United States Patent Application Publication US 2005/0228172 A9 - sequence listing, part 74

SEQ ID NO: 325634 - DNA, 540 bp, Homo sapiens
tttaatatgtattcactattatattattaaattctattttaaaacttgtaaatttatcgttacacaaggtttataataaactgtttaaactcatcataaggcatcttttaattatccgaagctacaaataatacacaagtagaaaacattacatgcatttttccccttcactggtattcaatatcaatttattgccaatcacacaagcatcaaaaagtagttatctgataagattttctttacttgaattttaaattttttgatttgactttatttatcaaatgcactctatcgtgattataagaaatgagacttctattataggaaaattgtcatgttgcccatcactgtgtaccattaggagactcttcakttatttgtttttgtttctacttcctctgtttcttggcttctgactcaagtaatacagtacttgttcctcctgaatactgtgaacaggagagagagagagcaagaacgggcttttatatatgtaatgtaatgagtgtaataattttatatagagagtatatgtgtaat

SEQ ID NO: 325635 - DNA, 423 bp, Homo sapiens
aataactttacacaccaactaatcatcttcattaaagtcatacttgggaatcttaatattgggattctgtattattgtggcttctttatattttcatttcatttcaattttatattttcttctttatatatgtggcttctttatattttcatttcatttcmattgacattatttttattttgttagcttatatccatcatgaaaaattgaatactttatgcagattgaatagtgtattttaatcaattttttcgtgaacacatttttaaataaactattatttaatataaagattacaaaataccctaccaatatttagtaagagtctgagtttaaaagttattagaaaaaaaggcatgtccaagagttcaaatatcagtcaaatgaaggcacaaagctcctggaaaaaatatgaatcagcac

SEQ ID NO: 325636 - DNA, 423 bp, Homo sapiens
aataactttacacaccaactaatcatcttcattaaagtcatacttgggaatcttaatattgggattctgtattattgtggcttctttatattttcatttcatttcaattttatattttcttctttatatatgtggcttctttatattttcatttcatttccaytgacattatttttattttgttagcttatatccatcatgaaaaattgaatactttatgcagattgaatagtgtattttaatcaattttttcgtgaacacatttttaaataaactattatttaatataaagattacaaaataccctaccaatatttagtaagagtctgagtttaaaagttattagaaaaaaaggcatgtccaagagttcaaatatcagtcaaatgaaggcacaaagctcctggaaaaaatatgaatcagcac

SEQ ID NO: 325637 - DNA, 567 bp, Homo sapiens
ttgggcaaataaaagtatttttttaattgcttctcacaattcttcatatgtaatctattaaataccattcagataaataactttacacaccaactaatcatcttcattaaagtcatacttgggaatcttaatattgggattctgtattattgtggcttctttatattttcatttcatttcaattttatattttcttctttatatatgtggcttctttatattttcatttcatttccattgacattatttttattttgttagcttatatccatcatgaaaaattgaatactttatgcagattgaatagtgtattttaatcaattttttcgtgaacacatttttaaataaactattatttaatataaagattacaaaataccctaccaatatttagtaagagtctgagtttaaaagttattagaaaaaaaggcatgtccaagagtkcaaatatcagtcaaatgaaggcacaaagctcctggaaaaaatatgaatcagcacatgcaatatacactatccctccctaggagaggaataggggaaaaaataaataataacaaagaaaaatac

SEQ ID NO: 325638 - DNA, 567 bp, Homo sapiens
ttgggcaaataaaagtatttttttaattgcttctcacaattcttcatatgtaatctattaaataccattcagataaataactttacacaccaactaatcatcttcattaaagtcatacttgggaatcttaatattgggattctgtattattgtggcttctttatattttcatttcatttcaattttatattttcttctttatatatgtggcttctttatattttcatttcatttccattgacattatttttattttgttagcttatatccatcatgaaaaattgaatactttatgcagattgaatagtgtattttaatcaattttttcgtgaacacatttttaaataaactattatttaatataaagattacaaaataccctaccaatatttagtaagagtctgagtttaaaagttattagaaaaaaaggcatgtccaagagttcaaatatcagtcaaatgaaggcacaaagctccwggaaaaaatatgaatcagcacatgcaatatacactatccctccctaggagaggaataggggaaaaaataaataataacaaagaaaaatac

SEQ ID NO: 325639 - DNA, 591 bp, Homo sapiens
cttgttcaatctaaggatgataatttcagtgtcatttataatagatatgggagatttaaagctgtcttcctcttagcaactgtaaaattgttatcataaaataacatgattttagccatttcattgctttagaatcaagaggaggagttattttgattataaaaaagggaaaaaawtgtgtgaatttctactatctggtaataaattttaagactaaggctgtagttttgaagatacttaattttacaatgttacttatgtttctgatttacaagtttattatgccaacttgatgctcaaagatatttttgatgagtgaagttataaaaagcttcagtgatttttatatactaaatctcagttgcaaaatctgcagcctccatatgttgggatttatatttccaattcatatactcaggtagcactatttttaagcccccttttgatataattctgatataattctgattttagatagctattaactatttccaggttgccgatgatggcttgtttgattttgacccagtcacagattgcttattattcttattgatacacactctgtaaagcaaagctgaaatataaaag

SEQ ID NO: 325640 - DNA, 591 bp, Homo sapiens
cttgttcaatctaaggatgataatttcagtgtcatttataatagatatgggagatttaaagctgtcttcctcttagcaactgtaaaattgttatcataaaataacatgattttagccatttcattgctttagaatcaagaggaggagttattttgattataaaaaagggaaaaaaatgtgtgaatttctactatctggtaataaattttaagactaaggctgtagttttgaagatacttaattttacaatgttacttatgtttctgatttacaagtttattatgccaacttgatgctcaaagatatttttgatgagtgaagttataaaaagcttcagtgatttttatatactaaatctcagttgcaaaatctgcagcctccatatgttgggatttatatttccaattcatatactcaggtagcactatttttaagcccccttttgatataattctgatataattctgattttagatagctattaactatttccaggttgcygatgatggcttgtttgattttgacccagtcacagattgcttattattcttattgatacacactctgtaaagcaaagctgaaatataaaag

SEQ ID NO: 325641 - DNA, 540 bp, Homo sapiens
atcaaagaaacagagtaaagagcccagaaataaatccatgagttgacagttacctgatctttttacaaaagggccgagaacacacaatggaaaaaagagagtctcttcaattaaatggtgttggttaagtggatatccacaagcagaagaatgaaattagatctttatctcaccccatatacaaaaatcaactcaaaatggattaaaaacttaaatataagaccagaaattataagcctactaaaagaaaacataggtaaaacttcttgacattggtcttggcaaatattttttgaatatgacaccaaaagcaccagcaaaaaataaaaaattwaaaaatttaaaaaaatagacaaatgggattgcgtcaaactaaaaagctaaaaagcttctgtacaacagtggaaacaatcaccagtgaaaagaccacctacagaatgagataaaatatttgcaaaccatagagtaggtgttttaaaatgtataagataataaaatgaattatatgcccatatataggcaaacttatgaaaaattgaa

SEQ ID NO: 325642 - DNA, 550 bp, Homo sapiens
ggtttcttgccttacccaacctgtggcagaactgcccaacaactttcatagtattttaataccgttgttataacatatattttatttttttaatttggcatttgttattacagatattggttactctctgcatatctccaccctcaaattattactaacacccctccttgtgtttacattaagcaatttactgttataaagattaactttgtaaataaactatatataaaatctcccccaaaatacaaatatatttattcctaattattttcacaaatacaacaaatcatasctaggcatgcagggcagtggagaggggataattagatgtatctgtatagcaaagactcgagagaagatatcttgatcagtttggactgctataataataaaacaccataaactaggtggcttaaccaacaatctatatcttacagttctgaaggctgggaagtccaagattaaaatgtcaacatatttggtgtctgcctgcttacagtccacattttggtttgtggagagccggtttcttgttgtagcctcatatgcc

SEQ ID NO: 325643 - DNA, 583 bp, Homo sapiens
tgtggtcagacagcatattttaggtgattttaatccttttaaattaattcagacatctttatggtaagtgtatcatatatgtttatatatatttagggtgcacttaaaaatgtgttctgtttttagtgagtagagtgttgtacaaatgtcaattaggttgttagttgatagtgttgccraagtctcgtaaattcttattagttttataactactggatcttacaatcgctggcactgggtgtttaagtatataaccatgattgtggatttgtttattgcatgttttatttttatcagtgctttgcttcaacaattttgaagctctgatattaggcacataaacattcaggatttttgtcttctctttatgaattattcctttgtcattataaactggccctctttgttcttgttaatattatttcttctgaaatttgttttttctctgatagcaatataaccaattcagtcttgttcagagtagtgttagcatgatacatactttataatctttttacttttaagttatctgtgcttttatatttaaagtgggcttcaaccgggtagcataaagttgggtcat

SEQ ID NO: 325644 - DNA, 605 bp, Homo sapiens
aggcaaattgtacagctaagagtcataatgacattttataaagcatttaggaggcctaatctgtacagcatttcttgcataaattttcttttataaattatttcatgycttacacagacaagctacgacatgccttgactttctgacttgtcctcaacatccctctttttagacaaccagttattttactttaggacaagactttaccatacaagatcctttattatataaaatctcttttctttaatatctttttgaatagctaggcacatggctaatttcatatgtccccaggacttatctagaatttaacactccaaaataaattgaataatttttaagtcaaaagaagcagtttatgacctaaagcatttagcaaacctaatatttgacctgcataatttagaccaaatgtttacatttttgaagatatttatattttaccaataatctttaaaactctctttatttttatacctttcttcatatctctcttatttcctggtttcttttatcttgttttatatataacctttaaataagctttgaattagacaaaaattagttaccctttaaaaaggacacaatttttagaaagaatgttt

SEQ ID NO: 325645 - DNA, 631 bp, Homo sapiens
ctgttctttaacttaatataactttagattctaaattgtgacaagtttgtttatgaatatttaccccattacatttatttawttatttattttgataatttacctggttatttatgaaaactgtgatagtcatcatttaaagtcatgaaactgctgttgcaaaattataactgagatagtgaaaatgatctgacctaactaactccatcttgcttctaacttccaaactattcttgttcattaacttagtttatagtttagttttgaaactaagatgataacagtcctttcccagaacaaacttccttcatgtctgtggactagactgcctaaggccacaagattagaagttagagtattttactaagtaattcaagatgtagctgtcttcattaaaccaatattaatgttttatttattaaaaattacaccagcaaagatcattttgttttgggctgagttatagttttgtagcctctatgccaaattttgacaccttgtagtatttggcagagataagtatgaaattgcttgatcaataaatacaaacaaaaatttatgctggcaactattaagacatttctaatattactgtaccaataatttgtaaagctagcttatttattaaaga

SEQ ID NO: 325646 - DNA, 616 bp, Homo sapiens
cagttacagggagaaggcctggaaattatcgccagactaactcaaaattacaaagttttccagagcttatataccttctaagttatatatcaaygtggaagtgtgcattcatctaaagacataagtgattaacttcttttaatctataactaaggtctgagtcctgaagaccttcctctggagcctcagtaaactgacttaatctaaatgagtccagctgctggggtgattacccttatcttgtctcctactaaatcacagaggtttggggagttccttcagacgcccagtaaacttgtttgtggaggcctggggattttcttcagacccacaataaaacttgtctaatcctaaatgggtcttgttaaaaattccttcattattttatcacgctttaaggcccaggaaaggcctaggcaaaactcttggtgggcttttgttgcatcccaactttggctaagggcactggcttttaatattcaacttaaccactcggtcagtactgaaacagttgttacggaggcctgtgttagtgagacctagcttgccacattaggatgcatctatcttatgttgtgcgatatgatgtaattgtctttttttgcattggcaaatg

SEQ ID NO: 325647 - DNA, 584 bp, Homo sapiens
gcatgtaaaatcgctcaatttctctctgcacaaaatcgtttcggaagttgaccttcagaatttattagcatcattactaattggctcaagtattgacttatgtgacctttatcaacagccttaattcaaatactaaatctagcagaagtagaacaggctctgaagtagttcattttatgctcaatttttgttatgaaaaaamttaaaatatatgggggtagagagaatagtacaacaaaccaccatgtgcctattatccaccttcaacaattattaatgcaaactcaattttgtttaatctaagccaatgattcttaaacagtgtcaattttgctcccaagtggaccttcatcaatgtttagagacttttttttgtcacaactggtatgcgtgaagggtaccactagcatctagtgggtagaggccagaaatactgataaatatcctataatgcacagttgccaatggcaatgaattacctggcctgaaatgtcagtgttggtgttgttgaaatatcttgattttcatcttaatgcactctgcccatttccctggattaatgatgcaaacaccacatatcatat

SEQ ID NO: 325648 - DNA, 591 bp, Homo sapiens
aattttgtttaatctaagccaatgattcttaaacagtgtcaattttgctcccaagtggaccttcatcaatgtttagagacttttttttgtcacaactggtatgcgtgaagggtaccactagcatctagtgggtagaggccagaaatactgataaatatcctataatgcacagttgccaatggcaatgaattacctggcctgaaatgtcagtgttggtgttgttgaaatatcttgattttcatcttaatgcactctgcccatttccctggattaatgatgcaaacaccacatatcatataatttcacagatttttttgstgtctatctaaaagagaaggaggttttgagggatttttgagccatactaaccagattccttctttatgttgatttgttgctttggctttgcttttttcttagatgtgtacctagccagcccctgatctgatatgtatctcaaagagctctcctctgcaaaccaccttgcccagtctaccttgccaatgaatttttattagatttggcaaatggaaggcactgagtgggagaatgcttcaggtggcatctctaacaatttactgagtggatata

SEQ ID NO: 325649 - DNA, 615 bp, Homo sapiens
cagttgccaatggcaatgaattacctggcctgaaatgtcagtgttggtgttgttgaaatatcttgattttcatcttaatgcactctgcccatttccctggattaatgatgcaaacaccacatatcatataatttcacagatttttttggtgtctatctaaaagagaaggaggttttgagggatttttgagccatactaaccagattccttctttatgttgatttgttgctttggctttgcttttttcttagatgtgtacctagccagcccctgatctgatatgtatctcaaagagctctcctctgcaaaccaccttgcccagtctaccttgccaatgaatttttattagatttggcaaatggaaggcactgagtgggagaatgcttcaggtggcatctctaacaatttactgagtggatatacctcttgcctgcagttcacctgtacttggttgactagtgcccgcccccccaacacacacacacaaaactcatgtstacccagaagctgaggacgtgaccagatttggaaatagggtctttgcagacataattatattaacatgaggtcatgctggatggactagggtagatcctaaatccaattactggagtc

SEQ ID NO: 325650 - DNA, 647 bp, Homo sapiens
caaacattctccccaaatatcaaatacttaaaaaatgaaattgttttagtcccacatagttaacaaagaacatatgaactatttacatttccactaaacttagtcattttgaaggcacattccagtttgttttattttccttaacatccaatttagtttctgtctyctcataaatcatcaaataatatttgctgaataaatgaacatattattccaagatgctgaaaattatatgtgatatataattttacatcatatagaattgaagttggatatttcataaatatagaagttaaaaaattgacttgtgttgtcaaaaaattcaaatgaggaatctgtaaatcttaatgtggaaagaggtgctaacttatattgaggttgatcttctctttgaattgaatgggttctctctatcatgagcagacacatccaatatccacaggaatataataatattgagttatatcctggggttaaacaaatctgacatcatggtagactttgacaaaatttaaggttgagatctccttccaggtgccagaatgtcatacaatagtccacagtaaccatgcatgtaggcagccttaaacaggctgctagttcctaagtatctaaatttgtgacaatttgtgaatgaatcaccatgc

SEQ ID NO: 325651 - DNA, 647 bp, Homo sapiens
caaacattctccccaaatatcaaatacttaaaaaatgaaattgttttagtcccacatagttaacaaagaacatatgaactatttacatttccactaaacttagtcattttgaaggcacattccagtttgttttattttccttaacatccaatttagtttctgtctcctcataaatcatcaaataatatttgctgaataaatgaacatattattccaagatgctgaaaattatatgtgatatataattwtacatcatatagaattgaagttggatatttcataaatatagaagttaaaaaattgacttgtgttgtcaaaaaattcaaatgaggaatctgtaaatcttaatgtggaaagaggtgctaacttatattgaggttgatcttctctttgaattgaatgggttctctctatcatgagcagacacatccaatatccacaggaatataataatattgagttatatcctggggttaaacaaatctgacatcatggtagactttgacaaaatttaaggttgagatctccttccaggtgccagaatgtcatacaatagtccacagtaaccatgcatgtaggcagccttaaacaggctgctagttcctaagtatctaaatttgtgacaatttgtgaatgaatcaccatgc

SEQ ID NO: 325652 - DNA, 529 bp, Homo sapiens
tacatattcatggaattattttggtattgtgggaaagaagaagaaacacagatatgcatgtgtatacactatacatagaggcataccttggagatattgccagttcagttctagaccactgcrataaagtgaataatgccataaagcaatattttattgctgaaaatgctaaccattatctgagccttcagcaacttgtaatctttttgatggtggagtttcttgcctcattgttgatggctgctgactgatcagggtggtggttgcttaaaggtggggtggctgtggcaatttctggaaataaaataacagtgaagtctgccccatcaattaactcttcctttcaccaaagatttctctgtagcacgcaatgcagtttcatagcattttacccacagtagaacttatttcaaaattgggttcaatcctgtcaagccctgatgctgcttaatcaactaagtctatatcatatattcaatttctttttgtcatttgaacaatgttcatggtattttcaccaggcatagat

SEQ ID NO: 325653 - DNA, 468 bp, Homo sapiens
tcatgaggccttccgggccatgtttcctatacagcctgtggaaatgtgagttaattaaacctcttttcttaataagttacccagtcttgggtagttctttatagcaatgcgaggatggactaatgcatccagctgtcggttttaactcttaggtcacactcttctttggcagcctgaatctagtactgagtgaggctagggtatgaaggcctgattattttgactcagcgcaggacattctgatggacaatacttactttagagttcctccttgcagaggtgacaaagtttgttagactgcagtttaaaatcttctgcatagttattgtgaaattcccaggtgttgtactctattgtatttgtatgcgaaagtttgcgtaaccmtttgtctgtcgcgggacatgcgggtgattcccagttttcagctattacaaataaactgactatgaacatttacttacaagtctt

SEQ ID NO: 325654 - DNA, 576 bp, Homo sapiens
accaccattttcaaagtttaatgataagttacaaaattagaagacatggcaatctaatgactaatattcataacatatgaaaaactctgaaaagaaaaaaaaaattctcccttaaaaatggaaaatgaggccgggtatggtggctcacacctgtaaccccaccacttcaggaggccaaggcaagaggatggcttgagtccaggtgtttgagaccagcctgagcagcatagtgataccccatctctaattttttaaataaaaaataaataaaaataagaaaatggtcttcacttacagatcagaaaaaaataagttaaaaaacgkagaatgtatcagtaggcaaatcattgaacaaaacccacaaaaggtcactaaaagttttaaagcatatgcaacctcattactaattcagaaataataaatttagcaataataacattatttaaatataaggtggcaacatttaaaaagatacgtagaaaatatccagtcatgtcaatataagggaaaatgggccttttcatgcaatgctggctggagtgtaaactgctatagctgttaataggacaatgtgac

SEQ ID NO: 325655 - DNA, 576 bp, Homo sapiens
accaccattttcaaagtttaatgataagttacaaaattagaagacatggcaatctaatgactaatattcataacatatgaaaaactctgaaaagaaaaaaaaaattctcccttaaaaatggaaaatgaggccgggtatggtggctcacacctgtaaccccaccacttcaggaggccaaggcaagaggatggcttgagtccaggtgtttgagaccagcctgagcagcatagtgataccccatctctaattttttaaataaaaaataaataaaaataagaaaatggtcttcacttacagatcagaaaaaaataagttaaaaaacggagaatgtatcagtaggcaaatcattgaacaaaacccacaaaaggtcactaaaagttttaaagcatatgcaacctcattactaattcagaaataataaatttagcaataataacattatttaaatataaggtggcaacatttaaaaagatacrtagaaaatatccagtcatgtcaatataagggaaaatgggccttttcatgcaatgctggctggagtgtaaactgctatagctgttaataggacaatgtgac

SEQ ID NO: 325656 - DNA, 555 bp, Homo sapiens
acaatacaaacctatgttgttcaagggtcaactgtatatccaaactggtaaactggtccgtgttaagagatagagggtggacagacacagtgtgagatagtgtggcagagtgaaagccaaagagatgtaagatcctgttaccatttcttcaacctccctctaacctagatgatgtgaaaaactagcagagraaatctataataggaaaccattactgtctctactcactccagttgccattttgaaaacttgcaaatttatcttcaacacattttgagacatacttttgaacacatcttaagtccatcctttggactttgtgaaattgcctttctgcaacagatgctggcgaggttgcagagaaaatggaacacttttacactgttggtgggcgtgtaaattagttcaggtattgtggaagacagtgtggtgactcctcaaagacctagaggcagaaataccatttgacccagcaatcccattactgggtatatgcccaaatgaatataaatcattctattataaagatacatgcaaatgtatgctcattgcagc

SEQ ID NO: 325657 - DNA, 674 bp, Homo sapiens
aaaccactaaccactggagacattttggaaatataaaaatgtcttaagtattaaagagcaatcattgcctctgaaggaactggggaaaagagcatagagattttgttataatatgtataaatagaagtatatctcaaatgaaatgtgaaaagcaattagtggaagatatgatgcctctttcacttttatttaaaataaaagggtaggatcgaagtgaattcaaccatatctggaaaaaagcttcactcctctgaacctaggctttaaatctgacaaacttgatgatccttatatgttttttcatcagaggaccaaattacatatcaaactttttccagtattttcagttagtatcatatagtttattcttacccaagtcataaaatattcttcaaagtacatttttatcatgtgaatatttgatttcacatatgtgttatggtttatttagcctcttctcattgttaagcctttgtactgtctccaatctttggtattataaaaaacatytgatgaacgtccaactgatcccagcaatctaatacagttttctcatggtaattctgaaagcggattactaaatcaagggattcaatatattttagtctcttggaaacataatgctgaatcgcactccagaaagaatgtatcagatgcccacatatcattataca

SEQ ID NO: 325658 - DNA, 618 bp, Homo sapiens
atattaacatttaaaaatttaccaatgtaagaagcaaaaattgtaattattttgatttgtttgctactaatgctcattttttaatacgcttatttatcatttgtgttgattttgtccattttgtcctactttctgtgaaaattcaacttctaaagtcgtttttattatagcaccagagatgaccacatcattttatgtacttcagttgcgtaatggttttgaaatatattgaggagtgtcccacggggaggagartacatttgggtttaaaatgtttcattcttgaaagaattgcttaaatttaaatagcaaatgaaataaattaagaaataatgacatatttggaataaaaacattgtttattattaaactaaatacatgtggcacacagtatatgtgaattgttgaatagttgttattggtatatattttaatatatactgttaatcttcttataagatgccttgcaaatacaaaatacattttagtgacaagtaaaatttaaaaaatacaatgtatttcaatactattttaaaaatcccaagttctattagcaataaaaaaagattgaactgaaggaaatagagtacatgcatcataagttcccaacgtaacaca

SEQ ID NO: 325659 - DNA, 630 bp, Homo sapiens
ttattggtatatattttaatatatactgttaatcttcttataagatgccttgcaaatacaaaatacattttagtgacaagtaaaatttaaaaaatacaatgtatttcaatactattttaaaaatcccaagttctattagcaataaaaaaagattgaactgaaggaaatagagtacatgcatcataagttcccaacgtaacacagatgtaatagataaatataattccattcttgatattgataactaaagtataaaatattcataaaaattgataaaagtgctggaagattgtcttccaaataaaaatacagataagataaatcataaaawatatatagcaaaaacatatatgtcaaatgtacagcattaaaagcttaaaagcaaatagcatgaaacaagatagcaaatttaacttaaaataagcatacatgctttaagttttccaatgactagagcaatgttcattgtttagattattttaacttttattttaggttcaggggtacatgtgtaggtttgttatataggtgaactcgtgtcacaggggtttggtgtacagattattttgtcacctgggtactaagcttagtgcccgatagttattttttcgatcctctcattaaaaatta

SEQ ID NO: 325660 - DNA, 598 bp, Homo sapiens
tttacttccaaaacagagcaaatgtccccattgagccagggtaaaaagacattgtgtacaaaattcatatacagctggttgcattcagtaatgttggtatactgaacttggttgccactatttgctatttttgaatgaataaattcatgttacagaaatattcattttagcagaacaggtagtaaataagaagaaagcaatgataataactattaagtccatgtatgattaaaatgaattaaagagkttatgtattctaccttggtaaaacatacaatcttaactcggtatagaaacataaacatttatagctgtctcttaccataccaatatacaaatgcatattattttcaaccatatttatatttattactcaagtacactaaatattttctgatattaatactgccactgctttttaattcaacatctccattttgagtgataattttgattgaaaattttccatgatgtgaacaatgccttcctatttttcccaaataaagctgatggatgatacaatgtctgagattttgtatgtaagagaggtctttctgttattttcttataagaattataacttgactgtctctacatt

SEQ ID NO: 325661 - DNA, 598 bp, Homo sapiens
tttacttccaaaacagagcaaatgtccccattgagccagggtaaaaagacattgtgtacaaaattcatatacagctggttgcattcagtaatgttggtatactgaacttggttgccactatttgctatttttgaatgaataaattcatgttacagaaatattcattttagcagaacaggtagtaaataagaagaaagcaatgataataactattaagtccatgtatgattaaaatgaattaaagagtttatgtattctaccttggtaaaacatacaatcttaactcggtatagaaacataaacatttatagctgtctcttaccataccaatatacaaatgcatattattttcaaccatatttatatttattactcaagtacactaaatattttctgatattaatactgccactgctttttaattcaacatctccattttgagtgayaattttgattgaaaattttccatgatgtgaacaatgccttcctatttttcccaaataaagctgatggatgatacaatgtctgagattttgtatgtaagagaggtctttctgttattttcttataagaattataacttgactgtctctacatt

SEQ ID NO: 325662 - DNA, 415 bp, Homo sapiens
ttgtgaataaaatttcattgactataacaaggtagagggaaatggaatcccagagaagaaccagtagacataggtatagaagcataatgtgcataaggaaccacaagtagtttacaattgctrgtgtgtacagtctaaataagatgagaggtgggtaacagcaatgttttaatttgctagggctgccataacaagctaccacagcctgggtggcttaaacacagacaattatttctcaaagttctgggacctacaattccaaatcaatgtgcctgcaggtttggtttttcctgaagcctctctctttggcttgtggatggctgccttcttgctgtgccctcacccagccttttctctgtacacatccctggtgtctcttcctcttcttataaggacacccatcttattggattgg

SEQ ID NO: 325663 - DNA, 599 bp, Homo sapiens
ttttgtactacaattgactactttttaaacataatacaatgttaagattccaaatgggaaggaaaaaactatatacactacttcagtgttttattatcataacgtggaagttaaagtctttctcttttgacttctttcaggcagcacacatttattttttgtgtcagtttctctactgcctagctactttacattttatccctgaaaaaatatttctaaggcagtgttgtttttatttttactggtatcctttggtctggttaacctgattaatttaaaggaaatagcactgagtccagtatttggaactgtagagacagagaatgaaattttcaagtacasatctgtctaacacacagtagagacagccagataactaacgcttatctggaaatcctactctataacaaacatttttgttttattggacacagaatgtaatttgagtcacaattatctttcatatgagtctatattgttattcagatgagttatgaatctgtgattactatttccattgttgaagtattgatgctgtctttttgacctggtgatataagatatgtaggcgacaagggtaagcccattaaagtggtaga

SEQ ID NO: 325664 - DNA, 518 bp, Homo sapiens
gcttaaactattcaataaccacaattacayattaatgaaagcatatgtgcctactgatcacagccataacttctcaaatcttgaaatcagattgaacacctccagcctcatttcttgttacacatcgattttcatataggatgtgcttttttatcaaaacacccatcaaaaatccagtttcgcaaaaacgtgacatcatagaaagaaatgaagtacaatcaaatttatgaactaccttaagctaatttacacatatacaaaagatgtcctgtattcctctgtttctctcaaaaactgaaaatatcccattgtgtcagtttatggtaatacccccagacatcttggcacacagtttgggaaccacaagattcttttcttaatcttgaaattgtataatactatcaggctacatgaaagtattggtctcttataattaaatatgtttgcttataaggatccatttttatttgtaatatttgtggtttaaacgaatcctttaagtcctttaaaattttttt

SEQ ID NO: 325665 - DNA, 564 bp, Homo sapiens
ttgtctgcttggtccaggagtttctgagagccgtgtgccaatacatcctgataatgattttggaggtgtcaaactcccattaaagttttatctattttaactatgtttttagggacatrtggataattgttttatagtcaactttctcagtaactatgcaacacgtcctcctctttcctcaactcttcaatatccacttccttattctcagctgatagcttactgagaaaatagagacaaccagaagaggctttccacattctttctccatcaaatctgccaaactcgtgctacctgatatccttcttgtcacaatgagtgattgcccatctcttcaagagcatagtcatccttctagagaacacaaagatttgcccctgcaattgtctctttccttcatcattaatttcttcctgtagttctattttctttacaacctcccatctcctgttattcttcacataaattaccttcattcaaatgaaaccagcatggcagcccctcctttcttgaccacattgtatgagatatcatgggatcttcctcggattagccttttgctga

SEQ ID NO: 325666 - DNA, 593 bp, Homo sapiens
agccttcaatacagaaactgtgcactgatgtttcagctcacccttccagcaacccacaagtaaaagtggggatcttatactctcatcagcaggggtcaacaaggtatcatagagtgggactaaacagcttctgtagatctcattatttccatgaacgagygtcaacaaaggaatccagacacctgttctttcctttaccccaacatccaaagcttcaccactatcatcttccttgaatccacagtgacttataaatattattacaccttttcttccttttaatgttaatcatctctcatcttttacactaattttcacaaaggtcaactatcctctgttctactccttttctccattctttcaaaaattctgaaagctttttcacgatttcatctagatattatggctcatcattatcaaatgttatgtatgctcttctctgattacaatatgctcttcctctgtaattatttcaccttcttgctctaacagaattctgagtgttctgactactccaccttctttgcagccctcttaagtggtaacttttatattctacccaagggcatgtgttgaggaaatgtccttattat

SEQ ID NO: 325667 - DNA, 586 bp, Homo sapiens
ttactagatcttacttgtaaatgggtttgtggaaataaattcagatgctatttgaaaagatgtgtctcatgaggtaataaatatttctctagtagaaaagcaatatggaaggagaaaaaatacattaaagtaatgtttttcccagccaataatttgtaaaacatatattcttattatatacctttcataggcaaacaaatctaattttaaaactagtgatatgaatttgtttattggacaagtgttatttaattcctatcacatgttgggcatctgcccacaatgctaggtgctgccatcacacaaataaaagwgcccaagaactcacggtgtagggatataacaccgtgtcaaccaaaaaaaatcatttgatgttttaagataatagaaaaatccttcctcatcctggataagaatcctctcctggttttccttctgcatatctctgttttactaaagatatctttcatgaaataggctggctctaaacctccaggacatgtttgagacacaaaaggaacataaaacgactttccatttttcattcaatatttgcatatattcatctatcatttatttttacaat

SEQ ID NO: 325668 - DNA, 603 bp, Homo sapiens
gaacttgcccaccagaaatccactgtgtgattgcttccccctgtgtaatatgaaagtcatgggaaaaataagataaatcaatagttctttctgccaagaacctatttattataccccaaatggtgtgcatagctgagaaggtatggtttttattttgacaataagaacagtgttttgttaaaccaactttgtaatcattgaaagatttctttttctttcaaagtacattttctcttggagtgtgtaccatacaacataaacacattaatcatctctttggctatttattcattcatttgcattctcaactttttgttcttcaaaactccacaaagtttttcttttttgcattctttttctctctcctttccttttccacttagactcattgatcatttttctcttcccatctgagcagctataataagatccagggtaactggataacaaaataaacaatgtcaactgttactagcaaaaaacatacatttatttaatgtaagttaattatacagccatgtaraacagtgaaaaatgtgtcactacaaaatatgcaggcaagccatcagtaacacaaaggtcctaccaaagctcccagttgtc

SEQ ID NO: 325669 - DNA, 587 bp, Homo sapiens
aagaagggcttattgaaaagtgaagagaaaacagaaaccagaggagaaaagggttaggtttattgaaaaggttgttttcctccaattatttcaaatttttatgaatgcagttgtctgtaatagccagtttaccayctttgaattttgcttcaacaacgcttcatgagaagtgaatggagatgtatgtcccaaggaactactttatagtgtgttagtatagaagagtgtacacgacatacattcaaagcagcactgcaaaccattctcataaggaaccactttatatagtgtgttagtatagatgaggaaacatatatacattcaaagcaacacttcaaacaattctcacaagtgaaacaaagagcatggaataattcactaggtaaaatagtatagttacaactacagcttgaaatctagactttgttttaaatctaacctaacacaagcattgagtcatatttaaaatttgttttaaaatggtctattaaacatagaaaaaaacatatctctgttgtgctattctgcagtaaaccttaaaggattaagacaatattaaccagtttaatacaatgtccacctacaag

SEQ ID NO: 325670 - DNA, 589 bp, Homo sapiens
tattttagggtgttcataaaagttttctggtcccctacttaaaacttgagcttagaatttaaatgtctgtgcttacgatttttcttcrccatgtcctccatgcattagaatcaagcaatcaacttcatatatgagttattctccttagtttccactaaaatactggctggtagcaaatacttgttcacacaaggccttgcctttggtaagcatttgattgcaggtgataatcaaagttactctttttgccactgtatactgtggactgtaagtatatggttaacacagaaaaacagaaccattaacgttttaaatgtaactagatcagagaactaattatacattctcatccttaaggttctgttcccctggactgaattctgataccaatattggtatcagtcagtgtgtgtcagagaagtagaatctctacgagtattgcagaacaagagattctttatgagcatgacaccttacacagctgtggaagaagctggaagagttgtttttatttttgtttctttgtttgtttgtttttcttaagccttttcagggaaattagagattcagagaaaagtcactaaccagc

SEQ ID NO: 325671 - DNA, 597 bp, Homo sapiens
cactgtctgtgtccagtacattttcatcatgcaaaatagaacctctgtatttatcaattatttcctatttcttatttcctcttcccccatcccctgataagctctattctactttctgtctctgtgaatttgcatatcctaagtaccttgtccttttgtgtctggtttatgtcatttagcctaatattttcaaggttcatccatgttgttgcacgtatccctcaaacatatactttaagaatgactttagttctctcaaaaacaacatttacttataaatgttaagaattgtggatgtataagttctcaattataataatcataactaatatgtagtgtcaaatagagaaatattaaacaactatgtgayaaataatgaaagattaaattcttgcaagtcttcttgggaaaaagtttaaaaatcctttcatgaaagcagagataattatttactgacattttctaattatttagagtagtgcttggcacataataggtccccaataaatatttattaaatgaatgcatcaatttaaggcaggagagcagaagttaagagttgtttctctgtattgcttcgttggtacgtgagaaata

SEQ ID NO: 325672 - DNA, 558 bp, Homo sapiens
tgctataaaccttcaatttgtaacaaatgcaatctgcgtgaaacacactaaagcaaaacacagtaaaatgaggtattcctttatgtgaaagtttayataagctaaatactttttatatgtgtcatggattgaattatgtctgtctacaaattgatatgttcaagttgttactactaatactccagaatgtgactatatttaaaaatagagcctttaaagagctaatttaagataaaattaagtcatatgcatggtgacttaaccaaatatgtctggtgttcttataagcagaacagattaggacacaaacaaaatagagtctgtctggtatgaccaggtgtgaacacagagagaaggtggtcatctacaggctgcaaagagtggtatcagaagaaacaacctgctgacactctgatctcagctatacagcatacagagctgtgaaaaaataagtttctgttgtgcaagccactcagtctatgctattttgttatagcagccataacaaactcatgcaatatgtttgccatatacagccatatgtcaatatatttggtg

SEQ ID NO: 325673 - DNA, 558 bp, Homo sapiens
tgctataaaccttcaatttgtaacaaatgcaatctgcgtgaaacacactaaagcaaaacacagtaaaatgaggtattcctttatgtgaaagtttatataagctaaatactttttatatgtgtcatggattgaattatgtctgtctacaaattgatatgttcaagttgttactactaatactccagaatgtgactatatttaaaaatagagcctttaaagagctaatttaagataaaattaagtcatatgcatggtgacttaaccaaatatgtctggtgttcttataagcagaacagattaggacacaaacaaaatagagtctgtctggtatgaccaggtgtgaacacagagagaaggtggtcatctacaggctgcaaagagtggtatcagaagaaacaacctgctgamactctgatctcagctatacagcatacagagctgtgaaaaaataagtttctgttgtgcaagccactcagtctatgctattttgttatagcagccataacaaactcatgcaatatgtttgccatatacagccatatgtcaatatatttggtg

SEQ ID NO: 325674 - DNA, 657 bp, Homo sapiens
gggaaaagaaaagactggcagcaggaatttaaaagactactacagttattatatatctttaatcatatatagtttcaaatatacaaatatatccaatatgtcgactaattaatttcaaaaggattgtgtctaatagcgctacgctatttcaatgatattcacccaacacataaacacaattaacttaaagcatgtctctaccttgttaycattttttcaagccaagattactttggttgaagtatgctcctggttacaacaaagtgaatacaaataaaatacctgtgaaaatttccaatgcagccatttaactctcaatttaaaaaattcaaaatatattacatggatgtgtcagtgttctacagtggacacagaatctacaaagcttcacaaacaaggtcaggggtcatttttaatggcaaaggaaaaatacagaagctgctgtaagaaaaaaaaaagagtttttattgaagtaaatactgtcatctatttgcgccattcctcaattaactgtactaaaaaacattacaacagatttattttgtaaatacctcatgagattcatacttagtaaaaaaatcagataatggaaaactttgacttttaaagttcaaccatgtgtaagttattcaagttgactttcaactagttaaaagt

SEQ ID NO: 325675 - DNA, 537 bp, Homo sapiens
cttggcacacagtttgagaaccatggcactaggcacatgtcaaaatgttcttggtaaatattctctatctgtagctatatttcatattcagtttgatactttgagccactcttttatgatcaagccagctcttttataattgtttgttttatactgcatatagtaaatggattattttatcggattttgccaatcatgcggatttttaaaatttccacataaaatatcttcctgttacaatttgtaaaccatctaatggttacaattatattactgggaactttatacccawacagaaaagacaggggcagaggactgcagtctctagtaataaaacaatcatctctattttctacctctaagatatgtactctaaagaaatagccgatgatcctgaacatggggtgcaaagaagccatgtgctgcaggaagagccctggagtgtgagtaagacaaagtgtttttactaaccctatatccatcaaccaccttttctcaaatgtcgctctcaagtataaaattttaggctgacaccaa

SEQ ID NO: 325676 - DNA, 605 bp, Homo sapiens
aaaatgattattggttagtgtttattgatggatggatatatggatggtaatttgggatcatgtttaaaattacctttctgacagtttattctcctccactagtcttcccacacattgaacagttatttgtaaaatatttaataaatatctactatgtgcaagaaactgagctaggcagtagagatgcaatagtgaacaagaaaactaaaatcccacatctatgaagccttgattatagtagggatgatggcggtgaaaaaagtaaaagaaacaaatacacaaagataattacatatttattcagtcactaatcctaacagcacctctgaattgtctttcagatctgttttcttgttttcccagtcgcattacacattcctagsgttcttacgattcttacagttctcatcatttctcactttaaaagcccaccaccttcaatttctcctttatttaatcttccacagtaaacctctgagctgtttctgagattttggttggtgagtgtggggggcagcgaggactgagagagggagaaggggaggagagggagggtgaaagagaaggcaatgtgtgtgtggtggtgggggcggcagagagaggga

SEQ ID NO: 325677 - DNA, 414 bp, Homo sapiens
tatttcagtatacctggaaggtaaaacaaaaacaaatgagcttacactagcttggggatttctgtcagataataattttctgaaagagatgcttgtgaaatattggaattgatgggaaaagttgtacaaaaattcctgatctttttttagaaaggatatactctcatctatttggttgttcattcagcagacatttaytgaacacgcctacactttcagatactttttgaaatggaaaagataatactgcacacaagaaagaattcctgacctcataaatctcaaggtctagtacatgtatgtgatatttacattattgtggacatattaagatccatttttctagttaatgatagaatgattcctacaaaaatggcaaaattgaggcccaattcgtagcaattacttgggcag

SEQ ID NO: 325678 - DNA, 620 bp, Homo sapiens
gttttattgaatttttatttaggagacatgaagactctaagttggaataggctcgtgcattactgcagctgatagtcaataagtgaatacttgattgtgttaattagacacaatatctcctactttatcaactatatcagatgttggtattgaataattacaatgaagtcacatggtaaatcagtagtttcaaattattttgataatacctcatggggtccatggagtccctccagggggctgctgggatgggatcatggtattgagarggagaaccaggtcattgtggatgacctgagcttcccgtgctaagctttcataattagggttctgtattagatttttggggggggggacaaaaaggatttttagagctagaaaaaatatgagaaaccatgtaaggttcttactagactaacatactttaagaagtgaataatctgggcatttagaacctttggataatgtatttcactacattatttttacttgcttattcaaatgtatagagacacacaattaaaattttaagttgccagaattctcaggtcctattttgtcttcacctgttgatttaaggggttatctttatgtttgagctcttttctggttttcagaga

SEQ ID NO: 325679 - DNA, 609 bp, Homo sapiens
ctatagtggcttagaaatggaactaagagtagagcacatttctagttaaaagagagaaacctggaaatctttattgtatatttaatgtgatactgaaatgaggaagatgctaaaatgcattatctttaggtttttcccttctctaccctactcatagtctcaatcatgtatgtgtctctcgacatctgtctttcccctttctcccatccccagtctcatcttttctaacttcctttgttaacttcaatatttttaactctatgggcttgtctgaaaactttttctttatttatttttttccattctactcaaaattatgtggtgaaaagattttatcaaccaatggggtgttagggttagtgcagaggatgattgattaagaaaactgtcagcagatgcatacaaaatgtcaagtaaacactatttgctaataaaattaaaatactattatttcctcacattttgaaatagctttctattgctgatcaatgtgtaaattgaaacgttgagttttttctcctgttaaatctttgcaggtgaaccatttacakactaaaggtttcctgtgatgaggatcaggtcttcctaaattcatgtgtggtattgaga

SEQ ID NO: 325680 - DNA, 622 bp, Homo sapiens
ggtatttattaaatgtctattrtatgccagcagctagcttaaactctgggtgtacaaggaggtaagaatcaagtaagggcaacaggtgtgcatgtcaacttatctgcatacattgaatcattcatttattcatttattcaatatgcgtgtatcgataactatagtagaaaatgtgagagataaaaaagattatcagatgggtatcttgtacccaaggagcttacagtctgattatgtagatatttataaaaatagccaaatagccatactctatgatacaaaataaattttgtaaaaagttacagataaagtacattggaagttatattgggaggcagagatcatcttcagggagagatcccatcaggagtttgccagagaagggaaaactgaaatagaccttaaaatacaagtagaattaggacctacagaaggtgttttaaaaatatcagtgactgttataatgtggtacagtgtaggtataattttagataaatcacccgcccaatgagattatcatgtaaggaaatgaaggtaatagtagtgttagaagtaaggcaatttagaagtggttttggtttttaagctaagaaaacattagaacacatggaaaaggatcagg

SEQ ID NO: 325681 - DNA, 622 bp, Homo sapiens
ggtatttattaaatgtctattgtatgccagcagctagcttaaactctgggtgtacaaggaggtaagaatcaagtaagggcaacaggtgtgcatgtcaacttayctgcatacattgaatcattcatttattcatttattcaatatgcgtgtatcgataactatagtagaaaatgtgagagataaaaaagattatcagatgggtatcttgtacccaaggagcttacagtctgattatgtagatatttataaaaatagccaaatagccatactctatgatacaaaataaattttgtaaaaagttacagataaagtacattggaagttatattgggaggcagagatcatcttcagggagagatcccatcaggagtttgccagagaagggaaaactgaaatagaccttaaaatacaagtagaattaggacctacagaaggtgttttaaaaatatcagtgactgttataatgtggtacagtgtaggtataattttagataaatcacccgcccaatgagattatcatgtaaggaaatgaaggtaatagtagtgttagaagtaaggcaatttagaagtggttttggtttttaagctaagaaaacattagaacacatggaaaaggatcagg

SEQ ID NO: 325682 - DNA, 592 bp, Homo sapiens
tcaaacactgatgccctggtatgggaatcataaaatatgcagttgaaaagaagtacagtatctttaaacttgcaattaaaaagtatcttaagtagatttcatgctagaacgcattgtcggattagccctattagttgctgtaaagaaccttaaattccactaagtattattgaaaaggagtaagaaacttataactaggacacgcttctcacacacatgcccaaaactatagaaaccctgtcccaccagaagcttcaagatgacaggaaacttaggtctccaggaacactcaatttgttgtcataatgaaagctgagtagaagtcactcagtcacttcctgtgaaacagtsaatcaggtcaagatgaaccactggtccaggatctttactggaaacataaagcaactaactatcaatattagaaacaggttgatttaatgtaaaaaagaaaataggaaataaaattgctaaaagatggggactgtagaataggcaacagagtaagagggaaaaaaaagagcttcccttccaaaaattctagaaagatatcttattctaaaatatttacaaatttcatctattaatatgcatt

SEQ ID NO: 325683 - DNA, 594 bp, Homo sapiens
cctggtaaaacattatgccggggtgtgttgtgaggttgctttctgaggagattagcacgtgagtctaagtggcctaggtggggaacattcaccctctcaatgtgggcaggcaccttctaatctgctgaggatccagaaagaacaaaaacagaggaaaggtgaatgcgtggatctatctggtgggactgggatacactcttcttctgtccttagacatcaacttcaggcccctcatctttgtactccaggactcacacttgcagcttcccggcttctgaggccattggccttggagtgaaagttgtatcaacagcttccctggttctgaggcctttgcacttggactgagaaccatgccgccagcctcccagggtctccagcttgcagaaggcctgttgcagaacttagcctccataattgtgtgagccaatcacccagtaagtcccctctcatatatttatctatacctacayctatatttatatctatctatatcatccatatctatatcttctattgattctgtcattttggggagccctgagtaatatactggggtattagagtatgtaaatgtttgtgcatacacataaa

SEQ ID NO: 325684 - DNA, 611 bp, Homo sapiens
ggaggccatgtatattttactcactgttctcaggaagtccrttacaaaagcaatgctgaatggatatctaataagagtgcatgaatagatgagatgaaaactgtaaacatttcatcacatgggataggatataacttctaacatcctgaaacttatcactctcttataaataagttctagatctcattctcatcaagtaatagtcactaacatttttattaaaaaaaaaaaaaaatctcttggccgggtgtggtggctcacgcctgtaatctcagcatttcgggaggctgaggtgggtggatcacgaggtcaggagatcaagaccatcctggctaacagggtgaaaccccatctctactaaaaatacaaaaaaattagccaggcgtggtggcgggcgcctgtagtcccagctacttgggaggctgaggcaggagaatgtcgtgaacctgggaagtggagcttgcagtgagccaagatcgctccactgcactccagcctgggtgacagagcgagactccgtctcagaaataataaaaaaaaaaatctcttaacctctatacctgaaagtcaaaaattcaggaaaaaattcacacatcaccataaacaaaaga

SEQ ID NO: 325685 - DNA, 462 bp, Homo sapiens
aacctcactaactgcctaaataatttcttactaactcctatatcactattactgtactgctcttaacctgaacagtggaactcagtctaggttaaagcaagtggagtacgagaagtgagttttgcatttaaattttatttttacttatttttggactttttacctttgtcttcaatgactgccccctttyctctatctgtaatgaatggaatgaaaaaagttgtagtttggatgtactgacctagtcaagtctcaagttacgttaataggaggaagcctgtggctaaatagttcctgacaatggctttgttagcagacatctctgagtagaaagcagtgagtcccagggacatcaaactttcaactcttaagaggaaagcaagggagcaaagttctgaagactgagaagaactgaaattcaagtggtgaggagaattcattacaagagatttaaatatggag

SEQ ID NO: 325686 - DNA, 595 bp, Homo sapiens
taaatttacatgaaatttgatattaataattagatgcaagtaatgcaaaagtgtcccaaacatctgcaggtgttttgctaaatttaggagttaaacaaatttaggaatacgtctttgtctctaggatggagaaccaggtgatctttaatacttcctactacttaagctctttaatgaggcttcttaaaacttcatttcttgtccattgccttttcatatccagatctcaagattggagtataaaaagtttcccaactccttgtcttcaatctcttttccctctactttattctatcacctgttatttaaactgtttcttctctacattcctttagcatgtcatactcctgctttgatgcatttcaccctatccgaaaggtctctcctcccctccatctgcacattttcaagaccaagctcactcttattttcatctgtaactattcccttaagattgaarcctggattagttctcccttacctcctatactacctactgatgatggtcaacattattcaaataagcacttaattagaaaagatagaaatgcagtaaatacagaccaagttttgttttgtctcacagagcagctag

SEQ ID NO: 325687 - DNA, 588 bp, Homo sapiens
acatagcaggtactcaataaatgtttttgaatggcgtattaactgagttattttaagttatatttttcatgcgtgcaatattcaacacattttttataaattagatttctacaaaatgttttatgcattacaaaattgttctattatttttagttatttgctatggtcatgtgtcagatgacaaataatgtacattacttatatttcttagcaatttattgggccctatgcaacaggtctattgtacctctttactaattaagaacccccttgattttcataaaaaataagcagaataaccttctctatgtgcttctctgtatgtttttgtgtgtgcctatatttttacaggtcatataacagtaaaacttcaggattaattttgaattagtgtgcttttttaatagataaaaaaygtcggggggaagggatctattttccattttcattacaatatagttttgtaaacatttatccctggataataaagatgtcaatatttcatataacttgaaaaacacataaaatgttttcttcgttgttaatttgtccatattatttaagagattaagattatttgaatcaaga

SEQ ID NO: 325688 - DNA, 444 bp, Homo sapiens
tgggacatacaaattgcattacatacaacttgtaacatagggtggagtcttaattaaatatacacagaaaaatgtacttaattatgtatagatacacacacacaaatttaatgtcttaggggataattagaggaaagataaaatgatgaaagcaattttatctttttaagctattgtctttagattaatcttttaagaagcactttgtttagtgagaggcagtataacataatggttataagtgtggttcttgcagccatctcttccttaaattatcatactgttactttcaagctctgtgactctgggcaagttacctaacctctccatgcctcaattttcttgtctgtaaagtgrgtataaatgacctcttattgttgaggattaaatgaaataatgcatgcaaagtcttggaacaataaatgtattatttctcaaatacca

SEQ ID NO: 325689 - DNA, 444 bp, Homo sapiens
tgggacatacaaattgcattacatacaacttgtaacatagggtggagtcttaattaaatatacacagaaaaatgtacttaattatgtatagatacacacacacaaatttaatgtcttaggggataattagaggaaagataaaatgatgaaagcaattttatctttttaagctattgtctttagattaatcttttaagaagcactttgtttagtgagaggcagtataacataatggttataagtgtggttcttgcagccatctcttccttaaattatcatactgttactttcaagctctgtgactctgggcaagttacctaacctctccatgcctcaattttcttgtctgtaaagtgggtayaaatgacctcttattgttgaggattaaatgaaataatgcatgcaaagtcttggaacaataaatgtattatttctcaaatacca

SEQ ID NO: 325690 - DNA, 478 bp, Homo sapiens
tggatagttgaattttcacttcacgtatccagaccttgccattctcaaataatggttaagttccaggtcttcggtgaagatttttcttcatctgctaaactttttttttttttgatagagatgtggatttctattgttcaagctggagagcagtggctactcacagtgtgatcatcgtgcactatagccttgaactcctgggctcaagcctttctcctgcctcagccatacacgcagctagarttgctgatgtgcaccaccgtgccctgcttctttttgtttttttaaaataatttatcaatcctaatttcaaaatctagccctaaattatgccttttattatttcatatttcctctccaacaatatctatgatgtttgatttatactataaaagctaatgttagtaggaatataagtagtagtagaagtaatagtacttggaaaatatttgtgtattatcacatcacaggcactttc

SEQ ID NO: 325691 - DNA, 478 bp, Homo sapiens
tggatagttgaattttcacttcacgtatccagaccttgccattctcaaataatggttaagttccaggtcttcggtgaagatttttcttcatctgctaaactttttttttttttgatagagatgtggatttctattgttcaagctggagagcagtggctactcacagtgtgatcatcgtgcactatagccttgaactcctgggctcaagcctttctcctgcctcagccatacacgcagctagaattgctgatgtgcaccaccgtgccctgcttctttttgttttyttaaaataatttatcaatcctaatttcaaaatctagccctaaattatgccttttattatttcatatttcctctccaacaatatctatgatgtttgatttatactataaaagctaatgttagtaggaatataagtagtagtagaagtaatagtacttggaaaatatttgtgtattatcacatcacaggcactttc

SEQ ID NO: 325692 - DNA, 449 bp, Homo sapiens
ttatgtgctcataaccaggccttctagtttccagctgagtttaaacaaagggaaatctaggcagtaaattggagaaagaaatgagagtaggctcaggttatttcccacyggcttccccccagctgtgtcactttgtgctgacagtgtcctcaattgagggtcacaacccttcacaaagtggcctttactataagactctcttctcttgggtttaggtaactgttttcccaactctatcacttctgggcccaaggttagtaatgactgctgctattggccttgagtttttagtatattccaaacacccttttgagtaatcattttacaaatcaactattttcaaattatcctaatttaagtgatctatatgtttcttattgagattctaagaatagaatggtagaacaaaaaattggaaggaacccaggcctccctgaacaccagaccta

SEQ ID NO: 325693 - DNA, 597 bp, Homo sapiens
ttgtttaaacaatagtaaatcatcaaaattcagcaaacagttttatctgtctttttccttttactgttttattttgcttatttttgctttataaaaaataaatttcaattaagtataagtgacttacaataaactgcaaattcagaatttaataaatttatatataattcatatatatatataaacatcaccacaatcaaaataaggaacatattaatcaccccaaataagttttcttgtgcctacttgtcatccttctctttcttctactgctggcaccacaacatctatttcatccacaggcaaccactattctccttgatttctacataaatcactttgygttttctacaatttaatattaatagaataatacagtatacagtcttttttgtttggatttgttcattctaaataatgactttaagattcaaccatgttgtagtataccaacaattaattttttattgtgtgaataagattacaccgtataaatataccataactgtttatgcatcaacctgtaaatgaatatttagtttgttccagttttgtgatattacagaaagagctgctatggacattcatataaaaaat

SEQ ID NO: 325694 - DNA, 575 bp, Homo sapiens
  misc_feature (1)...(575): n = A,T,C or G
aaagaaaacgtggcaaattaaaattggatgttagacatctgtaatctcataatacctgtggcactccatctcaagaattaaatgtggccaagatactctactacaacccntattcccccttntatgttgcccacccttctcaatctcataccaaaccctcttctccccaactctacacatatttttttctgtgctctcccatttcccatctaaatgtaagtttcttatgaagagcagtttagctaactcctttggttcatttttttttctttcagtcaacgttttcagagccttactttccactcccatgtatcttatcaacatattgtcctaaacagaagcagttctttttctaaaggagctctatttycacctattaaaataatgcatttttcaattgcctgaaacaccaaatgtcacaattgttattacctagttttgtcttgttcatgtgagagttggtaagtgaaaactttcagaccacacaaaattgaagtgtacaaactctgggcatgcctagattagctacaatttaggtataattaggatattgttagctatagtttaggtataat

SEQ ID NO: 325695 - DNA, 563 bp, Homo sapiens
ataagacacccaaataggaagacagggagtcaaactgtccttgtttgcagatgatatgattctatacctagaaaacctcattgtttctgccccagatcttcttgatgtgataaacaacttcagcgaagtttcaggatacaaaatcaatttaccaaaatcagtagtatttctataaaccaacaacatccaagctgagaacaatcccattcacaactgccacaaaaataataaaatatccaggaatacagattaccagggaggtgaaagatctctacactgagaattacaaacatcactcaaaagaatcagaactgacacaaacaaattttaaaaatccatgtccatggataagaagactcaatgtagtcaaaaacgtcaygttgtccaaagcaattaatagacttattgctattcctatcaaactaccaatgacattcttcatggaattagaaaaaacaatttaaaaatttgtataaaacaaaaaagagccctaatagtcaaagcaatcataaacaaaaagaaaaaagctgaaaccaatttagtcacttaacttcaaaatatgc

SEQ ID NO: 325696 - DNA, 538 bp, Homo sapiens
gctgaaccattctacatttcatccagtgatgtatgagttccagtttatctatatcttcacacatccttgtcaacacttattaaaaaaaaataggaaggaggatccaagatagctgaccagaagctatcttgtgctttaaccacacctccagcaagctgctgtgtgcaactctcayggagagaagacagattggcaagtattagcttttccactggaacatacaggtggacacattgggatttatcaagggaacaacttgacccgcggaaaatggagagaagtgagatgagacaaccactcaccagagtggcattgagccagggaaggccccccaaccatggggaaatggtgagtgagagtccctgaagaccttgggtctctaaactgacatggagagctacatggagtctaggcagaggcccgccaaggcaaatgcagagtcccaggagcctttgatcccagggtatcctgatattaacagctgcagccccgaaaatgggagatattatgcccgcttgcatgcccccaggaaaggggc

SEQ ID NO: 325697 - DNA, 576 bp, Homo sapiens
aatcttaaactgcatttcttgggaggggaaaggcaatatataatctgttttgagaggagtgtaacttaaaaggatagtgacttttatactggttaaggctgcttttcttacaagaatatttgaaaaaacttatgctaggataagaagtttatagaaatcctccaaatatatagaatttttctgcagattgaatgtraaacatattcaatcatgaaaataaacacactaaatgtgtatataaagacaaaagattacagagaaacaagaggtgagaaacacaattattaaagatgtattagggatattgggaaggcaatgccccttacaaaaaatggtaagaatagaaagattagccaagaaattaggattcaatggtgtctaatttattgtcagtttctgatatgcagtaaagttaagatgaagagtttcatttgaaaaaaaaaaaattagccacagtgagtcattgccagctcatggatgtcataagaaaactacaactataggaaatattagtaagttttcaataaacacagtgactgtagtaaagagaaactaatggtggaaaaaatatgtacc

SEQ ID NO: 325698 - DNA, 565 bp, Homo sapiens
aaaaatccatgactagcagagaataaaagctttgccatgaccatcatatattccaaactgggcaccactaaattatcattctgttgcatgtgcccatttatacatgaagagccatctagaagatctgaagaaattaaaacagactctgccattttttatctcaaacccargtattccagttagtgccacactcaggatcccctgcagaaagttgtgtttctagtcgtcaaaaaggatgaggatatatgcttacatgttctatttcttactcattaatgtacaaaccttattaggaaaaagatcccagacatctaatagatgggtcatcattgtacaaaccttcagtttagaaactgaatttagaagtccactcatttagcagaggttctgttcacatttgtcgaaataaggtaatgtaatattgagtaagctcctgggctttcttgggagtgccagaagtagtccacagagaagaacacacgtccgtgtatatgtgtgtgtgtgcatgtatgtgtgtgcgtgtgtgctcatcttgtgtgtgtgcagctcctagaagttttatact

SEQ ID NO: 325699 - DNA, 590 bp, Homo sapiens
tgaaattggtctatattgtttatatgccatactrctttgattactatagcttcaaagtatatttggacatcaagtagtgtgatgtctccagctttcttatttttgctcaattgctttggctactcagggtaattgcggatccatacagattttaggatttttttctatttatattaaaaatgttaatgaaattttgatagaaattgcattgaatctgtagatctctttgagtaatattgatattttaacatattaattcttccaatccatgaacatgggatgtctttgtagtaaaataccacaaattattttttaatcatataattaaacatgaaatactattttggcaaataagacaataaagtaacatttatttgttgacactctgccaaataggtattacatttaaatatccaaaacctgggttttccaattcctgcactcccgtgtttccccaaatgtgtttcacaaagtcctcatcccaagagatattaagaggcattctgtgagataagggttctacagtcaaaaggttttgaaaatggtgggttaaagttaaacaatattctttcccacacaactcatcggag

SEQ ID NO: 325700 - DNA, 590 bp, Homo sapiens
tgaaattggtctatattgtttatatgccatactgytttgattactatagcttcaaagtatatttggacatcaagtagtgtgatgtctccagctttcttatttttgctcaattgctttggctactcagggtaattgcggatccatacagattttaggatttttttctatttatattaaaaatgttaatgaaattttgatagaaattgcattgaatctgtagatctctttgagtaatattgatattttaacatattaattcttccaatccatgaacatgggatgtctttgtagtaaaataccacaaattattttttaatcatataattaaacatgaaatactattttggcaaataagacaataaagtaacatttatttgttgacactctgccaaataggtattacatttaaatatccaaaacctgggttttccaattcctgcactcccgtgtttccccaaatgtgtttcacaaagtcctcatcccaagagatattaagaggcattctgtgagataagggttctacagtcaaaaggttttgaaaatggtgggttaaagttaaacaatattctttcccacacaactcatcggag

SEQ ID NO: 325701 - DNA, 590 bp, Homo sapiens
tgaaattggtctatattgtttatatgccatactgctttgattactatagcttcaaagtatatttggacatcaagtagtgtgatgtctccagctttcttatttttgctcaattgctttggctactcagggtaattgcggatccatacagattttaggatttttttctatttatattaaaaatgttaatgaaattttgatagaaattgcattgaatctgtagatctctttgagtaatattgatattttaacatattaattcttccaatccatgaacatgggatgtctttgtagtaaaataccacaaattattttttaatcatayaattaaacatgaaatactattttggcaaataagacaataaagtaacatttatttgttgacactctgccaaataggtattacatttaaatatccaaaacctgggttttccaattcctgcactcccgtgtttccccaaatgtgtttcacaaagtcctcatcccaagagatattaagaggcattctgtgagataagggttctacagtcaaaaggttttgaaaatggtgggttaaagttaaacaatattctttcccacacaactcatcggag

SEQ ID NO: 325702 - DNA, 594 bp, Homo sapiens
attatcaatagtaacactgaaggtaaatgaactaagttctccaataaaaagacatagaaagactgaatgaatgaaaaacatgacccactgatctgtggtccatgagaaacacgcttcacctataaaggtatacatacatggaaaataaaaggatggaaaaacatactacatgccaatggaaaccaaaaaagagcagaagtagctatacttatatcagatacaatagatttcaagacaaaaactgtaagaagaaacaaagatggccgctgtataatgataaaggagtcaattacctaagaggatatgattataaatatatattcagccaatacaggagcacccagatacaaaaagcaaatattattagagctaaagagagagagatagacctcaatacaataatagctggagacttcaaaactccactttcagcattggacagatgttccagagagaaaatcamcaacgaaacattggacttcatctgcactatagaccaaatggacttaataggtatttacagaacatttcctccaacagatgaagaacacacattcttctcctcagcacatggatcattttcaagaacagacc

SEQ ID NO: 325703 - DNA, 607 bp, Homo sapiens
tacaataagataattatgactgtaatatctaataattaaaaattttcaatcgctaatattttcaacaggcttattttaaaatccaatatttgccttctgtagagtcagaattctggaacataaaaggatgtttaccatctttttagtctatttccaatatgaaaaacctttaaaaaataccaaggtaatacatatttaatatagaacatttagataagcaaaagaaggaaaaaattcacctttaatcctattctaaactgtcatgaatattttgtaactaaattcttgcaaatgctcatgattatttccttgaactagattaggataaactccaagatgagaatgcaaatttaaagaaaatgattattttaagggctttgactaatgttaacaaagacggaaagattgtgttcatatttgaaagcctaagctctggagtagattgcygagtttttgttgctactgtccaccattactaattctcgccatttggcagatcctgtatctttctagaagcttttgcttctttattgaccagtggagaatctcagctttggctcatcatctatcatgcctgtaccatggagtggccattaggattacaatg

SEQ ID NO: 325704 - DNA, 599 bp, Homo sapiens
ttcataattatgtcacgtctcttcttaagctcttcaccttactttttatatatctggtattaatattcctaccttaaatcatttttgattaacatttgttttatactttatatctttttcctactttttattttcaacctttgagataaatattatatagctgggttttattttttcatctaattcaagggcttggaaatccttcctttctttctttctcctcttctcttctctactcttcttttctcttgtcttctcttcttttctttcttctttttaagggacagggtctctatcacccaagctggactgcaatggcctgatcaaaattcactgtagccccgatttcctgtgctcaagtgatccrcccacctgagcccctggagtagctagaactacagggggatgccatgccaccacactagctaatgtttgtattttttgtagacagaggtctccctttgttgccatcctcccactttggcctcccaaagtgctgggattacaagagtgggccactgtgccaggcttggaaactgtttcttatccaccaaaatctatttttctattcttctacagtaataaagttgtaactgggc

SEQ ID NO: 325705 - DNA, 627 bp, Homo sapiens
gcaaaattaaataacgatgtgttaggttctggcattcagtttgtggtaatcctctcagagcaagaagcttttggtttagttctggctgtgactgccacttacttgcgttataatcttgaattcagacacctttagggtctctactcctggccccattttctgaggtggccccacaargaagtgacccatgctggtgtggactaagctctgattttttttatcttgcccaaattcctttctaaggtgtctggggagtcatgccctacaagccataaattctcatcagatgggttttattttaccctatatatcgtgacttactttccaacctgactctggcataacaagggaaaaaataaaaatgttttaccccaaaatatatttccttgccataccttgaaattgccctgcaaagtcttttgtgggaaaaatccacattctgtagggaatcctctttcccctttgttttccttccttccttttcagatccaggagataatcaactaagaggcaggtacccttttaagtctgataggaaacatttttcaacctgctctctgtaaagtctgctgagagcttcctctgcacaataaaacttagtctccacatctttcatctcaacctgaa

SEQ ID NO: 325706 - DNA, 627 bp, Homo sapiens
gcaaaattaaataacgatgtgttaggttctggcattcagtttgtggtaatcctctcagagcaagaagcttttggtttagttctggctgtgactgccacttacttgcgttataatcttgaattcagacacctttagggtctctactcctggccccattttctgaggtggccccacaaagaagtgacccatgctggtgtggactaagctctgatttttyttatcttgcccaaattcctttctaaggtgtctggggagtcatgccctacaagccataaattctcatcagatgggttttattttaccctatatatcgtgacttactttccaacctgactctggcataacaagggaaaaaataaaaatgttttaccccaaaatatatttccttgccataccttgaaattgccctgcaaagtcttttgtgggaaaaatccacattctgtagggaatcctctttcccctttgttttccttccttccttttcagatccaggagataatcaactaagaggcaggtacccttttaagtctgataggaaacatttttcaacctgctctctgtaaagtctgctgagagcttcctctgcacaataaaacttagtctccacatctttcatctcaacctgaa

SEQ ID NO: 325707 - DNA, 627 bp, Homo sapiens
gcaaaattaaataacgatgtgttaggttctggcattcagtttgtggtaatcctctcagagcaagaagcttttggtttagttctggctgtgactgccacttacttgcgttataatcttgaattcagacacctttagggtctctactcctggccccattttctgaggtggccccacaaagaagtgacccatgctggtgtggactaagctctgattttttttatcttgcccaaattcctttctaaggtgtctggggagtcatgccctacaagccataaattctcatcagatgggttttattttaccctatatatcrtgacttactttccaacctgactctggcataacaagggaaaaaataaaaatgttttaccccaaaatatatttccttgccataccttgaaattgccctgcaaagtcttttgtgggaaaaatccacattctgtagggaatcctctttcccctttgttttccttccttccttttcagatccaggagataatcaactaagaggcaggtacccttttaagtctgataggaaacatttttcaacctgctctctgtaaagtctgctgagagcttcctctgcacaataaaacttagtctccacatctttcatctcaacctgaa

SEQ ID NO: 325708 - DNA, 531 bp, Homo sapiens
ggttaaggaggatcatgatagaaacataaaactgcataggacataccaccgacaaaaagcagctgtgctggactgcatttcttatttatacccatatacttcaggcacataacagtgaaagcaaaagcgtatgggtgggaatacatacagtcatcatcaaaacaataaaaataatattcaacttttaaaataataacaggaactgtaacttacatttattgagtacttactatgtgccagacactgtgctatgccctttcctccaaaccaaaatgctgactattaaaatatygaaatgctgtcatacacattagcaaataattgaagccctgagcatctttagggagcccctagtgccctggtcatctgagctcctttactagaaccccttgtgtcccctgccctgaggaactgaaagcacggaaaggagcctctgagtactccctccaatgttatgatctgtgcctcttctgactggtcaatgaccccactaaatatttttaaaatcactctaatattacactcattaag

SEQ ID NO: 325709 - DNA, 502 bp, Homo sapiens
gcacaccaacattggcacatgcatacatatgtaaaaaacctgcacattgtgcacaggtaccctagaacttaaagtataatttaaaaaaaaaaaaaaaagcctcgtgaggcggaggttgcagtgagccgagatcacgccattgcactctagcctsggcatcagaaaaaggctgtctcaaaacaaacaaacaaaaacaaaaacaaaaacaaaaaaagcctcctgattaccattaactttatctagaacaagttctatagaattgaagaccagtgggtaaacttgaggaagtatacttttaaattagcatggagattttggaaaaacactgcatcctcaagtttttaaatgtatcttttgttttgttttgttttgtgagacagggtttcattttgtggcctaggctagagtgcagtggcaccatcttggctcactgtacctttgacttcccaggactcaagcaatcctcccacctcagcacccccagtagctgggactatgggca

SEQ ID NO: 325710 - DNA, 611 bp, Homo sapiens
tctttggaaagaaaatcttttccattctaatatgtcraaattatgtcaaaatatgtcaaaaataatatttcattgttattttaatatgcatgtatttgattactagtgagactgatcatcttttaataggaatagcaggcactgtgaggccttccatatcctccagcttccacctctgtagccactggctgcttactcagaggacctgttgaaacaggaaagttcctgactcccccaacacaggatgtgcaacagaggtgtggctccactgtgtgtgctcaaaccccttatgggagaggcggcacgcatatgggcaggtacgggagccagggcaagcgcccctgggctctggccccacagcagtgtccaggggtggaagcctgtgactcccaaagcccaagtgggcgtgtgtcatggtgcgctcctttagccttgctgttcgtggatgacttaagtgttaaccaggtcagtgccctcttggtacccaggtgattgtccggagtccaggaagaatccggtggcacatggacttgaaggatgaatgcggggattttattgagtggtggagatggctctcagcaggatggatggggagctagaagcagaatgaa

SEQ ID NO: 325711 - DNA, 611 bp, Homo sapiens
tctttggaaagaaaatcttttccattctaatatgtcgaaattatgtcaaaatatgtcaaaaataatatttcattgttattttaatatgcatgtatttgattactagtgagactgatcatcttttaataggaatagcaggcactgtgaggccttccatatcctccagcttccacctctgtagccactggctgcttactcagaggacctgttgaaacrggaaagttcctgactcccccaacacaggatgtgcaacagaggtgtggctccactgtgtgtgctcaaaccccttatgggagaggcggcacgcatatgggcaggtacgggagccagggcaagcgcccctgggctctggccccacagcagtgtccaggggtggaagcctgtgactcccaaagcccaagtgggcgtgtgtcatggtgcgctcctttagccttgctgttcgtggatgacttaagtgttaaccaggtcagtgccctcttggtacccaggtgattgtccggagtccaggaagaatccggtggcacatggacttgaaggatgaatgcggggattttattgagtggtggagatggctctcagcaggatggatggggagctagaagcagaatgaa

SEQ ID NO: 325712 - DNA, 611 bp, Homo sapiens
tctttggaaagaaaatcttttccattctaatatgtcgaaattatgtcaaaatatgtcaaaaataatatttcattgttattttaatatgcatgtatttgattactagtgagactgatcatcttttaataggaatagcaggcactgtgaggccttccatatcctccagcttccacctctgtagccactggctgcttactcagaggacctgttgaaacaggaaagttcctgactcccccaacacaggatgtgcaacagaggtgtggctccactgtgtgtgctcaaaccccttatgggagaggcrgcacgcatatgggcaggtacgggagccagggcaagcgcccctgggctctggccccacagcagtgtccaggggtggaagcctgtgactcccaaagcccaagtgggcgtgtgtcatggtgcgctcctttagccttgctgttcgtggatgacttaagtgttaaccaggtcagtgccctcttggtacccaggtgattgtccggagtccaggaagaatccggtggcacatggacttgaaggatgaatgcggggattttattgagtggtggagatggctctcagcaggatggatggggagctagaagcagaatgaa

SEQ ID NO: 325713 - DNA, 611 bp, Homo sapiens
tctttggaaagaaaatcttttccattctaatatgtcgaaattatgtcaaaatatgtcaaaaataatatttcattgttattttaatatgcatgtatttgattactagtgagactgatcatcttttaataggaatagcaggcactgtgaggccttccatatcctccagcttccacctctgtagccactggctgcttactcagaggacctgttgaaacaggaaagttcctgactcccccaacacaggatgtgcaacagaggtgtggctccactgtgtgtgctcaaaccccttatgggagaggcggcacgcatatgggcaggtacgggagccagggcaagcgcccctgggctctggccccacagcagtgtccaggggtggaagcctgtgactcccaaagcccaagtgggcgtgtgtcayggtgcgctcctttagccttgctgttcgtggatgacttaagtgttaaccaggtcagtgccctcttggtacccaggtgattgtccggagtccaggaagaatccggtggcacatggacttgaaggatgaatgcggggattttattgagtggtggagatggctctcagcaggatggatggggagctagaagcagaatgaa

SEQ ID NO: 325714 - DNA, 577 bp, Homo sapiens
taaataatattcactaccttaaataacattagtgagcacttaaagtaagtctggtactgtgctaagtgctttgcatgcattatctcatgtaatacacatatacacacaataccttgaggtcggtaccagtattatccccatcttccaggtgagaagcaattgccgaaggtctctcagctaacaaagggcagagctaccataagtcatcatgggaaggagatctacctagaatgtttgggcaaaactcagtgaggagatgagagtagatcttttaaagaagagaaagaggccagctgcaatggctcacgcctgtaatcccaayactttggggggatggatcacttgaggtcaggagttcaagaccagcctggccaacatggtgaaacctcgtctctactaaaactacaaaaattagccgggcatggtggggggcgccagtaacccaactactcggaaggctaaagcaggagaatcgcttgaaccagagaggcagagcttgcagtgagcagagattgcgccactgcactccagcctgggaaacagaacaagactctgtctcaaaataaataaataaata

SEQ ID NO: 325715 - DNA, 632 bp, Homo sapiens
tgctagctatgttctgttattttagttttcagctgtttcttttttgaaaacatggggctttgtgctctttagggaaaggggatctgtgaaaggaacatttgccttctctgtgtccagtcctggggaaggggagagttgctgtctgcaaatgcactcaccaccattgactcaaacagttgagagagagaagaggatatatagtagaaattaaaactctgcctactccccaacaccacataatgcctcaggcacacatgaatctattgagtagtatctgaagacaagacttrtagcaggcatttatctttgaaacagatttaaatagatttgttttttaatctactttaaaatgtgtactgagtaaaccttaaatagtaaatctcaaagtaggaagagaggtcatttacatttaaggaaacagaattggttaattagagctaaaaaaattatagctctgggtatgcattttaatttggttggctgtcaagggcattgttgtcctgagtaattatgaaacaaactcacatatacaggaaatcatcatctagggagggttttctgcaggtagaatgactattaataaaaatcttcctttttatcctcgactgtcctctggctgtcccaacagaata

SEQ ID NO: 325716 - DNA, 503 bp, Homo sapiens
ccagccgcctgagggaaagaagaggcgtggagagaatatgcaggcagggcccctgcacaggttgctgtgctcctccccgtccagctcctaagtcgctcatagacccctaagaacaggaggtggctgcactcagccacatggagctgtaagcaaggcaggagctgctgcattttgtcattggttcagctgtcccaggtccatggtcagaatcagggaataggccttgtcactccctgtgtatatggtgggtcttcatagagttatatcttcccggggcaccttaagaaaacctacacttcctgcgttgatctcggggcattgaggaggaaacaatggcctgtgaagctattgaaatccctacctcagaggccagccctgcgtgtgcaaaaaggttccagtgtgcaaacacctgctctatacacgaggagaggctgtgacctcctcaactccctcagtggccactctaagtgaccgyggtggggctagaaatatagtcagtgtaa

SEQ ID NO: 325717 - DNA, 592 bp, Homo sapiens
catggagtcactcatggtgcaaaccactaatcctgtgaggtagcatgcatggacggtactctatgtgggagtgattactgctaccaggaaggaaggaggatgcaggagaggcctcactgaagaggttgtatcagtcagggtcttcctggcagaatgcagaacacactggaaaggaatgacaaacagagcctaaagaaggtgcaggggtgtgggcagtgccatgagagccaacagggcaccgggagcagcaggaagccactagacctctaggcccaaggagtcaagtggatggagtgagtgtgggatacccagaacctgcagatggctgtggctgtggagaagggctgttacaggactgggacctaggaagagggatgcacccactccccaaatcacaaggaggactgtgagcaccaggaccttgctctctggtctctggctagtgcaggattcatgrctgaagccaactggaatccagagagaatggagcctgagtgatggtctctgggacaataagcaaggaagagaaatgaggagaatggatctggaggagacagcagaatggccagcctacagaagtgagaagaaagca

SEQ ID NO: 325718 - DNA, 551 bp, Homo sapiens
tgctcacgcacccaagaagtatccaaaggacacatctttcactaaagaaataaayttgttaggggagtcccagcatccatgaagagcactgtagttcctcttctctacaggtgagaaatcatggtgggaactgatgctactgaactggaatccttagatgccagagggatagttggatcccagagtggcaggggacaagtgacagcacttaaacaccaaataattgggtgtggttactttaatggacaacaaagtcaaagcaggaatcagaatagcctcacaccacagacctatggcattagcaagttgatcacagtgttctagaagtgaaataggcagactgtatactaaattctgacttgatctgcataagtggaagagtttaaggtcaaaggaacagaaggataacttctgtagtcatagcctttcaatcaattctagacttgagccagtttacggacccagaaccccttgaattgaagggaggctaggtccccttcaggaagggcccagctgcaatgacgaaaatttctaccgttgatctttctcct

SEQ ID NO: 325719 - DNA, 528 bp, Homo sapiens
cacagtatctcatattaattctacrgcagtctgtcagcaaagtattcttattcacattctgcagataaagaactttaaacccaggaagacttgctcaggatcactaaactgataagcaggggacttgggttctgcctggctccacaatcactgtgttctacaggccatggcaagttaggggactccatgctgtttctgactgcgtgccagtgggctaaccacctcacttccagggctcggtttacccacaggatgatgaggtggccatctcagtgtccttttcatccctatgattctggtaccaagggacgtctaatgatcaaatgaagttacagtataatttgcatagtgttatcgttggatagaaaaattgtttttgaccttgtcaccaagaaatgcttcgtagaaaagatgaagcttcttggctataggttctctcttgttcatgccctactttgatcctccagcaagctccaaagttattcattcggtcaataattttttcatcacgtgtttattaagtatatt

SEQ ID NO: 325720 - DNA, 538 bp, Homo sapiens
catgtgactaaaaacaatccaagtgtgcttggagaaagagctgggtctggagatataagaaggaagaagaaccraaattgcctcatggtggggcatgccctgggctaccacatcattagaggtgagcctcagtctaaaccaactggcaccttccttcaccatccttagatcccgttgcctgtcttgtactctgatgaacctttttccccactattaatgttgaccaaagtcctggaggtcctatgtccctcggtgaagcatgcactttctgagtgatgtgtctttggggcatttttggctaaataacaccctttgtttgaataatatatgtggttgtcttaaaatctttctctgaaaaggaagataatttcatttatactcttaaggttgccaccttctttgacttcaaggaatggtcaaatgatctcatttgcatatgaactgccttcctgctctgaaactgatccaaaggccccaagtactttgcagattatggtattaaagcacactgggaatccctggggaccttgcccctctt

SEQ ID NO: 325721 - DNA, 590 bp, Homo sapiens
aaaacgccttctcagcctgctgctagaatgtcatgtgtgtttggtgaagacatttggacaacagaaaacatcccattgctggaagaggaacaagggccaaaaacataaaagtcatccaggtttcaacatgccccagtctctttctggaaacttttcattctccctcaacaatcggaaaactcacagraaaacaaaacctctttgcggtttggcagagagaggacaaggtgaggacgggctgagaggatttatctatttgatttatgtaaagaaaaaagttagagtaagtggatagaggatgtcagtactcaaatgtatttcgtttgtgatattctctgtattatgtttcaaatacaatatgttgtcagggcctcagggagtaaaagcatctctattagtcatttggtttacatgtattttctagaaatctccaaatcagggagttgccatctagtgtagaagcagagaatcatagacttttagattttattagacagcaacctttaatcttctatgtgaaactctaatttcttatgcaacatctgcaccatttagagctctaactttgataaatgaattactgaaatcca

SEQ ID NO: 325722 - DNA, 590 bp, Homo sapiens
aaaacgccttctcagcctgctgctagaatgtcatgtgtgtttggtgaagacatttggacaacagaaaacatcccattgctggaagaggaacaagggccaaaaacataaaagtcatccaggtttcaacatgccccagtctctttctggaaacttttcattctccctcaacaatcggaaaactcacaggaaaacaaaacctctttgyggtttggcagagagaggacaaggtgaggacgggctgagaggatttatctatttgatttatgtaaagaaaaaagttagagtaagtggatagaggatgtcagtactcaaatgtatttcgtttgtgatattctctgtattatgtttcaaatacaatatgttgtcagggcctcagggagtaaaagcatctctattagtcatttggtttacatgtattttctagaaatctccaaatcagggagttgccatctagtgtagaagcagagaatcatagacttttagattttattagacagcaacctttaatcttctatgtgaaactctaatttcttatgcaacatctgcaccatttagagctctaactttgataaatgaattactgaaatcca

SEQ ID NO: 325723 - DNA, 590 bp, Homo sapiens
aaaacgccttctcagcctgctgctagaatgtcatgtgtgtttggtgaagacatttggacaacagaaaacatcccattgctggaagaggaacaagggccaaaaacataaaagtcatccaggtttcaacatgccccagtctctttctggaaacttttcattctccctcaacaatcggaaaactcacaggaaaacaaaacctctttgcggtttggcagagagaggacaaggtgaggacgggctgagaggatttatctatttgatttatgtaaagaaaaaagttagagtaagtggatagaggatgtcagtactcaaatgtatttcgtttgtgatattctctgtattatgtttcaaatacaatatgttgtcagggcctcagggagtaaaagcatctctattagtcatttggtttacatgtattttctagaaatctccaaatcagggagttgccatctagtgtagaagcagagaatcatagacttttagattttattagacagcaacctttaatcttytatgtgaaactctaatttcttatgcaacatctgcaccatttagagctctaactttgataaatgaattactgaaatcca

SEQ ID NO: 325724 - DNA, 633 bp, Homo sapiens
ggtcctggcaatttccaaagagactttctgaactcctcttcaagagtctttgtgaattaccctgtaattgctggcaaggcatttcaatgccagagaaagtcacacagaaaaggagcacaccatcctcttaagcagctcaagggcagcagtcttacatgagtaggagaagcaggagaaagaggtaaggagggaattggttagcccttagttttggaagtcattttcagtgccagagaaataatctttatcatcaccaccttcatctttattaccagcagacctagcagcagcaaattcacacaatgaaaacctytatcaagtctgaagcatctgtaaaatcagtgaaatagttttgaatgtgtcgctttacttcagaaaaaattacaatggggagaaaaaggcatgagacaaaacattttaaatgtatttatctggaccatatccagtcttcaaataggttttctaagtcctaataaagtagataaagtgactatacactttataaaaatgtgaatctctgtggcatattttaaatccatttaataagattgaaaacattcctttactgtttccagtgatcatactcactttttgctgttgtaggatgtcttataggacatgtggccaatcact

SEQ ID NO: 325725 - DNA, 541 bp, Homo sapiens
gggtttggccaaatctcagaaaagcacataagaaggatagcctaattccaaagcggcattatagaaaacatcagaatgaatgaaatttaagcctgaatgcaaacatctgtggaatttttacttgggggaaggagaaagaaagtgagattaagacctacagcatctgaaagaacaggttaatagaaataataagtatttaccacagtttcgtaactctaatggcacgcccacaaggcaaagrttttctgaaacatcaacatccttgagaaaccacaatgtttactccgtgtttaacctgcacgtaatgtacccacgagtgttgtttttgctttcccgacctcttttctccctcttctgctaaagaaaccctccttcctgtgaaaatccattccaagtggtgcaggcagagctgccctgccaccagtctgccaaaacggtgcattagtgaccaaacctggcttctggaggtgcttcagtcctcaggccagggtggattgctcagaaatgggcacatcacccaagtagggccaagcagagcctg

SEQ ID NO: 325726 - DNA, 501 bp, Homo sapiens
catctggtctaaagagtagtactttctggtgcttgaattatgagacagaatctcctcttgccatctgccagggtagttcagctgctgagattcacatttttgccaaacagttcctacagtctagggcctagggttctgccctggtatgttctctatctgcactgatatcctgggtttacctacagggaaccaaaggtcactcaaagccctgaaagataacagaataagtgtgtgtaaagaaaatcacacaccataaccatcatgtagtgtatgctcagtcaacattcactgagagagttaaaaggaaaactagagaatcctgtctttgaaaaagtatgatcctcttgggtcagtggccaggccatatggaactctacaaaggggaattaattctacatactagatatacaaagcaamcatttattattaccaaattcaacttgtaacctgagataaggtcatctggatgacccaggtaggggaaaaacatagaagaattac

SEQ ID NO: 325727 - DNA, 585 bp, Homo sapiens
accctcccatcccccagacatatgtttcttgaaaagagaagcaagaggcatcaaaggatggaagccaaagaaactccatttgctactgtgttcgtaacttatgtctaaaattgatttttgtggtctgaggcaggtggaaattttcatagcaattctgctccattccctgtttctgagcacttygagattcactttcattcattttctcatttgattgcaattccagatctcactgatataaagtggatgaaagggagtgcaaatacaggttcctttttctccaaattccatactctctaccagtgctctgggactggtgaagaattctgggccactatctctgcagtgttacacaagcaagtggcaggagaggtgcctccacaatgcagcgcgcagctcctcctgggcgtcattagcatgcagcctacgttcttcaagatggcgcccagttcagcctgtcagcgagtgatctatgatgtgtcacttgtgctattaacaggcgttttcaatttcagcagcctcagcacatttagttcctctcccatgtgatcactgctctgtcctccattaataaccactttcaaa

SEQ ID NO: 325728 - DNA, 515 bp, Homo sapiens
ccttgttccaagagcctgacactcccgtttctttgactctgcatttctgcctcttttgcagacacmtggcttggcatgtgtttctgatatatggctctggagatacacagcacaaccatggaggacagtggtcgctatcatggggctccaggccagttggttgtatcactcctatgaccccttcctggttgggaaatacctggggatgaagaaattttatgacactttaactgagaaataactattctctgctgggttccagacctggcctggagaccagtgactcagaagctgttttcccctctgtggcttccagagaatctctgaggactcgggcaattgtccacatgctgagctttctgtccaccccagtcaaggccacgtggacctggtgggccatgtccctgggcaggctaatcacaggtgcccttcacaaaactgctcttcgtgtgttcaccctgctctccaaggagtagctgtgtgctgtgaagggaatagcagagaatgaagtaccc

SEQ ID NO: 325729 - DNA, 313 bp, Homo sapiens
ttgccagcttcctcaacccacaccctacccttcatggagcacttctggcactattcctcctccagagaaatactacagcaaacatagcgagtgatgactggcacctcgttctggggatgagcaggctgtccatgtaaactgttttcttctaggttgaggttgtccagaggagatgaaagagggtcgtgagggtcatgttgaaccaaaaagttgaggygctgcagaaaatggactgtgtgatgtttgggggtgggggagcagtctctgctgaggaggaggaataaacaagaagaaaggtgggaaagagcagttc

SEQ ID NO: 325730 - DNA, 558 bp, Homo sapiens
aatattttcccccaacctgtaactgtctcttcattttcttaatattgtcttttgaagaaatttaattcatccatttgttcttttgtgaatcctgcttttgatatcatatctaargaatctttgcccagctcaagatcacaaaggttttctcttatgttttcttccagaatttttatagttttaaattttacacttagttatggcatgcttcctgaattaatttttgtttatgatgtatggtatggattgacgttaattttatttttgctttggatatccaattgtttctgcaccatttgttgaagagacgatactttctccagtgaattgtctttgcacctttgttgcaaatcagttgcttgcctatgtgtgggtctatctccggactttctgctctgttccactgatctatttgcttatctttacaccattatgacactctcttgattatggctgcttaatagaaaataagacttgaaatcaggtagtgtgagaagatgcttcccatgacttcacatagatttgagatctcagcataactcccatagtataaatatg

SEQ ID NO: 325731 - DNA, 427 bp, Homo sapiens
ctgcagctgttcccacctccagacttccccgacacccaacgccccactcagcagacccaccccaccatccagagtgcaaacccattacactgagtgcagagccacccattgttaagggaggaaatcatttttgaaataagttcrtaatgcttttcctaaatatagatgatatggggttccagaggaattggattattcaggttcttcttgccttccttcacacagagagtgccccaagcttggctgtgttctcatagaaacaggcaaacagagaaggcaaaggattcaataatgaaccatgagcatctctagcctggcatgtactggctttagatttgccaaacagaacacttggaaagcctggctccactacatctatcaaagttgggccagggaagcccccagacaatttgaaggttggagaaag

SEQ ID NO: 325732 - DNA, 618 bp, Homo sapiens
ataaaactgggtcttatcctaagaagaagcaaataaaaaccaaaatgtacccataggcaggaaatggcatcttttggaattaagctatattctttgataactctgatatcagcagatgctgataacttttcatataatcatgaactatttagattttcttttctgggcacccacacccacactattctagggaagcgttaggatcttccttcccattactccccaacctgctgctctgcccagcaggcaaaactagaaacccctttcctttactagcaccttgggtagagggcttgtggaatgacaggtggatgctgctccacctgccactacagtaagaccatgaggcccactcccagggcataggaaatatcttctgctgcccacagactgcctggtacccactgaggttgactcaactgacatctaaaccgcaaaggtcccaactcggttggatcgagttttatgacaggatgaaagtsagggctttggagcccatgttttggcactaggctcctttatcggaagggccagcatgtgggtggggatgaccaactgttcttctttccccttggaagcagggcaaaggaagcgagatcaaattataacagaagggat

SEQ ID NO: 325733 - DNA, 606 bp, Homo sapiens
tcccaagacttagactcctcaaaccctactcagaacagcaacagatgtcaatctgacaacctatcttctcctccctcacactaaattaggaccctatagaacctcargagagtttattcagattacccagagcagaccattcaggtcaggttcagggagctgggagaagaaagttatcaaatccctgccacaggctgacgttgaagaaagcctgtttcttctcatctgctgggatctgggtctccagcacttcttcagcctgagaggctatttttctttctctctttcttcctcttttctttaaataagtacccaacggctgggaatggcttcctggaaccccttctttgtttctcccggaaatgatgataaattcatgggtttgcctaagaaaaataaacccaagacttccagctgctggattctgtactttattccctagattagactaaaggcttattcctctttcaaacataccaaattatccccagatcaaagtttaagcccttgaaacaagtgataaatgataaggcccacaggcccacggctgttcctaaaagggcttctgtggtgagagagcaaatctggttccaatagtaggaagag

SEQ ID NO: 325734 - DNA, 584 bp, Homo sapiens
ttaaaacagtatacttttgaatagcttaaataattgaaggaatgacacattctggtgagtttaatattttaatagccagaaaatatttttgctcctaactcaggttgaattttttttatatatatttatgagctgatctcattgtgtaacagaaagagattcaacactgactctttcaccatccagcaggggcccctgggccaatttgatttccttctcagagcctcagttttcaaatctgttggactatgtgatctttaaagcaccacgctgctctaatattccatggccttgccttraggacagtagactccaccgactcttcctttgactctgaaggatctcaaaggaggatcattctccaaagtgtcaactctgatactgctggacttggagaaggaacaagagattgggttggatgtgcccttctcgtggaagatgagtgctgctttattttaagccaaaatctaatattaattccacaatttatttcaacatgcatttacttccaagtgcttactagatgcaagcagctgttctaggtgctttgggtgctataaggaaaaacaaaacataaatgtagc

SEQ ID NO: 325735 - DNA, 589 bp, Homo sapiens
gtaatgttctttctgatctctcaaattattaatgtatcttttgaagaatactttccaagttaacttaagtgagcaactagagaatttccctaccccagagagtaactggcatttcccttgcttcatgctttcgtgctgagatgtccactgagtaatacgtccagcctttcctcctggcttggtcctggcccatcatgggcctttacttagacggacttggtgtattaacaactaagcatattgtggtctctcttcttttccctttctttggcaccactttcctgacactgagattgggcatgtctacactccaaaccataattcttccaagataatggaagggctaattgtggctatctgtctcaaccacttagttgaattcagcttcattcgtagtaaaaatggcattttggtattcgtctgtctgactcttgtatattctcagctgatttagaactcagaaatatttaaagaatgasatcagttatcatccacaaaactcagcatcttagagcagggttattaagcaatgataactactgagtgggcttacaaaatccttaataatttctctttgtctgtaaaagat

SEQ ID NO: 325736 - DNA, 589 bp, Homo sapiens
gtaatgttctttctgatctctcaaattattaatgtatcttttgaagaatactttccaagttaacttaagtgagcaactagagaatttccctaccccagagagtaactggcatttcccttgcttcatgctttcgtgctgagatgtccactgagtaatacgtccagcctttcctcctggcttggtcctggcccatcatgggcctttacttagacggacttggtgtattaacaactaagcatattgtggtctctcttcttttccctttctttggcaccactttcctgacactgagattgggcatgtctacactccaaaccataattcttccaagataatggaagggctaattgtggctatctgtctcaaccacttagttgaattcagcttcattcgtagtaaaaatggcattttggtattcgtctgtctgactcttgtatattctcagctgatttagaactcagaaatatttaaagaatgagatcagttatcatccacaaaactcagcatcttagagcagggttattaagcaaygataactactgagtgggcttacaaaatccttaataatttctctttgtctgtaaaagat

SEQ ID NO: 325737 - DNA, 562 bp, Homo sapiens
tccagaccataaaggaagtgatgagtgtagatggacaccgtaccagtcagggaaaamaaaaaaatcctgcaaagttctgggccagaaattcctacccagagttagaaaattaactgatagcccttctgctctaattcagaggcatttgagcaatgcagagcagtgaattttccacgtttaagtccaatatcataaggcatttcaattccccaaatcccttctctcttttcagccagctgtctcctttcttcatagtgctctttgtgtagaggcctctccggaccagtcggcttctatcatggaaatcattctgtttcccgctaaaaggcgaaagaaaattcacccaccgaaccacagcaaattgcagtgacagtgtggagaccccagagaggtgccatattgattaaaatgttcaagttagtaagaaaggaagagagaagaaaggaaccgtgtagactctttaaagatagggacggagaggaggaggaataggggtggaggaaaacagggaaaggagcatccacctcttgcagcctgtccccctggagaccttccaacatga

SEQ ID NO: 325738 - DNA, 621 bp, Homo sapiens
catccctgcactcgcgcatggcagatgtgcatcsccgatgcacttcgcagccctccgctgtcgcccccttgtgcggagcaatactgcgaggtgcagccaggaatctgcagagcagaccctaccagtgtagtggacagtggacagctggatgccatctggaggtgtaggtacagccctagtccgaagggggtttgcaggaagcactgaatttttctgaatgaccttgggaataaggatccatcacaagtgtcagcttaaatggttccctgcattaacagtcatcagtaaacagagtagcaatggctcacattgtgtcacagtgcttgacaaagtgcattatttcatctagtccttgctgcctcccaataagggagagatttttgtcactgttttgtggatgaagaaactgaggctcaatgaggttcagtgacttacccaggagacaggaaagcacagtgccttgccttgaatgaggtcccagcactccaggctcataaagcaccgtctgaaaccccaaggaaaagtggtctaactcctccgcctcccttctactcctctatgtggcaatgacactgactctcccaccctcatagaccaaggtggagctggtctgactgtaat

SEQ ID NO: 325739 - DNA, 575 bp, Homo sapiens
atcaattcctactgaaaaaaggatctacttagttgctcttttcaggaaaaagaaaaggaagtaggaggagtatggtaaggaatatggtagggccaggcatagcttgcctttgcacaactgcaaaatgtctaccaattggaatatagcatgtcctttcttcattttaayttaatcagagacagagggatgaggcactagcaggaacaagctccaagtttccctctttttatcctacttcagtttttcctttgttgtaccttacctcagattttttttaacacttcctctgcttcagagtgttcagttcttaagcttctatgatagcagaaaacaagtgtgtcttattcaccatttattcccacagccttgttaacataaataaaatattaatgtacttattcagttcaaacttttacatgaaatatacatacgtacattttttttaaaaaaggcaagcagtacagaagagcataacatgcaagatattttatccatccttccttaaccccctcctgatttccatgtgctcccaaaaccaccttaaacaattcctgtttttaagacaggaaacagtg

SEQ ID NO: 325740 - DNA, 573 bp, Homo sapiens
gcactttttgaacagcagtgtagtggttcacaaggcatgtagactcctgagagggtgtgatgcgggtttaagaagcttatttcatgtccaatatcatttacatttcaaactaggactcaaaccagggcttatattgaaacttcaaatgacaagaggtagagcaaaatacattcatctataaacatgcaataatgttatcagaattgccrcaacccattaattataaacataagcctagctattgacactatggctcaggcactgggctttttttccctgcttctgataagtcagcatttccattgaacctatgcatgccttaaaattctcataccagtctacactgaggcatgtgtttttattttgctttctatttataatctttattttgaaaacaacaattgtggtttggatttaccatgaggaggctgaattttacacatgcaaagactcattttttttgtagacttcatttttagctatattatctgatttgctatcatcccaggagtataaagtatatacagtatacattaccaaacacatttaacggatgaggaaaatgaaggtaga

SEQ ID NO: 325741 - DNA, 618 bp, Homo sapiens
agttactcaattacaaaatattagtttaatattggtttgatttttgaatcaaccttaagtttctgaatttttctaggtgctagagaaatagagaatttaatatttatgtacgcactgaaaaggaatatatatatatatacataggcatctgctattccatatgtacagggaacttgtcatgccggcaatgtaaaagccatttgaggtctgtagcttcctcttccccacagaaggaaatgtggcagtgagtcaaattgatacaggaattttaaatatgtgaggtcacacaaagttagagaacattataaatatatatatatattctctagagagactgcatcgcacaaatcgaagtgcatggactatccatgggttctgggaaaacatttaagttgcctgtgtgacttcccctgcacacaccctcattcctctccccttgggaaccagacagtttcctgaagactatcaaattacaaagaggaaggaagcgctcatctgcagattggcgatgcttacttttccagttgtctttcaatctctatycttcacattctttgttttcatgttcaaatctcccatatttgagtgataataattaaattcccaagaattcaaaca

SEQ ID NO: 325742 - DNA, 506 bp, Homo sapiens
cttgtgcctgatcttggagggaaatctttcagtttttcatcactgagtgtgatgttagctgggggattttcatatacggcctttgttgtattgggggattttcatacatgaccattgttgtattgaggcaaatcccttctatacctaatttgttgagagttttyatcacgaaaggctgttgaattttgtcaaatgttttttctgcatctagtaagatatgaatgtgacttttattcttcagtctgttagtatggtttattacattaattgatttgcatatattaagccatccgtgcatcccagggataaatcccacatagtcctgctgatccttttaatgtgctgttgaattcaggttgctagcattttgttaaggatttttgcatccatgtgccttagagatatgggcctgtagtttcttttcttatagtgtcttggtctcactttggtatcagcatcatgcttgctgcataaaatgagtattgagatgttcccttcagttttgg

SEQ ID NO: 325743 - DNA, 496 bp, Homo sapiens
aatgagcatcctagccttgtgcctgatcttggagggaaatctttcagtttttcatcactgagtgtgatgttagctgggggattttcatatacggcctttgttgtattgggggattttcatacatgaccattgttgtattgaggcaaatcccttctatacctaatttgttgagagtttttatcacgaaaggctgttgaattttgtcaaatgttttttctgcatctagtaagatatgaatgtgacttttattcttcagtctgttagtatggtttattacattaattgatttgcatatattaagccatccgtgcatcccagggataaatcccacatagtcytgctgatccttttaatgtgctgttgaattcaggttgctagcattttgttaaggatttttgcatccatgtgccttagagatatgggcctgtagtttcttttcttatagtgtcttggtctcactttggtatcagcatcatgcttgctgcataaaatgagt

SEQ ID NO: 325744 - DNA, 624 bp, Homo sapiens
tctagaggccgatctcacattctagaggccaccctcggtttcctgccacatagtcctctctataacatggtaatttactttttcaaggccagtagggaaagcacttctcttgcttcaaatctctcatgccagtctgttaaggagtcttaactaatataatattatcacaggaatatttgcacacaatagaatctaactaaggaggtgactatcatattcgcagtccctgctcacactcactttattattttagcatgtagttcatcaggaaataatgcaaaagatatgagtattagaagatggatagaattttgttagaggaagaggaaagggaaaaaatgtcaagcaagagaacaatataaggtattagatgtttgttgtagggctgagagaagratgcagttggcatattaaagctgcaagccaaatgaagtagggtgtttatatggaagatcatgagaagcacaactataattggagattgcagtctgatcccgagagcttttactactatcccaagaaatatgctctccaacagaaagtcagataggaaatgatgtatggattttcagtagagagaatgatacaacaaaaatatattttagggtgataagataagacaaa

SEQ ID NO: 325745 - DNA, 624 bp, Homo sapiens
tctagaggccgatctcacattctagaggccaccctcggtttcctgccacatagtcctctctataacatggtaatttactttttcaaggccagtagggaaagcacttctcttgcttcaaatctctcatgccagtctgttaaggagtcttaactaatataatattatcacaggaatatttgcacacaatagaatctaactaaggaggtgactatcatattcgcagtccctgctcacactcactttattattttagcatgtagttcatcaggaaataatgcaaaagatatgagtattagaagatggatagaattttgttagaggaagaggaaagggaaaaaatgtcaagcaagagaacaatataaggtattagatgtttgttgtagggctgagagaagaatgmagttggcatattaaagctgcaagccaaatgaagtagggtgtttatatggaagatcatgagaagcacaactataattggagattgcagtctgatcccgagagcttttactactatcccaagaaatatgctctccaacagaaagtcagataggaaatgatgtatggattttcagtagagagaatgatacaacaaaaatatattttagggtgataagataagacaaa

SEQ ID NO: 325746 - DNA, 624 bp, Homo sapiens
tctagaggccgatctcacattctagaggccaccctcggtttcctgccacatagtcctctctataacatggtaatttactttttcaaggccagtagggaaagcacttctcttgcttcaaatctctcatgccagtctgttaaggagtcttaactaatataatattatcacaggaatatttgcacacaatagaatctaactaaggaggtgactatcatattcgcagtccctgctcacactcactttattattttagcatgtagttcatcaggaaataatgcaaaagatatgagtattagaagatggatagaattttgttagaggaagaggaaagggaaaaaatgtcaagcaagagaacaatataaggtattagatgtttgttgtagggctgagagaagaatgcagttggcatattaaagctgcaagccaaatgaagtagggtgtttatatggaagatcatgagaagcacaaytataattggagattgcagtctgatcccgagagcttttactactatcccaagaaatatgctctccaacagaaagtcagataggaaatgatgtatggattttcagtagagagaatgatacaacaaaaatatattttagggtgataagataagacaaa

SEQ ID NO: 325747 - DNA, 629 bp, Homo sapiens
gcataaagaaatatttacttactaaattgagattaaaaataaagataattatcctaataatttaattttaaaattgtttttaaaaatagacatattaaaatgtatgtctttatcatgtacaatatgatgcctgaagtataaaatattgtggaatggttcaatcgagctaactaacaaatgtgttagcacacctagtttttttgtggtgagaacacttaaaagtcattctcagaatttttttaagaatacagtacattaactacagtcatcctgctatacaatagatcactggaacttactcctgctatctaactgtaaatatgtattctttgaccaacatctccccaacccccaattacttcagcctctggaaaccaccattctattctctattctgtgaggtcagcttttttagattccacatgagtgagatcttrcggtatttgtctttctgtacctagcttatttcacttaacacaatgtcctccagactcatccatgtcattgcaaatggcagaattttccccttttttggctaaacagtattatattatgtatatacgccacattttttaaatccatttatctgctggtggacacttgagttgcttccatatcttggctattgt

SEQ ID NO: 325748 - DNA, 557 bp, Homo sapiens
tttgcaccatgtgggatgtccccaacacctgctttcattgagtggggaaactgctgccaggagattgtccggtatctcaggaaaattggacagtttcttctctaggrgtggtgaagccctttgtagcatattgttcagtggggcgacttcattaatcaccattgtcctgagcagtgtgtctgatcgccactcctagcaaaggagaaaacaaatgctatgggagtttccttgtaggtacagttttgcccagttcttgtgacatattcttatgaaaaaacatttacaaaggtaagcttctatacatgtttaaggcaattaaattatctccacattttacttttttgtctcttaatttatcctggcaattttctccttacttaacttggatagagatctcatcttcaactgaataacgaattacctcaaatactacaaaagactgcaaaatattataaacatttataactcatttgtattacacacctttatttatgggaatatatttaataaacatccaacacataagagaatcttttacttatttctgtacaagatat

SEQ ID NO: 325749 - DNA, 586 bp, Homo sapiens
cacctgttagggtggctattacaaaacaaaaatcaaaagataacaagtrttggagaagatgttgagaaattggaactcttgtacactgttggtaggaatgtaaaatggggtacagctgctatggaaaataggacagagattcctcaaacaattaaattagaactactatgtaatctaggaatcatacttctgggtatatatctaaaagaattgaaatgagaactttgaagagatatctgtaccttctgattcactgcaacagtattcataatagccaagatatggaaataacctaaatgtccatcaacacacgaatgaataaagaaaatgtggtatacacatacaaaggaatattagtcagcctttaaaaagaaggaatcatgtcatatgtgacagcatggataaagctggaggacataagctctgtgaaataagccagtcacaggaggacaagtactgcctgatttcacttatacagggtatctaaaatagttaaactcatggaaacagagagtagaatggtgtttgccagggactgggagggaaagaaaaatagggagtagttgttcagcaagtatatagtttc

SEQ ID NO: 325750 - DNA, 617 bp, Homo sapiens
actcttggccaggtgcagtggctcacacctgtagtcccagcactctgggagcccaaggcaggtggatcacttsagcccaggagtttgagaccagcctggccaacatggcaaaacttcatctctgctaaaaatacagaaaaattagacaagcgtggtggcatgtgcctgtagtcccagctactcatgaggctgagatgggagaatcacctgaagtcaaggctgcaatgagctgtgatcatgatcatgccactccagtctgggtgatgggagtgagacccagtctcagaaaaataaaaaataaataaaaatttaaaaaccaactcttcattttgatattttccattattttcctagtctctatttcatttatttctgctctaatctttattattgctttccttctactaaatttgggcttagttttgtcttatttttctagctccttaaaatataatgttagattggttgagagccttctttttgatatagctgtttattactataaacttccctctgagaattgcttttgctatatcctatgggctttgttgtggtatatttcaatttttatttgtctcaataaattttataatttccatgtatttgtgacttttcca

SEQ ID NO: 325751 - DNA, 617 bp, Homo sapiens
actcttggccaggtgcagtggctcacacctgtagtcccagcactctgggagcccaaggcaggtggatcacttcagcccaggagtttgagaccagcctggccaacatggcaaaacttcatctctgctaaaaatacagaaaaattagacaagcgtggtggcatgtgcctgtagtcccagctactcatgaggctgagatgggagaatcacctgaagtcaaggctgcaatgagctgtgatcatgatcatgccactccagtctgggtgatgggagtgagacccagtctcagaaaaataaaaaataaataaaaatttaaaaaccaactcttcattttgatattttccattattttcctagtctctatttcatttatttctgctctaatctttattattkctttccttctactaaatttgggcttagttttgtcttatttttctagctccttaaaatataatgttagattggttgagagccttctttttgatatagctgtttattactataaacttccctctgagaattgcttttgctatatcctatgggctttgttgtggtatatttcaatttttatttgtctcaataaattttataatttccatgtatttgtgacttttcca

SEQ ID NO: 325752 - DNA, 593 bp, Homo sapiens
ccagttagcatgtgaaaatatccggcaacagtgtgtttttacttctgtgataaactgtattgtctttttgttataatgggaaaggattagtaaagcttaccaaataaacagcagcttccttagagacattgacccttgtattttacaaaaccaagaaaccaatactgaatagaatatggggctctctggcagactaacggagggcaaccttcaaggatctgagtcagatgaggatttgggctagtgatacattttgatactttctattttaagcaccccaaaagctagatgcttatacacagctaatccaattttttctaaaaatctgtagtctgcaaaattgtgttcctttagaactttttgcctgtttttggcctggaaatgataatatttaaataatacatcttgaaatgcrgaggtccacccaaaggaaaaataacataaaagaaagtgaaccagacactttcaggcctcaaaaaaggtcttactcggcttagcgagtgctttgggtgaaggctcagagggtcggggggccaaaacaagcctggtatttttcaaacaaaaattttactgtatattgtacaagtaaagga

SEQ ID NO: 325753 - DNA, 555 bp, Homo sapiens
tacaagtaaaggaaatgagaagagataaaagcacacgcagtttagaatttaactttttggggtggaaacttgaaagcacttaagaagtggaatctagacattttcaaatacacgtcagctcttgtgctgtctgagcttacattacctgtttgaattaagatcaagacctggrttaccaaatagtaatgcccttttcagcaaagtccacatttgaatcagcttttctgtatcactctcttgagtagcctgctttcttgaacactgaagtctggtctgagctcctgaaatcaacatctcaatgcattaatccagaaaacctataattgatgccgacacagggttatcatcaggtgataagccttccaccttactttcttccatctttcataatgaggaagttcttgcttccaagataattaaaggacggctgatttataagtgggtttgctatgccacttttttctttatatggtttcttttcagtttctcttctgttaataactggcttaacacttttatataataaaaaggtcagataggctccacacaaagcac

SEQ ID NO: 325754 - DNA, 624 bp, Homo sapiens
aaggagtgataaaaggaaaatacatgtaagcaaaaatgagaaggtaaaaagtgaattattaaggaaagaagatgatacatacaaggacagattaatgaatgaaaaaaatcatataccttctaagcctgcaaatatgaattttgctaaccttggatgccataaataggaattccaacaacctcaacagtccaaattggcgatttcacttagtcatttttttctacagtaycaaaatagcaatttattcggacctaatagaagatcttgctgatgtagtagttgagcttggtaggtggtattcttctggtaagacatgaagattatcctagatgagtagtaaagcatcttctagaaatgtccagaccagagagagaccttagaaacaaagggagtcactatcactctccattgttttggccttgaattcaacttctctatcaccaaaaatgattggactcgaggccctatttcagggactgagtttagtcagaatgttttctcaattagcaaaaaatgcagtgtctgacagctagtcccttgcagactacacacctcaacagcgtgatttaaaggcaaaagaaagttccaaccaccaaaagtattcctcactggttctgccatgat

SEQ ID NO: 325755 - DNA, 599 bp, Homo sapiens
caataattttatagaatctgcagttccacaaaaatgttttagtaaatagtgtgaaacatgagaggaaatggtaatttttaattttcttcttctttactagaggggctgaattactcatggcgtcccaaatctctcttaatgcatagtatgaggtctgtagttgttaagactgactcaacattttcttaaaagaattctgaattgaatctttctgaagaagaaaaaaaaaagatcacttaccatttcattatttttcatcctcattcacctctgaacttcctggttctgtctggggccaaagtaaaaatgccaaaacaccacgggaaaggctgctctcacagtatttctggctcaccaaaaatttytggagaaagccagtttccatgagatttcagttccaattttatagacccaagaaaactcaagatagttcagataaagttcagataagcattcaaatttttcagttactgatgccagaagaaccactaagtcatttgacatgttcacatcactgttttaggacagaaaaaaaaaacaactagaattctgatccaatgtgaacaattttagaggagtacaatgtactgagaagccat

SEQ ID NO: 325756 - DNA, 622 bp, Homo sapiens
caatacccatatttagaaaggagcaaattcctccaaaagaaaatatacctagttaatatgctataaaaatatcaagtctgaatcttagcactcagtagactgaaaattactcaaaagtaagggattagagaaacaaaaagtcttggcaaatatacacgtagaggtgtcccacccatatttaaatcattagttatcttttaatatggtacctactatttgtttaatgtcactaagtatgaggtactatcctaggcattgtacatgtgttttatcacttaatgtactttaatctaaacrgtgcaagagcaacttcaatacaggtattagtattacccctatttacagataagaaatggagactgagaagaatgaagttaacctatatgtgtgcatacatctcgcaaaaaatagaactgacttttaatctaggtctgtttgacttaaaagtctatttacttttcactatgaagtttgttctaaatgagaataatgtactttatcaccctataaatattataacagtaaacattgaagtggtataaactacaatggaagttatctaagccagaaattattgtataatttaacactaactcactttttaaaattttatatttgcact

SEQ ID NO: 325757 - DNA, 585 bp, Homo sapiens
ccttttggtgcccttgttgaaaataagttggccatctaagttttgatatatttctgggctctatattatgttccattggtctatgtttctgcttttatgctagtgccatgctgttctgattactgtagctttgtaacatacagaaagtgtgatgcctgtgactttttctctctcagtattgctttgggatttttttgtggttccatacaaattttaggattgttttttctatttctgtgaagaattgccattagaattttgatagggatttgctttccttttttaaaaaatagatttgggagttacaggtgcagatttcttacagggatatattgtgtagtggtgaagtctgggcttttagcctacccatcaactgaacattgtacctagtaggtagtttttcaaccctcacccacctcccaccttcccctcttttggagttcccggtgtctgatatatatayacacacacacacacacacacacatatatatatatatatatatatatatatatattttatgctttaagttctagggtacatatgcacaacgtgcaagtttgttacatatgtatacatgtacca

SEQ ID NO: 325758 - DNA, 585 bp, Homo sapiens
ccttttggtgcccttgttgaaaataagttggccatctaagttttgatatatttctgggctctatattatgttccattggtctatgtttctgcttttatgctagtgccatgctgttctgattactgtagctttgtaacatacagaaagtgtgatgcctgtgactttttctctctcagtattgctttgggatttttttgtggttccatacaaattttaggattgttttttctatttctgtgaagaattgccattagaattttgatagggatttgctttccttttttaaaaaatagatttgggagttacaggtgcagatttcttacagggatatattgtgtagtggtgaagtctgggcttttagcctacccatcaactgaacattgtacctagtaggtagtttttcaaccctcacccacctcccaccttcccctcttttggagttcccggtgtctgatatatatatacacacacacacacacacacayatatatatatatatatatatatatatatatattttatgctttaagttctagggtacatatgcacaacgtgcaagtttgttacatatgtatacatgtacca

SEQ ID NO: 325759 - DNA, 574 bp, Homo sapiens
tctctgcaagctgagaacaatatgtgatatggtttggctctgtgtccccacccaaatctcatgtcaaattgtaatactcagtgttggaggaggggcctggtgggatgtgattggatcttgggggcagattcccccttgctgttctcgtgatagtgagttctcatgagatctggttgtttaaaagtgtgtagcacttccctctttgctctctctctcctgctgcaccatgtgaagatgtgcctgcttccccttcaccttccaccatgattgtaagtttcctgaggcctccctagccatgcttcctgtatagcctgtggaaccrtgagtcaactaaacctcttttcttcataaattaccgagttgcatgtagttccttatagcaatgctagaacggactaatacaacatgttttaccattgttttcatacaatgctttggggatatatgaagatgcagggaaatgtcatggtagaagtaatagcacaattttttgaaaagcttgggttagtaagactcattacaaatattctggatccatttttggctaaatgaagaggaaaattttaccaactga

SEQ ID NO: 325760 - DNA, 574 bp, Homo sapiens
tctctgcaagctgagaacaatatgtgatatggtttggctctgtgtccccacccaaatctcatgtcaaattgtaatactcagtgttggaggaggggcctggtgggatgtgattggatcttgggggcagattcccccttgctgttctcgtgatagtgagttctcatgagatctggttgtttaaaagtgtgtagcacttccctctttgctctctctctcctgctgcaccatgtgaagatgtgcctgcttccccttcaccttccaccatgattgtaagtttcctgaggcctccctagccatgcttcctgtatagcctgtggaaccatgagtcaactaaacctcttttcttcataaattaccgagttgcatgtagttccttatagcaatgctagaacggactaatacaacatgttttaccattgttttcatacaatgctttggggatatatgaagatgcagggaaatgtcatggyagaagtaatagcacaattttttgaaaagcttgggttagtaagactcattacaaatattctggatccatttttggctaaatgaagaggaaaattttaccaactga

SEQ ID NO: 325761 - DNA, 615 bp, Homo sapiens
tagactcctgcttactttgatgctgtttttaagggtaccttcaaataagggccaaatttaataataatataaattacaagtyaaacaaataactcaattttcctttcttctagtctagatgtaattttcctaattgtttttggtgctaaatcctcccaaaataatcaggtcatctgaatctacagagaaaaactgaaatgcaattaaattagaaaatgcatataaaaaatctttgcaaagaattaggaaattttaaaatattatcaaaatacaatttcaacaaaaaccaacttcccaagacacgtttataaatttctctaagattgatgtcaaggggatagcagaactctccttcctccattagctccttggagcaggcacagtatgcattcattttgaacagtttgcctgtggaggcaagagcttcacaaggtactgacatgggagacttgcgctaacattaaataaaatttacaggggccattggtttgggctgagctcctgcattaggcccaacaaaccaaagtaaactggagttactgatgctgaagttccacaccatcaagccaaaactaagctgtttatctgatcttctgaaaaaccaggagagagaga

SEQ ID NO: 325762 - DNA, 485 bp, Homo sapiens
gtcctttccccattgtattttcttggcaactttgtcataaatcagttggccataggtgcctggattcatttctgggatctctttgctgttccattggtccatgtgtccatttttatgccagcgtgttatgctgttttkgttacagtagctttggagtgtattttgaaatcgggtagtgtgatggctccagatttgttacttttcctcaagattactttgacccttcagggtcttgtgtggatctgtacaaattttaggattgttttttctattttttcaaagaatgccattttgataggaactgcattgaatctgtaaattgatttgagtactatggacattttaacaatattaattcttccagtttatgaacacggtatatctttccatgtataagtgtgttcttcaatttctttcatcagtgttttattggtttcagtgtggagagatagttcacttccttggatacatttatgttctaagta

SEQ ID NO: 325763 - DNA, 485 bp, Homo sapiens
gtcctttccccattgtattttcttggcaactttgtcataaatcagttggccataggtgcctggattcatttctgggatctctttgctgttccattggtccatgtgtccatttttatgccagcgtgttatgctgtttttgttacagtagctttggagtgtattttgaaatcgggtagtgtgatggctccagatttgttacttttcctcaagaytactttgacccttcagggtcttgtgtggatctgtacaaattttaggattgttttttctattttttcaaagaatgccattttgataggaactgcattgaatctgtaaattgatttgagtactatggacattttaacaatattaattcttccagtttatgaacacggtatatctttccatgtataagtgtgttcttcaatttctttcatcagtgttttattggtttcagtgtggagagatagttcacttccttggatacatttatgttctaagta

SEQ ID NO: 325764 - DNA, 485 bp, Homo sapiens
gtcctttccccattgtattttcttggcaactttgtcataaatcagttggccataggtgcctggattcatttctgggatctctttgctgttccattggtccatgtgtccatttttatgccagcgtgttatgctgtttttgttacagtagctttggagtgtattttgaaatcgggtagtgtgatggctccagatttgttacttttcctcaagattactttgacccttcagggtcttgtgtggatctgtacaaattttaggattgttttttctattttttcaaagaatgccattttgataggaactgcattgaatctgtaaattgatttgagtactatggacattttaacartattaattcttccagtttatgaacacggtatatctttccatgtataagtgtgttcttcaatttctttcatcagtgttttattggtttcagtgtggagagatagttcacttccttggatacatttatgttctaagta

SEQ ID NO: 325765 - DNA, 485 bp, Homo sapiens
gtcctttccccattgtattttcttggcaactttgtcataaatcagttggccataggtgcctggattcatttctgggatctctttgctgttccattggtccatgtgtccatttttatgccagcgtgttatgctgtttttgttacagtagctttggagtgtattttgaaatcgggtagtgtgatggctccagatttgttacttttcctcaagattactttgacccttcagggtcttgtgtggatctgtacaaattttaggattgttttttctattttttcaaagaatgccattttgataggaactgcattgaatctgtaaattgatttgagtactatggacattttaacaayattaattcttccagtttatgaacacggtatatctttccatgtataagtgtgttcttcaatttctttcatcagtgttttattggtttcagtgtggagagatagttcacttccttggatacatttatgttctaagta

SEQ ID NO: 325766 - DNA, 525 bp, Homo sapiens
aaggtctaatttcattcctctgcatatagatgtctagttttcccagcactatttattgaagagattgtcctttccccattgtattttcttggcaactttgtcataaatcagttggccataggtgcctggattcatttctgggatctctttgctgttccattggtccatgtgtccatttttatgccagcgtgttatgctgtttttgttacagtagctttggagtgtattttgaaatcgggtagtgtgatggctccagatttgttacttttcctcaagattactttgacccttcagggtcttgtgtggatctgtacaaattttaggattgttttttctattttttcaaagaatgccattttgataggaactgcattgaatctgtaaattgatttgagtactatggacattttaacaatattaattcttccagtttatgaacacggtatatctttccatgtataagtgtgttcttcaatttctttcatcagtgttttattgktttcagtgtggagagatagttcactt

SEQ ID NO: 325767 - DNA, 563 bp, Homo sapiens
tgaattgtgccaattatacttcccagagcaatgttgcacctcggcaaggggacatttgctcacgcatttataaagttacatgatgtggaataaattgagagaaataggaaagagaagcagttatgcctgagaagactgccaaatatcttggcaccaaagaattctgcttgatttccttcgtggagcttattcaacttggctttctctcagtttaatttggaattaattttctatggcattgacctttgacagtttctgaccttagacacacacragtagttgaatctattgctactttgaagcaattgccacctaattttggtaaatgcgctgaaaactcatatctttttatatgaaattgagattatacatataccatggacatctctaatatgagctaatatcaagataccttcaattactgtcataatttgagagattctggctttcatagaaccttgagcaagaacattatttccaaacatcatatttcttagatataaaatggggataataataacaataatctctaaagttaatgatgaaagtggctggttggcttt

SEQ ID NO: 325768 - DNA, 533 bp, Homo sapiens
aaaaggaaaagtttgggcagagctcaagagggcattactagccctttctttctcctttactcatggagtatagtaatgtggacagttaatttgtttctctggtttctacacaattgtggtgcaggatctcttccatcaagagatgtggaatgaatgactttttcttgtctgaaaaaatctcagctccaaaccacaagttagtgctgatgttaccgggatgagaagtagggaaaaggtagcagagctcctgtagccagtgtacatagccatgcattgaaatggcatgaattcgtgagatcctgtggatggagggtgcccaaggcagctggggcttgaggcatcttgctgatacctcaatagagctgtccataggaacagtragaataacctagcagcaagcctgtggggtggagggggaagaagatacttgtaacatcaaatgtatcgggggagccctagtggagtccctccagaatcatttatgaatagagcttgtgaaaggaaaataaatcttggaaaacttggggccccaa

SEQ ID NO: 325769 - DNA, 521 bp, Homo sapiens
gatcatattgtgggtttctgttgttgttgttgtttgttccagcctttttctcatcagatttgaccaactctaactgacttggtcagatctaagtgagaattccaaattgtgggtaagaaaacctctctaatttggccaaaattccttgcagttgcaaacaaggaaaacaaaaacaaaaaacaaaagaaacccatgcacttggtttctgtgtttgcttcctgtcttaaaaaaaaaaaaaaagttcttttgtttacttttcttccaccctacctccttccgtttttgccatctgcagtacaaaaacaaacagacaaacaaaaactagagaaggcttctaatgacttgaacacctttaaagarttcagaacaaaggtgccactcaccccttttggggtgttttgtcttctttgtgaagtttcaagagtcatgggcagattcttcttaggtctaaagctctgttttcctgtattgcatgacctgatctccttggctttgggggtaccagaaatcaccttgtactg

SEQ ID NO: 325770 - DNA, 570 bp, Homo sapiens
cttctgggtctaaaaaggacaccaagtcttgcgaaatcttcaacactgacagtaattaaagcttcatctttaggccatgtagaagatgccaatcaaaataaattagattcctgagacacatggtcagaaattaaatctattcaactcctcaaggcccagggactattgcagaatatgtgggaatgtcaaattttaagggccaattttgagagataaaataagtttagtttatctataattaaataaattaaccattaatgtcaaaggcacactgatgcaagaccagcatatgcacccctgtttcagattaacaaggttttcttgaagcattaattgactccttaataaaggttataaaggttataaaaggtatattatagawgttataaagattaaaattttacagattgtttataaaattttggaatacaaatctaattgactttatgctgttttcattagggcttattaattggaaaattaattctcctctctaaaaaatgaaggttttcacctttttttgaaatctttgagttatcactttgtttaaataaatgacttgacaatgac

SEQ ID NO: 325771 - DNA, 502 bp, Homo sapiens
gatgcaagaccagcatatgcacccctgtttcagattaacaaggttttcttgaagcattaattgactccttaataaaggttataaaggttataaaaggtatattatagatgttataaagattaaaattttacagattgtttataaaattttggaatacaaatctaattgactttatgctgttttcattagggcttattaattggaaaattaattctcctctctaaaaaatgaaggttttcacctttttttgaaatctttgagttatcacttygtttaaataaatgacttgacaatgacctgtgatcctattttatgatgtcaaatgttttaaacctttgatatttgacaaactttccaaaatcatattataaattatgtctttgtctcacctaattaattttgagatatcggctttcctaaagtccaaaaatgacctatttggcttatttggtataaaaattatacaggaagcattgtcaaatatgaaatggtgttttgtttt

SEQ ID NO: 325772 - DNA, 605 bp, Homo sapiens
accaaacctgcagtatcttcaaggtatgcctatataatgaatgattttgtttatatataattcttacaatgacaaaattataaatgtggagaacagttaagccattgccatatgttaagaatttgtggttatgaaagggcaacacaagggatccagtatttgactgtggtggttaataaatgaatacacacatatgataaaattgtatagaactgtatacatatacacacacatgcatatgcacaagtgaaagtaaaattgggtaaatctgaataaaacatgtgtcttgtctaagtatcaatatcctgcttstgatatttatactctagttctataacctgttaccattagaagaaactgggtgaaggatacacaactacatgtaaatctgtattatctcaaaacaaaaagtttaattaaaaaaactaactccacacatcctgtactagtttttagggatgccataatgaataccacagactgggtgggcttaaataacagaaagttattttcttacaattctggagactagaaatccaagattatgttgtcggcaggtttggtgtctggtgaggcctctcttccttggcttgcagattgcagag

SEQ ID NO: 325773 - DNA, 605 bp, Homo sapiens
accaaacctgcagtatcttcaaggtatgcctatataatgaatgattttgtttatatataattcttacaatgacaaaattataaatgtggagaacagttaagccattgccatatgttaagaatttgtggttatgaaagggcaacacaagggatccagtatttgactgtggtggttaataaatgaatacacacatatgataaaattgtatagaactgtatacatatacacacacatgcatatgcacaagtgaaagtaaaattgggtaaatctgaataaaacatgtgtcttgtctaagtatcaatatcctgcttgtgatatttatactctagttctataacctgttaccattagaagaaactgggtgaaggatacacaactacatgtaaatctgtattatctcaaaacaaaaagtttaattaaaaaaactaactccacacatcctgtactagtttttagggatgccataatgaataccacagactgggtgggcttaaataacagaaagttattttcttacarttctggagactagaaatccaagattatgttgtcggcaggtttggtgtctggtgaggcctctcttccttggcttgcagattgcagag

SEQ ID NO: 325774 - DNA, 653 bp, Homo sapiens
tataaacttctgaggctgaaaaatgtataaagaaatgttgcaggaactgctccttcagccgaagtgagagtcaataatctctgaccatgtctatgacctggttggagagctgaatgggttggaatgtgactgcacagagtaagtacatgacggcatgtttgtctcttgtttgggctgaaaagaagagattgaacattgtcatctgacataactgggaggacaagagaatgaagataacccccatggaatgtaatctgatcccagtggtgaaataggtttccatagttattttcatgaaaaaccactgaggtatgggaacacagcagaactgytcatatacagtgacaaagcataaaacagagcagtgaagatgagaattctttctccttgtgcacagcacttccttctcctagataccacgaaaactcagtctggtacatcttggtacagtctgaagtagctgcaccagagcaacagcagagaccctggtgctcagcaggagatggtacattcccagtggacacagcagtatccagtgtcagcctggtgggagatagtaaatgtcccttgtgaagccagcttgtaggtacatgtggatcaaccctgtctactactagaaatgtttgaaagacaattcccagggcactgagtta

SEQ ID NO: 325775 - DNA, 653 bp, Homo sapiens
tataaacttctgaggctgaaaaatgtataaagaaatgttgcaggaactgctccttcagccgaagtgagagtcaataatctctgaccatgtctatgacctggttggagagctgaatgggttggaatgtgactgcacagagtaagtacatgacggcatgtttgtctcttgtttgggctgaaaagaagagattgaacattgtcatctgacataactgggaggacaagagaatgaagataacccccatggaatgtaatctgatcccagtggtgaaataggtttccatagttattttcatgaaaaaccactgaggtatgggaacacagcagaactgctcatatacagtgacaaagcataaaacagagcagtgaagatgagaattctytctccttgtgcacagcacttccttctcctagataccacgaaaactcagtctggtacatcttggtacagtctgaagtagctgcaccagagcaacagcagagaccctggtgctcagcaggagatggtacattcccagtggacacagcagtatccagtgtcagcctggtgggagatagtaaatgtcccttgtgaagccagcttgtaggtacatgtggatcaaccctgtctactactagaaatgtttgaaagacaattcccagggcactgagtta

SEQ ID NO: 325776 - DNA, 579 bp, Homo sapiens
tacttatcaatactaatattgaatgtaaatggactaaactcttcaatcaaaagacatagagtggccaaatagattttaaaacaaaacaaaacaaaaaaamcaagattcagtgagttgttgcctataggaaacacatttcaccaataggccgggtgcagtgactcacacctgtaatcccagaactttgggaggccaaggcaggcagatcaagaggtcaggagttcgagaccagcctggccaatatggtgaaactccgtctctactaaaaatacaaaaaaaaatagctgggcgtggtggtgcacacctgtagtccagctacttgggaggctgaggcagaagaatcacttgaacctgggaggcggaggttgcagtgagccaagattgcagtactgcactacagcctgggtgacagagtgagactctgtctcaaaaaaaaaaaaaaaaaaagaaaagaaaaagaaacacatttacacatttcacctataaagacacaaaaagactgaaaataaggggatgaaaaaagatattacatgtcagtggaaaccaaaaagagtaggagttatgatacttacatcaggc

SEQ ID NO: 325777 - DNA, 582 bp, Homo sapiens
taatcgttttaggaccaactacaattttctacataggctgtatatcttgttctagttcctctctctaaaatgtattggcttgatgagtagactgaattcatttaaactgtagttattttattgtttttatttgtttggtacatcagttttttttcatcaactggatttccttttcctctacaacacggtgataggatgaaaaaaataagacgtttatagtgcacaataatcttagataaaaatgtaagtaaaaatctgtcaaaactgattaactatcataagcttttggcatatttgaaacactattgagaagaarcatttgaagttcctaaggtcagaccctggccagatgataaaattatagataggagctattttcccatatctatgagtagaatatgaataactcataaacaggagcctctcctttaaagaattttattattggcattcttttatttaaaaagtagacacttaggggtgtccccttaaaagtactaaaatcttccatctgtggaaagtttagtagtactatttggaaataatttttcttaactaaagaaattaaatatatatatatat

SEQ ID NO: 325778 - DNA, 582 bp, Homo sapiens
taatcgttttaggaccaactacaattttctacataggctgtatatcttgttctagttcctctctctaaaatgtattggcttgatgagtagactgaattcatttaaactgtagttattttattgtttttatttgtttggtacatcagttttttttcatcaactggatttccttttcctctacaacacggtgataggatgaaaaaaataagacgtttatagtgcacaataatcttagataaaaatgtaagtaaaaatctgtcaaaactgattaactatcataagcttttggcatatttgaaacactattgagaagaagmatttgaagttcctaaggtcagaccctggccagatgataaaattatagataggagctattttcccatatctatgagtagaatatgaataactcataaacaggagcctctcctttaaagaattttattattggcattcttttatttaaaaagtagacacttaggggtgtccccttaaaagtactaaaatcttccatctgtggaaagtttagtagtactatttggaaataatttttcttaactaaagaaattaaatatatatatatat

SEQ ID NO: 325779 - DNA, 582 bp, Homo sapiens
taatcgttttaggaccaactacaattttctacataggctgtatatcttgttctagttcctctctctaaaatgtattggcttgatgagtagactgaattcatttaaactgtagttattttattgtttttatttgtttggtacatcagttttttttcatcaactggatttccttttcctctacaacacggtgataggatgaaaaaaataagacgtttatagtgcacaataatcttagataaaaatgtaagtaaaaatctgtcaaaactgattaactatcataagcttttggcatatttgaaacactattgagaagaagcatttgaagttcctaaggtcagaccctggccagatgataaaattatagataggagctattttcccatatctatgagtagaatatgaataactcataaacaggagcctctcctttaaagaattttattattggcattcttttattwaaaaagtagacacttaggggtgtccccttaaaagtactaaaatcttccatctgtggaaagtttagtagtactatttggaaataatttttcttaactaaagaaattaaatatatatatatat

SEQ ID NO: 325780 - DNA, 583 bp, Homo sapiens
gccacaagccaaggaatgactggagccaccagaatctgaaagagacaaggaaaatgtttccatagagcctttagagggatgtggcccagctgacagcttgattttgacttcttgcctgtagaactacagtaggatacattcttgtggctttaagccactaattttgtgatactttcttacatcatccctaggaaagtaatacagactgcagtaaaaatacaccttggtagcagcaatgccaggactcattccgaaacaatctggaagtgatgcagatccctggccttgggaggacacctgagttggctccagtagtgaggcaggcccttacttggtctggcctatcgcacataagaaagtgctgaggtgattcttggacctctcaggagacggcatcgytaaggcaataaaagacaggagttcttgtcaacatggaaaggtggttactaaagcagtgacaataacaaagctggacaataatagctagtgcttactcatgtgaggcactattctaagcacttaacgtatattaatccacccattctctacaacaaatttcttaagtaggtagtaaaaatactcc

SEQ ID NO: 325781 - DNA, 599 bp, Homo sapiens
actgtagtgaaaagtaatttaattgtatatttttaaataactaaaaaatgggatcagattgtttgtaaagcaaggataaatgcttgagggcacggataccccatttaccttgatgtaattattacccattgcatgtatgtatcataatgtctcatgtaccccataaatatatccaactactatgtacccataaaaattaaacataaaaaataaaataaaataagtacctttttggagttaatatattacaatatatataaaatatctggaatattartctcccaaatattaatggtgattataccattgtgatgtgattacaagtaatttttcatggtttgtttgtttctattttctaactttcttctttaatacatttgtattacatgtattatgaaaacatttttaacgtaaaaatatgtgggcaaaaatgcgagttccgttcattgcctatgactcacatctaatgtatgtttaaaagatgggtcagggaaaatgtcaagtgccaagctgtgtttattttgcaataaaataaagggacataagtaggaaatgaatagaacaactacacctaagaactcctcaaatatttgaaaaac

SEQ ID NO: 325782 - DNA, 576 bp, Homo sapiens
ttttgagttttacttgagttgtagtttcacaagagtctgctttataattattctttaaattatgcatgtatgttttatgctgtcttctgtgggtatatctcatgaacaagtaattccaggaagagaaaaaaatcaacatccagcgaacccataaaaagattcctaacttaacatataataatgaaaaagaaaattaaatgagatgcggttttacactcactagactggcaaaactaaaaagtattgtgcgaatgtagagaaaggtgatggtgagtgtaaattcacataaacattttggaaaaagatttggtatctagaaaagttggtgctyataccccttgactcaacaacttcaccattaggtacatgtagaggaattctggtacatatgcaggaggtacacacaaaaaagtttatagtactatttctttttacaacagcaaaatattgtaaaaataaattgaaatgttctgtaataggagcatggataatcctagctagctcctctctgtaattatgaaaattaatgaattactattatatgcattaacatagattaatcacacacataatatg

SEQ ID NO: 325783 - DNA, 583 bp, Homo sapiens
tggcactcaaaccatgagtcacagtccttcccacgctttcctcccttttcccctggcagagaggcctcaccccatggttaccacccccacagacccaacagaatactgccaggctactgcagatgttccattaaggcctaggggctttttagtcagcgtatggtgaatgctgcctggcccagaactcaacattcagagcagtgggatcccctctggcctaggataggtccagaaaagccaagggctggaattgaggatcccaggagcccacttggtgctttacacccctgtggctgaactggtacctaaggtgcaagacaaagtcctctttactttttcttctgcttttctcacgcaaaaaagtttcatgtgaagccagcaagtctcagattctctctcagggcccacagtgtcctacctggataccrctgctggttattcagggcacaagggctctttagtaagcaagtaatggatcctgacaggactgggctttttcacttgaaggcagcaggtttccttttggcacagggtatgtctagaaatgtcatctgggagctagggcctggaaagggggcctcac

SEQ ID NO: 325784 - DNA, 590 bp, Homo sapiens
ctcctctcagtctctccaccctggtgagtcttccatcccttcctctagaaaagaaagctcaagtctgcatatgcggtggatgcctccaagcagatatgactgctgttttgaatacttctttaggtttctgacccctttatattttggcctgttgattctttactgtcttcttggctctaccatgcttttaagaagatatttccattttccccagcattttttagttttttttttgcaggggggagtaycaattgaatacctaacctactatattgaagaaaacagaaatctgtttagcttttctagcacaaccttttatttttatagaattaatcattgtcttttatcctccttagctttctaccaacttgctactaatatatctgcaaactcttctcatgcaaatctcttctccctaagttcaaatgcattaggtagtctatgtatttcttaaagaaatcactctcaaaccctttggaactgctctaattttgatgaattgatctctagtcctgctatacaacttggcatctctcttcaccattgtcctggagattacttttgtctcttttgtgctggatcccatttct

SEQ ID NO: 325785 - DNA, 470 bp, Homo sapiens
aaactgcattcttgagacacagggccagaaattaaagttattcaactcctcaaggcctagggactatcgtggaagaggtagacatgtgagattgtaaaggccaattttaagagataaaataagttcagtttctctataaattaatcatcaatgtcaaaggtacactaatgcaagaccagcatatgggcccctgtgtcagattaacaaggttttcttgaggyattaaccaactcctgaataaaggttataaaaggcttatggaagttatattttatggtaaagattaaaattttatagagtgttcattaaattttgaaaaacaaatttaattggcttcatgctgtttttattagggcttattgtttggaaaattaagtctcctctctcaaagaatgaaggttttacctttttcttttttaaaaatccttgagatattactttgattaaatgaaattacttattttacagtg

SEQ ID NO: 325786 - DNA, 594 bp, Homo sapiens
tttaacaattgagtaaaatatactcctatgaacacaatttggagcatattcatttctttcttccttatttctacagaatttggaaactatttgtgagtattcttaacttatgacaatacagttatttgcataagtgcaataagaatctgttttcatttgtaacacgtcacagttaaagaaactggttattttaccaaggctttggctggaatggtgtgctttcctttaaggaataaaacttgttttatggagccaataaaagtcccttggaaatactggtctcatacctttgtctacacagtccccatacagggtttctgacttgyggtaagtaaagaatgtcactttctgacaggcccaggagccctaagtttatcttaaaccctcaagaggagaggaattcacctaactcataggtatttgatggtacaaatctatggctgggcttggctttaaaaaagtcttatctgaaattccttctatggaacaaagttccatcaaagccaatttaaaaggctatgtaaaaaataattattctggctgcactgtatacaaataatcaggccaagtataataaagcaaaccagtcctacc

SEQ ID NO: 325787 - DNA, 563 bp, Homo sapiens
tgattttgttgttggtggttaattaccgcactttgtccatcttctggatgttaattaatacccacagttaaatttccacagctgtcttcaattttgtgtacaatatcttttgtttttataatttaactattaaaatgaaattcttaatttcctgaaaccaagtaaatataaacctgaaaagacaagcaaagagattatttgcttagagaacagrtaattagctcatgcaggaggggtcctctctttctcgttttttcctttaatccctgtagagtagctgtttggtgttgcatagcttgacattgtatatgatatagtcattatattttaaaacctcatctgttcagaaagattatgttggagtaaccctatgacatttacaaaattgtgttcaactccagtggcatttgtcattaacaattttattacaggtgtgggcagcagcatctgaagcaaagcatcaacctccatcagattttctttggaaggaacaagacaagtttagagcaagtcctgattgtataacaatcctgtgcaaaccgaacggtcaagttagtttctgg

SEQ ID NO: 325788 - DNA, 584 bp, Homo sapiens
ttctcttggttttgaaatatgcttcccctttaattgtgccttcaacattaacaccacagcataaaatggcttttgagttccatttaggcttttttcttttacagagagaaggaaatcccaccaaccgttttccctaatcgcagcccttggtgccagaatccctatgtctctgcacatccttactgtcctctgattgaaccacacaatacatccaccgctggaggcagattggatagacagcccaggwctcggtcaaccagacctaatcgagcctcaggtcagttaaaagagtgcttgttccagtggagagtgcgtgtgtgtgcatgcacatgtgttaactagtgggttaagtggttaaaatgtgctaagtgttaaagatgattcatattctcaagaatagatggctcttaaaggaagtattgttaaccattcacttacatttcccctagcacagtgtcttccactgtgctagataaacatctgtctttgataaatatctgttgaatgaatcaatgaattaaaagaacagcgtggccagcaagagtatgtatgattcttgaagttcaatgaaaaaacactttttg

SEQ ID NO: 325789 - DNA, 558 bp, Homo sapiens
gggcaactaagggagaagataggcggaagcattgggagaggagacagaaggacaaagggaaaagcagagaggagtatcatggacaaaggaagagagtggtttccaaaatgaaggagaatgattattaatgtcaattgctgctggtgggtaaaaaaaaaaagtatctaaaaaaagtgtccattgggtttatcaagacaagtcatcagtcgccagtgggagtagggagactgactgaagggtggggtaagcgatgtcctcttttttttctgtctattccttgttaagcttcctacgcatttttctagttctcttstggcctcatcagttgcttcttctgcttcatttccaacttctcttactcttgcctccaccagccctggagatttctatagctcagttctcggtactgagcacagacacattcccttgatgagctccctacaacccaaatcctcaattaccaggtatctgggtgacaccttaaatgctgacctccagctcagcacatctggagaagctgcttctccagacatcttgcagagtagtcatccatgaact

SEQ ID NO: 325790 - DNA, 590 bp, Homo sapiens
tggtaaatgttagaaaccatgcaacatgctagagataaaaggatgaataaatgaacacagatttaactatacattttattttttaaacttatattttaactacttccaaaaatgatttgtgctggattatagaaattttattttttcattttttacttttattattattttttaatacaggatctggctctgtcacccaggctggagagccatggctcattctcagctcactgcaacctctgcccccccaggctcaagccatcctcccacctcagccttcagagcagctgggaaggactacaggcacaggccaccatgcccagccaatttttttgtatttttggtagagatrggttttgccatgttgaccaggctgatcttgaactcctgggctcaaagcaatccacctgccttggtgggattacaggcatgagccactgcacccagccagattgtagaaattttatcagaaacatatttattattgtagacaatattattattgtagacattattaaatagtcaaatgatctattagatataaaggtatcaaaaacctattcaatcgttttggaaaatgacattgtaag

SEQ ID NO: 325791 - DNA, 615 bp, Homo sapiens
ttcttctgtgtttccatcaataccattctacctcaatctttcttctccttcagtgactttaattagaagtagattaaaacaaaatcttgccttattygtctcttatacttatttataaccttgctatctgtgattcagtctagatatttacttctgagaatattccagttcagtgattctctcttctgctatatcaaatgtaatgttaaacccacctactgaaatattaatttccgttactggattttttttacttctagaacttgtttatgattcttttagttcccaggtttatgttaaaatttttatcttatcatttaattacttgaatattttagtcattgttagtttgaaatcctggtcagaagactacaatgtctggaccttatccacctgttcctggtgtccacttttaatcttggtgtttggtcaactcttatcttttgtatacgttgttttttttgtttgtttgtttttgtttagtgcctagtattacagagaaaaaactgcagagataatttaaggttctgtatattttttcactcaagatttacttttgcttctggtaggcatctaagttgggaacaaatcactttaaattaaatgtgaaataat

SEQ ID NO: 325792 - DNA, 620 bp, Homo sapiens
tcaaggtagtagcaatggggataatgagaaatatttaaattctatacctttcaaaaatgatatgatttgctgatggagcaaatgctggatatgaaagaaagagaggaacagccccaatgttttgggcattagaagggggcatccccagggaaggctgcagaggaacaagsttgggattggaggggagtcaagagtttgggtttcgaatatgcttctcatcatctggtattgccttgtatgataaaaacactcaataatgattctattagctcctcaggggcctgaaaatccaaacaccctcagggtacagcaaacagctaacttcaccgtatgacttagccaagtgtaaaacaacaaaacaatggtacagcctgtgaactgcagagttcatgcatgacccacaggcactaacataaaaagaaaagttgcgctggtcactgttgcccttgaccttgagtttgtgagcccgcccccccccgcaaaataatatcaacatcattggcttttatccacattgtccttaacacttacatattttctgccttctactaaactgtgtatgcagctgaatttagtagagcagaaactgcacactctgcctcattcatcattatattatt

SEQ ID NO: 325793 - DNA, 620 bp, Homo sapiens
tcaaggtagtagcaatggggataatgagaaatatttaaattctatacctttcaaaaatgatatgatttgctgatggagcaaatgctggatatgaaagaaagagaggaacagccccaatgttttgggcattagaagggggcatccccagggaaggctgcagaggaacaagcttgggattggaggggagtcaagagtttgggtttcgaatatgcttctcatcatctggtattgccttgtatgataaaaacactcaataatgattctattagctcctcaggggcctgaaaatccaaacaccctcagggtacagcaaacagctaacttcaccgtatgacttagccaagtgtaaaacaacaaaacaatggtacagcctgtgaactgcagagttcatgcatgacccacaggcactaacataaaaagaaaagttgcgctggtcactgttgcccttgaccttgagtttgtgagcccscccccccccgcaaaataatatcaacatcattggcttttatccacattgtccttaacacttacatattttctgccttctactaaactgtgtatgcagctgaatttagtagagcagaaactgcacactctgcctcattcatcattatattatt

SEQ ID NO: 325794 - DNA, 507 bp, Homo sapiens
aaaaggcatccctgaaaatgctgaatgtatgcatttaaaagaattttgttctgggatttagaaagtccacccaaatgaaatgcctcattctccaataacattggatatctgctaccatcccacactcttgcctgtgtgccacacccatggccaacagatgctaaaaacatacccctggacatgccttcctgcttagagagagatggtggcagaccctcttatatcacctgcctccttcgtctctcccatctgcattccagggtctagccagctttggatctgactgccatggcctgctctttgctgcctgtactcacaggttggacttgatggcagaattcagcttccctggttctgacttgggtgctcagaattcatcatcccttgagtatgatgtgtgcacataggtattaatcatmctttcctcctgggcctgtgtgcctcagagcccaacctatctttggcataaacttggcttatacttggattggacctccagcaatgctc

SEQ ID NO: 325795 - DNA, 549 bp, Homo sapiens
ctattaatgtttttctcgtcaataatrtagatgaaaaaatttttaaatattttaattttcttttttacttaaaaaaaaatttaccaagtcttttgaatgcatccaagaaaatgttatgtctacggcaatgattatccttgtgcaagtctacttgtgcatacatacaaaggttcctttggggttcatacctaaacttttaaaatcttctaaaattcctacatgtacttattcagttgtatggtacctgtatcttcaactttattagattttgctcaactgctctaggaagaattttgctaatttatactcccaccaacatagtaaaatatttcccattccccttattctcacctaactttatattgccagaatcttaaattatgtgccaatctgatggacattaactagtaactcattatcttaatgtgaagttcttctttaatagtggtgttgtgcatattttcatatgtaaaaaaataaaaaatctttccctatctcataataattctcataataataaagttatgtgcttatatttattaatttttg

SEQ ID NO: 325796 - DNA, 549 bp, Homo sapiens
ctattaatgtttttctcgtcaataatatagatgaaaaaatttttaaatattttaattttcttttttacttaaaaaaaaatttaccaagtcttttgaatgcatccaagaaaatgttatgtctacggcaatgattatccttgtgcaagtctacttgtgcatacatacaaaggttcctttggggttcatacctaaacttttaaaatcttctaaaattcctacatgtacttattcagttgtatggtacctgtatcttcaactttattagattttgctcaactgctctaggaagaattttgctaatttatactcccaccaacatagtaaaatatttcccattccccttattctcacctaactttatattgccagaatcttaaattatgtgccaatctgatggacattaactagtaactcattatcttaatgtgaagttcttctttaatagtggtgttgtgcatattttcatatgtaaaaaaataaaaaatctttccctatctcataataattctyataataataaagttatgtgcttatatttattaatttttg

SEQ ID NO: 325797 - DNA, 549 bp, Homo sapiens
ctattaatgtttttctcgtcaataatatagatgaaaaaatttttaaatattttaattttcttttttacttaaaaaaaaatttaccaagtcttttgaatgcatccaagaaaatgttatgtctacggcaatgattatccttgtgcaagtctacttgtgcatacatacaaaggttcctttggggttcatacctaaacttttaaaatcttctaaaattcctacatgtacttattcagttgtatggtacctgtatcttcaactttattagattttgctcaactgctctaggaagaattttgctaatttatactcccaccaacatagtaaaatatttcccattccccttattctcacctaactttatattgccagaatcttaaattatgtgccaatctgatggacattaactagtaactcattatcttaatgtgaagttcttctttaatagtggtgttgtgcatattttcatatgtaaaaaaataaaaaatctttccctatctcataataattctcataataataaarttatgtgcttatatttattaatttttg

SEQ ID NO: 325798 - DNA, 558 bp, Homo sapiens
caataaatatgatacaccacataaacagaattaaaaacaaaaattacatgatcatctcaatagacccagtaaaagcattcaacaaaagccagcattcctttatgccaygtttacagtagaatagcatatccagcaaaaataatcttcaaacatgaaggagaaataaacactgttccagacaatcaaaggctgagggatttcaacaccagatctgtcctacaagaaatgctaaagggagtacttcaatagaaagaaaaaggattttgatgatcaaaaagaaatcatctgaagataaaaaaactcattggtaatagcaaatatacagaaaaacacagaacattataacaccgtaacagtggtgtttaagctactcttacatagaaggactaaaggacgaaccaattcaaaataataactacaacttttcaagacatagtacaataaatgtaaatagaaacaacaaaatgtggaaaaattggggacatagttaaggcacagagtctattagttttctttttgcttgttaggttgtttattcaacagcgttaagttgttatc

SEQ ID NO: 325799 - DNA, 568 bp, Homo sapiens
caaaacctatggaatatagcaaaagcagtactaagagggaattttatagctgtaagtgcctacrtcaaaaaagaagaaaaatttcaaataacaggtctgatgatgcatctgaagaactagaaaaataagagcaaaccaaacccaaaatcagtagaagaaataataaagatcagagcagaaacaaatgaaactgaaatgaaaacaatacaaaagatcaataaaacaaaaagttggttttttgaaaagttaaacaaaattgacaaacctttagccagactaagaataaaagagaagatccaaataaataaagtcagagatgaaaaaggagacattacaactgatactgatctttcttactcctttaattgagtgctcctctcataggttaaaatttttacatattttaaacagggttcctagggggcgctagtgttccataaactagagaatcaatatttggctgttatgttgaataatgactgcctttatcctgtttgcagagggaataaaagctaatgaatagaatttctcaattcaaattgttctccaataatgtgttacaggcttt

SEQ ID NO: 325800 - DNA, 568 bp, Homo sapiens
caaaacctatggaatatagcaaaagcagtactaagagggaattttatagctgtaagtgcctacgtcaaaaaagaagaaaaatttcaaataacaggtctgatgatgcatctkaagaactagaaaaataagagcaaaccaaacccaaaatcagtagaagaaataataaagatcagagcagaaacaaatgaaactgaaatgaaaacaatacaaaagatcaataaaacaaaaagttggttttttgaaaagttaaacaaaattgacaaacctttagccagactaagaataaaagagaagatccaaataaataaagtcagagatgaaaaaggagacattacaactgatactgatctttcttactcctttaattgagtgctcctctcataggttaaaatttttacatattttaaacagggttcctagggggcgctagtgttccataaactagagaatcaatatttggctgttatgttgaataatgactgcctttatcctgtttgcagagggaataaaagctaatgaatagaatttctcaattcaaattgttctccaataatgtgttacaggcttt

SEQ ID NO: 325801 - DNA, 631 bp, Homo sapiens
cctgctcacttttggtgtctatttgcgtgaaatgcctttttccacccttttactttaagtttatgtgagtccttatgtgttaggcaagtctcctgaaggcaacagatagttggttggtgagttcttatccattctgtagttctgtatctcttaagtggaatatttaggccatttacattcaatgttagtattgaaatatgaggtaccgttgcattcattttgctatttgttgcccttgtactttaggttttttattttttgtttttgctttttaacttgtatttttgttttatgggtcctgtgtgacttatgctttaaagagattctgttttgatgtgtttccaggattcatttgaagatttagagctcctwttagcagtccttgtagtggtagcttggtagtggtgaattctctcagcatttgtttgtccaaaaaagactgtatctttccttcatatttgatgcttagtttcactggatacaaaatccttgactgttaattgctttgtttgagtaggctgaagatatggcctcaatcccttctagcttgtagggtttctgctgagaaatctgctgttaatctgatcaattttcctttataggttacctggtgcttctgtttcacagctct

SEQ ID NO: 325802 - DNA, 591 bp, Homo sapiens
aagccccagacctcttgtttgcacttatctaaagtagagtttctgcagtaaggagataggagaaagtaagaaatattggtgacctgggccactctgtgagaaaccgtaactctactatcgtttagaagaaaaatgaactcatgttcttggccatacccagtagaacctccatcacactgaacttggaggtggagagcaagttatggctcgaatcccagagagtcgcttttcctaataagatttagttaattttctttaataaacatttctacatcttcagtatgttrttaggataccttccagacactttaaatggttgttgtttttacaattttcattatttatagttgttttgctgggaagagtgtccacagagcttctcataccacctttgggaagtgcttctccttaacatgatgaattagcctcctatggctgctttaacaaattaccaaaaacttgatggcttaaaacaatacaggtttattctcccacagttctggagtccagaagcccagaatcagtttcactaggctaaagtcaaggtgttggcagggctggttccttctggtgatacgaggggaattcatc

SEQ ID NO: 325803 - DNA, 571 bp, Homo sapiens
atcatcaggtcttgatcatactcacagatgcacgacagtaacagcaggaaagaaattcttttttgttgtcttttcagacagggtctggctctgctgcacaggctggagtgcagtggcatgatcctagctcactgcagacttaacctcctgggctcaaatgatcctctagcctcagcctctcaagtaactgggactacagccaggtgccaacacacccggctgttttttaaattttttttgtagtgacagagtttcactatgtttcccaggctggtcttgaactcccacctcggcctcccaaagtgttgggattacaggcatgagccacagtgcccagccatgggaggaaattatgagaactcaacttttgccaaggtgaaaggattattcatttttttttccctgtgaactcaactctgtaatgtgcacttgtttagtttacagtttaatggtgatttatgatgttcagggctcttttatgcctaagcagctyagctattatatttcattatctgggtatggatactgtttacttctggttttgaatatggggatcaaaattgtttggagg

SEQ ID NO: 325804 - DNA, 560 bp, Homo sapiens
ggcacagtgaagggcacattgatgatcaactctgaagataccaccagaggggggtgggagctctgagaaaacagaagtaaggcatcttaggaggcccagaacttttcaaaacagggtgggcagatttttttaaaaaatcaaagctaccaaagaatatgccacagagaggatcaatgaacaagtcttttaccgtggtagttaagcaaaataataaccgaggaagatcaacgaaggctaaaaacctctgccaaattgttattcaatatccaatgggatgattcagaacatttttttccaagcaaaacataaaaaattcccccccyttttttttgtatacaataaaatgtcccctttccaactcatatgcaaattcagtagaattctctctggctacagggagtgaaacataatcaaattatggaagtgctgttgctaaatgcctgggcagatttcagacctcattctttgcatttcaattgcacactactaaagcttatgacaactgaaggaaattgatcaccaggtagacataactcaggatctccgggagcaaggactat

SEQ ID NO: 325805 - DNA, 584 bp, Homo sapiens
aatctttttatgttgttcctttctttccttatcctttgcttccttactgcttatttttttctagatttggggatattttgtattccattttattttttatattccttctaaaattctcattaaaataccagtctaactctatgagatgtcatttaaaaatcttcggtgtctctttttcagtctgtccttcagtatacacatattaactcctatgtgtcatgtactgagtttggtgcaagtgacaaaaagacaagcaaaataaaagcaatttaacacttatagtccagagataaaagagaatttacaatacagtgcaataaatgctttgcttggtgagtgtaagatattactgagaacacatattaggagcaaaaaactcatttggtggggaccagagaggggttctttggagatagtgacatataagtgaaackttaaggatgaaaaagaattatccatgaaaagaggaggggtgaaagaatgtgtgaaggcctggaggtagtcagggtgtgtttgaagaactgaaagaacttcaagatgattaaagcatagaatgcaagaaggagaatgtgtgatgagatagg

SEQ ID NO: 325806 - DNA, 548 bp, Homo sapiens
ataacgcctaagttctcttgaatatctagaaagccttcccaagaaggacaggtacaaacaagcccagagtgagaggattccaaggaacacctaagtcttgagtgcccagacactgaagaatatctacaaggatcaacatcatgcagaaaaacatgrtatcagaaggagaggatcatggtggacaggaggcagaactagattgcagctcccagttgaatggacagagcagcacgtggaggcttgcatcgtgaactattgctccagaatgactgcaggcatacattaggaaagccaagagaacccacagaccctctgaaggaagcagattgctcctgcaggagtcaggagacaccccaaatactgtgagtgcccaaactttggaagtgggaaagggagatcatttgccctggaacacccccactagggaacctgaaggtctagattatggcagaaaattctgaccttacctggagttgaatcaatttagagagccaaacaaaatacagggtagaggaagcagcgggaaaagccctgtggactcactgggt

SEQ ID NO: 325807 - DNA, 500 bp, Homo sapiens
ggccctgggtgtacttttaaacatgatttgttaaggctgctcagcatttactccatcctatctattactaataacagcagaatgaattttactcctactgaactaacaaagaggacctttcccataatgtgcaaatgattgcttgtagtattaatgtactgcagagccttttaaagagattgcctctagagccaccaaccaaagaatggagtgggctagcaaaagtttcttttagtatcctataattcgtctaattattgatccactaggaacaaacacatggttacataatgcatactgggaatgcattcaactcctaggcctggtgttcaaggctctccacagtctggtcttycctgtctctctggctctacttggcactccccacccatgccatctcttgcctcagccaattagttcatctttgctgtatctgcttgtactttcatccctgcattttgatgcatgccagaaaagtacatacaacactgcctagccac

SEQ ID NO: 325808 - DNA, 674 bp, Homo sapiens
gctgcaagaagaaaccacgtggaggtagcgtggggaggaaaagctgcttcaagaagaaaggacgcaggggaggagcagggaggcaagggtctgagtggaatgcggttgcagccaggggctccgtgggcacaggcccaggctggacctgggaatgggccgcatggcctccagttgtgcttggctgtgaatgcccaggtgagcttaagggctggcaagatgttgccaggagaccagagacaccagaccctggcaagtccatgccacccctctgccttttggaagccccttccctatgcatcaggtggaactgaacacggtgagcatctrcctgaggaccccgtgctacctgaacacggtgagcatctacctgaggaccccgtgctacctgaacacggtgagcatctaccagaggaccccgtgctacctgaacatggtgagcatctacctgaggaccccatgctacctgagcaggtgaagatgattcagccgcagtgagctgagtgagtggaccaaacaaacttgcttctcgctgtgatctgggggtggaggctcttgaggacgacatgattcattgcagatttgcaccctccatggtgacatgaataacccactctctgagatctcacaagtacaggccacagcccagccagcctgggggccagcagggccccagc

SEQ ID NO: 325809 - DNA, 674 bp, Homo sapiens
gctgcaagaagaaaccacgtggaggtagcgtggggaggaaaagctgcttcaagaagaaaggacgcaggggaggagcagggaggcaagggtctgagtggaatgcggttgcagccaggggctccgtgggcacaggcccaggctggacctgggaatgggccgcatggcctccagttgtgcttggctgtgaatgcccaggtgagcttaagggctggcaagatgttgccaggagaccagagacaccagaccctggcaagtccatgccacccctctgccttttggaagccccttccctatgcatcaggtggaactgaacacggtgagcatctgcctgaggaccccgtgctacctgaacacggtgagcatctacctgaggaccccgtgctacctgaacacggtgagcatctaccwgaggaccccgtgctacctgaacatggtgagcatctacctgaggaccccatgctacctgagcaggtgaagatgattcagccgcagtgagctgagtgagtggaccaaacaaacttgcttctcgctgtgatctgggggtggaggctcttgaggacgacatgattcattgcagatttgcaccctccatggtgacatgaataacccactctctgagatctcacaagtacaggccacagcccagccagcctgggggccagcagggccccagc

SEQ ID NO: 325810 - DNA, 674 bp, Homo sapiens
gctgcaagaagaaaccacgtggaggtagcgtggggaggaaaagctgcttcaagaagaaaggacgcaggggaggagcagggaggcaagggtctgagtggaatgcggttgcagccaggggctccgtgggcacaggcccaggctggacctgggaatgggccgcatggcctccagttgtgcttggctgtgaatgcccaggtgagcttaagggctggcaagatgttgccaggagaccagagacaccagaccctggcaagtccatgccacccctctgccttttggaagccccttccctatgcatcaggtggaactgaacacggtgagcatctgcctgaggaccccgtgctacctgaacacggtgagcatctacctgaggaccccgtgctacctgaacacggtgagcatctaccagaggaccccgtgctamctgaacatggtgagcatctacctgaggaccccatgctacctgagcaggtgaagatgattcagccgcagtgagctgagtgagtggaccaaacaaacttgcttctcgctgtgatctgggggtggaggctcttgaggacgacatgattcattgcagatttgcaccctccatggtgacatgaataacccactctctgagatctcacaagtacaggccacagcccagccagcctgggggccagcagggccccagc

SEQ ID NO: 325811 - DNA, 609 bp, Homo sapiens
cttcctggactaaaaggctgaggattgattgtgtcgctgtctcagaggagggctcgctcccagcacaggtgtcgctcagggatcctgtgtgaaaggcaggcagggtgtttgctgagcttggtggcttctctttgacatcgctaaagtacagatggctgtgctgagtggaagcggccccgccctgagacattctggggtggaggccctggccagggcccggtggtgcagctcatccacstgccctccttagccgccacaccaggggatggaccagggcagtggctcaggccttttggggctggagaagccgggacccagctgctgggtctccatgccggagagaaaggaagagggcaggcccccttgtgcagtcaaaactggcattgagttaaagtaatcctccgtcaactgagacaagttaaaacccacactgagcactgcgcgttcctggtggcattaagcttctcagtgttcacggagaggcagcctggaggttgggctacacaggctgcgagacggtgcataagaccagatggtggctcctcaaaaagttaaatgtagaatgacaatttgactcagcaattccactgctgggcgtagacccaaaag

SEQ ID NO: 325812 - DNA, 609 bp, Homo sapiens
cttcctggactaaaaggctgaggattgattgtgtcgctgtctcagaggagggctcgctcccagcacaggtgtcgctcagggatcctgtgtgaaaggcaggcagggtgtttgctgagcttggtggcttctctttgacatcgctaaagtacagatggctgtgctgagtggaagcggccccgccctgagacattctggggtggaggccctggccagggcccggtggtgcagctcatccacgtgccctccttagccgccacaccaggggatggaccagggcagtggctcaggccttttggggctggagaagccgggacccagctgctgggtctccatgccggagagaaaggaagagggcaggcccccttgtgcagtcaaaactggcattgagttaaagtaatcctcmgtcaactgagacaagttaaaacccacactgagcactgcgcgttcctggtggcattaagcttctcagtgttcacggagaggcagcctggaggttgggctacacaggctgcgagacggtgcataagaccagatggtggctcctcaaaaagttaaatgtagaatgacaatttgactcagcaattccactgctgggcgtagacccaaaag

SEQ ID NO: 325813 - DNA, 609 bp, Homo sapiens
cttcctggactaaaaggctgaggattgattgtgtcgctgtctcagaggagggctcgctcccagcacaggtgtcgctcagggatcctgtgtgaaaggcaggcagggtgtttgctgagcttggtggcttctctttgacatcgctaaagtacagatggctgtgctgagtggaagcggccccgccctgagacattctggggtggaggccctggccagggcccggtggtgcagctcatccacgtgccctccttagccgccacaccaggggatggaccagggcagtggctcaggccttttggggctggagaagccgggacccagctgctgggtctccatgccggagagaaaggaagagggcaggcccccttgtgcagtcaaaactggcattgagttaaagtaatcctccgtcaactgagacaagttaaaacccacactgagcactgcgcgttcctgrtggcattaagcttctcagtgttcacggagaggcagcctggaggttgggctacacaggctgcgagacggtgcataagaccagatggtggctcctcaaaaagttaaatgtagaatgacaatttgactcagcaattccactgctgggcgtagacccaaaag

SEQ ID NO: 325814 - DNA, 609 bp, Homo sapiens
cttcctggactaaaaggctgaggattgattgtgtcgctgtctcagaggagggctcgctcccagcacaggtgtcgctcagggatcctgtgtgaaaggcaggcagggtgtttgctgagcttggtggcttctctttgacatcgctaaagtacagatggctgtgctgagtggaagcggccccgccctgagacattctggggtggaggccctggccagggcccggtggtgcagctcatccacgtgccctccttagccgccacaccaggggatggaccagggcagtggctcaggccttttggggctggagaagccgggacccagctgctgggtctccatgccggagagaaaggaagagggcaggcccccttgtgcagtcaaaactggcattgagttaaagtaatcctccgtcaactgagacaagttaaaacccacactgagcactgcgcgttcctggtggcattaagcttctcagtgttcacggagaggcagcctggaggttgggctacacaggctgcgrgacggtgcataagaccagatggtggctcctcaaaaagttaaatgtagaatgacaatttgactcagcaattccactgctgggcgtagacccaaaag

SEQ ID NO: 325815 - DNA, 547 bp, Homo sapiens
actcctaaggcagggctgtggcaactgggctgctgtgagctctgaatctgagggacagtcctggacagaagcaaatggacgactccaaggagtctaaggcagacartgggagggatgcggctgacacagtgccaggccaggcccatacggggctgtccgagttattcccaccaaactcctggaaaaatgcaaaacattgcaggttacccttgagcccagggcaaaggccctttgaccttcttgggcaatcctgctgcaagtacgatgacgtatcggaaatgaaccattggtgcacagatcataaggcacagttgtaacctaccataaacagaaagtatctgagacaggtctcaatcaatgtagaggtttattttgccaagactgaggatgtgcctgggaaaaaggaacacaaaaccacaggaacatctgagatttctgctttgtccaagcagggtttggggacttcaatatttaaagtggaaagagaaggcagtaggggaaagagggaaaaaaagttgggaggggataggaaaaaggggcaatggct

SEQ ID NO: 325816 - DNA, 565 bp, Homo sapiens
atgtaactgagaattctaagaagaagatggacttcaggcatggttggatctaggtgctcaacccaggcatattcctgcttttatctcttgcctttgttcttctttgcattggcttcattttttagaaggctgtttctatgtcccacctaccactccaggcagatgtaatgtgtacaactgataatctcagaagcagaagggttctatttgttccagtgtttgtatcaattctagaaaaaggaagttggcttgcttgagacatgcactgccttttggcccagttgctgtgttcaggggtgcagcgttctctggacagccaggctgtgcccagggacagtgggattggtgggcagccccactagaatcatgcagaatggagcaggcttgtccacaaaggctctgattacagctgaaacaggcccccagggagtgcttggagtggcatggagcagaaataagggtacggtcacccacagatatgaggaccgaggyagagcaagcatgtgggagtccctcagcaagcccagatgccatgcaccaaggaagcttcctcaccccgagtccc

SEQ ID NO: 325817 - DNA, 452 bp, Homo sapiens
ctgacaccctagctaaatgtagccttgtgcmtgagcccaggtgaggccagcagaagaacctcccagctgacagaatgataaagaataacaaatcaccattttaaggcactaagctttggggtcatttgttatgcagcagtagctaactgaaacacctgcccccttatcactttggtgtttcagtatctgtggtctgaaatcattaatttgggtgcttggcctttctcccttgactgcccacccctgccgagggacatttattcttgaaggcagaaactcatgcctgctttatctctggccgtatttcagcagctgaggggagaggattgccctgtgcccatagcctgagacctgatgacaccactgtgaccttgagcatggatgaatgtccaaaacctctggccttaccacatgcttggccctgagagacttctcagcacaaacagtgccag

SEQ ID NO: 325818 - DNA, 615 bp, Homo sapiens
aagcagagaataaaaatgtacacacacagaggaagtgaagggctcactttttcataaatatggttgaaaccctgccagcaacaagcacacagggagaatctctgaaaacttaccccaggagattacaagggaagtctcaacaaacacaacaaccacaaaactataagaatcatcagcatctagtctagagtgtttgacctcacaataaattagaaaataataacaaaaagacaaytcaccaaaaccccttcggtttgtaagtttacaaagaccttttaaataatttatggtcaaattagaaagaataatgaaagtacaaaaaaattactaattaataccaacaaaaacactctataccaaagttgtcggagctagctaacatggtactaagactgaaaacccattagctgagcaaacaatttggaaacacagaataactccaaagaaaaccaaaagaaggggataatgaaagcaagagcagaaattaatgaaatagaatatgaaggaaaaatagagacatcagtgcaaataagacctggttctttagaaaaacgggcaatattaacacactgctggcaagatcatctaaaaaaataaagttagaaaaagacaaaa

SEQ ID NO: 325819 - DNA, 615 bp, Homo sapiens
aagcagagaataaaaatgtacacacacagaggaagtgaagggctcactttttcataaatatggttgaaaccctgccagcaacaagcacacagggagaatctctgaaaacttaccccaggagattacaagggaagtctcaacaaacacaacaaccacaaaactataagaatcatcagcatctagtctagagtgtttgacctcacaataaattagaaaataataacaaaaagacaactcaccaaaaccccttcggtttgtaagtttacaaagaccttttaaataatttatggtcaaattagaaagaataatgaaagtacaaaaaaattactaattaataccaacaaaaacactctataccaaagttgtcggagctagctaacatggtactaagactgaaaacccattagctgagcaaacaatttggaaacacagaataactccaaagaaaaccaaaagaaggggataatgaaagcaagagcagaaattaatgaaatagaatatgaaggaaaaatagagacaycagtgcaaataagacctggttctttagaaaaacgggcaatattaacacactgctggcaagatcatctaaaaaaataaagttagaaaaagacaaaa

SEQ ID NO: 325820 - DNA, 615 bp, Homo sapiens
aagcagagaataaaaatgtacacacacagaggaagtgaagggctcactttttcataaatatggttgaaaccctgccagcaacaagcacacagggagaatctctgaaaacttaccccaggagattacaagggaagtctcaacaaacacaacaaccacaaaactataagaatcatcagcatctagtctagagtgtttgacctcacaataaattagaaaataataacaaaaagacaactcaccaaaaccccttcggtttgtaagtttacaaagaccttttaaataatttatggtcaaattagaaagaataatgaaagtacaaaaaaattactaattaataccaacaaaaacactctataccaaagttgtcggagctagctaacatggtactaagactgaaaacccattagctgagcaaacaatttggaaacacagaataactccaaagaaaaccaaaagaaggggataatgaaagcaagagcagaaattaatgaaatagaatatgaaggaaaaatagagacatcagtgcaaataagacctggttctttagaaaaaygggcaatattaacacactgctggcaagatcatctaaaaaaataaagttagaaaaagacaaaa

SEQ ID NO: 325821 - DNA, 646 bp, Homo sapiens
ttccgtgaccaaatcttcaacataagcaataaggaggcacctgctttaaaaattacctcatgaaatccaacagcaagtggcgcgttaaagaaagtcagcattattatcattggcagattaaactgtgctcacaaaagactcaaagatgatataaaaaggccttcactgctaaagacgttttcacttcaaagtgcattgtctaaaagattagaacatttctttttcatagaaacaatgatggtgaaggtcccaggctattcaataaaattctgttaatccacaattataatgaagaacaacattgccaagccacaccacttcctattctccaacacattctgctcccccatctgggtgccctttgcttgtgtatacctgtcaaatcatacctaattgtggagacayggaacaggtacctcctcctccaggaagccttccttacaacctcagacaaaagaaagccctctccattgcatgtttccggagtcctctcctttatcattttctataacagttcttacattgtgtgttatacaggcatcttatttgtcctcttcagctgggagttccttgtgggaagagattatatcttaataatcttggacatcctacagcctcaatgatgatgtcttaagaaggctagctc

SEQ ID NO: 325822 - DNA, 533 bp, Homo sapiens
tcacctacttaatcaggtgaggatgacaactgtagctttggttccagatgtggtaatttactgagaaaatcagtacagccactggctacaggtatgcaactattaacacagcaaatgccatttcttcgatttctgttgaaaaagataaccggaagagatttgtctccacatgttttcccttgagaccatgataactcccctgcttctttgtcataatataatgcacagggatcttgattattttgatatcccatagaacatcatgtgtgggcactccctcagtaacagtgtgctcattgtacacggtaaggaaaacttcccatcatgaactgggtagcatctgagtcaccagatcatagaggtgggcacagcacctgtagttacatggaaaagatctaaatgagactgactcaaacaagtacasaaggtacaagtaaatggcatgagcacgtagctttctccccgtcaaggtgcctcttccttatgcttcactacttctccctctacccacactgatgacctcatagggaatt

SEQ ID NO: 325823 - DNA, 413 bp, Homo sapiens
atcatttcttacaaaaatgcccaccagagggcatccactccagtgccagctctcagtaatgactaagtgtggatgccagttagcctctttccccagccacmccagtgcttgctcaggctcttatcccaagtggccctgaaggtatggctggggtcaagaagcctggactttccccagcgaggcttatttggttcctgacaccactgagttccctatgagccaatggcaagtatggccctaatccctgagtataccaagcagccacataggacacattgattccattgctcctttcatcatggagggggcaacaaatttggcctcaccatgataaatgcctattctgttaatagacttacttttcttgcctattgtgcttccacatgcatcatgattggtgccttatcagctgc

SEQ ID NO: 325824 - DNA, 544 bp, Homo sapiens
ttgaaaactttaatggacttcaagtttcaagacggagatatgagctcacatgtttatctcacctccatcctagaaactcattatggtgaccaagaagatgcaaaataaaaagaatgtctacagcagcattgaaaaataagaaggggaagcagaacaagaaagggaatactagacaataagaagcatgtatcagtcagggctctccagagaaacagaaccagctggatggagatatatgttttatgattatgatgaattggctcacaaaattatggaggctaacaartcccaagatcttcagggtgagtcagtaatctaaagatccaagacagccaatagtgcaattgcagtccaaaggccagtaggcacaagagccaggaacagctgatgcttccattcgagtcagaaggcaggagcaagccaatgatcaagtctgaaaacaggaaggagaaattctctcctattcgagggaaagtcagtcttttaattgtattttggccttcaactgactagatgtagtacacttgcattaggggagggcaat

SEQ ID NO: 325825 - DNA, 544 bp, Homo sapiens
ttgaaaactttaatggacttcaagtttcaagacggagatatgagctcacatgtttatctcacctccatcctagaaactcattatggtgaccaagaagatgcaaaataaaaagaatgtctacagcagcattgaaaaataagaaggggaagcagaacaagaaagggaatactagacaataagaagcatgtatcagtcagggctctccagagaaacagaaccagctggatggagatatatgttttatgattatgatgaattggctcacaaaattatggaggctaacaaatcccaagatcttcagggtgagtcagtaatctaaagatccragacagccaatagtgcaattgcagtccaaaggccagtaggcacaagagccaggaacagctgatgcttccattcgagtcagaaggcaggagcaagccaatgatcaagtctgaaaacaggaaggagaaattctctcctattcgagggaaagtcagtcttttaattgtattttggccttcaactgactagatgtagtacacttgcattaggggagggcaat

SEQ ID NO: 325826 - DNA, 556 bp, Homo sapiens
cctgtacattcatcttatagatgaagacactgaggttcagggaggcaaataaactagcccaaagccacgcagctaatacttgatgaatctgggacttgatctcaggtctgactccaaagcccaagcttttttcaattggcaggttaaaaagccgggtgtttgtgaggttcaaataaggtaatacccactacttacctcagagcttggcacataataaatgcttaatagaaagtttacctgtctattcttcttttcacataggaaaagatttttaaaaatagatgaattagcctggcagttgaaatgaccataagcacttaaaatggagattyaggcatcatccaatcattgggatactgtctggagtttgaacacatggatcctcacacaaggattcttgaccttgttgtgcgaccagaggcagtttaagcaacctctctgggcttccagattgtagggtgtagcttcccgaacttctttgagctggtcattcacagcccagggactttggctccctggagaatcagaggactaattcaaggaacctgggaatcat

SEQ ID NO: 325827 - DNA, 586 bp, Homo sapiens
tatactctggatgtcaaaggcgtattgtgaaaagaatgtgaaatatcttgttaacaatattttatattgattacatgtcaaaatggtgacattttggatatgttgggttacataaaatatattattaagttcacccatttttggtttttttacttttaaaaccagccccagtgatctccattcattcacttaataacatttgccaccttcctccaacctcaggctatttgcaaattgaaaataatctcttaattaactccttggctactttgtacttttagcatttccttggtttcaaagtatacatttatctgtagaaccattttatccacgtctgtctcccaactaaaataaatgtaaactccataaagatagaaacgatacctgtcatagccagtcctgtgtgctcagcccctagcatggcgtggacccaggactctatgtcttagtggtaattaagagtatgtgcttcagcatcasatggaatgatttcgaatctgcctccactggggccgtctatttgaccggaagacacgtcatctgacttttctgagctttgatttccttggttttaaaaagcctattt

SEQ ID NO: 325828 - DNA, 562 bp, Homo sapiens
ttgcggggggcactactgtggtatattagtggttgtctgtggctggagggaggagggtgtggaacacagagtgattgctcatgggcatggtgttttgtgaggggggctgaaattatactaaaattgaccatgatgatggttgcactactctgaaggagtgggagagggaaaggaaagtgctgttctgtggaaaaggacagaaggaggrggagaaaaagggaacagaaacgtggcggtcagctgttgggacaggagcactgcggacagctcctaggcaacctgccacccacgctgcatcatggttttaagcaccagcatgggctcacactccgggcattactcgtagctgcaggaggcaccctgaaaccagcctacaaggtggcacagctgagatctggctgtggtgacagtggccacaggagctaggtccctgacctgctctgctgagagtgcccaggccataagccagagctttcatgccccaggaaggagccatgtcaaggtggcgctgatggaggagccagcaacagaagcaatacaggaacttaacaggaaaactaaa

SEQ ID NO: 325829 - DNA, 562 bp, Homo sapiens
ttgcggggggcactactgtggtatattagtggttgtctgtggctggagggaggagggtgtggaacacagagtgattgctcatgggcatggtgttttgtgaggggggctgaaattatactaaaattgaccatgatgatggttgcactactctgaaggagtgggagagggaaaggaaagtgctgttctgtggaaaaggacagaaggagggggagaaaaagggaacagaaacrtggcggtcagctgttgggacaggagcactgcggacagctcctaggcaacctgccacccacgctgcatcatggttttaagcaccagcatgggctcacactccgggcattactcgtagctgcaggaggcaccctgaaaccagcctacaaggtggcacagctgagatctggctgtggtgacagtggccacaggagctaggtccctgacctgctctgctgagagtgcccaggccataagccagagctttcatgccccaggaaggagccatgtcaaggtggcgctgatggaggagccagcaacagaagcaatacaggaacttaacaggaaaactaaa

SEQ ID NO: 325830 - DNA, 562 bp, Homo sapiens
ttgcggggggcactactgtggtatattagtggttgtctgtggctggagggaggagggtgtggaacacagagtgattgctcatgggcatggtgttttgtgaggggggctgaaattatactaaaattgaccatgatgatggttgcactactctgaaggagtgggagagggaaaggaaagtgctgttctgtggaaaaggacagaaggagggggagaaaaagggaacagaaacgtggcggtcagctgttsggacaggagcactgcggacagctcctaggcaacctgccacccacgctgcatcatggttttaagcaccagcatgggctcacactccgggcattactcgtagctgcaggaggcaccctgaaaccagcctacaaggtggcacagctgagatctggctgtggtgacagtggccacaggagctaggtccctgacctgctctgctgagagtgcccaggccataagccagagctttcatgccccaggaaggagccatgtcaaggtggcgctgatggaggagccagcaacagaagcaatacaggaacttaacaggaaaactaaa

SEQ ID NO: 325831 - DNA, 562 bp, Homo sapiens
ttgcggggggcactactgtggtatattagtggttgtctgtggctggagggaggagggtgtggaacacagagtgattgctcatgggcatggtgttttgtgaggggggctgaaattatactaaaattgaccatgatgatggttgcactactctgaaggagtgggagagggaaaggaaagtgctgttctgtggaaaaggacagaaggagggggagaaaaagggaacagaaacgtggcggtcagctgttgggacaggagcactgcggacagctcctaggcaacctgccacccacgctgcatcatggttttaagcaccagcatgggctcacactccgggcattactcgtagctgcaggaggcaccctgaaaccakcctacaaggtggcacagctgagatctggctgtggtgacagtggccacaggagctaggtccctgacctgctctgctgagagtgcccaggccataagccagagctttcatgccccaggaaggagccatgtcaaggtggcgctgatggaggagccagcaacagaagcaatacaggaacttaacaggaaaactaaa

SEQ ID NO: 325832 - DNA, 504 bp, Homo sapiens
ggaacctttctttgatagttcaggtttgaaacactctttttgtagaaactgcaaggggataattgcactctttgaggagtaccgtagtaaaggaaataacttcctataraaagaagacagaagctttctcagaaaattctttgggatgattgagttgaactcacagagctgagcattccttgcgatgtagcagtttagaaacacactttctgcagaatctgcaagtgcatatttggacctctgtgaggaattcgttggaaacgggataatttcagctgactaaacagaagcagtctcagaatcttctttgtgatgtttgcattcaaatccccgagttgaactttcctttcaaagttcacgtttgaaacactctttttgcaggatctacaagtggatatttggaccactctgtgtccttcgttcgaaacgggtatatcttcacatgacatctagacagaagcatcctcagaagcttctctgtgatgactgcattcaactcacgga

SEQ ID NO: 325833 - DNA, 520 bp, Homo sapiens
tctcagaatcttctttgtgatgtttgcattcaaatccccgagttgaactttcctttcaaagttcacgtttgaaacactctttttgcaggatctacaagtggatatttggaccactctgtgtccttcgttcgaaacgggtatatcttcacatgacatctagacagaagcatcctcagaagcttctctgtgatgactgcattcaactcacggagttgaacactccttttgagagcgcagttttgaaactctctttctgtggcatctgcaaggggacatgtagacctctttgaagatttcgttggaaacggaatcatcttcacataaaaactayacagatgcattctcaggaactttttggtgatgtttgtattcaactcccagagttgaactttcctttggaaagagcagctatgaaacactgtttttctagaatctgcaagtggacgtttggagggctttgtggtttgtggtggaaaaggaaatatcttcacctaaatactagatagaagcattctcagaa

SEQ ID NO: 325834 - DNA, 520 bp, Homo sapiens
tctcagaatcttctttgtgatgtttgcattcaaatccccgagttgaactttcctttcaaagttcacgtttgaaacactctttttgcaggatctacaagtggatatttggaccactctgtgtccttcgttcgaaacgggtatatcttcacatgacatctagacagaagcatcctcagaagcttctctgtgatgactgcattcaactcacggagttgaacactccttttgagagcgcagttttgaaactctctttctgtggcatctgcaaggggacatgtagacctctttgaagatttcgttggaaacggaatcatcttcacataaaaactacacagatgcattctcaggaactttttggtgatgtttgtattcaactcccagagttgaactttcctttggaaagagcagctatgaaacactstttttctagaatctgcaagtggacgtttggagggctttgtggtttgtggtggaaaaggaaatatcttcacctaaatactagatagaagcattctcagaa

SEQ ID NO: 325835 - DNA, 397 bp, Homo sapiens
ctgagaatgcttctgtttagctttcctgtgaagattctcccgtttccaacgaaatcttcaaaataggtccraatatccacttgcagattccacacaaagagtgattggaaactgctctttgaaaaggaaccttcaactctgtgagttgaatgcaatcatcacaaagaagtttctgacaatgcttctctccagtttttatgtgaccataattcgttttccaccacaggcctgaaagcgctccaaatgtccacttgtagacactacgaaaagcatgtttcagaactactctatgaaaagcaatgtgaaactctgggagttgaacacaaacatcacagagaagtttctgagaatgcttctgtttagtttttatgtgaagatattcccgtttccaaagaca

SEQ ID NO: 325836 - DNA, 495 bp, Homo sapiens
agctgctctttccaaaggaaagttcaactctgggagttgaatacaaacatcaccaaaaagttcctgagaatgcatctgtgtagtttttatgtgaagatgattccgtttccaacgaaatcttcaaagaggtctacatgtccccttgcagatgccacagaaagagagtttcaaaactgcgctctcaaaaggagtgttcaactccgtgagttgaatgcagtcatcacagagaagcttctgagratgcttctgtctagatgtcatgtgaagatatacccgtttcgaacgaaggacacagagtggtccaaatatccacttgtagatcctgcaaaaagagtgtttcaaacgtgaactttgaaaggaaagttcaactcggggatttgaatgcaaacatcaccaagaagattctgagactgcttctgtttagtcagctgaaattatcccgtttccaacgaattcctcacagaggtccaaatatgcacttgcagattctgcaga

SEQ ID NO: 325837 - DNA, 495 bp, Homo sapiens
agctgctctttccaaaggaaagttcaactctgggagttgaatacaaacatcaccaaaaagttcctgagaatgcatctgtgtagtttttatgtgaagatgattccgtttccaacgaaatcttcaaagaggtctacatgtccccttgcagatgccacagaaagagagtttcaaaactgcgctctcaaaaggagtgttcaactccgtgagttgaatgcagtcatcacagagaagcttctgaggatgcttctgtctagatgtcatgtgaagatatacccgtttcgaacgaaggacacagagtggtccaaatatccacttgtagatcctgcaaaaagagtgtttcaaacgtgaactttgaaaggaaagttcaactckgggatttgaatgcaaacatcaccaagaagattctgagactgcttctgtttagtcagctgaaattatcccgtttccaacgaattcctcacagaggtccaaatatgcacttgcagattctgcaga

SEQ ID NO: 325838 - DNA, 495 bp, Homo sapiens
agctgctctttccaaaggaaagttcaactctgggagttgaatacaaacatcaccaaaaagttcctgagaatgcatctgtgtagtttttatgtgaagatgattccgtttccaacgaaatcttcaaagaggtctacatgtccccttgcagatgccacagaaagagagtttcaaaactgcgctctcaaaaggagtgttcaactccgtgagttgaatgcagtcatcacagagaagcttctgaggatgcttctgtctagatgtcatgtgaagatatacccgtttcgaacgaaggacacagagtggtccaaatatccacttgtagatcctgcaaaaagagtgtttcaaacgtgaactttgaaaggaaagttcaactcggggatttgaatgcaaacatcacmaagaagattctgagactgcttctgtttagtcagctgaaattatcccgtttccaacgaattcctcacagaggtccaaatatgcacttgcagattctgcaga

SEQ ID NO: 325839 - DNA, 393 bp, Homo sapiens
tgtttcaaagcttctctctcgaaaggaaagttcaactctgtgagttgaatgcaagcatcacaaagaagtttctgagaatgcttctgtttagctttcctgtgaagattctcccgtttccaacgaaatcttcaaaataggtccaaatatccacttgcagattccacacaaagagtgattggaaactgctctttgaaaaggaaccttcaactctgtgagttgaatgcaatcatcacaaagaagtttctgacaatgcttctctccagtttttatgtgaccataattcgttttccaccacaggcctgaaagcgctccaaatgtccacttgtagacactacgaaaagcatgtttcagaactactctatgaaaagcaaygtgaaactctgggagttgaac

SEQ ID NO: 325840 - DNA, 501 bp, Homo sapiens
ctcccgtttccaacgaaatcttcaaaataggtccaaatatccacttgcagattccacagaaagagtgattggaaactgctstttgaaaaggaaccttcaactctgtgagttgaatgcaatcatcccaaagaagtttctgacaatgcttctctccagtttttatgtgaccataattcgttttccaccacaggcctgaaagcgctccaaatgtccacttgtagacactacgaaaagcatgtttcagaactactctatgaaaagcaatgtgaaactctgggagttgaacacaaacatcacagagaagtttctgagaatgcttctgtttagtttttatgtgaagatattcccgtttccaaagacatcttcggagaggtccacatatccacttgcagattccacaaaaagagagtttcaacactgctctatccataggagggttcaactctgtgagttgaatgcaatcatcacagagaagtttctgagaatgcttctgtctagatt

SEQ ID NO: 325841 - DNA, 501 bp, Homo sapiens
ctcccgtttccaacgaaatcttcaaaataggtccaaatatccacttgcagattccacagaaagagtgattggaaactgctctttgaaaaggaaccttcaactctgtgagttgaatgcaatcatcccaaagaagtttctgacaatgcttctctccagtttttatgtgaccataattcgttttccaccacaggcctgaaagcgctccaaatgtccacttgyagacactacgaaaagcatgtttcagaactactctatgaaaagcaatgtgaaactctgggagttgaacacaaacatcacagagaagtttctgagaatgcttctgtttagtttttatgtgaagatattcccgtttccaaagacatcttcggagaggtccacatatccacttgcagattccacaaaaagagagtttcaacactgctctatccataggagggttcaactctgtgagttgaatgcaatcatcacagagaagtttctgagaatgcttctgtctagatt

SEQ ID NO: 325842 - DNA, 501 bp, Homo sapiens
ctcccgtttccaacgaaatcttcaaaataggtccaaatatccacttgcagattccacagaaagagtgattggaaactgctctttgaaaaggaaccttcaactctgtgagttgaatgcaatcatcccaaagaagtttctgacaatgcttctctccagtttttatgtgaccataattcgttttccaccacaggcctgaaagcgctccaaatgtccacttgtagacactacgaaaagcatgtttcagaactactctatgaaaagcaaygtgaaactctgggagttgaacacaaacatcacagagaagtttctgagaatgcttctgtttagtttttatgtgaagatattcccgtttccaaagacatcttcggagaggtccacatatccacttgcagattccacaaaaagagagtttcaacactgctctatccataggagggttcaactctgtgagttgaatgcaatcatcacagagaagtttctgagaatgcttctgtctagatt

SEQ ID NO: 325843 - DNA, 528 bp, Homo sapiens
tgagcattccttgcgatgtagcagtttagaaacacactttctgcagaatctgcaagtgcatatttggacctctstgaggaattcgttggaaacgggataatttcagctgactaaacagaagcagtctcagaatcttctttgtgatgtttgcattcaaatccccgagttgaactttcctttcaaagttcacgtttgaaacactctttttgcaggatctacaagtggatatttggaccactctgtgtccttcgttcgaaacgggtatatcttcacatgacatctagacagaagcatcctcagaagcttctctgtgatgactgcattcaactcacggagttgaacactccttttgagagcgcagttttaaactctctttttgtggcatctgcaaggggacatgtagacctctttgaagatttcgttggaaacggaatcatcttcacataaaaactatacagatgcattctcaggaactttttggtgatgtttgtattcaactcccagagttgaactttcctttggaaagag

SEQ ID NO: 325844 - DNA, 518 bp, Homo sapiens
gttcaggtttgaaacactctttttgtaggatctgcaagtggatatttggaccactctgtggccttcgttcgaaacgggtatatcttcgcataaaatctagacagaagcmttctcagaaacttctctgtgatgattgcattcaactcacagagttgaaccctcctatggatagagcagtgttgaaactctctttttgtggaatctgcaagtggatatgtggacctctccgaagatgtctttggaaacgggaatatcttcacataaaaactaaacagaagcattctcagaaacttctctgtgatgtttgtgttcaactcccagagtttcacattgcttttcatagagtagttctgaaacatgcttttcgtagtgtctacaagtggacatttggagcgctttcaggcctgtggtggaaaacgaattatggtcacataaaaactggagagaagcattgtcagaaacttctttgtgatgattgcattcaactcacagagttgaaggttccttttcaaagagca

SEQ ID NO: 325845 - DNA, 531 bp, Homo sapiens
attctcagaaacttctctgtgatgattgcattcaactcacagagttgaaccctcctatggatagagcagtgttgaaactctctttttgtggaatctgcaagtggatatgtggacctctccgaagatgtctttggaaacgggaatatcttcacataaaaactaaacagaagcattctcagaaacttctctgtgatgtttgtgttcaactcccagagtttcacattgcttttcatagagtagttctgaaacatgcttttcgtagtgtctacaagtggacatttggagcgctttcaggcctgtggtggaaaacgaattatggtcacataaaaactggagagaagcattgtcagaaacttctttgtgatgattgcattcaactcacagagttgaaggttccttttcaaagagcagtttccaatcactctttstgtggaatctgcaagtggatatttggacctattttgaagatttcgttggaaacgggagaatcttcacaggaaagctaaacagaagcattctcagaaacttctt

SEQ ID NO: 325846 - DNA, 550 bp, Homo sapiens
aaaataatcgctaaggaactgaaaaatttcagtgtgcctagcttgatttaaaaatgttattttcatcttaagtgacttgaaaaatctttctgcrgtataatctgcaatgatgtccacattagtaagacgaaaagcaaacactataagaaatagctcctctgtcacctgaaaattctggaacacctaacaacatcatggtgagacttcagatttgttgcttgacattaatagccaagctgggtatctttagcttcataaattagaaaaaaaaataagttatacatgtacacataaatatagtcctctgtgtgaaggcttcagaacacacaggaacgttcagtgctgctactaatgttatttacattccagaacactgacagaaaaggtactaaattaagatttttttaaaaaaaggaaaatatgtttggttgtttataaaagcagtagaatacagttatgggggatatcagtttaatttcttcactcagcaagagcccatatttttttcaaaggagacgtacatatctatcagtcaatcatactacatttg

SEQ ID NO: 325847 - DNA, 550 bp, Homo sapiens
aaaataatcgctaaggaactgaaaaatttcagtgtgcctagcttgatttaaaaatgttattttcatcttaagtgacttgaaaaatctttctgcggtataatctgcaatgatgtccacattagtaagacgaaaagcaaacactataagaaatagctcctctgtcacctgaaaattctggaacacctaacaacatcatggtgagacttcagatttgttgcttgacattaatagccaagctgggtatctttagcttcataaattagaaaaaaaaataagttatacatgtacacataaatatagtcctctgtgtgaaggcttcagaacacacaggaacgttcagtgctgctactaatgttatttacattccagaacactgacagaaaaggtactaaattaagatttttttaaaaaaaggaaaatatgtttggttgtttataaaagcagtagaatasagttatgggggatatcagtttaatttcttcactcagcaagagcccatatttttttcaaaggagacgtacatatctatcagtcaatcatactacatttg

SEQ ID NO: 325848 - DNA, 517 bp, Homo sapiens
tttttattattaaaaatgtttatcttctaaggaaaatgaaaagttgaaaaccactggtgttgtcatctttttaatatttctttaatctcataaccattaaattagcaatttgactttgtgtgttgaactgtagtttatatgccaaaacaccaaggttctgagttctatagaattattgtttacttatataaatatttatatttacttataaatttacttatatgaatattaatttacttatataattatattaatttacttattaatttacttatataaattacttatatacatttacttatataaatctaggaaatatggcctaccacttataacaaaacatgaatataattagattgcaagaaaaatagaatgtcaaaatcctgacttttttaatatcttaaaatatggaaattatttgctttccacttttctatgttaaaaattmtttcatgaaattaaatatagttagctgttaggctttctttaatgtatttacaaatgattttagcaaaat

SEQ ID NO: 325849 - DNA, 530 bp, Homo sapiens
ggaggattaagtaagtcagatacttagaagttaattcaatataaatatgaaagtgttataagcatgagttttgaagtcagaatctatgagatgtagatttgaatcccagatatgcaacttatgcaacttacattggttaagtcacttaatttatctaagcctcactgtatttacctcygtaattagtatttcaaaaacagtgaaaaactagacaaatatatgaaaaaaaaaacctctttctggaacttgaacaattggcaacacaaaagtatgatcctgaaagaggggaaataaatgaagtaaggttttggtagcccttattttctgtgtagagacgctttccatccagatcagggagtaggtaggggagacataagtagtaaagtactgtgtcactaagctgagaagacaaagataagatttggagaggctgaagtggctggaattgcagagcacagtgttagaaagaatggcattactcaaataatgtgctctgaagatctgcataggagtgtcacatgaggctgggc

SEQ ID NO: 325850 - DNA, 530 bp, Homo sapiens
ggaggattaagtaagtcagatacttagaagttaattcaatataaatatgaaagtgttataagcatgagttttgaagtcagaatctatgagatgtagatttgaatcccagatatgcaacttatgcaacttacattggttaagtcacttaatttatctaagcctcactgtatttacctccgtaattagtatttcaaaaacagtgaaaaactagacaaatatatgaaaaaaaaaacctctttctggaacttgaacaattggcaacacaaaagtatgatcctgaaagaggggaaataaatgaagtaaggttttggtagcccttattttctgtgtagagaygctttccatccagatcagggagtaggtaggggagacataagtagtaaagtactgtgtcactaagctgagaagacaaagataagatttggagaggctgaagtggctggaattgcagagcacagtgttagaaagaatggcattactcaaataatgtgctctgaagatctgcataggagtgtcacatgaggctgggc

SEQ ID NO: 325851 - DNA, 645 bp, Homo sapiens
agcctgcgtccaggaagggagcctggggcaccttggtgtgatagatgctgaggggacagggccaccagagggagcctgagagyccagagaagactaagagaatcatgtgaccctttgagggacttgaaggtaggctgtggggagtggagggtctacaaagaaggataaaggggcccagctttcctaggtgagccttgaggaccctggagagaagctgatgaggtctgagattactgaaaatactacaggagcattgggatcactgggggagggttctggggagtctggaggatctgggggaccttgggggaaagcgtatggggtttgggagcatggaatgaactaggggagctaggggtggtcattggtggagcttggacgtgcctggaggagcctggagggatgatctgcccctcaatcaatagaaccagttaagaagagaccatctcccaaccctgaataggctcagtgtccgaaggtaggttgtgtagaaatgcatccccacaatcacaagaatcaatgtgaaagtaatatcaggagttttatttcagctattggtgggtcaatcttttttctctgtggaattttttttcttccaaagtttcctgttttcttcataatttaatttccttcttagcttttttt

SEQ ID NO: 325852 - DNA, 645 bp, Homo sapiens
agcctgcgtccaggaagggagcctggggcaccttggtgtgatagatgctgaggggacagggccaccagagggagcctgagagtccagagaagactaagagaatcatgtgaccctttgagggacttgaaggtaggctgtggggagtggagggtctacaaagaaggataaaggggcccagctttcctaggtgagccttgaggaccctggagagaagctgatgaggtctgagattactgaaaatactacaggagcattgggatcactgggggagggttctggggagtctggaggatctgggggaccttgggggaaagcgtatggggtttgggagcatggaatgaactaggggagctaggggtggtcattggtggagcytggacgtgcctggaggagcctggagggatgatctgcccctcaatcaatagaaccagttaagaagagaccatctcccaaccctgaataggctcagtgtccgaaggtaggttgtgtagaaatgcatccccacaatcacaagaatcaatgtgaaagtaatatcaggagttttatttcagctattggtgggtcaatcttttttctctgtggaattttttttcttccaaagtttcctgttttcttcataatttaatttccttcttagcttttttt

SEQ ID NO: 325853 - DNA, 564 bp, Homo sapiens
taactaaatgcatatatacatgtatgtatatataaatctcaaactattaagtctttttgatctttagtttcctgcccaaacctgcaaacacttgtgctcacttgtttcttgagtttttagttaagaattggaaatttagtaaatttaccttgactctattctgaccgtaaaagaagcaattaggctactcttcttcttaggcattctctctctaaattagctcagtggtcacttatgctctagggccattttttttttttttaggaataaactatgtcattaagatggaaaagacttccccagaagcaagctatgttttcagtctctggatcctgaatactcaagcaagtagttaccaaatgctttcaagtccaaaagaggaatggggttgaagggcgtggaaggggaaaaaataatcacatgaatcaaacttagccttatcctctttttttgggttttattttctcattttgactccctcatcccaacatgaaacrttcagaagaaaatatcatttgtattaacacctattgacaggcacaataaaaatttctactttcatct

SEQ ID NO: 325854 - DNA, 564 bp, Homo sapiens
taactaaatgcatatatacatgtatgtatatataaatctcaaactattaagtctttttgatctttagtttcctgcccaaacctgcaaacacttgtgctcacttgtttcttgagtttttagttaagaattggaaatttagtaaatttaccttgactctattctgaccgtaaaagaagcaattaggctactcttcttcttaggcattctctctctaaattagctcagtggtcacttatgctctagggccattttttttttttttaggaataaactatgtcattaagatggaaaagacttccccagaagcaagctatgttttcagtctctggatcctgaatactcaagcaagtagttaccaaatgctttcaagtccaaaagaggaatggggttgaagggcgtggaaggggaaaaaataatcacatgaatcaaacttagccttatcctctttttttgggttttattttctcattttgactccctcatcccaacatgaaacgttcagaagaaaatatcatttgtattaasacctattgacaggcacaataaaaatttctactttcatct

SEQ ID NO: 325855 - DNA, 590 bp, Homo sapiens
attaaatacaaaaactcatcactatatccaaggttacctagatattctcctctgtcatcttctagagctattatagctttatgttttgcattttcattgatggtccattttgcattaatttttgtgaaagatatgacttctgggtctattcattttataacatatggacttccaatcgttccagtatctgttaaaaagacaaatttttctccactgtattgcgtttgctcctttgtcaaagatatgctgactgtatttgtataggtctattaccgggatctcttttgttccattgctctgtctattcttttgccattaccacattgcctcaattactgtagctttacggtaaatcctgaagtcaggtaatgtcagtactccaactttattcttcttcttcagcattgtgttgrctattttgttttgttttgctttccttgtctttccatacaaacttagaatcattttgtctatatccatgaaatagcaattggggttttgattgggattgacttaaatctattgatcaagttgggaagacttgacacactgacagtgttgagtcttttcatccatgaacacagactatt

SEQ ID NO: 325856 - DNA, 586 bp, Homo sapiens
gatttcatgaattaattttctaatattgaaccatcagtcctgcatacccaagacaagtcctattttgttgtggtgcataagtctttttaattgttgctggacacaatttgctaatatttgttgaggatttttccatttgtattaatgaaagatactggtctgcagttttactttcttgaaatgtctttatcttattttggcattatggtaatttggcctcatagagtgaatttaaaaatattctctctgcttccattttctagaagagattatgtacataaagaagaaatgtaygtacatcaagaaaaaatagaggccaggcgcagtggctcatgcctgtaatcccaggactttgggaggctgaggcgggcagatcgcctgaggtcaggagtttgagactagcctgcccaatatggagaaaccccatctctactaaaaatacaaaatcagctgggtgtggtggtgcacacctgtaatcccagctactcaggtggctgaagcaggagaatcgcttgaacccgggaggcagaagttgctgtgagctgagattgtgccattgcacttcccaaaggacaaaaacgagcag

SEQ ID NO: 325857 - DNA, 553 bp, Homo sapiens
aactgttaatatgccatttcagtgtctctttacttctttatatgaaaatttatgattccaaactgagacaagatcaaacggaataaatttgaggtaacacaaggcccacctacctataccaaattatcattttctctcctaagagcagcagaggtatttatcgaggcttagtattatttattaataaaaaattatagacaagctgttagtgaactgctaagtgcagtatcatattcagctctaccacatcttgaaatagtgggcttcaattcatgtttcatgtgcagattagtattcatattacttacattaaaaggagtagaaattggtartaaaattcttagagaatctttggacaatggtcctttcatgtctctgttcataatcttggtattaaggcaatttactaagccttatttatgcttcaaacattgtattttagaatgtactctcatggatatttcctcatttgctcttcctgtgtactcattcttatttctagttaatgtaaagagaacactgagtctcagagaggttaggtaacttgtattca

SEQ ID NO: 325858 - DNA, 553 bp, Homo sapiens
aactgttaatatgccatttcagtgtctctttacttctttatatgaaaatttatgattccaaactgagacaagatcaaacggaataaatttgaggtaacacaaggcccacctacctataccaaattatcattttctctcctaagagcagcagaggtatttatcgaggcttagtattatttattaataaaaaattatagacaagctgttagtgaactgctaagtgcagtatcatattcagctctaccacatcttgaaatagtgggcttcaattcatgtttcatgtgcagattagtattcatattacttacattaaaaggagtagaaattggtaataaaattcttagagaatctttggacaatggtcctttcatgtctctkttcataatcttggtattaaggcaatttactaagccttatttatgcttcaaacattgtattttagaatgtactctcatggatatttcctcatttgctcttcctgtgtactcattcttatttctagttaatgtaaagagaacactgagtctcagagaggttaggtaacttgtattca

SEQ ID NO: 325859 - DNA, 564 bp, Homo sapiens
ttttctctttttccgtaacagtgagattgcttttctacagaactcatgaatttatccatattgtattgccataggacaatcttacattccaagctctttgtatgaatatttcaaattggggaaatgaaagcagctagctgaacagtctgaaaatgtagcaaaggcattctttgctggttttgttattctgcttcactctctttgattaaaactggcccactgacaggatttcctgaaatgaggttcaagttaataatcccaaatacaagcatcttaagaaactcattctcygtaccagtctttagttaaaaacttagtatggcttggatttaagctgtagataatgaggtttaagaaatccaggggagaaatacaagctttctcaaatagcactagtaataaaaattctatttatgggctaaaggtatagaattgaggcacagtgtgcttctactagtgtatgtagagctttaatttaactcgaaatcaggatgaactaggccagatggttaagaagtgtattctctgtcttcagataaaattaataggatgctccctttgtaa

SEQ ID NO: 325860 - DNA, 587 bp, Homo sapiens
gaattagaaggtagatcacaataaattagcgtgctctggaactctaagtggaggagaactggcaggtaataatttagttgaaattacccatctaaaggtgagtatcattccaaaaagttaattagcattgttagcagctgcaagctgggtatttagctcagatggcatatggaagccatctgtcacaatgcctggtacatagtaagcactcagttaatgattattaatattattttaaaatatctaattttcctataccatttccttcagtttggagagcactgtctaattgctttcttccctactgaaatgatactagatgattaaccacgttaaagaaaaaggtcctccacacccacacatccatgtctcacctgaaagattcctgcccttgtcatgatgaagtgaacatgactactatgatcaaggttgtatctccatagcagctaggacattaaatggtgagatgcaggaaatttacacacactcatgcttgtgtagccrtttcattcatagtgtggagatctgatttcagtgtataaatgattcgtaaatcagtttgtatcaaatgcgtagtcatatggatc

SEQ ID NO: 325861 - DNA, 584 bp, Homo sapiens
tggccaaaatactttcttatgtgacatgtttataatcaatgataaagtaattagagaaaatatgtgtgtatgtgtgtgtgtatgtgtgtgtgtgtgtaataactagaaaaatccaggatactgtaattatcccataggaatgttgattgagtgcccgtggggagaacatattgtgtgtctgtaatattattttccattttctttagaatttccaactttaacctgcaatgaatactactattttatatatagaatataattttctactcattattctcytacagttttagcaaacctagccaagaaaaacaatattttttttcagtagtacctacactttaaaggaaagtctttggaatttagtatcctttgtaaataaaataggatacaaatgggagttttagtagaatgaagatattgaatgctttggctagttttaaagaaatattttccattttatatataatagacaaagatataatcaagggatgaaccagaacacaaaggtatctgtaaactggaaatcaataataaagtacctttctctatactgataaagcaaatgttagcttacatagcaattt

SEQ ID NO: 325862 - DNA, 460 bp, Homo sapiens
aattacaaatataaagcatctggcttgccacagcctgagagtccaagggaagcgtcatatacttctgtatatccaaggacagaactaaataaaggagagggattaattggcacctccaggcagtttccagtcagtttatgaaagagatattcatgtgaaaacatttaatttccaacccgcctgtttccatgaatgatggtaaaaataatacaatcttactttcacatcaattatgccagtttcttgttgtctcactactakgaagaactttctcaaattaaagaaaatttggaaaactcacacccagaattaaagtaagatactgaacctgtataaaactccaaatgttcaccattccttgtcaagaattttatctaggaaaaaagaatactggattatctttctaccaaaatgccaggaagctcatgtttgatttatgcttcaaggtattgagttgtaa

SEQ ID NO: 325863 - DNA, 442 bp, Homo sapiens
gttctgtaacagattttggctgtttaggcacactttatagtagtttgtagaaaggaaggatttagctactccaactcaagactyaattagaaaattatcacatcatcacatttcaaatgtttttgaaacttttggaaaatggaaagccaaggcagtgttctagtcatgatatacatgtctaacattattgttaaccgtgttttcctggaataattaggatggtggagtattccaaattactatgtataccaaataacagaaagttaacatacattttgtgcaaagtatgtcaattgtcaaagaaatgagataacataaaacacactagtaaccactaaaattatcctaaacatattttcgttttttaaacttaaaaatgctgctcagaatctagtagtgtattaatacaccaaattatcagatctcatagatatacacaaat

SEQ ID NO: 325864 - DNA, 442 bp, Homo sapiens
gttctgtaacagattttggctgtttaggcacactttatagtagtttgtagaaaggaaggatttagctactccaactcaagacttaattagaaaattatcacatcatcacatttcaaatgtttttgaaacttttggaaaatggaaagccaaggcagtgttctagtcatgatatacatgtctaacattattgttaaccgtgttttcctggaataattaggayggtggagtattccaaattactatgtataccaaataacagaaagttaacatacattttgtgcaaagtatgtcaattgtcaaagaaatgagataacataaaacacactagtaaccactaaaattatcctaaacatattttcgttttttaaacttaaaaatgctgctcagaatctagtagtgtattaatacaccaaattatcagatctcatagatatacacaaat

SEQ ID NO: 325865 - DNA, 622 bp, Homo sapiens
ctccaaattctgtcaactggttgycttgcgggaaatgagaactaggtttgtagaacttccaatgtttcagagaaagctagaagtctgcattctggtattgaatctcccatgccagaaaaaagtagccataggatgaatgaagggacatcattttatcacttctaatcccaagatttcatttgtggccgaggaaaaaagaggtgaaaacaaacaaaagcaggggtctctgtggtttgtgtagagtccctttgtggttataactgctgccttgaagatccattccatttacacaatgaagtgtacatcagagagcccctttctagggcattctttctttccttattctctgcatttctttacatccctggactaaagcttttcccaggacaggaattatgtcacatttatctttgtatgtcctgtgccttggcacagaaccaaaacttaataaatatctgtggaataaatgaatgaatcaaaaagggtgaacatgtaaagcgttaccagctttacagaaaggctgttcttggggaaatccctcaagacataggaacaggtgcttcagaactaaggtgaaagaaaaggtgaaaggaaacctgttgtcctgactcaggttgggtct

SEQ ID NO: 325866 - DNA, 570 bp, Homo sapiens
aaaatttaatttgttcaactaattttagagattttgcagctaagccaaaaattttaataattaatagaccgatggtatgattattcatttattaatttcttcattcattctgcaaatatttgctgaacacctattataacctaactgggtgctggggataaagtgttaagccagatagccacataacatataacattcttcttgscctttcttatgataatgtttttctttaaagtgatttgaagtcaaagatctgggttaaagtcccaactctatttcttagctgataacttctagcaagtcctttaacttcacaggttctcagctggttcatttcagagaaaatggtacttgtctctctgatgaggttataagagactcagattttatgtccggaatgacaggtgagctgtacacacactgctacattggatgtacttgttgctgtcatcgtaacttgtatgcatatcccagttgtgcatgcttttacctctggcagccaaggaacaaccacggaaaatcaggatgaattacagattaagtttatctctgcaaggcattctcaggcaa

SEQ ID NO: 325867 - DNA, 565 bp, Homo sapiens
tttttctttttttcatagtagaactttttaaattttttttcaaatgaaatgtatgcaagaaaacctttcattccacagataaaattgaactaatctggctaatgtcccggagggagaaccagaaccccactcaatgccctcctcaatccctctcaccctaaatctccatggtgtgccctagaaatcccctagctctccaaggagcatagtttgaggactactaatttgtagtgacaaatctgattctcaagtgtgacttgccaaacgattcatttatttataagtatagtggcaaaccaatttgacgggcgttgtgaaagattctgggtttataacttgaatgagctcagagtctcctggggaaggcagacaagcccacagctccggtgcrgtggggcatgtgtcaccactaacatgtgaagagagtgagggcaattcactaacttggcttacaggagtctagaaaggtttcaacaggttgcaggtaactgaactggcagttgaagagtgagtgggaatttttcctggaagagaaaagtgggaggtacaggcttattacgagact

SEQ ID NO: 325868 - DNA, 470 bp, Homo sapiens
tgctaagctcttctgcagtcagcaatatggtcccacacttcttgcctggtacacccctggaagcagaaaaagcctcttagtgagaggagggagggtaggcaacaaggattgagtggccagtctggggttaggtgggccaggggattcagtttgccatttactgacagtcccttgtgtcttgagtgccttctggtgaggaagggcctcactttgactgggtggggtctgcagtctggtgaaaaggggttagaacagcttaggtgaacatctcacaacagtagcatgagaaagacatgggatttagagccagtggattttatgattgttaagctgtgtgacmctgggcaagttatttacccttcctcggccttagtctttttctctatgaaatgggaatcatgatgacttgtcagggctgtgaacagatctgaatgagtgcatggaaggaaaagcaactcgtaagccttata

SEQ ID NO: 325869 - DNA, 465 bp, Homo sapiens
ttctttcctcagcttgtctcatttataaaataatataaaagccactctctaccatgtagtgtttttgtgcctaatatatgagtagtatggaattgaatcttaacccactagcatctgtagtatgtgctactgcagtatacgaaaagatgcagtagatttctaaattttggggggaatattgtgttttatgcacatgcgttctataagggaaatttaggaaaccatgtagtgcatgttttcatacactatatttgtactggtatgaagtcacacagacagttggaatactgtcccgaagatatataattgtttgagtcacagaggttcctacractccattaagacagaaggtatagcctagagttggtgggtctgagacagtgtctccaaagtctgaaggataataactgaatatagactccaaaatttaaggcttcagcatcctcagagtccttgcatttgtga

SEQ ID NO: 325870 - DNA, 565 bp, Homo sapiens
tgtattgactcagtttactttttggtgcactattgaaatcactcaattgaacgggaacttatgccagtcctgagaggataagaaacttgttgaaaattatttttgccctctcaacaaaagacattagatttttaagtatcctagaattatcatgttatgtctaatagcagtcatcatagtgattaaggcttcccaggcctcaccaagatttgggtaacaaatgaagcaatgtagtagcttcgttcacccattttacttatttgaatgaaactggagaaaggctgggctaaaggaaagaagccctcactcccacacttaccctcttttttctcattcccttatgctatatttgtcttctttgccakattaaaccagaagcctcagccaaaatgaagagaaacacagaaggtatttcttagtttccaaagtacaatgttctgaggaattaagagagtttgaagagtaacttcctatgttcaatttggggagagttatgtagtaattttataacctccccactccaaaataatgctagtcataccagtatctgtcactcatagaaatg

SEQ ID NO: 325871 - DNA, 436 bp, Homo sapiens
atttgtttccaaaacacgtctcaaaagaaattagtgccaattgacagagaatttaaagacaaagcattargttgcaggaatggggaaagatgaggttcatatcaacagcgaaagcattcacctgataaaggacacaatatattcagaaaatcagaattctgattactaaaatgtagcattaaattgaatcttatccctacattactgttttgtatactgctggtttatgctaatttcaagaataaattgtcaacctaaattagtcaatttcactatcatcttgcttatggaaaatccttatgaaaataattacagaagatcaacaaagtttcataacctttgacctatccttcttatggttaggatagttataggttctacagcacaaattccaatagcttaaagctaaaaagaaactaaatgttcaataatgggg

SEQ ID NO: 325872 - DNA, 595 bp, Homo sapiens
tcatatcatgacacccctttgtctaaaaccctacaatgcttcccagctcatccagaaaaaaaatccraagtctttaccttgctacagggctctccctgcatgatctgccatgttgccttctctctgatccccttctcccacctcctaacactgtcttcactcactgcactccagatatcctggtctctctgcttctcaaaatgtttagcagagagctgggcatggtggctcacgcctgtaatcccaactcgggaacactttagaccaggagttcaaaaccagctttgtcaacatagcaagaacttgtccctaagaaaataaaatattagacaggcatggtgtgcatgcgtggagtcctagcacttgggagctgaggtggaaggatcacttgagctcagcagttcgaggctgccgtgaactatgatgacactactgaactctagcctgggtgacagagtaagattctgtctctaaataaatgtttaaaaagcctagcagaacagttatgcaaaatattaataagttctggagatctcccctacaatatagagcatatgattaacaatactgtactatttacttaaaaaggtactaa

SEQ ID NO: 325873 - DNA, 595 bp, Homo sapiens
tcatatcatgacacccctttgtctaaaaccctacaatgcttcccagctcatccagaaaaaaaatccgaagtctttaccttgctacagggctctccctgcatgatctgccatgttgccttctctctgatccccttctcccacctcctaacactgtcttcactcactgcactccagatatcctggtctctctgcttctcaaaatgtttagcagagagctgggcatggtggctcacgcctgtaatcccaactcgggaacactttagaccaggagttcaaaaccagcyttgtcaacatagcaagaacttgtccctaagaaaataaaatattagacaggcatggtgtgcatgcgtggagtcctagcacttgggagctgaggtggaaggatcacttgagctcagcagttcgaggctgccgtgaactatgatgacactactgaactctagcctgggtgacagagtaagattctgtctctaaataaatgtttaaaaagcctagcagaacagttatgcaaaatattaataagttctggagatctcccctacaatatagagcatatgattaacaatactgtactatttacttaaaaaggtactaa

SEQ ID NO: 325874 - DNA, 595 bp, Homo sapiens
tcatatcatgacacccctttgtctaaaaccctacaatgcttcccagctcatccagaaaaaaaatccgaagtctttaccttgctacagggctctccctgcatgatctgccatgttgccttctctctgatccccttctcccacctcctaacactgtcttcactcactgcactccagatatcctggtctctctgcttctcaaaatgtttagcagagagctgggcatggtggctcacgcctgtaatcccaactcgggaacactttagaccaggagttcaaaaccagctttgtcaacatagcaagaacttgtccctaagaaaataaaatattagacaggcatggtgtgcatgcstggagtcctagcacttgggagctgaggtggaaggatcacttgagctcagcagttcgaggctgccgtgaactatgatgacactactgaactctagcctgggtgacagagtaagattctgtctctaaataaatgtttaaaaagcctagcagaacagttatgcaaaatattaataagttctggagatctcccctacaatatagagcatatgattaacaatactgtactatttacttaaaaaggtactaa

SEQ ID NO: 325875 - DNA, 556 bp, Homo sapiens
aagtaactcaagcttcaggcaacataaaacctcatccaattcatacccaatgcttctttctccatctaattccctcaggaacttgatctctgctagagaattgacaaaaatacactctctaatgcaataatgaataatgctgatgtaatttcctctaaggaattactttctctgactgtttagctagggattctctgccattacaaacttttaaccaagagaagtttgataaaggctacaaatcattctacaaaagatagccgtaatacaraaactgatgtaagccacactctgagcagatgggctgtctgagtgtcttctgtcttctgactgtgtacaataaaatcacacatgggacttgttactcaccatcacctttatagttcaaaagaaggtttagtttaagcaaacaaaaagaatgaagaaaaaggcatcagaataaaaggtccacacatttaggccctgtgaaaaataaatccccaaggattggagatggcaatgctacatgttagtcaacagctcagattctggattcagatatactagttttaaattc

SEQ ID NO: 325876 - DNA, 556 bp, Homo sapiens
aagtaactcaagcttcaggcaacataaaacctcatccaattcatacccaatgcttctttctccatctaattccctcaggaacttgatctctgctagagaattgacaaaaatacactctctaatgcaataatgaataatgctgatgtaatttcctctaaggaattactttctctgactgtttagctagggattctctgccattacaaacttttaaccaagagaagtttgataaaggctacaaatcattctacaaaagatagccgtaatacagaaactgatgtaagccacactctgagcagatgggctgtctgagtgtcttctgtcttctgactgtgtacaataaaatcacacatgggacttgttactcaccatcacctttatagttcaaaagaaggtttagtttaagcaaacaaaaagaatgaagaaaaaggcatcagaataaaaggtccacacatttaggccctgtgaaaaataaatccccaaggawtggagatggcaatgctacatgttagtcaacagctcagattctggattcagatatactagttttaaattc

SEQ ID NO: 325877 - DNA, 599 bp, Homo sapiens
caactgggctccccaagactttaagaatggtttctgtgtcaaatctcctactactaatgccgcaactactcagcactctgtcaaaatactctggtgattaaaggatctccagtcacaataactttctatgccaggccatcgctgttctagggctgcagttcaggggttaatctggcccctttatgtcactcattgcatgctattatggatggggagaggcaaggaataaaatgagctatagttttactacttagaaagcttttcaacatcattaaattaaaccataaaggcaacagtattattacatcttagccccaaattgatttacatcaacttttacctagtacatgagttaaaatacacaacaaatatttacctatatgaaaaatgtagaaagaaaaactgatcacacacaaaaatatgattcatctggatcactgttgccagaatatattattacattggggcattacagcatccacttttttttttttttttttttttagagctggaagatgcttcctctttacattagcatttctaaaaaygcaagatgcacaacactggaatgggagataatttttggattgtacagagat

SEQ ID NO: 325878 - DNA, 647 bp, Homo sapiens
tgtgctccatctcactctttacttgtgcagagtctgaaatcctgagaggcagagtgatttgatcaaagtcacaaaaccagaaggtagcaagtacagttctagactccttgggtttctattacaattacaccaagaaaaaaaagaaagaaagaaaaagactaaaactcaaaagcaattyctaataactgaaaaaaaattcataatattgatttcctctaaaatttatttactgaactggagagcaagtttaaataatatgaaatccataaacaattatgaaatgccattgataatcttcttaaattcaactgaatcgagcgcatagctgaaatcataagggaggtacaagaaatctagagaatcaccttcaagtctggttatatctagttagataaatattacattaaaaccaaagttttcatgtaaatatcacaacattggagagaagagcattcccaaagacggtatccaagaaccctgctgaagaactaaagaggataaggaagaatttatctccacttgaaaatttttattttgcaaggatcatttgtgtgcaaataatatttgcctgtcttatcagtacttcataacttcccaacaaaattctatacagaatatcacatcaggttctagcaaaagctgttgac

SEQ ID NO: 325879 - DNA, 493 bp, Homo sapiens
atcagggaatttggctctgagcaactctaacttcctgacagcagacagtgtctctcaggagacagtagtactttttttctcctcagaatatttaattgtttttatggagatataattcacacatcatacaattcagccttttaaaatgtacagttaagtgatttttagtgtactcacgaggttgagtgaccatcaccrctttctaatgccagaatattttcatcagcctaaaaagacatcacatatccaacagcagtcgttccttatcctccctcactccttggctctgggaaaatactattctactttctgtccctatggctttgtctattctggacagtccataaatggaatcatacaatatgtggcctttgtctctggcttcattcacttagcacggtatcttcaaagtttgtccatgttgtagtatcagtacttccttcctttttatggctgaataatattccactgtatgggactaccacatttttta

SEQ ID NO: 325880 - DNA, 533 bp, Homo sapiens
agggaagctccataacggaggagtggaagacagattgggattacagtttgggaaacttggaatctgattatgccactcattatctgtgggactttggacaaatcagtgtacttgtgtgtaaaatgagagaactgggataggactataattatgtaattctgtttatcatgtatcagggaatttggctctgagcaactctaacttcctgacagcagacagtgtctctcaggagacagtagtactttttttctcctcagaatatttaattgtttttatggagatataattcacacatcatacaattcagccttttaaaatgtacagttaagtgatttttagtgtactcacgaggttgagtgaccatcaccgctttstaatgccagaatattttcatcagcctaaaaagacatcacatatccaacagcagtcgttccttatcctccctcactccttggctctgggaaaatactattctactttctgtccctatggctttgtctattctggacagtccataaatggaatcatacaat

SEQ ID NO: 325881 - DNA, 549 bp, Homo sapiens
acccagtatttgtttcctgttcctgcattaatttgtttagtataatggcctccagctgcatccatcttcctgcaaagaacatcatttcattcattttcattgttgcatagtattccgtggtgtgtatgcaccaaattttctttaatccaccatcgatgggcacgtaggttgattctatgaccatgaatagtgctgtgacaaacatacaagtgcatgtgtctttttttttttaattatttcttttcttttttttccttttcttgtttttgagacagggtcttacactgtcacccaygctggagtgcagtggcacgatcttggctcactgcagactccaaatattgagctcaaacaatcctcccacctcagcctcacaagtaactggggctaaaggcaggagccaccacggctggctaacttttaaattttttttttgtagagatggtatccccctgtgttgccctggctggtctcgaagtcctggactgaaacagtcctcctgcctcagcttcccaaagtgctgggattataggtgtgagccactgtgcc

SEQ ID NO: 325882 - DNA, 610 bp, Homo sapiens
gagctcaatctacagctccggttaatgtaccagttgctcaactggtagacaacatcaaatgaacaattacttaagaaactagtagtttaaaagagaatttaaaacttatttattgagttttaaagcagtatgttgaaatgtaatataacttaatgattaataaaaataaaaaaagtccttgcttttyttacaatttttaaaaattgtggagatttacaatttttaaaaaagctttcacatgtattaacgcgtatgttttaaaattccccctttaaaaatgatagagaactgatttataagccacacaaaaaaattagcttcattaatttatagtcacaattcatttttgaccaaaaaacagtattacccagcatgaacaccaacatttaccatgaaatggctctgaacaagtttctaaatatggaaagcttagctgttgccaaaaatgaaatctaacttcaaaggacaaggatttacaagcacttgaaatattcagaggaataaaataggagccgtaaagaaaattccaaaagaaaagatccataagtattttaaacaacagcttaaatgtgattgataagtgaccacactgataagcgaccacacgtct

SEQ ID NO: 325883 - DNA, 596 bp, Homo sapiens
tttatattatatatatttataaatatatatatttatatgtaaaatatctatctatagatagatatatttgtatttttagtagacagggtttcaccatgttggtcaggctggtctcaaattccttgcctcaagtgatccgcctgcctcagcctctcaaagtgctagtattacaggtatgagccaccgtgcccagscacaaattttcttaatggcatctgggatggtgaatcctttctagaagagtttcaatttactttgccgagatccatcagagaagtcactatgtatggcagctataaccttataaaatgcatttcttaaataagacttgaaagtcaaaatgactcctgatccattggctgcagattcgatgttgtgttagctggaagggtaacaatatacatctcctaatatatctccatcagagctcttaggtgacaaggtgcattgtcaaacacaagtaatattttgaaaggaatctttttttctgagcagtaggtctcaacagtgggcagaaaatattcagcaaaccatgttgtaaacagatgtactgttatccaggctttgttgttccataaaagaacacaggcagagta

SEQ ID NO: 325884 - DNA, 604 bp, Homo sapiens
agcaataagactgtattaatttcttattcatgcgttgcctgaagttgcacttttaatttccttcaagaatttttcctttgcattcataacttagccaaccatttggcgcaagaggcatagctttcagcctgtcttggctttcaccatgccttcctcattaaggtcaattccttctagttttttattcaaagtgaaagatgtaygcttcttcctctcatttgaacacttaggggccacggtggggttagtaattggcctaatttcaatattgttgtttcttagggaaaagggaggccccaggagaagggagagagatgggggagaggccagccagtggggcagccagagtacaacattgatcgattaagttcttcgtcttatatgggtgcggttcatggtatcccaaaacagttacaatagtcacatcaatgatcacagatcactataacagatataatagtaagaataaactttgaactattgtgacaattacaaaaatgtgacactgagatacaaagtaagcacatgctgttgggaaaaaggtggcagtagacttgctcgatgcagtgttggcacaaaccttcagtttgcaaaaaaaactcaa

SEQ ID NO: 325885 - DNA, 604 bp, Homo sapiens
agcaataagactgtattaatttcttattcatgcgttgcctgaagttgcacttttaatttccttcaagaatttttcctttgcattcataacttagccaaccatttggcgcaagaggcatagctttcagcctgtcttggctttcaccatgccttcctcattaaggtcaattccttctagttttttattcaaagtgaaagatgtacgcttcttcctctcatttgaacacttaggggccacggtggggttagtaattggcctaatttcaatattgttgtttcttagggaaaagggaggccccaggagaagggagagagatgggggagaggccagccagtggggcagccagagtacaacattgatcgattaagttcttcgtcttatatgggtgcggttcatggtatcccaaaacagttacaatagtcacatcaatgatcacagatcactataacagatataatagtaagaataaactttgaactattgtgacaattacaaaaatgtgacactgagatacaaagtaagcacatgctgttgggaaaawggtggcagtagacttgctcgatgcagtgttggcacaaaccttcagtttgcaaaaaaaactcaa

SEQ ID NO: 325886 - DNA, 587 bp, Homo sapiens
atatatattcccactgtgttaaacaacaatagttgaagtgatacagttgaagaataaatataaattatttgggaacagatttcatttctgtgcatgtatgtctcagtgtttaaacatactcaaagcatgaaaggtcagagrgtgaaaacagaacctgagttttccttgttttgaatattattgggtattgaggcaaggactagctttctaccatccattaacctcttcatcatgaacaaagagtgaacctcaagtgtgatatttggctaagggcacttttaagtaaaatctttcacatattcccagtagattttgtaaagaatgctggggaccaatttttaaatgcaacatcttgaacaaattacagcaaagaaaattttgaggcctttataatttaagtgttatttttactactaatgtgaattcaaccctagcaaattaaaacaggagaattaattggatatgcaaatgagattattcagtatataaatctaattacataccaatttgctttaacagcatgaaaaaagaataaattgttctatgtaaattgattgtcttaaataaccacctgtagcccagcaaaa

SEQ ID NO: 325887 - DNA, 580 bp, Homo sapiens
agctgttcttgtgtccagttattatctcacagtcactgtttagctttgtaagtgttcccactacccaatcatccttttcttaaagaactgcatcaggtaaccactgattctttactacatttccccccttgtttatcgtattctttccatcaattcaccatttcctcagtatataatccctggtagacatatttctgtacaaaaactgtgtgtctgcttttggtagaaagccttattccttccatgctaacccataaatagccttacaaaatctctgaataaagaaaaatataaaaagygctacagtgttagagtacagtttttgatctgttgtttcaacagcagttttcatgtataatatgttggtgtttgcttttgttactcaatttagactcttcaacttgtcatactttaccacaatgtaatgaattctccaacattgccatttgagagcttacaaagcttgcatgaaaagcaaagcaatgtcagattattctcttactcatttctaatcctttagcccccagctacatcccctttaagccagacaaaaacagaatttgttttacatataaatgtt

SEQ ID NO: 325888 - DNA, 634 bp, Homo sapiens
ataatagcaaaaaaagagaggatatcaatagtaagtggatagcaaattatagaataccaattcacaaataatgatggaaaagtgaaaataagataaacagatctagttatagcagcatggatgaatctcaggaacttaagctgagtgaaagaagcaagtcacaagtttcaacgtaactctattcactcaaagtttatattgggagatacatgtggcaaaaccataaaagtagtggaataataaacacaaatttcaggaycatggttacacttgggagggaagagactggtatcacagaggagcactctggaaatttcagagctaatggtaaatgataattggcttaaactgtcattaagtatctgttacatagttattctttataccttaggtatactttgtaagtattcttgtatattgacctaatatttaatgaaaatagttttagaatagaatatacaagccatcctatgaagaggtcccaggatgtccagggtcccagaagtctgctcttgtggcgttgtgggaggtgtgcatggatttttagagacccactacctttttggaggatgaagatggcagtgggttacaattcttattaagcacgattacagtatgtactgaaaacaatact

SEQ ID NO: 325889 - DNA, 634 bp, Homo sapiens
ataatagcaaaaaaagagaggatatcaatagtaagtggatagcaaattatagaataccaattcacaaataatgatggaaaagtgaaaataagataaacagatctagttatagcagcatggatgaatctcaggaacttaagctgagtgaaagaagcaagtcacaagtttcaacgtaactctattcactcaaagtttatattgggagatacatgtggcaaaaccataaaagtagtggaataataaacacaaatttcaggaccatggttacacttgggagggaagagactggtatcacagaggagcaytctggaaatttcagagctaatggtaaatgataattggcttaaactgtcattaagtatctgttacatagttattctttataccttaggtatactttgtaagtattcttgtatattgacctaatatttaatgaaaatagttttagaatagaatatacaagccatcctatgaagaggtcccaggatgtccagggtcccagaagtctgctcttgtggcgttgtgggaggtgtgcatggatttttagagacccactacctttttggaggatgaagatggcagtgggttacaattcttattaagcacgattacagtatgtactgaaaacaatact

SEQ ID NO: 325890 - DNA, 634 bp, Homo sapiens
ataatagcaaaaaaagagaggatatcaatagtaagtggatagcaaattatagaataccaattcacaaataatgatggaaaagtgaaaataagataaacagatctagttatagcagcatggatgaatctcaggaacttaagctgagtgaaagaagcaagtcacaagtttcaacgtaactctattcactcaaagtttatattgggagatacatgtggcaaaaccataaaagtagtggaataataaacacaaatttcaggaccatggttacacttgggagggaagagactggtatcacagaggagcactctggaaatttcagagctaatggtaaatgataattggcttaaactgtcattaagtatctgttacatagttattctttataccttaggtatactttgtaagtattcttgtatattgacctaatatttaatgaaaatagttttagaatagaatayacaagccatcctatgaagaggtcccaggatgtccagggtcccagaagtctgctcttgtggcgttgtgggaggtgtgcatggatttttagagacccactacctttttggaggatgaagatggcagtgggttacaattcttattaagcacgattacagtatgtactgaaaacaatact

SEQ ID NO: 325891 - DNA, 568 bp, Homo sapiens
ttgtttgcttaatctgcaggaaagtggattgaactctccaggggtcagtttagggtatgtggtctcttgacagatcgggaagccagatataccttgtaagaggtacttctaaagccataacaatttggtcttcaaaataaatttaaagtgctatgaaagagaataaaggaaaagtcttgaattgtatatgtaaagatagtgcatctctgtacgtgtttgcatgcatacaaatctacccaacaacattgtggacaatttctgtgctacccaagtacactagctctttagttcctagaaagccctggggttgagccaagtggaaagaattttgtaaattgggatacagcagcagagagttaaatctccttgcattctttgttttggaccctyggcagactgttttgtttgaccccagagctgccggcttaagcacaaagaggactttataacgtcctcagcggcatttggaagcaggacctctgcacacaaatcataccctaaccctccttaacagcttagggcagccactgtgaagcaaggaatgcagttctgtgaactgtctctatga

SEQ ID NO: 325892 - DNA, 569 bp, Homo sapiens
tgtaaggacattgggactaattcaaaaatattttgcatagrtattgctaagttactgtgaaataattaagacatttggatcagtgaagagatacagagaaaaaggagtgctgttggatttgactgtactggctgacacactttaacaatgtaattatcttaaatgaagtgggtattgtgacaccgtagtcagtctgtcttatttcagtgagtgtttctggagtagttaatggggatattccatctagttcagtagatattgataaatatgtatttatggaaactatatagcagtttttacaggctgccagtaaattaccttgatccttctaccaatgtctgtgtttctgatcccccactcctccctccaatgatctgtattaccccaaatagtcctaggagatggtgtgagaagactgagtttgaggaggttgattttattaaatcacttcaacctttcagagagtaaataagttcttacggtagggcgtaatgccatgcaatactgaatgacttcttgaaatcctttcacttcacttttcctttaccaagcactttgtccagagtaat

SEQ ID NO: 325893 - DNA, 647 bp, Homo sapiens
catggttttaagtagagttgaatgaatatgtgaggaaggaagcattttgagcttttttgaacaagttttacaactgcaaagtgctattactattaaagataataatttagaagtaaatattatagcaactaagtgcaaaagagctcttagtgcactattttcatttcaccgtrtaaaaagaaaattggtagtaaaatatatagtgactatctactttgtaattcatttccgccaagtctattgactattctctcccttcggactttccctttggtaattcagaagctaccttaagttttgcaggaacccagctagaaggagttacagagtagatgacagctttgtctttttttctactatcagagggctcaacactgtggagtgatttgtgggggcatctgacatcatcagaggcgcaaaagtaatcgtgcttatcactaaagagagttggctctaagctttggtaaagtggtcctgatcccgtgtgatcctaaaaaaagatgagaggaatgatcattactgtttggagcctacaggctcaataaccttctaactctgctttttaattaaacacagagcacttaggggtttatttatccattatcaggcaggcaaatcctctactgacatcattagattttatggca

SEQ ID NO: 325894 - DNA, 556 bp, Homo sapiens
  misc_feature (1)...(556): n = A,T,C or G
gattcaanttgatgtagtattttaaagttaaagctctatactcagtattaacaaggtggttgcattttccacagagactctaacaaacgatgtagtcttaaatatcaattgatttacaatatctcttagcctgacatcaatattaaggctttaggatagctctcacatgagaaatctgatattttgaactttggatcataattaatttcacaatacagtattgttrtcttgtattacatattttttctcatgttaatttgacttactggctattaataataagaaacgcactatttcaatgaccgaagagtgcaaacattaggtagtgatgctagtagaaaaacagtttggacagtgcttcttaaacattagtgtgtggaaatgcagattctgattcagttagactgactgggactcaagactctgaatttttaattagctcccatatgatgtcagtcttggtggtccacagataacacttgagtaataaggataaagaccatgtggaattccctgttcagcccacatgagatttcccaactgaggaattctttct

SEQ ID NO: 325895 - DNA, 556 bp, Homo sapiens
  misc_feature (1)...(556): n = A,T,C or G
gattcaanttgatgtagtattttaaagttaaagctctatactcagtattaacaaggtggttgcattttccacagagactctaacaaacgatgtagtcttaaatatcaattgatttacaatatctcttagcctgacatcaatattaaggctttaggatagctctcacatgagaaatctgatattttgaactttggatcataattaatttcacaatacagtattgttatcttgtattacatattttttctcatgttaatttgacttactggctattaataataagaaacgcactatttcaatgaccgaagagtgcaaacattaggtagtgatgctagtagaaaaacagtttggacagtgcttcttaaacattagtgtgtggaaatgcagattctgattcagttagactgactgggactcaagactctgaatttttaattagctcccatatgatgtcagtcttggtggtccacagataacacttgrgtaataaggataaagaccatgtggaattccctgttcagcccacatgagatttcccaactgaggaattctttct

SEQ ID NO: 325896 - DNA, 621 bp, Homo sapiens
gctcatatgttgattggactgcctcctttccccatggatgttgtagtcttgattctttgttgtatttcagaaaggaaacctctaaaattttattattttacatttgaaattgttatttctattttattggaattggattttgattgtgtattatctcatatgtggagaaatcaggaatatcaaccatgttatgctacactgatgatcagtcaatgcattggcccataaaatgaacacagttatacaccagagatcaaatcattcccattaaaacaactagatgctaaaatagcactgatattaggaaaaccatgctatgacattaaaataattcaatccaaggtgaaaccgaaactgatttgtctgagattgtactactttactgacccattttattaaacgtaattttttaaaagcacttttaggaggtagatagtatagtgcattattgagattataggtggtggctaaagccctgtaagtatattactgaaacaaattttttcaattctctggtagaatatgaaccaagstttttttcaatattagcctttaaaaaactcttaatactccataattagcctacaatataataatttgtttccacctttagtatgacaa

SEQ ID NO: 325897 - DNA, 603 bp, Homo sapiens
tgtgacgtatttctaggactctcacctaaataaagttatccttttacctgggctctcctctcaggggttattgcaagktattgctggacgtaaagcctaggtgatgtgactcttctagactgcttagcctttgctcaatacaaaattgtaatgtttcaatggatccaagacctaaatgatgtgactatcatctcttgcctgagccctgaatacattgtgttttgtgacactgtgactctcttgcatgggccctgccaacagaaggcattatgacatatctctggctgcatcaattatttgatgtgactctgctgttttacctggacattgcccatagaagagattgtgacatatctctgggccaaatagctaggtgttggtgactctcctcttttgcctgtgccaggctcccagaaggaataatgaattatcactaggcccagcacaaatgcaatgtcattcttctgcctgattattgtccacaagggccactgtgacatatctctgggcccatgacctaggtgatgtgattctcattttctttctgggacttgtccacagtgaaaattgtgacatatttcttgctgtagcacctacattata

SEQ ID NO: 325898 - DNA, 603 bp, Homo sapiens
tgtgacgtatttctaggactctcacctaaataaagttatccttttacctgggctctcctctcaggggttattgcaaggtattgctggacgtaaagcctaggtgatgtgactcttctagactgcttagcctttgctcaatacaaaattgtaatgtttcaatggatccaagacctaaatgatgtgactatcatctcttgcctgagccctgaatacattgtgttttgtgacactgtgactctcttgcatgggccctgccaacagaaggcattatgacatatctctggctgcatcaattatttgatgtgactctgctgttttacctggacwttgcccatagaagagattgtgacatatctctgggccaaatagctaggtgttggtgactctcctcttttgcctgtgccaggctcccagaaggaataatgaattatcactaggcccagcacaaatgcaatgtcattcttctgcctgattattgtccacaagggccactgtgacatatctctgggcccatgacctaggtgatgtgattctcattttctttctgggacttgtccacagtgaaaattgtgacatatttcttgctgtagcacctacattata

SEQ ID NO: 325899 - DNA, 603 bp, Homo sapiens
tgtgacgtatttctaggactctcacctaaataaagttatccttttacctgggctctcctctcaggggttattgcaaggtattgctggacgtaaagcctaggtgatgtgactcttctagactgcttagcctttgctcaatacaaaattgtaatgtttcaatggatccaagacctaaatgatgtgactatcatctcttgcctgagccctgaatacattgtgttttgtgacactgtgactctcttgcatgggccctgccaacagaaggcattatgacatatctctggctgcatcaattatttgatgtgactctgctgttttacctggacattgcccatagaagagattgtgacatatctctgggccaaatagctaggtgttggtgactctcctcttttgcctgtgccaggctcccagaaggaataatgaattatcactaggcccagcacamatgcaatgtcattcttctgcctgattattgtccacaagggccactgtgacatatctctgggcccatgacctaggtgatgtgattctcattttctttctgggacttgtccacagtgaaaattgtgacatatttcttgctgtagcacctacattata

SEQ ID NO: 325900 - DNA, 589 bp, Homo sapiens
cagcacacctgtgaggctgtgactctactaaggaggcatagtgcacagaagaaagcgaggttcccacgcacagacctagtccaccattaagattgtgactcatgtatttagacccaacatagaggagatgttgactcccatacttagaattgggtcatgtgcaagaactttaactttatccctgtatctttctgcatgtgagactgtgtgacatatgcctctgtccagcaactgagtgatttaacacttctgccttggcccaacccacagatggaattttgacatattgctaaacccagcaccttcatcatgggactctattccactgccttggcactgcccatagacagcattgtgacatatcactgtcactargccttatattcagttaatgtcagtctcctcttctgttttgtcactgtgcacagaaggcattgtgacgttgggccccacacccaagttatgtgattctcctacctgtaccctgcccacacggcccattgtgatatgttgcttggtccagaacccaggtgatgtaactctcttgccttggcccttcctacaggaggcattatgacatctctgcacc

SEQ ID NO: 325901 - DNA, 589 bp, Homo sapiens
cagcacacctgtgaggctgtgactctactaaggaggcatagtgcacagaagaaagcgaggttcccacgcacagacctagtccaccattaagattgtgactcatgtatttagacccaacatagaggagatgttgactcccatacttagaattgggtcatgtgcaagaactttaactttatccctgtatctttctgcatgtgagactgtgtgacatatgcctctgtccagcaactgagtgatttaacacttctgccttggcccaacccacagatggaattttgacatattgctaaacccagcaccttcatcatgggactctattccactgccttggcactgcccatagacagcattgtgacatatcactgtcactaggccttatattcagttaatgtcagtctmctcttctgttttgtcactgtgcacagaaggcattgtgacgttgggccccacacccaagttatgtgattctcctacctgtaccctgcccacacggcccattgtgatatgttgcttggtccagaacccaggtgatgtaactctcttgccttggcccttcctacaggaggcattatgacatctctgcacc

SEQ ID NO: 325902 - DNA, 593 bp, Homo sapiens
ttgaggatttgaatcttatatctagaggcagtcaaaagttgcaatgttgactctcattcatgaattcgttatgcatggattttgtgacccttaaaccataatttagcacacgtgtcaggctgtgacttttctaaggggacacaatgcccagaaaacattgagaagctgctgcacagatccagttcacagttgaggttgtgacttgtctactttacccatcatacaagacatgtggactctcatacctagaaccagaacatgtgagggattggtaatttcatccctgtattttttgaaggtctgattgtgacatacacctctgccaaacacctgatttgactctcctgcctggcttggttcacrggtagaattgtgatatattgctggacccagcacccaggtgagatgactctattctcaagccttggtgcctcttacaggaggcactgtgacatatcgctgggatttgcagtcaggtaatgtaaattttctctcctaccttggtgctgccaataaggggcattgtgtcatattgctcattttaacacccaggtgatgtgactcttctgcctgggtccagcctaaagggggga

SEQ ID NO: 325903 - DNA, 538 bp, Homo sapiens
tttataaacaggtggtccagaaccccaggctggtggacaaaacagcctgctgctgcagattcagtgtctggaggtgggaatatgccagaagacttggagatacttctgtaagtttttggcaaaaaaaaaaaaaaaacactaggatcaaaaatgctgtagtaaaattcctgagtgtggttccctgtcctgggagaggtgtggacacattaatgtctagtgggtatgttagtgagtgggtgaaaatcttgtggtggtggctgtggcaaaaggggatctgccatcagagctcctttcctctaagttttaggtcctctgtcaccctggaaggggagctggaatcacagaacaagggacagtgtgacagcctgtgtagagtgcacagcctctcattcctggacacccagaggtttatwctaatccaggagtctgtggtatctttcttctggcaccaaatctgtagagtttgctaaacaccaagcaattctccaacaccaacttattatctaaaacttcaattctgacaccacccagagtcagc

SEQ ID NO: 325904 - DNA, 604 bp, Homo sapiens
tacaattatcctgatcttccagacaagtaacaggaacaaaagggttaaaccacctgtccagtggtgcacagttgattaatgtgagtcagtacttgaatcaatctctagaattctttctcctcaattccaagttataacctatgtaacagaatctgtgacaggcagactgtggtaacttacagctattaattattagatattaatatagctatgactattattattcctaaggaactgagcaagttttctaaaacatggccacctacaccatttgttctccttcaccagctcagtcttctgcctctctaaggaaagcagctactaccacytttccagtagaactcagaatctattgaagtcccagaggagagaatttgaaacaaattctacgcaagggctggagagcttcagagtcctatataaagtatgataattgcagatctataaaacccagcaagttggacaagagaagttcaacattaacccttttgagaatgctgagtctccctgagctctaaacagccagagggagtaaaatgaatgagctgtgtcttctctactctcagggcttggagagtggaagaccagatgcagaggggtggta

SEQ ID NO: 325905 - DNA, 551 bp, Homo sapiens
taaacaaaataataaaggcactcattataaaggtgattcaagtacaaaagacatcctggaacttaaatgattgaaccaagaaaatcagtaaaagaattaaagacaagcatgatttaactgtggtgaacacaattagtggcctgggaggtcgagcataggaaatatctcaaaacacaaaacaaaaagaaaaaaatatggaaatcacaaaggaaaacacagactaacaggacagactcaagataaygtaaatggagaaaagggaacaaatggagaaaagacaatagtaagaattattgccaatactagggaaaacaaaaacaaaaattccccaaactgcgcaaagatctgcagctgaaaattgaaagggcttgggagttctgggcaggaatgatgaaaaaagacacaactccagccacattccggtaaaatctctgaagttttaagatgaaaaaaaacatgttataagcattcaggcaaaagaacaagtttaccttcaaagaaacccaaaatcacataaatatcagacttctcatctgggacactgagagcca

SEQ ID NO: 325906 - DNA, 470 bp, Homo sapiens
ttttttttgtttttgctttattttctggctgcctcgagcaactcatcgtcagaggagccatcagtgcctttggtcttttatgtacaaaaacacaccaaccagtggagaaatatggtgtttgtgatcagtgcttatgggtagtggtgacttttgatagttttgggtttttagtgctagcaagctacctgagtgtcagtgaagagtggccccagtgatactgtggcacagacacagttcataataaatgctctctctatgcctggaaggcccttctccactttttccaaatacatacatcatcctggcctcatggactttcacctgcctagaatccattcctcctcttcctgtaccaccatcttgatattttggagagcctcttttccctcaagctgaatctgtgggaaayagtgtagtatagtgttgaactggatggtgtctagagccagagttcctgggtttgaacccag

SEQ ID NO: 325907 - DNA, 470 bp, Homo sapiens
ttttttttgtttttgctttattttctggctgcctcgagcaactcatcgtcagaggagccatcagtgcctttggtcttttatgtacaaaaacacaccaaccagtggagaaatatggtgtttgtgatcagtgcttatgggtagtggtgacttttgatagttttgggtttttagtgctagcaagctacctgagtgtcagtgaagagtggccccagtgatactgtggcacagacacagttcataataaatgctctctctatgcctggaaggcccttctccactttttccaaatacatacatcatcctggcctcatggactttcacctgcctagaatccattcctcctcttcctgtaccaccatcttgatattttggagagcctcttttccctcaagctgaatctgtgggaaacrgtgtagtatagtgttgaactggatggtgtctagagccagagttcctgggtttgaacccag

SEQ ID NO: 325908 - DNA, 617 bp, Homo sapiens
gctttatggtgcccctggcaagcaatagtatgtatcttcaaaaattctatatggtgaaaagtatcataaataattttttaaggctgggcgcagtgactcatgccagtaatcccagcacttcaggaggttgaggcaggtgtatcacctgaggtcagaagttcaagaccagcctagccaacatggtgaaaccccatctctactaaaaatacaaaaattagccaggcgtggtggtgggcacctgcagtmccagctactcaggaggctgaggcaacagaatcacttgaaccctggaggcggaagttacagtgagctgagatcatgccactgcactccagcttgggcaacccagtgagtctctgtctcaaaaataaataaataaataataaaaatttaaaaattaaaaatcctagtagccattaacatatgttcactacacattgctaaggaaaaaataacatgtcacaaacaatatgtgaagtatgatcccatttatgcaaagagcaaacaaacagaaacaaaacaatacaaatacaacataagtttgcacatgtgcatttgtggacatggatgattctgagagtagtaagtgagtatgttttcacccaaactccttttta

SEQ ID NO: 325909 - DNA, 513 bp, Homo sapiens
tggcaagcaccacttgtgtaaaactcacccaaacactaatttttctcaaaaatggaaaacatattattaattataagtaaaacctttgagtagaatcacacgataaggttacaaaacaccatctcctgaattggagcaccacccctatgcccaccacaaaatgagtcatatttcacctaccatttactttttatcctttcaattgttatgaacatatatagccaactgcacttctaaagaactcataaagctgtgctttagttattctgagttcaatatttacatgcagtaccgttctcagaaatactcatttcaaatcaatcaaggtttattgggcastttttatgtgcaggctcttggtactgaggggtgcaaggaggatcaggacacagttcctgccttggagtatttacagtcttaaaggaggggcacataggtaagcaactaataattacacaagacaaaataaagcaagtgacattaataataaccagagcaggatagtatgtggga

SEQ ID NO: 325910 - DNA, 591 bp, Homo sapiens
ggcctttaaaggatggtaaggatttaaaaggcagagaaacagcaagggccatagccacaccatgagcaaaactaagcaggtgtgaaaggaagactgatgtccttccacaactcagtgtagggtctctaagaaaacaagttatctaggcctttcactgtatctgttaatcattttgcattctgtattcactgttctcatgtagccagaggccaaataggttgacctcatctaaaattattagaaagagacagtgaaatagaaatgcactcagcaaatgtgggttccttgagaagcacaggtactcatacatcatgccaggggcaacatgaggggggtctctaaaagcacagctctgctagatgaactacactytccgctgctcacctgagaagtgctgaaacactgcatgtaacaagactggagctcgcaaaatgaacagatagacttttccccccttggtttcaaattcttcaaactgggctacagctgaacataaatcataattccaagtagccagctgtgatgcacttagaacaattcttttgatgtcttcatctgttggggtccctcatagcttgtggagtagcagca

SEQ ID NO: 325911 - DNA, 566 bp, Homo sapiens
tggcaccctctctagctgtcccacatgagttcacaaaaaatccaaagatctggctctagtaagctctgggggtgagcaccagtgcagccacttcacctctgcgccattgtcacagcagttgaccagcacaaaggctgccctctaaaaggaacaggcagggtcaaatagcaacctgttgtgtccaccaaaacacaggagacacacctcgagcttgtcttaggccattcctgctgctataacaaaatacctgagactgggtaatttataaagaacagacatttctttgtcacggttctggaggctggaagtccaagatcaaggtaacagcaggttcaatgtctggtggtggcctggtctctgcttctaaggtggcatcttgttgctgcttcctccagaggggacaaatactgtgtcctcacttggtggaaggcagatgggcaaaaagctactagctagttccctccagactttttataaggcactgatctcatrctaatcacctcctaaaggccccacctcataagaccatcaccttggggcttcagttccaacatacgaattttgga

SEQ ID NO: 325912 - DNA, 545 bp, Homo sapiens
actgggcaagttacctaagttctctgagcctcagtttcttaatcagttcaatggagacaatagtgcctaaacaggattgttgaaaggattaaaggaggtcttgaaagtaaattgcttagcttggtgcccagcatctgggtaagtactcaataccattgggtagttgttattcattattgttgtgttacttyctgtcacacagggatggcttggaacatatttcagccaatgacgtagccagaggaagcccatggcaaggactgtcccgtgctctctgtctttcctccaggtggcccacaagagattccccacaagggcctgcttccgcattgttaggggcaggcctgcagaggccaggcaggtgcagtaattgactggaacaggtcaagctggaaggcagtactagccacagccagttgtggccatttggaaaagtggactcagagctgccaaatcctgtgagttttcaggaaaagccaggaatctagattattacatcaaactcccagttttcaaatgttttaacttaaaacacattttttaat

SEQ ID NO: 325913 - DNA, 545 bp, Homo sapiens
actgggcaagttacctaagttctctgagcctcagtttcttaatcagttcaatggagacaatagtgcctaaacaggattgttgaaaggattaaaggaggtcttgaaagtaaattgcttagcttggtgcccagcatctgggtaagtactcaataccattgggtagttgttattcattattgttgtgttactttctgtcacacagggatggcttggaacatatttcagccaatgacrtagccagaggaagcccatggcaaggactgtcccgtgctctctgtctttcctccaggtggcccacaagagattccccacaagggcctgcttccgcattgttaggggcaggcctgcagaggccaggcaggtgcagtaattgactggaacaggtcaagctggaaggcagtactagccacagccagttgtggccatttggaaaagtggactcagagctgccaaatcctgtgagttttcaggaaaagccaggaatctagattattacatcaaactcccagttttcaaatgttttaacttaaaacacattttttaat

SEQ ID NO: 325914 - DNA, 545 bp, Homo sapiens
actgggcaagttacctaagttctctgagcctcagtttcttaatcagttcaatggagacaatagtgcctaaacaggattgttgaaaggattaaaggaggtcttgaaagtaaattgcttagcttggtgcccagcatctgggtaagtactcaataccattgggtagttgttattcattattgttgtgttactttctgtcacacagggatggcttggaacatatttcagccaatgacgtagccagrggaagcccatggcaaggactgtcccgtgctctctgtctttcctccaggtggcccacaagagattccccacaagggcctgcttccgcattgttaggggcaggcctgcagaggccaggcaggtgcagtaattgactggaacaggtcaagctggaaggcagtactagccacagccagttgtggccatttggaaaagtggactcagagctgccaaatcctgtgagttttcaggaaaagccaggaatctagattattacatcaaactcccagttttcaaatgttttaacttaaaacacattttttaat

SEQ ID NO: 325915 - DNA, 522 bp, Homo sapiens
gcccggtctccctgagagtgttctggaggcatgctaggaggggtctctgaccctgcttggtrggagctgagggcggagctgagggcagacctgcacctgctgccgcaggtggtgctggcaggaccagcaggggtctgaagccagcccaaggctcctccatttcgggcctcccctggtcttcagcataacccacctgggagtcttgggcttggggaggagaggaggtgccctgctgctcccagccctccacagccagaccgtctgttgtcttctcatgatcttgtagttccttgccctggcaggtgtacctgattaccaatgtcccagcccagctcctctgggaagccttcccttccaccggagggacaggtcaagcagccatctctgtaacaagttttctgagggttctaacacaggcaggcagggaaccaccttgtccaaaccagctctgggcttgcagctgaaaccagcagtgttgcttctctttccaaacccacctacgcaatctgctctctcacaata

SEQ ID NO: 325916 - DNA, 522 bp, Homo sapiens
gcccggtctccctgagagtgttctggaggcatgctaggaggggtctctgaccctgcttggtgggagctgagggcggagctgagggcagacctgcacctgctgccgcaggtggtgctggcaggaccagcaggggtctgaagccagcccaaggctcctccatttcgggcctcccctggtcttcagcataacccacctgggagtcttgggcttggggaggagaggaggtgccctgctgctcccagccctccacagccagaccgtctgttgtcttctcatgatcttgtagttccttgccctggcaggtgtacctgattaccaatgtcccagcccagctcctctgggaagccttcccttccaccggagggrcaggtcaagcagccatctctgtaacaagttttctgagggttctaacacaggcaggcagggaaccaccttgtccaaaccagctctgggcttgcagctgaaaccagcagtgttgcttctctttccaaacccacctacgcaatctgctctctcacaata

SEQ ID NO: 325917 - DNA, 568 bp, Homo sapiens
gcacaaagaaatcattcaataaatgtttgttgaatgtatgaatgaatggtaacttgcttgatacaaacaattctggggagatgctactggcaacatggtcacccaggtgtcaatcatacaatacaaccctgccactcrgtgggtgcttaggaagatgtggaaggaataatcttttaggaggagatgggacataatagatgtttaatacacatactcaccgtttgatcattgtaaatacatttttggtaatggtttcattgagatacaatttacatcaaatccatacatttccaataaactttttattttgcaataattctatacagaagagttgtaaagataacacagagagtttctgtataaacttcacccttcagtttctcctaaggtcaccttcttacacaaacaaggtatgtttatcgtaactaagacactaacattaatacattattattaaactaaattttagaccttattcagatgtcaccagatttttcttttatgtcccttttctgtgcaaggaagcaatccagtagaccatttcacattgagcacaattatgtttgcc

SEQ ID NO: 325918 - DNA, 536 bp, Homo sapiens
agataatatgggcaaatactaccagagggttcagaaacattagtttcctatctttctttttcccaggatactgggaacagtatggaaaatgcttttagaatagtgatgtggaaaaaagaagtcctaagttcaaattctacctctgttcttcactagctgaacaaatatgggcaagtcatgcattttctttaagcctgagttgtctgtctgcttaacatgagtaataatatatattcattcagttagataacatatgctcaaattattgaagaaataaacaattcaatcagaaaaaagagatatacatgttttatagagcatcatatgcatgttgaggtattttggatttgtctatgtacttacctttaccagcgaattttatactttcatatgttttcatgttggtaattatagccctttaatttctacttgaagaactccattaagcattttctgtagagcaagtctagyggtgattaagtccctaaacttttgcttgtttgggaaatactttatttctcttacatttttaaaag

SEQ ID NO: 325919 - DNA, 538 bp, Homo sapiens
gctggtctctggcagggctgatgtgtgggcaggaaggagggtgccatggagtactcgttccccgtagtcgtggggacatggattgggcttcyttttgctgaagatgagaccagctttggttgtttttaacctgaggtttccatgtgctcctcacacaggagagctcccgtacttgagctccagctgaacctaatgcactgtctacttttggggagatgcaggctaaataacaaaggagaggatggccacagctcaggtggggattctgagtgcctcagccccactaagcaccagacaagctcctactgcggcccccatctactcgcatgctccagaaatgggcccaggtcctcaagtgtacctacagccagatacaagccattcaggctgatcccagacatggtggggtctcccttgtagcacagacccaatgaactggtgcggctgagcctgctcagagccagggatggaacatggtttaggcaccacccccggttccttccagagacacgatatgcaattgggaaaaataaagggg

SEQ ID NO: 325920 - DNA, 380 bp, Homo sapiens
ataggtgacacactcagagtcaacatcagagaaagcactgccacagatgctatcagacacagcttttaaactaaaaatgctactatgttcaaggaaaataaagctacatttgagaatctggcatactatgaaaaaggaagaaggtccagtgctgtggctcatgcctgtaatcctagagctttgggaagctggggtgggcagatcacytgaggtcaggagtttgagaccagcctggcaacacagcacaacccctctctactaaaaatacaaaaattagccaggcatggtggtgcacacctgtaatcccagttacatgggaggcgtaagaattgcttgaacctggaaggcagaggttgctgtgagcccagattttgccactg

SEQ ID NO: 325921 - DNA, 628 bp, Homo sapiens
tgttcgagcacatttcaaaaagtggaagcatcaatctagattgggctggagtccagcgaagccagtaactgggtcactctcagctttttggccaacagccttttctcgttgcctcattttcttcttaccacagatagctccttctcaagaacctcatgctgtaggatgtgaaacagcttcagatgctcttctcctttgacacgttcagataaccatgacgtgaccatcccattgacattagtgataggatcaattcrtgctgaaatgcaagtgatactcagcagaattcattagggtgacggtgggatagtgttgagttgaattaagaacttagatgataggaagtttgagggaagtatattgggaattttatcagtgagatggggctagattctcctctgccgtatttatttataatatgcccagttctagatcaaaataacaagtggaataatgctttggaaatcttttctcttccaaacacatagcaacaatgtataaataaaagatatagagacacaactttagtataaagtaaatatatctggaacagaaacggaagagaaacaaaaacagtgagtgagaccatatctgattttgtcctgcacttgttttgcccatgtatgga

SEQ ID NO: 325922 - DNA, 616 bp, Homo sapiens
agacttgtaatcaattcacaagacacaataggttttaatctatcactgcctttatttagctttctagtaggaaacagaatgggaaacacagcttgcatagtatctgctatctcgtaggaaggcccagcaactacccacagytgcagactcttggcctcccctctgcgcactatggtgcacatagttgccaaagatgaagggtgtggttcaccctacccaggagaaaccactgctttggtttccttctggattctttcttgctccaatcatggaggcccaaggccactgggcaactcatagctcttccaatcctaatgcagtctcaggaatcaatagttttgcaataatcaagacagataattcacctcaggtacacagcaatccaactgctgtgtttccaagaaaaagatggcatgagaaggtaagtctgcagtcatcttcccaggcaggtcaacgggaaaaggttgcaggcctaactctcaggtattaacacatcctgattccagggtcattaaaatgggagaggaagagggtgcctcttagaaaaactgaaatgctgcttttccaaatcaatttaactgccaattctcattgtcttaactgtaacaaggataat

SEQ ID NO: 325923 - DNA, 576 bp, Homo sapiens
tcctaaagctaaattaaaaagctaaagagcagtgttatcaaaaaagcaaatacataatatattgaatttaaaatgtgtttattaactgattctccataaataaaaataagatgtgtatataaagtaaaaaaaaaaaaaagcagtgcttatctcaataagctctggcaattaggcatccaatatttaatacagcttttaaagacaatttaactatttcattaccaaactgataagctgcttttctgagaagttgacattaactgagtcattcccaggtaagtcaattgtttatcagatatgatrtaagcggcctccatgagctctgcaagactgggctgtcttccactgaggggttagtgtggggcttcccctctactcatgcctgtaacagggaggttgtggctggaatctttcaaatgcacagaaaggatgtcttccaggattatataaccaagctcaaactttaccaggactttctatgtgagatccttcccagtgcattctaagcattaactaaaccagtcaggcttacttccacctatctttaagcctgaatgatttgtgtagccctatgaa

SEQ ID NO: 325924 - DNA, 619 bp, Homo sapiens
attagtgtatagatgctactgtgagctgtggggttggatgaggtcacctaaggtggtggggaggagggtgccatcagaaaggagaagagggtggagaaccatactctgggtctgccaactcttcaaggtcacgcagcggaggagataccagcagagcccagggagctgaggcccatgcgataggaggaaaacctgctcagagagaatgaagctgtttcaacgacttgttcactgacacgaagagctagaaaacggagagctcctgaaagatttgacacaaggaatagtcatggagatgtgtacagtataaataaaaagctggtggttgagggaagcatatagtgaagaccagtggaggagagagagataattaataacaataataayccagaaagagctgatgagagcagtggctttggggatggaaaaaaaaggaaagaataggaaaggcattcaggaatacactaggacttggtaagggatcatatacatggatgtgagtgggtgactgactcagtggctgtgagtggggatgctggtacctcccataaaaacagagacagggtgggcaagaacaaacactgagagggagaagttttgagtgtgttgacacccagga

SEQ ID NO: 325925 - DNA, 619 bp, Homo sapiens
attagtgtatagatgctactgtgagctgtggggttggatgaggtcacctaaggtggtggggaggagggtgccatcagaaaggagaagagggtggagaaccatactctgggtctgccaactcttcaaggtcacgcagcggaggagataccagcagagcccagggagctgaggcccatgcgataggaggaaaacctgctcagagagaatgaagctgtttcaacgacttgttcactgacacgaagagctagaaaacggagagctcctgaaagatttgacacaaggaatagtcatggagatgtgtacagtataaataaaaagctggtggttgagggaagcatatagtgaagaccagtggaggagagagagataattaataacaataataacccagaaaragctgatgagagcagtggctttggggatggaaaaaaaaggaaagaataggaaaggcattcaggaatacactaggacttggtaagggatcatatacatggatgtgagtgggtgactgactcagtggctgtgagtggggatgctggtacctcccataaaaacagagacagggtgggcaagaacaaacactgagagggagaagttttgagtgtgttgacacccagga

SEQ ID NO: 325926 - DNA, 490 bp, Homo sapiens
gaattaattgaggttgggatataagtgttmtaatgttgctcttttaagtgactagttatgattgagggacagactgtcctttatctctccatcaccatcagatgttctttgttccctgagaagtgcttagaagctttggcataaaagttactagaagcagaattaacaaacaccgtcattgtctgcttctcctaggtgcaagcatgttagctccttaccccaactttgacttatcctgtcccaagactcccaattgcatattttatgttgtttggtgctcttgatgtttcatcagtcaggttattcagacaaatgtttattgtgggcctactaaagttcaggcacagtgctggccactgaggagtcaacaatgaacaaacccagcccagtccctgagtttgccaagcttgcaatctagttgagttattattttatgaattttcccagtcagaggcttcttccccatccacgcattcatctatccatccaa

SEQ ID NO: 325927 - DNA, 490 bp, Homo sapiens
gaattaattgaggttgggatataagtgttctaatgttgctcttttaagtgactagttatgattgagggacagactgtcctttatctctccatcaccatcagatgttctttgttccctgagaagtgcttagaagctttggcataaaagttactagaagcagaattaacaaacaccgtcattgtctgcttctcctaggtgcaagcatgttagctccttaccccaactttgacttatcctgtcccaagactcccaattgcatattttatgttgtttggtgctcttgatgtttcatcagtcaggttattcagacaaatgtttattgtgggcctactaaagttcaggcacagtgctggccactgaggagtcaacaatgaacaaacccagcccagtccctgagtttgccaagcttgcaatctagttgagttattattttatgaattttcycagtcagaggcttcttccccatccacgcattcatctatccatccaa

SEQ ID NO: 325928 - DNA, 575 bp, Homo sapiens
tgagctgcaatctaggaacagaattgacctggagataggccagccttcacataggacgaaatggttctttgactcatctcagtcactgagttattatcgcctgtccccttcccagctgccaactagaaggaaaactaaattctgtctgcgggaatatgccatcattcagagcatcaaattatctctaaatttaaaatccaatgctcagaagaaataagcagttataagggaaaaaaaggttgaccaaaagccaagagagggaaaaaacattaaacagacacgtggaagatccagatactagggttacacacacagacttgaaaatatgtycaaagaattaaaagacaagaaacaacattttgacaaagaactagaaaacattttaaaaatcaagtggaaattttagtcataaaactaccattgttaaaatcagttaccagatggatgggtttatatggatattagacacagtgaacagagaactggggaactggaatatatgtcagaaaaaaagaaaaagatccagactaaggtgcagggagacaaaaggatggcaaatataagaagaatgtgag

SEQ ID NO: 325929 - DNA, 624 bp, Homo sapiens
tgaaccatgtgttctactcttaactgtttttattcctacttctgggctaataatagaagctagtgcttattgagcacttactatgtgccaggtaccatgctaagtcctttaaagatcacataccagccacagccttccagggtggcaagcagtagctcagagaagatagctccaaaccagactgcagctggaggtggtcaaggaaggctttctggaagaggcagctctcaaatggaggttttaaaggacaagtcagacaaagaagaaataaaaggaaccatatktacaaagggcactgattgtgaaataacaggacatgttcgaggcaccacaaatcctttgataacagatcagccagctgtggtttgaccctcccaagagaatggatagctaagaatattagaacaaccagagtcaaccaaggttacttggctgttctctctgcaaagtacaatgatatcaacttaaatgaagtcattaccagtttagccataacctgtgaactaatagatatcataaccttctagaagctctctcttaatacattccatcacattcccatgatttgctgttcccctctaccctcaagcctctgccctcggcatgctccaataaccttaccct

SEQ ID NO: 325930 - DNA, 586 bp, Homo sapiens
atattcttagttctaaaattcattttgtttaatattaatgaaaatagccacttctgttttcttttggttagtactaggctggtgcatccttttctatacttttaagctttctgtgtctttatattaaaagtggatgtcttgttgacagcatatagttggctcttgacttttcttttatccyatctgataatctctgccttttaattcagatacttggactacttacatttaatacaactattgatgtggttgggtttaaatctatcatcttgctttttgttttgtacttctcttctctgttcttagttccccccattcccctttttctgttttcttttggatgtactaagtatttctgaaatgtctaatatatcttatcttctatgttagtttattagatatatctacttttttgtgattgacatcatattctatgtacgatcactaccattcaattcactgctattaccctagcacctggaaaaatgcctggaacctagtagggatttaataaattattcttaaataaattgaataacagagctaagcaaaataccagttaaacaaaataatcaagaaaaagcat

SEQ ID NO: 325931 - DNA, 586 bp, Homo sapiens
atattcttagttctaaaattcattttgtttaatattaatgaaaatagccacttctgttttcttttggttagtactaggctggtgcatccttttctatacttttaagctttctgtgtctttatattaaaagtggatgtcttgttgacagcatatagttggctcttgacttttcttttatcccatctgataatctctgccttttaattcagatacttrgactacttacatttaatacaactattgatgtggttgggtttaaatctatcatcttgctttttgttttgtacttctcttctctgttcttagttccccccattcccctttttctgttttcttttggatgtactaagtatttctgaaatgtctaatatatcttatcttctatgttagtttattagatatatctacttttttgtgattgacatcatattctatgtacgatcactaccattcaattcactgctattaccctagcacctggaaaaatgcctggaacctagtagggatttaataaattattcttaaataaattgaataacagagctaagcaaaataccagttaaacaaaataatcaagaaaaagcat

SEQ ID NO: 325932 - DNA, 558 bp, Homo sapiens
gcagcaaatagcacctctcatagtctttcctctccaacctcatttacattaatcattaggtgtctccaggtgaagaattttcaagtgtgacttgattactacgatcctttaccctttaaaatttatactcatttacaataagatcgcaacacacatggaacactgttttcttcataattactttgaaccaatatattcatgtattaaagtacaaatttccctcagaggaacacctgatattaccctaaaaacagatgtttacctagcaaaccaggagatcagttcctgctcctagtataccaattaattttcttgctgctttttcttgagctgtgtttattttgggggaaaaatcagttctatcacttaaatgatatttgccctctgaaagtacratgctttgctctacaataaaatgtgatgtcataattgcagagattagacttcgtaaaaaaagtgacctcaatggaagggtcgaaatagaaaattatctccttaaactctgatgcttttaagatggtaacagaaaaattaatggaaaatattggccagaagtat

SEQ ID NO: 325933 - DNA, 603 bp, Homo sapiens
cctcatctagccttaatcaccaccttaaagacccaatctccaaaatacagtcacatggagagttagggcttcaacacatgaatttggagggacacaattcagtccatagcaccacatacgatgtgtaaatttccagaggttttctggcataagtagattgtttctttccccagagacaagccggattctgcaagtgcatctgatgtgttgttagtgtgtcaggtaacaaccttgyttcttcacggtaggtacacacggactttttccctgtagtgataaggtatactggggcaaggaagtttttgtcaccaaggccaatgatccgtgttgtggatacagaagaaactgaagctcattagacaacaacaacaacaacaaaaactaatttaattgggggtttcttaattcttgaggatagaaggtatccctctcagtgcagttatactctctcctttgcttcccatccaaataggaagctcctgattcatccgcaccttggcaacaatatttgctatgacttccacccatattagttgggtacttcccatgagccagccagcattcttggcccttgggttccaacagtgaataaacatgcaatag

SEQ ID NO: 325934 - DNA, 603 bp, Homo sapiens
cctcatctagccttaatcaccaccttaaagacccaatctccaaaatacagtcacatggagagttagggcttcaacacatgaatttggagggacacaattcagtccatagcaccacatacgatgtgtaaatttccagaggttttctggcataagtagattgtttctttccccagagacaagccggattctgcaagtgcatctgatgtgttgttagtgtgtcaggtaacaaccttgtttcttcacggtaggtacacacggactttttccctgtagtgataaggtatactggggcaaggaagtttttgtcaccaaggccaatgatccgtgttgtggatacagaagaaactgaagctcattagacaacaacaacaacaacaaaaactaatttaattgggggtttcttaattcttgaggatagaaggtatccctctcagtgcagttatactctctcctttgcttcccatccaaataggaagctcctgattcatcygcaccttggcaacaatatttgctatgacttccacccatattagttgggtacttcccatgagccagccagcattcttggcccttgggttccaacagtgaataaacatgcaatag

SEQ ID NO: 325935 - DNA, 460 bp, Homo sapiens
aatggtctaaaactgaagagcatatttaacctaatgcaacaaaagtctactgcacacacacacacacacacacacacacacacacacacacacacacagagcttcagggggttgggggctgtcaggtagactgaaacgccagtagctaaatccttatggaggcagataaactactaaatatagaatcaagtcttctttcagatcagttctcctatcctttcattggaaagcttaccatagtaagctactcatccagatataagcagcatccattgatatcttacaatgctataagactttgtcctcaataaacaaaagagcaggttttctctccttgagggccctttaaccacgaaaaggaagtcaaggcagattctgtgctccaggacctgctcctggggaagggggatgtaggactgcttakcccagaaagcaagcctgtggcaccatttccatatga

SEQ ID NO: 325936 - DNA, 543 bp, Homo sapiens
aataaggagaatgtacaaagtttaagagacttcataacaaagtttacaacctaaaagacaagaagcttttgcataagtaaatgtgaaatactgaggaaygttttttaaatatgaaaaatggatgtttttctatgcttgcaaaatttctcaaagttctccaaaataatacattctaaaattaacaaaatatacaatgtgatcactgtaaaacagttgattactgtgcaagttagtctccaattgtaaaaaccactatgcccatccacatccactgtctgccctgctctgtgtcttgaaaggctgatctgtgcagcctgcacaagcctcccttgtggctggcttcatgttggatgtgaccagtgggaggcactggcagggcactgcaggatgagagctgagagaggtcaagtcacttctttcccactccttcgctgcttcagtgccctgtcctggcaatagcatgtgccttcatgagtaccgcttatgccaggggcccctcagtctacagtcctagggccggtaagggctaaatacagttgctag

SEQ ID NO: 325937 - DNA, 502 bp, Homo sapiens
gggaaagtaaaaactgagaaaaaaaatggaataaactgataagacagggtcctgagtctcttatgaggctcaggtstttctcccccattccacccttgggctttgagttcaggatagggagaaggacagcaggcaggggacagaggaagtgataaaaaaagtgtatcagcagtcaggggacagaatgaactgaagagaaggatatgtttacagcaataagttcgaggtctccaaccaagataactggacatattttaatatcattagtcatcaaacaggaactgtaaacagtgaattaagtggccattttaaaatgccattattttagacaatcatcaaactgcccatcacaattttagtttatctataccgaggtagctccagtgacactgaacatctcttattgcctgttacgaagagcctttgggatatgctcaggatatttttcattgcccctccagacccactctccaccctgctcagcaccctggaaaaccccaat

SEQ ID NO: 325938 - DNA, 593 bp, Homo sapiens
aattgacccacagttctgcatggctgtggaggcctcaggaaacttacaatcatggcagaaggaaaagcaggcaggcatatcttacatggtggcaggtgagagagaagagtgaaatgggaactgccaaactattaaarccatcagctcttgtgataactcactccactattatgagaacagcatgggggaagtcgtccctgtgatccaatcacctcccaccaggtcctaggtcaacatctggggattacaattcgagatgagatttgggtggggacacagccaaaccatatcaactgcccatcctccctaccacccagcctctggtaaccaccattctactctctgcttctgtgagttcaattaatttagattatacatataagtgagaactgtggcatttgtctttctgtgccttgcctatttcacttagggtaatgtcctccaattccgtctgtgatgtcacaaattacaaagttatttttattttttaaagcctgaatagtgttccattgtgtgtagatgaattttttggtattcatttatcctctgatagacatttaggtttattccattatttggctattgtctagtgc

SEQ ID NO: 325939 - DNA, 515 bp, Homo sapiens
ttttttaaaaaaagaagtttcaccaaaaaagacacttctatttaatgtatgtcttatttcttttaccttaagaaatgtttctcttaacctttytccattttcaaccccatttgtttgctcttctctgcaacaaaaatcctctaaagagttttctatgctccatgttccaattcctctttttctacctctgcatcttcattggtatatttaaaagatatcttgaactcagatgtcccagaccgaactcctttcctcccaaacctttcccattctttctcatctgaattgatggcaactttatacagccagttgctcagttaaatctttggagtcatccttgactccttcctttctcttgtattccaacaaatctgttggctttttctatgaaatatatctagaattcaacagttttctactatttctgctattagtatactgatcatctcttgctcagatttttgttattacccactatcatttcttgcctggattatagtaattgtgttctgttc

SEQ ID NO: 325940 - DNA, 515 bp, Homo sapiens
ttttttaaaaaaagaagtttcaccaaaaaagacacttctatttaatgtatgtcttatttcttttaccttaagaaatgtttctcttaacctttctccattttcaaccccatttgtttgctcttctctgcaacaaaaatcctctaaagagttttctatgctccatgttccaattcctctttttctacctctgcatcttcattggtatatttaaaagatatcttgaactcagatgtcccagaccgaactcctttcctcccaaacctttcccattctttctcatctgaattgatggcaactttatacagccagttgctcagttaaatctttggagtcatccttgactccttcctttctcttgtattccaacaaatctgttggctttttctatgaaatatatctagaattcaacagttttctactatttctgctattagtatactgatcatctcttgctcagatttttgttattacccactatcatttcttgcytggattatagtaattgtgttctgttc

SEQ ID NO: 325941 - DNA, 437 bp, Homo sapiens
agacattaaactgtttctctgtccctatttgtaacttggaatcgatgaacaggaagagaaacattgcttctgccaatgcctgtaaaattaaccaagggtttaaaaatccccacagtgaatttttatttatgctttctttactaatcttagctagaaaaacccaaactaaatattaaaaaatgttgatcttaaattaattcaagttgacaaagacaggtgtaagcccaaatactgcttgatagtacacgaaacatacaagtagaaggttttgtttgtttgtttgtttgtttactgggcaaaatggttttatctgcaaactagttagaatgaagctcacaaaaatggaaaaatagggacctctgaaggggataaagaaggagaaaagaggaagataaygggggtctgttttttacctgtacctcttcatcacagtagca

SEQ ID NO: 325942 - DNA, 533 bp, Homo sapiens
gaaataaacattactagtgtagaatctctgtaaaagaattattggggctggcctcatcattgactataattaactaaaaaatttgttcagatatttcttccagtattcaaaagttctggtatagaaaaaaatgttgctgatgttttctatttatttataggttttctgcatcttatctgtcagaaaactttcaagattttaagtcatatttggagcagtgaaatttcaccattgtatgtctmctctctaatgacttaaacaattgaaactattttttgaaaaactgtaaccacaatttctttttaatttttttattttgaaatctttattactccactcattattgcaattgtcacaacaatatccaagattttaacttatctctgtaaccagtcaatggatggatggctagataattgggtagacagattagatagatgatagatagatagatgatagatagatagatagatagatagatagatagataatttagatagatagatttggctttggaatcagatgtttggtaa

SEQ ID NO: 325943 - DNA, 582 bp, Homo sapiens
gaattcaggatgctatcacaaagtaccatagattgggtggttcaaaaacaacagaaatttatgtcacactattcattaggctgaaggtctgagatcaggatgtcaacatgatcgaaaattggtgagtgtcctcttccaggttgcagatgattgttttctcattgtattttcacaccggagagaggagagaccagaaggctcttycatgactcttacatgggcactaatcctattcaacagggctgggccctcatgatcccatctaatcttaataataatctccaaaaggccctacatcctgatgtcatcacattggaggaggtaggatttagacacatgaattttggagggttacaaacattccacctcttatacctactgatgttaaatgaatgctggagagcatttaaaatattccccattcagaagcaaggtacagttgagagtgtttggcatcttacttgactcaatctctgtaggaagagaatagttgcattacccaagtttctgtctatttcctgggagcaattctagtttaatcgctattcttatgtatgagtataaaggcctggttctgttgtg

SEQ ID NO: 325944 - DNA, 598 bp, Homo sapiens
tagaaactgcttacacagtatctgtcaggaggaaaggagagtgacctttacaactctttgatgtgatcatttaggtctagggttgaaaacaaaaagaacaaacgattctgggtctatcaccattagaatgtgaccaaatgctatgggaaaacatacaacttctaacttcaaaggaacaattgccacccaacgttccttaacgcaggttgccagtttccttttctcagaaagccctgatgctacaaaaacatgaaaacatccaattagcatggtttcttgataagcacatattgaaaatgtcaaatctttgaacaaactgagatatgtatacatttatgcayctaaattataaaatgtctcatgtaataagaggtaatgacttcattaggtgttaaaagcaattctttctttgaatattctttttttctaggtaactctgactcattatgaactttacttattttaattgaaactagtaaaatcattgctcaaaagaaaaatggtttctacaatatgtttagaagaattttccaaatattttttaaattagaaaaatatttaccttatccttattgatttcactattgatgtttgtgta

SEQ ID NO: 325945 - DNA, 590 bp, Homo sapiens
  misc_feature (1)...(590): n = A,T,C or G
tcattttttttaaatttcttgctttgaaagatgctaaactgtttttggggaactatagggatttgcttttacctgaatttttatctttatacaattgagtctataatctacttgtttataaccacttgaaatattccagttattcagataaatataccatacacattataatgttgcttcttcagaaatcttaaaaatgataaaccagattttatgccaatttgcctttatgcaacaagtttttccgtattttaacagtaaggcatcccatgtttttaataacaaagacctggaaacaattcttatgagactaagctaaggctgtatacaagggaggaagcattttagttgatatatttyaaaagattaaagaaacacttagtaaacccgggcatggttttcttttacataaaatgttatttatcacatagaatcatgaattatttacaagcactggagtcacttgcaacaggagtaaacagaattgatgatgaccttcagttcactgtactgcagagaaagtcattctctgcatgtagatctttcacntggagaataaaagaagcctttgcctcatgaaaattcactgc

SEQ ID NO: 325946 - DNA, 497 bp, Homo sapiens
gcagtctctctccctctcacactctgaggacttatagatttttgcctgtctcatggagtaagctgcagcctggcgctgccttcaaaaggtctgtggattctttttttttttttttttttctgttaagttcttgcattgaatcttatactgtgaatctctacacactattttgtctgtccaagtgagagaggcatgctaacactgcctgcaatctgccatcctggaaaaaaaacaaaaccaaaagctttacattaaaaatgaatcctaccaaaaatatctctaaggtggttgtcaaaaatttgtattttcttcattaatccayatgcttgccaaaattaatataagcaaataatttattatttgaaacactgatgatattgtcttgtgtattttaacttttttcatatataatatctaatatacatataataaaatgtgtatgtcaaaatcatagtttgcttaatttgcacaaattgaacacacgtgtgcaaccaaca

SEQ ID NO: 325947 - DNA, 497 bp, Homo sapiens
gcagtctctctccctctcacactctgaggacttatagatttttgcctgtctcatggagtaagctgcagcctggcgctgccttcaaaaggtctgtggattctttttttttttttttttttctgttaagttcttgcattgaatcttatactgtgaatctctacacactattttgtctgtccaagtgagagaggcatgctaacactgcctgcaatctgccatcctggaaaaaaaacaaaaccaaaagctttacattaaaaatgaatcctaccaaaaatatctctaaggtggttgtcaaaaatttgtattttcttcattaatccacrtgcttgccaaaattaatataagcaaataatttattatttgaaacactgatgatattgtcttgtgtattttaacttttttcatatataatatctaatatacatataataaaatgtgtatgtcaaaatcatagtttgcttaatttgcacaaattgaacacacgtgtgcaaccaaca

SEQ ID NO: 325948 - DNA, 613 bp, Homo sapiens
acttttgagacacatttgtatacataaatgtcatcatcatcaccaccaacaaaaataatatagtaataaaaatgaacacgtgtgagagtgagagcaagagaaaaaaaggcagaagttggagaggttggtagatgtgaagtacagtgccactgtatttttttaaaaaatattaaatgatacttgatatagcacaataaggcagactttattcaggaccatcaatataagtgtagggacaaggcggtgagattgtgtagagggaggagagaagttggacgcagctcaaaatacagcatggacaagtgggaatttatagccaaaaagcagggtgaagcgcaatgaaggaaaaattattaagaggcaacatcaaggattctgaccacacctgcctagcagaattattgctggcgacaggccagcatgatcagatatcacctgggggatggtggaaggtgaaaaggccaatcagatatcaagagtgattgagggtgaagagttcttgcaacatttttctaaaactgaattttgtaaggaattacacagatgagcctaagagaaggttwcggaacctaactaaatcttggtcaagcaaagaatctttgttaatacaaat

SEQ ID NO: 325949 - DNA, 394 bp, Homo sapiens
gaaaagcgcatgaacatttttttattgatgtatttttcttgttttgaatatgagcaagaggattttaagggcaaacagagtgccaggaattccytacaaagtttccatcaggaatttaattctttgaaggaaaaagagcactgatggaaggagaatccttactgaaaaaaattcagtggcacatattgaaaaaaaataataagcatgtaagggagcatattggctatggctgtttgataccttggcccaaagcaagaggacaagatatttatatttcattcatcttcatttgctttaaattgaggtccaatttacaatatgtaaaattaattattaattattttaacacataaaattaagtgtcatttggttcattcacaagattgtggagcgt

SEQ ID NO: 325950 - DNA, 394 bp, Homo sapiens
gaaaagcgcatgaacatttttttattgatgtatttttcttgttttgaatatgagcaagaggattttaagggcaaacagagtgccaggaattccctacaaagtttccatcaggaatttaattctttgaaggaaaaagagcactgatggaaggagaatccttactgaaaaaaattcagtggcacatattgaaaaaaaataataagcatrtaagggagcatattggctatggctgtttgataccttggcccaaagcaagaggacaagatatttatatttcattcatcttcatttgctttaaattgaggtccaatttacaatatgtaaaattaattattaattattttaacacataaaattaagtgtcatttggttcattcacaagattgtggagcgt

SEQ ID NO: 325951 - DNA, 394 bp, Homo sapiens
gaaaagcgcatgaacatttttttattgatgtatttttcttgttttgaatatgagcaagaggattttaagggcaaacagagtgccaggaattccctacaaagtttccatcaggaatttaattctttgaaggaaaaagagcactgatggaaggagaatccttactgaaaaaaattcagtggcacatattgaaaaaaaataataagcatgtaagggagcatattggctatggctgtttgataccttggcccaaagcaagaggacaaratatttatatttcattcatcttcatttgctttaaattgaggtccaatttacaatatgtaaaattaattattaattattttaacacataaaattaagtgtcatttggttcattcacaagattgtggagcgt

SEQ ID NO: 325952 - DNA, 563 bp, Homo sapiens
gaataaggcacatggacaccggagagtgagtagaataggattttttagaaaagtaaagctctcagcaaagagaggaggcctgaaagcacgttgcccaaaatggggctgagttctgggtattttctgtggcaagagcaagaaagtcctctctgggttctgcacaaaatgggagaggtgaaattccctcctaagggtgttgcaatrtgcacatgcctggggttgaccagattggctccatcttggttattactcacaagtgccttagggaaactcaagagggggataaaacgacaatgctattttttatgttagtgacattataatcagccaggtcaagttaaggacatttaggttaatttattgtacctgcacctaagttggggcagtcccttctgagcagacatcctggcgtaagaggaaattcttgaacacatttctttccattagctacgggggctgtgcagatgtggtcccatgggtatttttccacttccaagatcctccctctctatctgcctaaccagcctctacctctgtctctcacttgtagctggtgttattca

SEQ ID NO: 325953 - DNA, 563 bp, Homo sapiens
gaataaggcacatggacaccggagagtgagtagaataggattttttagaaaagtaaagctctcagcaaagagaggaggcctgaaagcacgttgcccaaaatggggctgagttctgggtattttctgtggcaagagcaagaaagtcctctctgggttctgcacaaaatgggagaggtgaaattccctcctaagggtgttgcaatatgcacatgcctggggttgaccagattggctccatcttggttattactcacaagtgccttagggaaactcaagagggggataaaacgacaatgctattttttatgttagtgacaytataatcagccaggtcaagttaaggacatttaggttaatttattgtacctgcacctaagttggggcagtcccttctgagcagacatcctggcgtaagaggaaattcttgaacacatttctttccattagctacgggggctgtgcagatgtggtcccatgggtatttttccacttccaagatcctccctctctatctgcctaaccagcctctacctctgtctctcacttgtagctggtgttattca

SEQ ID NO: 325954 - DNA, 512 bp, Homo sapiens
acgttgcccaaaatggggctgagttctgggtattttctgtggcaagagcaagaaagtcctctctgggttctgcacaaaatgggagaggtgaaattccctcctaagggtgttgcaatatgcacatgcctggggttgaccagattggctccatcttggttattactcacaagtgccttagggaaactcaagagggggataaaacgacaatgctattttttatgttagtgacattataatcagccaggtcaagttaaggacatttaggttaatttattgtacctgcacctaagttggggcagtcycttctgagcagacatcctggcgtaagaggaaattcttgaacacatttctttccattagctacgggggctgtgcagatgtggtcccatgggtatttttccacttccaagatcctccctctctatctgcctaaccagcctctacctctgtctctcacttgtagctggtgttattcataactagattgtcttaagatgctcattttaacaccc

SEQ ID NO: 325955 - DNA, 537 bp, Homo sapiens
ggggacctgaatgccacaatgtgaatttgatgcagttgcaagataaaagaattgacttatcagggctactattctagggacacttgtgtcaacttaaatgaaaaaaatcttgaagaaatttatttgaaaaaacatcttggtaaacgtgagaaatatattacagaaatgtaatgtacacatttacctttgatgcaaaagatataaagtgttttgtgacttctttgcctaccactaactttaagatgtaaaaagaaagagacataaacacaaacaacacaaaaacaaagaacwgttatgatatattaaaagggttagaataccatataggtgcacacacatatacacacaaatgaagatggctacagaccagactagagtagaacaaaagttgattattatcagcaagaatttataggtacagaaatataaatatatgaatctatatagacatatgtatcattttaaattgtaaagaaagatttcttctataaaatgtccttccatttttgatacatatttttcaaaaattaaaatcat

SEQ ID NO: 325956 - DNA, 537 bp, Homo sapiens
ggggacctgaatgccacaatgtgaatttgatgcagttgcaagataaaagaattgacttatcagggctactattctagggacacttgtgtcaacttaaatgaaaaaaatcttgaagaaatttatttgaaaaaacatcttggtaaacgtgagaaatatattacagaaatgtaatgtacacatttacctttgatgcaaaagatataaagtgttttgtgacttctttgcctaccactaactttaagatgtaaaaagaaagagacataaacacaaacaacacaaaaacaaagaactgktatgatatattaaaagggttagaataccatataggtgcacacacatatacacacaaatgaagatggctacagaccagactagagtagaacaaaagttgattattatcagcaagaatttataggtacagaaatataaatatatgaatctatatagacatatgtatcattttaaattgtaaagaaagatttcttctataaaatgtccttccatttttgatacatatttttcaaaaattaaaatcat

SEQ ID NO: 325957 - DNA, 609 bp, Homo sapiens
caaataaagatatttagaaatgacaaagtttacattacaattgaccaaacaggaatacaaataacaatcagataatattttgaatagttctatgcaaacaaactagaaaatctagaagaaataggtaaatttgtgaacacatacaacttcccaagactaaaccaggaagaaactggattgctgaacagatcaataatgagttccaaaattgaatcaataataaaaagcttattaatsaaaaacaaaaacaaaaacaaaaacaaaaacaaaaacaaaaacaaaacaaaacaaaaaaaagcccaggaccagagagagtcacagccaatttctaccagatgtataaagtagagctggtaccattcctactgaaactactccaaaaaattgaggaggaatgagttttccctaactcattttgtgaggccaacatcatcatgataccaaaacctgtcacagacaaagcaaaaaaagaaaacctcacgctaatatccttgaacatagatgcaaaaattctcaaggaaatcctagcaaactgaatccagcagcacattgaaaagctaattcaccatgagcaattaggctttgtccctgggatgtaaagttggttcc

SEQ ID NO: 325958 - DNA, 584 bp, Homo sapiens
ttaaatagtctgagttattattagaaaacactgctggcaaatggcaaagacattttcttttccatgttgcagagttcttctgtgtaattgaaaccatgtacagggcttaccatgtcagagtaaaacaataaagtagttggaggttacttcagaatctcacccattaatctgtcacttataatacgatgctatgagaaatatggtgccttaattattacaataaagtgtagcttatgatgatgtgaatagatggttgaggtgaactgaaagcattaacatttaaagggaaagatattaaagaacttaggagcagaattttggagtccctgtctctgtggatactaaactcaccaagaattatgatgagaattgagttgcacaaagctataacaaaccagcaattaaaattttcaagaattgttgggggcagagtctatagtctattgatgagagtaatgagaaagtactactacaaaacaygcctaccctctttctaacatgcctggttttctgttcaatctcccatatattctttggttcttgtcagaaacattattgattagtatgacacatctcctttattg

SEQ ID NO: 325959 - DNA, 408 bp, Homo sapiens
ctaatgtagaccagacccccatatttacaatccccaacaaatattgttttcatattttacatcagagcatcaaatacaattcttgcaacaaaactggaaagaaagatgtatagaagatattcaagtattatactggtatcaggaagaaaatgctgtgataagactatgagcttgacatataatagggattacatgtgcttttggtgacatgaatgctattctagattttactctytcttttgtatggagcaatgcagaaatatgtgagcgtataggtgatccttcaagatcactaagagctctggtgccttctctattattaattaccctgtcatcaactacaatttgtcctcatctatgtgatcagagtatgaagagaagtggagggaaagctgtatcattttaaat

SEQ ID NO: 325960 - DNA, 574 bp, Homo sapiens
aacagagtggcttcacagcattgcaaagttgaaacatcttaagttgaaccattctattaggtgactattgctataaattgtgaaatggctaaattgagctaattaacatatacattatctgacatacttttttggtgtgtgagaacacttaaaatgtactctcagcaattttctggattataatayattgttattcattatggtcacgaggtagtacaataggtctcttgaactcattcctcccagctaactgaaattttgtattttttgacaaacatctccccacccaccccgactcctatccctatcccttggtaaccaccattctgtctacttctgagttcaacttttttaggtttcacacataagcaagatcatgtggcatgtgtctttcagtgtctggcttatttcgctcaacctaatatcctgcaggttatctatgttgttgcaaatgacaaatttttcttcttttgtaaggctgaatactattctcttttgtatgtatagcacattttctttatccattcatctattgatggacacttaggttgattccatatcttacctattgtga

SEQ ID NO: 325961 - DNA, 684 bp, Homo sapiens
cactttctactatttaattttaattcttcttaaaatgaaatgctaattgtatgcagttctgttggttgagatgcacagtatagatactacatatacattattcttcattcttaactttaggaacaaacattctcaattaccaaatctttgtaattataaaataattagaactaggccacaaggttcaaattcatagttagtttaagattatttgtaaaacaaatgattggaaataaaacattgttagcaaaatgtagtatttaaaatgaaaattkttaactcttccttctgattttacaaattttggttgtattcttttaccttttttactttgttcactaatagtgtatatgtttaacaaatgttcagatgtttgtgcttcatctgtgagctcatatctaatggctttttatctaaaggtaataaaatactccatatcctattttatgtcttcataataataatgtagcaatgagcattttaagctgtaaatcaaatattacaaatgaatatctattgagaacatttgctattttatttccatttttcttagcaatcacattacaaaaaatttttaaaattacattcactggtgtagatattattaaatatatggatgtaagatttataatattaataaattgttttaaaaagtgatatgtggtgcacttattttctatggat

SEQ ID NO: 325962 - DNA, 419 bp, Homo sapiens
gaaaccctgtctctactaaaaatataaaaattagccggggcatggtggtgtgtgcctatagtcctagctactcagtccyagctactcaggaggctgaggcaggagaatggcttgaacccaggaggcagaggttgcagtgagccaagattgcgccactatactccagcctgggcaacagagcgagactccatctcaaaaaaaaaaaaaaagaaagaaaagaaggaatcttaaaatgtatgtcaataatacaaataattacataaatatagcaaaaatgaaaaatgtagacatgctaatggtgaatggagagcacatatgagatgtttgctgtatttttcctttactatttgtggttgaaaaaaattttctgcaaggggaaaaaaataacaaaataaatagcatagattatgttttcactg

SEQ ID NO: 325963 - DNA, 539 bp, Homo sapiens
tctattttatgttttctcctattatttggatattggtcctcccaaactggtcttctaattttcttatctttttgctgtactttttggggaatttccttaattcttccagtccttttattgagttttcatttctgttcttggtattttaaacttctaatgasctctttttcctctgaatgtttgttgtggatattaatgatttttagaacatctttcttcttgttgcatactgtttatttggcaagttgcttcccccagccccgctttctctcatgttaggatctttcctcagatgtctgataatcctgggttgtctactcatgtttaagaatgagggattacaaagcagattggaaactctaggtgcgtgggtaggatttgaaagctggttgctttgctgtaggacagcaccatccaatagaaatctaatgtgaatcacattgtaagtttagattttctagttttagaaacgtgaaattaatatatctaaaatattacttcaatatgaatgaaatataaaaattattaatgaaatattt

SEQ ID NO: 325964 - DNA, 567 bp, Homo sapiens
acgcacggccggggaggggctggcggcggccgcgggcggcgggcggcggaggtgcggggcctgctcccgccggcaccatggccaagaccgtggcctatttctacgaccccgacgtgggcaacttccactacggtgaggaaacagggatatgcatgaggrgttgggacacggaggttttgaggcggggttgcaactccaggggtgagagctgacgaactctcttctccccacccccaggagctggacaccctatgaagccccatcgcctggcattgacccatagcctggtcctgcattacggtctctataagaagatgatcgtgagttccgccgcctcggccgggggttggggggtggggcgagctgtggccgtagggataggtgggctggactgagtgcatgaagtgcgacccgcccctagagtatcggggagctggatagaagtcaccaggagtaccttgaaagtgcagggtgttgggggtggcgtcctctgcttaatggaaagtactttctcacctcaggtcggccaccctctgactgtaggcacactagcccttggcctagggt

SEQ ID NO: 325965 - DNA, 570 bp, Homo sapiens
cttccctctgccacttcatttgcatacaaatatataaagttttaaaatttctcataatatcttttgggaaaaacatccacagtaaatgtcaggtagcttaaattagacttttaaaggactccatcattattgaggttaaatcatttttagacaatatttaccaaaaaatgtttcatgtcttctattaaagttgatttctagagggttgaggcttagtactcttcagcacttctcacatgttctcatggctcttattttgaatataaatattgtatctgctgcctatttctgatctccattacatttgatttttttamcgtaagatttcgtattatcattaataccttcagaattcaaaacttttacattagatttagaagtcactctcagttctcagtaacatttccaggaagaaaaaaatgtattgcacttctcttttactttaacatctgtgattatctttctgtaagttctttttcttggcaatgaaaaaattttccatttcccaattggatagtaaccagtagtcagtaactatcaaaacacagcagagaaagtattgtttttcta

SEQ ID NO: 325966 - DNA, 638 bp, Homo sapiens
taatgggtatgaaaaattagaaaaaatgaataagacctactatttgatagtacaacagggtgactatagtcaataataacttaactgtacattttaaaataatttaaggagtataattggattatttgaaactcaatggataaatacttgaggggatggatacgccattttttgtgatgtatttatttygcattgcatgcctgtatcaaaacatttcatgtactgcatacatatatacatacctactatgtacctaaaaattttttttaaaaaaagatgagggcacaaaattgcttgttgattaaatgaaaaatcagaacaatcattattttcattgttctccctggtgtgcacagcagctacttttaatcttaaattttaccataattgaagaggggactaggctaccaagattcagtaggaagagtccaacaagaggacctttgtaaagcaagagtcacattctttaaaaggatcactgacactaagaaactatacagtaatactatgtcatgagttttcacgaattatttctttctgcatgaaaactattgtgttatcttactataaatgattatagaaataatgctgtgtcattcagaatatttgaagggtaaagtgcagtaattcagtttaaa

SEQ ID NO: 325967 - DNA, 638 bp, Homo sapiens
taatgggtatgaaaaattagaaaaaatgaataagacctactatttgatagtacaacagggtgactatagtcaataataacttaactgtacattttaaaataatttaaggagtataattggattatttgaaactcaatggataaatacttgaggggatggatacgccattttttgtgatgtatttatttcgcattgcatgcctgtatcaaaacatttcatgtactgcatacatatatacatacctactatgtacctaaaaattttttttaaaaaaagatgagggcacaaaattgcttgttgattaaatgaaaaatcagaacaatcattattttcattgttytccctggtgtgcacagcagctacttttaatcttaaattttaccataattgaagaggggactaggctaccaagattcagtaggaagagtccaacaagaggacctttgtaaagcaagagtcacattctttaaaaggatcactgacactaagaaactatacagtaatactatgtcatgagttttcacgaattatttctttctgcatgaaaactattgtgttatcttactataaatgattatagaaataatgctgtgtcattcagaatatttgaagggtaaagtgcagtaattcagtttaaa

SEQ ID NO: 325968 - DNA, 640 bp, Homo sapiens
actaatctagtaaaattgctagattttaaataataaaaagaaaaaaatctgtgggtatatttaagaaaaaatatacatcttataaggaaaataaaattagatcgttatcaagctattccaacactttatgccagaagaaaataaaataatgtatcaaagaatacaatgaaagtataagccaaagattttaatttcagcaaaactgactttttgttataaaggtcacagacaaattgttatcagcatgtaagaattcaacgaatattgtttccatgaagagtttagaagagtctactagaaaccaagctttaatatcagaacaactgcagaaacatcaaggtaagcattggtggtgggcattaayatcttgcaacctgaaaactaagatgaaataagggcaaagagggagataacacggtatgtagtggctatatgatctgaaactgaagatgtggtacaataatttataaaatggggagggcagatgtaatttttaaatgttttgataatgaaattagtggtgctaatagatgatacttgctatgggaatggagaaaagtatatagcttaagaggtatttatggggcagaaattgcaggacttggtgacggcttgaatgtagggaatgaaggaaaggaag

SEQ ID NO: 325969 - DNA, 619 bp, Homo sapiens
tttgtgaaaagaatgttgtaaaagcaagcatataaagagtctataagcatacatgggaagctgttagttttaggttatattgtttggttgtttccacgcactctttttaactgtacatcattttggctatggaacacatgcctttaaatggttaatcttctttaacacattgcaagctcatttaccacttataaatgcagattcctcttggaaggtggttctcatctcagttgcagaagcatctgcggttgcatatcccaggcctttaaaaactcttccactctcytgccacgtcttttgaaaattttttcttacttctttaggtgaatcagagatatctaaaatatgtccagcaatgacatcctcataggttggtggggcatgcttgaagtcacagccagatttgccagcttctgagctatgtgatgaagaggttttcatcttcgactcaacaatttgactctcaaatgcatccatgcctgagaaatgttcacttagagacctggtttcagagcagatcctgggctgcttaacaggaatcttttctcgcagttctctaggatgtttgcaagaaaagtctgtaaaactcgtgtttcctaaagatgttaatccaaattcc

SEQ ID NO: 325970 - DNA, 479 bp, Homo sapiens
gagaatttcattgtagaattaagtccagaaactaaagaagaagcaaatctcccaatatgtacatttttttttctccaccagagaaggtgtagatttagggggttactcaaagagagaaggaaaaaggagcctgtatgtattgtgacacttccaaaccattctggctcctgacaygtggaaatattctgtagagatatagccagagagcgggtttgtgatcacctatccaatttatttacacttcgtctttcatgaactcatacctagtgaacagtcagtttataatgatttaatctattacacaattctttccacgattcttcttgtgcgctaaaagatactgtgtgtatgattcccatttggacgagtaaaaaacattaagatttgtagataatttatcgtttatatcagtcacagctcccagtttcaagcataggagtctgactgatttaaacagaaaagggaatttattgaagagg

SEQ ID NO: 325971 - DNA, 601 bp, Homo sapiens
gacaactcaatatctctgaatcttgtttttcttgaatataaactagagatagtaacatctcttctatgtataatttactgggttaccttgggttaaatacttaaacyatctaagcctcagtctcctcatattttgactgacgtaaaggtttacctacaatgtagtgttgttgtgaagattcagtgacataagtcatgttaccatgtgatataaactataattatataaacttctatagccactaaaaatacagttgttaccatataggctcttatattttaaaaaattgaaagaagttcttatactttaaaattctatctataacaccattttatttatatacaggtacatcttttgaaatgtgatctctaaataaaaacttaccatcattgcaacctttgactatccatcttaaatgtgctgtatatacaacttaatgtgcagaaagtcttaacttccaatatgtgggaaatgtatactttaaaggatattgtaatgaatattaatacaaatttcatagatgtgtgtatatatgtgtatataatacatatatgaatttgtctattctaaattaatgaatttatttggggattaatacaaa

SEQ ID NO: 325972 - DNA, 475 bp, Homo sapiens
cacattggtgtatatatgaggataactgaaagaaatggcaataacataacatagggacaaagtcaagaagctgtgactggttggcttgaaattgtgaagtaaatgaaagaggtgcaaattgaagtttgaggcaacttattgcttctatttaaagggtggatattaggaactataactagtaatttagagttgacaactgctatagctgaactagatcttttgagaaaccaaagggtgtgacttaaatgcaaactcatgccttccaaatttcatttccctgaaattttgcagagtaaaagttgaggctgttgtccagatctggatgatgaagggatgatgaatcttggaattatttccattccagaatsagtcagtgactgaaagcgggcatgcactagtacagttccattcctaaaaataaatgttttgagtcctccaggactcagaggactagcatattttctactagcgaagt

SEQ ID NO: 325973 - DNA, 540 bp, Homo sapiens
acttttcttcaaacttgctgtttttgatttttcaggaaaaaagtgtatttgataaaaatacatatacattaaatattattttttcacttttttctcataataaattttctaatgtatatattagtacaaaaacccaatgattatacattaagaycaacaaaaaatggtcaggaaaagaaaccttggtggaacactgtataataattggtaataattaagagcaataaatgttaaatctacaggagcacacataaattaactgacctaagttcaagcaaaaatgttcagtcataaaattaattagtgatcacgtaatttggttcattcattttagtcatgaagacaatgaaaacatcaggacctagattctgaccattcattattacagtggttttagacactaaatttcattcttcatttaataacagtttaatcaattattatgaaaccactatgaaagcaagacagatgaatgacgggtagatggatggatgcatgatagacagacagacagatataaaggcagaaagattcataagg

SEQ ID NO: 325974 - DNA, 601 bp, Homo sapiens
cttatgagttttcttaacattgttagccacctttgaattatttttaaaggttggagtataaataatttttaaaactcccatccataaaagataactatcttttctctccagaactataagtctcttggaaatttgatttgatttaggtaattggccctactacatagtaccttccctctctgggctcttgaccatctggggttatcctatgtttgtcatgctagggaagcgtaagaatgttctttgggtattctttcagaattaaataagaaaaggcaaaatgtttgataaacagacatttatttcaatattaaatatccttcatataaaatgggctgaagtctaaattgcacgttcttcaagttgtccttgatcaagatgtgtagatgcagaatagttccttcatttccacatcttttctagtgagcaggtgagagtactttctctgaaactgaagagagaagtgtcctgatcctaaaacctttcagagagctgcctgactgcgctgctcaggaaaaaasgggtgctcaccctagcatgatagggatggccaagtgccttggggcacccagctgttcagcggcattgtggtgaaagggaa

SEQ ID NO: 325975 - DNA, 547 bp, Homo sapiens
acttagggtggtacactctttttgggggtgattttcatctgttccccaaccaggctctgctgcctgactctcttttctggaaaggtttctgctgctttcagacgttcatttttctccctatgcattaattgaagtttagagtatrtttcgtgtcctggctatgctacaggcagggctggcttcataggcatgccaccaacgcggctgcacagggccctattctcagaagggcctctcacctggggtttaatgcttggcagtcactgtcttaaaatccttaataatttagtatttgaatttgtgttttgtaagtgaagtctgatgggacaatggagcatgtgccaggaccttgaagccttggctcacacatgagcctgcctccccttccccagcaacacttactcctcacctccccagccccgaactcccctggctgaattctcagccacctgcctccgtgtctgccttgcagccactgaggtcctctggctgaggcagcaacctggctgcattgcaggcggaggtcagtgctctgtcctagccttcc

SEQ ID NO: 325976 - DNA, 624 bp, Homo sapiens
agtagctagaactaaaaaacatttttaaaattatctaaacaaattggtaccaaagaaaacttgccatacttaaacagtatatatgttcccttttttggctgagagattcaagtttgtgctatatagaacactaacagttactaaagactaggaaaatttgcaggagaaaggctatttttaaacttcacaataattctaaaggaagccaaataataaaacttctaataaatgccataacttaactattacctctatttgtacctttcacaaggatctaggttcaaaataagctcaaaacacagcactcaccacttcaacagcagctcaaagtcaaatggaaaaacttgtggtatattctttggaggatatactaggacctgagaagcaacatgttcctggttggtaggtccacaaaaaatttaaacatgyagaattttatggactgacaaaaaaaattaccaatttaagtgatcaatatattaatggttttcagagtagtacccgatatttgatgttcaaggttcatgcatgtgtatttttaattccttaaactagacagcaaggtataagtcaccattctcctctaatttttgaaataatcttaaactgcgcaatccagattct

SEQ ID NO: 325977 - DNA, 587 bp, Homo sapiens
atgctttttcttgattattttgtttaactggtattttgcttagctctgttattcaatttatttaagaataatttattaaatccctactaggttccaggcatttttccaggtgctagggtaatagcagtgaattgaatggtagtgawcgtacatagaatatgatgtcaatcacaaaaaagtagatatatctaataaactaacatagaagataagatatattagacatttcagaaatacttagtacatccaaaagaaaacagaaaaaggggaatggggggaactaagaacagagaagagaagtacaaaacaaaaagcaagatgatagatttaaacccaaccacatcaatagttgtattaaatgtaagtagtctaagtatctgaattaaaaggcagagattatcagataggataaaagaaaagtcaagagccaactatatgctgtcaacaagacatccacttttaatataaagacacagaaagcttaaaagtatagaaaaggatgcaccagcctagtactaaccaaaagaaaacagaagtggctattttcattaatattaaacaaaatgaattttagaactaagaatatt

SEQ ID NO: 325978 - DNA, 587 bp, Homo sapiens
atgctttttcttgattattttgtttaactggtattttgcttagctctgttattcaatttatttaagaataatttattaaatccctactaggttccaggcatttttccaggtgctagggtaatagcagtgaattgaatggtagtgatcgtacatagaatatgatgtcaatcacaaraaagtagatatatctaataaactaacatagaagataagatatattagacatttcagaaatacttagtacatccaaaagaaaacagaaaaaggggaatggggggaactaagaacagagaagagaagtacaaaacaaaaagcaagatgatagatttaaacccaaccacatcaatagttgtattaaatgtaagtagtctaagtatctgaattaaaaggcagagattatcagataggataaaagaaaagtcaagagccaactatatgctgtcaacaagacatccacttttaatataaagacacagaaagcttaaaagtatagaaaaggatgcaccagcctagtactaaccaaaagaaaacagaagtggctattttcattaatattaaacaaaatgaattttagaactaagaatatt

SEQ ID NO: 325979 - DNA, 527 bp, Homo sapiens
gggcacccctggagggggcgaggcaagtctttctgttacaaagatgcagatttcagtgcaactgaaggcagaactttctaatgagagtataaagttgtccactggttgtttagaaagaggctggacttacaccagtagaactccaagtccacatagacccgccatttggttcaccagacacctattcccagggctgtattttagccrtctgactgtccagggatccccgggaatccttatgtgtgatgtatggggcttttagagactttgaactaaaatgccaaggcctcagctccgtgaattggtcttcttcctttagattggtgcttctcaaacctcttcaaatctgagggtgaagaaagtggatgcctacctccaccaggtaaagtgatctgctgcaagcattagatttttgtgaaatttcattctttagcttaaaaattcatgtgaactttgcattatactctggttttctcaactaagataaaaatattttgaaggactttgtagttaaatcactaaacttg

SEQ ID NO: 325980 - DNA, 549 bp, Homo sapiens
agattgcatggtggattgtgagaaagaacagctcttccaccccaaaactagtctgctccacatcctactgtagccagaaagggaagaagcaatgaaatggtgaagggctgggctttgccatgagtcacaactgggtgggaatcttggctctgcctttaatcagctgtgtgaccttgcatatattgcttcactcctctgacccagtgtcctgtctgcaaaatggagatgattatgcctcgggaaattgtaagttaaatgagatagcataggatgcctagaactttctctggcagttaccattaatgatagcagttgctgttgtgtgggaatagaagatgataaaatgctcccctacatcttctatgtgacttaagccaagcagcctactgggctctgtaacacagcaggaacttgtgtccaaggatacaaggcccaaccacctgtaggactgacttcactctaataatggcagcaactatgtcctccttgcagcccttccaggttccygtgcccccttaagagaaacatgtatgaagagggagtttgtac

SEQ ID NO: 325981 - DNA, 585 bp, Homo sapiens
aggcttgggtgaggcagggtgagcagggttaggctaggctagtcggattaatttcagaaaggtctggkacatattggtggttctagttgtctggtacctggccctagggtgattagggttggggaattgtggcctggagtgtaagagccaaaggtggtggtggttggggaatgggctctggattggttgatttgcatatgaagggcatgctcacaggagaattgtgtgctatctctaggaattagcaaccctgagaagggcagtccttccagggtcagcaaagccccagaagtcaaagcatcagaaacacagaaaataaaaatatacaattaatacagctgtccaccttcaatcagttttgtgagtttccatgtgaaatccagttttgtaacaccttcaaatgtcctagaaggccttatcatggtctagccctctgccgtgaacctgacctgctcccacccttttgccctcacaccctcccttcagtcacccaggctcccttgcagtccttagaacacaccaggggctcatagaactctgcctggaatgcttttccttccaacataaactgggcttgcttttctc

SEQ ID NO: 325982 - DNA, 605 bp, Homo sapiens
catttgagttgtactaaatttagaggtgtgagctgggctcccctgataacttcagggtattccccccaccctgtgtattgctcataaaaaacattaaaattcacacagttcgcattacacagatacggtttggatttaaactagctattttaatcttcattattctctcccaaaatgaacatcggaaatgtgtgaaatataaattttttcctgcctgacacagatgggtagatcccatagcaggcttcccagtcatggagtgaatgcagccacttttgcagcaacagaaaatcttccagggaccaaaaccccctgcttgtttatagaaatgcttgcactctggggaggaaacacaggcctgttcataaataaatgctcagtcrtaagagttagctctggatgaactgattcatttagcagaagtggaatgctttgaagctagatggaagaggtcactaattaaatgctagaccaagacagagtccagttgcatggggagctggaattttcttgaatgttagtaagtgaaataaaaggtgagaaaatggctttttagactttggtaccctgacaagaaattagtggattaagagaagtttcttatc

SEQ ID NO: 325983 - DNA, 555 bp, Homo sapiens
tacctcactattattgaatacagttcttggtttgacatttcaggtatacttatgagaaaagataggttacgattcatttttttcaccaaagccttttgaaagccttagagaacaaagaagtattactctgtgatcttaaacataacaacaggtawctacatgtgttgtattctcatattgtcccaagcacttcgagaaatgcctcacataaactatctgttttgatctttacaaaaacctgtgaaatacgtattattatcctcattttatggatgaggaaactgagggccattgaagacaaaaagttgcctcaggtcgcataactggaaaaatacagagccagatttcacccagttctttctgccttcttccctctaaacggatcaaaataggaagacaaagttagaatgcctttatgagtggaaaaaaataacatttttcagagtttttttttttaaagaaaaaacatcaatccagtaaatcaacagtttttttttattttgtaatgtgtaagaaagctttttattgggattctttaaacagtcagtataaata

SEQ ID NO: 325984 - DNA, 609 bp, Homo sapiens
cctttcacctctgtgctctgctgccacctttgggccactttatcactcacaatggataaatttcacatgaagctgatttaactgttagttttagaatttcattgcattgaatgttaggtagaagaagagaaagtaatggacacttagccaaagtgaagtcttgaaatatgaaatgtcaattttgtttatccagattcgttcattccctcactaccaaactaaggagttagtgttatagtcttggatatctctatgcaatataataacaataccttacatctgtctagccttatatgtgctgtttttataactgttctcatttaatcgtcttcttttaagctctatgrgtaagactgggaatgttttatgcccattttagagttgaaaaaatggaggcttggggaagaatgatatgaccatttaattcctagcagaccttaaacccacaatctggatctgctggctcctagtccagggcccctttgccttttcctgaactagctctgctctctatatatgatctcatcttacggtgcagaaagcctgaaagttatttcaagtggcttgtggttgtcattgtgccaggaatctctgggaaagctgaccact

SEQ ID NO: 325985 - DNA, 323 bp, Homo sapiens
actttttttcccccctcttgagggcgggggcctgtttttgtttcagttcttttcagttctttccccatagaaagaacttgtgctgctagttgtccagagaccacactttgagccactgcctcctcagtgacttttaaggcagtagttctaaagtgtggtccccagacaactagcagcaccagtatctcctgcmcaggaagtgccaatttcctcccagccctgctggctgagaagctctgggtgtgggtccagcagtctgtgctgtaaggagtcctccaggtgctgctgcagtgggctgaagtccgagaaccacccatctaagg

SEQ ID NO: 325986 - DNA, 289 bp, Homo sapiens
gaaaaataaaatagggataggaagtgggaaacagggataggaatgaaacagggactgggcgagtttagatgggtgggccaaggaagcccttaacagacttcctatcygttccttgtggacttcctgtctgtcccagtgggcttcctgtctagacccagtggacttccttcttaaaaggtaacatttaaggaggaaaaaaaggtcatatccatgttaagcagatacaatcaggctgctctcgttaaacctcaggcaaagcaagatcctgccttcaagagcttggtttcat

SEQ ID NO: 325987 - DNA, 632 bp, Homo sapiens
aatagaaaaatctgttatcacttcaaacttgaaagattaccttataaaatattatttgatctaatgaaatatattcatttctgttaatttccaaattgcactattatatttattcttatgtaattagcagaaaagtaagaaattatctacactttcaattagttcttcacaaccaccttaaatttcctagtcaccaccagctttggccgttctttatccaaaaacctaayagctgtctcacatgcctcccaagactgacattttcatctgcttatgccatcagcagtcttctcagatagtgacacctttctttcaaaaatcatagtatctcttctgatcatacccccatgtgggttcttcctctctattcctattttattatactggctcaagaacattttttaaagtcagttgaaaatctggcagcatttcagacagtttcctaggatttattgagtgttttagaaaaatctctcaatgactagaatttccagggaatccctggagtttgtgggtagaaataaaacccagtacaattcaaaccagggccctgaataagtgtcaaatcaagtgagagtatagacagaactgagaattacaacatttacaagtattccaacatttttgaaaac

SEQ ID NO: 325988 - DNA, 590 bp, Homo sapiens
aatacaagcttactgttacataggatgaataagtataaagacctaatgtacagcaggaagactatacttaataatactgtattgtatactgaaaatttgattaaagagtagattttaggtgctcttaccccccacacacatacacacacacacacacacacacacacacacacacacacacacacacaaagggaactatgggaaataatggataaatttgcttggctgtagtaatcttctcattgtgtgtgtgtgtgcgtgtgygtgtgtataaacatcatgttttcaccttaaatatatatgataaaaatacattaaaaataaaaatgggccaggtacagtggttcacacctgtggttccagcactttgggaggctgaggcgggtggatcacaaggtcaggagttcaagaccagcctggccaacatggtgaaaccccatctctactaaagacacaaaaaatttgctgggcatggtggtgtgcacctgcaatcccaggtactcgggaggctgaggcaggagaatcacttgaacctgagaggcggaggttgcagtgagctgagattgtgcaattgcactccagcctgggca

SEQ ID NO: 325989 - DNA, 590 bp, Homo sapiens
aatacaagcttactgttacataggatgaataagtataaagacctaatgtacagcaggaagactatacttaataatactgtattgtatactgaaaatttgattaaagagtagattttaggtgctcttaccccccacacacatacacacacacacacacacacacacacacacacacacacacacacacaaagggaactatgggaaataatggataaatttgcttggctgtagtaatcttctcattgtgtgtgtgtgtgcgtgtgtgtgtgtataaacatcatgttttcaccttaaatatatatgataaaaatacattaaaaataaaaatgggccaggtrcagtggttcacacctgtggttccagcactttgggaggctgaggcgggtggatcacaaggtcaggagttcaagaccagcctggccaacatggtgaaaccccatctctactaaagacacaaaaaatttgctgggcatggtggtgtgcacctgcaatcccaggtactcgggaggctgaggcaggagaatcacttgaacctgagaggcggaggttgcagtgagctgagattgtgcaattgcactccagcctgggca

SEQ ID NO: 325990 - DNA, 576 bp, Homo sapiens
catttgctgccaagaatctaagaatctccaaagatttttctccctaaatatatgaaaatattttaagtaaaaagcaagccattgagattttgacttgggtaggcctgagggatgcaggtagattcttagctcggccataagcccccgrctctagcgtccctgtaaactgcagcaccagaagcattgaagtgatgtgccattccaaacccgatatgcaggacatggggaatgcacccctggattcatcagtccaggaagaccagcaacgccctgccatggatgaatgccctaatgtgtaagcagattatcatcatcagaatgaaagatgtacagtattcaaagtctttcaaatatctgatcaaataatcctcatggccaatctcttgaattgtgttgttttattcaaaatgaagacatttctccagtttctgtcagttagaagctgtaagttagagtaaaaacatcccctaagaagctaaagaattcagatttggccagcggttcttatacacaagtttcaagctgaagtgctcgtccacaataattctagaacagcagcagcagggtgggtgtgca

SEQ ID NO: 325991 - DNA, 576 bp, Homo sapiens
catttgctgccaagaatctaagaatctccaaagatttttctccctaaatatatgaaaatattttaagtaaaaagcaagccattgagattttgacttgggtaggcctgagggatgcaggtagattcttagctcggccataagcccccggctctagcgtccctgtaaactgcagcaccagaagcattgaagtgatgtgccattccaaacccgatatgcaggacatggggaatgcacccctggattcatcagtccaggaagaccagcaacgccctgccatggatgaatgccctaatgtgtaagcagattrtcatcatcagaatgaaagatgtacagtattcaaagtctttcaaatatctgatcaaataatcctcatggccaatctcttgaattgtgttgttttattcaaaatgaagacatttctccagtttctgtcagttagaagctgtaagttagagtaaaaacatcccctaagaagctaaagaattcagatttggccagcggttcttatacacaagtttcaagctgaagtgctcgtccacaataattctagaacagcagcagcagggtgggtgtgca

SEQ ID NO: 325992 - DNA, 426 bp, Homo sapiens
cggataattggtaactaaattaccataaagctatagaaaggaataccttaaagcttgtaaaaatatactctaaaagaatgaaatctaaaatattatttcaccacatgaggcaaagttgatcawataatgagctttcaaagtacgttgtaagctctgaagccaaagtgaccttttaaaggaaaaaaagtgtagcctgtaaggaacacagggcaataagtaaattcttgtagattatctggacaaaatgcagaaggcaaatagtaaaggcagaggggggtaggaagagaaactagcacaattctattttatattctctgcattgttattatgttcgctagtgagcatgtgaccattgattttttttttgttataatttaagttctgggatacatgtgtagaacgtacaggtttgttacataggtatac

SEQ ID NO: 325993 - DNA, 426 bp, Homo sapiens
cggataattggtaactaaattaccataaagctatagaaaggaataccttaaagcttgtaaaaatatactctaaaagaatgaaatctaaaatattatttcaccacatgaggcaaagttgatcaaataatgagctttcaaartacgttgtaagctctgaagccaaagtgaccttttaaaggaaaaaaagtgtagcctgtaaggaacacagggcaataagtaaattcttgtagattatctggacaaaatgcagaaggcaaatagtaaaggcagaggggggtaggaagagaaactagcacaattctattttatattctctgcattgttattatgttcgctagtgagcatgtgaccattgattttttttttgttataatttaagttctgggatacatgtgtagaacgtacaggtttgttacataggtatac

SEQ ID NO: 325994 - DNA, 426 bp, Homo sapiens
cggataattggtaactaaattaccataaagctatagaaaggaataccttaaagcttgtaaaaatatactctaaaagaatgaaatctaaaatattatttcaccacatgaggcaaagttgatcaaataatgagctttcaaagtacgttgtaagctctgaagccaaagtgaccttttaaaggaaaaaaagtgtagcctgtaaggaacacagggcaataagtaaattcttgtagattatctggacaaaatgcagaaggcaaatagtaaaggcagaggggggtaggaagagaaactagcacaattctattttatattctctgcattgttattatgttcrctagtgagcatgtgaccattgattttttttttgttataatttaagttctgggatacatgtgtagaacgtacaggtttgttacataggtatac

SEQ ID NO: 325995 - DNA, 636 bp, Homo sapiens
ggtgtctgtgtgttgtccctagacatactgtagtgtaagacctaaaaagggtcactattatatgctgtcttgacatctggtaaaattgacaaccttccttttcactgggatgaagcagtgtctgcttattcctgagtagaagatttcagtcttctgccatctcgtggaatcgttcaaacaggccaatcacaccctcccatgggaacaggggcacctcatcctcttgatactacaaagtcttctccacagcccttgttgttcagtctgttccaagtgcagccccacgtgaccttccatggagtgcagcgtcctcctccccaggctgtgggtgtaggtgactaataaacgttcccctctgcccagcaccatrtgtcatgcacttggccctccccataaccttagggcaggaattcctccctcaccaatggggcaaaaaagaagcaattaaaacacgtttgcctccctttttacgttttgtttttggtgctttagccacttgtaaaattaactggacattttcccaaatgatttctgtgttctggaacattttaaacaagtgaaaattatctgcttcttcatgatttgacaaaacacttgtacaattattagagtctgatttattttttggaggaaatt

SEQ ID NO: 325996 - DNA, 592 bp, Homo sapiens
aagacccattggtgtgctgtattcaggacaaaagcacaggcgacaaaagtaaaaatggataaataggctcacataaagctaaaaagcttctgcacagcaaagaaaacaatcaacaaagtgaagagacaacccacagattgggagaaaatattttcaaactatccatctaacaagggattaataaccagactgtataaggagctcaatcaattctgtagtagaaaaaccccaaatgatacaatttaaaaatgggyaaaagacttgaacagacatttctcaaaagaagatatacaaatggccaacaggtatacaaaaaaatgctcagcatcaataatcatcagagaaatgcaagtcaaaattaccatgaggtatcatcttactccagctaaaatggcttttatcaaaaatataggcaatcatggatgctggtgaggatagagggaaaagagacctcttcaacgttgttggtgggaatgtaaattagtacaaaaactatggacaataatatggaggttcctcaacaaattgaaaatagaactatcatatgatccagcaatctcactgctgggcatatatccaaaagaaaggaaat

SEQ ID NO: 325997 - DNA, 525 bp, Homo sapiens
gacttccagctgctgagcacctgcttctcttccaccaagggctcgctctgccccaggctgctcattcagggaacataggaggtggaggaaatcacatccaccctctaaccaataacttactggagttggtggtggacacctcagtgcccagcgttctctgggatgcatacactgaggtgtatgcttcattctcactctcaagarttccccaattggtaacttgctggctcaaacacttactgcttttctttgcttctcttctgatgtttcccatcatctgttgacaaagaaactaattgcacttgaatttttatgtcagggtctcttttttgggggaacctaaactaaaacactgatatttgtgtaactgtgaacagcttacaaggggctttcccattcatgatgtcagccttattaagtgcataggaggagtcactgtgtgaattttacagctacattgaggttcagagagattgagcgatgcgctcatgttgacaaagttaattgaggagcaatactaaaacc

SEQ ID NO: 325998 - DNA, 635 bp, Homo sapiens
tcaatggaaaaatacaacagcccaatccaggtaggactacaaatggcccagacccttcaggcatgaaggtttgggtcaccccacsaggtaaaaaacactgcctgctgaggtgcttgctgaaggaaaagggaatacaaaatgggtagtagaagaaggtagtcattaataccagctacgactgcaagaccagttgcagaaacgaggactgtaattgtcatgagtatttcctccttattttgttaagaacctgtttgtgtatgtatacacttgtactaaaaatatctttattttatttcctttcttttttcctttattatgtgacataagatttattgactcatatcagaatttaagtgttagtaactttatgtaatagcatttaggttaaggattaatgcgcttccggttgtatgaaggatagctgtattatgttagatgtaattatgaccttattattgtcttcatttgaagattatgtctgatttcaggagatatgtatgggttcaagttgacaaggggtgtacttgtgatggttgatactgaatgtcaacttgattggattgaaggatgcaaagtattgttcctgggtgtgtctgtgaggttgttgccaaaggagattaacatttgagtcagtg

SEQ ID NO: 325999 - DNA, 635 bp, Homo sapiens
tcaatggaaaaatacaacagcccaatccaggtaggactacaaatggcccagacccttcaggcatgaaggtttgggtcaccccacgaggtaaaaaacactgcctgctgaggtgcttgctgaaggaaaagggaatacaaaatgggtagtagaagaaggtagtcattaataccagctacgactgcawgaccagttgcagaaacgaggactgtaattgtcatgagtatttcctccttattttgttaagaacctgtttgtgtatgtatacacttgtactaaaaatatctttattttatttcctttcttttttcctttattatgtgacataagatttattgactcatatcagaatttaagtgttagtaactttatgtaatagcatttaggttaaggattaatgcgcttccggttgtatgaaggatagctgtattatgttagatgtaattatgaccttattattgtcttcatttgaagattatgtctgatttcaggagatatgtatgggttcaagttgacaaggggtgtacttgtgatggttgatactgaatgtcaacttgattggattgaaggatgcaaagtattgttcctgggtgtgtctgtgaggttgttgccaaaggagattaacatttgagtcagtg

SEQ ID NO: 326000 - DNA, 635 bp, Homo sapiens
tcaatggaaaaatacaacagcccaatccaggtaggactacaaatggcccagacccttcaggcatgaaggtttgggtcaccccacgaggtaaaaaacactgcctgctgaggtgcttgctgaaggaaaagggaatacaaaatgggtagtagaagaaggtagtcattaataccagctacgactgcaagaccagttgcagaaacgaggactgtarttgtcatgagtatttcctccttattttgttaagaacctgtttgtgtatgtatacacttgtactaaaaatatctttattttatttcctttcttttttcctttattatgtgacataagatttattgactcatatcagaatttaagtgttagtaactttatgtaatagcatttaggttaaggattaatgcgcttccggttgtatgaaggatagctgtattatgttagatgtaattatgaccttattattgtcttcatttgaagattatgtctgatttcaggagatatgtatgggttcaagttgacaaggggtgtacttgtgatggttgatactgaatgtcaacttgattggattgaaggatgcaaagtattgttcctgggtgtgtctgtgaggttgttgccaaaggagattaacatttgagtcagtg

SEQ ID NO: 326001 - DNA, 635 bp, Homo sapiens
tcaatggaaaaatacaacagcccaatccaggtaggactacaaatggcccagacccttcaggcatgaaggtttgggtcaccccacgaggtaaaaaacactgcctgctgaggtgcttgctgaaggaaaagggaatacaaaatgggtagtagaagaaggtagtcattaataccagctacgactgcaagaccagttgcagaaacgaggactgtaattgtcatgagtatttcctccttattttgttaagaaccwgtttgtgtatgtatacacttgtactaaaaatatctttattttatttcctttcttttttcctttattatgtgacataagatttattgactcatatcagaatttaagtgttagtaactttatgtaatagcatttaggttaaggattaatgcgcttccggttgtatgaaggatagctgtattatgttagatgtaattatgaccttattattgtcttcatttgaagattatgtctgatttcaggagatatgtatgggttcaagttgacaaggggtgtacttgtgatggttgatactgaatgtcaacttgattggattgaaggatgcaaagtattgttcctgggtgtgtctgtgaggttgttgccaaaggagattaacatttgagtcagtg

SEQ ID NO: 326002 - DNA, 457 bp, Homo sapiens
tgctatcctcagagatcaggagcctccaaaaatcctgccaagcccatcccgcagcgtgccaccacctggccagcttgtctttcgtgaaaaagaaatgcatatcggttttgtttaacccaagtctactacttctggggacagaaggagtgattaactctcctatatgtgacttccaggttagaagactaaaacagttccagaatgactcacagttatctataaagaccagatgagaataaaagaatatatatcttaggacacaaaggggacaataatgtcctaaaatgacagaaggaattaatgtttaatttttcaagcctagttaatagctgaagtaagagcaatatgttttttctttatttatattggtattcgcatattaactattcccatgtgaatgaawtgatgtgtttcttacagtttgtcactgtaatagggcagctgttttgaatgatat

SEQ ID NO: 326003 - DNA, 593 bp, Homo sapiens
aacaaatctgactgggttgttctataggtacaccctctgtatttctttgtacatggtaaaacacttgggaacacaaagccatccagcaggaccatcaccaccactttattttgactgagccccagctccagagaagaagcttagagccagggcatcttcctcctggagacaccctctcactggcctcctctgttccctgagctgtgcatgaagaaagggctgtaaccaggaagtgagtttttgtccaaaagggttgaatttcaatgggtcaagacttggatgtcatagtgtgtgatggttaatatttagtatcaacttgattggattgaaagatrtaaagtattgttcttgggtgtgtctgtgaaggtgttgccaaaggagattaacatttgagtaagtggcctgggagaggcagacccaccttcaatctgtgtgggcacaatctaatcagctgccagtatggccagaataaaagtaggcagaagaatatggaaagactagactggtttagtctcccagcctgtatctttctcctgtgctggatgattcctgcctatgaacatgggactccaatttcttcagctttggggctc

SEQ ID NO: 326004 - DNA, 611 bp, Homo sapiens
caactttacttcaactggaggcaactctccatcttcacagctcccccggggggtccctaaggccttgtgtgactacattgtagccaaattctccttctgcccartcttgctttcttcccttcccaaacaggttttgatcccaagagactttgtaataaacttcctgcatgctaatttccatctcagggtgttcttcccagagaactcaacctgtgacaaatctttagccttcagcaaaagtacaggcccctagtaggggcagttgtacccagctgctcatatgagaggtactccaggtcagaaaatagacgataataactgtagggataaaaagatggccaaaccaaggagtctggctcggtgagttcatccaagccagcatcagaaaaggcatggtgtttgtgctatcaatcttctgtgcccagttcagggccagccttgggaaagaggggcccagtcctctgtgttttctgaaactaccaggctggttctgacctttatttccattgtagttactagattaatgttatttcaacgatccatatatttcccattaggagcttgttaacattaattgagttaatattcattaacccttttcccatttgccc

SEQ ID NO: 326005 - DNA, 611 bp, Homo sapiens
caactttacttcaactggaggcaactctccatcttcacagctcccccggggggtccctaaggccttgtgtgactacattgtagccaaattctccttctgcccaatcttgctttcttcccttcccaaacaggttttgatcccaagagactttgtaataaactycctgcatgctaatttccatctcagggtgttcttcccagagaactcaacctgtgacaaatctttagccttcagcaaaagtacaggcccctagtaggggcagttgtacccagctgctcatatgagaggtactccaggtcagaaaatagacgataataactgtagggataaaaagatggccaaaccaaggagtctggctcggtgagttcatccaagccagcatcagaaaaggcatggtgtttgtgctatcaatcttctgtgcccagttcagggccagccttgggaaagaggggcccagtcctctgtgttttctgaaactaccaggctggttctgacctttatttccattgtagttactagattaatgttatttcaacgatccatatatttcccattaggagcttgttaacattaattgagttaatattcattaacccttttcccatttgccc

SEQ ID NO: 326006 - DNA, 611 bp, Homo sapiens
caactttacttcaactggaggcaactctccatcttcacagctcccccggggggtccctaaggccttgtgtgactacattgtagccaaattctccttctgcccaatcttgctttcttcccttcccaaacaggttttgatcccaagagactttgtaataaacttcctgcatgctaatttccatctcagggtgttcttcccagagaactcaacctgtgacaaatctttagccttcagcaaaagtacaggcccctagtaggggcagttgtacccagctgctcatatgagaggtactccaggtcagaaaatagacgataataactgtagggataaaaagatggccaaaccaaggagtctggctcrgtgagttcatccaagccagcatcagaaaaggcatggtgtttgtgctatcaatcttctgtgcccagttcagggccagccttgggaaagaggggcccagtcctctgtgttttctgaaactaccaggctggttctgacctttatttccattgtagttactagattaatgttatttcaacgatccatatatttcccattaggagcttgttaacattaattgagttaatattcattaacccttttcccatttgccc

SEQ ID NO: 326007 - DNA, 611 bp, Homo sapiens
agttaaaatgggcaactcacttcatatgaggtatcccgtggtcaggtagaggtggctggatgccttggtaagatatgtggattccagaattggtcaatacactccatgaagtttcagggcccagctacttcagtgtggtttttaggagtccagtggtgagagacttgctggaataacctctccaaagtaaaagacaagttgtggcgtcttccaccttaacccaaagaagaaagcacagagcctggaagtctctttagattctgatgcaacatatcccatacttaggaatattgcacctgcccatatactgggtgacatggaaggctgacagctttgagggggcttgaagaaacaaagggcactccatcaggtccagactgtggtataagcagacccctactcaggtcacatgatccagcaggccctatggtgttggaggtatcagwggtggcaaaagatgcagtgaggggcttatggagaactccagtgagagaatcacaaggctgacccctgggattctggagaaaggtcatgccacccacagcagaaaattacataccctttgaaaaacagttcttgtcaagttgttgtcttgtcgagttgcagaaggc

SEQ ID NO: 326008 - DNA, 566 bp, Homo sapiens
ccttgcccatggatacccagctactgagtgaaagaaaagatttgcccccctggctccagggcttatgctcttaccaactcaatttaatccaacatgcttcattttgacacttgctccacttctagaaccatctgaatcttatggctctgtctcagaagatctaggaagcacctggtaaggaccaagagctactcttaccccttgagaaccaacgctctctgagcaaacaaagccagactgggtacactggcatccttcatatggaattcattcattcagctattcattcatccattcatctgtatacagagggacttggggcttgggatgagaggcggaggaaaagtggatggcagagcagaaggattgttttcaataactcagcctcaaggaagagggaaaaactcaggactttgagactaccttctcatctcatgagggatgtcgggaggtagaaaagccctggtgtgccacygttgctcttgactcagttcaagccaattgtctttgactcactttaggccaggagttctcaatcttgccactattcacattgaggacctgat

SEQ ID NO: 326009 - DNA, 592 bp, Homo sapiens
tgtccattgatctgatttaaaatgcaaccaaaggactgggttgctttaacagaaatctaagcatggccaacaatgcctgccatcacccagatttttcataatatgtgagtttctcagtgtggctatcaggacctcctggcgaagcttacctcttgaatggccattatttagcaatagaaatgattcagcartgaaaacaagtgcttgactttttttttctttttaaaagatttattaaagctcctcagaggttgtttttataaaacccagcccttagagtggctgaccttaaaaatatgtttatctaagctatattccccaaaacgttgaccaacatgataaataatttatttaatgttgccttaaatattattttgtttggtttaaacccaaagtagaaacttctccccaaaaggaacactgtctcatttttgtatacaatggcaacatttgggaacaaataaaagaaatataatctttttcacaaacgttggcttactaagtgagctggttaatccaggggatgcaaaataaatgttgtgacatttggctgttaaattagaagctgggaactttggttgatggttatacc

SEQ ID NO: 326010 - DNA, 524 bp, Homo sapiens
ttggaattagactgttctgaaattgacatcctagttctgccactcgtttcttctgtgctcttgggcacttttctttatcccttgaagtcttagtttctccactgtgaagcaaggttaattataatatagtagagagtcctattgcttcttggccctttgactaagatcaagtgtatagtagacagtctccaggtacagctgccaataattccccatctctcttcatgaacaccactccttgctttaattttggaggagtctacttattaccctctccttaaatgtgggctggcctcaggacttgttcaggccaatagaatggggargaagtgacattctcagacttctgagcccaggccttaagcttctgcttcttctcccttggagcccaggctttaaggaagtccagcctagactaatgaatgatcagatgccctgaggatgaatgaccatttgaacatcaaggcttgaccaaactctaaactaaatgcagcctcatgaaagaccctaagcaagaccagcag

SEQ ID NO: 326011 - DNA, 589 bp, Homo sapiens
gcctgggcccctcacaggggtattttcaaggacaaaagaaagagccaatgtggaatcactttgaaccattcaaaaagcagactccatattattagttaattcttagtcatactaatgctatatcttcttagggatctcattagaaagacccctaaggtgcatcacttagaagactagcaaaaatttaagtagatgttgtttaaaaacccatctgggtctcttacaaggtatccacattaaatgttttgaattagtatttttgtgtcagagccactgtagagcagctacttttcatgcctctgagggtatttccttgctaattttatgttttcgatccaaatcattttaatcyatggttaagctacatggagctaaaggagaatgtacgataaattgaggggccaggaaatggaagacaaaggaaagaacagagaatttactccactcactcacccattcattccataaatacaaacaagtgtctaatacgtcacaggcctgtatatggctctaggatcaactcaggtcctgctcttgtgagggttgaggggtacatgttacagaagaggaagacgttaaacaatcacag

SEQ ID NO: 326012 - DNA, 589 bp, Homo sapiens
gcctgggcccctcacaggggtattttcaaggacaaaagaaagagccaatgtggaatcactttgaaccattcaaaaagcagactccatattattagttaattcttagtcatactaatgctatatcttcttagggatctcattagaaagacccctaaggtgcatcacttagaagactagcaaaaatttaagtagatgttgtttaaaaacccatctgggtctcttacaaggtatccacattaaatgttttgaattagtatttttgtgtcagagccactgtagagcagctacttttcatgcctctgagggtatttccttgctaattttatgttttcgatccaaatcattttaatccatggttwagctacatggagctaaaggagaatgtacgataaattgaggggccaggaaatggaagacaaaggaaagaacagagaatttactccactcactcacccattcattccataaatacaaacaagtgtctaatacgtcacaggcctgtatatggctctaggatcaactcaggtcctgctcttgtgagggttgaggggtacatgttacagaagaggaagacgttaaacaatcacag

SEQ ID NO: 326013 - DNA, 523 bp, Homo sapiens
tatcatcctcatttataagggttgagactgacattctgagaaatgagaatattttagctcctatagctaagagggaatacagctaggtcttctgattccatatcccatcccgcagtcttaaacttaggcaggtgccaaaactgctttgtagttaagcctgcaggctctcatgccagttggcctggrtggaagtcctagctccgaccctcacttgttttgctgaccgtgagtaagatacttcaattctctgactctcagttccctcatctgtaaactgggaatgacaatagcagggcccagttcacaaggttgtcagggaacttgaataaaatgatacatatagagagagcacttagcccgatgaagggccctcaccaaaatcagctctcatcactaactcttcccctttcaccctatcctgctcatcataaagaagaccaacatctgtgctccagggtttgtgtgtgtgtgtgtgtgtgtgtgtgtgtgtgtgtgtgtgtaattaaagcgatccctaaacttg

SEQ ID NO: 326014 - DNA, 523 bp, Homo sapiens
tatcatcctcatttataagggttgagactgacattctgagaaatgagaatattttagctcctatagctaagagggaatacagctaggtcttctgattccatatcccatcccgcagtcttaaacttaggcaggtgccaaaactgctttgtagttaagcctgcaggctctcatgccagttggcctggatggaagtcctagctccgaccctcacttgttttgctgaccgtgagtaagatacttcaattctctgactctcagttccctcatctgtaaactgggaatgacaatagcagggcccagttcacaaggttgtcagggaacttgaataaaatgatacatatagagagagcacttagcccgatgaagggccctcaccaamatcagctctcatcactaactcttcccctttcaccctatcctgctcatcataaagaagaccaacatctgtgctccagggtttgtgtgtgtgtgtgtgtgtgtgtgtgtgtgtgtgtgtgtgtaattaaagcgatccctaaacttg

SEQ ID NO: 326015 - DNA, 582 bp, Homo sapiens
agatttgccaactctgcaatcttgtaagctagttcctgtaaacaaacaaacaaacaaacgtatcctgttggttctgtttctttggagtaccctaatacagtagttcgctgcaattctgaaatcactgtcagcaatcattgagaggccccacactgagggtcaggaatgcttcgtgactgcacctgtattatgcttgccaggagtagttcccccatcatggttctccctggctcctgatggttgattacacgctgggaagcccttcctttcccatratcttacactggagaatatgcctgtcttggtggctgggcagctttctcagcttcttcaagcccataaaaactggaggcccaaaggttgttttttgtcttgaaataatcagcgtcttttattccaggctggcagcactttgtgcaatacagagctctcagaaactttggtttttgttactgttttttaatcagtttgacttcaggaagctccatgggccaatagcaacacccacacatttttttttcccagacccctctttctatagatttaattacaggtgctttgaacttattggcgccttggcag

SEQ ID NO: 326016 - DNA, 646 bp, Homo sapiens
ctgcactcacccttaatggcatgtgcttggatagagatgggacaaggcccagaggggcacatgctggagaaactgaaccccagcccagaggtctgggaaggcgtctctgggcaagagaccttacagctgggaactgaaagatgagaagcagcactgaccaggtgaaaggggtggcaagaccaggagtgtctgggctgagcacccaggcaggcactgagatgagaagaaacagagctcaccaaggaaaattgagggaactcagcctgctggagaaaggtccaaggagagatcaaagaagcaggaagggccagatcaccygatgctttgcagaatgtgggattttaaactttaccctaagaacagttcgaagccactgagataggtatccctgaggactccatttgttctccactgtttttgttcacttccactctgacacacaagctcctagctccatgcctggcaattaacaagagcctaaaaataatcagctggatggctgaacccagtcaccccagggagggagaacctgcaagcaaagaccatgaccgcacatccgacatctcacctctctccctccttttgtctcccctgatccaggcctgcaagctgagaagtgtacaatcctcacaacaaggagtgattg

SEQ ID NO: 326017 - DNA, 648 bp, Homo sapiens
gtatctgcccctgctcccattcaggaagtctccagcaaaggtaaatgttggtcactataattgttctccctggggctgtggaaaattcactggagctgtctcaagccttctgtgactcaacaggcctcaccaccatggttgccactgcccatggtacccacccaagcacagggataatctgggacccagagctctcctaggacccagcaaggaatggatggatgggaggaatgagtcccctctgttccagatctccaagtgtatccagaggktctatcactgaagctccacaggggaagagcagcagaggacaaggacacttattggagtcccaacaggctctagcttctcccctcatgctcaccatctttacctaacccagggaattagtacctcttctagatgagacaagctagtctcttggatcttcttactctccctgacctcagctttgtaaactcacaaaaactcaaagtacaaaatgcaatgcctttgtgccactctgacaaccctcccccagggcaatgagtgcctcatagctcagtttgaatggatcaggtgggtggtgataacgatggagttaaaagggattataagatatttattaaacatatgtaacaaatgcccataaaaacatctgttcaagaa

SEQ ID NO: 326018 - DNA, 648 bp, Homo sapiens
gtatctgcccctgctcccattcaggaagtctccagcaaaggtaaatgttggtcactataattgttctccctggggctgtggaaaattcactggagctgtctcaagccttctgtgactcaacaggcctcaccaccatggttgccactgcccatggtacccacccaagcacagggataatctgggacccagagctctcctaggacccagcaaggaatggatggatgggaggaatgagtcccctctgttccagatctccaagtgtatccagaggttctatcactgaagctccacaggggaagagcagcagaggacaaggacacttattggagtcccaacaggctctagcttctcccctcatgctcaccatctttacctaacccagggaattagtacctcttctagatgagacaagctagtctcttggatcttcttactctccctgacctcagctttgtaaactcacaaaaactcaaagtacaaaatgcaatgcctttgtgccactctgacaaccctcccccmgggcaatgagtgcctcatagctcagtttgaatggatcaggtgggtggtgataacgatggagttaaaagggattataagatatttattaaacatatgtaacaaatgcccataaaaacatctgttcaagaa

SEQ ID NO: 326019 - DNA, 632 bp, Homo sapiens
catgggaagagagggaggcaggaagagaagaaggggagcagaatggagggaagaaagatctatttacaagactccgtggctatttagtagccagaactcaaacctacagagacctgtgatgaacagcctcactactacagctytgaagcaatgaatatatttctgtatcataacaactacagaggaaaccatagacgaaaatccagaacctctgccaacgaaagacagcatgcaacacccaagtcaagtgatcagagatgtttttgtacgttatctgagaccagaaatccaaaaggagaagtcaaatctaaacagctgagtggttaaaaaaaaaaaaataagttcaccactctctacttctgccgtgaagcataacctgcatttactgattcagcaagcacatttcaagtgcttgctttatgctgggttctgctagagactgcggataaagcagtaaacaaggccaacgagctccgtgtcatcatggagctgacagcttagagggcgagacaggcacaatacagaggtaccaaaagagaaaacttggcctttctaagggggtgatgtttcatgcaagacctgaagcagaaaaaggtgccatccctggggagaatgcaagaagctgcagcccg

SEQ ID NO: 326020 - DNA, 632 bp, Homo sapiens
catgggaagagagggaggcaggaagagaagaaggggagcagaatggagggaagaaagatctatttacaagactccgtggctatttagtagccagaactcaaacctacagagacctgtgatgaacagcctcactactacagctctgaagcaatgaatatatttctgtatcataacaactacagaggaaaccatagacgaaaatccagaacctctgccaacgaaagacagcatgcaacacccaagtcaagtgatcagagatgtttttgtacgttatctgagaccagaaatccaaaaggagaagtcaaatytaaacagctgagtggttaaaaaaaaaaaaataagttcaccactctctacttctgccgtgaagcataacctgcatttactgattcagcaagcacatttcaagtgcttgctttatgctgggttctgctagagactgcggataaagcagtaaacaaggccaacgagctccgtgtcatcatggagctgacagcttagagggcgagacaggcacaatacagaggtaccaaaagagaaaacttggcctttctaagggggtgatgtttcatgcaagacctgaagcagaaaaaggtgccatccctggggagaatgcaagaagctgcagcccg

SEQ ID NO: 326021 - DNA, 632 bp, Homo sapiens
catgggaagagagggaggcaggaagagaagaaggggagcagaatggagggaagaaagatctatttacaagactccgtggctatttagtagccagaactcaaacctacagagacctgtgatgaacagcctcactactacagctctgaagcaatgaatatatttctgtatcataacaactacagaggaaaccatagacgaaaatccagaacctctgccaacgaaagacagcatgcaacacccaagtcaagtgatcagagatgtttttgtacgttatctgagaccagaaatccaaaaggagaagtcaaatctaaacagctgagtggttaaaaaaaaaaaaataagttcaccactctctacttctgccgtgaagcataacctgcatttactgattcagcaagcacatttcaagtgcttgctttatgctgggttctgctagagactgmggataaagcagtaaacaaggccaacgagctccgtgtcatcatggagctgacagcttagagggcgagacaggcacaatacagaggtaccaaaagagaaaacttggcctttctaagggggtgatgtttcatgcaagacctgaagcagaaaaaggtgccatccctggggagaatgcaagaagctgcagcccg

SEQ ID NO: 326022 - DNA, 509 bp, Homo sapiens
cctggccagttttttaagtcaaatcccaaacagttaggattgtgtgagcacagtccattttctccccaagaacatcttgcagccagaatggaatccaaaaaaataactgcagtcctgaacagcggtgtttgtccaagctgatctaaacacataaacttaccgtctcgtctggtgttttgtgcacaaatttttgtgtttaaagacatctggggttaatgctttttttttttttctttattctttctagcccttggctatttatttctgaatttgtctctggttttcctgtttccctttgcttattttttacttatttggtagtgtttgcrtgtggttcttctgaaagcaaggatccacaggctacgcatttctcacttggagctgaagtcctgctggggaaccaattatatgtcctacccaccagggagagtgtgatattttttattactttctaatttcaggtcttgaaatggcttcagtgatcagaacattcttctgcttaagaacct

SEQ ID NO: 326023 - DNA, 468 bp, Homo sapiens
tttatttgcaaccattggaatttttaaaaagaaaggactctgcacttataartgaatgtttatagcagttttactcataattgccaaaacttggaagcaaccaagatgtcctttagtaggtgaatggataagtaaactgtggcatatccaagaaatggaatattattcagcactgaaaagaaataagttgtcaagccatgaaaaggcatgaaagaaacttaaatgcatattactaaaagaaataagccagttcaaaaaggctacatactgtattatttcaactatatgacattctggaaaaggtaaaactggagacagtaaaaagatcagtgattgtcaaggattagtggggcaggaaggacaaataagcagaacacagaggatttttaggacaatggaactactgtgtatgacactataatggtggaaacatgttactatgcatttggcaaaacccatacgacgtac

SEQ ID NO: 326024 - DNA, 468 bp, Homo sapiens
tttatttgcaaccattggaatttttaaaaagaaaggactctgcacttataaatgaatgtttatagcagttttactcataattgccaaaacttggaagcaaccaagatgtcctttagtaggtgaatggataagtaaactgtggcatatccaagaaatggaatattattcagcactgaaaagaaataagttgtcaagccatgaaaaggcatgaaagaaacttaaatgcatattactaaaagaaatmagccagttcaaaaaggctacatactgtattatttcaactatatgacattctggaaaaggtaaaactggagacagtaaaaagatcagtgattgtcaaggattagtggggcaggaaggacaaataagcagaacacagaggatttttaggacaatggaactactgtgtatgacactataatggtggaaacatgttactatgcatttggcaaaacccatacgacgtac

SEQ ID NO: 326025 - DNA, 548 bp, Homo sapiens
tcccagagcactgcctgataaacctcctgcccaagaattctcatctgctccccaggaaaccccatctgtaccaggaaccttactccactgagtttccatctatttcctgcatctttgactttcccttcttattcatctctttcccctcgccacatgtaatgctctaggctctcccatattaaaaagaaacacaaccaggaaacataataaccattcctaaattgtgtcatcctcaagttgtggctggttttgtttgtttgtttgtttrttttttccatatcccaacttcttgaggagctaactggacactgtctcatcttcgccttccacttactcctcgatacagcatggcttttctcagctgccatcactccctgaaattgttctcaagaaggtcaccagcaacctcctctttattaaaatcccatgacactcttcagcctttcctatatgtgacctggtgactggcaatgtgattttcttttgccttgatgaagttgttgtctggctccaatagcctccatcgccccctctgcactggattccca

SEQ ID NO: 326026 - DNA, 294 bp, Homo sapiens
ttttactctcgtataaatgtaggaaaacagcctggggcaatgctgyactactccaggggagaccttcacatagaatataatacaaacagtatacctggagttgtgcaacccagcagtcctgggtgaagtcatattctaaacgactgttgggactttggggaagttgattgaacactgtggtgtataaggacatttctgggtatttgaaatacctctgagcagttgacttccaatgttcttggagtggagggacatggtagctgatagtgagatgggaaaaaaaaaagtactggg

SEQ ID NO: 326027 - DNA, 611 bp, Homo sapiens
gtagcagtaaaaataaatgaacatgctgtatctatcttgtaattatgtaaacacatatgatgctgaaccacagaaggaagttaacaaaaatatagaaatgatttcgttaagaaaagttgaaacaaggcaaatgaaatgatatattgcttggaggaaacacaggtggtaaaactatgaagaaaagcaagggaatgctcagtgctatttcaatgtaggatackgctgagggcatagaaatggacagatcagaaagcagcacataagccctctgcatggatcagagcacagtgtgagggacatgggtgtcattttttatttttcattaagtagtgaaaatatactgtatgtacttttagtacatacaatttttaagtattttaagaagttaaatggaaaactataataaatatggtgaaaagtgattttattgtaataaactgacaaaagtacaggtgtacatcaagaaaattaatttagtgtaaaaagtattaataaaagcaaagcaaatgattttatatgttggtcaaatacaaaattaagacaataattataaagagaacacataggagccaaaaagaggctagcttttaaaaaaataggatgcaaagccc

SEQ ID NO: 326028 - DNA, 449 bp, Homo sapiens
gggacccagtgggttgccactgcaagctggggcagcctgcttttattcccttatctggccccacccacatcctggtgattggtccattttacagagagctgattggtctgttttacagagagctgattggtccattttgacagggtgctgattgatgcatttacaatccctgaactagacacaaaagttctccaagtccccactagattagctagacacagagcgctgattggtgcattcacaaaccctgagtctagacacagggtgctgattggtgcatttacaaaccttgagctagacacagagtgctgattggtacacttcacaatcccttagctagacataaaggttctccaagtccccactatactcaggagcccagctggcttcacccagtggatcccgcaccaggccrcaggtggagctgcctgccagtccagcaccgtgtg

SEQ ID NO: 326029 - DNA, 618 bp, Homo sapiens
tttgctgtccgttttctatgatggacttttgtcaggccatggtgggggaccaggaaaaccaaacattatttgtataacaggtagaagttattatatatcagcatagaaggcaaagatgaactgagaccaataactatgtgatggcaggaagcctagaattcagggacatctgccttcaggttttgtggagcctgaagtatttggggacctcaataagaaaaataatttaaaattgcgagaaggtagtcaggcatcaaagtaaayatttgtttagacattaatttaattacaagtgaatatgtgtttataattcctcatcctcccctccacatcaaccccttacaggacatcaagtataagggaggggacactggagtggaaacaggcagcagtcttagccaattaaagtaaaaatatactgtatttgcaaatttgacaaaaatgcacaatcacatgaacaccttgctagggcttctccaaaggtcttgggaaggcgcccctgcaagtgagtggccctaaagtgtaagattcactaaatttgagagtcagactgtgttggagatagatgtagccaaaatatctggaaggtgaaacaggtcaagaagccagcaatcagta

SEQ ID NO: 326030 - DNA, 541 bp, Homo sapiens
gtaaactccagcctgaaaacagacttgcatctgccaggccagtgtctctgtaagtaaatctgaatgattttcatggtcataaaagataatggttacccagtgggctttaaaagacatgggcaaatactatccaaagcaatctacagattcaatgctattcctatcacactacaaatgtcattttcacaaaactagaaaaaactattctaaaactcatatggaaccaaaaaagagcccaaacagccaaagcaatcctaaacccccaaaacaacaaagccggaggcatcacattccccgactttcagctatactataaggctacattaatcaaaatggcatgctactgggtacaaaaacagatacaaagaccaatggaacagaatagagaacccagaaataaaggcgtacacctataaccttctgatctttgatgaagtyaacaaaaataaacaaggactccttattcaacaaatggtactggaatagcttcatatgcagaaaattgaaactggactcctacctttaactatatgcaaaaact

SEQ ID NO: 326031 - DNA, 598 bp, Homo sapiens
aaaacatataaaggaactatggagtcttgagttttttaaaaaaattacaggttrgctctgtgaggaggaaccagaaggctattccaaccaattctcccccaaccttgaaaccctgacactctgttcctggacagtctttagccttgggaataatgaaggtgtttcaggagtgctggtttttatctttctagggagcaggggaagaatgatgatagctgtcaaaaacccagagtatcacactgacttgccttcttttctcacttgctccctccttccccattaagtaatttttagggtaggcacaaaggaaaggaaagactccagtctcttaaagaatttgcattgtaataagacaaatctaaatttgtgtaatgaagccttatagtaaacttgtatccatacgcatcataggacatggtgttctcagatgctcaagtgttgaatatttgtgaatagggctattgagagttaatccatgaagacttttgaaagaaaggaaagatctgagtttgagcagaggcaaaacatcatgtttatattaagtggaagttaaaaatgctttattcaagtttgattcaaaatcagattctaatggtct

SEQ ID NO: 326032 - DNA, 598 bp, Homo sapiens
aaaacatataaaggaactatggagtcttgagttttttaaaaaaattacaggttggctctgtgaggaggaaccagaaggctattccaaccaattctcccccaaccttgaaaccctgacactctgttcctggacagtctttagccttgggaataatgaaggtgtttcaggagtgctggtttttatctttctagggagcaggggaagaatgatgatagctgtcaaaaacccagagtatcacactgacttgccttcttttctcacttgctccctccttccccattaagtaatttttagggtaggcacaaaggaaaggaaagactccagtctcttaaagaattkgcattgtaataagacaaatctaaatttgtgtaatgaagccttatagtaaacttgtatccatacgcatcataggacatggtgttctcagatgctcaagtgttgaatatttgtgaatagggctattgagagttaatccatgaagacttttgaaagaaaggaaagatctgagtttgagcagaggcaaaacatcatgtttatattaagtggaagttaaaaatgctttattcaagtttgattcaaaatcagattctaatggtct

SEQ ID NO: 326033 - DNA, 460 bp, Homo sapiens
acttcattggagttaggcctgactgcaaaccctggctcctgtgtttcagcaaattaactaccctctctgagcttcagttttctcatctataatcaagaatggggccaggtacagtggtttacacctgtaatcccagcactttkggaggccaaggcacaaggattgcttgaggccaggagtttgagaccagaccaggcaacgtgaccccatctctaccaaaaaaaaattttttttaagttatctgggtgtggtggggcacacctgtagtcccagctactcaggaggctgaggcagtaagatcccttgtgcccaggaggtcaagattacagtgagctatgatcatgtcactgcactccagcctgggcaatgagtgagactctgttgaaaaaataataataataaaacaaaaaaggatgtaatataatagtacagttcttgacccacattaggcactcaataa

SEQ ID NO: 326034 - DNA, 598 bp, Homo sapiens
aaaacatataaaggaactatggagtcttgagttttttaaaaaaattacaggttggctctgtgaggaggaaccagaaggctattccaaccaattctcccccaaccttgaaaccctgacactctgttcctggacagtctttagccttgggaataatgaaggtgtttcaggagtgctggtttttatctttctagggagcaggggaagaatgatgatagctgtcaaaaacccagagtatcacactgacttgccttcttttctcacttgctccctccttccccattaagtaatttttagggtaggcacaaaggaaaggaaagactccagtctcttaaagaatttgcattgtaataagacaaatctaaatttgtgtaatgaagccttatagtaaacttgtatccatacgcatcataggacatggtgttctcagatgctcaagtgttgaatatttgtgaatagggctattgagagttaatccatgaagacttttgaaagaaargaaagatctgagtttgagcagaggcaaaacatcatgtttatattaagtggaagttaaaaatgctttattcaagtttgattcaaaatcagattctaatggtct

SEQ ID NO: 326035 - DNA, 594 bp, Homo sapiens
cgacagtacaacagatttcactgagaccaaatcttctgaaaaattataattacagcaagctctctgtcttaaagataaaaaaaamatctggaaagtggtatcttgaaatcattgtggtaacacatttctctttggccctaagacaattttgagacaattacatttttattttaccaggtggtaaggcagttaagagtggggacctgccagcacccattcttttgtcctacagagcatatagctgtgctgtgtacagaaaagccaattgtaaatatttgtcaaattgaatttccaagtcagggcatattaatatactctgttaattatcacattaaaacctaaacaggtggtaaatttagatgagatgcagagaaaaatgcaaaaccagctaagagctcaaacggactaggaaatacctaaaagattggggagaaaagcaaaggtttgctcagaagagatgaacaggaagttttaggaaacttcaaatatctaaaacacagggatgatttctttgcacatacctggaaaaccaaattaggggaaatcaacttaaggtgtagaaggagcgatttcgataccaaggcatttggaatg

SEQ ID NO: 326036 - DNA, 594 bp, Homo sapiens
cgacagtacaacagatttcactgagaccaaatcttctgaaaaattataattacagcaagctctctgtcttaaagataaaaaaaaaatctggaaagtggtatcttgaaatcattgtggtaacacatttctctttggccctaagacaattttgagacaattacatttttattttaccaggtggtaaggcagttaagagtggggacctgccagcacccattcttttgtcctacagagcatatagctgtgctgtgtacagaaaagccaattgtaratatttgtcaaattgaatttccaagtcagggcatattaatatactctgttaattatcacattaaaacctaaacaggtggtaaatttagatgagatgcagagaaaaatgcaaaaccagctaagagctcaaacggactaggaaatacctaaaagattggggagaaaagcaaaggtttgctcagaagagatgaacaggaagttttaggaaacttcaaatatctaaaacacagggatgatttctttgcacatacctggaaaaccaaattaggggaaatcaacttaaggtgtagaaggagcgatttcgataccaaggcatttggaatg

SEQ ID NO: 326037 - DNA, 580 bp, Homo sapiens
cagcctcgtcatccaccccacctgcttggattctcttttccatatcatgtgtgcatgcatgcacacacacacagacacacacaygctcacactcccatccacacacccctgaggaatgcataaagtgtaataatgaagtaatgactaatgcctaacaagggcagtatgtaaaatgttgtgccagtagtggacctagactcccaggtttggaaatcctgactctgcagtttgcttgctgtatgacctttgacacattcctcaacctctcagtccctcagtttccacatctacaaaataggataataatagtacctaccacataggatgttgtgaggactacctgggttgatacacgtaaagcacttaaggtaggacccagcatgcagtcattactcaataacattagctgttataatttttaatattattttcatacatctaactgagtgcagttgtattcaaagcatgggtaagaagaggaaaaatggattgtacacgttttgtgtgctgtgtcttctatatacatgactttattgaatccttaccttaacctgaagctcagggctattattattctgag

SEQ ID NO: 326038 - DNA, 612 bp, Homo sapiens
aggtaagtttacttactaagagcaaagtagcaagtaggagcttatagacagagagagagtgagagggagaataatcaatgaaacaagtacctcagagaataagaarcatggtggccatagcaaaacatggcagaatgagtcttagacaggtatatgtatgtaacttggtaagtgttagtacaggaaatagggagatctcagctgaaactctggaatcagtgaggaacagaacaaattaagggaagggaaataaaattgaatgagttctttaccccaagtggtttctccaagcatgatcagaatccagggtaaatagaaaaatgaaataaacatatgaacttatgaaatgagacactaaacagaaacgtatttcctgaaattaaggaggttttcaagaagaaaattctcactccatttctgaaaattactcctccacctccaattccccatgaagagatcaatgcctaagagtctctgagataaattcagattttttaaaaaaggcatgtgcagacagtacaaatcacatgattaactaaaagcagacaggaactaatggctcatgtctatacaagttataccttgaataagattttaaaaataagaaacaaa

SEQ ID NO: 326039 - DNA, 612 bp, Homo sapiens
aggtaagtttacttactaagagcaaagtagcaagtaggagcttatagacagagagagagtgagagggagaataatcaatgaaacaagtacctcagagaataagaaacatggtggccatagcaaaacatggcagaatgagtcttagacaggtatatgtatgtaacttggtaagtgttagtacaggaaatagggagatctcagctgaaactctggaatcagtgaggaacagaacaaattaagggaagggaaataaaattgaatgagttctttaccccaagtggtttctccaagcatgatcagaatccagggtaaatagaaaaatgaaataaacatatgaacttatgaaatgagacactaaacagaaacgtatttcctgaaattaaggaggttttcaagaagaaaattctcactccatttctgaaarttactcctccacctccaattccccatgaagagatcaatgcctaagagtctctgagataaattcagattttttaaaaaaggcatgtgcagacagtacaaatcacatgattaactaaaagcagacaggaactaatggctcatgtctatacaagttataccttgaataagattttaaaaataagaaacaaa

SEQ ID NO: 326040 - DNA, 600 bp, Homo sapiens
acaataagagcgtgacagtatgagaactctgtttaatatagtatgatctttttcaagaaagattgtattccatcaaggagaattatgaagctgtaaattacattgtgtcacagctagtagtattaaataccaagygtttaattagcagttttaattttatattcttgcttagatatacctctacaatacttgaaagatgctttttgctgaaaacatttttaatcagataaaaatcaaagaagaaatgtctaagcaccacaaatatgatgtatgacttggcagtgaagaaaaactaaattattagtaagataaagtaatctatatttatattgtacttgcttacaatgtattatattaaacctaaaagtaatagcaatctaagatacttctgacactgagaattctttccagaaatcttagaaaaggcattaagaaaaattaatccaacaaatgtattatgagagcatgtgccacttgtatacacatctccaatcttctgcttgtcataatacttttgggttgcttaagttcacttaaattaaaaggaattaattgccttggaatcagctgtcttggaactgtcttgaaatcagctccacc

SEQ ID NO: 326041 - DNA, 439 bp, Homo sapiens
tgcaaactataacccatgaccaaatccagcstatgcctgggtttcataaataaagttttcttggaacccagccaaagttatttgcttacgaattgttttggctgcttttgtgctataatggcagagttgagtaattgctacagagatgatatgggccagaaagcctacaattttactttctggacctttaaagaaaagtatcccaagccctggactaaagagaaaaaaagccagtgtggatatggattgctgaatagagggatggatgtataaatgaacaaggagaagacattatgtggtgatatggtacggtattgcttaaatgcataggtaatggggggaagttctgaatctgagttcagtaaaactgaggtttagataaggactaacacaataaaatgagattatgtatttcttaagcattgccccacacagtcct

SEQ ID NO: 326042 - DNA, 648 bp, Homo sapiens
tctctgtgacaagctgatgttaacattttaattgatgagaggaagtcaaatataaaactatcattctctattacatctttctaaattaagctacactactcttgtgtttaaattatattttccattaataaatttactttaagctagataggtagctttcaaaatgttgatatttacatcactcactaagtatattctgaaaattgcactttctctaaagtgcacactgctgtaagctttatgttaactgaaatatttaaataccacttcaaggacatgaagttgattctcataatagaacagtctttttgttcatttttacttacaactttagttgagcaagttgcttatagcatcctggttcattccctgagaatcccagtggcaagaagtaactcttgcttgacgtatctttattgtttctctgccactgttatggctactaaaaggtcagcgagagcttayggcaccaaaaggtcatttttgttattccaaagacagaagttttgacatatgatatattataagagaacagaggcactaattgatgtaccgtaatgctaatcatctacatcttttctttctttaaaagaaagaagagggaaatttttttgtgttcatctctgaaaatcttctaaaacgtttaaa

SEQ ID NO: 326043 - DNA, 579 bp, Homo sapiens
caaattctaccataaaaacaatggaagttttaaaattcattgctgcatcatttcaaaaagctctgaaaaatctgcaattgaaagatcagaccctaacaaaatatataatttgtatgacatttatctaacactgtggtgaaagttgatgcatcgtaaaactgctacatttatctatgcaacatacaataacagaaaacttgaacatatttttctgcaacagcttttggaaaaacccctacttctacattctttaccattgctctcagttgttacaaccatcactagatattgaccgacttatttaatgatgtaataaaatctttaaatattgttttaatgttatatatttttccaatgatttacaagtgctagaccttcttttaattggactgtagaatgtattgyacaaaaaatgtgagaatatctgtaacaccctcctctagcctagctgaattgttagacttcacatgagaaaagactttaatttaataacatctaggatgtgcatgctcagactatctctagattatatcatgagacataggaataattatattttcatcctgcccatccttttca

SEQ ID NO: 326044 - DNA, 583 bp, Homo sapiens
gaatgtagagtttccattcatggacaagtgtcctcattcaaactccctaaagctaccttgcccctcttctcaactttctttgcagtagggaaatgtgattccatgaaaccmccgggattctgttttatgttaactggcagagcttttcacgtctcacagacctggtgacacctaaatgacacacactttggattgtcttgttgtgtggaaaagctagataaagggaggaggagaaacttaaaacaggtgggcaagggcaaggtggcattcacaatgttcctgagatcagggccaggcttaggatcttggggagataaaacatcactccagtgaaatgatttcacagaagtgttaagttacaacagagtcctgagagtgccctaaaatctgacagccctagaatggagctttgcaaggaaaaggtaaaaatcttcagaatctacaccaggatatgagcagagagtaatactatttaaatgtaattagtagactatgtctggcttgcaagtgactgtggaattgtgttagatggggactgactggtttaaaataccagcatttccagctgtactgggggataaga

SEQ ID NO: 326045 - DNA, 583 bp, Homo sapiens
gaatgtagagtttccattcatggacaagtgtcctcattcaaactccctaaagctaccttgcccctcttctcaactttctttgcagtagggaaatgtgattccatgaaacccccgggattctgttttatgttaactggcagagcttttcacgtctcacagacctggtgacacctaaatgacacacactttggattgtcttgttgtgtggaaaagctagataaagggaggaggagaaacttaaaacaggtgggcaagggcaaggtggcattcacaatgttcctgagatcagggccaggcttaggatcttggggagataaaacatcactccagtgaaatgatttcacagaagtgttaagttacaacagagtcctgagagtgccctaaaatctgacagccctagaatggagctttgcaaggaaaaggtaaaaatcttcagaatctacaccaggatatgagcagagastaatactatttaaatgtaattagtagactatgtctggcttgcaagtgactgtggaattgtgttagatggggactgactggtttaaaataccagcatttccagctgtactgggggataaga

SEQ ID NO: 326046 - DNA, 590 bp, Homo sapiens
tttatgaaatggcatgagtagagaaagggttggtctgtgtgtatggtatcagaaggtgtttttgttttgacgtgttttgtgtccacatttaattttagatgccttttaaacttctaagtgaaaccaccaaataagctgttgaatatgcaaatgtagatctcaatattgataagttaattaactaactaacacctcatggaagcttctcaaattgttctttgtcagaacaccaagattttatgattgtacaaattacataaatggccttcattcaataaatgggagaaaggtttatacaagaatcttctcaaatgtacattttatcctaatatattttttctcacattttcacttatctacattagagtctggcaatagatagataattatatataagaaacatatacgtgctataaacacaaatccatacatacataaatattcaatatttttattatatgtttaatatttagttcttttatgactttctatctagatgtcartatctttcaaatgacttagcacttgaaaacatttgagaatcactctctaggggatctgatgtggtatcccaagaacccagccatgac

SEQ ID NO: 326047 - DNA, 623 bp, Homo sapiens
ataatggtgatgtgcagtaagcaatgctactactatttaagtccctttctttcttgaactacagagacaaatataaaaagttgttatgctctaaccaaacacatttgaaaaaatgaacagatagatagataaacgaataatctggcagtgattgagatttcatagtcaccgtgactttgttataaaatatttctggaaaactgggattacacaaaaagccccaagaggagttgaattaatcactctttkggatatcccattagatgttgccagcacaatcatgtgttcttacagatgttcacaagaaaaagttattaattaataatgggctaaacatttatatttgtcatgataagctcaattcttaaccctcttaacaaaggaagcatctgcctgcttaaatgtcatggtcaataaatatctacctggaaaagtagaatttctgtatatcattctacaatgtcaaacacgtagtgtatactgattaagataatgtaatatctaaaaggagaatatgggtaggaataagccatgtaagcttattcacctaggaaactccctgattcaattttactcccagaccagaactctgtaaataaaatttaatccagaaatgctaacag

SEQ ID NO: 326048 - DNA, 598 bp, Homo sapiens
taccgcactggcactgtcacccgtggagcccctgccctgtccccaagatccgccctggcagctcacggcccacatctgattggccctcaccctgaatcacttcttgtgtcctttgaactggttccctcctcctgtaacatccaaccccagtccaccttgttcatgtagccaggagttgggagggctgcgggtggggattgggattgcaacccaggccccttggccatcagatccacaactggactagcctccagccactgagatctggaagaggagctgcggcgaattgccagagacagtgtgtgcttatcttgaaattgctgtgtgacctgagagattccctggccctctctgagcagggctcatcaggctagtgccaggtgaggtctccctgtcaaacagctgagcccagagcccagattgggggatcacgaggacctcctcgttggggtctctgccctcatcagaccccccagctcctccctcagcctgggctgggtgggtgatggagcagctgccagcctgctggaaatttttctccccstggggcccagggctgggagccaagggcagctgccgctcagaaggagggagaagg

SEQ ID NO: 326049 - DNA, 582 bp, Homo sapiens
ataaatatggaaggcaacagacatgtagtcaatcaaggagacccctttccaggcattaggatagtgggctggaagcagattggcactgcagtagctaccctgcaaatcatctaccagstggcagcctaacttcagtaaatatgcttccacagagccagtgaagtatattgtgtgaggtctcctgaactcacgtagtatgcattaagacttgtactctgctccaatattgaaagcaaaaatatcatttttaattttccctgagaacatatggcaatggaagtgaatacaggatcctgatgagcagggaatcttacacataatggatgagttttccttcagtagcagcacaatttcttgtctctgattggcaatgggcagtatgattggtatattatgctccagggataactctttcattcacagaacaaagcagagatgagcccagggcagggtcacctgagctctggctgaagaatgaagaacaaagggataatcagaagtcaacaatggtttctttttttctcttttcttcctttattccatcttccttccttcttttctttcttgttacttcactattcc

SEQ ID NO: 326050 - DNA, 627 bp, Homo sapiens
aaaaaagcaaaaaaaaatttttttctttattgtgaaatcggcaatggttattcatttgtattttcattacatgtctaagaggtgttagctttgcttacattaataaaatcatagcaaatgcagtcaaatccaatattcagggtttgatatacctgtagtagatgacatatgtaggaagcaaaagcagaggaaagagaagctatgagcacatcagtgtattttagaggaacagaggagtgagttcacacatgtatgcaacaacacacattcacacactcatgcacataatatcacacatagaatcacaggaagccaggaaaacataagcttgaccccctccattttctcagagaggtctccaaaattaaagagctgccttaactgagatgrtccgacaacagggataattctgggaacaaaaatacgttgaatgcaaaagagtgaaacttgaaatgtctgggaaccttgatatacatgccacttctatcggcaaacaaactagtactcttctcctgcagaaatatcagttatggataatccacctgagagatgcagtgagctctctcttcactctcagatcagggaatgaagtgttcaagttaatcaacatctgactgtgagttataa

SEQ ID NO: 326051 - DNA, 627 bp, Homo sapiens
aaaaaagcaaaaaaaaatttttttctttattgtgaaatcggcaatggttattcatttgtattttcattacatgtctaagaggtgttagctttgcttacattaataaaatcatagcaaatgcagtcaaatccaatattcagggtttgatatacctgtagtagatgacatatgtaggaagcaaaagcagaggaaagagaagctatgagcacatcagtgtattttagaggaacagaggagtgagttcacacatgtatgcaacaacacacattcacacactcatgcacataatatcacacatagaatcacaggaagccaggaaaacataagcttgaccccctccattttctcagagaggtctccaaaattaaagagctgccttaactgagatgatccgacaacagggataattctgggaacaaaaatacrttgaatgcaaaagagtgaaacttgaaatgtctgggaaccttgatatacatgccacttctatcggcaaacaaactagtactcttctcctgcagaaatatcagttatggataatccacctgagagatgcagtgagctctctcttcactctcagatcagggaatgaagtgttcaagttaatcaacatctgactgtgagttataa

SEQ ID NO: 326052 - DNA, 560 bp, Homo sapiens
attgaagcaggagctggagttttttggatttccactactaacattaaattactgtgccagaaacaatttttaaaatgtcattaccttcttcaagcaacatccttgttcatcagtggctttgtaagtcttaccttctcacaatgctgaatgataggaatatgggtaagaggaactgataaaacattccattgagataaagggcctgtccctctacccacattcaaagttgctttaaagtttaatcagaaagggttactaagttataaagatatcaaagctctgtatctgaagtcatcagagttatagtttgaagacatcgataaatgtaaatgttcaaagatataacttaagtttgaggcaaaggttactggtagactcacttacctggcagtgggtaggatgcacaagtatgaataatcaaaccaggagttgaaatgttctaattcactctactaacagaagggaaaccattgtggaatatctgaaytctcatttatttaactcagtggtagatattggtattataatttactttagctgtgtgctgaagtatgaaaggg

SEQ ID NO: 326053 - DNA, 596 bp, Homo sapiens
tagagaaagtctctcaccaaactgtttacctcctgtgccaggctgctcctaatagagaattttgatgttgctcaattaactccttcagatctgcatatgaacttgacatcccagataaaatttggaatgcctgtgtatgtgcagtgaaagtgcccagtctattatttgccaattgccattccagaacgggtagagaggcataattgaaacttttaatggctagcatctgttcaatcttctcttcctcccttccctcgatctctctggagtcctcctccccacccacctctcatccctcatttcaaatccctccttcccagacttctctccaactctgtgtacaatcctactcccttttcacaccagcaggctctcaaaatcctctctgctccccggggaaagcctggaagatctgagacctcctgcccagaagtggttgacaatgtagtgttttcattcgaatgcaaatttgtctctggacaagattcaaggaaagtgctttcccctycaactgtctctccagctcctccccagcccttgttgtcttttgtgttcttgtaaataaatgagaggcgaatggctttcaatttgaagac

SEQ ID NO: 326054 - DNA, 547 bp, Homo sapiens
tgaacatagcatatttttatatgctatgtttgagtcaagtaaaaggacaacattgtagtctttttttttaaggtttgcttcctttgcatgatgagaaacaaaataagttttgcaaaacgaagtgatgatgcgtatacagttgaatgtacrttacaagctctagtgtatattatcaccagtaaacgttggaactgcattaattttgttttgacaatcattttgttaaagtgtgtaggtactttgttaaaacaaggagagatgggctcttttagacaggaactcctggaggggaacagacagaagcttatctccttccttaggcctctagcatccgtcttcaaattgcctaaaattcttttgagcagggctttgttgggggaaagaaactgtgttaatgcagggttccctgtgtcaccaggagcgtcctcactcagcctccattaacccagggaggactggagagtctcttcactggtccttctagacacaaaagaacaataaaaatccactgtttgctgatgcttgaaattccattagccaaagaaca

SEQ ID NO: 326055 - DNA, 604 bp, Homo sapiens
ggttcttgctatgttgcccaggctggtttcgaactcctgagcttaagcaagcttccaccctcagcttcccaaagaggtaaatattttttaactgaattgaactattaacaaatttttcattagctaaagactttatgatagattttataatgtttttgagccttttaacagaaaattgtacctttgartatttaaattttctatgcacttctgctgaaattcaaatttgagtgatattttaaagcctaatgtggtctatgttgagattcataaaaagcatactttgtagtgttgcaaaaatcatgtaattgcatacttcgtgatttgcttccatttcaaagattactaaatacaaagaaattcaaagatatgttatgggatggtatagaatatgttataacttgacctagtctgtcccttaattataacatcatgaaccctcttaaccataaatttaaaaagtttatgcacatttacatactacctagtcaagtggaggcactgctgggaaaaatacatcctaaacggaatctccatctaagattctattcctctctttctaatttgtcacattgcgttactgtggtcttgtcagcagaaagag

SEQ ID NO: 326056 - DNA, 614 bp, Homo sapiens
atttttttttatcttcacatgaatattaaaagtttttcagagtgcaacataaaagagattatttcacttgataatgtgttgatatatgggtttgggggctacattaaaggaaatgaattttctcgtttgcattatcgtgtcagaagcagaaggaaaacacttcacctccctacctctacatctgttgtttcaacctgaagtctcgggaacatggcaattgtttgcttagcagagccatcatcagaacagcaagggaaaaagtcagatcccacatcagcctgaaacattgtcttcaaatgcagtgtgttgaagagagaaccgttactacaaaacagacttctggttttgtccataagtaaaggaaatatttacaagcaaaattattttggccagagaagagaccagctgtttacagtagctgaattrtttctatggaataattccttagcgataggagaacattgtttcattaaagtaattccaaatcctaacaaccgtaacataaaatcccagaccttaggacagagatgtaatatatagtgaatcatgtaactgctgcttttctctgcagctaatgccgaccaaaaaaaaaaaatccatttctttgtatgtcc

SEQ ID NO: 326057 - DNA, 617 bp, Homo sapiens
gtggatgggaggcttaccaggttctcaggaaaaggaacctgctcaagaggcctgccaatagcaggaatcttcagcaaggaaggctacagggtcactgtcacactctaaagctgcactcggtagtaggatgtggggaaggaataacagagaggtgttgccctagtcccaggctcaggcagtggctgtcagatggtccctgtggagcctctcaaggaaacccatgaaatgtatctgaaaaaggcaagcatcagctccccacagccatccacattggagagcaccaaggctgggccgtgacaccgttcctccaggaagacttttccatgcccaatcgctggcctggccccaaccatcttggccccgaaggagtgggaagccctcgtggatgccagctcagggtgygaagggaaagaattgtcaggcggggaaatcaactggaagccagccatgcctctttgttaccataggaggattctcaactgaagcaggtcctagctggtgcagggacatgatgaaattttatatacatatacaatttttttaaagactgggctcttaactcttaaaaaacacaagattttagttactggaattatcttgcttttatgattaataat

SEQ ID NO: 326058 - DNA, 531 bp, Homo sapiens
cttctttttatcacaaatcaataaaaagagaatttaggaaggtactattaagtaaaagagccttaagataaatttaaaaattaaatgtacagattttttggattctgacttaaacaaaccaactgtaaaaaaaactttgmgacaagagaaatttttatatgaatttgaaatcaggtgatagggttttctgataattggcatgagaattgctattaatcaggataatggcatattcttattgtttggggatgcacactgcagggttcatgaatgaaatggcaggatgccttggattttttaaaaatacttcagccaaaaacgaaggatagttgaaacaaggtggccacaatgttaacaaatattggagcttggtaatggatataccaaagttcagtaatctctctatgtttatgaaatgcttcaaataaaccagaaacaagttggcaaatggtaatcctgccattgtctggcctcttgtcaggattttggctgccactaagcctgtagggcaatgcagaattagatggacag

SEQ ID NO: 326059 - DNA, 587 bp, Homo sapiens
ggaagtgatggtctcagcttgtatctggactcaagggcagttcaaggttgacgccagtacaaaaactggattaaatctcagttgacttgagtcctttagaattagcctgtggctcacatagttagctttgattcttttaggctacaggtgcattttggaaactgcaagtttttggtttttaggttattaatttgaataaataattattttaaaggggatagaagaaatactgtaaatatcagcaatgctactaaatattcctcaagatgaggttttaaagtgaagtatttggcatttagtaaatgattactaatctttctattcattccacatatttcgataattaataaagrtgaccatttgactgaaaaaagacttccaatttcaagtcagagtcagttaaatacagttgttaaaaatcatgaagcacactcttagtgtaattatttatcagatgacaactaaagtagccacactgtggcaaaatgatttcgtaaggggcttctgctctttaaacactaaggcaaattgattccttaggaaggaaagcagttttaaagaacttataagtcaagcagtgaggagaa

SEQ ID NO: 326060 - DNA, 614 bp, Homo sapiens
ctaatctttctattcattccacatatttcgataattaataaagatgaccatttgactgaaaaaagacttccaatttcaagtcagagtcagttaaatacagttgttaaaaatcatgaagcacactcttagtgtaattatttatcagatgacaactaaagtagccacactgtggcaaaatgatttcgtaaggggcttctgctctttaaacactaaggcaaattgattccttaggaaggaaagcarttttaaagaacttataagtcaagcagtgaggagaaagttgacccctcctatatctagagaatggcattggtgaaaggatattcacagatatgagaaataattaatgatgaaatgaaagatttgagtctgaatggaatactgagaacagaaagtataagtgatctttcgtggtcttttgttcaatacaataaaaattacttttttattgactcaattggtatcagaggcatagcattaatatggctgacctcaataaagcatggaacatttctccatttctgaagtggatctttctactgccatactaacatttggaaaaaccacttcatatcaattattcttttctgaaacctatcagaagtattgggagc

SEQ ID NO: 326061 - DNA, 614 bp, Homo sapiens
ctaatctttctattcattccacatatttcgataattaataaagatgaccatttgactgaaaaaagacttccaatttcaagtcagagtcagttaaatacagttgttaaaaatcatgaagcacactcttagtgtaattatttatcagatgacaactaaagtagccacactgtggcaaaatgatttcgtaaggggcttctgctctttaaacactaaggcaaattgattccttaggaaggaaagcagttttaaagaacttrtaagtcaagcagtgaggagaaagttgacccctcctatatctagagaatggcattggtgaaaggatattcacagatatgagaaataattaatgatgaaatgaaagatttgagtctgaatggaatactgagaacagaaagtataagtgatctttcgtggtcttttgttcaatacaataaaaattacttttttattgactcaattggtatcagaggcatagcattaatatggctgacctcaataaagcatggaacatttctccatttctgaagtggatctttctactgccatactaacatttggaaaaaccacttcatatcaattattcttttctgaaacctatcagaagtattgggagc

SEQ ID NO: 326062 - DNA, 601 bp, Homo sapiens
actgtaatatttgacatctctttaatgttatgtatctaaaaatttatatttaagtattaattcataattctaaattatcgcagctacaaatctacaataatagtaaattaacctttttcatatccttaacctttttcctatgttgaaaatatttatagagaaaattagtaaagccaaattcaaaatttttcttaaaagaatagcatgktcttctgaaataagacattaagtaaaacctcattgattctgataaaatgaagtctgaaggttagaattctgctaaatggaatttaactattgttgaatactgacagttaactgaaattaatctaagtaaggcaacagctcttgtcaaagtcttgcattgatatataaatcacagcccagtatacatgacttctagacaattatatatctccattaaagcagcaatattgtgcttgcctgtgttttgctcagatgtatagataagaagatgccattctttataagattacaatacatttaaacattaagttaattcaatggcagaagtgtacagctctaaggaaccttcaggatcaatgattttcacgtctgctttgatggagaattcctagtg

SEQ ID NO: 326063 - DNA, 543 bp, Homo sapiens
atttttgctaagcaagttttcatgcatgaaatagcagtgttttggtgacagcagagtgtctagagagaaccaaatgttcaatggtaaytagaatgcgtcacaagtagttgctgagtcactggattctgtctcagatacgttatttaaaacattgactgggtatcggcttagaaatcagaattgtcactttagcatctctccattttggcatcaataactgcttcaagggtcccactcaccgacgaggaaccagagcacttgcaaagaggagatgtaactgtgatgacgggcatgagccttcagtcattccagaacttcctttgtagaagtagaatttgacattctgctctgcatatgagatgctttgcatttctgtcttcccaggaggcagggtgtggttaagattttaaactctggagccagactgccagtagttggaatcccagctgtgccccttcctagtgctgggacctggaataaattatttaacttctcgacacatgagttactcttccataaaatggggatgttattaagaattgt

SEQ ID NO: 326064 - DNA, 543 bp, Homo sapiens
atttttgctaagcaagttttcatgcatgaaatagcagtgttttggtgacagcagagtgtctagagagaaccaaatgttcaatggtaattagaatgcgtcacaagtagttgctgagtcactggattctgtctcagataygttatttaaaacattgactgggtatcggcttagaaatcagaattgtcactttagcatctctccattttggcatcaataactgcttcaagggtcccactcaccgacgaggaaccagagcacttgcaaagaggagatgtaactgtgatgacgggcatgagccttcagtcattccagaacttcctttgtagaagtagaatttgacattctgctctgcatatgagatgctttgcatttctgtcttcccaggaggcagggtgtggttaagattttaaactctggagccagactgccagtagttggaatcccagctgtgccccttcctagtgctgggacctggaataaattatttaacttctcgacacatgagttactcttccataaaatggggatgttattaagaattgt

SEQ ID NO: 326065 - DNA, 560 bp, Homo sapiens
cagtgtcagctgatggactgacttctctgaacgtgcatccaggtttcagggccctggtgctccaataaatgcagcagtgttatgcctttctgtgctgaaagtaactttaaaggattgtggatttcgtgtactctcttgcatatcgatttatgcaactcccaacaatgtgggtgactgaactgatattggctgatcttcttcctgcacaccagaaactcttcagaggtcaggaataaattacaatctgcatgcaaaaatattaatacatatctgatttccagggggaaaaaaggaaatctgcaggyacccaacatggagaaatcacatgcaactttgttttacatccttaggctggatgtagaggaagctggcatggcatccctgcacaaagactggaggcaaagggcagcctcagctgtggaaagagctagaaactccctgaacacttgtttgagatcagcagagcaacttgccatctcaggggtcttgggtgaggaaaacgttctcccatgagaaacccaaactccagacctgcttgagcgtagagagttatatatgac

SEQ ID NO: 326066 - DNA, 570 bp, Homo sapiens
tagtatatttttcatttttttcaaagaaaatggatcagaaggaacttagtagtaaattgacagataagtcctgggatactgaaaaaaggcttagaactcagcggagattagtagttgttccaaatgagctaccttttaggtgaatgactgtacaatggaacagtcttttgtatttaaaaatggttttatgtcctttgggaggccaaggcaggaggatcacttgaggctaggagttcaggactagcttgggcaacatagcaagcccccgtctctacaaagaatttaaaaattagccaggcatggtggtatgtgcctgtagtcccagctacttargaggctgaggtgggaggattgcttgagtccaaggttgcagtgagctatgatcatactactgtactccagtctgggtgacagagtgaaaaccccacctcttcaataagtagttttgtttttttaagttagaaaataaaaatttcatgaagttcgtttttagttgtaccactggtctgtttccataaagtctgccattaggaaaggttatccagaactggccatctgcaccttggagat

SEQ ID NO: 326067 - DNA, 610 bp, Homo sapiens
agatgtgggacaggagggcatccrtgccaagtccacatgaggccgaggcagcttctgataggtcattttgttgtcctttttttcttgtttcttttcttggtggtggtttatttgctgcagacaagtgttaagaaacacatagattagagtgatagctcatttcttagttggtatttattaaattattaaaaattattaaaaacaacaacaacagcacataacataaaagtaagttactttcgagcaccccaactaatggaatttattttccatttatatttttaaatttactttttattttttgtgctttttagctttagatttcttgttgatgctttctcctcatcgtaacctgtttctatattcttctgttactctggggaaaaaaaaaaatagaatctttcttctatagacatacccataatatctaagactaaagcctgaggccactaatgacactatcggactcctctctgctgccacaacagcaaaggcagggaggctgaagagaccaaggccagggctcaagttgaggggagatgtgatatgtcaggggtgtatcagtgctttataataggtcaaatccacagtgaaggcctgaaagccaggc

SEQ ID NO: 326068 - DNA, 610 bp, Homo sapiens
agatgtgggacaggagggcatccgtgccaagtmcacatgaggccgaggcagcttctgataggtcattttgttgtcctttttttcttgtttcttttcttggtggtggtttatttgctgcagacaagtgttaagaaacacatagattagagtgatagctcatttcttagttggtatttattaaattattaaaaattattaaaaacaacaacaacagcacataacataaaagtaagttactttcgagcaccccaactaatggaatttattttccatttatatttttaaatttactttttattttttgtgctttttagctttagatttcttgttgatgctttctcctcatcgtaacctgtttctatattcttctgttactctggggaaaaaaaaaaatagaatctttcttctatagacatacccataatatctaagactaaagcctgaggccactaatgacactatcggactcctctctgctgccacaacagcaaaggcagggaggctgaagagaccaaggccagggctcaagttgaggggagatgtgatatgtcaggggtgtatcagtgctttataataggtcaaatccacagtgaaggcctgaaagccaggc

SEQ ID NO: 326069 - DNA, 585 bp, Homo sapiens
atttattttccatttatatttttaaatttactttttattttttgtgctttttagctttagatttcttgttgatgctttctcctcatcgtaacctgtttctatattcttctgttactctggggaaaaaaaaaaatagaatctttcttctatagacatacccataatatctaagactaaagcctgaggccactaatgacactatcggactcctctctgctgccacaacagcaaaggcagggaggctgaagagaccaaggccagggctcaagttgaggggagatgtgatatgtcaggggtgtatcagtgctttataataggtcaaatccacagtgaaggcctgaaagccaggccaggcctataggagagagggcagctcccccaagtcctatgcccmcgaggtcatcgaaatcaaagaataaagaacctagaccataaaattggaactatgacctttctgatcctcagtctttgctcttggccaggaattatgccctctgcttggtatgctggggcaaaacccacagaagtgtgtttagatatccctggattatagtggggtggggacattcatttgtgagcactgag

SEQ ID NO: 326070 - DNA, 577 bp, Homo sapiens
gtgaggtcaaattctcattatctgaatggacatttcttgggggcactgtattttgtgtcgaaaaaaagttttaagccctaccaaaaatttggggatgactcttataaaaatatgatttatgatacacttgtcttgtttcataattgctacaccaagacaaaagacaattaccaggggtgcaaggagccccatgaagccatgagaaactataggtgctcccctttccacctcgatctgaaagacatgcaagtattcctaaccctttttaacaacaacaattccaggcaagttatattgcgattattttttaataatcactatcacaataatacagacattcctgtaggctaaatgccttttaataaaggactctatcatctttccccagagacttttttttttttttttttaaccaaaggaaacgtagtggtcagaaaacacagggcaacaggccaggaagggctttctcctcacagctgcacactttcactcgcacarccaagtcttcctgagcagggggtgcgcagggctctcctttctggaggtcagattcgggttgtccaaacatttgccaatg

SEQ ID NO: 326071 - DNA, 581 bp, Homo sapiens
ttacacatttatcatcatcattctggaaaaatagaaataatttttcattaaacatgcactttcattaattagctcrttgctgctgaatgtgtttaatgaaaagatgtcaaataaataaaaattttaatttttacaaaataatgtatttgggagcggcagtagcaaaagcattcagatgctctgagtcattttattctgcctctatttcctgcactccaagtctgtgctttcccacatttgccactaaccttgctgattgtagcatgatgatacaatgtatctttcaggcttcagcaagtattgtggcaaaatttgctagcaaatcaacagatggcaggggcagctgatttaaaaatgttctcattagtacttgagagaaaaggacttagctacttgtagctcctttggcctaagcatttttatcagcaacgccctgcatgctgtcctcgtaagcaaggtcatgccaaactcatgcgctgttagacaagatcatgcccttagctggaactatgaaaaagagcactactgaactcattttgcctttttttggtgcaactggcaataaagatactttgctaaaa

SEQ ID NO: 326072 - DNA, 447 bp, Homo sapiens
gcctgccatatggaaggtgctaagagcatatttgatgaattaatcagagggtgggtgagcaggacggggtacagagggagaacactggctctctgggccctcagggagcacctcctttggagggctgcatgcaatacactttgagtgtagaggcaagatgaacttgcagatgtattccaatgatcaagaaatgtatttcctgtctgatatcttttataacaccatctttttcatgactccatttccactttttattctgtgatcacagtgcttgagtagtgctgagtatcaggttctaggggaagcttgttccaaggataatctaaatccrcagtctacttccctcctacatcccaagacacagaaacaggcacacaaacacacacacaaacacaggccaattgatagcatgataacattccagaaatatagaaatcaataaattta

SEQ ID NO: 326073 - DNA, 576 bp, Homo sapiens
tacaagcatgcgccaccccatctggctaattttgtatttttagtagagacgtggtttctccatgttggtcaggctggtctcaaactcccgacctcaggtgattcgcccaccttggcctcccaaagtgctgggattacaggcatgagccaccttgcccggcccatagagtatgtttttaataaggtcttattttttataatattttccacaattagctgtaatattccacaaagttgaatttcatagctaacaaatttgaagttactgatgcctttagtttactcttctgtacaatcatagcatttttaactgaragaatattcttaacaggtgctgattcctaaattcctaaagaaggaacccctcaattctaatttttatattgaaatacatacatgttttaggccaaatctcttcacactttctgacttttaacctccgttcagagtatccatctttgataaatatttttgaaagataaaatttattaaataaatatctatttatgaactgtatctctcacactttgctggtgggaatgcaaaatatagggcagtcactttgaaagaaagtgat

SEQ ID NO: 326074 - DNA, 576 bp, Homo sapiens
tacaagcatgcgccaccccatctggctaattttgtatttttagtagagacgtggtttctccatgttggtcaggctggtctcaaactcccgacctcaggtgattcgcccaccttggcctcccaaagtgctgggattacaggcatgagccaccttgcccggcccatagagtatgtttttaataaggtcttattttttataatattttccacaattagctgtaatattccacaaagttgaatttcatagctaacaaatttgaagttactgatgcctttagtttactcttctgtacaatcatagcatttttaactgaaagaatattcttaacaggtgctgattcctaaattcctaaagaaggaacccctcaattctaatttttatattgaaatacatacatgttttaggccaaatctcttcacactttctgacttttaacctccrttcagagtatccatctttgataaatatttttgaaagataaaatttattaaataaatatctatttatgaactgtatctctcacactttgctggtgggaatgcaaaatatagggcagtcactttgaaagaaagtgat

SEQ ID NO: 326075 - DNA, 561 bp, Homo sapiens
cttcatttttgaaggctatttctgcaagatgtggaattctaggttggtagttatttgtacatatgtgtgtgcatgcatgctctcatgtatcctttcagctctttgaggatatctgtctgttgtttctattaagtctggtgagaagtcagtgactgcacttatctttgttctcctgtacataatgcgcatcttttatctggctcattttaaaaatctrctctttagttttggtggtcaccaattagctatgatgtgcttaggtactttgtatttctcctgattggtgttttctcattgttttagatttgtgagtttatgtcttttatcaattttagactattctcagcaaatatcatattaaatatttattcttcttcattttctcttcttcttgggtcccaattatatgtatgttgggtcatttgatattgtctcacaaagaaaggcatcataacctattctgggttttgtgggtttttttttttttggtctttttatgtttattttttatttgtcaatttttaatttgtatttcagcttggatactttctaataacttgt

SEQ ID NO: 326076 - DNA, 615 bp, Homo sapiens
tctagttatgaactgttctattctttattgtaagatatcagaacagcagagctcaaagtgcacacgatttcccttcttatgtcaggcactggtttcatgtcactcaatagacgtattctgcagttaagctgtgtctgagctatttggcaagttaagcttgcttcagtttactactaggttcaaatgttttgaaagtgggctcaggattttccattctgcagtgtgtgggtttctgagcactagcgaaattccccaaagtttttcatgtcacccaaatcaccagtttttcaaatcatgagagatctctctctgatttaaaactcaaatgatggtttgtacattgttggagaatcttctttgctctccagtccagcccaggcttttggatccacatagagctcctgctctgtctggaatgycctggaggagtttctttcatcttttctgccccacccgtagctattgtcagttgaaagcctgaggtttttttggtttatgttatagtaataagtatataagttataagtataatagttatatcgttttttttaccattacaatagacatttatttaaagtaaaatatctgcagaccaaataattcttaaaattgttt

SEQ ID NO: 326077 - DNA, 604 bp, Homo sapiens
gagcagactttctatttgtctgaatgactaatataacttatttccacattataaatagaattaatgtttcaggaggggggctcttcagacaatctgctgtatgtgacctattcaaataagttttaaccaaattacaaaatttagtataaaacattttaaatgtacaatacacaacttttaacttgttgaaaataagtatttccttattgttgaaaaatttaatttaaaaatataaattacagagaaaaaatactcaaagtttatgaatttaaatctattggatagcataagtccattaaaatcctgatagaaaatattaaaatctggataaacaatgtataatgcttttttcagcttgaaatattattccaaaataaagcctatgataaatctaaaaaccggagtgaaacttcatattttagtgcattctcatgctgctataaagaactgtccaagactgggtaatttataaacaaaaaaggttaaattgactcagagttccacaggactggggggcctgaggaagcttacaatcacggcggaagatgaaacaaacacctccttcttcacmtggcagcaggagagagaagtgctgagcaaaggg

SEQ ID NO: 326078 - DNA, 565 bp, Homo sapiens
ccaagcttcaactctttctctttgcatacctgcaggctcctcaccacatcaaaatgccagggcttgaggcttgcaccttctgaagcaatggcctgggctctacctggacccctgttagctgcaccagaggctggtgcagctgggatgcagggcatcatggcctgattctgcatagagcagtggggccctggcctggcccacaaaatcatgtttttcttctatgcctctgggcctgtgatgggaggaactgccatgaaggtctctgaaatgccttggtagcattttctccatattcttgtctattagcattccatttctctttayttatccaaatttctgctgctggcatgaatttcttcccagaaaaatatgagtttttcttttctaccacatggccaggctgaagattttccagacttttatgccttgtttccattttaaatataagttcaagttttagataatctctttgttcatgcatattagtgtacaccattagaagcagccaggttacacattgaatgctttgctgcttagaaatttctttcagcagataccctaaatt

SEQ ID NO: 326079 - DNA, 624 bp, Homo sapiens
taatgaatttgaatatgctcataaggtaytaacaatatggttctactatagatttatatgaaaacgtcttctaaaacttgagtaatgaatcctaaactgaaatttgagtatcagaggttcagtctaactgggtctgtgcaaagctcgtgccagcttcttttaggtttcttctcaaaaaaagcctccaatatttttggtatcaagctatctcctatggtcaatttcttataccatggaattgtatctgatatttactttcaagcaggattgaaaagccaaagtaaacatgaaatactaatgtaacaaatattacttaaatttagaccacattgactttatataatataccctcaaactgaaaatttaatctcatctttttttctgaattaatgatgatccatcttgccaaaaaaaactctatcaataaataataaaactatctgtaaagtgttcccaaatagagaactgtacttttagcataatgactactagactatctagagaacttagcttaatctaataatgcattggaagccaaactgttaaacactttaataatttactcacttagcctttggatatggtaaatgatagtccagttgacattccctgaggggaatatag

SEQ ID NO: 326080 - DNA, 624 bp, Homo sapiens
taatgaatttgaatatgctcataaggtattaacaatatggttctactatagatttatatgaaaacgtcttctaaaacttgagtaatgaatcctaaactgaaatttgagtatcagaggttcagtctaactgggtctgtgcaaagctcgtgccagcttcttttaggtttcttctcaaaaaaagcctccaatatttttggtatcaagctatctcctatggtcaatttcttataccatggaattgtatctgatatttactttcaagcaggattgaaaagccaaagtaaacatgaaatactaatgtaacaaatattacttaaatttagacyacattgactttatataatataccctcaaactgaaaatttaatctcatctttttttctgaattaatgatgatccatcttgccaaaaaaaactctatcaataaataataaaactatctgtaaagtgttcccaaatagagaactgtacttttagcataatgactactagactatctagagaacttagcttaatctaataatgcattggaagccaaactgttaaacactttaataatttactcacttagcctttggatatggtaaatgatagtccagttgacattccctgaggggaatatag

SEQ ID NO: 326081 - DNA, 456 bp, Homo sapiens
aacacttttgtaagggaatggatcttttgttttgtttgttttttctgtattatttttacccagctggtttcatttttacactaaacatccttagagacaaaaaaawgaaacaacttttgggctaagtccctattgactgactgaaggaaacatgaagataagatttttttattgttcaacatctagagatttacattgtaatcagtttaaaatctacctaaattataatattttcttaactcttactttaatatctcttttgaagctgtaaggaatattcaatctgagctgtttttatacttcatagaaatttacaactgtctataggactaatactttccttatatttctcaaacgcattaatcccagaatttccataataaatttactatcttcacttccactaaccgtggaagccctcccctgagtgttctttattacctttacatgacacta

SEQ ID NO: 326082 - DNA, 518 bp, Homo sapiens
tctaggtcacatttattcacaactggaggaaggaggacactgctcctttcaggagcacttgagggtttgcatttgtgaatagactgagcaagcaggaatttatgtgaagaagactttgtagtaacaagaggtgaggtggctcctacttctgcaagaggatgtaattgatggatgtatttgaataattgtgtgtgctggctgaaagtgaagctcattaggttgtccaattgatagagraattatctgagtagagagcatatgttaacaattttgatatgcaaggcattattagtgatcaatgtttgtggaagaatgagggagaaaccaagattaagcagtgagagaagacagactgtggtatgaggccaaagaagtcttgaccaattccacccaggccccgtcacacagagtcttcagaattcccctgtcctgagccaacatggcagtgacttacttacctgctataatgagactttcgatatgagtcaccctgggaaggatgtgctcttgttcaagtc

SEQ ID NO: 326083 - DNA, 534 bp, Homo sapiens
acaagtattgatcttatttttcctttgagactgctaacaagccaaactgtagcttcataaaatattcagctggagcagtggtttgtcagaactataagttaacaagaaatttacttttattctcccatggaaaaataaaacacaattagtaatctccatgtatttgtggattacataattgttttatcatctaaatgaytgaatgatctaagaattgaagccaatatttttaattttcatcttacttaagtatatgtgtgatttgtctagagaaaataaaaaatcaacatgttatataatatagtaagactgaaagaacaaaattgagaaaattacatagctttaaatctatcatgaaataacatttcaatgtacagttttaaagttattcttatactgaaatatatttgaaattaaatattctgcctaaacaataagaaatcaagaaaacatatttaaatgtctctttatttattacctatgtcatgcttttgtaaacaccataaataaagtgattaaatagaagatttagag

SEQ ID NO: 326084 - DNA, 534 bp, Homo sapiens
acaagtattgatcttatttttcctttgagactgctaacaagccaaactgtagcttcataaaatattcagctggagcagtggtttgtcagaactataagttaacaagaaatttacttttattctcccatggaaaaataaaacacaattagtaatctccatgtatttgtggattacataattgttttatcatctaaatgactgaatgatctaagaattgaagccaatatttttaattttcatcttacttaagtatatgtgtgatttgtctagagaaaataaaaaatcaacatgttatataatatagtaagactgaaagaacaaaattgagaaaattacatagctttaaatctatcatgaaataacatttcaatgtacagttttaaagttattcttatactgaaatrtatttgaaattaaatattctgcctaaacaataagaaatcaagaaaacatatttaaatgtctctttatttattacctatgtcatgcttttgtaaacaccataaataaagtgattaaatagaagatttagag

SEQ ID NO: 326085 - DNA, 477 bp, Homo sapiens
cattaatagagacattctagctttattataaacaatatttgcatgggccatctaaaaatcatgttacctttagccttttaatatactcrtatttaaagtgtacatcagggatttccaagcccctgttgtattgttactgggtcagtggcccattaggcaccaggcacacagcaggaggtgagtggtgggccagcaagccaagctccctccgtatttacagccactccccatcactcacattattgcctgatcttcccctcctgacagatgagctgcagtaattaattctctcaggagcacaaaccctactgtgaactgtgcatgtgagggatctaggtctcatgctccttatgagaatccaatgcctgatgatctgtcactgtctcccatcatccacagatgggactgtcgagttgcaggaaaacaagctcaagcctcccactaattttacattattgtaagttgtctaattgtaat

SEQ ID NO: 326086 - DNA, 573 bp, Homo sapiens
ttgctccacaattttgccagagtttggtattgtcaggatttcgtttggttttggattttaaggtatatgaagtgatatcttgttgttcagttttcagttaccttcaagattttgttacttatctttgattttctgcagcttgaatatgttatatctaggttaatttatttttggcatttatcctgcctggtgttccctggatcaccagggaacttccagaatctgtggtgtttcctgatcactggggctttcttgatttgtcgtttggggtctaacattaatttggagaaattctcagtcaatattgcctcaattgtttatcttgtttctttctcttctacttcttctgataacttaatcatgcatatatctttagtagatggttattgaatattctgttcttttttttagtgtcttttttttcaatgtttgacattaawattgacattttttcaaactcagagattctttcttcatccacatccagtcccctaatgaatccatcaaaagtgttatttctgttacagcgtttttgatttctttttgcttcattcttagaatttaatctctctg

SEQ ID NO: 326087 - DNA, 630 bp, Homo sapiens
tacccatttgttctgcatgttttctgtttttcattagagctcttagcatattaattatagttgctttaaactcaaggtctgaaaataccagcagtcctgccatatctgaatctggttctaattcttgctctttcttttcacactgtgattttgtcttttaatatgccttgtaattttttcattgaaaactggacatggtgaaagaaactctaataaacagggttgaaagaaacttcttacttagagtttatgggtgaaagaaacactaataaatagaccttagtgatgtggtgggaaggtgtgagaggggaagcattctgtatttctatgattaggtctcagtcacttagtgagcctatgcctctgagctgtgacctgcacaagtgcttattagaccccacttttaggtgagayaagttggctagagggggctggagttggatatgtctcttcctccaggttggttaggctttgacaaaatctcagtaggctctgatgaaataatttcttttgaagccaggcctagttaagaaaaaatgatgtggcatatttcaggatgattattttcccctttttctactagggaattttcatcaatattcactgtgagaacctagtagagctccagaa

SEQ ID NO: 326088 - DNA, 580 bp, Homo sapiens
ttttattcccacttgaataatatgtctattaaatgaaattctaattagatagaattcattagagaggaggagtaattaattaggtttacctggaccgcgtatagtgtagaaattaattaagtaacaaattttaaaatgctttcatgcattttcaaaatggtattatcaccttcaataaattactttctatgctgttgcctctttactattgtacctatagtagaactaaacagctagacacccaatttctaaataccttttaatttaatctttatgacatatcaaaaaaatttatctccccataagacacatattgctttcccctcaaatctgtatattgtatattttattgctattgtataactgtattaaataygcatttgtgtgttttttctttctcattgtgtaagctaaattcaaaaagtatgtctgtcaaatattttgtataataatcaacagaggacgatagtactcatatcgatttaagtgttgatgttgcacaatgatgacaagagactcttgtaaaaaagcagaatatgggctatggagtcagagcaacatgcattttagttctgccctg

SEQ ID NO: 326089 - DNA, 619 bp, Homo sapiens
tccactcacatgttcattgcagaattattcataatagccaatatatgcaaacaatttaagtgtccattgataaagagctagataaagaaaatgtagtatatatatacaataaaatattattcaatcttaaaaaaaaggaaaccttaccatyttcaataacatcgatgaacccgaagggcattatgctaagtgaaataagccaatcacagagggacaaatactgcatgattcttcttatttgaattatctataacagacaaacttatactgttggagaatacaacagtgattgcaaggagtaggcaaaattgggacttgttcaatggatataaagtttcagttatgctaaatgaacaagttctagagattttctgtacaacatagtgatggttttgtgcacttcaaatctttttaagagaatcgaacttatattaagggttctttcaaagagaaacaaaaataaacaaagacacacaaaacaagtaaacaacccaaataaaaccaaaaaagacataattaaactttggaaggtgatgtatgtggctattactttgatgtggtaatggtatgacaaatgttttcatatgtgcaaactaattacgtgatgtacattaaatat

SEQ ID NO: 326090 - DNA, 619 bp, Homo sapiens
tccactcacatgttcattgcagaattattcataatagccaatatatgcaaacaatttaagtgtccattgataaagagctagataaagaaaatgtagtatatatatacaataaaatattattcaatcttaaaaaaaaggaaaccttaccatcttcaataacatcgatgaacccgaagggcattatgctaagtgaaataagccaatcacagagggacaaatactgcatgattcttcttatttgaattatctataacagacaaacttayactgttggagaatacaacagtgattgcaaggagtaggcaaaattgggacttgttcaatggatataaagtttcagttatgctaaatgaacaagttctagagattttctgtacaacatagtgatggttttgtgcacttcaaatctttttaagagaatcgaacttatattaagggttctttcaaagagaaacaaaaataaacaaagacacacaaaacaagtaaacaacccaaataaaaccaaaaaagacataattaaactttggaaggtgatgtatgtggctattactttgatgtggtaatggtatgacaaatgttttcatatgtgcaaactaattacgtgatgtacattaaatat

SEQ ID NO: 326091 - DNA, 619 bp, Homo sapiens
tccactcacatgttcattgcagaattattcataatagccaatatatgcaaacaatttaagtgtccattgataaagagctagataaagaaaatgtagtatatatatacaataaaatattattcaatcttaaaaaaaaggaaaccttaccatcttcaataacatcgatgaacccgaagggcattatgctaagtgaaataagccaatcacagagggacaaatactgcatgattcttcttatttgaattatctataacagacaaacttatactgttggagaatacaacagtgattgcaaggagtaggcaaaattgggacttgttcaatggatataaagtttcagttatgctaaatgaacaagttctagagattttctgtacaacatagtgatggttttgtgcacttcaaatctttttaagagaatygaacttatattaagggttctttcaaagagaaacaaaaataaacaaagacacacaaaacaagtaaacaacccaaataaaaccaaaaaagacataattaaactttggaaggtgatgtatgtggctattactttgatgtggtaatggtatgacaaatgttttcatatgtgcaaactaattacgtgatgtacattaaatat

SEQ ID NO: 326092 - DNA, 396 bp, Homo sapiens
acagtctgctttggtattgctctaaaacaatgtaggcagttytgcaggcaaatagaatttacacatgaatattcagcattgtgagtccatcctgacaatttgatggttttgttataaagagtggttttgtcctcctgtgcactattgtagtgtgttgaatagatgcctcaatgtgatatattcaagccccaaaccctggtgcttgtatatgtgaacttatttgtagataagatctttgtagatgtaattaagttaaggatctctagaggagatcatcttgaactttgggtaggccctaaattcagtgaaagtaccctaaaaggagtcagaaaagaagacacagaaatatacaaagaggaagcccatgggaagacaaaggcaatggttagaatgaca

SEQ ID NO: 326093 - DNA, 593 bp, Homo sapiens
aacagtcccatatctggactactcattttctttataatactttctgccttaagagtagccttgagtattttagtattatttattttcttattattgagatttgcttttttaaaaagtcctgcatagaattcacagacaggaatgcgattttaaattattttctcccattccatggcttatctttccattttctgtgctttttgaagagcaaactattttaaaattgataaaatccaatatgttaagatttaaacaattggtttcagtgtgacacctaaaaactattcgactaacctcagggcacaaatgcattgttctatgcttattctagaaattttatggttttaggttttatgtttaggacaatgccttattttcagctcgtttttgtatagcttgtgttttttgttgtttgttctgcctttgaatattcaaggtatttcagcactatctgttgaaaggactactttttctcattgaattgaattctattgtattttaatctactgacaaatatgtacagtactacttctgsgatctcttttctctttttctgctttatatgtctatattttttccgatatgacatcatt

SEQ ID NO: 326094 - DNA, 430 bp, Homo sapiens
tagcttggcaaagtggtcaaaaacaggttgcaagaatagtctgggccaagccattcctccataaactacaaaagaaccctaatttcacagttccttagctttaaaccaatttaagtatattaaacccttcagcatctatcatcatggtagctgggtggcgggggtgggggtgggtacaagtacaaagaccagagtgaggatagagcaatgtgtgagaaaaacctggattctggtatagctctactgccaagaatatctccctgcctggaacagttggaaatgcaagagagtattttatgatttgtctgtttgtttgccaatttcaaagaaatcttgatgtagaaagtttgaaaaacacatagaaatataaagaagtaggaaaaaatcrcccataatccaatcatccagtaataaccactttacactgtgg

SEQ ID NO: 326095 - DNA, 587 bp, Homo sapiens
agatgactgatggatggctagcaaaatcagatgtgggctctgtcctcatggagcatrcagtcagaaggggaagatttacctaattacactaacaaacttatactgtggtcagtgttctgaaggaaaggaaatccagttgtatggtaacgtataacaaagaaactgaactaggatggagatgggggtggtaagtgtagttggggaagccagggacatgatctgtaagatggctggcctggattcaaattccactccacttacttgctgtgtgattttagattagtcgcttctcctctctgagctcaacttcatctataacaatctttcctagggttgttaaaggattgaatgagccactctatgtaaccacttgacacatattaggcacttcagtggctccttttccagattaaagaaggagaaaacgtgtatgtttggagttagcacaagacaggatgattcctcatgtttgttttggaaaacaagtcttaaactcacagccatgacagagtctgacatcatcagacatcaggcgtgttaagaattgcactcttaattgaaaatgtccagagtttgtgattaattgc

SEQ ID NO: 326096 - DNA, 587 bp, Homo sapiens
agatgactgatggatggctagcaaaatcagatgtgggctctgtcctcatggagcatacagtcagaaggggaagatttacctaattacactaacaaacttatactgtggtcagtgttctgaaggaaaggaaatccagttgtatggtaacgtataacaaagaaactgaactaggatggagatgggggtggtaagtgtrgttggggaagccagggacatgatctgtaagatggctggcctggattcaaattccactccacttacttgctgtgtgattttagattagtcgcttctcctctctgagctcaacttcatctataacaatctttcctagggttgttaaaggattgaatgagccactctatgtaaccacttgacacatattaggcacttcagtggctccttttccagattaaagaaggagaaaacgtgtatgtttggagttagcacaagacaggatgattcctcatgtttgttttggaaaacaagtcttaaactcacagccatgacagagtctgacatcatcagacatcaggcgtgttaagaattgcactcttaattgaaaatgtccagagtttgtgattaattgc

SEQ ID NO: 326097 - DNA, 522 bp, Homo sapiens
tttctaggtcttaggtgggctcccccacagaagacaaatcatcaaagggtagtggctcccatttcccaacctccccacattatgcaccactgaatgcctaagggaaaaggaataaatagccaggtagagttcaaaccagagaaaaatggaaaccagattctctgagggaaaaacrcaatcaacaacacagcaagcagtgagagaaacctggaaagcagaaatgctaaagcaagtgagtgaggctcttgcaaaaggaaattagatatgagctgccaggtgatatagcagctgaaaggtcagtgctattttgggctgaatatgaagaggcttcaggcatctcaggaccaaaaaaataaaaatgtacaaactagagagggttcagagaaaggcaacagcattgattaaagaagggcggttggctttgtggtgaaagattaaaggcatgagataggcaggtgcagcaaggggagttgatgccaattgtatattaatagcactttgcggtgacaaagcactcaacac

SEQ ID NO: 326098 - DNA, 567 bp, Homo sapiens
tagattctgtgtctatgaagggagaagcacagttccaaaggctttaattttcaagcaaattaactgatattttcatgtgactgggttaaaatgaaaacaaatcatgacttatggattgcatctaaagtcagaaaagaattttagtgtcactctgtatgtttgtgaggacctaactcctgcatatttatcaaacatacagaagagatattttctagtttttcctttttgatattgcaacagttttattggtgtacattatatcattatttcyatcttggtggaagaagatggaggaaactacattatatcattatttctatcttggtggaagaagatggtggagagatataaaagggaaaatcaggggcagtgtggagaattggaaatgaaataagaaaaaaacaaagtgaaaagatgtgggcaagagaagagtaagattcaagttcagtttttgaagacatttatgtcctgctttataaaatcatcatgtgacagtcctaataaaaagaagaaacaagaaatgttttataagcttgtatttcctatccaataaagtagtatttacaa

SEQ ID NO: 326099 - DNA, 557 bp, Homo sapiens
gtaggggatgggaagaaatcaggactacactttcattgacttcacactaatacctaatttgtaaatcacaagatttgactaagcaaagcgtctgtgctcttaccattttgctgcttgagataagagaggctcagagagctagaggggatctgagagagacttcagcagcctcctcttagaacaacgaaaggaaaaaaaaacaatctctcagtttcgggtcattctttctccctctccctacaacctacacaaagtcctcgtccaagaaagtaatcaggtctttacaagaagtaatttcaaagcttctgtgggttctttgtgtagctaggtgaacagccattaagaggtacatggatcggcaaagagktctattcctcaccctggcaggcccaagggggcacagtgttccacggagaggtatgaatgaatgaaattaatgttgctttacttgggaatggaaaatacaagtatggcagtaagagctaaagccttatacataggttactttggaaaagatttctcttctacctttagtattaggtgattgcttctgaagc

SEQ ID NO: 326100 - DNA, 489 bp, Homo sapiens
ccgtctcctgatggaacgtttttttagtgccccttgcagtcatctcccctccctctccctagcacccctggatacaggtagaaattgctccacttcctatccactatagattggtttacttgttctagaatttaatataaatagacttttctaagtataacgtctatgtgattcctccatgctgttgtgtatctcagtagctcattcctttttattgatgagtaggatttgattttatgatatactctaatttgtttatccaatcattaatttactagaacccacccttatttgggttgattttagctgctataaatgaagctcccatgagcattcatgtaccagccttttttataaacataagttgttagttctctggagtaaatacctaagagcrgaatcactgggtcacatgataagtaggtttaacttcataagaaactggcaaactgttttttaaacgtggtcactctattttacaccttactg

SEQ ID NO: 326101 - DNA, 638 bp, Homo sapiens
caattaatgctgtgactggtgagtcacaaagcaaaatgcaagctagtaaaggcatcattttctctaaaagagttggaaacttgggagaatatttttaatggctggtgtttaagattggcctttggtctttctctagtttttatagtgtatattttgtaaactccttccactactcacccacaccttccctcacacttggcattggatttgatgacttgaaatggaaatcctcccatatctctaaacagatctttctagtacagaagtttcactggactcccaccttaatcagtaagagatactatatggttctcagcatcccctgccaagaactttactaacatgattgattcatttggcattaatcttccctttttctgttctgtgatctaggttatgatggggcagtgcctgagagaactgtagcgccagtgagccaaatcctactttccgcygtaaaatttctttttctattgggggtttcatgcttagcctcttactgtttgtgtgagggcaaaatgtgtctgacccaaagatattctaatagcacatcctgggaagcccagccagccaaaaacatcattggatgttcattttgttccctagttcaaagagagaaaagcaaatcataccttata

SEQ ID NO: 326102 - DNA, 567 bp, Homo sapiens
tcaggtcagaagcttcagtgggcaagaatggttgccatgaggttaaaacccctccttctctaagttgtcttctgtaagcacactgtggatagcaaatgttcttctgatgttcacctctcaaagaaaagtccacatatttaggttcccaattccagacattctttcttcaatatcttcagaagttgattctggtaccaaaccaaaaagattgtgggttcaaactactaggaagtaattaggcgttgatggactgtaccgtctgctggctttatggaggttgagggccttggagctgagatcttagatccaaaattcagtatggcagaccacccacaatatcagtcttctgacaaccctcaggaaaatgccgagtacaagagaccatgagccaaggagcatagttttctttaacagaaaatctttttttctctctctccaaacacatccacacacacagacgaatacacacatcccacatggatatatcatttataatccctatctttaataacttcccaaatatwaccaaacaaatacagcacaatttgtttatacattggtttcagg

SEQ ID NO: 326103 - DNA, 526 bp, Homo sapiens
tgtggtggcatgtacctttagggtagctaaggtgggaggattgcttgagactgggaggcagaaagaaattgtagtgagccaagatcataccactgcattccagcctgggcaacagggtcaagaccttgtctcaaaaaaattggattcattcatttaacaaatattgattagttactgggtatcaattatgtgcttaacagtaggctaggctctacggcaaatggaaaggaagaaggtataatttcccctctccaagagcctgcaatctggttggcaagtctgcatacatttatataccaagtacartctagactgtggacaggaccagcatgttttatgctcctggatatgtttcaaggaaactttggggatctcatagcaaatcatcccaaagcatccaaaaggtgcaacataaatattactaagttcttcccaatttgctacttctctattctcctcttccaaagctgttctttcttgagcattttatactttaagccgatttattttaatgccaaagaatgca

SEQ ID NO: 326104 - DNA, 530 bp, Homo sapiens
gtaacaaacatgcacatgtactctctgagcctaaaataaaatttgaaagaaaaaayaaatttaaaaattaatagttaaataaaattatactccatgaaaaacaacaaccaaaacaaaatattgcaagtctacatttaccaaatcagcatggtattggtataaacatagacacatagactaatgaacagaataaggaagccagaaataaagccacatacttacatccaactgatctttgacaaagttgacaaaaacttacattcgagaaaggacaccctcttcaacaaacggttctggggaaattggatagccacatgcagaaaaataaaactgaacccctgtctctcatcatatacaaaaatcaactctatgtggattaaagtcttgaatgtaagacctggaacgctaaacatactagaagaaaacctagggaaaactctcctggagtaaaaaatatatgactaaggccttaaaagcatagtcaccaaaaacaaaagtagacaaatgggacttaattaaactaaaaagct

SEQ ID NO: 326105 - DNA, 530 bp, Homo sapiens
gtaacaaacatgcacatgtactctctgagcctaaaataaaatttgaaagaaaaaataaatttaaaaattaatagttaaataaaattwtactccatgaaaaacaacaaccaaaacaaaatattgcaagtctacatttaccaaatcagcatggtattggtataaacatagacacatagactaatgaacagaataaggaagccagaaataaagccacatacttacatccaactgatctttgacaaagttgacaaaaacttacattcgagaaaggacaccctcttcaacaaacggttctggggaaattggatagccacatgcagaaaaataaaactgaacccctgtctctcatcatatacaaaaatcaactctatgtggattaaagtcttgaatgtaagacctggaacgctaaacatactagaagaaaacctagggaaaactctcctggagtaaaaaatatatgactaaggccttaaaagcatagtcaccaaaaacaaaagtagacaaatgggacttaattaaactaaaaagct

SEQ ID NO: 326106 - DNA, 531 bp, Homo sapiens
attcagatcttagaacaataggtaaagtctactagggatggtttttttttctaaataaagggacaactgggaaaacttcagaaatggggtatatggtaaacatctactagattttatcatagatatagattaaaagaaatatgggtacaaagatataagtataatgtagaaatattacatgttctgacartgtaatgatgcaaacaaaagagagaggataaaagagaggtaaaggtaaataggaaagagaaataagctcttggtagtatattttatatgtgagaattaaaggatcattaaaaactgataaataagaaggtaacagacaactgaaaaaaattatttgcaatatacagccaaataaagggctagtatccctaatgtataaagaactattaaaattgagaagaaacaccaaaagcttggtagaaaagatatgaacaatttacaaaaagagatataaaattgacccttaagtatttgaaaagttattcagcctcactgataatatagaagtgcaaattgaaacta

SEQ ID NO: 326107 - DNA, 316 bp, Homo sapiens
tggggctcagagtgttgtactcgtaaaacaaggatcatcgatgttgtctacaatgcatctaataatgagctggttcgtaccaagaccctggtgaagaattgcatcgtgctcattcgtactagcacagccgtgccgactagtggtaatgatgtcccactaygtgctgcccctgggccgcaagaagggagccaagctgactcctgaggaagaagagattttaaaccatcataacgatttaaacaaattcagaagaaatatgatgaaaggaaaaagaatgccaaaatcagtcatgtctcctggaagagcagttccagca

SEQ ID NO: 326108 - DNA, 363 bp, Homo sapiens
ttccctgttgctctttgagcttcttatatttgggtgtctagacctctaacaaggccagggaagtttttctcaattattccctcaaatacgttttccaaatgtttaggtttcccatcttccttgggaacaycaattatccttaggtttggttgtttaacatagttcccaaacttcctggaggttttgttcattttttaaaattcttttttctttgtctttgttggattggattaattcaaaagccttggtttttgagctctgaagttctgtcttctacttgttcgattctattgttgaaagtttccagtgtattttgtatttctcgatgtgtgtcatttcccaaagttgtccttgttttttatt

SEQ ID NO: 326109 - DNA, 566 bp, Homo sapiens
cttttctgttactgatttctaatgtgattcccttgcagtcagattccacacttatataatttaaacccttttgaatactttgagacatttttaggtagtgaagaatatggtctatttcagtaaatgttctgtgtgcacttgaaaataacgtttgcccatattgttgagtggagacttctataaatgtcagtgaagtcaagatgggcgtagtgttgtttcaagtcttctattttcttatttctccttgttctaccaattattgagacaagggtgttgtaatctctgattaatattgtggctgcatatattttttcagttctatcaatatttgcttcatatttttaaagtatctgttattagttgcatacatatttagctctgttatgtactctttatgaattgacttatcattaygaaatgaccttctttagctctagaaatagcacatggcatttactttgcctggtattactatagccactctagctttcttagattaatgtaggcataatattactgccctccagtcttttacttttaacctacacatgtctttatatttaaag

SEQ ID NO: 326110 - DNA, 575 bp, Homo sapiens
tcatttctttttcattattgatagatatttgtgttggctctagaattcttgctttacagttttttgttctttcagtaccttaaaaatgtcgctccactgttttctgacatgcattgtttcccatgtgaaatctgttgtcactctcatttctgttccttattacataatatgtcttttttcctgtttttactttaagattttctcttcatcactggctttgagcagtttatgatgtcctrcaattttttccacttgcattttgttgagcttgcttttaatttctatcacatttttaaatgccctccaacatttcttcaaatatttttctatgatccttcctaatcatcttcttataggactctagttacacatactcaggaagagacaaatggaattggagtgcaaccaaaagtctctattacttgaatattctcaaacaaaagatcctattccacttttttactagtaccttcttgacttccataattcacaatagccactttaaatcacacttctaaacatcatagggtataaataaatatttctacaattgttcccctttcagagactacaca

SEQ ID NO: 326111 - DNA, 340 bp, Homo sapiens
ttcatgcagtagaataaacacaacgacatgataaatgattgaaaaacaaaatatcagagtattcaaaacaacacagaaagttagatgacaatagagcaatgccttctaaactaaggggaaaaaaagatctgtcacccagaattcaacatgaaattatcaataaaaaataaagataaaataaacatatttccagacatgtaaagtcaaaacattacctctatkacttctttcttaggaacctactagaagatatggtgcacacagtaaataaataaagaatggggtttcaaaaaatggaaaagaaaaagtacgagaaataagggatctagtatagaagaaa

SEQ ID NO: 326112 - DNA, 562 bp, Homo sapiens
aaaacaatttgttgtttttttcccactagggtcttaaaggatgacaggatttccacctcaaaacataggttgctcttggaacgtggagaagtcttcagctgggctgtrtctggcagccaggggcctcttcacagcactcctttgccctgtttgttatttttcttgctatagatgccattttgaacttgtttgcaagaaccactagtcaccctaagacatcgaagcatatttgatttttgtttctcttcttacaactagaaagataggattagctaagagatcgcatgctcattatagaccttctccttcacatgcctttctgcacaacccagtttattcatatatttcctcctatactctcctccaacatattttatttagtatttgcttatttattttactttattgagatataatttacatacacatatattttaaggtataatttatatatacatataatttgaggctgtttcaaaagagatttttttccttactgctgtgcttagggttggaaatctctgcagctcacatgggcttctcttttttttttttttttttt

SEQ ID NO: 326113 - DNA, 470 bp, Homo sapiens
taaatgtatcaaatattctttgctttttgtccttacagtacatttcctttcttaaaaaatctttatgctttaaaaaaaaagttatggaaaaaaattcatgcactacagataaagcaaaatttgtatttgatcccggtgaactcttactccgttccctaagataatttattatatgagctgaataggtaaactttcaaaactttcttaaaaattcatttatgaatatatcatcctatttttattatcatgtttattcttaattgcctttaagacacataaacttcaatttttttcttytttaaatcataatctataccctaaataaaaaaagaacataatatacttttatgcttgtttctctttacctgaccctgccatcttccatgttaaaatcagaaataaagctattttatgtgtgcatgcatgtgtgtgtgtatgtgtgaaagagagagaaatcgtaattaatagtt

SEQ ID NO: 326114 - DNA, 600 bp, Homo sapiens
atttttcttgagtagcacacctctttgattctgtgagctttaggtggatgctcagttcttgatcccccacctcacatcagctatgggtatgttttcactcctgcaagtgatttaaaggtrtatgtccaagcacttagcccttaaagcctagagctgagtttgaaaccccggggattgctacagtgtctgtttaagcttatggctctggctttgacttctatttgtttccagcacttgaggaatttttgtttcttatttttagcaaagtattattttgaaagtattttatccagtatttctctgtgtttggagcaggaaggaagcccttacatattggcttggactataccatgttataagaattttctgttttttttaacattgatgtaatttgattgactcttaatttctttctattttaaggatattggttgattctctaatagctttttaaaaattctgttttgggattgttttaacttttcttttccctccagtgcgtttttcaaacattttttgttttgtgtgtatctggtacctaataaatattcagtaaatgttttctaagtgaaaataagtcaaatgtttagtttgtgccaa

SEQ ID NO: 326115 - DNA, 496 bp, Homo sapiens
atgttttaatgtacttacttgtaatgtatttgtatcccatactttcagagttttatcaaatgagcttgatgtgaacatgccagtgtcatgaggataccactgtacagtctccacactgtatctgtgaacatcaggatgatctctacaaaacagcaatcaaaatttacattaactgacttatgtgagtttcaaaactggtactatattaagaacaagtagtagtctcaggtaggatgatatgaatggccaaaccgagatcacatgcctgtgtccaagctgtgtagaaggcgagaaagaatgtccaggcatctctagattcaggctcccactgtgtgatgtagagacatacctcctactaagggtcacaatgtgaaagattctctgtttttgtactatatacagcctggaggcatcagccaactacactggwcttctttcatcttgaaagagtgatttggtcttactggaagagacagctgttttggttttggatttg

SEQ ID NO: 326116 - DNA, 597 bp, Homo sapiens
atcaaatgttccaaaactgcactgggaaagaaaccaggatttaaattcaacatttttgacattatacctaatcttcaggataatgcccttctaagctctcaacgtctttccaaagcaggggtgacacggtcatcaccaacagatgatgcttagagagtaggtgagagattatttctgaattttgtgatagaatcttaatataagagaaagaaaagagaactaaggtttacttgtatgtctggaacrtgtgctcagtgccatgtgaggcaactttcaatggattatctcatttaacgttcactgtgatccccagggatggatatttttgcttccattttataaatggaagaggtggggctcagaggtattagataactattgccccagttcacccatcctatcagaggctgcacagtgcttcagcttagttctttttggaggcactgcatttcctgtgtaactcatttgcagagataggcttagggatgatgcttagttgatatcatagcatgagacaagctttcccgaggagcatatctaacattctgttttgttacattctatggcaaaacgtacatgaaaattttaaaaaggaag

SEQ ID NO: 326117 - DNA, 597 bp, Homo sapiens
atcaaatgttccaaaactgcactgggaaagaaaccaggatttaaattcaacatttttgacattatacctaatcttcaggataatgcccttctaagctctcaacgtctttccaaagcaggggtgacacggtcatcaccaacagatgatgcttagagagtaggtgagagattatttctgaattttgtgatagaatcttaatataagagaaagaaaagagaactaaggtttacttgtatgtctggaacgtgtgctcagtgccatgtgaggcaactttcaatggattatctcatttaaygttcactgtgatccccagggatggatatttttgcttccattttataaatggaagaggtggggctcagaggtattagataactattgccccagttcacccatcctatcagaggctgcacagtgcttcagcttagttctttttggaggcactgcatttcctgtgtaactcatttgcagagataggcttagggatgatgcttagttgatatcatagcatgagacaagctttcccgaggagcatatctaacattctgttttgttacattctatggcaaaacgtacatgaaaattttaaaaaggaag

SEQ ID NO: 326118 - DNA, 515 bp, Homo sapiens
taaacatcctttttaaatttttaataaagtttgttttaaagctttgaatattattctaacaatacaacattttcgttttaaagctttgatagttattctaacagtacaacactctttatcaatttgatgctatcaggaaagttactgattttcattgatattaatagattttaaaagatagcattttmggcagttttagatgagcattttgtccaaaggtgcacttctcatagattataaatgatataatacaagtccaaaaaatcctaaactgtagaggtgtagggattcatttctaaatgcttttcagtgaaataaccttattctttattagtttaatattttcatgactcaagttttttgatagtttctaatatagtccattatttatggtgcacttaaaactttattctcaaatttcctatcttggctataaaccagatgcctgggggctgcagacacaggaattgagattcacagggtgcagtccattcagtcccctggctggtgttttc

SEQ ID NO: 326119 - DNA, 523 bp, Homo sapiens
ctaagaactaggcatacaaaataattaatacatgtatatcatatttatttaaacaccatcaaccctcaagaaatcctgggtagccacaagataatgaattgatcttcccaaaagattccctaagttaatggtaggtttatagttagtgatttttcatctgggacatctccagtgtgtggaattattcaatgggagctttgttgcaacaaaaatctcagaagtatttacataatttttttttctgaaaaataactctagcttaatttttacatgtactttaaaatgtatagacagtttctttttctcttctgacatttccttgaaaagattttctggagtagcaggaactgagtagaagcaccaactcccagagaggctactaacaaaaggaagaaatggacgtctgcaawtattatcaagatgcaaatgttattatctgtgctagtttcctcctgctgtgtagtggtagttccataaactttgtggctcaaaacaacacacgtttctttttgaaatttcatag

SEQ ID NO: 326120 - DNA, 550 bp, Homo sapiens
ttttggtagtctacttctaggaaggtgttattgcggcaatgaggagcaatccacttctcagtggtaggagtatatttttcttctgacgtgtcttctcccatgcattttggtttctgtctgtcctaaggcaggaatgccagctcacactaattgaggaatgcaaacagtagaaaggaagggctcggtttctttggattgtttggaagatctatactatcagttgaattcctaagaagttgatttaaaaatgatagttacctagctaaagcaacatttttggtcttcatattctagctgcagttcrtaaatctttgtccacaaagggttcggtttttattgagttctattatcaagatagtagctgtaagtataaaaaaagtattgatttttgagacatgaagtgaccagtgtgtgtggctggataacaagaggtgacatttctgagtctcagtgtcatccttggagaaggcggtgatggtttttcctactgagagctcctgtatcaaggagggtgccatccgtaaggtctggcaggtctcacgtttgagtg

SEQ ID NO: 326121 - DNA, 581 bp, Homo sapiens
gtggtggtttacattcctgaaatcagtggtgatacccaagtcacggcggcagttagctgcctaccwgctgggtgaagtttgcacacaggtcttgttttgtaagcatagtgtttaaaaaaaaattggtatcttgaaaaccggatggcataatatacaaataagaatctcttgctgttcttaaggaacccagaaaaattggacacctaacagggagttctcggtggcaggggtgaggcaggatcactcgctacgccttgtcatctttatttatatatcgcctgtatcaatcttatttatgactgccagaattgccaagaattggttttgaggtatactctactacttcttggtttattttgctggctataatattccacccagtgcttctatttcaaatagttggaagagtattcagagttatagaatctatgtattggatcataagcaacccacttagctctctaatacctgaaaattttctagctttgccttttatgctggactcccgctgtgtccgtgtggggcactgtgtgactccctgggttcaccatgcaagaagaaaacaataaaaatagtaaaag

SEQ ID NO: 326122 - DNA, 581 bp, Homo sapiens
gtggtggtttacattcctgaaatcagtggtgatacccaagtcacggcggcagttagctgcctacctgctgggtgaagtttgcacacaggtcttgttttgtaagcatagtgtttaaaaaaaaattggtatcttgaaaaccggatggcataatatacaaataagaatctcttgctgttcttaaggaacccagaaaaattggacacctaacagggagttctcggtggcaggggtgaggcaggatcactcgctacgccttgtcatctttatttatatatcgcctgtatcaatcttatttatgactgccagaattgccaagaattggttttgaggtatactctactacttcttggtttattttgctggctayaatattccacccagtgcttctatttcaaatagttggaagagtattcagagttatagaatctatgtattggatcataagcaacccacttagctctctaatacctgaaaattttctagctttgccttttatgctggactcccgctgtgtccgtgtggggcactgtgtgactccctgggttcaccatgcaagaagaaaacaataaaaatagtaaaag

SEQ ID NO: 326123 - DNA, 188 bp, Homo sapiens
aagtaatatactgaggtgattttaatttataaaccgtccaacatattcttaagtcactattgctttcaccctaaatgactgtttaaaaaaaaacttgaattgcataacattgtaaaagatggaggttagatatctttactrtgatagtatgctttaatatcctggagagatgttcacaaaaacagcag

SEQ ID NO: 326124 - DNA, 488 bp, Homo sapiens
caagtaatatactgaggtgattttaatttataaaccgtccaacatattcttaagtcactattgctttcaccctaaatgactgtttaaaaaaaaacttgaattgcataacattgtaaaagatggaggttagatatctttactgtgatagtatgctttaatatcctggagagatgttcacaaaaacagcagattacatatctgtaacttgtgtttttggaaaataaagaaaatactgggtggtgggtgggggggtgttaagtctgtgtttactgtaagtctccaaaacagaattacctgatgaagcaggccccaaaagcaaagatacggaacaatttcaaaaccatgtgtaaagaaaataatactggcatgtctaattctaaataagagtctraattattttggaatgggtcctgcaccctggctaaacaaaactagagtttgggaattgtactaaaaacaaacaacaacaacaaaaacagcaacaagca

SEQ ID NO: 326125 - DNA, 618 bp, Homo sapiens
gactgtcactaggaaactgctagaatctctagacaatgaacattgagccatttcccaattgttttagcagttctagtacacgtctgcatgatatcttcactacagtgaggcatcccttcttgtagtggatttattctttatgaggtttccttgactcatgtatatacagttcatgcaagtatccccataatgtggtagcaggagaaagaaagatttactcatcccttttcttttggaatgcacaaattaaaatctaaaggtagtaaaagacctttggcaagtatattggcaagtgtagaagcttcctcacatgactggagaggacctgtggctccccagcttttargccctctgtgctcgatgtacaggatggagcaatacagtgttttcagagcaccgtaagaactgactcatgtcacttaaccacacttttgtacccataaaggtctgcattaaattaccacacaggcttttctactttgggtttaacagccccagtttattgcaccatgtatgcaaggctacaacagtcaagaaaatgctctcaaccttttccagagtccacatacccctcttcatggcagctcatgcatgaaaatgtgggcatcgggagagaga

SEQ ID NO: 326126 - DNA, 618 bp, Homo sapiens
gactgtcactaggaaactgctagaatctctagacaatgaacattgagccatttcccaattgttttagcagttctagtacacgtctgcatgatatcttcactacagtgaggcatcccttcttgtagtggatttattctttatgaggtttccttgactcatgtatatacagttcatgcaagtatccccataatgtggtagcaggagaaagaaagatttactcatcccttttcttttggaatgcacaaattaaaatctaaaggtagtaaaagacctttggcaagtatattggcaagtgtagaagcttcctcacatgactggagaggacctgtggctccccagcttttaagccctctgtgctcgatgtacaggatggagcaatacagtgttttcagagcaccgtaagaactgactcatgtcacttaaccacacttttgtacccataaargtctgcattaaattaccacacaggcttttctactttgggtttaacagccccagtttattgcaccatgtatgcaaggctacaacagtcaagaaaatgctctcaaccttttccagagtccacatacccctcttcatggcagctcatgcatgaaaatgtgggcatcgggagagaga

SEQ ID NO: 326127 - DNA, 586 bp, Homo sapiens
tgccttaatttcattgtttacacaaaagtcacccaggagcatgttgttcgatttccatgtagttacatggttttttgagtgattttcttagtcttgacttctatgtctattgcactgtgacatgaaagtgtgcttggtatggttttggttcttttgcagcttctgaggattgttttatgtctaattatgtggtcaattttaaagtatgtaccatgtgacaatgagaagaatatatgtcctgtagttttttggtggagagttctgtaaatgtatatcagattcatttggttcaatgttgaattcaggtcctgaatatctttgttaattttgtgcctcaatgatctgtctaatactgtcagtagagtgttaaagtctcacattattattgtgtgtgagtccaagactaattgaaggtctctaaaaacttatgaatctgggtgctacygtgttgtgtgcatatatatttaggatagttatgtcatcttgttgaactgaatcctttaccattatgtaatgcctgtctttgtctttttgatctttgttggtttgaagtcagttttgtctgaaattaaaatggcaaaccctg

SEQ ID NO: 326128 - DNA, 648 bp, Homo sapiens
gaaaacatgctgtgatcttgggcrtcttgaaggggaacactcaacccagatgtagggatctggagatggatgaaggaacatttcttagggaggtcaaggcttgagctggatcttgaagcaattgaccagtgagtgaataagtggaagagtagatgttcaagaaaagcaaatgaataagctggtgcaaaggcctgaaatgggaagaaaggacatctaagctggagaactggaccccagggtggggattggagaggtctctggctacacgctgatatgcagctcaggacaggcctcctgaaccatgctaaaagaagttagttcagatttatttttcatgagttgaagaaaagccatgaataaaattttaagcaagatattggcatggtgagagacaagtagttgagaaagacttctctgtgggtataagacctggaaagcagtgtggctgtagtggtgaatacaaggagagtgatgtagaggtcattgcaggcaaccagcaggtaggcattgggaacctgaaattagcagggacaatagggatagaagaagggatgggtaaccagcaatttagtagtgggaagggcactgtcttttgatcatgtagatgtgtgggtggacagcagtagcacaagtctgcctaatctacag

SEQ ID NO: 326129 - DNA, 573 bp, Homo sapiens
atgttttgatcatcacacttttaaatcaaacacactttagttcattggtaatacattctggatttttaaaacaaatggaaaaccaaccaaagaaaatcttatgaatcacatgaaagttacctttaaaactgtaggaattcaaagtaattcagtacaagaacttctttttcaaagtaatacaataatgatttatttgtttggaattctgtgtcctaagtcaagcaaataagatataaaaaattacacaaacataaatttcaaaatgagagaaaacttacaactcttgacttccaagacatttagcaaagctaaagaagttggaatttaaaagtggaaaaacataagaaaaatagactaacaaattaagattttcatatctattagtattacatttttcttagattttcacatgctatggttttaatgctccaccaaaatttaygttgaaatttaattgctgttgtaagtattaagaggtaagacctttaggggacaactaggtcttgagagctctgtcctactaaatgggactaatgccattgtctcaggagtgggttagttataactggagtg

SEQ ID NO: 326130 - DNA, 554 bp, Homo sapiens
gaaagttagtccaaaggagcacatccatgctcaagagataagaatgaatcaactcctgatggggaatgatggctggtactcttctgcccatcataactaactctaccctcccaacaatctagggtataggtaccagtattacattcatcttacacagtaggtagaaaggagcttaacaacttgccaaagattactgagcttttaaatggatggcctgggattatgaagtcaggccaccctggctggctccagggtccacaatcttaacccacgtgcgatggactctttcagtgaatgagttggcaggatctcccagattcctaattccttcctgtctcaccagagttctattgacagattgagtttgtttgctttgaacttgtcagacaaaataaaatgtgrtgcttttgaaaggcccttggtgggaaagcggggaatgaaatggtttggctggagagagaacactactccacatcttcactactgagatttcaacccagttgttatgatttcagtgctgatttcacaaagtcatcgattcgaaagcttccccc

SEQ ID NO: 326131 - DNA, 576 bp, Homo sapiens
gacaataacacaacaatttatggaagagctaaacattcctccctatgctatcacacaggcaatgggtaagtactgcattttaaatttagtgctttctaggacaatcataccccaaaagagctctaatatgtctgaaacaagtaatgctarcagagttgtctgcctcatttcctaatgcttcaagctcttattaggctgaataattaagaaaactattttttcttctttgtttttccaagtatgataactttcttccatacatgtctatataagcttttactcaaggacagctgatttaatgggttgtgatgacggataattaagtctcttaattattctcttaggattattgtagctgtgaaaatcaagccacatacacatacattcaaacagcaattaaaaatattgaattgctttttaatttagaaattatttctggttttggaagctatctctggccccaatatgctcatcattatatttgcatattcaaagactttatcagtcttcataaccattttgattggtctacctcctatggtgttttgacaaatattattataatctgttagattt

SEQ ID NO: 326132 - DNA, 576 bp, Homo sapiens
gacaataacacaacaatttatggaagagctaaacattcctccctatgctatcacacaggcaatgggtaagtactgcattttaaatttagtgctttctaggacaatcataccccaaaagagctctaatatgtctgaaacaagtaatgctaacagagttgtctgcctcatttcctaatgcttcaagctcttattaggctgaataattaagaaaactattttttcttctttgtttttccaagtatgataactttcttccatacatgtctatataagcttttactcaaggacagctgatttaatgggttgtgatgayggataattaagtctcttaattattctcttaggattattgtagctgtgaaaatcaagccacatacacatacattcaaacagcaattaaaaatattgaattgctttttaatttagaaattatttctggttttggaagctatctctggccccaatatgctcatcattatatttgcatattcaaagactttatcagtcttcataaccattttgattggtctacctcctatggtgttttgacaaatattattataatctgttagattt

SEQ ID NO: 326133 - DNA, 581 bp, Homo sapiens
gtgtgcagggcaagtcagcccctagacagctctgtacccagtaactgaggcctcagaaggcagagagaagccaagtaaagggcaaggagggtgttagggtgttttgtttccttccttcraggctatagatgataccactacaccctacaactagctgccagcacctagtgcaaacatgctgagattttgacctgctgaatacacatttggactgaatactgaaaagtcgctgagaagaaacacaagggggaagaactgtcaaatggcatggcatattactaacataaaaaaagaagcattcctgttgatttgaaaagaatatcaagagaagctagaagccttaccatcgccccttcaaataggttatcaaatgctagcttcagtcctaactctatattttcatgtaagttcttaaattaagaggctcagggaaccaaaattttactatgcaatgaacatcttggccattgggttacaaatgaattgatcaaacttactttgtcttgggattggatttaggttacctattgaagactggtagccaaccaggcgtgctgtctttcagtgaggtggcaagagac

SEQ ID NO: 326134 - DNA, 584 bp, Homo sapiens
tggcctcaaacctgaaacagacagttctccactaatctgaatgctgccaatgtgtttcacacaatgcctaagaaactactcatggagcagctactttatgccaggcactgagaatgtcctgaggatgcaatgatgaaccaaagagacagggcacctgcaaccggggagtttggaatctcaagcgattttccaagagtctccattcgtccctcatacagaagggcayaggaaagccccggcatcaccaacttcctctcactttgtgttcaccagtgactttaccctaagatagtgacgagagcatgatttataatgtaaagctgtgccaagcaaatatctgtcctccactgagatataaatgaaatgtctgcaaagtgccaggcttgtaaaacctcctttggtaataggaggcctgttgtaagtagttatgtagaaagcttatcatttttaccttgagtgcttaggctgggagttaattcaaattcctctcaaaccaaggaagcacaagctgagaagctcacagtaaactcacagtcacccctactcagaggcctctgctacacaaacagcagtgctaaagcaac

SEQ ID NO: 326135 - DNA, 584 bp, Homo sapiens
tggcctcaaacctgaaacagacagttctccactaatctgaatgctgccaatgtgtttcacacaatgcctaagaaactactcatggagcagctactttatgccaggcactgagaatgtcctgaggatgcaatgatgaaccaaagagacagggcacctgcaaccggggagtttggaatctcaagcgattttccaagagtctccattcgtccctcatacagaagggcataggaaagccccggcatcaccaacttcctctcactttgtgttcaccagtgactttaccctaagatagtkacgagagcatgatttataatgtaaagctgtgccaagcaaatatctgtcctccactgagatataaatgaaatgtctgcaaagtgccaggcttgtaaaacctcctttggtaataggaggcctgttgtaagtagttatgtagaaagcttatcatttttaccttgagtgcttaggctgggagttaattcaaattcctctcaaaccaaggaagcacaagctgagaagctcacagtaaactcacagtcacccctactcagaggcctctgctacacaaacagcagtgctaaagcaac

SEQ ID NO: 326136 - DNA, 649 bp, Homo sapiens
caaatcacaggatctcatttttaaggctgtataatattccactgtgtgtgtgtgtgtgtgtgtgtgtgtgtgtgtgtgtgtgtgtgtgtgtcccacagcttctttatccattcatctattgatggacacttaagctgtttccaaatgaaatggcaacctacatgttgggaaaaatatttgcaaagtatacatcagataagggattaatatccaaggtatataaagaactcatacaacatgataaaaaaaatatatatgacccaattaagaaatgtcaagggayttgaaaagaaatttctccaaagacataaaaatagccaaaaggtacatgaaaagctgctcaacatcactggtcatcaggaaaacacaaatcaaaaccactatgagatgtcaccttacgcctgttaggacaggtactctctatgatgaaaaaacagtagacttttcatcacagagaggaaaaacgagtaactatgagagaaggtggatatattaatttgttccactatagtaatcatatgactatatgtaccttttaccatcatgctgtatatcttaaatatacacgataaaatttacttcaaaaagaggggggaaaaagcatactgtgaacagtagcatcaacacaccaaaacaatgtaaataaaag

SEQ ID NO: 326137 - DNA, 649 bp, Homo sapiens
caaatcacaggatctcatttttaaggctgtataatattccactgtgtgtgtgtgtgtgtgtgtgtgtgtgtgtgtgtgtgtgtgtgtgtgtcccacagcttctttatccattcatctattgatggacacttaagctgtttccaaatgaaatggcaacctacatgttgggaaaaatatttgcaaagtatacatcagataagggattaatatccaaggtatataaagaactcatacaacatgataaaaaaaatatatatgacccaattaagaaatgtcaagggatttgaaaagaaatttctccaaagacataaaaatagccaaaaggtacatgaaaagctgctcaacatcactggtcatcaggaaaacacaaatcaaaaccactatgagatgtcaccttacgcctgttaggacaggtactctctatgatgaaaaaacagtagacttttcatcayagagaggaaaaacgagtaactatgagagaaggtggatatattaatttgttccactatagtaatcatatgactatatgtaccttttaccatcatgctgtatatcttaaatatacacgataaaatttacttcaaaaagaggggggaaaaagcatactgtgaacagtagcatcaacacaccaaaacaatgtaaataaaag

SEQ ID NO: 326138 - DNA, 649 bp, Homo sapiens
caaatcacaggatctcatttttaaggctgtataatattccactgtgtgtgtgtgtgtgtgtgtgtgtgtgtgtgtgtgtgtgtgtgtgtgtcccacagcttctttatccattcatctattgatggacacttaagctgtttccaaatgaaatggcaacctacatgttgggaaaaatatttgcaaagtatacatcagataagggattaatatccaaggtatataaagaactcatacaacatgataaaaaaaatatatatgacccaattaagaaatgtcaagggatttgaaaagaaatttctccaaagacataaaaatagccaaaaggtacatgaaaagctgctcaacatcactggtcatcaggaaaacacaaatcaaaaccactatgagatgtcaccttacgcctgttaggacaggtactctctatgatgaaaaaacagtagacttttcatcacagagaggaaaaacgagtaactatgagagaaggtggatatattaatttgttccactatagtaatcatatgactatatgtaccttttaccatcatgctgtatatcttaaatatacacgataaaatttacttyaaaaagaggggggaaaaagcatactgtgaacagtagcatcaacacaccaaaacaatgtaaataaaag

SEQ ID NO: 326139 - DNA, 589 bp, Homo sapiens
tccatgagctttttgcaggtttgctagcaaactgttgcctgattgatggttgttctctgctcacctttgacctcagatgcaaagaccggcacagggagatgttttctcaaatgcccacctctaagaggatggagcccaggccagaaggctgagcagaaggaggtgggaggccaaaaaacatggcaggtccctcacatgggccccactgcctgtgaacttggccacctgtggyttactgcagatgcttgaaagaatttgctatctaagagattgtttccttggagaaggccatttctaagagagctgagaaggtccttgaaagttccataatttatgatgttcatagagtagggaaaatatcaggagcagctttttatttttattttactttttgagacagagcctcactctgtcacccagactggagtggagtggtatgatctcagctcactgcaatctctgcctcctaggttcaagcaattctcctgccttagcctcctgaggagctgggattacaggcaggagccaccacgctccgctaatttttgtatttttagtagagacagggtttcgccatgttggccagact

SEQ ID NO: 326140 - DNA, 222 bp, Homo sapiens
ggtgaaataattcttggcaaagtgtaaggtaaaggttgcctcttggaagcacgtgggctgagcttgatgyggatggttttgttgagtttgcacagtggttactttttattttttattaaagactgaaatggttgtaaatatttgaaaattaagagatattatgtttgaaagtgtgacttttttttttttttttcatttccccgggccctgacattctggcat

SEQ ID NO: 326141 - DNA, 407 bp, Homo sapiens
tttagtttcagctgcctggtctgtagatttttcttcatagagggagaaagctcagaagtaaaccacatggcactgcaatccatgagaatctacttggamtcacctaaaccacgctacattctgtcactgatatagcttgggatcacacattttttctttgtttatcattttaatcttcctttgctctgaagtcttagatattctatatacagcctcctcctcctccacatcacatatattatgagcactaaattaaaatggcaactttgatagaaatactaatctgtgactaaatgtttaacaagggggcaaaaaggatttacattttgatcttcaaacattggaaaataaatgccctcagttgtcagctttccaaattgacaagactgcaagggcaaaacaaaatt

SEQ ID NO: 326142 - DNA, 450 bp, Homo sapiens
ctgacactcttgaaacactaaggagaacttatcctctcttctcctcttacacgctctaaagtatgtgatcacttttccatcttgcacctgatcctaactttgttacgtgactattcagagagtttcttagcctttgggcttgaggattagggacagtttgagtaaatraaatccagcaataatccccaaggctaaagatagatagaaataagtagttcctcccttggttttttttttttttctttttttttcatcagagatattcaggggcaaaaaggtaaatgtcgtaactgtacaaggtgcaggcaggggaagatgatgggagagtgaaaagactcctgggtggcccagacaccaacactctcagctgtagtccagacacgtcatcctgggtgaggtagctggcctcttgaggtcctagtttcctcacccttagaaggaagcagttgc

SEQ ID NO: 326143 - DNA, 609 bp, Homo sapiens
tatgaacagttttctttctttcaagtccgtggttagggcaaactgtcccccgggagaatgtcggtgccttagttgatagctttgtgtttccggaagcctggcttccaataaaggtggttaattgggagaagtggaatggtacattcttgctttccaattaagaacaaggcttcattacaacaaataaggccagcacaatccaatactattaactttgtatttaaataagagtgtaattttaaaggttaaagaaatgtgaaaataagcactaatcyccatttaaagttcttaataatggtttaattgaactctgttaattttctcctccaagattaaatagaactagcgcattctcagtctttcggctgtgtgtgtgtgtgtgtgtgtgtgtgtgtgtgtgtgtgtgtgtgtgtgtacatggtttacacattttgggatttcaggacagctaaccctcaaaagccctgcaggtgaatttttacgtagaccaagacgctccatttccaccacaagctaccttgtaccttttgtatcctccacccctccctttcccctgactttccagccataagcttacgcagaaagaccccttctcccgatcatggggag

SEQ ID NO: 326144 - DNA, 629 bp, Homo sapiens
agttttgatgtatctatgtatcaaatcttttacaatatttttagtttctattgaaaatagggatatggttttccattatatttttcaaacttatttttgcatatattacaattaactgttttcatatgttaatttcataatctgctaccttattgaattgtctttgtttctagactttcctaggcttttcatacctctttggagggttctggaacaagkttggcaagtgcctaaccactcggaatctctgctcacctgccatgcgtgcagggctgtggagttggtgctgtgagcctaaagaggaccccaacgaggctgttatagacaccagagggaattttattcatctggggtgggacataaaaagaggcaaaatgatacactcatagatataaaaaaagttcatcagtaaatccaagctacataaacaagtttccagaaagaatttcagagtatgggagtgttcataccaaagtcaggttaatcagtaaaggctcccaggagctgatggaccaagtctggcagagaaatgcaagagtgtatatgagtccactcaggcttccataacaaaacacatttctgccaagttctctgccactttattatctatttttaaaaaataaacccat

SEQ ID NO: 326145 - DNA, 629 bp, Homo sapiens
agttttgatgtatctatgtatcaaatcttttacaatatttttagtttctattgaaaatagggatatggttttccattatatttttcaaacttatttttgcatatattacaattaactgttttcatatgttaatttcataatctgctaccttattgaattgtctttgtttctagactttcctaggcttttcatacctctttggagggttctggaacaaggttggcaagtgcctaaccactcggaatctctgctcacctgccatgcgtgcagggctgtggagttggtgctgtgrgcctaaagaggaccccaacgaggctgttatagacaccagagggaattttattcatctggggtgggacataaaaagaggcaaaatgatacactcatagatataaaaaaagttcatcagtaaatccaagctacataaacaagtttccagaaagaatttcagagtatgggagtgttcataccaaagtcaggttaatcagtaaaggctcccaggagctgatggaccaagtctggcagagaaatgcaagagtgtatatgagtccactcaggcttccataacaaaacacatttctgccaagttctctgccactttattatctatttttaaaaaataaacccat

SEQ ID NO: 326146 - DNA, 629 bp, Homo sapiens
agttttgatgtatctatgtatcaaatcttttacaatatttttagtttctattgaaaatagggatatggttttccattatatttttcaaacttatttttgcatatattacaattaactgttttcatatgttaatttcataatctgctaccttattgaattgtctttgtttctagactttcctaggcttttcatacctctttggagggttctggaacaaggttggcaagtgcctaaccactcggaatctctgctcacctgccatgcgtgcagggctgtggagttggtgctgtgagcmtaaagaggaccccaacgaggctgttatagacaccagagggaattttattcatctggggtgggacataaaaagaggcaaaatgatacactcatagatataaaaaaagttcatcagtaaatccaagctacataaacaagtttccagaaagaatttcagagtatgggagtgttcataccaaagtcaggttaatcagtaaaggctcccaggagctgatggaccaagtctggcagagaaatgcaagagtgtatatgagtccactcaggcttccataacaaaacacatttctgccaagttctctgccactttattatctatttttaaaaaataaacccat

SEQ ID NO: 326147 - DNA, 629 bp, Homo sapiens
agttttgatgtatctatgtatcaaatcttttacaatatttttagtttctattgaaaatagggatatggttttccattatatttttcaaacttatttttgcatatattacaattaactgttttcatatgttaatttcataatctgctaccttattgaattgtctttgtttctagactttcctaggcttttcatacctctttggagggttctggaacaaggttggcaagtgcctaaccactcggaatctctgctcacctgccatgcgtgcagggctgtggagttggtgctgtgagcctaaagaggaccccaacgaggctgttatagacaccagagggaattttattcatctgrggtgggacataaaaagaggcaaaatgatacactcatagatataaaaaaagttcatcagtaaatccaagctacataaacaagtttccagaaagaatttcagagtatgggagtgttcataccaaagtcaggttaatcagtaaaggctcccaggagctgatggaccaagtctggcagagaaatgcaagagtgtatatgagtccactcaggcttccataacaaaacacatttctgccaagttctctgccactttattatctatttttaaaaaataaacccat

SEQ ID NO: 326148 - DNA, 530 bp, Homo sapiens
agttttgccctctcaggataacttttagtactagttgctgaaaaaggttagcacacattggaaaaacattgcatctgcctggaggtcaggtctttgaaatttttctttccagtactcagctggcaaccacgtcctcactttctcctttataggcaatcgagtatgctgattatataatcagacaagtttactattaattaccatggatttccctaaaacaatctatgagcccatttttacrgtgctataaagacataactgagactggctaatttatgaaaaaaagaattttaattgattcacagttccacagatgtacaggaagtatggctgggagtccttaggaaacttacaatcatctgcaaatgtgaagcaagcatgtcttcacatggtggcgagagagagagcaaaagaggaagagctatacacttttaaacactcagatctcttaagaattcatttattatcacaagaatagtaagggggaaatcttcccccatgattcaaccacctcctaccaggcccctcca

SEQ ID NO: 326149 - DNA, 534 bp, Homo sapiens
tttaagtatacgttctagttttaggtcatttctttgtttgtgcaaagtagcatagygttttagaagcagccaagacacatcttgaatgctttgctgcttagcaatttctttgatgagatactctaaatcatcactctccagttaaaaatttcactgattcttaatgcaggagcacaatgctgccagtcctgttgctccaccatagcaagagtgacctttactccggttcccaataagttcctcattccctttgagcacctcatcctggacttcactgtacctgtcactatcagcattttggtcacaatcattcgacaagtctctaggaagttctaaatgttccctcaactttctgtttcttctagtccctccaaactctttcaacctctgtgcattacacagttccaaagtcactcctacattttcaggtttcttcatggcaatacctccctcccagtacaaattttctgtattagtctgttctcatactgttataaatagctacctgaaacttggtagtttataaagaaaaaa

SEQ ID NO: 326150 - DNA, 630 bp, Homo sapiens
tactgacatcaaatatttccaccactacctagcttctttaccaatcaaagttggagataattttccccctctgggcacatgtaatattttgcatgtaactggaaaatttctacattaacttatataattttatattttgtccattcatttcagttcaaactactgcatgttgtgagggcaggttttagtcattgtccacaaaatttacatgtaataaattaccaataaaatgtcaaggtgaaaaaaagtgattatgtaattatttctaatcattaggtgataaatatagaaaccaaactatccctgatctggcaatatccaattaatgaaggaaacatagaaaatgcatttaataaaacaaacttaaatgtggtgctccatcgtcagagccatttgagttaacattatgtttttactttgtcatatctcctaattttctaaatcttagctttaatatttcttacttatataatagagattagaatattttatgcttcataggcatttgggttgattaattaagttaatgcatacamaaaacagcctgtacttttgaacaggacattttgaatatattgagctattataataggctatgttgggtgtaaatgatagaaaaaagtaaaaatc

SEQ ID NO: 326151 - DNA, 590 bp, Homo sapiens
agaaatgtcacccgacattactttgtgcagcattggtcagaacttcttacatgcctattcctaccccaaacacttacagcaacaacaaggtgcaattttcttgtgaagcttaaattattgtgactcagctcttccctgatttgcttggtttaaggggaatgaatamaatcaagtaggaaggttgtgaatagacaggccattgctattcatatatatactttttttaaaataaaaggctaagtcaagaaaatagcaagtaatagcatctgttttaagagacacaatgtgacagaagcattttttctaacattttactaaatgtcaatgctttttattattttctaacctaacacagacatgattaaaataccctggaaattatgtaaggtaaatatgtcttgcatagtgatatacaagaactataaaaaaagctctaaatagcacaatcagagagagtttgaataaaatgtgttttgaaatacatacattttggtaaatcaaaaactatcttgataaaagacatctagttttccatcttggcttggtattatattaatttgctaaggctgctgtaacaaaaaacagactat

SEQ ID NO: 326152 - DNA, 588 bp, Homo sapiens
aaagtaatcagaatgaatgcataataaaaactaaaatctacattacaaagaaatttttgttacatatgctcgtaaacatttttttctcatctcttcactcataaaacaaaaagactttgggatttttggagtctcttcaaatatttacttattttttattattttttctatgtcaccttagcttattaaatcttcacattagccctccttccckcttcaccacctgaaaaaaaggtaaacatacacagactaacacataattcacaactgataaaagatgggttataaatgctggctttcacattggaggatgtgattcttctttgactcttctgagaaaaaattgagggtcaaaaaaaattgagggtcaaaaaagattaggtttgaagtgtttgtgggctgcagctttaaaaagaaggttaacttagacaaactgtaaaaaaaatgcttttctcaaaaatctgtatacattaaaagaaaagacaatcttgttctcaatgggtcataatacccagaggcagacaaccttagacaagatgttaaacacaggtcatttgtttaagattcaaaaacactgtacttttcttt

SEQ ID NO: 326153 - DNA, 568 bp, Homo sapiens
aagccttgtctttagacctggacaaagatgaaaatcaaagtaaactgctttcatgagacacaggatcaggactgtattaaaaaaaaaataagattcatttaatagttctgcctttttctgaaatatacaatttattatctgccttaatactaaataaatgtttggctaccgatgggcttccctttccttcgttctcagaaccaggcagagaatatgatcttttgttaaaaacattgttaattccttatgcttacttttccctccagaaatttaaatattcatcccctccagctcagggactatcacatgagattgtaagggttggttttggagaataaaattagttcagactctccaaatcaaggatgggcacacagatgcctaaacagctgaagaaaatatgtgtgttttacacagctagttactacaagccaggaatacaataggtcaatgcatagaatgtattgataagyccattttgtaaccttgcttcttggcctttgatttttggtttttatgtgtcttaaaagggtttaagtttaatgagtgccggcctaattcctccatt

SEQ ID NO: 326154 - DNA, 615 bp, Homo sapiens
cttttactttaccacagctgattgaagtctattctacctcagccagttctcaacaaactcttggctgaccaaaaccatatgagcaaacacagctgacatctgcatagcctggaccaggttagtagaaaccacacaagaatgcttcctcacaaacaamattaacacctcagtggcttacaacaataggtatttacctttgttcatgaatctatgcatggcctgtgtggtttctactaagcatcctgagcaaaaggaaatacttattgtaacccactgaggtgttggttttgtttgttatgaagtattactgtttcagaaaataagtgtagcccctgttgagaataagtactgtatttgttttttactagagccaaatcacagattaagaccttagaaaatttctaagagatgggataaatgcaactatttttacatgaattatatatttcaagcccaaagggaatataatatctgagtgcctctcagaaattaatggtttctttagggcgacagaaagcctaaattactcacacatttttaaaaaggagacaaaagaacaataattaatttaccctcaaacagaagaaagtagtaaataactaccataattccttt

SEQ ID NO: 326155 - DNA, 509 bp, Homo sapiens
cagggtatttaaggtattcatcatctccagtatttatcatttctatgtgttgagatcatttcaaaccctctcatctggctattttcaaatatacaataccttgctgttaattatagtcacattactctgttaaccaacctcacaatttattttttctatctaactgtgggtttgtacccattaatcaacctcttttcaatcaccctcccccatatacatgccgttaatagcctctgatatctatcattacaatatctgcctccatgaaatcaactttagctctcacatgagtgagaacataygatatttgtgtttttatgtctggcttatttcacttaacataatttcctccagttccatttatgttgctgcaaatgacatgatatggtattattcgtgcatcctttgatggacactcatgttgtttccctatctttgctattgtgggtagtgctacaataaacaagaagttgcaggtatctctttggtgtacatactcccttcacttt

SEQ ID NO: 326156 - DNA, 573 bp, Homo sapiens
atacaagaaaaactcaacgcacataataacagaaatgttaataaatctcatatttttttaaccaaataagtgaataatgtattcattgaacttactccccaccccaccctactcttttcaccttaaaggtcagagctgatccagctaaatagtttacctttatggacatacaatgacaaaataatagtgataagaagacagaataaaagcaagcatacttayaaagtgatctagtggatgaggtgattctttgactagcattaatgtcattctcaaacttgtatatatggaaagcaaaaaaaaattagtgaataaactatgactatttagaaataatttcaaagatgctatccacaaaatgtaaactggtgaaatgttctgagtaagatttagcataattaggtcattctttccttgtatatgtcactgtcttacttggttctatagttgagctaaattccaaagcagtgaaaaattctacaggaagcataatgcaccacacatagtgtacatggaagaatcttatataactagaggctcctttcttctagatttagccaaatacattattct

SEQ ID NO: 326157 - DNA, 429 bp, Homo sapiens
ttcctaggccctcacttttttttcctcacaatcctacaatagtttcagagggattttaatctatctgtatgactttagttgctgagatagaaaataggtaaagatatagatatatagacacacacaacatgtggatatacaaacatatttgtgtgcttgtgtatattgtgtatatttagatgtgtgggtgggatccacgaagcgcatgcaaataaacatttggtctcacatacactgacaatttcctgaaatcatttgttgaggaatgtcaaatctgttaytataacaattagcagtcacatcacagaaacaataaaaaaaaaagctcatcatctttgaaaaccatctgagggtgcaagtttttaaaattaatctgtcttgcttgattgcatttaacttccacaccttccattttcagtcattatgaca

SEQ ID NO: 326158 - DNA, 623 bp, Homo sapiens
atttgtattaacaaagattctttgcttgaccaagatttagttaggttccgaaaccttctcttaggctcatctgtgtaattccttayaaaattcagttttagaaaaatgttgcaagaactcttcaccctcaatcactcttgatatctgattggccttttcaccttccaccatcccccaggtgatatctgatcatgctggcctgtcgccagcaataattctgctaggcaggtgtggtcagaatccttgatgttgcctcttaataatttttccttcattgcgcttcaccctgctttttggctataaattcccacttgtccatgctgtattttgagctgcgtccaacttctctcctccctctacacaatctcaccgccttgtccctacacttatattgatggtcctgaataaagtctgccttattgtgctatatcaagtatcatttaatattttttaaaaaaatacagtggcactgtacttcacatctaccaacctctccaacttctgcctttttttctcttgctctcactctcacacgtgttcatttttattactatattatttttgttggtggtgatgatgatgacatttatgtatacaaatgtgtctcaaaagtatttaaactt

SEQ ID NO: 326159 - DNA, 527 bp, Homo sapiens
aaagtaaactaaaacatttctcttagtatttactccacctaaaatcatgattccataatgctatccaacatttaatgaatatataacattctgcccagactcattttccatcagcattatttacctcacaattaaaaagatctaaatcctttactcaatatatttacatggctttttggagcatgtcaagtaatttaatatacatatatcatatgtatatgcgtacatattatatataacatgtcaatacatatgatatgttaaatacatattatataatacatgtaaatatatgtaatatatacatatatgatataggttatatgttayacataggtgatgtaatatacatatatatgtaataatataatatataatacatataacaacatatttattgtgttatgtataatacataatttatgtacattatgtatacatgtacacatacgtatatattttatacatacatataaaaccactgtttttcaatatataatgtttatccaattcatgtgaattcggga

SEQ ID NO: 326160 - DNA, 531 bp, Homo sapiens
ttttctattactgtatttttctttctcttgttttttcccaaatattttttatctccagttggttgcatctgcagatacagagagcctattgtatttccttttctttcctagtaatataattctattacttcatttatactaatttcagttccttcctttcgttaaaattatatatatatataattaagaaaaatgcacttgtgtaacacaaatatattgctcttaaagctttaatttatctagcyttaaaaactgcatgggaatacagaggtaatagcagtagccatccatagatatgccatacttagatctggttattaacctcagtgctttattgactcaacatgcttaaggaagtttctgggcaaggcttgtctgattaacccaatttgaatgagctacattcaggaagtgagggatcaatgtcaacaatttcttaattgtcttcaggtttaaaggattttaaagagactaatagatttttttaataagtaactttctggaaaatagttgaagagttaaagagaaaaa

SEQ ID NO: 326161 - DNA, 452 bp, Homo sapiens
acacacaaaatctcactgccctgctaccaccagcactcatgcatgcatgcagactcttctgccacacttccccaatgaaacacttttgccagcaaccctcattgaaatgttgtagccaacagactgagaacacctcaccccatccagtgcagcagggcttaacatcagggggccagagagcaaagctgtgagcctggtcccacttcccgagtgttagaccaaggagtccaagtatgctgagctgggcctttgtcacttgaaataatccggacgtaaagccattcaattgaacccaatttttaccatagtcaaaccttcaaggataycaaaggatataaaagcaaaaattcccatccaaaggacagtaatgtcaaagattaaaggatcatcaacgcacatgcataagaaaaaaaacaatgtgagaactctggaaacaaagacagagtttctcc

SEQ ID NO: 326162 - DNA, 600 bp, Homo sapiens
atctcaatacactcagagaaggctttcaataaaattcaacattctttaacgttaaaaacctcaacaaactaagcattaaatggatgtatctcaaaataataagagtcgcatatgacaacctcacagccaacatcatactgaataggcaatagctggaatcattccccttgagtagtggaagaagacaagaatatctactctcattactcctcttcaatgtagtactagaagtcctggccagagtaatcaggcaaaagaaagaaataaaaggcatccaaattggaagagaagaagtagaactatttttattcactgcctagtggagctgtgagaagagggccactgtcctccagaccccasagtggtagatctgctgacagcttgcaccgtgcatctgggaaagccacagacactcaatgccgtctgatgaaagcagccagaagggaagatagtatcctgcaaagccacacgggtggagctgcccaagaccatgggaacccacctcttgcatcagtgtgacctgaatgtgagacatggagtcaaaggagatcattttggagtattaagatttgactgccccattggatttcagacttgcgt

SEQ ID NO: 326163 - DNA, 483 bp, Homo sapiens
ctcaacagatgcagagaaggctgatcatctcaatacactcagagaaggctttcaataaaattcaacattctttaacgttaaaaacctcaacaaactaagcattaaatggatgtatctcaaaataataagagtcgcatatgacaacctcacagccaacatcatactgaataggcaatagctggaatcattccccttgagtagtggaagaagacaagaatatctactctcattactcctcttcaatgtagtactagaagtcctggccagagtaatcaggcaaaagaaagaaataaaaggcatccaaattggaagagaagaagtagaactatttttattcactgcctagtggagctgtgagaagagggccactgtcctccagaccccagagtggtagatcygctgacagcttgcaccgtgcatctgggaaagccacagacactcaatgccgtctgatgaaagcagccagaagggaagatagtatcc

SEQ ID NO: 326164 - DNA, 574 bp, Homo sapiens
aagagaaccagaaagggtattatttttgctgtattgaaaaattgaatatatttgtttaatctatttttatgcttgcataaccagtgagtatttttttaggtaggaattctacgtatgtctttgaagcatcccttaatcagctcagtatactccttcaaactttataatcaataaattaaatattttacttttcaatggaaaaatacagtttcagaccaatataatttctactattctaatttaatttggggccagtctaagatcgctgctaatttaaacatttctcaggataatgtttacttttagagacagttttaatatatagcatattcactttattttgtcagtgtcttttatcattttatctcaatccagaattatagttttctaacrtttaagttactggttcaaaagccaacttagagatcactattaaaaaggaagcatggtgacagatttttaaaacaggggaagttagagctttgcacattttaaatatatacctacatggaataattttaaacaaaacctaactactacattgagctcctatatgtgtaatacagtttgcagg

SEQ ID NO: 326165 - DNA, 557 bp, Homo sapiens
acacacacacacacaccctcaaagatccaagagcttttacctcagaactctagtcatgagacaatatcgcaaactcattattttactaaagacggctgttttcaaattattttttacaaaattgggacwtgtatatatggctaaactttatttgccctgacaggtaatccaaggaaagacatggatcaaaattttggataaagtatattccatggcactttgatatgtaaacaaacaaacaaacaaaacaactcttttatcttttctttccttcagttccaaatgagtttcgttgttacattttagtagaactggttgaagtaagaaaaagaaaacctccaagttgccttgaatgagtgagttttatctcaaccctggtagcttaataacagcagattcaaagtaggcagaaaatgaaagagaaacagatagctttagaacactctacttaactctacagttgcagattaaccatttgagctctgaatttattttgttgttgtaatttgcccatcagttttaaaacatgcacaagatatctttgtctaccagaacag

SEQ ID NO: 326166 - DNA, 608 bp, Homo sapiens
tatcagtaacttttgaaagcctttagaaaggccacctttgttagttttgggatccgtaaattatgtaagcattatgatcttgcctcagttgtaatctatttaggacaaagtaccaaggtttgataaagtctgtggaatcaagacaagtgacttaccatagacacaggtgtgggagcataagttctttagctcatcggaaataatagggcacgtccatggaataatatttagtcttcygccacttaatctccctagcttctgataatttttcctaccctaattgtccctacatcttattgtaattacttatgtataagtgcgtctctgcagaaaattgttagttcctcttggaagagaacatatctcatcacttgtttaataatctaataatacataatgttgtacactgctaaagcacattattatttaattgaattaccaaacatactttaagtaaatagagttaattagggagtattcagcaccagacaatgcaagagtaaataaagcaaattaatatgactagttccaaatctcaaaattttaagtgtggtagaggaaaatgatattttagtatgttctttgcatacacacaaaatgaaatagta

SEQ ID NO: 326167 - DNA, 608 bp, Homo sapiens
tatcagtaacttttgaaagcctttagaaaggccacctttgttagttttgggatccgtaaattatgtaagcattatgatcttgcctcagttgtaatctatttaggacaaagtaccaaggtttgataaagtctgtggaatcaagacaagtgacttaccatagacacaggtgtgggagcataagttctttagctcatcggaaataatagggcacgtccatggaataatatttagtcttctgccacttaatctccctagcttctgataatttttcctaccctaattgtccctacatcttattgtaattacttatgtataagtgcgtctctgcagaaaattgttagttcctcttggaagagaacatatctcatcacttgtttaataatctaataatacataatgttgtacactgctaaagcacrttattatttaattgaattaccaaacatactttaagtaaatagagttaattagggagtattcagcaccagacaatgcaagagtaaataaagcaaattaatatgactagttccaaatctcaaaattttaagtgtggtagaggaaaatgatattttagtatgttctttgcatacacacaaaatgaaatagta

SEQ ID NO: 326168 - DNA, 527 bp, Homo sapiens
taaaagcctaatgataacaagtattagcatggatatagagtaaccataacttgtatatattgatataatcactcttgataaatttctgtcagtatctacttagctatacatgttgcccactatttttactccaaatgtaatatctaattatgatgcatacatacattcaccaaatacatatattagaatgtttagagaaacaatayctagaaataatccaaatgtccatcaatagaatattttgctattgtcacaaaatggcatactatctgtgtattagtttgttctcatgctgctaataaagaagacatacccaagactgggtaattataaaggaaacaggttaaattgactcaagagttccacatgtctggggagaccccacaatcatggtggaaggcaaaagagaagcaaaggcacatcttacgtggcagcaagcaacagagcttgtgccagggaactcccatttgtaaaactatcagatctcatgagacttattcactaccacaagaacagtatggaggaaa

SEQ ID NO: 326169 - DNA, 527 bp, Homo sapiens
taaaagcctaatgataacaagtattagcatggatatagagtaaccataacttgtatatattgatataatcactcttgataaatttctgtcagtatctacttagctatacatgttgcccactatttttactccaaatgtaatatctaattatgatgcatacatacattcaccaaatacatatattagaatgtttagagaaacaatacctagaaataatccaaatgtccatcaatagaatattttgctattgtcacaaaatggcatactatctgtgtattagtttgttctcatgctgctaataaagaagacatacccaagactgggtaattataaaggaaacaggttaaattgactcaagagttccacatgtctggggagrccccacaatcatggtggaaggcaaaagagaagcaaaggcacatcttacgtggcagcaagcaacagagcttgtgccagggaactcccatttgtaaaactatcagatctcatgagacttattcactaccacaagaacagtatggaggaaa

SEQ ID NO: 326170 - DNA, 595 bp, Homo sapiens
ttgcaaatgacagaactttcttcatatttaagacatcacagtatttcatttagtatatataccacattttctttatttattccttggtggacagttgctttgattccaaattttggctatgtgaatagtgttgcaataatcgtgagggtatagtatctcttcaacatactcattttatttaatttgggtatataccccaagagagattgtagaatcttatgatagttctatttttaattttctaaggaacctcaacactaattttttcttagctcctgcaccatttttcaatcctaccaagagtgtacagtggttccaatttctccacattcttgccaacacttatgatatgatttggatggttgtcctcctgaaatctcatgttgaaatgtgattctcaaggttggaggtaggcctggtgggaggtgattgaatcatagtggcrtatgcctcataaatggcttaacacgattcccttgttatttcattaagaacttattatcaacttactgtctttcttttttgataatagtcattctaataggtgtgattgtcattttgatttgcattttcctgataattaatgatgctgggc

SEQ ID NO: 326171 - DNA, 585 bp, Homo sapiens
actacaggttttttgtgttattttagtgtatattttaacatttatagaatcatcattaatttatggtctaacttcaactcacatagaccagtgtaaatagggcttaagaaaagtaaaacttctattgctcctctcctagtcattcwgctactttcatcacaaatttatcctgtatatatgttctaagtctcacaaggtattgttactactttttattaaacattttttttgtctttcaggataattttaaaaactttatattttctatgtgttaaactttctggtgctcatcactcttttgtactgatccaggtttccacaagatatattaagtataatgtttattctgaatgtaaaatgttcttaaatatttctttgtgtttggatctaatcatagtaaaatcttctaatctctgtatgtctaaaaagtcattatttcataattgttattgtaacatacctgtgcattctatatcaaaaggttttgtttttgattttaaattaagtactttaaatatgttgttctattgtcttctattttgcattctcttcagtgaggaatctgctgttatccttatctttgtt

SEQ ID NO: 326172 - DNA, 565 bp, Homo sapiens
tctaagtctcacaaggtattgttactactttttattaaacattttttttgtctttcaggataattttaaaaactttatattttctatgtgttaaactttctggtgctcatcactcttttgtactgatccaggtttccacaagatatattaagtataatgtttattctgaatgtaaaatgttcttaaatatttctttgtgtttggatctaatcatagtaaaatcttctaatctctgtatgtctaaaaagtcattatttcataattgttattgtaacatacctgtgcattctatatcaaaaggttttgtttttgattttaaattaagtactttaaatatgttgttctattgtcttctattttgcattctcttcagtgaggaatctgctgttatccttatctttgtttcttagtatatatttttttgtcttgtagctgctatggcaatgtaagaaactttcyttccactctctgaaggcttgatagtttgagtttctgggctaaatttgacattagacagagaaaaaaagcatactaatttattaaatgcaaatgcaaagaaatcatg

SEQ ID NO: 326173 - DNA, 577 bp, Homo sapiens
tgaaatttttctcatgattttatcttggagttcaatgagactatataagttcatggcttgcatcaaattttcatattctcagacattattttttcatttagtggttgtttttcacataaaatgaggtgaatatttcagggaagtaggaataaacacaagaatgtgtccagattcctttgggcaattttctcattctccagtgggtcacagtcatcagcattgttaacccaatttggggctgtaagaaccagaataccactaaatatctcatctttggttttccatagaagtatatatgtactgagaaawgttttccatgagggacaagctgcattataaaagccactatttaatgcaagaaactttaggactgtttgacttccccaagcttatggatatacagcagcataatggactatagaaaaggtcaactgttcttcctcatctcgcgagcgaaccagccagccaagtttctaataaattgctttgtttctgcccatagaaaacatagatttcctcattttatacttaatgtggatttgaatctaggcaaccattgactgaaagaaagagaaaa

SEQ ID NO: 326174 - DNA, 527 bp, Homo sapiens
ttaactataaaagccctagatggcatcttctcccaatagaagactgttttgttgacattaaaaaatctgttatttagtataggcactttcattaatgatcttacctagaccttttggatacttgctgatgcttctacatcaacattkgctgcttcgccttgcacttttatgttatagagatagcttctttccttaaatctcatgacccaatctctgctggcttccagcttttcgtctacaacttcctcacctttcttagccttcatagaattgaagagagttagcgccttgctcagagttatgctttagtttaaagggatgttgtggctggtttgatcttctatccagaccactcaaaattacttcaccttagaaataagtttcactttcttgtcatttgtgtattgactagagtagcacttttaattttctttgaaaagatttctttgcattcacagcatggctaactggtgcaagaggcctagctttcagcttatttttgggttttgctgtgccttcctcactaa

SEQ ID NO: 326175 - DNA, 527 bp, Homo sapiens
ttaactataaaagccctagatggcatcttctcccaatagaagactgttttgttgacattaaaaaatctgttatttagtataggcactttcattaatgatcttacctagaccttttggatacttgctgatgcttctacatcaacatttgctgcttcgccttgcacttttatgttatagagatagcttctttccttaaatctcatgacccaatctctgctggcttccagcttttcgtctacaamttcctcacctttcttagccttcatagaattgaagagagttagcgccttgctcagagttatgctttagtttaaagggatgttgtggctggtttgatcttctatccagaccactcaaaattacttcaccttagaaataagtttcactttcttgtcatttgtgtattgactagagtagcacttttaattttctttgaaaagatttctttgcattcacagcatggctaactggtgcaagaggcctagctttcagcttatttttgggttttgctgtgccttcctcactaa

SEQ ID NO: 326176 - DNA, 527 bp, Homo sapiens
ttaactataaaagccctagatggcatcttctcccaatagaagactgttttgttgacattaaaaaatctgttatttagtataggcactttcattaatgatcttacctagaccttttggatacttgctgatgcttctacatcaacatttgctgcttcgccttgcacttttatgttatagagatagcttctttccttaaatctcatgacccaatctctgctggcttccagcttttcgtctacaacttcctcacctttcttagccttcatagaattgaagagagttagcgccttgctcagagttatgctttagtttaaaggratgttgtggctggtttgatcttctatccagaccactcaaaattacttcaccttagaaataagtttcactttcttgtcatttgtgtattgactagagtagcacttttaattttctttgaaaagatttctttgcattcacagcatggctaactggtgcaagaggcctagctttcagcttatttttgggttttgctgtgccttcctcactaa

SEQ ID NO: 326177 - DNA, 459 bp, Homo sapiens
agcaaaattgagtgaaagctacaaagggttcccatatacccctcccctcacacacagtctcccctgctctgaacatcccacgccagagaggcacacgtgttacaattgatgaacctacgttgacatgtcactaacacccaaagtccayagtttacattaggattcattattggcagtttaaattctatgggttttgacaaatgtataacatgtgtccacctttagagtatcatacagaatagtttcactatcctaaaaattccccatgctccacctatcaatataacttttatgtgtgtattttatctgaaattctattcagctcattcaagattttcatgttctaatctctccatcttgatgaaaatcaccctctgtaagaatatccttggcatttggtattttatgaagaagtggtattttgttattatttgcatggttgtttattcaatttactca

SEQ ID NO: 326178 - DNA, 459 bp, Homo sapiens
agcaaaattgagtgaaagctacaaagggttcccatatacccctcccctcacacacagtctcccctgctctgaacatcccacgccagagaggcacacgtgttacaattgatgaacctacgttgacatgtcactaacacccaaagtccatagtttacattaggattcattattggcagtttaaattctatgggttttgacaaatgtataacatgtgtccacctttagagtatcatacagaatagtttcactatcctaaaaattccccatgctccacctatcaatataacttttatrtgtgtattttatctgaaattctattcagctcattcaagattttcatgttctaatctctccatcttgatgaaaatcaccctctgtaagaatatccttggcatttggtattttatgaagaagtggtattttgttattatttgcatggttgtttattcaatttactca

SEQ ID NO: 326179 - DNA, 567 bp, Homo sapiens
tgttaactgggggtgatactaatagcaataacagtgattagcttatagggttgttatgaagattacataagtcaatgtaaaacacctatakaagagcttgacacatggcaattgctcaatagaggtattcgctgcgatttagaaatgaaactctgtggagagaattgaggattcggtgactgggggatgtaaggaaaactactgatcatttgcaagtgttatccctttaacacaggttagtttctcagcccagctagctgtctcctaacagacagagcagtcacaggagaataggatgtagggcaagcatgtttgagtaggagaatagaaacaagaaaaaagaaaaagttcagagcatgtgatgccacccagaagatgagacttggacacacttctttaattggagggctttggtggccagaaataacctgagatctctgggaacttgtagagaatggctgtggttggggagagagactctcaagttcagcagccaatggaaaaatcttgcctagggatgggcttgcctgtagcaaatcagtggaagagtctttgaagatgtaagag

SEQ ID NO: 326180 - DNA, 594 bp, Homo sapiens
ttggtgcaattgcaaaaaggcattaagcttggagtcataagatctgagcttaatctaggaaatagctgtgtcacattggacaagacacttacattattcaagcccttggttccttatatagagagcagggacaataattcttactctctgaattgctattaacgtgctgttatggattcaattgagtcccccagraaggatctgctgaagtcctagctcccagcactcagaatgtgacctcatttggaaataggattattgtggatataattagctaagttaaaatatggccataccagagtagagtgaccctaatccttcccattggtattcttctaaggagatggccatgagaatgtatggagatgcagggggagcatatgtgaagatagtaacagagattggattgagggcatccacaagccacagaatagaaatgattgtcagtcatcactggaagataggagagaggcatgaaacagattctccctcaaagccctcagaagaaaccaacaccacagacagcttgcttttggacctttggcatccagcactgtgaaagacaaaacttctgttaagacacccagttcgtgg

SEQ ID NO: 326181 - DNA, 514 bp, Homo sapiens
atgtgcacaatgtgcaggtttgttacatatgtatacatgttccatgttggtgtgctgcacctgttaactcgtcatttagcataaggaatatctcctaatgctatccctcccccctccccccaccccacaacagtcccyagagtgtgatgttccccttcctgtgtacatgtgttctcattgttcaattcccacctatgagtgagaacatgcggtgtttggttttttgtccttgcgatagtttgctgagaatgatggaaacctgagggtcttacattctgcttcagggtgaggtcagaaaatcctccctagattttatgacctgcttcaggggacaagggatgaggggaaggtgagaatgacctttctgcttctgctatttttctcaaatgctgaagtgccatatttgaggatagcatgtcctaaaccccatcaataagaagtgtgataagatgaattgtcaccaaggaatgctgcaggaagagaagcccaaaattattattctttcaggagagtg

SEQ ID NO: 326182 - DNA, 514 bp, Homo sapiens
atgtgcacaatgtgcaggtttgttacatatgtatacatgttccatgttggtgtgctgcacctgttaactcgtcatttagcataaggaatatctcctaatgctatccctcccccctccccccaccccacaacagtccccrgagtgtgatgttccccttcctgtgtacatgtgttctcattgttcaattcccacctatgagtgagaacatgcggtgtttggttttttgtccttgcgatagtttgctgagaatgatggaaacctgagggtcttacattctgcttcagggtgaggtcagaaaatcctccctagattttatgacctgcttcaggggacaagggatgaggggaaggtgagaatgacctttctgcttctgctatttttctcaaatgctgaagtgccatatttgaggatagcatgtcctaaaccccatcaataagaagtgtgataagatgaattgtcaccaaggaatgctgcaggaagagaagcccaaaattattattctttcaggagagtg

SEQ ID NO: 326183 - DNA, 514 bp, Homo sapiens
atgtgcacaatgtgcaggtttgttacatatgtatacatgttccatgttggtgtgctgcacctgttaactcgtcatttagcataaggaatatctcctaatgctatccctcccccctccccccaccccacaacagtccccagagtgtgatgttcccctycctgtgtacatgtgttctcattgttcaattcccacctatgagtgagaacatgcggtgtttggttttttgtccttgcgatagtttgctgagaatgatggaaacctgagggtcttacattctgcttcagggtgaggtcagaaaatcctccctagattttatgacctgcttcaggggacaagggatgaggggaaggtgagaatgacctttctgcttctgctatttttctcaaatgctgaagtgccatatttgaggatagcatgtcctaaaccccatcaataagaagtgtgataagatgaattgtcaccaaggaatgctgcaggaagagaagcccaaaattattattctttcaggagagtg

SEQ ID NO: 326184 - DNA, 575 bp, Homo sapiens
caggcataatcatatttaaccccctcacagcatttgacactggaaataacttcctctaacttaagamaatctcctcgttggcttatgtgttgttatatactcctggtttcttccataactctctggccccttcctctcagttttccttgtgttctcatcttcatctgtccaggtcttcagtgttggtattggtcacagtctcctctaaatgtaagagcatatctatttcagtaggtttaattttccatccacattctgacattttcgaaatttttatttccaacacatatgtcttttctgaacttcagacccagttaagctattgcctgctgaacacgttttcttggttttctacaggtatttggaactcagtacagaacaatttatcttttatttcaaacctgttctttctctcatgttacttatctcagctgctcaggccaataacctgagattcctcctagatctcttccactcaccagtgcatttcatccaatgtcttaaagacgttttcacgcaaccctaagtatttatcaaatccatacaatttccccacataccttaattccagtcac

SEQ ID NO: 326185 - DNA, 575 bp, Homo sapiens
caggcataatcatatttaaccccctcacagcatttgacactggaaataacttcctctaacttaagacaatctcctcgttggcttatgtgttgttatatactcctggtttcttccataactctctggccccttcctctcagttttccttgtgttctcatcttcatctgtccaggtcttcagtgttggtattggtcacagtctcctctaaatgtaagagcatatctatttcagtaggtttaattttccatccacattctgacattttcgaaatttttatttccaacacatatgtcttttctgaacttcagacccagttaarctattgcctgctgaacacgttttcttggttttctacaggtatttggaactcagtacagaacaatttatcttttatttcaaacctgttctttctctcatgttacttatctcagctgctcaggccaataacctgagattcctcctagatctcttccactcaccagtgcatttcatccaatgtcttaaagacgttttcacgcaaccctaagtatttatcaaatccatacaatttccccacataccttaattccagtcac

SEQ ID NO: 326186 - DNA, 638 bp, Homo sapiens
agctttctctcaacagcccattgcacacaatgatctgcatctagcaactacagagtcttaataacactttcatcagattccaacaatcaaagaatcatagacttttcagaatcatctgattcaacgtctaatgttaaacagaaacctgtccaaaggtgtgacaaaggcgtgatctatcctattggccaaaagcaaattggattcaaacccaaaatcaatttatatatttttccatttctgacgaacacacttataattatatatgaagagcaagctctgaacagctgggcagaaacattgaagttctcagttttcgtttgagtcctgcttaataaataatataataatttggctgctgcatttttctctctgcattgcttttaaacctgactttaatcaacatattgcattatttgaaaatattgtgaaaccttcaaaattcccattgataaatgtcaccaatatcaatgtaaaagcattctgaaaattacaaagcrcttgaggtttagtttccattgtacatttgacatattattataatactacaatttcgttcattgaaaaaggtgtatttcatagtaatgactgttgtaattatgctgtgccattgtaatcagtatttgggaatcatgaccagg

SEQ ID NO: 326187 - DNA, 675 bp, Homo sapiens
tttgatgaatcaatcatctgattgttttgggccacattactacaatcagaaaataattcccaggactatggaaacacagactgaaaataactccggtgaggccctttttggggacttcccattttggaatattgctagccttatgctcatttgaaagctgggtgtatttccatcagggactgcctagagagaagaaaaaaaaatgtttgaaaacctgctgtgtggtaaatactcagaaagttgtgttwcttaaggatattagaatagagaagtaagaaaacttattcaagaaactcagtgatggaatggaccctgatactcattaaaaatcactccctatctctacattccttaccaccatctgctatgggtgtgaaagtaggtacaggggaaatccaggtcacctacaagattttcacaggcctgaatgcttggagttaagtcataaaagctttatccatgcttatcttaaagcaggaaatctcgggtgtagagcagaataacttaagtagataatgggcaagaaaaggtttctgtttactgttggctttttcaaggttccatctcgaatcttgtccaaaacaaacatttcatcaaatgcattaagctccgggattaggatctgactggatatcagaggattaaagggaagtagaaaatgtgtcaagtgaaaat

SEQ ID NO: 326188 - DNA, 437 bp, Homo sapiens
taaatagtctggcactggggggtctgtctggccttccacactacccaagccataggaaactgactaggtgggctaccaggtaggttgtgggccttttgggttcaaaatttttttgaattttccacggttagttcccacacatccaggcctctttgggtcaaattatgagtgcaagtctggagacttctagaacatgcgaggttggggttggggtagcaatgtgactccatttataactattagaacttctcataatttagagttctttagaactccaataaactcctatttggtgatatttctagatcctggggaatgtttttacagctactgagggaagaggataagtaagatacaatccctgccataaggggctttaatagaagtcytatagtttttatttacatgggaaagtgaatgatcttttttacttacat

SEQ ID NO: 326189 - DNA, 509 bp, Homo sapiens
ctacttcctggttcataaaatgtgatcttttcattgtgttttcatattgtggacatggcagaaagctcccttgggcctttcttataagagcactcattccattcatgagggcaaagccctcacatcctaatcaccaacaaaaatgtccgaactcctaataccatcactctgagcgttaggatttcaacataggaattttgggaggacacaaacattcagactatagccatcattatacacaaaaataatataccacttaaaatttcatgtttataaattgacatttattcttaagggaaaaggtgttkgtttacaaagagttttataattacttatgttactgcaatttattaaatgaactcagtttgcaaataaccttaggatacatgaaaaatgaagcattatcagaaggtaatatacagtcatgaattgcttaagaacatggatacattttgataaatgcatcattaggcaattttgtcactgtgcaaacatcatagactgtactt

SEQ ID NO: 326190 - DNA, 194 bp, Homo sapiens
cacccaatctcttgtaattatatttgcaaataataaaaatactttattggcatggttgtaacctaaagcatcattttttttcctttttacttttcctacaataaatgaggtgtcyctattagctttcttcaagttttcttctaatactccttagagatttcttcacaatttgccttctactcacaacagtaaaa

SEQ ID NO: 326191 - DNA, 591 bp, Homo sapiens
cggaaaatgtgaaatttaacttaatattagaagattacaatttaacaaagtagaaggatgtgtgaggaggcaaagtgaataatgtcccaggatatggagataatgaaagtaattttggacggaaatgtcacgtttgcggtaaaaggacagaataactgatgtctggagagaatgggaagggcattgtaaggcaaagctggagaggcctatgagggcagaccttctatgttctgttgattagcttaagggaaatgggactctagatctcttattttatattaatcaagacaataaaaatattaaataatttccccaaaaatgtaaaaaaaaaagaaatgggaatacattgatttgtgtttttaattttatttttaaacatacagagtaacataaataggagctgaacttcgtaaaaatattgctgaatgcagaataaataaaacggtttgaagggggccaaagttaattatgtgtctagatcttagagtgaaaatgtagtcttgcttgygaaaatagacgattttaaacaaaatttaagagaaaaataattgacaggacgtgatgagggattggatcatgaagactgcaggg

SEQ ID NO: 326192 - DNA, 619 bp, Homo sapiens
atcgaataaaaagaattaactaccctgtacaaatacagagttcctctaggcaatgactggatgcactgtattgataaaggagcagatattaccatgcctttaatttactgtcaagacatactctcctatgaacttctggctttattcaagtacaactattatatttatccaactgcaattgcctgacacctcagcagtctttccaaatgtgcactcatttcaaatacaaaaacactaaagctctactcayggtgatattgatcattcctttcactttggcacaagtatcatttcttaatgattcaagggaatatatgcaaaacattactcatatatagatacatatatacttgtatatgcattatatttatatattatgagtgtacatacacacatacatgaatatgtatgagtcactgattttaccacttcccgtatctcataggtttaactaaattcctttactggtctaattttataggaggcttagaaagctgaaatataactctaaaagttacaatataaaactcaaactcaaactcatctttaacttatcgtgcaaaacacctcagactgtatcttgttaatgaggacttccttgacatacaaggtccgattt

SEQ ID NO: 326193 - DNA, 619 bp, Homo sapiens
atcgaataaaaagaattaactaccctgtacaaatacagagttcctctaggcaatgactggatgcactgtattgataaaggagcagatattaccatgcctttaatttactgtcaagacatactctcctatgaacttctggctttattcaagtacaactattatatttatccaactgcaattgcctgacacctcagcagtctttccaaatgtgcactcatttcaaatacaaaaacactaaagctctactcatggtgatattgatcattcctttcactttggcacaagtatcatttcttaatgattcaagggaatatatgcaaaacattactcatatatagatacatatatacttgtatatgcattatatttatatattatgagtgtacatacacacatacatgaatatgtatgagtcactgattttaccacttcccgtatctcataggtttaactaaattcctttactggtctaattttataggaggcttagaaagctgaaatataactctaaaagttacaatataaaactcaaactcaaactcatctttaacttatcktgcaaaacacctcagactgtatcttgttaatgaggacttccttgacatacaaggtccgattt

SEQ ID NO: 326194 - DNA, 551 bp, Homo sapiens
catataataattctgtttaactttttgaggtaccatcaacctgtttttcaccagtggttgcacccacttatatgcctaccagcaatatatgagtattccaatttctctacaaccttgcctagacttactagttcccatttttaaaatatgcctactctattcactgtggagtggtatctcaatttggttttgtttagcattgacctaatgactaatctcatagagcattttttatatgtttgttggccatttgtatattttctctgaggaaatttattttcaagccatttattcatttgtataaaaatggtgttgtctttttgttsttgagttctaagagttctttatatattatgaatcctaaacacttgtaagatatatgttttgcaaataattcttcttattatgaaagttatctatttatctttttggtagtgtcttttgatgtacaatagtttgtttttatgaagtccaatttacctatattgtcttttgttgtttgtgtttttgacatcatactaagaatatattgccaaattcaggtcatgaag

SEQ ID NO: 326195 - DNA, 567 bp, Homo sapiens
agtgaggtttattttgtgctcatttaacggttctgtgtatttttactgaaagtgattttctgcacagcaactcaagaactcaactgatcccttcaatcttgtaattacaacatcctttgcatttggcttgtaagcaaaagagagagagagagatggagattgaaatagaaataaggagagaacaagatagagagataattaaagagtgagagggagagaaaaatagagtttagtatggggcttttttgaataggctggaagtgttatacctaattcccttccacattaaggtggccaaaatgcaaacacataaccacatgtaagggaagwtggaaactataatctagatatagtttcaggaagaaggataaatgatttttctgaattagtagccagaataatagctattctctgacaaacccggacaagtgtttctcccaaacttcaatgacttcagtctctctctctaaatagcatcttccatttctttctttttgcaagaaaaatgtctgataatttcaaaatagagcactccaaatatttctgcaaaaatccatgctattaagt

SEQ ID NO: 326196 - DNA, 527 bp, Homo sapiens
aacaaacagctcaactcttatcatcagctattcttaacttttcttaaacatattttaaattttctaacttcttgtccaattttaattaggaaaaccatagagtaattttaatcattataatacaataatgataaaatacatttccaagacatgttttagaatagtgtgtttcacttcagccataaatgtatttctttgtttattttagacatattagcttgtatctttaagccatctcatattagatattagcttcataattagcatattattttgtggttttaagataaaagaaaaccaattataatcctacttctatgcaatgtayttccactataaagattttcagtttaggctaatatgcattacctgtacttgagctctcatagcaaaccacgacaaacctggacaaaatatgtaaattcactgtttttagaaattggacagcagaaaagaagcaacatgacaaggtatacattccctctagcattctgtctggacaagaattttactgcagggaagtagag

SEQ ID NO: 326197 - DNA, 500 bp, Homo sapiens
ttgtaccttcagatgatttcttattgctcattaatatctttttcctttacattaaggaactccctttagcatttcttgtaggtcaggtctggtgttgatgaagtcccctgacttttgtttgtctatgtaaatctttatttctcctccaattcttaaggatatttctactggatatactattttagaataaaagtgattttttttcctttagcactttaaatatgttgkgccactctctcttatcctgtaagttttccactgagatatctgttgccaggtgcatttaagcccctttgtatgttgtttttttattttctcttgctgcttttaggatgctttctttatgtgtccttgaccttggaagtttgattagtaaatgtcttgttgttcttatttgggttaaatctgctttgtgttctataaacttcttgtccttgaatattaatatttttttctaaattttggaagttctctgttattatttctttgaataaactttc

SEQ ID NO: 326198 - DNA, 641 bp, Homo sapiens
agaattcatacttatgtaaagagagactcttagctattacagttaatgctctagaactatcattaagcccagaaaatattatctaagtcaatatgagaagggccacccatgaaagcctaggacaaattgccgatccatggaatgtgatccaaatgaaatggttggttttgtgccactacattttggagggactttttatatagcaacagatagcagaagaatgatttcctctcctgcacattgaggaagaggatccaaatacccattttccatgaacackatatttttgtaacctctgacatttcatggttaaccccttgcttctttataatattaagcatgtacaaatagatgaaggaagatgcctcaggattggaaagcagagacattttagggatattttagtgagtctgaaaaaagtttttaatgacacatttttgccctcatatttaattcatcaaaacaaaaagatgtcatattcaacatgttcaatgtgtttaactgaagaaagagattctatatgaaagagtttacagaattaagagaaccaacaaagaacagtgaagcacccagggaccagtgacagaaggctttccccagagtcccgaaaaataaggagagaagcagtgtttcaagaacaa

SEQ ID NO: 326199 - DNA, 622 bp, Homo sapiens
ttcaataactcacaagcttttttccctgatatcaatgttcattaattctgttgattctcttttccttgtyttattgaaaattgtcatcaaagatcttagatgttcattttccttgtcctttgctgattttactggctggttaaaaaatgtgtgtaacgtgtgtgtatgtctgtgagtgcatatgtacaaatatatatatatatataatatatatacacacatatatacacccatgcaactgaccctgagtcaccttattctcaatacttctttataccaaaaccaattttaagtctagaaggtttatttttatattcttaagttatagcaaagttaacaatatagttatgagattaatgaatccaattaagttaaataaatggtgtaattaagttaaatatagttattaaattaataaagttaatgaatataattaaaatactttaaaaataccgaattataatatttaacatgaatctattttgtgttgcttttatgaaagtgtcaccaaactaaatatttattcattttccccttcatatatacagtgtaaattatagttattgatcttattgttctttctgatcaattcttttttcaagtagctatgtaaagaaatgac

SEQ ID NO: 326200 - DNA, 625 bp, Homo sapiens
ttttcacagcctgcacacaagtgcattaaaatacacacacacacacacccatatgtgataagaaaatataaaaacactataaaatgtataataacagaacacagagacaacaaccactgaccggcaggtgagaaaatggctcataaaaagtgacatcagatgaacaccttttaaatctcaacaggatttactattcatagaataaaatggaaggtatgaataaactgggaaagtgaagtgattaaatggtaaattaaatattggtgtgattaggggttaataatagtgaatgtcctattttaaaggttttaaaagaatggcaatctagatgtattcgagcattttccctatgcaagagtcattaaaatctttgaggaggataacattgygacatgtaatttagggaaaacgtactgtagtaacaggataaaaaacttatttcaaaggggaaaaggaaaccagatgtaataagaccagttaggggtctaatataagaaagtcaactggaaacattgaaagattgacggctgtcagcagcaactaatatgcaaccgtattttggagtttggaagagaaatcaaaagaaccagattaatcacaggagtcacaaaaaaggcagagacat

SEQ ID NO: 326201 - DNA, 452 bp, Homo sapiens
gtgggggctgagttccaggaaacccatgtatatcaaaatctgagaatactcacgttctgccattggccctgtggaacccccccacaaaagaaaactcagccaaaaaagtcagccctccctatataaggatttctcttcccacttttcagtctgagtttgggtgaaaagtctgcctacaagtggacatacgcagttaaatcagtgtcgttaaaggatcaactgtactttctctastggatgcttttcagcggtcctgtgacatgaaatattaaaacaatttctaccaggctttaacaacatatggtcaaacactgaaaaaagtcctctgctcctgcactttagttgcagattgtgggtaggaggaagaaactaagatgtgagaatgatgacacttaatcttgatgctgctaactgtagcaaagtaatagtaaactcagatttttttttttttt

SEQ ID NO: 326202 - DNA, 539 bp, Homo sapiens
aataatataagaaaatgtgatatgaccatatgcacttttttattgtgaacttgaaaatttgtttgattaggtaactgattcttaagctatttgaggagcaagtctaaatgctgattttaaaatagtgacataaaacattggaactaaataaaataactattgcaattcattagcaacattaccacatatttataaacataaagcaattaagaagtaaaaggtaatagccagatgtatatcaataaagaaacttttattttctaatgaattatttatttaaatgaagattagcctttttgaaaaaatgtttcctttttgatatgcatgcaataaatgatatgcattattttaatgaaaaaataaaacrattcttgagttaaagcttgtaagaacatattgaaaaccacatttgactgttcatttctcagtagccattggatattagtcatgcaattggttcaggtgagggaaaaaaaaaaagcaaggaaacataaataacagaagggtaattcgggtttaagaggacaattggagtagaa

SEQ ID NO: 326203 - DNA, 630 bp, Homo sapiens
ttgtcacttaaatgggatttaattgtctcttggaggcatatgttttagaaagtatgcttgtgtatcatgcatcatctgttatcttcctgccatcaccttcccacttccatgtctcagtcaatttccaacaacatgtgctatagattttgcatccatttattcaggttcacagcctcaattgaagtatctgcctttaaacagtcttagccctttgaaatatttgtctagtataatcctgatatattctccttgccctctggagcctcatgagattcctgagttagcttttttttttttttttgagatggagtctcactctgttgcccagactggagtgcagtggcgtgatctcagctcaccaaaacccccgcctcccaggttcaagcgattctcctgcctcagcctcatgagtagctggaattacaggcacaagccaccacgtcaggctaattttgtatttttttagtagaggcagggtttttccatgttggtcaggctggtctcraactcccgacctcaggtgatctgcccgcctcggcctcccaaagtgctgggattgcaggcataagctaccgcgccccacccctgagttagctattttccccagtgatgtgtggttggagtatgagg

SEQ ID NO: 326204 - DNA, 479 bp, Homo sapiens
ctgaggcaccaagtacttaagtaatttgcccattgtttattagcaaagctgattttaagaaccaggcagtttaatgccagagtcaatgattttaatacctttattgttgccgtagtccttgtctcattgtccctcttggttaaatacaagttcaaattaataaggaactaaataaataaattagaaaaaaatgttttcctagaaaatatgaaatattttcttttgraaattgttgggcctaacacatatcaaaatttttgaagaatattatgtcaattatattctcataacagagtattactaaagatatgacatttaagtgaataagaaaggtaaaagtattaatttgtatagcatatctttccaaattttgaatagttttcaccattttaaaggttttaaatatgtcagaaatataaatgaatctcatatattgttcaaaggggaatttaaatatagttggggcatatatagattaa

SEQ ID NO: 326205 - DNA, 561 bp, Homo sapiens
gggtagtttttaatgcagcagtgagatgcttttgcatttaatttataaatacagcatgccaagccatgcgctctttaaggtgcagycttgagaactgtccaaccctcttttgctgggatcctcctctcctctcctctcttctctcctcctcttcctccctagaggataagttggacctgggcagggtctgagttgatcctattcatgtattcaaatgtatgcagatgtatgcattttgtttaacaagttaattcatttgccaggccaggcagttgggggttttcacagtgtaatacccacactccattctcccttccacaccagattatgccctggagttttacttgcagaatttctggagttggagcctaatataggctggggggaggggctgcttgcctgttggagaagatggctgcagggtctccccaggataagatcaagggctctgtccagcctcccggttattctagaagccctgggaagtccagtgcacctggagaagtgtgcctccttgagaccacaaaacatgaccactcgtttctcccttatctgctgaaa

SEQ ID NO: 326206 - DNA, 561 bp, Homo sapiens
gggtagtttttaatgcagcagtgagatgcttttgcatttaatttataaatacagcatgccaagccatgcgctctttaaggtgcagccttgagaactgtccaaccctcttttgctgggatcctcctctcctctcctctcttctctcctcctcttcctccctagaggataagttggacctgggcagggtctgagttgatcctattcatgtattcaaatgtatgcagatgtatgcattttgtttaacaagttaattcatttgccaggccaggcagttgggggttttcacagtgtaatacccacactccattctcccttccacaccagattatgccctggagttttacttgcagaatttctggagttggagcctaatataggctggggggaggggctgcttgcctgttggagaagatggctgcagggtctccccaggataagaycaagggctctgtccagcctcccggttattctagaagccctgggaagtccagtgcacctggagaagtgtgcctccttgagaccacaaaacatgaccactcgtttctcccttatctgctgaaa

SEQ ID NO: 326207 - DNA, 560 bp, Homo sapiens
tagaaacagcatgtagtcagaccttgcttttatccattctgataatttctgtcttttaatttgagaattaggtccatttataattttaaaaattattcatattgttaaatttaagtctactttcaatatttgctttctcattgtcctattttttgttcccctcttctccactccctgccagctttttggattaattatttttcagtattctatttcatctcttccactgattttttttcagtaatacctttgtgttaatatttcatggttactctagggtgcaatatgcatcttcaacttaacacagtttgtctgtaaataatgttgcactattttacaaacaacgtaaaactcttaccrctgcataatgtgccctcactgctatatattttacttctacataaggtaaaaccccacaatacattgttataatttgtacttttgacaatagtcttctacagaagtttagaaatatatttacataacacataaatataatttttaatatcatcaggcttatactttttgatactcttcatttcttcccacaggcattattc

SEQ ID NO: 326208 - DNA, 615 bp, Homo sapiens
tcatacccactaaaaataacagcaattgtttaataccttctattacccagttgatgatcaatttttcttgattggctcaaaatgtgtttttacagttgattgctttgaatcaggtgataaacaaggttcatatattgcttttggttgggatttctcttacgtttctttcctccctcgcctcgcttccttctctcttcttcctcccttcttcctctgatactgaggtttaagctacgtaaaattaaaatgaacaatttgggcagggctcagtggctcacgcctgtaatcccagcactttgggaacctgaggctagaggatcccttgagcctgtgagtttgagaccagcctgggaaatatagtgagacctcttctctacaaggaatttaaaagtagccccagctactcaggaggctgaggtgggaggatcgcttgagcccaggacttcaaggttgcagagctatgagtgtgccacagcactccagcctgggaaacagtcagactctgtctagaaaaagaaaaaaaaattgatggatattggcaattgatacagcccatgcaacaaccaccyaaatcaacatatagaacacttatcacctcaaaaatttttctcatgc

SEQ ID NO: 326209 - DNA, 624 bp, Homo sapiens
gtgtgttaattatttggaagacaacaaaatgttgtaggtggtaataatgtcttttgctggcaataaagttaaaaaataaaattattttctgtgggactaaaatttcggaaggttatgtacagattttaatttatcgtctgtctctttctttgcacagctattcgtgtgcattagtcctttttcacattgctataaagaaatgcctgggacttggtaatttataaaggaaaggggtttaattgactcacakttccacatgactggggaggcctcaggaaacttatagctatggtggaaggcaaaggagaagcaggcaccttcttcacaaggcagcaggagagagagagtgaagggggaagggccccttataaaactatcatatctcatgagaactcactcattatcatgagaacaacatggaggaaaccacccccatgatcatttttgttcattaaaatgtgacaaaaatgaaaatcactcttgacatcacttgcaaacactttaatgaaggagcttgaatgaagaaataggaatcgatggagttatctttaaaagtaattttatttttgatttttttaaattgttgagaatagcagctcttgataccccaaaactgcctggtac

SEQ ID NO: 326210 - DNA, 624 bp, Homo sapiens
gtgtgttaattatttggaagacaacaaaatgttgtaggtggtaataatgtcttttgctggcaataaagttaaaaaataaaattattttctgtgggactaaaatttcggaaggttatgtacagattttaatttatcgtctgtctctttctttgcacagctattcgtgtgcattagtcctttttcacattgctataaagaaatgcctgggacttggtaatttataaaggaaaggggtttaattgactcacatttccacatgactggggaggcctcaggaaacttatagctatggtggaaggcaaaggagaagcaggcaccttcttcacaaggcagcaggagagagagagtgaagggggaagggccccttataaaactatcatatctcatgagaactcactcattatcatgagaacaacatggaggaaaccacccccatgatcatttttgttcattaaaatgtgacaaaaatgaaaatcactcttgacatcacttkcaaacactttaatgaaggagcttgaatgaagaaataggaatcgatggagttatctttaaaagtaattttatttttgatttttttaaattgttgagaatagcagctcttgataccccaaaactgcctggtac

SEQ ID NO: 326211 - DNA, 606 bp, Homo sapiens
gaaaatacaaacaaatattaaaacatgccacaaaggcaaaaataaatcatctgtacatttccaaataatagaactaaaattaaaaatgaatcactgaatatcaaagcatttatatcaaaggaaaagattagagtgatttaattatcctactctaaagactaatacagcttaataagatagagtgtacaaagtaaagtagcaagggacaaagaatataaacaattcccactccaggcctggcgtagtggctcatgcctgtaatcccagcactttgggaggccgaggcaggtggatcacgaagtcaggagttcaagaccagcctggccaacatggtgaagccctatctctactaaaaatacaaaaattagctggacatggtggcacgtgcctgtaatcccagctactcgggaggctgaggcaggagaattgcttgaaccaggacccaggaggcggaggtagtagtgagcaagatcgcaccactggactccagcttgggctacagagygagactctatctcaaaaaaaaaaaaaaaagaaagaaaaaaaaaaagaagaaagaattcccactccagagaagacagcagcagctacattttgtacagctct

SEQ ID NO: 326212 - DNA, 591 bp, Homo sapiens
caggctgtgaaatataaaggtatggaaaggtctgagtggcatagaataaatgttagctagtattagtatcattatcatcatcatcatcatctcaatgttgaatcttcacaatgattccatgagaaatgcatcattctccctattttgtagaacagaaaaattagactgaagaatgtgaaactacacatcaagaaatagcaagaaacaagactctacacccaagttccctttgwtaaagtaagactgcctcaaaccctcaagtaataaattgaggaaagttaaaataatgagtaatttttatatctgcatctcttttttctccagccagccaggatgctaccagtccccatcagctgtgggtacaaaggaggttttttatcccaatcctgctggtgcagttgcagcaccacggccctcaagccagagttccttccagactccctgtctctcttgccctccacacctacacgtctctggcttgtgcccaccttttaaagcaactctgggaggccatgcccaggtccatctccctggggtcttcaaaggatatttccttgacttgggacagggctaagcacctcccaccaagta

SEQ ID NO: 326213 - DNA, 591 bp, Homo sapiens
caggctgtgaaatataaaggtatggaaaggtctgagtggcatagaataaatgttagctagtattagtatcattatcatcatcatcatcatctcaatgttgaatcttcacaatgattccatgagaaatgcatcattctccctattttgtagaacagaaaaattagactgaagaatgtgaaactacacatcaagaaatagcaagaaacaagactctacacccaagttccctttgttaaartaagactgcctcaaaccctcaagtaataaattgaggaaagttaaaataatgagtaatttttatatctgcatctcttttttctccagccagccaggatgctaccagtccccatcagctgtgggtacaaaggaggttttttatcccaatcctgctggtgcagttgcagcaccacggccctcaagccagagttccttccagactccctgtctctcttgccctccacacctacacgtctctggcttgtgcccaccttttaaagcaactctgggaggccatgcccaggtccatctccctggggtcttcaaaggatatttccttgacttgggacagggctaagcacctcccaccaagta

SEQ ID NO: 326214 - DNA, 591 bp, Homo sapiens
caggctgtgaaatataaaggtatggaaaggtctgagtggcatagaataaatgttagctagtattagtatcattatcatcatcatcatcatctcaatgttgaatcttcacaatgattccatgagaaatgcatcattctccctattttgtagaacagaaaaattagactgaagaatgtgaaactacacatcaagaaatagcaagaaacaagactctacacccaagttccctttgttaaagtaagactgcctcaaaccctcaagtaataaattgaggaaagttaaaataatgagtaatttttatatctgcatctcttttttctccarccagccaggatgctaccagtccccatcagctgtgggtacaaaggaggttttttatcccaatcctgctggtgcagttgcagcaccacggccctcaagccagagttccttccagactccctgtctctcttgccctccacacctacacgtctctggcttgtgcccaccttttaaagcaactctgggaggccatgcccaggtccatctccctggggtcttcaaaggatatttccttgacttgggacagggctaagcacctcccaccaagta

SEQ ID NO: 326215 - DNA, 571 bp, Homo sapiens
aaaagaaagcttggaaacattttggagtaggagctaagacctgaagctgagccttctttttccgccttgctgctgcgatcattcctccctccccaggyaggtgctaagggcactgtttgaggggttcattccccagggcctgggaggttcaggtcaaaagcaagcacgaatgagaggtgcagccacatttactcatgttggaaatactgtattgaaaaaatacactcatgattgctgtgggagaatgggtacgttgacacgcttgtaaagtaaaacataatataaaaccatatcaatttgtatctaaaaattgttttcctttaagaatatacccaaaggatataattcaaaattggaaaatgtatagcacacacacattaaatatatactttaaaataatatttatgtagtagaaatgaggaagtaaaatacatgtctaaagataggtacatagcattatggtatataaatatgatataatattatgaaataaattaagatatgaaactcttaagcatataatgactatacaacatatgaaaatgtttctggtagaatattaaatttaaaa

SEQ ID NO: 326216 - DNA, 646 bp, Homo sapiens
tattccagtggccaggcttggtggctcccacctataatcccagcgatttgggaggccaagtgttttgggattctcaaggatcacttgaggccaggaattcgagaccaacgtgggaaccatagcaaggccctgactttctacataaaatatatatatatatgtttgggcaccatagtgcacatctgtagtcctagctactcaggaggatgaggcaggaagactttttgaacccagaagttcaaagtaacagtgagccatgattttaccactgcactcctccccgggcaacagagtgagatccyatctaaaacaaaacaaaacaaaacaaaactaagcaagcatttataattttagaatttggggtattcaaagttaatttaatttagttaaaataaaaaacctctgcttaacacttgcaatgtgcaattgcttttatttttggctttgtaaaatttgaattccaattccaagctgaacaaagagagatctctcttagaggtacatgagcatttacaaaaaggaggggactggttaaaacgtgtcttgaaaaatatagaaataaagggagacttacaaaaatgccatcaacactttccacatgcaattatcattgttattatcttattaataacacaaaagtagatag

SEQ ID NO: 326217 - DNA, 512 bp, Homo sapiens
taaagtctcatacacaaggctgtaattgaygaaaaatctaattaagtctttttggagaggagggatcaaaactacataaattatgtactaatttattcataaaaacattgagaagtctatgtagaaactcaggacatagaaatggggatagaaaacatgtatgtctaaaaagcagaaaacatcagaaataataaaagtttcaagtttttgagtttttcttcattttttttccgtttggtttactatataaacaactttgatccaaaaataaaaattgtgaatgataagattgcagactattttgttatcatatattgcctgagttaattttcaacatttttgtaaattacttgcaaaaatttcaaatttcaatctgtgcagagtctttaaacaagaataaaattctttagtttgaaggttaaaaataaatctctgcttctcttttctttttctgcctgaaaatacaaatcatacaacaatctcttatagtcataggcattgatatctaatgc

SEQ ID NO: 326218 - DNA, 578 bp, Homo sapiens
ggatctgcaggggtgttcctacatctttagcccatagggactagcctggtactagtgtccattggggtggacatgaaccctgggtctactggagcaggcctggactctgaggcaatgaatcctggggccaccatgactagcctggatcttaggtctgtaggtgctggtttggaacctggggccatgggtgttagactggtgctggggctggcctgaagtctcagtctgtgggaattaacctgtgtactcaggccatggtgaccagcctggagcctgtatccataggaatgaccctggaacatgactctttaggggacagcccagcatatatatctactgggttggggttgatccctgggtctactggaaaggacctggaccctgggtcttccaaagaatgagtccacaggggccagcctaaatcctggagtcctggagactggcctggactctgggmtcatggaggccagcttgaaaacaaaatgtgtggatgctaccctagaagctaggtctgcaaggactgacctatggcctgggacttcaggggcttctcctggaagctgaagatgtagggatta

SEQ ID NO: 326219 - DNA, 525 bp, Homo sapiens
tggaaaataattttataatggtgartatgatttaataatttctaaaaagttccatgttaactagtcatgggttttcataatagtcaaaataatttttatcatgctttggtatcaagcccaaaatctgtgttgttaaacacaatgtttttttttttttaatttgtgattgttggaggttggcaagagactgggaagggagactccaccacgcaggccacagtgtgcccaccttgtagctccacctcccgaaacatgaggttttctaagatatggagcccaggaaagagacagagcactaggtcttacaccggcaattaactcctcagcctagaagtgacatgccatttcttcttatagagtattggccagaattagtcacaaggtcctacctatccacagaagggtggggaaatggagttttccattcatctaaaaggagagaagaaccacatatgagtgaccttcaaagataccttatacaagtgtgacaaactctggagggatttctggtggccctgcctttaa

SEQ ID NO: 326220 - DNA, 687 bp, Homo sapiens
ttgcttgcaaaatcatccttgaatattttaagatatcttataaagaaagaaacaaagcaaacaaaaaacaaaagtaaacaaacaacaaaacttctccctttacctgtttgttttacatgtagaaattgtaaatgtagaaattgttctcctgtgcataaaattacataagtatttatgctgattatctgtttatagttayaccgttttatctttcagacatttcctatgttgtgagctacagttacttctgagactccaagtctttgctttgtttatgctgttttctcaggtcccagtgccttctgcatctcacactggattgcaaactctcatccttaaagactcaaattctagtttcaggacgactcttcccgtccctcacaccattaagcccttcttctcttagaggacttagaatatgcgtaaatccacctacttaactctaaagatgattagagagactgtgaatgtcaggttcccaatcagaaatttcactggaaatagtgtctaactcaaatttcatttgcttctcaataacaagaagacaaataacccaattaaaaattggacaaactccctgatagacatttctcagaagaaatacaaatgaccaagtatattttaaaaaatgctcagcatcactaatcagtaggtaaatgcaaaataaaaccacaatgagatatcacc

SEQ ID NO: 326221 - DNA, 687 bp, Homo sapiens
ttgcttgcaaaatcatccttgaatattttaagatatcttataaagaaagaaacaaagcaaacaaaaaacaaaagtaaacaaacaacaaaacttctccctttacctgtttgttttacatgtagaaattgtaaatgtagaaattgttctcctgtgcataaaattacataagtatttatgctgattatctgtttatagttataccrttttatctttcagacatttcctatgttgtgagctacagttacttctgagactccaagtctttgctttgtttatgctgttttctcaggtcccagtgccttctgcatctcacactggattgcaaactctcatccttaaagactcaaattctagtttcaggacgactcttcccgtccctcacaccattaagcccttcttctcttagaggacttagaatatgcgtaaatccacctacttaactctaaagatgattagagagactgtgaatgtcaggttcccaatcagaaatttcactggaaatagtgtctaactcaaatttcatttgcttctcaataacaagaagacaaataacccaattaaaaattggacaaactccctgatagacatttctcagaagaaatacaaatgaccaagtatattttaaaaaatgctcagcatcactaatcagtaggtaaatgcaaaataaaaccacaatgagatatcacc

SEQ ID NO: 326222 - DNA, 532 bp, Homo sapiens
aataaaaccacaatgagatatcacctcacaccaattagaatagctatcatgaaaatgatgaacaataacaagtgttggtgaggatgtagagataataactcttgtgtacattgttgatgagaatgccaattagtatagccrttgtggaaaacagtacataggtttccccaaaaattaaaaatagaactaccatatgattcagtaatcttacttctggttatagatccaaaggaaatgcaatcaatatgttgaagagatttctgcactcccatgttcattgcagtgttattcacaatagccaagttatggaatcaacctaagtgtccaagggatgaatggataaagaaaatgcggtacatatacacaatggaatactactctcatttttaaaagaaggaaatcttgtcatttgcacaatatggatgaacctggaggacaatgtgttaagtgaaataatccaggcacagaaagacacatactgcctggtcttacttatatatggaatctaaacaagttgaactgatagaagcag

SEQ ID NO: 326223 - DNA, 532 bp, Homo sapiens
aataaaaccacaatgagatatcacctcacaccaattagaatagctatcatgaaaatgatgaacaataacaagtgttggtgaggatgtagagataataactcttgtgtacattgttgatgagaatgccaattagtatagccgttgtggaaaacagtacataggtttccccaaaaattaaaaatagaactaccatatgattcagtaatcttacttctggttatagatccaaaggaaatgcaatcaatatgttgaagagatttctgcactcccatgttcattgcagtgttattcacaatagccaagttatggaatcaacctaagtgtccaagggatgaatggataaagaaaatgcggtacatatacacaatggaatwctactctcatttttaaaagaaggaaatcttgtcatttgcacaatatggatgaacctggaggacaatgtgttaagtgaaataatccaggcacagaaagacacatactgcctggtcttacttatatatggaatctaaacaagttgaactgatagaagcag

SEQ ID NO: 326224 - DNA, 532 bp, Homo sapiens
aataaaaccacaatgagatatcacctcacaccaattagaatagctatcatgaaaatgatgaacaataacaagtgttggtgaggatgtagagataataactcttgtgtacattgttgatgagaatgccaattagtatagccgttgtggaaaacagtacataggtttccccaaaaattaaaaatagaactaccatatgattcagtaatcttacttctggttatagatccaaaggaaatgcaatcaatatgttgaagagatttctgcactcccatgttcattgcagtgttattcacaatagccaagttatggaatcaacctaagtgtccaagggatgaatggataaagaaaatgcggtacatatacacaatggaatactaytctcatttttaaaagaaggaaatcttgtcatttgcacaatatggatgaacctggaggacaatgtgttaagtgaaataatccaggcacagaaagacacatactgcctggtcttacttatatatggaatctaaacaagttgaactgatagaagcag

SEQ ID NO: 326225 - DNA, 546 bp, Homo sapiens
tgtctgaaagatcacatatctctgtttcttcaggattgctctctggtgccttatttagtttatttggtgaagtcatgttttcctggatggtgttgatgcttgtagatgttctttggtgtctgagcattgaagasgtaggtattttttgcattttttacggtctggatgtgttagtccctgtcctttttgggaaggttttccagatattgaagggacttgggccccaagccttataacactgtggttttattggtaccaccttgatgatcttggataagatccagaagaattctctggattaccagggaaagactcctgttctttccccttactttttcccaaacagagtatctctctgttctgagccacctggcactgggggtgtggtgatgcaagcacccctgtggtggcaagcaccccaagagagggttcttggatctcaggaaagaaagaattcaggcaaagcccatagagtaaagtgaaagcaagtttattaagaaagtaaaggaataaataatggctactccataggtaaagcagccaagg

SEQ ID NO: 326226 - DNA, 546 bp, Homo sapiens
tgtctgaaagatcacatatctctgtttcttcaggattgctctctggtgccttatttagtttatttggtgaagtcatgttttcctggatggtgttgatgcttgtagatgttctttggtgtctgagcattgaagacgtaggtattttttgcattttttacggtctggatgtgttagtccctgtcctttttgggaaggttttccagatattgaagggacttgggccccaagccttataacactgtggttttattggtaccaccttgatgatcttggataagatccagaagaattctctggattaccaggsaaagactcctgttctttccccttactttttcccaaacagagtatctctctgttctgagccacctggcactgggggtgtggtgatgcaagcacccctgtggtggcaagcaccccaagagagggttcttggatctcaggaaagaaagaattcaggcaaagcccatagagtaaagtgaaagcaagtttattaagaaagtaaaggaataaataatggctactccataggtaaagcagccaagg

SEQ ID NO: 326227 - DNA, 574 bp, Homo sapiens
aattttaataagttttttgaagaaaagactttttgttttattgattttctttattgtgtttctctttccaattttacttgtttctgctattatgattataattttcttccttattcttgctttgcattgttggggaggtaaagtaagttgatgctttatagttcttagttggaacagacccttgtaataaaatacagattaaccagagaaaaacaaagagaagtttattaacatgtgtgcctgatgtatacatgagtgatgctaaaagaaatgaggttttgacttcaggctcagataccctcatgtgctgaatgaccctaggaaagaaacctgtggggaagggctggatttggggagatggtgctttaaacaagggtaaggcctgttatgctgattcagttggtgccttgtctagtgatttagtcatccttctttttctgcagagaaggagacaaccttacaaatagagatttcctttatagatgtaaatttcacttacaaaaggttatcttctactctgttttcatagattcttccragagtctgcattttctcaaaataaactactcaaaat

SEQ ID NO: 326228 - DNA, 648 bp, Homo sapiens
ggtaacaagttaataaatcaggctgagtacgtggagtttaccaatttawgcatagttttagagatagctgtaaaaacagaatctatttggaactttttaataacatttacatgcagagttatccatggttggtgttttccagaaatgttaaagtaaaaggaaatgctcacctatttctagatagtcagattataggaatatagtcagttatccaaactgtaaatgtgtcaactccttaactctctggaaacccaataaacttgatgaagatagaaatgggcttggtgagcaggttcaaaagatttcagtttttatgtttctttgaaaattgatgcttaaactctctgggcctcattttctaagtggggttctaacttagagttagagagggttaatcagggttctaactaaactctctgggcctcattttctaagtggggttctaacttagagttagagagggttaatcagggttctaacttactgtttggtgtttaaattttgtagcttcaactagggttaattcaaaatgaaagtaaatatgactttgattttcattgggatgaaataactaagccattttgaatgtgattgggttacttatgtttacaatgttaatttaattttagtattggttgtagattatgg

SEQ ID NO: 326229 - DNA, 648 bp, Homo sapiens
gggaaggaaaaacagagctgatttttcctattactgtctgaagcctaaagattcaaactcaatactaattgaaacttgggaagtgctgtgtaggaaaaaaattgatttatagcttgacagaaaagtctaactttatctctggagacagctgggtgtcttgtttgacacttaccatgctaagggtagtgggatccgtgatatactatttaaagtccaaaattcycctggaagtccttaaggccagtttgcttttgggtgttgttttcatctgcataaccagtgagcctgcctcacttgactctttgaacagaggggcactaaacctcactggaagttgtgccttgacctcttcaggagactaaattcctttcacaaatcttggtggcttgacccagggacacagggctcttatttaaaggcaggggctcctgggcagcatccagggctcttactcaagagccttttgtgacatgctcagtggagtctggtaagtccttgcaagtatcccaacccgtgatgctcacaggtgccaggctgcctcagacaacattggtttgttggtgggaggcagcgagaagcccagctgtgaggagttgaggaaaacagaggtagtcaaatgagatacagtggagtttatgagtcacaaaa

SEQ ID NO: 326230 - DNA, 533 bp, Homo sapiens
ctgcaggagcaatgtgtaatgtcttcagactggaagaagctcgggaaggacccaattagtgagagccctgaagcccggacttatcagcagcctccagcagacattgtactccctccacccattctctacaagtttatcttttctcaacatcctacagtaatagtaaagggagttttgtagttccaactatttcttagggggaaatgagaaaagtrcagccagggaaaagcttcaaaatacttttgttgctaggaagagttagtgcacattcttttctttgtttttctgaaacacaagggcttacattactacaattatgtgcaaattagccctaagagttggcgtggtattacttttttttttttaatggcctacaaagacactttttaaaaatatagcagcagaaattagaattactttttaccttagggtttgtacaattttttgttacgtgcataaacttattactattccttaaccaccttatgtaactgggaataaggaatgttccttaagagaattagggcataagc

SEQ ID NO: 326231 - DNA, 533 bp, Homo sapiens
ctgcaggagcaatgtgtaatgtcttcagactggaagaagctcgggaaggacccaattagtgagagccctgaagcccggacttatcagcagcctccagcagacattgtactccctccacccattctctacaagtttatcttttctcaacatcctacagtaatagtaaagggagttttgtagttccaactatttcttagggggaaatgagaaaagtgcagccagggaaaagcttcaaaatacttttgttgctaggaagagttagtgcacattcttttctttgtttttctgaaacacaagggcttacattactacaattatgtgcaaattagccctaagagttggcgtggtattacttttttttttttaatggcctacaaagacactttttaaaaatatagcagcagaaattagaattactttttaccttagggtttgtacarttttttgttacgtgcataaacttattactattccttaaccaccttatgtaactgggaataaggaatgttccttaagagaattagggcataagc

SEQ ID NO: 326232 - DNA, 533 bp, Homo sapiens
ctgcaggagcaatgtgtaatgtcttcagactggaagaagctcgggaaggacccaattagtgagagccctgaagcccggacttatcagcagcctccagcagacattgtactccctccacccattctctacaagtttatcttttctcaacatcctacagtaatagtaaagggagttttgtagttccaactatttcttagggggaaatgagaaaagtgcagccagggaaaagcttcaaaatacttttgttgctaggaagagttagtgcacattcttttctttgtttttctgaaacacaagggcttacattactacaattatgtgcaaattagccctaagagttggcgtggtattacttttttttttttaatggcctacaaagacactttttaaaaatatagcagcagaaattagaattactttttaccttagggtttgtacaattttttgttacgtgcataaacttattactattccttaaccaccttatgtaactgggartaaggaatgttccttaagagaattagggcataagc

SEQ ID NO: 326233 - DNA, 565 bp, Homo sapiens
cctagcactttgggaggccgaggcaggtggatcaactgaggtcaggagtttgagagcagcctaaccaacatggggaaaccccgtctccactaaaaatacaaaaaaaaagtagctggacatggtggtgggcccctgtaatcccagctgcttgggaggctgaggcaggagaatcgctagaacctccgaggaggtggaggttgcagtgagctgaaatcacaccatggcactctagcccagggaacacagtgagactccatctcaaaaaaaaaraaaaagaaaaagaaaaagaaaaacgtttcaggatgatggggttcactctgggttaagaaaacttgaacattgaaataagtcgtgagagcaatgagtataatccattgaataaaataagaaaaagaggaaaaaattgttaacatttgttaagttgaagtaaatggcagttgagaattttttatatcattctcaaaacttgtctttaggtgtgatactttattaaaacaaaaacctttaaaaaagtatctcacaagatataaacagaggataaaaaagcatgcatgcaagagcaatg

SEQ ID NO: 326234 - DNA, 641 bp, Homo sapiens
agaacatttccttaattttcctaaatccttttgccatcagctgagtcaaaaattctactagtgaagaaaaatatccttagtttaaaactttattttatattaaaattctgtcttcttgattttggggaaacgaattatttctattaattatatataattattattggtagaactaataatgataaaaatagaatcatgtttcaagtgctttgtcatatgtcagtcactgggcccaattttccatacacctaagtctttatgaagacaacaataaagaatgcccaggtggaggagaggttcttcttatccccattgcatagttaggggtattacagagcattgttaatccccacagtttaggccacaccattagtgattaaaggcagaatgttcatccccagagcccctttcttttgatcactgtgtgccttgtttattacctagtttaatcatttaacattggtaaagataatgtcctgtgagaatatgmgaatataagaatataattagaatgtaagaatgttcctgcactggctcatgcagtctcttccaccattgtttttgtcaattaaaatcctttataatcatccttccagatcagttcaaatgttacaggcatcaggaagtttgcctcagtccct

SEQ ID NO: 326235 - DNA, 535 bp, Homo sapiens
gtacacaactattgaacatattttaatttgttccacaatattgggtrgagggagtgcaatatttcttgatcttctctgagctacacccacctacaagtggaaagttaaatcagttggaagtgcaggggagaaagggacacacacacacacacacacacacacacacacgaagctggcaacaaacacactaatgtctgatgactctacatttttgctaaagagcacatcagaagaaaaacttgttagtttggttccctggggacaagtggcataccaaagagattaaatgaccagatctggagtgcttttaggcagaggagggggccactctaaatctcagttctctaatttgttttaagaattagaatagaaaatacctggcatttaaaaagatattttagctgtaatagtcatagtgtattcttactgcacagatgactataggcaagattcttagctttactgagcttgtttcctcatgtctaatctcctcctggagtttctcatacttaattttgaaatgtactgtttataa

SEQ ID NO: 326236 - DNA, 535 bp, Homo sapiens
gtacacaactattgaacatattttaatttgttccacaatattgggtggagggagtgcaatatttcttgatcttctctgagctacacccacctacaagtggaaagttaaatcagttggaagtgcaggggagaaagggacacacacacacacacacacacacacacacacgaagctggcaacaaacacactaatgtctgatgactctacatttttgctaaagagcacaycagaagaaaaacttgttagtttggttccctggggacaagtggcataccaaagagattaaatgaccagatctggagtgcttttaggcagaggagggggccactctaaatctcagttctctaatttgttttaagaattagaatagaaaatacctggcatttaaaaagatattttagctgtaatagtcatagtgtattcttactgcacagatgactataggcaagattcttagctttactgagcttgtttcctcatgtctaatctcctcctggagtttctcatacttaattttgaaatgtactgtttataa

SEQ ID NO: 326237 - DNA, 535 bp, Homo sapiens
gtacacaactattgaacatattttaatttgttccacaatattgggtggagggagtgcaatatttcttgatcttctctgagctacacccacctacaagtggaaagttaaatcagttggaagtgcaggggagaaagggacacacacacacacacacacacacacacacacgaagctggcaacaaacacactaatgtctgatgactctacatttttgctaaagagcacatcagaagaaaaacttgttagtttggttccctggggacaagtggcataccaaagagattaaatgaccagatctggagtgcttttaggcagaggagggggccactctaaatctcagttctctaatttgttytaagaattagaatagaaaatacctggcatttaaaaagatattttagctgtaatagtcatagtgtattcttactgcacagatgactataggcaagattcttagctttactgagcttgtttcctcatgtctaatctcctcctggagtttctcatacttaattttgaaatgtactgtttataa

SEQ ID NO: 326238 - DNA, 423 bp, Homo sapiens
ccctcagaagcatttcttcacagtccagatagtcaggaagccattaaattccaaatccaaggtttcttcccaggacaaagcrtgaagccagaatctcaaatctatagtctgttcacattttcaaatgaacatggttgccttttaaggagaggctagtgcctctgaaaaacttcacttaagaattaattgcatatatgaatcaaaaacagactaatcaacaagtaaatgttgaatttttcataggcttttggcaattgttattataatagacattaaaagacaaatgcatctatcagtccatttaaatcagtgttattatccatattgacttacaaatattaaacacatcttcctgtaaaacataataacataccctgttttagaactttttgaaggtccacgtgcagctgaagaaatgttcgt

SEQ ID NO: 326239 - DNA, 423 bp, Homo sapiens
ccctcagaagcatttcttcacagtccagatagtcaggaagccattaaattccaaatccaaggtttcttcccaggacaaagcatgaagccagaatctcaaatctatagtctgttcacattttcaartgaacatggttgccttttaaggagaggctagtgcctctgaaaaacttcacttaagaattaattgcatatatgaatcaaaaacagactaatcaacaagtaaatgttgaatttttcataggcttttggcaattgttattataatagacattaaaagacaaatgcatctatcagtccatttaaatcagtgttattatccatattgacttacaaatattaaacacatcttcctgtaaaacataataacataccctgttttagaactttttgaaggtccacgtgcagctgaagaaatgttcgt

SEQ ID NO: 326240 - DNA, 423 bp, Homo sapiens
ccctcagaagcatttcttcacagtccagatagtcaggaagccattaaattccaaatccaaggtttcttcccaggacaaagcatgaagccagaatctcaaatctatagtctgttcacattttcaaatgaacatggttgccttttaaggagaggctagtgcctctgaaaaacttcacttaagaattaattgcatatatgaatcaaaaacagactaatcaacaagtaaatgttgaatttttcataggcttttggcaattgttattataatagacattaaaagacaaatgcatctatcagtccatttaaatcagtgttattatccatattgacttacaaatattaaacacatcttcctgtaaaacataataacataccctgttttagaactttttgaaggtccrcgtgcagctgaagaaatgttcgt

SEQ ID NO: 326241 - DNA, 423 bp, Homo sapiens
ccctcagaagcatttcttcacagtccagatagtcaggaagccattaaattccaaatccaaggtttcttcccaggacaaagcatgaagccagaatctcaaatctatagtctgttcacattttcaaatgaacatggttgccttttaaggagaggctagtgcctctgaaaaacttcacttaagaattaattgcatatatgaatcaaaaacagactaatcaacaagtaaatgttgaatttttcataggcttttggcaattgttattataatagacattaaaagacaaatgcatctatcagtccatttaaatcagtgttattatccatattgacttacaaatattaaacacatcttcctgtaaaacataataacataccctgttttagaactttttgaaggtccaygtgcagctgaagaaatgttcgt

SEQ ID NO: 326242 - DNA, 478 bp, Homo sapiens
aaaacggaggtctttttttaatgccaatagagcttttaaggataatttaaacatatggatrttttcctcaagatgttttgtcaattagtagtggagaggaggacaccagcaaagagcagtcctttatcaaaaacactgcaaaaatactttggttacttgcttccttacaaaatcattatatcaagcaactgcatgcaggaacttagattgaacacaaagctccaaatatttttatctctattgatccctagcagatgtaacagaaagaaaagatgaacagtcaacctgatttcaatatagatattttgtggcagcaagaaaggagatgccagttgaatcacaattaattgtgaatctgcttgaggcagcctcatgaaaaaaaataatcttttagtctgcctcctacattcagaggctacctcagtcttctgaagaaatgttaaattatctgagggataactctaggtgagtcaagggt

SEQ ID NO: 326243 - DNA, 478 bp, Homo sapiens
aaaacggaggtctttttttaatgccaatagagcttttaaggataatttaaacatatggatattttcctcaagatgttttgtcaattagtagtggagaggaggacaccagcaaagagcagtcctttatcaaaaacactgcaaaaatactttggttacttgcttccttacaaaatcattmtatcaagcaactgcatgcaggaacttagattgaacacaaagctccaaatatttttatctctattgatccctagcagatgtaacagaaagaaaagatgaacagtcaacctgatttcaatatagatattttgtggcagcaagaaaggagatgccagttgaatcacaattaattgtgaatctgcttgaggcagcctcatgaaaaaaaataatcttttagtctgcctcctacattcagaggctacctcagtcttctgaagaaatgttaaattatctgagggataactctaggtgagtcaagggt

SEQ ID NO: 326244 - DNA, 478 bp, Homo sapiens
aaaacggaggtctttttttaatgccaatagagcttttaaggataatttaaacatatggatattttcctcaagatgttttgtcaattagtagtggagaggaggacaccagcaaagagcagtcctttatcaaaaacactgcaaaaatactttggttacttgcttccttacaaaatcattatatcaagcaactgcatgcaggaacttagattgaacacaaagctccaaatatttttatctctattgatccctagcagatgtaacagaaagaaaagatgaacagtcaacctgatttcaatatagatattttgtggcagcaagaaaggagatgccagttgaatcacaattaawtgtgaatctgcttgaggcagcctcatgaaaaaaaataatcttttagtctgcctcctacattcagaggctacctcagtcttctgaagaaatgttaaattatctgagggataactctaggtgagtcaagggt

SEQ ID NO: 326245 - DNA, 524 bp, Homo sapiens
acatgttagctattatgatgtggttgttatgatgagcactcaccacctgtttgttgaatgaatgaattaaactattgatttccacacagctttatagtctccatgtttagaggaataaaatagattgtacaagatatctgaaaatcccaaagggatgcatagttacatttacctttagaatgttgccagtctttgatgtcacagaacacacagtctgatggtttaaatgctctcctcctcaaattctgtttttttttctctcccacccatccttattgccaaccaccccttagttgataagtggagaaaggaagagggttatgaagatktcaggtcactgcagatgaaacatacaaagacaaacccagggcttcccatattatattgaatatagagaatgccttaggggaactctaagaagcttgaagtcattttccctttagaaatcataaagaggtcagtgatttataattcagaagaacaatggacaggaaaagttctctacctgcccgtgcaagcaacga

SEQ ID NO: 326246 - DNA, 545 bp, Homo sapiens
gaacacattatggtcacgaacaaagtctgtgttcttttaaaaggaaagggagacaggattttgagcaggaaaaaagtgaggactgccgtacatagtagtcttcatgaaagtcctgtaagatgggtgttactatttctgtgaagcatgctataggcaaagttaaatargcttttaaataagttgtgaaaattatgtttgcacccaagaagtcacatttggatgggaattattacaaagaatttttcatcaatatgattcaaagaaatatagagtaatcacaaggaactttcacaagcttagaattgtttgcgcttagcaatattctccagtgtacgagtatcattatacttccatcctactaggcttcttcagttcctctcacccactgggggctttgttcttgttttctatgtttcaaaacctgtttgatctggtgttgaggctatccagattcttttttccttcaggtttcagttcaaatgccatctgccctggacggtgttccagctccccatctgggtattacctatccccaagtcattctc

SEQ ID NO: 326247 - DNA, 545 bp, Homo sapiens
gaacacattatggtcacgaacaaagtctgtgttcttttaaaaggaaagggagacaggattttgagcaggaaaaaagtgaggactgccgtacatagtagtcttcatgaaagtcctgtaagatgggtgttactatttctgtgaagcatgctataggcaaagttaaataggcttttaaataagttgtgaaaattatgtttgcacccaagaagtcacatttggatgggaattattacaaagaatttttcatcaatatgattcaaagaaatatagartaatcacaaggaactttcacaagcttagaattgtttgcgcttagcaatattctccagtgtacgagtatcattatacttccatcctactaggcttcttcagttcctctcacccactgggggctttgttcttgttttctatgtttcaaaacctgtttgatctggtgttgaggctatccagattcttttttccttcaggtttcagttcaaatgccatctgccctggacggtgttccagctccccatctgggtattacctatccccaagtcattctc

SEQ ID NO: 326248 - DNA, 545 bp, Homo sapiens
gaacacattatggtcacgaacaaagtctgtgttcttttaaaaggaaagggagacaggattttgagcaggaaaaaagtgaggactgccgtacatagtagtcttcatgaaagtcctgtaagatgggtgttactatttctgtgaagcatgctataggcaaagttaaataggcttttaaataagttgtgaaaattatgtttgcacccaagaagtcacatttggatgggaattattacaaagaatttttcatcaatatgattcaaagaaatatagagtaatcacaaggaactttcacaagcttagaattgtttgcgcttagcaatattctccagtgtaygagtatcattatacttccatcctactaggcttcttcagttcctctcacccactgggggctttgttcttgttttctatgtttcaaaacctgtttgatctggtgttgaggctatccagattcttttttccttcaggtttcagttcaaatgccatctgccctggacggtgttccagctccccatctgggtattacctatccccaagtcattctc

SEQ ID NO: 326249 - DNA, 545 bp, Homo sapiens
gaacacattatggtcacgaacaaagtctgtgttcttttaaaaggaaagggagacaggattttgagcaggaaaaaagtgaggactgccgtacatagtagtcttcatgaaagtcctgtaagatgggtgttactatttctgtgaagcatgctataggcaaagttaaataggcttttaaataagttgtgaaaattatgtttgcacccaagaagtcacatttggatgggaattattacaaagaatttttcatcaatatgattcaaagaaatatagagtaatcacaaggaactttcacaagcttagaattgtttgcgcttagcaatattctccagtgtacgagtatcattatacttccatcctactaggcttcttcagttcctctcacccactgggggctttgttcttgttttctatgtttcaaaamctgtttgatctggtgttgaggctatccagattcttttttccttcaggtttcagttcaaatgccatctgccctggacggtgttccagctccccatctgggtattacctatccccaagtcattctc

SEQ ID NO: 326250 - DNA, 450 bp, Homo sapiens
taaaattacaggcagtagataaagcccaaatcacaaaatgattcttgtggactattttaaagctcagactcccacaatccatgcctagaacaggcatgcaaatatgagacctttgacatcagaaaatataaaccaagaacaaacaaaaagcagatacttaggaattctaaaatttgagaatttttacagtgcccagcattaaaaacaatactgtaccccagagcaaacatgatatttcatacatattacactataaaaagaccaaaagaatttgaaaataatttttggaatctcaasagaattgggtcaaacttttgaatgttcatggcactgtaaaataaataaagtagggatttgactataatctcttgagtgttttaatcaacaattatactactcaatttagatttcaaagtagaatctgtttctttaaatttaaatatattcatc

SEQ ID NO: 326251 - DNA, 450 bp, Homo sapiens
taaaattacaggcagtagataaagcccaaatcacaaaatgattcttgtggactattttaaagctcagactcccacaatccatgcctagaacaggcatgcaaatatgagacctttgacatcagaaaatataaaccaagaacaaacaaaaagcagatacttaggaattctaaaatttgagaatttttacagtgcccagcattaaaaacaatactgtaccccagagcaaacatgatatttcatacatattacactataaaaagaccaaaagaatttgaaaataatttttggaatctcaacagaattgggtcaaacttttgaatgttcatggcactgtaaaataaataaagtagggayttgactataatctcttgagtgttttaatcaacaattatactactcaatttagatttcaaagtagaatctgtttctttaaatttaaatatattcatc

SEQ ID NO: 326252 - DNA, 450 bp, Homo sapiens
taaaattacaggcagtagataaagcccaaatcacaaaatgattcttgtggactattttaaagctcagactcccacaatccatgcctagaacaggcatgcaaatatgagacctttgacatcagaaaatataaaccaagaacaaacaaaaagcagatacttaggaattctaaaatttgagaatttttacagtgcccagcattaaaaacaatactgtaccccagagcaaacatgatatttcatacatattacactataaaaagaccaaaagaatttgaaaataatttttggaatctcaacagaattgggtcaaacttttgaatgttcatggcactgtaaaataaataaagtagggatttgamtataatctcttgagtgttttaatcaacaattatactactcaatttagatttcaaagtagaatctgtttctttaaatttaaatatattcatc

SEQ ID NO: 326253 - DNA, 450 bp, Homo sapiens
taaaattacaggcagtagataaagcccaaatcacaaaatgattcttgtggactattttaaagctcagactcccacaatccatgcctagaacaggcatgcaaatatgagacctttgacatcagaaaatataaaccaagaacaaacaaaaagcagatacttaggaattctaaaatttgagaatttttacagtgcccagcattaaaaacaatactgtaccccagagcaaacatgatatttcatacatattacactataaaaagaccaaaagaatttgaaaataatttttggaatctcaacagaattgggtcaaacttttgaatgttcatggcactgtaaaataaataaagtagggatttgactataatctcttgagtgttttaatcaacaattatactactcaatttagatttcaaagtagaatctgtttstttaaatttaaatatattcatc

SEQ ID NO: 326254 - DNA, 525 bp, Homo sapiens
atttctttaattcttcacttggcttctgagacatagcactctcctgaatccagtccttcctcacggatcatttcttcttagtcttgcttgctgggttctccttatctccctgaactctaaacaatgagtgtctaagaactcagcctttggacttcttctcttcttctcatggcctcaaaatcttgaagcaaaagctgtctccctgacatagagactyctagatgcaattgcttactcaaccccatccttaaatgttcaaacctttatccacttgcctccaccaaatctgcttctcccaaacttttctccatttaataaatggcaattctgaccttccatttggtcagattaaaaacttggaattatccttgactttcattctttcacatttttaatccaatttgttggcaaatcctatctaccccagcttctaaatatatccagaatgtaacttctccatcccatctctactgataatacaaaccttcctcatctctcatctgcattatttcaacagcttcttaa

SEQ ID NO: 326255 - DNA, 525 bp, Homo sapiens
atttctttaattcttcacttggcttctgagacatagcactctcctgaatccagtccttcctcacggatcatttcttcttagtcttgcttgctgggttctccttatctccctgaactctaaacaatgagtgtctaagaactcagcctttggacttcttctcttcttctcatggcctcaaaatcttgaagcaaaagctgtctccctgacatagagactcctagatgcaattgcttactcaaccccatccttaaatgttcaaacctttatccacttgcctccaycaaatctgcttctcccaaacttttctccatttaataaatggcaattctgaccttccatttggtcagattaaaaacttggaattatccttgactttcattctttcacatttttaatccaatttgttggcaaatcctatctaccccagcttctaaatatatccagaatgtaacttctccatcccatctctactgataatacaaaccttcctcatctctcatctgcattatttcaacagcttcttaa

SEQ ID NO: 326256 - DNA, 525 bp, Homo sapiens
atttctttaattcttcacttggcttctgagacatagcactctcctgaatccagtccttcctcacggatcatttcttcttagtcttgcttgctgggttctccttatctccctgaactctaaacaatgagtgtctaagaactcagcctttggacttcttctcttcttctcatggcctcaaaatcttgaagcaaaagctgtctccctgacatagagactcctagatgcaattgcttactcaaccccatccttaaatgttcaaacctttatccacttgcctccaccaaatctgcttctcccaaacttttctccatttaataaatggcaattctgaccttccatttgstcagattaaaaacttggaattatccttgactttcattctttcacatttttaatccaatttgttggcaaatcctatctaccccagcttctaaatatatccagaatgtaacttctccatcccatctctactgataatacaaaccttcctcatctctcatctgcattatttcaacagcttcttaa

SEQ ID NO: 326257 - DNA, 593 bp, Homo sapiens
tgggttctccttatctccctgaactctaaacaatgagtgtctaagaactcagcctttggacttcttctcttcttctcatggcctcaaaatcttgaagcaaaagctgtctccctgacatagagactcctagatgcaattgcttactcaaccccatccttaaatgttcaaacctttatccacttgcctccaccaaatctgcttctcccaaacttttctccatttaataaatggcaattctgaccttccatttggtcagattaaaaacttggaattatccttgactttcattctttcacatttttaatccratttgttggcaaatcctatctaccccagcttctaaatatatccagaatgtaacttctccatcccatctctactgataatacaaaccttcctcatctctcatctgcattatttcaacagcttcttaactcgtctatttccttccctttttctctcgagggtctattctcagggtagctcgggttttcttttctaagtcataaggcagatcacatcacttatctgctaaggatcctttgaaagctgttcatctgactcagtagaagccactcaatggatgccccccc

SEQ ID NO: 326258 - DNA, 465 bp, Homo sapiens
aaaccatcaaacaactccaagaaagcagcaaaagaaacttctgtcttaaatagagtggatagctgactataatagaagacaattctacaatccacagtacaagacaagttctcatgactattaaaaatctgtatagatcccaagagactccaaatagaagcaggccagacatcatggcatccatgcaaaattaggtatgccartttattaaaagtaccttttagagaggattgatggttcttttaaattctcttgctgcaaaacaaaacaaaaaaataagatgaaatcctaatatcatgtttaactggctgacattctttctgtttttttaataaaaaaaggatttcaagtgccacaataccatgttcattgtcaaacataagaatgatgtgtatgaataagaaataagcagagatgagcgcagcatgcatcggtgtccatatcaatcttgtaaagttgtacata

SEQ ID NO: 326259 - DNA, 465 bp, Homo sapiens
aaaccatcaaacaactccaagaaagcagcaaaagaaacttctgtcttaaatagagtggatagctgactataatagaagacaattctacaatccacagtacaagacaagttctcatgactattaaaaatctgtatagatcccaagagactccaaatagaagcaggccagacatcatggcatccatgcaaaattaggtatgccaatttattaaaagtaccttttagagaggattgatggttcttttaaattctcttgctgcaaaacaaaacaaaaaaataagatgaaatcctaatatcatgtttaactggctgacattctttctgtttttttaataaaaaaaggatttcaagtgccacaataccatrttcattgtcaaacataagaatgatgtgtatgaataagaaataagcagagatgagcgcagcatgcatcggtgtccatatcaatcttgtaaagttgtacata

SEQ ID NO: 326260 - DNA, 465 bp, Homo sapiens
aaaccatcaaacaactccaagaaagcagcaaaagaaacttctgtcttaaatagagtggatagctgactataatagaagacaattctacaatccacagtacaagacaagttctcatgactattaaaaatctgtatagatcccaagagactccaaatagaagcaggccagacatcatggcatccatgcaaaattaggtatgccaatttattaaaagtaccttttagagaggattgatggttcttttaaattctcttgctgcaaaacaaaacaaaaaaataagatgaaatcctaatatcatgtttaactggctgacattctttctgtttttttaataaaaaaaggatttcaagtgccacaataccatgttcattgtcaaacataagaatgatgtgtatgaataagaaataagyagagatgagcgcagcatgcatcggtgtccatatcaatcttgtaaagttgtacata

SEQ ID NO: 326261 - DNA, 465 bp, Homo sapiens
aaaccatcaaacaactccaagaaagcagcaaaagaaacttctgtcttaaatagagtggatagctgactataatagaagacaattctacaatccacagtacaagacaagttctcatgactattaaaaatctgtatagatcccaagagactccaaatagaagcaggccagacatcatggcatccatgcaaaattaggtatgccaatttattaaaagtaccttttagagaggattgatggttcttttaaattctcttgctgcaaaacaaaacaaaaaaataagatgaaatcctaatatcatgtttaactggctgacattctttctgtttttttaataaaaaaaggatttcaagtgccacaataccatgttcattgtcaaacataagaatgatgtgtatgaataagaaataagcrgagatgagcgcagcatgcatcggtgtccatatcaatcttgtaaagttgtacata

SEQ ID NO: 326262 - DNA, 547 bp, Homo sapiens
tgggaaccatcaggattatgtctggcatatgaagtctttccctcacacgtgttcatctcagggtatattgtgatattggcaggtttgctgtttactctcagtgggcagtgcaattgtttgctgagaaagtctgagttccagaagattggggaatcaaaataaagcctgttggtcaaataaaaacatatctttgtgcaatgtttccttttcattctatcttctttagtcagctctctcctcattttacataattgaattttattaagaaatgtgcagcaaagaaatttttctcccaagacactccagtgaagatgttctctttgccagcacttctagcatcactttgagcaagatggtctgtaagtggcaatagacaagggagcaacctcttgagagttcctgagttgtgaatgggtttttgataattggaggaacatgctcagaccctttgcagcctttacagacttgattacagccacagcaaatggtggtrcttcctttctcaagtaacttcagcatcattctgttttcccagaccactataatc

SEQ ID NO: 326263 - DNA, 583 bp, Homo sapiens
aaacaaaaccatataacaatacactcacatttcactttcttatgttttaaaaaatgatctaagaaacagacatgaaattccagctytgttaattaagtggaaataagatttacaaaacaattgcttgtagccttttctgatgtcacgaggtctaactctacttagcagaagactggggcataagaagatggcttaatgaatacttattctctattccctataaccactctttactctgtgtaccctcttttggacacatggaaacataatgcaaggaatgaacaaaagactcagtgatgtattttcttggctaatgacaaagaaaaaaaaaaccatgctgatcatttataacatgtaatgtactcatatcaaagattacataatcagagaagagtgggttacaaactacccaattgactcagcaggtatcaccaaaatatttgcaggttgcttggtaacccaattaaaagtctctatttaaatcccagatcattagtgactgaaagtcactatcatttgatggctcttctcagtccagttcttaggggagattttcctacatcagaaaaccaccaacatattt

SEQ ID NO: 326264 - DNA, 583 bp, Homo sapiens
aaacaaaaccatataacaatacactcacatttcactttcttatgttttaaaaaatgatctaagaaacagacatgaaattccagctttgttaattaagtggaaataagatttacaaaacaattgcttgtagccttttctgatgtcacgaggtctaactctacttagcagaagactggggcataagaagatggcttaatgaatacttattctctattccctataaccactctttactctgtgtaccctcttttggacacatggaaacataatgcaaggaatgaacaaaagactcagtgatgtmttttcttggctaatgacaaagaaaaaaaaaaccatgctgatcatttataacatgtaatgtactcatatcaaagattacataatcagagaagagtgggttacaaactacccaattgactcagcaggtatcaccaaaatatttgcaggttgcttggtaacccaattaaaagtctctatttaaatcccagatcattagtgactgaaagtcactatcatttgatggctcttctcagtccagttcttaggggagattttcctacatcagaaaaccaccaacatattt

SEQ ID NO: 326265 - DNA, 583 bp, Homo sapiens
aaacaaaaccatataacaatacactcacatttcactttcttatgttttaaaaaatgatctaagaaacagacatgaaattccagctttgttaattaagtggaaataagatttacaaaacaattgcttgtagccttttctgatgtcacgaggtctaactctacttagcagaagactggggcataagaagatggcttaatgaatacttattctctattccctataaccactctttactctgtgtaccctcttttggacacatggaaacataatgcaaggaatgaacaaaagactcagtgatgtattttcttggctaatgacaaagaaaaaaaaaaccatgctgatcatttataacatgtaatgtactcatatcaaagattacataatcagagaagagtgggttacaaactacccaattgactcagcaggtatcaccaaaatatttgcaggttgcttggtaacccaattaaaagtctctatttaaatyccagatcattagtgactgaaagtcactatcatttgatggctcttctcagtccagttcttaggggagattttcctacatcagaaaaccaccaacatattt

SEQ ID NO: 326266 - DNA, 583 bp, Homo sapiens
aaacaaaaccatataacaatacactcacatttcactttcttatgttttaaaaaatgatctaagaaacagacatgaaattccagctttgttaattaagtggaaataagatttacaaaacaattgcttgtagccttttctgatgtcacgaggtctaactctacttagcagaagactggggcataagaagatggcttaatgaatacttattctctattccctataaccactctttactctgtgtaccctcttttggacacatggaaacataatgcaaggaatgaacaaaagactcagtgatgtattttcttggctaatgacaaagaaaaaaaaaaccatgctgatcatttataacatgtaatgtactcatatcaaagattacataatcagagaagagtgggttacaaactacccaattgactcagcaggtatcaccaaaatatttgcaggttgcttggtaacccaattaaaagtctctatttaaatcccagatcattagtgactgaaagtcactatcatttgatggctcwtctcagtccagttcttaggggagattttcctacatcagaaaaccaccaacatattt

SEQ ID NO: 326267 - DNA, 551 bp, Homo sapiens
acatacaacacacatacaatctcattttgtaaaaaagtaagcctttgtatatatgtacagagaaaattccttgaagaataaaactcataatgttagtggtagttatcactaggcagtgggaattgtgtaacttgaggggctggggttctggttttcctaaatgaatacatattttatgtgtaatttttaaaaagcaccataacttccttttccttaaggcaaatagctaaaaccgaactggaattctaattcagtgacctgaagccctgagaacagaagggtttgacctccgggtgggaggcgatgacacagcccagagctctttgcagggtgccagaccttggtctgggggaacatctcacagtcaggccaccaggggagagcaggaactgaggctaagtcttccctaacccaggcagcattcggttaggaaatcacagacccagctgtgagaacctggaagcacagagaagaggaaatgaagccgaagcaggyggctctcacaagagatctggccagggccagaaccagagggtgccctgtcactgcca

SEQ ID NO: 326268 - DNA, 260 bp, Homo sapiens
ggctactggcatttggggatggggacaaaaatgttaaatactttgcaataagaacattaacacacagtgaaaattgtcatgtcaatgctcccttcgttgggaaarctgcaattagttataccttttctctctcctattagagaaatcaaccaagccaagcctgagtatctcagaatcagcatccttcaaactcaaatttgagtcttgactgctcaacatctataagcgttaagcacttactttgtcattcaatactcatt

SEQ ID NO: 326269 - DNA, 524 bp, Homo sapiens
acaacactttcaggtatattttccaaaaggaatgcaaaacagaattaaatcatggtctttggagtttcacagaagtgatgatcattagctctgtggccttggggaagctacttaatcttcacaagtttcattttgctttttcttcaaagtagagataataacaatacatacttatttaggcccttataaggcttaaaatcagaaaatatttgtaatgcaattcacagaataactagaaagctataatcaatattacttttggttattattaatgatgctcaattttctggtgagttttatgaagtagatttcattattattaccattttacatatgataaaaatttaggttcaaaatgggttttaacttgygtcagatcacacagttaataactgtgtttagcttggtctcaaacctaggtttcctgacagtaatcctagtactttttttttttcctggtactttttatcttttggtaaccagaatgtcaatttgaggaagattatttcttcctcaaaaagtgg

SEQ ID NO: 326270 - DNA, 260 bp, Homo sapiens
ggctactggcatttggggatggggacaaaaatgttaaatactttgcaataagaacattaacacacagtgaaaattgtcatgtcaatgctcccttcgttgggaaaactgcaattagttataccttttctctctcctattagagaaatcaaccaagccaagcctgagtatctcagaatcagcatccttcaaactcaaatttgagtcttgactrctcaacatctataagcgttaagcacttactttgtcattcaatactcatt

SEQ ID NO: 326271 - DNA, 536 bp, Homo sapiens
gggcagaatccccccattttttaagtttaaaatctatagataaggggaaagatacttgggggaactaaatctgtcaagcctcattatttcctatgtctgatttagatgagaaaattccagactttggcctgatattataatgggataagattttggggggtttagagttggtgagtatattttgcacaagggraaaatgttaatccttgaggaccagagagagggtatactagggtagctggcctccagaaaagtccccaataatttctgcaccctggtacacatgcccttgtgtggtcccctcccacattgtaccggagttggtctgtatgaccaacagaatatgatagaagtaatggcatgtcacttccaagattaggttataaaaggtgatgccttttgtcttggtctctgtctcttggatcactctgagagatatcatctgccatttattgggaccgtcagtggcctatggagaggcccacatggtgaggaactgaagcagctggccaacagcccgcaaggaactgatacct

SEQ ID NO: 326272 - DNA, 631 bp, Homo sapiens
gtatagtttatgttatgagctgaattatgcacccctcctccaccaccattgaagccctaatcctcagtacctcagaatgtgactatgtttggtgatagggcttttaaataggtaataaagttaaaatgaagccattggggtgggctctaatccaatgattggtgtccttataaaaagaagatattaatatctcacctgaattcttctaacacaagccactagatgccaaaagagaagtctccctaaaataggcttttatcacatcactwgtcggctgaaaatcatcaatggccttccctgcccaatttttttgccttcaagaaaaagtctgtctctccctctatagatgagagggacactatagatgtatgttcagaaaggaaaggccatgtgaggactcagcaaggagatggccatatgcaagctaagagagagacctcagaagataccaaatctttggacaccttggcgttggacttctagccttcagaagggtaagaaaaaaaaattctgttgtttaaaccaccagtccatggtattttgttacggcagccctagcaaactaatacagaatacatttcacatttattgttcaccacagaagtgggctttaatttcaagagtaaatgca

SEQ ID NO: 326273 - DNA, 525 bp, Homo sapiens
tttatttgtttgcaccaaatagttgactgaatactgaataactattagcttaaattgcaataaactcagttatttaactgagatctaacagtttrcatttttcttttttttctcctaagcagcctctgaataacatctctagagtatctcacgaacagaatgactatgatcttcataactgaatagcagctagcaggattgttcagcaattttctaattttttttgtttgttttctaagatgacacttgttagaatttaggaatagacactcacagagatatttttccccttttggaaaagagtaaagggttgctttatctagaaacatgcatgtattttatgatgaagggataaagtttgaaacagaagaccaggttctgactcagaattttgtttcctaatcactggttaatctccacctgcccctttttccacatcctttggtagcaaatatgttgatattaaggtttatcaagttacatcaattgacacatttaattttgttttctgttgtttcatgtaga

SEQ ID NO: 326274 - DNA, 525 bp, Homo sapiens
tttatttgtttgcaccaaatagttgactgaatactgaataactattagcttaaattgcaataaactcagttatttaactgagatctaacagtttacatttttcttttttttctcctaagcagcctctgaataacatctctagagtatctcacgaacagaatgactatgatcttcataactgaatagcagctagcaggattgttcagcaattttctaattttttttgtttgttttctaagatgacacttgttagaatttaggaatagacactcacagagatatttttccccttttggaaaagagtaaagggttgckttatctagaaacatgcatgtattttatgatgaagggataaagtttgaaacagaagaccaggttctgactcagaattttgtttcctaatcactggttaatctccacctgcccctttttccacatcctttggtagcaaatatgttgatattaaggtttatcaagttacatcaattgacacatttaattttgttttctgttgtttcatgtaga

SEQ ID NO: 326275 - DNA, 595 bp, Homo sapiens
agacatttgttggtcatataaggcacaaggagagtctaggcaagagctggtcgggagctgttatttaaaggtagtagtgaagtccagtaggacatgctgagcatttagataatacagaaaatcgggagccattaaaaatctaaacagaggggaaactgggaggaaagcaaaagcatatccactttttagaaagcaagcacaactagctttataatgaaataggttggagaaggtagagaaggcattctattggtgacaatgaaagagacaaaagtaatattttgatgagtaataatgaaagctaaatttgtgtagtaatagagaattygcagagaatctgtaggactaggcaaataatagggtaagaatttcaaagggaggagagtgtacagccattgatgaagccaacatttttgaccttaacaaatgggtaggtggtgaagcaatcaacacagataagtaagaatgggagaatgaaatgctgaatttgcagtgcttatggaggattcagatggcaccatctaaacttgtcatttaacagttgttgaacttattttgaaccgggcaatgactatctgctaggtcctagtgctga

SEQ ID NO: 326276 - DNA, 567 bp, Homo sapiens
atatcatcttgactgcctgggctttttgtgtcccagtctaaaataattcaagagatataggacatctgccttgtaaattacataatcttttatatcttttaccattgggcagtagttttcaaaattattgaaactatcttcaattattcatttctaatattgcrtatactttaaaacctaactcacaaccaaatgatctcttttgggatattttcatccattgtcacaataatacatattttacatttcctcgatttataattattgttatttttttcatttatttctttagtcaatcaattaattacttagtaagtatttatagagcttctaaagctcaagcctgctgggggaatcattcacatgggaacaaaaactctgatttacccacattttccataaatccttcatcagattgctggttccttgcctgtggtgagcaggcgttgctataatgaagtcccagaacagtttagactggcaaaggaacacttttcaaagaacctcgtggggcttcacactcagcagctgggggaacttgtaggaattgagaccttggtagatttg

SEQ ID NO: 326277 - DNA, 567 bp, Homo sapiens
atatcatcttgactgcctgggctttttgtgtcccagtctaaaataattcaagagatataggacatctgccttgtaaattacataatcttttatatcttttaccattgggcagtagttttcaaaattattgaaactatcttcaattattcatttctaatattgcgtatactttaaaacctaactcacaaccaaatgatctcttttgggatattttcatccattgtsacaataatacatattttacatttcctcgatttataattattgttatttttttcatttatttctttagtcaatcaattaattacttagtaagtatttatagagcttctaaagctcaagcctgctgggggaatcattcacatgggaacaaaaactctgatttacccacattttccataaatccttcatcagattgctggttccttgcctgtggtgagcaggcgttgctataatgaagtcccagaacagtttagactggcaaaggaacacttttcaaagaacctcgtggggcttcacactcagcagctgggggaacttgtaggaattgagaccttggtagatttg

SEQ ID NO: 326278 - DNA, 567 bp, Homo sapiens
atatcatcttgactgcctgggctttttgtgtcccagtctaaaataattcaagagatataggacatctgccttgtaaattacataatcttttatatcttttaccattgggcagtagttttcaaaattattgaaactatcttcaattattcatttctaatattgcgtatactttaaaacctaactcacaaccaaatgatctcttttgggatattttcatccattgtcacaataatacatattttacatttcctcgatttataattattgttatttttttcatttatttctttagtcaatcaattaattacttagtaagtatttatagagcttctaaagctcaagcctgctgggggaatcattcacatgggaacaaaaactctgatttacccacattttcmataaatccttcatcagattgctggttccttgcctgtggtgagcaggcgttgctataatgaagtcccagaacagtttagactggcaaaggaacacttttcaaagaacctcgtggggcttcacactcagcagctgggggaacttgtaggaattgagaccttggtagatttg

SEQ ID NO: 326279 - DNA, 572 bp, Homo sapiens
tctgtggtttgcattgaacatataacaacaattttatgttgttctatgcactgggtatacaacaacrttaacatttaacctatgttttggttatgttgcaataaaactgtcctgtcctatgtgctgatacaacaataacgctactctctgcaaagcatatacaacactactatactattgtatgcactgagtacacatcaacaataccaccctgtttgctgtactgggtatacagaaattattgggcagatgccctcttgaagtccttacatttgatccttatagatggatcacagatgaaagttcaagatgctattttaagagtgaaaatacaagagaatcaaatttgacccacctagacttgaaatgaagatactgatttccacaatgtctgtgtagtttgagacgaagaaacatccagaagagattggaaaaaagagaaagaactgtagagaaatccttctaacctacgaattagggaaggtgggtagttggtgaattaaaaaaaaggaagaagaaaaataaagggaaggaaaagaaagggaaagaaaagaaaagaaagagaaaaccac

SEQ ID NO: 326280 - DNA, 572 bp, Homo sapiens
tctgtggtttgcattgaacatataacaacaattttatgttgttctatgcactgggtatacaacaacgttaacatttaacctatgttttggttatgttgcaataaaactgtcctgtcctatgtgctgatacaacaataaygctactctctgcaaagcatatacaacactactatactattgtatgcactgagtacacatcaacaataccaccctgtttgctgtactgggtatacagaaattattgggcagatgccctcttgaagtccttacatttgatccttatagatggatcacagatgaaagttcaagatgctattttaagagtgaaaatacaagagaatcaaatttgacccacctagacttgaaatgaagatactgatttccacaatgtctgtgtagtttgagacgaagaaacatccagaagagattggaaaaaagagaaagaactgtagagaaatccttctaacctacgaattagggaaggtgggtagttggtgaattaaaaaaaaggaagaagaaaaataaagggaaggaaaagaaagggaaagaaaagaaaagaaagagaaaaccac

SEQ ID NO: 326281 - DNA, 514 bp, Homo sapiens
gctaattattattgacagggatgatagagagataaattcttcctgttctgggcaattgaataayctcttgtcccagtttacttcgtgcagatttgtcattgaactagcatccttgaattgtgtttaaactacaataaaaataaatgtgggaagtctcagtttatgtaaagggcagtactcccacaatctcaaagctttttcaaaattctgcaagtgtgctgtttgtggattccacagactttgttcatagagtcactctgtataaagtaaccatctgcaagtgccttttgtcccattaaatcagagaaacaaactggtggtttatagttgaatcagttctacatacttaacagcttggtctatttactagagttttagtgtttttcattagtgaccttaatttaataaggatctcaacctaatgtctttatgtttgttcaaaattttttctaagacaatattggactttaaattttatttatgatgttttctgtgctgagtgctatgtttcatg

SEQ ID NO: 326282 - DNA, 514 bp, Homo sapiens
gctaattattattgacagggatgatagagagataaattcttcctgttctgggcaattgaataatctcttgtcccagtttacttcgtgcagatttgtcattgaactagcatccttgaattgtgtttaaactacaataaaaataaatgtgggaagtctcagtttatgtaaagggcagtactcccacaatctcaaagctttttcaaaattctgcaagtgtgctgtttgtggattccacagactttgttcatagagtcactctgtataaagtaaccatctgcaagtgccttttgtcccattaaatcagagaaacaaactggtggtttatagttgaatcagttctacatacttaasagcttggtctatttactagagttttagtgtttttcattagtgaccttaatttaataaggatctcaacctaatgtctttatgtttgttcaaaattttttctaagacaatattggactttaaattttatttatgatgttttctgtgctgagtgctatgtttcatg

SEQ ID NO: 326283 - DNA, 514 bp, Homo sapiens
gctaattattattgacagggatgatagagagataaattcttcctgttctgggcaattgaataatctcttgtcccagtttacttcgtgcagatttgtcattgaactagcatccttgaattgtgtttaaactacaataaaaataaatgtgggaagtctcagtttatgtaaagggcagtactcccacaatctcaaagctttttcaaaattctgcaagtgtgctgtttgtggattccacagactttgttcatagagtcactctgtataaagtaaccatctgcaagtgccttttgtcccattaaatcagagaaacaaactggtggtttatagttgaatcagttctacatacttaacagcttggtctatttactagagttttagtgtttttcattagtgaccttratttaataaggatctcaacctaatgtctttatgtttgttcaaaattttttctaagacaatattggactttaaattttatttatgatgttttctgtgctgagtgctatgtttcatg

SEQ ID NO: 326284 - DNA, 615 bp, Homo sapiens
gtagtgaggagtgccgcaattttaaataagatggccaggcaagcttcactgagaatatttgggcaaagacttgtaggagatgttccaaacttagtttaacactaaacatatggaagacttttcttaccagcatatgaagagatcttcattcttttaattgctctttaatattctatggcactttaatgcttttttcttggaaactaagaatacrggaaatttttaaaacatgatgaacaacatatatttactaaacatagaaatatgttacttaagctaagaatatacattatttttaacattaatgaaatatctaaaataatttactagacattagtcattaatcatcatctcaagaaattaaaaacaaaataccaaatggatataatttagactatatcattaaactacatgcataaatttagaaaagaacaatgaattaatagccaattaaatccatttaccatagaaattaaaaaaatgcataacagtgacaataaacagagaatcaaaattggtgttagaaactttttaaaaacaaacagtgagaatattaaccatcaatccctccgagatacaataaaagcaatattcagagttaatttcacaatcccc

SEQ ID NO: 326285 - DNA, 615 bp, Homo sapiens
gtagtgaggagtgccgcaattttaaataagatggccaggcaagcttcactgagaatatttgggcaaagacttgtaggagatgttccaaacttagtttaacactaaacatatggaagacttttcttaccagcatatgaagagatcttcattcttttaattgctctttaatattctatggcactttaatgcttttttcttggaaactaagaatacgggaaatttttaaaacatgatgaacaacatatatttactaaacatagaaatatgttacttaagctaagaatatacattatttttaacattaatgaaatatctraaataatttactagacattagtcattaatcatcatctcaagaaattaaaaacaaaataccaaatggatataatttagactatatcattaaactacatgcataaatttagaaaagaacaatgaattaatagccaattaaatccatttaccatagaaattaaaaaaatgcataacagtgacaataaacagagaatcaaaattggtgttagaaactttttaaaaacaaacagtgagaatattaaccatcaatccctccgagatacaataaaagcaatattcagagttaatttcacaatcccc

SEQ ID NO: 326286 - DNA, 615 bp, Homo sapiens
gtagtgaggagtgccgcaattttaaataagatggccaggcaagcttcactgagaatatttgggcaaagacttgtaggagatgttccaaacttagtttaacactaaacatatggaagacttttcttaccagcatatgaagagatcttcattcttttaattgctctttaatattctatggcactttaatgcttttttcttggaaactaagaatacgggaaatttttaaaacatgatgaacaacatatatttactaaacatagaaatatgttacttaagctaagaatatacattatttttaacattaatgaaatatctaaaataatttactagacattagtcattaatcatcatctcaagaaattaaaaacaaaataccaaatggatataattyagactatatcattaaactacatgcataaatttagaaaagaacaatgaattaatagccaattaaatccatttaccatagaaattaaaaaaatgcataacagtgacaataaacagagaatcaaaattggtgttagaaactttttaaaaacaaacagtgagaatattaaccatcaatccctccgagatacaataaaagcaatattcagagttaatttcacaatcccc

SEQ ID NO: 326287 - DNA, 615 bp, Homo sapiens
gtagtgaggagtgccgcaattttaaataagatggccaggcaagcttcactgagaatatttgggcaaagacttgtaggagatgttccaaacttagtttaacactaaacatatggaagacttttcttaccagcatatgaagagatcttcattcttttaattgctctttaatattctatggcactttaatgcttttttcttggaaactaagaatacgggaaatttttaaaacatgatgaacaacatatatttactaaacatagaaatatgttacttaagctaagaatatacattatttttaacattaatgaaatatctaaaataatttactagacattagtcattaatcatcatctcaagaaattaaaaacaaaataccaaatggatataatttagactatatcattaaactacatgcrtaaatttagaaaagaacaatgaattaatagccaattaaatccatttaccatagaaattaaaaaaatgcataacagtgacaataaacagagaatcaaaattggtgttagaaactttttaaaaacaaacagtgagaatattaaccatcaatccctccgagatacaataaaagcaatattcagagttaatttcacaatcccc

SEQ ID NO: 326288 - DNA, 613 bp, Homo sapiens
acaaaacataaattcttttggataaaagaaagctgcttccctatcactttatggaacttggctcttagcatcatggacctgccatctctcccattggcatgagctttgataatttattttgccaagggcaagatttatacacatgaaccacttttattccaataatgaatgcattactttccctcaaaggtacagggaaaaattactatgaagtcattattctggctcagctgatgggactggggatgagaaaatagtcctttaaagcttgttcaaaattttttagctgtctygaagccctcattctttgtcaggtatgggagatacacatgccagacattctaggaagaagccttagtcaatcttctgaagagaagtcttaccaatctccatttgatcctcctattggagaggttaaaaagtatacttcccaaactcctttgcagctggagtcatttacatgcacttgtaagagatttggaaatcagaagtgaggcagaggccattttcatgcagctgtagctacaggtaaaatttgacagttatgaagtttatagtggttcaacatgacattctggggagccattggtgtgaggaggctatggtggctaca

SEQ ID NO: 326289 - DNA, 613 bp, Homo sapiens
acaaaacataaattcttttggataaaagaaagctgcttccctatcactttatggaacttggctcttagcatcatggacctgccatctctcccattggcatgagctttgataatttattttgccaagggcaagatttatacacatgaaccacttttattccaataatgaatgcattactttccctcaaaggtacagggaaaaattactatgaagtcattattctggctcagctgatgggactggggatgagaaaatagtcctttaaagcttgttcaaaattttttagctgtctcgaagccctcattctttgtcaggtatgggagatacacatgccagacattctaggragaagccttagtcaatcttctgaagagaagtcttaccaatctccatttgatcctcctattggagaggttaaaaagtatacttcccaaactcctttgcagctggagtcatttacatgcacttgtaagagatttggaaatcagaagtgaggcagaggccattttcatgcagctgtagctacaggtaaaatttgacagttatgaagtttatagtggttcaacatgacattctggggagccattggtgtgaggaggctatggtggctaca

SEQ ID NO: 326290 - DNA, 613 bp, Homo sapiens
acaaaacataaattcttttggataaaagaaagctgcttccctatcactttatggaacttggctcttagcatcatggacctgccatctctcccattggcatgagctttgataatttattttgccaagggcaagatttatacacatgaaccacttttattccaataatgaatgcattactttccctcaaaggtacagggaaaaattactatgaagtcattattctggctcagctgatgggactggggatgagaaaatagtcctttaaagcttgttcaaaattttttagctgtctcgaagccctcattctttgtcaggtatgggagatacacatgccagacattctaggaagaagccttagtcaatcttctgaagagaagtcttaccaatctccatttgatcctcctattggagaggttaaaaagtatacttcccaaactcctttgcagctrgagtcatttacatgcacttgtaagagatttggaaatcagaagtgaggcagaggccattttcatgcagctgtagctacaggtaaaatttgacagttatgaagtttatagtggttcaacatgacattctggggagccattggtgtgaggaggctatggtggctaca

SEQ ID NO: 326291 - DNA, 613 bp, Homo sapiens
acaaaacataaattcttttggataaaagaaagctgcttccctatcactttatggaacttggctcttagcatcatggacctgccatctctcccattggcatgagctttgataatttattttgccaagggcaagatttatacacatgaaccacttttattccaataatgaatgcattactttccctcaaaggtacagggaaaaattactatgaagtcattattctggctcagctgatgggactggggatgagaaaatagtcctttaaagcttgttcaaaattttttagctgtctcgaagccctcattctttgtcaggtatgggagatacacatgccagacattctaggaagaagccttagtcaatcttctgaagagaagtcttaccaatctccatttgatcctcctattggagaggttaaaaagtatacttcccaaactcctttgcagctggagtcatttacatgcacttgtaagagatttggaaatcagaagtgaggcagaggccattttcatgcagctgtagctacrggtaaaatttgacagttatgaagtttatagtggttcaacatgacattctggggagccattggtgtgaggaggctatggtggctaca

SEQ ID NO: 326292 - DNA, 481 bp, Homo sapiens
ttcaatagcaaaactctgaaaaaagtcacttttttaatatgtgaatgatgaaaatgtgttttgagatcgtaaagcccaaaacttttgaagataaaaatacaaaagatgaaattgattgggaaataatataactatataagtaacataaacaagcagtaataatacaaggatattttacatagttacttcaggctccaccagacaaaacatcagtcatataaataaattcttttaaaattataaatccagttgatcctaaatcacaccttcctgtcttggtgcctaccgcaatctccatattgactgggggatctgatagacagattttraatagatatgcccatagaaaatgatcgtgattatgaaatgatgatgtgaaatgatcatgaaaactgaggtttaaggagagtccaagtaactccttcaaagccacttaatccattcaagttgggtttcaagcccaggtctgcagagtcctgag

SEQ ID NO: 326293 - DNA, 463 bp, Homo sapiens
gcaatgttgatatcttcttaaaatttttttactccaccatagtttccttggtgatgactagtactgttcaaaagctttcatctttttctccagaacaaaaatctggtgtttgtttatgagtttattatctatggtccagtataaacttactgaggtgccctttggttgtccctatgtttctggggaacaccaggcagttgtccagcatgagtggctgcatctttcatgtgtgatttacaggaaaatttcttctaaaatatcacagacttacatcacatctgcmtattgcaatcattctctgttgacttttactgcctctaataagctatttatgaataatctaataattcaggtaaatatatgattaaatttctattcattgcattcattttatttcatatactctatgtttcatgcaaaaatacatagagagagatatgatttatgtgcataagtatcttaa

SEQ ID NO: 326294 - DNA, 463 bp, Homo sapiens
gcaatgttgatatcttcttaaaatttttttactccaccatagtttccttggtgatgactagtactgttcaaaagctttcatctttttctccagaacaaaaatctggtgtttgtttatgagtttattatctatggtccagtataaacttactgaggtgccctttggttgtccctatgtttctggggaacaccaggcagttgtccagcatgagtggctgcatctttcatgtgtgatttacaggaaaatttcttctaaaatatcacagacttacatcacatctgcatattgcaatcattctctgtygacttttactgcctctaataagctatttatgaataatctaataattcaggtaaatatatgattaaatttctattcattgcattcattttatttcatatactctatgtttcatgcaaaaatacatagagagagatatgatttatgtgcataagtatcttaa

SEQ ID NO: 326295 - DNA, 454 bp, Homo sapiens
gcctcctgcgcccccagaggatcccccggacgccctcctgggaagtggcgaagggcgcacggcaccccggctctgggcgcgcggtgggggggcgtgcgacaccgcgtgacccttcctcggaggctgcaggtgccgaggggtccatgggagacagccggtctgcggggcgcggggggggtcgcgttccccgggagccagcccagctgcccctgcccagcccccagagcgcggcggcgggtgcagtcgtgcaagtttcttgcgggtctcttgacttctccgagttgaaggcaccggttcgggacgcgaggtgctcttggaaagagttgggcatcgcgcatctctgctggcccgcggccctgttcaratgcgagctaggacgtcgcctgccccaggctttgtccttttggaaaactagggttgtaggaaggtgcctggtgccaggcagaccaccaga

SEQ ID NO: 326296 - DNA, 348 bp, Homo sapiens
acaacacatcgtgtcctctgaagacctcaggctttgggatctcatggtccagcttccagttcacttcgttgccgcgaccttgggcatatcattgtcacttctctaaccatggtgacccggggttttgtgcttggcttccaggtcccctcgggttattgaggacgattgaggtcatgcctccgagagcaccgcgccctgggcgcaggaggagctgttgctcagtgttgtctgtgttgtaaggtggactttgtagaaacttggctttgaggttttttkttttttttttttttggccccttctaagcgaaagccttggacttattgcccaggtttctctggcccctgagaa

SEQ ID NO: 326297 - DNA, 584 bp, Homo sapiens
accaaacccaaggcaggaaaatcagaacttttctttttttgcgtttaatgattaaaatgtattgaccgagctctaagccggtgccggggggtggtggcagttattccacgcacacttgccgagcctgtgcccggttctgttcctcctctcagggcacagccctctttttctgtccagtccacagtccctcccacccctttccctagcttctcagtctctgggggttgggggggcagtgaggaccttgggtggctgcagcacgatttctccctgataattgaattgaacatggtaacccctttcctatcacgtgcccacattttaaggagcagccaggtctcaacaaaatttcawttctgtaaaaaaaaaaaaaaaaagaaaagaaaagaaaagaaaaaaaacacaaaagccctcagagactgccaactaagtttgtatttcaagaaagagaccagtaaagtgtagctccaggaacgtgtcttttttgcatatgtaagcagctgcctctgaggctctataaatatcgataacccctgggccctggtctataaaagcctccttctgctgaggggtggagggttcaa

SEQ ID NO: 326298 - DNA, 568 bp, Homo sapiens
tttgtcatctacagagctattgtcttaatacttctctaaaagcacttgcaatcagttgcagtctaaaaatgcattttcttcaaagatagtttgcctattggaaaagacaattgcaaaaagattccctctaatctttctggaagcacccatcacaggtcttgttwaccaatcctggtatcacaaaccttagagggattgattcctggatgcatgtatttccaccactaacaccttactagaacaacactcttgtctatgaattaatactaaaaaaattccaggaattgaattagacaacatctgtgctagactgcttcctcaagatgactggacaagtcctgtacattttttcctcacttttagtattttactttgctctccttctcttcttcttggaaaagcaatttctttatcctcatttccaagtccactgccaaaggaggaaaccgtactaattattggaacagtcatcataaaccctgatctgtctgtgatgctgtcgcccctttgcttaatgctataatgagcctcactggtttttcaacaccaaataactggtccaattgca

SEQ ID NO: 326299 - DNA, 568 bp, Homo sapiens
tttgtcatctacagagctattgtcttaatacttctctaaaagcacttgcaatcagttgcagtctaaaaatgcattttcttcaaagatagtttgcctattggaaaagacaattgcaaaaagattccctctaatctttctggaagcacccatcacaggtcttgttaaccaatcctggtatcacmaaccttagagggattgattcctggatgcatgtatttccaccactaacaccttactagaacaacactcttgtctatgaattaatactaaaaaaattccaggaattgaattagacaacatctgtgctagactgcttcctcaagatgactggacaagtcctgtacattttttcctcacttttagtattttactttgctctccttctcttcttcttggaaaagcaatttctttatcctcatttccaagtccactgccaaaggaggaaaccgtactaattattggaacagtcatcataaaccctgatctgtctgtgatgctgtcgcccctttgcttaatgctataatgagcctcactggtttttcaacaccaaataactggtccaattgca

SEQ ID NO: 326300 - DNA, 474 bp, Homo sapiens
gcttcactactgaagtcagtaagaccatgaacccatyggaagaaagaaactggacacatttgaacatctgaaggaacaaagtctggacacaccatctttaagaactgtaacactcaccgcgagggtccgcagcttcattcttgaagtcagcaagaccaagaacccactggaagaaacgaattctggacacagtaggttatttacaacgtctgggttttgtttctatcagtataaaatatagataataatagtacgtatttgataggattactgtgagaactacttaatcaagtgattagagatgtacttagtacgtgaaaaaagccaatgaagataacttgtacttttacctatagttttcatttcatctccaaagagctgttttcattagatctttttttttcttttttgagacggagtcgctctgtcccccaggctggagtgcagtgctgcgatcccctctggggttcatgc

SEQ ID NO: 326301 - DNA, 588 bp, Homo sapiens
tctacctctgtactcaagtgatcctcccacctcagcctcctgagcaactgggactataggtgtgttccaccactcctcactaacatatatatattttttgggtaaagatggtctttcaccatgttgcccaagttgttcctgaactcctgggctcaagtgatccacccaccttggcctcccaaagtgctgggacaaaacaaatcttacaagtaattatatattggtatgcatatatcatccctggccactttctgctctacttcttcagagatcttatttacatgatttgctccaatgagttgtttaataattaagaaaagagtatatttggaatgtttaaggaatttgagctgaggaatattgaagagctcatgagagtgtggggtgcggacaaaagcatggactttsaggccagattgatctggatttgagttctgacccagagtcctgccttgtaaattagagtttaaaatacgtattgtatagatttgagtgagataattctgaatatgagactgctttgctgtgtgcttggcacatagtacactttcaatagatgacattagatgtgatgataggacaattata

SEQ ID NO: 326302 - DNA, 596 bp, Homo sapiens
tgattatagttaatactgtattatattctggaaatttaccaagagagtagatttcatgtgcttgcatcacacataaaaggtaattatgtgaggagactgatatgttaatttgcttgactgtagtaattattttactatgtatatgtatttcaaaacattatgtacaccttaaatatatagaattaaaaaaaaaaactttctcagacaaactaaactgtggcagtccatctgcactagatctcccttaaagacatacttagggaagttcaacttgaaatgaaaggatgtgaactaataacataaaaccatatgaagatataaaattcatttgtaagagtaagaatayagtcatcttcagagtactcgtatactataatgataatacaaagcacttttaactctaacataaaaggcaaatgtgttaaacaatcactgtagctacaaaaatttgttgctaaatacacaatatataaatgttgaaatatgttacagcaatataattttttaaaatgtcttcagttttatattcatcactagcgataatcttttaatcttctttcatacttctcaaacaatatttagaatttcaccatttc

SEQ ID NO: 326303 - DNA, 277 bp, Homo sapiens
atatacttaaggcaagttataaaagcacatgtaaacacgactttgtatttgctaagwtaattcaatacaggcagcataacaagactatcaatagcatttattttccataaaacagtaaaaagtatgcattgtaaaattaatttccattgattaccccaggctaaccagaaacttttaattcttccaattttcagttttcaagtgaataatgtacaaatttgctttgctttgttgattagtgtatatacatatatatgcacacacactaaacatatac

SEQ ID NO: 326304 - DNA, 501 bp, Homo sapiens
gaattagaaaaatgacttgttatgtcaatgaatctcagagcactggattggctagagcaatgctagtcttagaaacttgttcagtttctctccagtgcaacaccattaaatttaattacaaagaaaaacttatttttgttatacaaataatatccccatgtagcctaatttaaactaattgcctacatagttttcattccaaggggaaaactaaagtaaaataagtgctgacttattgaaaatgtctttaattatattatcacattgaattctgctttgacccttcttcaaaagttacttttaaaataaaaaatgttaccgtaaattgtagcatacctgcaatttgtagagcttcaatcatgcctgacctactttaccagttttttttttctttctaacatagaaaatacctttctgcagaaaaatctccaagtgtctacaayaggacatgaatagctatgctatttttcttcattatcatttcttgttattttatttttt

SEQ ID NO: 326305 - DNA, 559 bp, Homo sapiens
tctctcaatttatttgtgtctttttcaattgattttatcaatgttttatatttttttagtgtacaattgtggggaaaagaaagagagatcagactgttactgtgtctatgtagaaagaaatagacataagggactccattttgttccgtcctaagaaaaattcttctgccttgagatgctgttaatctgtaaccctacccccaaccctgtgctccctgaaacatgtgctgtgtcaactcaagggtaaatggattaagggctgtgcaggatgtgctttgtgaaacaaatgcttgaaagtagcatgcttgttaagagtcattaccactccctaatctcaagtacccagagacacaatacactgtggaaggccrcagggacctctgcctaggaaagccaggtattgtccaaggtttctccccatgtggtagtctgaaatatggcctcgtgggaaggaaaagacctgaccatcccccagcctgacacccctaaagggtctgtgctgtggaggattagtaaaagaggaaggcctctttgcagttgagataagaggaaggcatct

SEQ ID NO: 326306 - DNA, 618 bp, Homo sapiens
ggctgacttctcgtgtcttcctggacggcaggctccttgaaggcagatactatctttcatttctgtactcccattgccaagcacactttgttgaatgagtaaccaaatagtgtgacctgctttgggacagtcactkgttctaatgggtcaataactaatggattggtattctgcaaacccacaggcacatgcatagatagtttatgtatcaggtgtgcttggtaaattttgttcaggttagttctggaatcttggattatactatgaatattgctttctatccttttttccgtctcttatgttacgacatttccctgtatcataaaatgaccattgaaaacttggtttttagccactgcatagtatttcattatgttaatgtattcagtgtgttaacattaaaatttaacccttctattgtcgtttctaaatttttctattataaatagcatcatgataagcagctttgcataaaaacttgtgtgtatctctggtcttttttccttctcatttcaggcatagcatttgtttttgagagttttaagatgtaatggttgattatatattttttaaattatgaaaagcagaactgagtgaaagtgtgggctttcaaatgta

SEQ ID NO: 326307 - DNA, 591 bp, Homo sapiens
tttgcaaaaaacataccttttttggctgaactaattcacattaagttgcagacattacgatacttcacccctagatttttgacagagtctcgctttgtcacccaggctggagtgaggtggtgcgattttggctcactgcaacctccatttcctgggttcaaacaattctcatgcctcagcctcccgagtagctgggattactggcatgtgccactgtgatgcctggctaatttttgtatttttagtagagacaggatttcagcatgttggccaggctggtcacccctagatctttcggcaattttctacrtaatcacaatactattatcacatgcaataaattaatttctgtgcaataattactccatatttcaactttccaaattgttttaaaaatgtactttaacagcatttttttttgaaaaattcaggatccaagggatgatgacacactgcatttggttgttctacctctttaatctcttttaataaagggcaacttccctgccttttatttttatttaattttggtctttcgttatagacatttttgaatagaccaggacaggtatctggcaaaatgctccatga

SEQ ID NO: 326308 - DNA, 628 bp, Homo sapiens
  misc_feature (1)...(628): n = A,T,C or G
ttgcaggcctacttaagtgaaaaaatctgtcactggttctagcttatctttatctatatcttttgcatttctcctaagtaacactctcatggaaaaaccaccagcaaatccaggatcatcctttcgacagaatactgaatttgaagaactgcatggaaacggtacttatctacagttccattttacaggtttctccctaaagctcagagacagtgaacatttatctggagccacattgcagggygcatgttccaggcctccaaatgcacaggccagtgctcttccttgggttcacatttaaagaccaagtttaatgtttttttaattggtgttttatacctagattaaatgtattttaatattagagatgactgtgtgactttcttatttaaaaagaaggcctatgaaatccaaacaaacttgtgaaatctttagacagttccatttaataatgatcactaatggccattagaccaggcaaaatctatgaggcaaacaatcagaatgtttgtttgaaatgcaaatgtaagacaactaatgaaaatgccaacagttcttctgctaaggcctgctgtgatatcanaaacagtctaacaggaacttaaagaaggagagacctgattcagga

SEQ ID NO: 326309 - DNA, 628 bp, Homo sapiens
  misc_feature (1)...(628): n = A,T,C or G
ttgcaggcctacttaagtgaaaaaatctgtcactggttctagcttatctttatctatatcttttgcatttctcctaagtaacactctcatggaaaaaccaccagcaaatccaggatcatcctttcgacagaatactgaatttgaagaactgcatggaaacggtacttatctacagttccattttacaggtttctccctaaagctcagagacagtgaacatttatctggagccacattgcagggcgcatgttccaggcctccaaatgcacaggccagtgctcttccttgggttcacatttaaagaccaagtttaatgtttttttaattggtgttttatacctagattaaatgtattttaatattagagatgactgtgtgactttcttatttaaaaaraaggcctatgaaatccaaacaaacttgtgaaatctttagacagttccatttaataatgatcactaatggccattagaccaggcaaaatctatgaggcaaacaatcagaatgtttgtttgaaatgcaaatgtaagacaactaatgaaaatgccaacagttcttctgctaaggcctgctgtgatatcanaaacagtctaacaggaacttaaagaaggagagacctgattcagga

SEQ ID NO: 326310 - DNA, 628 bp, Homo sapiens
  misc_feature (1)...(628): n = A,T,C or G
ttgcaggcctacttaagtgaaaaaatctgtcactggttctagcttatctttatctatatcttttgcatttctcctaagtaacactctcatggaaaaaccaccagcaaatccaggatcatcctttcgacagaatactgaatttgaagaactgcatggaaacggtacttatctacagttccattttacaggtttctccctaaagctcagagacagtgaacatttatctggagccacattgcagggcgcatgttccaggcctccaaatgcacaggccagtgctcttccttgggttcacatttaaagaccaagtttaatgtttttttaattggtgttttatacctagattaaatgtattttaatattagagatgactgtgtgactttcttatttaaaaagaaggcctatgaaatccaaacaaacttgtgaaatctttagacagttccatttaataatgatcactaayggccattagaccaggcaaaatctatgaggcaaacaatcagaatgtttgtttgaaatgcaaatgtaagacaactaatgaaaatgccaacagttcttctgctaaggcctgctgtgatatcanaaacagtctaacaggaacttaaagaaggagagacctgattcagga

SEQ ID NO: 326311 - DNA, 594 bp, Homo sapiens
agtttttccatcaaaacaaattattttcatattgcctttgatgaaacacttttttcattttaaggcatgatatcagttcctctaagtcaaatagagctgttttaatggaaatamatgaagggtttcagacagtgtctggcacaggcacgtggtgagcttcaactaagtggtagatgttaatgttcttacctttgtaaagtaccattcaacacttggttcacctaacaatgcgagcacttttaatagcgacttaaggaaaatctgccttaggcaaattaagggaactaagttgttcccacttctgatctacatccagcaaaacaacttctggaatttggaaaaaacgaatcacagctacgaaatgatttaattaagccacacatatgcagaccaatgaaaaagacatcttgccatgaagattaaatgaggtgacacagataaagcttctagcataatacagcaggaagttggtaaagttttttatcagtacactttttttcaaaactaagaaaaggaggtggaaaaactattaaaaaaaaaaaaagtccaaagctaaaaaagaatagcagcctagggccattgtgcatagaggaa

SEQ ID NO: 326312 - DNA, 594 bp, Homo sapiens
agtttttccatcaaaacaaattattttcatattgcctttgatgaaacacttttttcattttaaggcatgatatcagttcctctaagtcaaatagagctgttttaatggaaatacatgaagggtttcagacagtgtctggcacaggcacgtggtgagcttcaactaagtggtagatgttaatgttcttacctttgtaaagtaccattcaacrcttggttcacctaacaatgcgagcacttttaatagcgacttaaggaaaatctgccttaggcaaattaagggaactaagttgttcccacttctgatctacatccagcaaaacaacttctggaatttggaaaaaacgaatcacagctacgaaatgatttaattaagccacacatatgcagaccaatgaaaaagacatcttgccatgaagattaaatgaggtgacacagataaagcttctagcataatacagcaggaagttggtaaagttttttatcagtacactttttttcaaaactaagaaaaggaggtggaaaaactattaaaaaaaaaaaaagtccaaagctaaaaaagaatagcagcctagggccattgtgcatagaggaa

SEQ ID NO: 326313 - DNA, 514 bp, Homo sapiens
ccacaggcagctacgtgaatctgggcaaaatccttaccctaccttggcctcagtttccgtttcctcctctatgaaaaggggagacacagctaayattttggcctcacaggactgttgttatcctcagatgagagatgcaactataatgtaacaaaagaatgcaaggaaatctatttttagaaacaacagtctgtttggaaacactttccttaatgtatttaacacactactacactcacagtgaatgtttaaaaaaaaataacttctagaactcaattgagatgctgacaaaggactaaataatttaggacatgtttggaaatgattaaattcttgaattattatataggtaagcaaaattattcttagggacagtgtaacattgcatgctaatcagcctcaagagaagcagtaactgtcaacagctcgtggcacacagccaactgtctgcggggtaagtaaagaaactgaattagctttttcaggggagccagaacactgagccctgatgaca

SEQ ID NO: 326314 - DNA, 514 bp, Homo sapiens
ccacaggcagctacgtgaatctgggcaaaatccttaccctaccttggcctcagtttccgtttcctcctctatgaaaaggggagacacagctaacattttggcctcacaggactgttgttatcctcagatgagagatgcaactataatgtarcaaaagaatgcaaggaaatctatttttagaaacaacagtctgtttggaaacactttccttaatgtatttaacacactactacactcacagtgaatgtttaaaaaaaaataacttctagaactcaattgagatgctgacaaaggactaaataatttaggacatgtttggaaatgattaaattcttgaattattatataggtaagcaaaattattcttagggacagtgtaacattgcatgctaatcagcctcaagagaagcagtaactgtcaacagctcgtggcacacagccaactgtctgcggggtaagtaaagaaactgaattagctttttcaggggagccagaacactgagccctgatgaca

SEQ ID NO: 326315 - DNA, 514 bp, Homo sapiens
ccacaggcagctacgtgaatctgggcaaaatccttaccctaccttggcctcagtttccgtttcctcctctatgaaaaggggagacacagctaacattttggcctcacaggactgttgttatcctcagatgagagatgcaactataatgtaacaaaagaatgcaaggaaatctatttttagaaacaacagtctgtttggaaacactttccttaatgtatttaacacactaytacactcacagtgaatgtttaaaaaaaaataacttctagaactcaattgagatgctgacaaaggactaaataatttaggacatgtttggaaatgattaaattcttgaattattatataggtaagcaaaattattcttagggacagtgtaacattgcatgctaatcagcctcaagagaagcagtaactgtcaacagctcgtggcacacagccaactgtctgcggggtaagtaaagaaactgaattagctttttcaggggagccagaacactgagccctgatgaca

SEQ ID NO: 326316 - DNA, 514 bp, Homo sapiens
ccacaggcagctacgtgaatctgggcaaaatccttaccctaccttggcctcagtttccgtttcctcctctatgaaaaggggagacacagctaacattttggcctcacaggactgttgttatcctcagatgagagatgcaactataatgtaacaaaagaatgcaaggaaatctatttttagaaacaacagtctgtttggaaacactttccttaatgtatttaacacactactacactcacagtgaatgtttaaaaaaaaataacttctagaactcaattgagatgctgacaaaggactaaataatttaggacatgtttggaaatgattaaattcttgaattattatataggtaagcaaaattattcttagggacagtgtaacattgcatgctaatcagcctcaagagaagcagtaactgtcaacagctcgtggcacacagccaactgtctgyggggtaagtaaagaaactgaattagctttttcaggggagccagaacactgagccctgatgaca

SEQ ID NO: 326317 - DNA, 582 bp, Homo sapiens
agaggagggaatactttccaaacttattctatgaggccaatatttccctgataccaaaaccacatgaagacacatcaaaaaaagaaaactacaggctaatatctctggtgaataatgatgcaaaaatccacaacaaaatactagcaaacctaattcaacaatacattagaaagaacattcaccatgaccaagtgggatttattcctgggatgcaaggatggttcaacatatgcaaatcaatcaatatgatacactgtatcaacacaatgaaggataaaatggatttatccttcaattgatgcttaaaaagcatttgacaaaattcaacatcccttcatgataaaagcactcaaaaaactaggcatagaatgaacatacctcaacataataagagctatatatgacagacccacagctagtatcatacggaatggggwaaagcctttcctttaagatctggaacataacaacgatgcccactgtcgccaccattactcaacatagtactggaggtcctagctacagtaatcagataagatgtaaagggcatccaaaccagaaagtaggaagtcaaattatcct

SEQ ID NO: 326318 - DNA, 602 bp, Homo sapiens
tactattcagccataaaaggaaataagatccagttatttgcaacaatgtggatggaactggaagtcactatgttaagtgaaatgggccaggcacagaaaaacaaacatcacatgttctcacttatttgtaagatctaaaaaccaaaacaactgaactcacggacatagagagtagaaagatggtcaccagtggctgggaaggccaagaggaaggtagggatggttaacgggtatttaaaaaaaaaaatagaaaaatgagtaagacctactatttaatagcrcaataaggtggctacagtcaataataacttagttgtacattttaaaataatttacagaatgtaatcggattgtgtgtaactcacatgcttgaggggatggataccctgttctccataatgtggttatttcacattgcatgcctgtatcaaaacatctcatgtacccctaaatatatacacctactgtgcacccaccaaaatttttttaaaaaggaaaaaaaagaaatgttgcatatgggaaagtcttacaaagtacgtaggtttgatttctggccagagaactaatatggtagtgccacaacagactttttagagataacc

SEQ ID NO: 326319 - DNA, 587 bp, Homo sapiens
aactgaatgatcagtgtttagtgtgtatgtttagatagtgcttaattcctagtatgtacaggcaatcccatttttttttcttcatcttaaagttcaggggtccatgtgcaggatcaatgaatcccrtttttaatatacccatgcagaacacacatgcaataaaatatatacatacacacatgcatctcaaaattcttagtgtaattttaagctttaaaaacaacaaaattataaaagcaacagacttaacatcatctggaagttcaattatttaaatttcttttacactcagttgatcaattttgaatgcaaaagttttgatttcacatcttttagtccctctcattagaaatgaaaaatgctaaaattccccaaacagaatctggggaaatttcagaagttacgttcactttagctactagaggaatgttttcattttctttctatggcaaagtgttcaatctggaggcagtaaccagtggattctaggcctgtagctctcccaaccctgagtgctgtgcaggtggctggcagcagtggctgctatcaaattttgtctctcttttgtaaactgcaccacacaagag

SEQ ID NO: 326320 - DNA, 587 bp, Homo sapiens
aactgaatgatcagtgtttagtgtgtatgtttagatagtgcttaattcctagtatgtacaggcaatcccatttttttttcttcatcttaaagttcaggggtccatgtgcaggatcaatgaatcccatttttaatatacccatgcagaacacacatgcaataaaatatatacatacacacatgcatctcaaaattcttagtgtaattttaagctttaaaaacaacaaaattataaaagcaacagacttaacatcatctggaagttcaattatttaaatttcttttacactcagttgatcaattttgaatgcaaaagttttgatttcacatcttttagtccctctcattagaaatgaaaaatgctaaaattccccaaacagaatctggggaaatttcagaagttacgttcactttagctactagaggaatgttttcattttctttctatggcraagtgttcaatctggaggcagtaaccagtggattctaggcctgtagctctcccaaccctgagtgctgtgcaggtggctggcagcagtggctgctatcaaattttgtctctcttttgtaaactgcaccacacaagag

SEQ ID NO: 326321 - DNA, 491 bp, Homo sapiens
tgtgtagctctgtggcaccgttcattatggttgatagaactaatagtcaatcagttcttatttccccactccctactcctcctacccccaaccctgagctttttcatgcatactgttttaactcagatcttattcatcctcgaattatggacagtatgtctttaaaaaaagataaatgatgttgctgttatatgattcttttttaatgggcatattaaggccctgatttaattctatttatctttgcttaagaataattttcttgaatagaaaattatctagaatctgaaaatctcctaagttgtttaaaagcctaccactttgacttaacctattgtcagtcagttctgyctgcagaagttggtaggtattcagttataattaataataaccaactctgctgagttaatatgcctcttgcagttctattgacttttaaaatgttatattttacagaggaatttcatttactgtctttaggggaagagatt

SEQ ID NO: 326322 - DNA, 574 bp, Homo sapiens
gttttttaatccatactttatccacttttcctgtgccttctttccatcccctaatacatacaaggggaaattacctgggtggactttttagtgaacgtaaatgttcctttatgaccgtgatttaatcaatgcactgtttgctttctattctttttaaactagttattgctatggctttaaaatatcgtagactgtatagttttactgactgctgtttttcatcatacaggattttattgttctaacatttattaagcactcataatgtgctagaaactctacatattattgygagtcattgcctctcaacactgttaaatatttaaagaaataaatactgcagaagctaccctgtgtatagtgactggttggctatgacccgaagcaaagggctagaaaaaataataattgcatctgtaaccttccattccgctgtgctgcaccccttgtgtaacattctctgacaggttattacggtagtgacatgatgtttctgataattttacttcagttaggaactgatttttttaattgaggttttagaaataaattattccaaagtaactaaagccac

SEQ ID NO: 326323 - DNA, 475 bp, Homo sapiens
tactttctgctttgacgagtttgattttttgagatacttcgtataagtaaatcatgtagtcatttgtccttccatgactagtttattttacatagcataatggcctccagatttacccatatgatagcatatgacaggatttccttcttttaatggctgaataatatttcattgtaagcatatacattttccttatccattaatctgttaatagacatttagattggctcctgtraataatgctgcaatgaacatgagagtacaaacatctctttgagttcccgattttaatagttttggataaatacattgaattagaattgctggatgatacgttagctctatttttaatttttttaggaacccctatactgttatccatagcagctacaccattttacattcccatctacaatacacaaagattcaaatttctccacatgcttgccaacgcttgttattttctgctttgttt

SEQ ID NO: 326324 - DNA, 608 bp, Homo sapiens
tggtgagctccctgcgtggggacaacatagtagtatccctaacctagaacctggcagaggtctagaatattgtgggggcttagtagaaatgtactaaacaaggaatgaatgaatcagtcttccacacccttctctttgcatacgcatttacacataatwacatatacatttgtcctttacaaaattctcaagtttgatttttttccttccaggccagtttagttccttttcattgtaaataaataggatgaggttatggcataatttttttttaaacactaaagattgctatttataatacttatttttaataaaaataggagtacatagccttcatgtttcaaataaaaaagatgaaaaaaactactgccctattttttttaagattaaaaaattataggaccagatttagatctttttaaactacagctttttttctttgcttttcattttgatcttatgtaaaaattgttcaactatacagagagttcccatatatccttcatgcttcttctaatatcagttttcatattcatggaaaaattatggaacctggaaattagcagtggtacaatattattgctgaaactacggatcttctatgaatt

SEQ ID NO: 326325 - DNA, 608 bp, Homo sapiens
tggtgagctccctgcgtggggacaacatagtagtatccctaacctagaacctggcagaggtctagaatattgtgggggcttagtagaaatgtactaaacaaggaatgaatgaatcagtcttccacacccttctctttgcatacgcatttacacataataacatatacatttgtcctttacaaaattctcaagtttgatttttttccttccaggccagtttagttccttttcattgtaaataaataggatgaggttatggcataatttttttttaaacactaaagattgctatttataatacttatttttaataaaaataggagtacatagccttcatgtttcaaataaaaaagatgaaaaaaactactgccctattttttttaagattaaaaaattataggaccagatttagatctttttaaactacagctttttttctttgcttttcattttgatcttatgtaaaaattgttcarctatacagagagttcccatatatccttcatgcttcttctaatatcagttttcatattcatggaaaaattatggaacctggaaattagcagtggtacaatattattgctgaaactacggatcttctatgaatt

SEQ ID NO: 326326 - DNA, 602 bp, Homo sapiens
gttccctccttatttctgctagataagatgaagattaattgaaataccaagtgctatataagctaatagttttattagcttaaaccagaagttcagccacctggaggacttgctaaaacataaattgctcagctctgtaaccagagtttagtttttagtagctctgggatgaggcttgagaatttacatgttcccaggtgttgcagatgctgctggttccaggtccacactgtgagaactactggcrtaagcagacactctcagcaaccttgaaagtgttgctccacaaagcaaataggcagtaccactaatttttttttaagatggagtctcactatgttgcccaggctggagtgcaatggcacgatcttggctcactgcaacttctgccttccaggttaaagcgattctcctgcctcagcctccccagtacctgggattacaggcacacaccaccatgcctggctagtttttgtatttttagtagagacagggtttaaccatgttggccaggctgatctcaaactcctgacctgaggtgatctgctcgccttggcctcccaaagtgctgggatcacaagtgtgagccaccaggcccggcc

SEQ ID NO: 326327 - DNA, 435 bp, Homo sapiens
agaagttgctcaggaaattacagaactgaaggaatatgtcagtcatagtttccagggaacaaacacaactagtaaaagtagtcagatgtgtagcatttattttgaaagttgatagtaaaaatttataaagggaaaaactataatagctgcgttttcagattggttttgaaatggtgcggcaaagcattcgtgaaaacctaaaaggcacttggtaatcattctcactggatccatgtgggtgaagctcagagaagttacaaaccattttgacaaattccagaaggaagctgtttttaaaaattaggtcttatttaaagtcttcctgaaaataccacaatcrtcaggaataagtactgtatttaaatatatagatcagggtatatccttgttcctttggaacctttagatccacctttgaggctcaggctcttcacc

SEQ ID NO: 326328 - DNA, 571 bp, Homo sapiens
tatagcatataggtcagttccttctcaccttctcatcactctccttcaggttaaattatgtctccttacagtttagtttctttaaataatttttagtaaaagaaaactatatgatgagatttcttaaatcatttgaaataattacagtatttttwaaatcacttagctttggaaaatatttcacatttatccatattccagtatgtttgctttatcattttaggtatacaaaacaaaatacacacatgaaaaatttaaataagtacttaattttcattcatattttaaagtgcaggggggtttgtatcatttagttctaacctttataagtacagttctaccaaccaaaatgtattttaaaatgagaaaacagtcattgatttgaactggaaagtcatctaaattaaacagtctagcttaaaaagatctttcttacaaattttatttaaataaaaatctaaagcctcagattttccaggtattttgctcatatagtccagagaaacaaatatttctttacttataaaaatgtttgtccagttgaaatcaactagttatcatagctctgaaa

SEQ ID NO: 326329 - DNA, 611 bp, Homo sapiens
taatattttctgtttcttacaatctgtktgaggttttttttaatgaatttaaggtatataagtgcagttttgttacatggatatactgcctaatggtgaagtctgggattttaatgtgaccatcacctgaatagtgtactcattaaataattcctcatccctcacccttctcccccacttccctgtctctatgtccatggataaacattatttagctctcatttataagtgagaacatgtggtatttggcttacatgagggttttgtataattcttttccatcttaggtggtatgagaggagagtaaaattggtaaccaagagtgaataaagaacaagttgaatcataaaatcagtgtggaccatcaaaattcgatgaacattccctgtattggttttcactctcctcctttaaacaatcaaggaaggagtaattttctaaatatgtgatgtaataggtcaaatgcaaagaaaatgcaaaaggtagagggggggtcaaagtaggtattttcttcccaacttgcaaatgcgcacaggaaatactgaaagtggaggtcaaatattctcttccctgcttggaaatatgcacagaatggctgaacgtgggcagtc

SEQ ID NO: 326330 - DNA, 513 bp, Homo sapiens
gtttgaatgatgttcctgtgaaaatggatgttaattggtctccggcttgaatcagttataaatatggaggtgaccctgattaaccaacagcagggaagcaattgtatctttattgcctatagcagtctcagtgaagtactggactcaactttctccaaaatttatcagatgagatacgcttttaaaraatctagattagttgtcatatctatctctgtacctcatttcttcaagacaggaggaatgatgaggctaaaggttgattataaaatattaatgctagccttaattttgcctcattttgttgcttatctgaaaagaacaagcctacagactaaatttggttggtgttggctttttagtctgtctttaatgtgggagcttatacagtataagcacatctagggacttggtacccccacacagaccgccacacctgcttacatacacccacacattaaaccaatctggagtaaaccaggaggttaaacttacagaaggcaaattatttgc

SEQ ID NO: 326331 - DNA, 513 bp, Homo sapiens
gtttgaatgatgttcctgtgaaaatggatgttaattggtctccggcttgaatcagttataaatatggaggtgaccctgattaaccaacagcagggaagcaattgtatctttattgcctatagcagtctcagtgaagtactggactcaactttctccaaaatttatcagatgagatacgcttttaaagaatctagwttagttgtcatatctatctctgtacctcatttcttcaagacaggaggaatgatgaggctaaaggttgattataaaatattaatgctagccttaattttgcctcattttgttgcttatctgaaaagaacaagcctacagactaaatttggttggtgttggctttttagtctgtctttaatgtgggagcttatacagtataagcacatctagggacttggtacccccacacagaccgccacacctgcttacatacacccacacattaaaccaatctggagtaaaccaggaggttaaacttacagaaggcaaattatttgc

SEQ ID NO: 326332 - DNA, 585 bp, Homo sapiens
aaagtgctgggattacaggcatgagccaccacacccagccagaagttcaatatgttaagcaataagtacatctttcttattaatcataaccagttttctaatttgcttttactagatggctaaatctattaaacagtttcttyagtaaagttcagaaaacaaagctgtgcctgctaatttttagcagtgatatgaaaatgactttgctcttatttgaattaaatatgttgaagtttcttaggaaattgaggcaagaggcttccttgttcttacttcatcatgtgtaatcaataattattgttgacacaattggcttttatttacctgagggaaccaagtgtttcacccaattctcttttttgatatcacagaccaatggactgaacttagtgtcttctactttttttatttccctggagaaaatgttaaaatatgtattcaggctctatctaattttgccctgcaatgcagaacgcttttccctaaaagttttctaatgcaagaaatgaactttacaatggcaaactttttatattttaacatttttttctagagtgaagcagagctgtattcatggtataaaca

SEQ ID NO: 326333 - DNA, 585 bp, Homo sapiens
aaagtgctgggattacaggcatgagccaccacacccagccagaagttcaatatgttaagcaataagtacatctttcttattaatcataaccagttttctaatttgcttttactagatggctaaatctattaaacagtttcttcagtaaagttcagaaaacaaagctgtgcctgctaatttttagcagtgatatgaaaatgactttgctcttatttgaattaaatatgttgaagtttcttaggaaattgaggcaagaggcttccttsttcttacttcatcatgtgtaatcaataattattgttgacacaattggcttttatttacctgagggaaccaagtgtttcacccaattctcttttttgatatcacagaccaatggactgaacttagtgtcttctactttttttatttccctggagaaaatgttaaaatatgtattcaggctctatctaattttgccctgcaatgcagaacgcttttccctaaaagttttctaatgcaagaaatgaactttacaatggcaaactttttatattttaacatttttttctagagtgaagcagagctgtattcatggtataaaca

SEQ ID NO: 326334 - DNA, 590 bp, Homo sapiens
caatagtcccttaattgatctcttctctcccagtcttgccttcttcctacacagcagccagggatgcaaatcttattactcctcagtttaaaaccttcaatagcttctcactgttcttaaaataaagaccaccaactataaggttgtattgtctgcaatttgctaatttatggtatgtcagcgtagacagtttggaatttatgagtgtgcttttaatctgtgctttaggatgtagattaaatgagttgccccaacaggaatatatattcagaaatgaaatatatttcagatattatatttcattaatatttcagatatatttcaaaatataaatataatatttcagaaaygaaatataatcagaaggcagagatggcttgtacaggtatgctagcctcattatttccactcaacacaaaggactttatgagtttgcaaaatggatgttagaagttatttttccttggtgaaatcagttttgtatgagtgtggactggctagaaatagtgtagtgagaggcactcccactcttgcatcaacaatgtgattacagcaatccagtatcttttacccttcccaatgttcctagt

SEQ ID NO: 326335 - DNA, 541 bp, Homo sapiens
tgtgctttaggatgtagattaaatgagttgccccaacaggaatatatattcagaaatgaaatatatttcagatattatatttcattaatatttcagatatatttcaaaatataaatataatatttcagaaacgaaatataatcagaagrcagagatggcttgtacaggtatgctagcctcattatttccactcaacacaaaggactttatgagtttgcaaaatggatgttagaagttatttttccttggtgaaatcagttttgtatgagtgtggactggctagaaatagtgtagtgagaggcactcccactcttgcatcaacaatgtgattacagcaatccagtatcttttacccttcccaatgttcctagtgcttgtttctgagaaatggctcattcagtggccggttcaaagcattcttgctgcttaaattaagctcttaggtgacctcaactcttcttctagaagagtgtcacatttgtctttcatgaactttccatgaagatacagttggagaaaccaaaagaatagaaggaggggc

SEQ ID NO: 326336 - DNA, 537 bp, Homo sapiens
agtaaaccaaagactgatcagtttgataatctcctccaaagaccaaatagaaaacctgcaaagtgctttagttggacagatagagaattgtgcttggagccagcaggcctcgggttcaagttttggctgaatcacatctccaagtctgtgtccttaactatgaaatgatcatcataatcctacctacatagatatcacagggttgttgggaaggctaataaacagaactacatagagaactatttcattacaaataattgcctgccaaagaaatttccccactatttacatggacatacagatttggaatttaaatgtttgaattacctcttagcaaaagctgaaaaactgctataatgaaaaggaatgggggaagctgcctttaaacaaacaacaaaaccacaatcaccaaaaagtatccttcttttacagtagcaaagaattgcaaagataacatccagcctgaaggttgggargcacagttcagaacttgacagtccagaatcatgttcacattctctctttattcccttagaa

SEQ ID NO: 326337 - DNA, 635 bp, Homo sapiens
aataatgctgctgtaaacatttgtgtacaagtctttctgtgacataaacgtatgtttttttccttggatatttacctaggagaattgatgaatactgtaattctgtgtttaaacttttaaggaattgcaagactgtttcccaacatggatgcaccatattacattcccaccagcagtgtattaaggttgcagtttctccacttccttgccaacacttgttattgtccatctgtctgattacagctatcccagtgggtggccgtcatgaagtggtacacctgctgtggtacctgctgyaggcaaggtaattttcaaaaattcattatttttaacatgttttattaaaaattatttttaatacagaactcatagaggttaacatacaaaatttcttcacatgtatatactgatttgattcctagcttctaaaccaacaacgatcccatctatgttttagcacaatgattattcctgttttacagacaaagaaatggaggctcacagaggttaagaagttctagggctgggatttgaacccaggggttctaaaagcacatgcttttagccacagtgttatcctgtttcaacagctactaggtgcctgcataaacatgagcagataagatgggagaatg

SEQ ID NO: 326338 - DNA, 597 bp, Homo sapiens
ttgtacctggcagcctgtatttaaagggtttattcttcayggtgatggggtggggtggatgtagctaagatagcagttccagttttaccacttttattaattttgtgctggggttgaagtgctccacaggaaaaaaaaggagcattgtttctatgaactgtataaaggggagggaaggaggaaatgttagaaggatgatttctcaattttatttcttaaaaggcactcttgtggttgcatttcctccaaacccaaccttttgtgttcagtttgattaaaatgcatccttcttggtctaacagtatctggaaaactcgagaaggctttttcctaaaccatcagtaggtcaagcaagaaagttagcagagctgattctgctgatgtaccttccataactgacagtattcatctttgaaatgatcaagccctggtattttgactgaaaatgtgaagtcttttataaggaaatgaaaaaaatctactaattttttataaacaccctaaattctgagtttttgcatacatgccacttgatcttcataattatatcagtaataccactgcataaaaacatcagtcagaggaaatctaatttaa

SEQ ID NO: 326339 - DNA, 612 bp, Homo sapiens
caataaaattacgtttatatatgaaattatattcattctagaatacatttacatactgttaaagcaaaataagcagggggtcaaaagactgaggctgtctctgtgctttgaattcctgtataacaaactgtaagctaatttagtatataaacaaatgaaaacttaggagaatattttttgtaacaaatagctgggtttcagccaatcagatgcagccaactgaccagaccatactcaactatggcaaatacctagctgtaaccaatcaagttatttctgtattttacttccaagtttagccaatgtaagctcactgctcactgtggagcagaacttggaatctcttttggttctgagtgctacccaattcatgaatggttctttgctcaaataaactgcgaaatttagttaatgtttttcttttagaaacatcaggtacgtggtgtgggagtatagaattcaataattttatttgcaaattaaagttctctgtttgtgaaaatatgctgtgggctttcaggaaggctgayatactttcttcctagtatatgggagatgttgaatacatatttgttgagtgaataataatttctgaactatcgaagttttaat

SEQ ID NO: 326340 - DNA, 455 bp, Homo sapiens
tgttctagcctttgcgaactacatttggttcaccagatgtgtttcctttcccaccctgaattttctcacccactgtgccctctgactgggkggtgggcggggggggggggcttaaattgcctcccaggcaaatgagtagaaaaattcctcctaattcattaaaatgtagtgaagtccttctatgagattccagagtactttatttctaatctttactagcatgtcttatttgttttaattaatttttaaatgtccctcccccactaactgggagctcttagaagttagcaatcacattatttatatcttcatagtaccagaatctgttatagcagaggtccccaactcctggaccgtggcctgctagaagctgggccacatggcaggaggtgagcagtgaggcagcattaccgcctgagctccttctgtcagatcagcggtggcattagattctc

SEQ ID NO: 326341 - DNA, 521 bp, Homo sapiens
tgtcacatttctgtctttgcagagctgttctgtgtatcaacaggcccacctaamctctctgaaggacagtgtcccgtgtacctgtccttcaagtccagatacatgtgttacctcctcattggcatctaccccagagccccaggggcagattaaggtagtttctcccctgagcctcatttattattcagacatttattgagcctctgctctgtaccaggcagagttgtgagtgcaatgataccataatattgaaaacagagtacctgccctcatggagtttacagtctcgcagttgtaaacaacagtgaccagggtggtgcttgcagcccaggaaatacagggtgcactgggcatgtgtaaaggttggggagaagctcagcccatctggaggcatcaagaaggcctgtggaggagttgatgtctaagctgaatcctcaaggttaggcagtgggagatggctaggttaaaagaatattctaggcagagagaacatactttcacaggcaaatctgagagaaaat

SEQ ID NO: 326342 - DNA, 574 bp, Homo sapiens
gtaacaattatgatttcagtatgttatcacaattttctggtagctagaagtaaagtgactagaggaacaagtgctttttaaaatcatacaaaaatggagtatgatccctagtggcartcccataaggatctcgaactaagaagctgtgtgatgctctggtctcaacccagtctgaagagaaccagaaaataagagtaagttgaattctagttggctaactctaaacaagcctagttctttaatattcaactgttaacaagttcgttaacattcaacatttaacaagttctttaacatactaatggcctcagccatttagttttcccacataaatcacctcctccacggacaagccacacaaacatcacagagcagaacctgccctgattcttgctctccttctgtcccagaggcatggatcaaaaaactggcagagaagacatgaggccctaccacccttggggactgaccttgacatggtgaccacacccatgggtaaagcccagtgaattccaggccatgaccaaccagtgaagccatcccttctcacacttgccaacttttctttttcctt

SEQ ID NO: 326343 - DNA, 547 bp, Homo sapiens
cttgttacagcgacttctggagcataaaggtaatttatctttgtttatttctaggttttgggtttttttttttttcagggctggctgaggccacttaaagctgatctctagatgaagagggtgtacttctctataaggtgaagaagtctagtgtaggcagtagtgatttttaaaaagagcttattgtgaaaactttcatacatgctcaaaagtacagataatagcataacaagcccccagatacctattaccagctttaccaactatcaacattttgataatcctatttcagaatcctatcatttgatcacaaaaattccttcatcatgaatttttaaaataaaagttttaatgtaatcctaacgatactattacattcagtagaattaaggataatttcttttttttcttttttttattatactttatgttctaggatacatgtggagaacgtgcagttttgttgcataggtatacacatgccatggtggtttgctgcacctatcaacccrtcacctacattaggtatttctcctaatgctatccc

SEQ ID NO: 326344 - DNA, 487 bp, Homo sapiens
caccctgtgtactgcagaactccatggggcactgttcacaaggactatggcatgttcaatgttatagccttgggtgttggtattctttctacctgatttattcttttgggtgggaggacaatsgtggttgtgatgtattccctggagctcatggccaatattaagaactctactgtggagtgagaccacctgaaccccgccaaagagccagcaacaccttattcacaacttaacattattttctcaatgatttggaagtcaagaagcacctatacatgtatctgaatttgtaatacaaacataagatactttatttagaagtaaattacaagtcaattactcaaactttaagcttctcatgtcacaagtagaaaggggaaatggagaaatggggatgtgatggttaattctatgtgtcaacatgactggaccacaggatgcccagatatttgacttaacattatttctggttaggtatgtgatgttg

SEQ ID NO: 326345 - DNA, 487 bp, Homo sapiens
caccctgtgtactgcagaactccatggggcactgttcacaaggactatggcatgttcaatgttatagccttgggtgttggtattctttctacctgatttattcttttgggtgggaggacaatggtggttgtgatgtattccctggagctcatggccaatattaagaactctactgtggagtgagaccacctgaaccccgccaaagagccagcaacaccttattcacaacttaacattattttctcaatgatttggaagtcaagaagcacctatacatgtatytgaatttgtaatacaaacataagatactttatttagaagtaaattacaagtcaattactcaaactttaagcttctcatgtcacaagtagaaaggggaaatggagaaatggggatgtgatggttaattctatgtgtcaacatgactggaccacaggatgcccagatatttgacttaacattatttctggttaggtatgtgatgttg

SEQ ID NO: 326346 - DNA, 609 bp, Homo sapiens
gatgattctggtggtattgtatagaaatactcaagtagggtgatgattctggtggtattgtacagaaatactcaagtagggtgatgattctggtggtattgtatagaaatactcaagtagggtgatgattctggtggtattgtatagaaatactcaagtagggtgatgattctggtggtattgtacagaaatactcaagtagggtgatgattctggtggtattgtacagaaatactcaagtagggtgatggtgtaaggcagttctgctgaacacacttactaaaaccccactaaatgccaagctctgttccaggcctggggacttaaaaacaaacaagaaccagtctcttcctcaaggacttgcaatctactaggggtaagcgggaaaataaatcaattaggatgcttttgttcatcccatttttgaagcaatgagggttagaccaggacctcggcaatggggatggagaagagttccaaaagcaagagtggatggtatctctgggtataatcacaagctctttatttattttatctgttttgcaccacckgctttctccccagtctgtctttacttttttccaattgattctccttgttcttattttc

SEQ ID NO: 326347 - DNA, 467 bp, Homo sapiens
  misc_feature (1)...(467): n = A,T,C or G
ttatatattattgtgcagtctgtggcttgaatagttgttgtagttactatttttgattggttcatcttttagtctttctgtctaaaaaaacatagtttrtacaccacagttacagttttataatattctgtatttttctgtgtgcttatgattaccaattagttttataccttcagatgatttattattgctcattagcatccttttctttctgattgaaatactccctttagcctttcttgttgaacaggtctggtattcatggaatccctcagcttttgtttttctgggaaagtaattttatttcttcttcatgtttgaaggatatttttgctggatatactattccagcataaaagttttattccttgagcaccttaaacatgtcatgccctctctcctagcctgtgaagtttcctctgaaaagtctactgctagatgtattgaagcacctttgnatgttattt

SEQ ID NO: 326348 - DNA, 467 bp, Homo sapiens
  misc_feature (1)...(467): n = A,T,C or G
ttatatattattgtgcagtctgtggcttgaatagttgttgtagttactatttttgattggttcatcttttagtctttctgtctaaaaaaacatagtttgtacaccacagttacagttttataatattctgtatttttctgtgtgcttatgattaccaattagttttataccttcagatgatttattattgctcattagcatccttttctttckgattgaaatactccctttagcctttcttgttgaacaggtctggtattcatggaatccctcagcttttgtttttctgggaaagtaattttatttcttcttcatgtttgaaggatatttttgctggatatactattccagcataaaagttttattccttgagcaccttaaacatgtcatgccctctctcctagcctgtgaagtttcctctgaaaagtctactgctagatgtattgaagcacctttgnatgttattt

SEQ ID NO: 326349 - DNA, 467 bp, Homo sapiens
  misc_feature (1)...(467): n = A,T,C or G
ttatatattattgtgcagtctgtggcttgaatagttgttgtagttactatttttgattggttcatcttttagtctttctgtctaaaaaaacatagtttgtacaccacagttacagttttataatattctgtatttttctgtgtgcttatgattaccaattagttttataccttcagatgatttattattgctcattagcatccttttctttctgattgaaatactccctttagcctttcttgttgaacaggtctggtattcatggaatccctcagcttttgtttttctgggaaagtaattttatttcttcttcatgtttgaaggatatttttgctggatatactattccagcataaaagwtttattccttgagcaccttaaacatgtcatgccctctctcctagcctgtgaagtttcctctgaaaagtctactgctagatgtattgaagcacctttgnatgttattt

SEQ ID NO: 326350 - DNA, 559 bp, Homo sapiens
tgtgtatataaatataaaatatgtgtatatattacataatacacacacacacgttttctgaaacagggtcttgctcttttactcaggctggagtgcagtggcaccgtcatagcttactgcagccttaccctcctaagctcaagtgattctctcaccttagtctcccaagtagctgggcctacaggcacaggcctccatgtcaggcaaatttatttatttatttatttatttatttatttttatttttgtagagataagatctgactctattgcccaggttgatcttgaactcccaacataaagtaatcctcttgcctcagcttcccaamgtgttaggattataagtgtgagccattgtgcctggccctgatgttaacttttagtcagtaaggaaaagtagcctcttcaaaattacttaaagccaaaagaaatatcattataacatgctaattttcatctttaatttgagaaacaaatgcaacgtatatataatagaagatacatccaccaaaataaaaaaatatattcagaagcttagaagttccatactatgtgctcc

SEQ ID NO: 326351 - DNA, 574 bp, Homo sapiens
tttcaaattaaaacaaacaaataaaaacaaactgtaggtaatatttgactaatttttaatattgtatttagtagaaaatcaaagaggcttgtcaaaatctagagaaaactcctctgactgatacctgtttcattatgttatggatatccacatcatactttatataatgccaagttaatttgataaggctttgccaacagaaaggaatcaccttgatcctttgacaaagtttctaaaagtgacatctaatatatgtcatggtaaccaaaaggaatttgaacgcccttcaaagtgacctaatggcataaaggtcaataccaccttagaaaagtctccaatttatgccttctttctttcttgctcctattgatttagaaaatataaaaacaaagtactattgcatctttttaaaatacttattttgcattaacattcactgaacttagttgatattgctgcraatctttgcattctgggcaactgctactgataactgttattacctacccaaaacaccatggggcatatgaaattttaaagtcttccaggatatttgtatgtgttgcactactat

SEQ ID NO: 326352 - DNA, 572 bp, Homo sapiens
aataattaaaaccaggcaatcatctggcctactttgtgtctcctacaccactcatcaactatgtggctttgaggaagtcacttaaaytgaagcatcccttctctcatattaaaactgggttaataacacctacttctcaggaaaaattatgtataaaatcaccagtacatcgtatatatttatgaatgtctgctcctgttatatctaacatcttttaaaaataattacgtaatctttcctcataatatacatttaaaataaacaatattaaataaaatttctactttgcagagaaaaaagatgaaagtaacatatcaaaaaggatgaggaagtgttaaactgttttcagttgaaagagctaaacctaggagaagctaaagttttttttttcagtttaatagtgttgtttatatggagacaaaaagtgctataatttaaatctttagcatgctattctgtattagagtactaatgttgtggcttgtcaatttagcatttttatttcatggattccttgaataattaataagtgagaacattgaggctatgcagacattttattaacacacatc

SEQ ID NO: 326353 - DNA, 610 bp, Homo sapiens
catgtgtttaaataagcttaccaggaagttagggtatgcagcatactaaaaggtaaattacaatttagataaaatcagggaagaaagtaaagtgttgagattccctcaagtctttacttgatgttgatattatatgaaatataatatcatatttattttataattaaaggaaatgatatctaaaacataatgatgttgatattatgtgatattatatttacttttatgttgatattatgtgaaaatatttgtgtacttattgttttgaactacatctgtttaaaaagtagagaaaatttcctttagtatcttaatgagaatggataagttgtaattttgtcatcactttaatcatcttmaatatgaaagaagagatgggttacaccaacaagaagcatagactttattgtatccttattgttgacaatacaggaatctttggatctctctctcaaaaatcaggatagtggatttctccaaatttactgtgaattttgtataaacaatgcaagtatcatatgattttacttattttgagagaaataaagagaaactttattgaaaattatttctgcccattatctgtccctaagtgttttgatcactctct

SEQ ID NO: 326354 - DNA, 610 bp, Homo sapiens
catgtgtttaaataagcttaccaggaagttagggtatgcagcatactaaaaggtaaattacaatttagataaaatcagggaagaaagtaaagtgttgagattccctcaagtctttacttgatgttgatattatatgaaatataatatcatatttattttataattaaaggaaatgatatctaaaacataatgatgttgatattatgtgatattatatttacttttatgttgatattatgtgaaaatatttgtgtacttattgttttgaactacatctgtttaaaaagtagagaaaatttcctttagtatcttaatgagaatggataagttgtaattttgtcatcactttaatcatcttcaatatgaaagaagagatgggttacaccaacaagaagcayagactttattgtatccttattgttgacaatacaggaatctttggatctctctctcaaaaatcaggatagtggatttctccaaatttactgtgaattttgtataaacaatgcaagtatcatatgattttacttattttgagagaaataaagagaaactttattgaaaattatttctgcccattatctgtccctaagtgttttgatcactctct

SEQ ID NO: 326355 - DNA, 610 bp, Homo sapiens
catgtgtttaaataagcttaccaggaagttagggtatgcagcatactaaaaggtaaattacaatttagataaaatcagggaagaaagtaaagtgttgagattccctcaagtctttacttgatgttgatattatatgaaatataatatcatatttattttataattaaaggaaatgatatctaaaacataatgatgttgatattatgtgatattatatttacttttatgttgatattatgtgaaaatatttgtgtacttattgttttgaactacatctgtttaaaaagtagagaaaatttcctttagtatcttaatgagaatggataagttgtaattttgtcatcactttaatcatcttcaatatgaaagaagagatgggttacaccaacaagaagcatagactttattgtatccttattgttgacaatacaggaatctttggatctctctctcaaaaatcaggatagtggatttctccaaatttactgtgaattttgtataaacaatgcaagtawcatatgattttacttattttgagagaaataaagagaaactttattgaaaattatttctgcccattatctgtccctaagtgttttgatcactctct

SEQ ID NO: 326356 - DNA, 586 bp, Homo sapiens
taaatagatacaatatttagaatccaattgaaagaagacagaaggtaatgttrctgctttttatgtttgctacttgggtatttgcattagaagcatggtcagggacatgaataacatgcatatgtgaatttctattataatccctggatatgacttggagctaaatttgagggggctcttcaggttaattcttactgtattcagaagaaaaatattgttggatcctagcttgaaataaactatttatttaggatttggatatttttatagacccccccccaaattgttacagaagttcagtctgcagcatttttgcaagagacttttattagttgatggagaatccttatctttgggaaaaaaaattaaagttatgtaatatggatccaaagaaaagcctcaagaggcagagtgatggaacaagcttgaataccacctcatgtcagccatcctgttgtactggggagtgggcagaggtgacaatagagagagaaaaaagagaagatagtgcacagaagaaatgagaaagagagagagagagaccctaacatatcccaaagtttaattatatagtaggaactaggac

SEQ ID NO: 326357 - DNA, 586 bp, Homo sapiens
taaatagatacaatatttagaatccaattgaaagaagacagaaggtaatgttactgctttttatgtttgctacttgggtatttgcattagaagcatggtcagggacatgaataacatgcatatgtgaatttctattataatccctggatatgacttggagctaaatttgagggggctcttcaggttaattcttactgtattcagaagaaaaatattgttggatcctagcttgaaataaaytatttatttaggatttggatatttttatagacccccccccaaattgttacagaagttcagtctgcagcatttttgcaagagacttttattagttgatggagaatccttatctttgggaaaaaaaattaaagttatgtaatatggatccaaagaaaagcctcaagaggcagagtgatggaacaagcttgaataccacctcatgtcagccatcctgttgtactggggagtgggcagaggtgacaatagagagagaaaaaagagaagatagtgcacagaagaaatgagaaagagagagagagagaccctaacatatcccaaagtttaattatatagtaggaactaggac

SEQ ID NO: 326358 - DNA, 627 bp, Homo sapiens
ctttgaaaagttcttaaccttagtgaactctgtcagaaagtagtattatttatgtactacacacatttgtttcartatcaacaattctctcgttttcattttaacttcttatgtaaaaatttagcaaacataaattgagttattatattcaaaatatccatagcataattctatttttagaaatgtttcattttcacatgcatatatacatcaaataatgtctctagttgcattattcaatacagtagccacaagccatacaaggctatttaaactaaaattaataaaattaagtgagattagaaatgcagttttttagtttcactaaccacatttaagtgcttaatagtcatatttggctattatgactggccactatattgtaaatgtagatataaactgaagtccacataatgttaacagtgattacttatattaaaatttgccttttaaaatattttacttcttttcatgtattttctaagttatttgaatattttttagcatgcttgtgtcattttttaacaaaaagaacttacgttaattctgaatgatgaagatatagaaggttatcatttatactttatacctttagtattttaaacattaaaataaataaaacataca

SEQ ID NO: 326359 - DNA, 627 bp, Homo sapiens
ctttgaaaagttcttaaccttagtgaactctgtcagaaagtagtattatttatgtactacacacatttgtttcaatatcaacaattctctcgttttcattttaacttcttatgtaaaaatttagcaaacataaattgagttattatattcaaaatatcyatagcataattctatttttagaaatgtttcattttcacatgcatatatacatcaaataatgtctctagttgcattattcaatacagtagccacaagccatacaaggctatttaaactaaaattaataaaattaagtgagattagaaatgcagttttttagtttcactaaccacatttaagtgcttaatagtcatatttggctattatgactggccactatattgtaaatgtagatataaactgaagtccacataatgttaacagtgattacttatattaaaatttgccttttaaaatattttacttcttttcatgtattttctaagttatttgaatattttttagcatgcttgtgtcattttttaacaaaaagaacttacgttaattctgaatgatgaagatatagaaggttatcatttatactttatacctttagtattttaaacattaaaataaataaaacataca

SEQ ID NO: 326360 - DNA, 627 bp, Homo sapiens
ctttgaaaagttcttaaccttagtgaactctgtcagaaagtagtattatttatgtactacacacatttgtttcaatatcaacaattctctcgttttcattttaacttcttatgtaaaaatttagcaaacataaattgagttattatattcaaaatatccatagcataattctatttttagaaatgtttcattttcacatgcatatatacatcaaataatgtctctagttgcattattcaatacagtagccacaagccatacaaggctatttaaactaaaattaataaaattaagtgagattagaaatgcagttttttagtttcactaaccacatttaagtgcttaatagtcatatttggctattatgactggccactatattgtaaatgtagatataaactgaagtccacataatgttaacagtgattacttatattaaaatttgccttttaaaatattttacttcttttcatgtattttctaagttatttgaatattttttagcatgcttgtgtcattttttaacaaaaagaacttacgttaattctgaatgatgaagatatagaaggttatcatttataytttatacctttagtattttaaacattaaaataaataaaacataca

SEQ ID NO: 326361 - DNA, 480 bp, Homo sapiens
tgcatattctattttatttactctgggtgcagtggctcacgcctgtaatcccaacagtttgggaggccgaggcaggtggatcaccctaggtcaggagttcgagaccagcctggccaacgtagtgaaacccctctctactaaatatacaaaaaaattagcctgacgtggtggtggcacctgtaatcccagctacttgggaggctgacgcagaagaatcgcttgaacccaggaggtggaggtgcagtgatccgagatcacgccactgcatttcagcctgggtctacagagtgtgactccatctcacrtaataaataaataaataaataaataaataaataaataaataaataaataagcacactgagtactggtattatttttaatataaaagttagaaactagaggcaaaaagaagtcaagtaaattgcataagccacataactggttagtggaagaattaggttttgagctgaaaccctg

SEQ ID NO: 326362 - DNA, 564 bp, Homo sapiens
atttacaaataaaattggaggaaaaggaaacaaatgcagcactaataaaagaataaaaaacataataaagtttagaacaagtttagtagatataaataaccaattaaattcagtcttgtcaaagattcttaagacattacatattctttaagagctacagaaattgatattttatayacgttaaattgaactacacattttccaggttttatccagctaaaattaatgtctatctatagaacaccttgtttatcatgatcatgatatattaaaaaaatgtaaatacattttttgattgctggtagaaaggtacatatagaatatgtctttacccataagccattaggttgcctcagagagagttgaatatgttcaattttgtgaaaatgaaagttacaacattgtggaaaatatttacctttctaaaccacttttttctttactgcatgttatcattagccaaaagcaatctgatatttacacagaaaaacagagtagaaaagatagtgaaagtgagtctgacctaaaccagaaaaaggcaattgtagctgactccttgaacat

SEQ ID NO: 326363 - DNA, 564 bp, Homo sapiens
atttacaaataaaattggaggaaaaggaaacaaatgcagcactaataaaagaataaaaaacataataaagtttagaacaagtttagtagatataaataaccaattaaattcagtcttgtcaaagattcttaagacattacatattctttaagagctacagaaattgatattttatacacgttaaattgaactacacattttscaggttttatccagctaaaattaatgtctatctatagaacaccttgtttatcatgatcatgatatattaaaaaaatgtaaatacattttttgattgctggtagaaaggtacatatagaatatgtctttacccataagccattaggttgcctcagagagagttgaatatgttcaattttgtgaaaatgaaagttacaacattgtggaaaatatttacctttctaaaccacttttttctttactgcatgttatcattagccaaaagcaatctgatatttacacagaaaaacagagtagaaaagatagtgaaagtgagtctgacctaaaccagaaaaaggcaattgtagctgactccttgaacat

SEQ ID NO: 326364 - DNA, 625 bp, Homo sapiens
tttataaacttccactagccagtgctatgtaaataccaagatgagaattaggcccatataccattcttcaataatttgatgacttatttgatatattgagtaactgccaattttgttttagaaagaaacatgatcagaaaaaaagagacctgttctaaacatgtttattcattacatacaacacaaatcaattctgcttctcttgcattgtgtccaaatgaagatgagtgtcatttcaatgataatcattggttcaaaatcaaatatggagggtaaatcagaatatgttctaagttagccctggatccagtgttgttcaatcatttatatcactggattctaaaatatcaggtatattacataagtttatgcatgataatgactgagaggaataaatactaccttgagggagaaagtaaaaaatagccttgataattaaaataaggcaacttatttccgaatgttgagacagagagacagaagagakaagtcttttattttcttttattaatttgaatgttttatgacagtaagaattaactaaattaattagaagcaaagaactgataagaagaaactttaatttggggatttacctgtagtgccatagtcacaattattatcc

SEQ ID NO: 326365 - DNA, 601 bp, Homo sapiens
aatcataggatagaagctctcattgtagaaaagttttaaagaaatggaaaggaaattagtttctgtcatttctctatgacttagtttggcatcattcttctctgcctttctaataacatagaatgcctgagacatgacagaaaatagcaactgattactgtgacaagaagccataatgcagaatatggggagaaatggagagtggtagtaatcttcattatttacacagcacactccctttctaggaggttagataagcactgtcattatgtaacattaagactggttgtttccttttaaaaataagtagctaaaataaggacatggtagtttcttatyttgaaaccttagaaagtactactatatatagtaaaagtgatgtgtgaattgtgaactgtgcctcttgcgaggcagaaaaagacaaaatattactgtaatattgactttgtcctaccacaaaaccatacgaaatctgctgtaaatgttttactgtattttatttttatagtgcagggcatttgcagatggttatacagtgattctgttcttgatgttaaaaattactaaactattaaatttaaggaaagactcattgctaata

SEQ ID NO: 326366 - DNA, 601 bp, Homo sapiens
aatcataggatagaagctctcattgtagaaaagttttaaagaaatggaaaggaaattagtttctgtcatttctctatgacttagtttggcatcattcttctctgcctttctaataacatagaatgcctgagacatgacagaaaatagcaactgattactgtgacaagaagccataatgcagaatatggggagaaatggagagtggtagtaatcttcattatttacacagcacactccctttctaggaggttagataagcactgtcattatgtaacattaagactggttgtttccttttaaaaataagtagctaaaataaggacatggtagtttcttatcttgaaaccttagaaagtactactatatatagtaaaagtgatgtgtgaattgtgaactgtgcctcttgcgaggcagaaaaagacaaaatattactgtaatattgactttgtcctaccacaaaaccataygaaatctgctgtaaatgttttactgtattttatttttatagtgcagggcatttgcagatggttatacagtgattctgttcttgatgttaaaaattactaaactattaaatttaaggaaagactcattgctaata

SEQ ID NO: 326367 - DNA, 571 bp, Homo sapiens
caatgctgaaaacttggttttccaaaatttatctgggtactttagcccagcttagattttgccaaggacaggaatgtgtgtgagatctagaaagcaaagacaaatagatatcactattcttcggaagtagtttcaccagaggaactggcaaataggagattcgaagagttttccaaacagtctttgatgaaccacctttttcattactgtagaatgacatagtttctggaagattcttagggaattctgataattttagcaactcccaggcaagattsagcaaccactttttcttcggtatgtcatgctgagatcttcagagaatcaaaaattctaatatcagtggcaactcctttgactttaaatggcatattctttttcctccaagatatttgttttacaagaacagtttaagcttaatgtaaatctaggaagttaaacctatattaatattttaaagccagaatatttagagtagaagtggtatttagaagattggcccacccaacttctgaaagcacaaataagtagcataaaagcaatggttcacacctatttttggtttattaca

SEQ ID NO: 326368 - DNA, 571 bp, Homo sapiens
caatgctgaaaacttggttttccaaaatttatctgggtactttagcccagcttagattttgccaaggacaggaatgtgtgtgagatctagaaagcaaagacaaatagatatcactattcttcggaagtagtttcaccagaggaactggcaaataggagattcgaagagttttccaaacagtctttgatgaaccacctttttcattactgtagaatgacatagtttctggaagattcttagggaattctgataattttagcaactcccaggcaagattgagcaaccactttttcytcggtatgtcatgctgagatcttcagagaatcaaaaattctaatatcagtggcaactcctttgactttaaatggcatattctttttcctccaagatatttgttttacaagaacagtttaagcttaatgtaaatctaggaagttaaacctatattaatattttaaagccagaatatttagagtagaagtggtatttagaagattggcccacccaacttctgaaagcacaaataagtagcataaaagcaatggttcacacctatttttggtttattaca

SEQ ID NO: 326369 - DNA, 537 bp, Homo sapiens
ctgcagtcagattcatttacctccactcccatagttttttttcaaagtgatgtaatccactaatatgtatcaaattttaataagagaatacayagagaaaatttagttttgcttactataagctgacctcgtcatggaattcatgtaagcctttcttgggaagtgataattaagctgatatcagaagtataagtagatgatatatcatccaacaaaatatatataactttacttatagtttcagttatataaaatccttcaaatgaaatcattaaatattttcttttctttatctttaatgtttaactgtctatttaacaattatgtgtgacagtctataaacacagtaattacagaaaaaaacaccaaaaaataaaaacatggagaaattagcctgtcagttattctgcacatttgctttcaatatacattgaaactttgattgtatgtataaaaattttgtgaaaaattattgtcctatatatatatgactattgtataacttcttattcatttaatatatccctataacactaa

SEQ ID NO: 326370 - DNA, 537 bp, Homo sapiens
ctgcagtcagattcatttacctccactcccatagttttttttcaaagtgatgtaatccactaatatgtatcaaattttaataagagaatacatagagaaaatttagttttgcttactataagctgacctcgtcatggaattcatgtaagcctttcttgggaagtgataattaagctgatatcagaagtataagtagatgatatatcatccaacaaaatatatataactttacttatagtttcagttatataaaatccttcaaatgaaatcattaaatattttcttttctttatctttaatgtttaactgtctatttaacaattatgtgtgacagtctataaacacagtaattacagaaaaaaacaccaaaaaataaaaacatggagaaattagcctgtcagttattctgcacatttgctttcaatatacattgaaactttgattgtatgtataaaaattttgtgaaaaattattgtcctatatatrtatgactattgtataacttcttattcatttaatatatccctataacactaa

SEQ ID NO: 326371 - DNA, 600 bp, Homo sapiens
aatacggacagaaaacaattttacaaatgttagtagtaagccttttcctatcaataatgatcttaaatatgaatggattaaactctgtcaaaagatagaatagctaaagggatttttaaaaaagatccaattatatgctaactacaagatacacagtttagatttaagaacacacatagattaaaaacataggagtggaaaaaatttttcatgcagatgcaatccagaaaagagcacaggctgccataggtatagcatacaaaataactttacattagattgtcataattgacaaaaaagaacattatataatgatcaaagygtaaattcataaggaaggtataacaattataaacatacatgcatctatatacatattcaagctatatattctaaatatctgaagcaagcattgacagaagttaaggcagaaataggaagcaacataatagtagtagaagtattcaatactccaatttcaataattgatagactatccagacagaaaatcaataagaaaaaaagacttaaacaacatcatagaccaaatggacttaaaggaaacatgtaaaactttttacccaagagcaaaggaataca

SEQ ID NO: 326372 - DNA, 632 bp, Homo sapiens
attatacacatatatacactgactttcagatgtctgatgctcttatgtcatttcaggaaagaacaccaggaaaaatgtaaacatattttacataaaataccataaaaccctctagatttctgttgccttattatttcagcaggctttcttaactttcttttttcctttctaacttttattttgggttcaagcagtacctgtgcaggtttgttacatgggtaaatygtgtgtcgtaggggtttgatgtacagataattttgtcagccaggtaactggcataatgctggagaagtggtttcaatcctcactcccctccctccctccaccctcaagcaggctccagtgttattgttcccttatttgtgtccatgtgtagtcaatgtcttaacttgtttagtagctgaacaagttagttgcacttagacttgcaaaacgaactatatgcctattttttccatttaaaaatagaaactgaggcagagaggcaggtttttcaaatcaactttaattaatctgttttctctatgtgtgatgtttcattcatatgtcagtaagtttccatgtatatactttcttgatgtgaaatattaggctggtgcgtatgtttttgataataaattttataatatcct

SEQ ID NO: 326373 - DNA, 632 bp, Homo sapiens
attatacacatatatacactgactttcagatgtctgatgctcttatgtcatttcaggaaagaacaccaggaaaaatgtaaacatattttacataaaataccataaaaccctctagatttctgttgccttattatttcagcaggctttcttaactttcttttttcctttctaacttttattttgggttcaagcagtacctgtgcaggtttgttacatgggtaaattgtgtgtcgtaggggtttgatgtacagataattttgtcagccaggtaactggcataatgctggagaagtggtttcaatcctcactcccctccctccctccaccctcaagcaggctccagygttattgttcccttatttgtgtccatgtgtagtcaatgtcttaacttgtttagtagctgaacaagttagttgcacttagacttgcaaaacgaactatatgcctattttttccatttaaaaatagaaactgaggcagagaggcaggtttttcaaatcaactttaattaatctgttttctctatgtgtgatgtttcattcatatgtcagtaagtttccatgtatatactttcttgatgtgaaatattaggctggtgcgtatgtttttgataataaattttataatatcct

SEQ ID NO: 326374 - DNA, 578 bp, Homo sapiens
tggaacctaaaataaaagttaaaacaagaaaaataaaaaaactcctgaagcttaaaaatatatgtgtgtgtgtgtgtgtgtgtgtgtgcgtgtgtatgtctccagtgagtacacaaatgataagaaagtgaaacagcctttttgctgacatggggaaagttttagtggtctgaatagaaaatcaaaccatccacaacattcccttaaactaaagtctaatgtggagcaaaaacttaacttttgttttaatcctctgaaggctgagaggggtgaggaagctacaaaagacaagttgaagcctagcaagtttgttttatgaggtaagggaataagccatttccataacaaagaatgcaggtgaagcaataggtgctgatggaaaagttgcagcaagttatccaaaagaygttgctaagataattgatgaaggtggctccattaaatattagatttttactgtacataaaacagcctcatattggaagaagttgccatctgggacttttatagctagagtggaaaagtcaaagtctgggttcaaaattcaaaggtaaggctgattttttttgttagaggct

SEQ ID NO: 326375 - DNA, 577 bp, Homo sapiens
gaggtcaagaaatcgaaaccatcctggccaacatggtgaaaccccgtctttactaaaaatacaaaaattagctaggcgtggcggtacatgcctgtagtcccagctactcagtaggctraggcaggagaatcacttgaatctgggagacggaagttgcagtgagctgagatcgtgccactgcactccagcctggcgacagagcaagactctgtcaaaaaataataataataataaaataaaaaataaaaaaaaacactttactttaaattttaatatagatactgtctcttctgaagtaagaatttttacagtagggaaggcagtaatcagcaaatcagtaaacaagcaaacaaaaaacaccaaagaagtacataccataaaaattgtgttgattaaataattattaaatgtcttctgcatttgcctatgtcctaacaaaatacacagattgggtggcttaaacaaacaaacaaacaagcaaaaagatattttcacagtctggaggctagaagtccaagatcaagacgtcagccaatttggtttctccagaggcctctctctttggctttcaggtggc

SEQ ID NO: 326376 - DNA, 577 bp, Homo sapiens
gaggtcaagaaatcgaaaccatcctggccaacatggtgaaaccccgtctttactaaaaatacaaaaattagctaggcgtggcggtacatgcctgtagtcccagctactcagtaggctgaggcaggagaatcacttgaatctgggagacggaagttgcagtgagctgagatcgtgccactgcactccagcctggcgacagagcaagactctgtcaaaaaataataataataataaaataaaaaataaaaaaaaacactttactttaaattttaatatagatactgtctcttctgaagtaagaatttttacagtagggaaggcagtaatcagyaaatcagtaaacaagcaaacaaaaaacaccaaagaagtacataccataaaaattgtgttgattaaataattattaaatgtcttctgcatttgcctatgtcctaacaaaatacacagattgggtggcttaaacaaacaaacaaacaagcaaaaagatattttcacagtctggaggctagaagtccaagatcaagacgtcagccaatttggtttctccagaggcctctctctttggctttcaggtggc

SEQ ID NO: 326377 - DNA, 607 bp, Homo sapiens
tacgtgctgaaaacctgctgtttgaaacaagtrtttgaagacaagactctcttccatttctctgatagctgagcaatcagatatctctttagatatcttttttacaactctgcttattcttccttgcacttggcagcttgtccttgtgaactgagaagaaaaagaatagagacctctcttcattctgttattttaaacttaaaattatcttactacttcttgcaacctcacacactgtaatattatttaataattacagagaagtaatagacagaatgtattccaaagtggggaaataataaataccaaatcacaaatagtttcttctggacctaacggagaaagtttaatgctactagagtatgtatggatatagtggtgatagtgggatccaatgaaataccatcttgctcttcttcatctccagcataatcaatgatgttattccaaagattagtgagcactattcaatcagaatgaatccaagctggcctaatcctagagcatgagaataaagtgattgtattgggcagaaatatgtgaaagttggagcatcctttgagagggtttggggtatgaagggcactcttgggtggtaggatttgag

SEQ ID NO: 326378 - DNA, 607 bp, Homo sapiens
tacgtgctgaaaacctgctgtttgaaacaagtatttgaagacaagactctcttccatttctctgatagctgagcaatcagatatctctttagatatcttttttacaactctgcttattcttccttgcacttggcagcttgtccttgtgaactgagaagaaaaagaatagagacctctcttcattctgttattttaaacttaaaattatcttactacttcttgcaacctcacacactgtaatattatttaataattacagagaagtaatagayagaatgtattccaaagtggggaaataataaataccaaatcacaaatagtttcttctggacctaacggagaaagtttaatgctactagagtatgtatggatatagtggtgatagtgggatccaatgaaataccatcttgctcttcttcatctccagcataatcaatgatgttattccaaagattagtgagcactattcaatcagaatgaatccaagctggcctaatcctagagcatgagaataaagtgattgtattgggcagaaatatgtgaaagttggagcatcctttgagagggtttggggtatgaagggcactcttgggtggtaggatttgag

SEQ ID NO: 326379 - DNA, 607 bp, Homo sapiens
tacgtgctgaaaacctgctgtttgaaacaagtatttgaagacaagactctcttccatttctctgatagctgagcaatcagatatctctttagatatcttttttacaactctgcttattcttccttgcacttggcagcttgtccttgtgaactgagaagaaaaagaatagagacctctcttcattctgttattttaaacttaaaattatcttactacttcttgcaacctcacacactgtaatattatttaataattacagagaagtaatagacagaatgtattccaaagtggggaaataataaatwccaaatcacaaatagtttcttctggacctaacggagaaagtttaatgctactagagtatgtatggatatagtggtgatagtgggatccaatgaaataccatcttgctcttcttcatctccagcataatcaatgatgttattccaaagattagtgagcactattcaatcagaatgaatccaagctggcctaatcctagagcatgagaataaagtgattgtattgggcagaaatatgtgaaagttggagcatcctttgagagggtttggggtatgaagggcactcttgggtggtaggatttgag

SEQ ID NO: 326380 - DNA, 607 bp, Homo sapiens
tacgtgctgaaaacctgctgtttgaaacaagtatttgaagacaagactctcttccatttctctgatagctgagcaatcagatatctctttagatatcttttttacaactctgcttattcttccttgcacttggcagcttgtccttgtgaactgagaagaaaaagaatagagacctctcttcattctgttattttaaacttaaaattatcttactacttcttgcaacctcacacactgtaatattatttaataattacagagaagtaatagacagaatgtattccaaagtggggaaataataaataccaaatcacaaatagtttcttctggacctaacggagaaagtttaatgctactagagtatgtatggatatagtggtgatagtgggatccaatgaaataccatcttgctcttcttcatctccagcataatcaatgatgttattccaaagattagtgagcactattcaatcagaatgaatccaagctggcctaatcctagagcatgagaataaartgattgtattgggcagaaatatgtgaaagttggagcatcctttgagagggtttggggtatgaagggcactcttgggtggtaggatttgag

SEQ ID NO: 326381 - DNA, 467 bp, Homo sapiens
atggggcgggtttcctccatgcttttctcatgatagtgagtgagttctctcaagatttgatggtgttataaggggctcttctccattctctcagcatttctccttccttttttcttgtgaagaaggtaccttgtttctataatatgtaataggcatgtaagtagtttcaaaagaagacttgcaagtctcaagtactatgaattaaaaatatgcaccatactcattaaaatctaatttattgccaggcacagtagctcatgcctgtaatcctggcactttrgcaggtggatcacgaggtcaggagatggagaccatcctgcctaacaggatgaaaacctgtctctaataaaaatacaaaaaaaaaaaaaaattagccaggcatggtggtgggcacctgtagtcccagctacacaggagactgaggcaggaaaatggcgtgaactcagaaggtggagcttgcagtgagc

SEQ ID NO: 326382 - DNA, 446 bp, Homo sapiens
ttagtacaatcaaactcctgttgacacatcatcacccaaagaccataatttacattagggttcacttttggtgttgtatattttataagtttggacaaatgcatagtgacataaattcaccatttaactatcatacacagtattatcactgccctaaaatttttctgtgctgcatctattcatcagtccctcccccaagcccctgacaaccactcatcyttttactgtcttcacagttttgtgttttccacagtgtcatttagttggaatcatatagtatgtagccttttcaaactggcttctttcacttagtaatatgcatccaatgttcctccatgtcttttcatcgcttgacagctcatttctttgaagtgctgaataatattccactgtctggatgcatcatagtttatttattcattcatctactgacagacatcttagtt

SEQ ID NO: 326383 - DNA, 598 bp, Homo sapiens
accatctcactttatctcatgtgagaactatcttcataaaagatggaatataagtaaaacattttggttataaatgccaaaaccagcctttctgagttcaccataaaaaattggttgaaaattgatgagttatcaaagtcatgagatgctgcctaagcagatataataaaggtttccaagacatggcaaaatttggaatttctgaaaattgcagtatatactatccaataactcagaagactccatcattctctgtttctcccttatactagattttttaaagtaatgttggtattattaaygttgtattataaatgtaaaaaaagattatgtagaaaatcaatgtacaaaaattaatcaagtctctagctttgtcataaaatacaaatattaaataataaaagtttgtacaaatttgaatttattttcctgaggacaatagttactatatctaaaccagaattgttgaataatgtggtttcaaaaataatttaaataatcttgcacggtaaacatattaaattacgagataattatgatataaaaatctcaatatcttactgctaatttttaatagcataagttcaagtatataaaa

SEQ ID NO: 326384 - DNA, 610 bp, Homo sapiens
attacatacttataccatctcactttatctcatgtgagaactatcttcataaaagatggaatataagtaaaacattttggttataaatgccaaaaccagcctttctgagttcaccataaaaaattggttgaaaattgatgagttatcaaagtcatgagatgctgcctaagcagatataataaaggtttccaagacatggcaaaatttggaatttctgaaaattgcagtatatactatccaataactcagaagactccatcattctctgtttctcccttatactagattttttaaagtaatgttggtattattaatgttgtattataaatgtaaaaaaagattatgtagaaaatcaatgtacaaaaattaatcaagtctctagctttgtcataaaatacaaatattaaataataaaagtttgtacaaatttgaatttattttcctgaggacaatagttactatatctaaaccagaattgttgaataatgtggtttcaaaaataatttaaataatcttgcacggtaaacatattaaaytacgagataattatgatataaaaatctcaatatcttactgctaatttttaatagcataagttcaagtatataaa

SEQ ID NO: 326385 - DNA, 570 bp, Homo sapiens
aattattcaattaatctatatgtacatgtgcagatttttttaaaaattgctacatgagatgattaatcataaaagtagctttcatattctacgtggtctatttagtaactagatttaagtgtaatggactttatcttaaaaaatcaatatgctattttaatattattcagcctatgccatatattaaacagcattgtggcatataaattaaattttgatgatatcttgcatcagctttgaagaartttttctgtctcttttaagccctagctttttgcacctttttttggttatctgaaatgttctgttaatgcaatagaatttaaaaggaaccaaatttcacaaaagcaatagagattagtaacaatgctactgaacatgaacattaaaacttgcttctatccaatttgtccttttatttctgtatttttgattggtgcatatcaagaaaaaaatagaattgtacaggccacctaaaatgatgagggcgtgaaaatcgaaaacttgtagtttgattaaaaggagaggatttaattgttattccaatggtccctgactccattttcttca

SEQ ID NO: 326386 - DNA, 525 bp, Homo sapiens
tagtacaatgttgaataaaaattataaaagtagacattgttgtcttgttctgatcttatgtaaaaataattcattttttccttaaataggatattagctatagggttttttttggatgtttttggccagggttaagaatttctcttctatttctattttgattaaatttttgttctyttttaaaattagaaacagatgttggaatttgttaattacttttaacaaataagatgctcatataaatattctatcttagtttgttaatatgtttaattacatttttgattttcaaataccaagttccatttttgggaaaaataccacttagtagtatcttatgttgtctcctaggaaacctgtaggagaaaatataaaacagtatctttaagagcttgggttgggcaagaaaaagcatcacatgtaaaagtttgataacttgaactacattaaaattaaagatttctgttcaccaaaatataccaataatattgtgaagcaagtaatgaaataaaaaatctgtacttc

SEQ ID NO: 326387 - DNA, 506 bp, Homo sapiens
gtatatgcatacatatataatatgtgtgtgtgtgtgttgaatatatatttagcctagcaggatgtgctttctttgctgtgatcaatcagattttagaggtatttcatcttctgaagaactattttgtaaatcaacctaagtgtcctataaaggtatttatttttcttttttaaaaaatatgtataaatttaaagactgtaagtagaattgcttaatttgatgtctggactttcagcatcaccatcactcaaataatttacattgtatccactaagtaatacctcatcatccacctttctcccgccccctaacccttctgagtcaccattgtctatcatttcacactctatattcatgtgtacacattatgtagctcccagttataactgagaacatacagtgttcctcttatcatttctgagttgttttctttaagataatggcctccacttccatccatgtggctgcaaaaggcaygatgtcattcattttatggttaagtggca

SEQ ID NO: 326388 - DNA, 551 bp, Homo sapiens
gcttcctgagacctccactatcccagcaccacaggaggcagggaacctgctcatatgcctaatacatcactagtataaccagcatttgaggaagctaccacaaaaatctataactaagtaactcctacagagttttttggcactaaaagcactcagaactagaaccaaatgaccatatacaacttgtattatattcacatcctcaaggggaaaagaaatcccatccaaatgaaagtaaattcaagaaaaaaggaaaagatattttattcagatgggaagaaaccagaaaaagaattctggtaatatgaaaaaacagtgttacaacatccccaaaggatcacattaactccagcaargatcctaaccaaaatgaaatctttgacattcctgataaagaattgaaatcattgattttaaagaagctcaatgagctccaacagaaaggtgaaaaccaatacaaataaatcataaggataacttaagatatgagtgaaagatttcctaaagagataaatattaattttaaaaatccagaacttctgttaataaaa

SEQ ID NO: 326389 - DNA, 532 bp, Homo sapiens
gggcatctaatcatctataaagaaaatcccatcagactaacagtgtrtttctcagcagaaaccttataagccagaagatattgaaggccaattttgagacctcttaaagaaaaagtaaaaaaaaaaaaataagtaaataaataaaatacctgtcagccatgaattttgtatcctgctaaaactaagcttcataaatgaaggagaaacaagacaagcaaacactaaggaaatttgtcacctctatacaagacagatgagaaacgctaaaaaatgctgtaaacatggaaacaaagggtcaatactcaccatcataaaaacatacaaaattagaaaactgacaggtcttataaaacaattacaaaattgagactgtaaagcaacaagaacaaaattaacattacaataggagtaaaacatcaatattaacattgaatataaatggactaaattatccacttaaaagatatacattggcaaaatagatgtaaaaaaacagaatctaattacgtgctagtaaagacagttatggact

SEQ ID NO: 326390 - DNA, 558 bp, Homo sapiens
taccaaagcttatttattcattcactttttgatggacagtttggtagcttccaagccttggcatctataaataaagctgcaataaaacatctgtgtgcaaatttttgtgtgaatgtaaattttttaactcattgagtaaataccaaggatcatgattgctggataatatgactatgtttagctttgtaagaaactgccaaattgtcttgcaaagtggctgtatcatttttcattcctaccagcaatgaatgagagcacttgttgctctatgtcctccccagcatttagtgttgtcaytgttttagattttacccattctaaaaggtgtgtactggcatctcattgatactttaattcgcaactccccagtaccatatgatgtgtaccatcttctcatatcctaaatggccatttgtattttttcattaaggaggtatctatttaggtttttatttcccatttttgaattgggttgtttttctactatggaattttaagagttctttgtatattttggaaaacagttctttatcagatacggctattgcaaatattttc

SEQ ID NO: 326391 - DNA, 587 bp, Homo sapiens
ggtggataaggaaagtccttggagtgctgagtgtctttggtaactgatatggccggggataaatggcataatgaaggaagttgtgaggctcctgtttgatgagttaagacctgaggagcccaatacctacagcagtgatcatgctgtaagatttgaatgaggtgggaacatgcaaagaagggctggaattcttggtagacagctgtctctgacattgtgttgggagccttgatgwatttttaaaaattcaactaactttgcaatccacagataaagtattagtttgttagggctgccataataaagcactaaaacctgagtgccttaaacaacaggaatgtattgtctcacagttctgggggctagaactagatcaaagtgacaacagggccatgctccctctgaaagtggtagggaaggatctgttccagatctctcttctggcttctggtagttccttggcttgtggcattctcccagtgtgcttgtctgtcacatttctcccttttataaagacagcagtcatattagactaggggcctaccctactacagcatgacctcaccttaactaattacacctgcaac

SEQ ID NO: 326392 - DNA, 603 bp, Homo sapiens
ttaaaaccatccactgtcaaggaaaaatataagaaaagaaaaaaattctagagaagaaggggaaakaggaaagggaagaaacagagaacagattaaaacaaaataatttagatgtttttgctggtaataagagaaatacttgaatttgcagatgtacctggcaaataggctcttgataaatgttaatacatatatttgctgaatggatgtcagataaatgccttggcttcttacataaaagagaaaaataggagcaaatccatgattgaactgaattttagatagcctgtctggtttcagtttgattataaatgtcccattgtaaatattacctccaaatctatacaaaatgagacagagtcacagatttatcccaaagtcatcctaagtaaggtcctgaggaaactttctgaatgtcagaaaccctggggcagatctaagcattcaaaaattgtttaatcctgtttaattctggtccacacattctgggcatttgattattattttagtagtataagggtaaaattcagtgatgaaatcttagctataaatataaatacaaagttccaagcagtgattaccagacctctcaacttggccacg

SEQ ID NO: 326393 - DNA, 602 bp, Homo sapiens
attcaagatgagatttgggtgaggacacagccaaaccattttagatggttacaaattttggaattcactccaaagaagcactggtgcagttaatgtatatgaacaaatagttaaatgtttatataataatttttgtgttttctggtttttgtgtgtttccagacagggtatccctctgtcacccaggctggagtgcagtggtgcaatcatagctcactgcaaccttgaactcttgggctcaaggtaaactccctgcctcagcctcccaagtagctggaactacaggttcacaacaccgcacctgcctaatttgttttcttttttcttttgtgttgagacaagatcttgttttgttgtccaggctggtctcaaactcctggactcaagcaatccttcagcctcagactcccaaagtgctggaattacatgtgtgagccacaatgcctggcctaggtaacagctttaattaaaaattctgtttcattaatataaaatatgagctaattctttatgattcttaaaagcmaacaaaaaaacgcatgaagcatgtaaaaacaaggtatataataaaatagttttctcacagccatcacgaaaagtca

SEQ ID NO: 326394 - DNA, 623 bp, Homo sapiens
aaagtagcaataactacagtagtacctgtaattgctttgtttactaactcacttctctgctgctaccagagattactagaaatttaccatgattatgtggcaaatgaactttgcaaactgtattttagagaatctctaaacacattttgaaaatgtcaaaakgcaatcttataacagatatataaaacaatagtgttaatatcatcatataatattttctaatcttgaaagagagtcaaagattctaggagatatttattccactacctaggtgataagccacatttggaaggatagaaggtaaaaataagaaaacaaaaatgagaacaggaaaatcaacacctacaaaagcctccctttttttcttatcaaaacctgtgcaggggtcatgaagcccacattttgtgacaggttgtcatgaaaataatgagtagatctctccttccaaatttttaacgaaagatttattagaacatggaaagtcagattaagaagaattgggaccaaagcctgtttaacttacttggtttgatggttaataaaatagtttttccacagatggaatttactcagtaatccacatatttgtctgttatttctataatgaaaggtcaacatcacca

SEQ ID NO: 326395 - DNA, 585 bp, Homo sapiens
taattcattgaagtcagaatcatctatacaaagaaaaacatctaataataatggaaaattatgtccattcgtgatgaagcagtttgggatttttttttttttttttttctgagacagagttttgctcttgttgcccagactggccaggctggcatgcagttgtgtgatctcagctcactgcaacctctgcctcccaggttcaagcatttatcctgcctcagcctcttgagtagctgggactacaggcatgcaccaccacacccagctaatttttgtacttttttagtaragacggggtttcaccatgttggccaggatggtatcgatctcatgaccttgtgatctgcccaccttgtcctcccaaagtgctgggattacaggcctgagccaccgcgcctgtagtaatgtagtgtataatgggaaattttttttttaatgctgtgttagttcattctcaaatgactatatagctgcaactgggtaatttatgaagaagagctttaattgcctcacagttctgcttctcctttaaatatcagttctgactttaggtcatttctttgcttatgtatcccagtataggtt

SEQ ID NO: 326396 - DNA, 585 bp, Homo sapiens
taattcattgaagtcagaatcatctatacaaagaaaaacatctaataataatggaaaattatgtccattcgtgatgaagcagtttgggatttttttttttttttttttctgagacagagttttgctcttgttgcccagactggccaggctggcatgcagttgtgtgatctcagctcactgcaacctctgcctcccaggttcaagcatttatcctgcctcagcctcttgagtagctgggactacaggcatgcaccaccacacccagctaatttttgtacttttttagtaaagacggggtttcaccatgttggccaggatggtatcgatctcatgaccttgtgatctgcccaccttgtcctcccaaagtgctgggattacaggcctgagccaccgygcctgtagtaatgtagtgtataatgggaaattttttttttaatgctgtgttagttcattctcaaatgactatatagctgcaactgggtaatttatgaagaagagctttaattgcctcacagttctgcttctcctttaaatatcagttctgactttaggtcatttctttgcttatgtatcccagtataggtt

SEQ ID NO: 326397 - DNA, 562 bp, Homo sapiens
tttttctttataaattttccagtctcaggtgtttttttagagcaatacaagaacaaaataatacaaatgcattctacattcwttttttttgaactaaaggaagtgatagagaaatagaacatctgattcttggataaaaattgacaatgagtaagagttttaattcttattacaagagtaggcaaaattaggaaatatgctttgagactaacatgtcaatgttcttttcacctaagcgttctgtcctctgtttcattagcgagatctgagaatgcctgttcctgcaagaagaaggagcagtcctatgtatctgggctgtaatgctgaagagggccaagtggctccctgtgagtccagataaaggatatattattcaagagaaaaacttgtaactactctaaacttaagacagatttatttagtcagctgggaattccagagactcaggcagatacctaagagcatgtttaattgctctaagcccctgattcctgatttcctaattttatatgtatataatggttatcagttctgtagaatagttttatggtaactgacatac

SEQ ID NO: 326398 - DNA, 562 bp, Homo sapiens
tttttctttataaattttccagtctcaggtgtttttttagagcaatacaagaacaaaataatacaaatgcattctacattctttttttttgaactaaaggaagtgatagagaaatagaacatctgattcttggataaaaattgacaatgagtaagagttttaattcttattacaagagtaggcaaaattaggaaatatgctttgagactaacatgtcawtgttcttttcacctaagcgttctgtcctctgtttcattagcgagatctgagaatgcctgttcctgcaagaagaaggagcagtcctatgtatctgggctgtaatgctgaagagggccaagtggctccctgtgagtccagataaaggatatattattcaagagaaaaacttgtaactactctaaacttaagacagatttatttagtcagctgggaattccagagactcaggcagatacctaagagcatgtttaattgctctaagcccctgattcctgatttcctaattttatatgtatataatggttatcagttctgtagaatagttttatggtaactgacatac

SEQ ID NO: 326399 - DNA, 570 bp, Homo sapiens
ttttctttttgcacaacataggcagcttgattttgaacttaaaacctatataaagattggcttgattctatattttttcatgcttaaggcaaattttctctatcatttyatgccatagacaaatttcctctttccccttctatatatggaaggtttatttcctctctaccctaagactgaggatgcaaaacttgaggtcttatttttgtggatttctcttattagacttcattcaagttcttctaagagtagaattcccaagttgtattcacatgttcaactctgttactatcagatttttaataaaattactctaccaacttgcatttcatatataccaggagagtataaaagttccagttgtttcacatttttgtcgacacttaacattataatacttcttgattctcccttatctagtgtgtgtaaatttgaattcattttaatcagatttgaatttccgtgattattaattagtttaaacatcttttcatgtctttatcagtcattttcatgaaacttacctggccttttctttttctcattaatttatacataattatattgtat

SEQ ID NO: 326400 - DNA, 570 bp, Homo sapiens
ttttctttttgcacaacataggcagcttgattttgaacttaaaacctatataaagattggcttgattctatattttttcatgcttaaggcaaattttctctatcatttcatgccatagacaaatttcctctttccccttctatatatggaaggtttatttcctctctaccctaagactgaggatgcaaaacttgaggtcttatttttgtggatttctcttattagacttcattcaagttcttctaagagtagaattcccaagttgtattcacatgttcaactctgttactatcagatttttaataaaattactctaccaacttgcatttcatatataccaggagagtataaaagttccagttgtttcacatttttgtcgacacttaacattataatacttcttgattctcccttatctagtgtgtgtaaatttgaattcattttaatcagatttgaatttccgtgattattaattrgtttaaacatcttttcatgtctttatcagtcattttcatgaaacttacctggccttttctttttctcattaatttatacataattatattgtat

SEQ ID NO: 326401 - DNA, 592 bp, Homo sapiens
  misc_feature (1)...(592): n = A,T,C or G
tataaatatatagtttatattaaatttatattaaaaattaaatccccatattaatagctgtaaaccatgacaaccagtgattagttataataataatgaggtgaacagaaaaatgagattctcttttaaactgatgtaaatacctgttacagacaatactgtattaagaaacattatatagtagtcaaattagaaaacattttccaaccagataaaaatgtatttctcttttgagaagttaggcttttgctataaaaaaacacataaaaaataatttttgtgttactacrttacctattaaaacaagtatgctttaataaacatcaaagaaagcagtctaattattcatttgaatttttatttccaaagataagtactcaaaagcttagagtcncaattattatcttgtcctgcatgaagtgataaaagataaattcaagttatgctctcattatctttctgtatntttactggtaatgacatttttcattgtaaatacaattctataattgactttcatataatgaattatatgttttactaacatccttggtatgcagccaagaaaggaagaagtagaaatcaacatggc

SEQ ID NO: 326402 - DNA, 563 bp, Homo sapiens
tccaactaatgaatttcattatttttgaccaaacctcaaacttctataacatcagcaacaactattacctaccaaaagctcttkcaaggacctaagctttggtcagaagacagtaataaatgtgactgtgatagataatatgtaatacaactgaggtaatttcatgaagattacaatggaaactatgcattactctattatttaattatataatctaatacaattttagctctaatttttgaggcaggcagtgcaaagaagagaaaatgctcagttctttcaaatgtgggacaggcattattatctcttcttttttggtttctgaatgaatgaggatttagcttttaccctgaagcttctcaaatgagtctagttacatagagtaacctcttaatataattttatgtaattaagctatcagagaaagtattcaaataaacaaaaatggagattagttcttacataaaaatcatgattccactgaaaaactaaattaaaagagagataataaaagtacaaatgtagtcaatgttattgctgactattaccgtttttcggattgt

SEQ ID NO: 326403 - DNA, 516 bp, Homo sapiens
tttttatttgttattgaacctccaaaatacactatttattcattgtgaatttttgttgcatatttgttcacaattttgttttagtgtaaatatccttwtcttctctaaattccctacctttaaataccctataagttattatcagtttttttctgcatttgtggcataatacaaggctgtaaactggataatccagtaaaaatactgtaaagcattgtcaacattgaaaggaagctctctctcagtttcatttcattatactattaatttgttatcatattactttatttctttttaatatgacacatacatagctgattgagtgtgcagcctattatgacacttaaggattttccatagtgtctctttaatagatttgtgtttttatgagaacaatttaaatgtcagcattttttacttaatgtatattgtgtaattatgaaaaaagttatatagatttcataaatatgtgtagctttttaaaatcagaatttaaaatcctatgtctttatttca

SEQ ID NO: 326404 - DNA, 516 bp, Homo sapiens
tttttatttgttattgaacctccaaaatacactatttattcattgtgaatttttgttgcatatttgttcacaattttgttttagtgtaaatatccttttcttctctaaattccctacctttaaataccctataagttattatcagtttttttctgcatttgtggcataatacaaggctgtaaactggataatccagtaaaaatactgtaaagcattgtcaacattgaaaggaagctctctctcagtttcatttcattatactattaatttgttatcatattactttatttctttttaatatgacacatacatagctgattgagtgtgcagcctattatgacacttaaggattttccatagtstctctttaatagatttgtgtttttatgagaacaatttaaatgtcagcattttttacttaatgtatattgtgtaattatgaaaaaagttatatagatttcataaatatgtgtagctttttaaaatcagaatttaaaatcctatgtctttatttca

SEQ ID NO: 326405 - DNA, 536 bp, Homo sapiens
aacatggtgaaaccctgtctcttctaaaaattaaaaaaaaaatagctgagcatggtggcacatgcctgtgctcccagctactcaggatgctgaggcaggaggatggctagaacccaggaggcagaggttgcagtgagctgagatggcagcactgcgctccagcctsagtaacagaaaaagaccctgtctgtaaaaaaaaaaaaaaaaagaaaaagaaaaaaaagtgggaaaaggatgaagacataagcagataacattttaaaatgcccagtatcactaattatcacagaaatgcaaattaaaaccacagtgaaatgccatcttacaccattcagaatggttattattaaaaagtcaaaaaaccccaacagatgttggtgagaatgtagagaaaaaggaatacttatacattgttggtgtgaatgtaaattaatacaacctctatgaagaacagtatggatatttctcaaagaactaaaaatagaactaccatttgacttagcaatcccactattggatatctacgcaaagcaaaa

SEQ ID NO: 326406 - DNA, 536 bp, Homo sapiens
aacatggtgaaaccctgtctcttctaaaaattaaaaaaaaaatagctgagcatggtggcacatgcctgtgctcccagctactcaggatgctgaggcaggaggatggctagaacccaggaggcagaggttgcagtgagctgagatggcagcactgcgctccagcctcagtaacagaaaaagaccctgtctgtaaaaaaaaaaaaaaaaagaaaaagaaaaaaaagtgggaaaaggatgaagacataagcagataacattttaaaatgcccagtatcactaattatcacagaaatgcaaattaaaaccacagtgaaatgccatcttacaccattcagaatggttattattaaaaagtcaaaaaaccccaacagatgttggtgagaaygtagagaaaaaggaatacttatacattgttggtgtgaatgtaaattaatacaacctctatgaagaacagtatggatatttctcaaagaactaaaaatagaactaccatttgacttagcaatcccactattggatatctacgcaaagcaaaa

SEQ ID NO: 326407 - DNA, 463 bp, Homo sapiens
gtgccatatgaattgtctactatttactttttgataatatttgaatcttatatgaaaataattttaaaattaataataaacatttacatagcacttgtaacatgctaagcattgctcctaataaaagagatattattatccccatttggtagatatataaactgaggcacagaaaatttaagtaaactgtgttcaaatgctggcaaaatgtcagaatctggatttgaacatcaagtttgttaccaatatcaggtcttttamctaattctccacacagaaaagcaacatatgcaaaaaacaaaaaatcacagaaggggtaagaatgtaacactctacttactgtcatgcttgaaagttaatgattttatagaaaatgctatttttcataaaataatctctcatggaaaagaccaatgttaattgttaattcaatttgcaaacattattcatgaattaattattg

SEQ ID NO: 326408 - DNA, 463 bp, Homo sapiens
gtgccatatgaattgtctactatttactttttgataatatttgaatcttatatgaaaataattttaaaattaataataaacatttacatagcacttgtaacatgctaagcattgctcctaataaaagagatattattatccccatttggtagatatataaactgaggcacagaaaatttaagtaaactgtgttcaaatgctggcaaaatgtcagaatctggatttgaacatcaagtttgttaccaatatcaggtcttttaactaatwctccacacagaaaagcaacatatgcaaaaaacaaaaaatcacagaaggggtaagaatgtaacactctacttactgtcatgcttgaaagttaatgattttatagaaaatgctatttttcataaaataatctctcatggaaaagaccaatgttaattgttaattcaatttgcaaacattattcatgaattaattattg

SEQ ID NO: 326409 - DNA, 463 bp, Homo sapiens
gtgccatatgaattgtctactatttactttttgataatatttgaatcttatatgaaaataattttaaaattaataataaacatttacatagcacttgtaacatgctaagcattgctcctaataaaagagatattattatccccatttggtagatatataaactgaggcacagaaaatttaagtaaactgtgttcaaatgctggcaaaatgtcagaatctggatttgaacatcaagtttgttaccaatatcaggtcttttaactaattctccacacagaaaagcaacatatgcaaaaaamaaaaaatcacagaaggggtaagaatgtaacactctacttactgtcatgcttgaaagttaatgattttatagaaaatgctatttttcataaaataatctctcatggaaaagaccaatgttaattgttaattcaatttgcaaacattattcatgaattaattattg

SEQ ID NO: 326410 - DNA, 566 bp, Homo sapiens
tgtttactctgataaaaccaaatttcttatttcaatgttctttgtgagccaactcaagtttgcatttcaatatctatccttcccaattctcaatatgcactgttttttgttagacttgcccactatatagttttcaactatgactrtctcatgtctaccatgacctatttttcttaacttctatgcctttactaaaatacttttcctgaatctacccacattttaagttctactttttataagaatatgacacatcccctaatgactccagcagatggttatttctttttaacttgagtccctgcataattactgaccttaattctcagttagcatctttatgtatataagtcaactccaaaattaagaggtgacagtttttctcatacatctagttatgcctcaaggaatgtattacacaaccttacaaatgattaaaaaatatttaattgacaattattatattgtcttttaactggtgagggcagaatcaattagtaacataactgatttactttctttttcttttcttttttttttttttttgagatggagcctcgctctga

SEQ ID NO: 326411 - DNA, 566 bp, Homo sapiens
tgtttactctgataaaaccaaatttcttatttcaatgttctttgtgagccaactcaagtttgcatttcaatatctatccttcccaattctcaatatgcactgttttttgttagacttgcccactatatagttttcaactatgactgtctcatgtctaccatgacctatttttcttaacttctatgcctttactaaaatacttttcctgaatctacccacattttaagttctactttttataagaatatgacacatcccctaatgactccagcagatggttatttctttttaacttgagtccctgcataatyactgaccttaattctcagttagcatctttatgtatataagtcaactccaaaattaagaggtgacagtttttctcatacatctagttatgcctcaaggaatgtattacacaaccttacaaatgattaaaaaatatttaattgacaattattatattgtcttttaactggtgagggcagaatcaattagtaacataactgatttactttctttttcttttcttttttttttttttttgagatggagcctcgctctga

SEQ ID NO: 326412 - DNA, 566 bp, Homo sapiens
tgtttactctgataaaaccaaatttcttatttcaatgttctttgtgagccaactcaagtttgcatttcaatatctatccttcccaattctcaatatgcactgttttttgttagacttgcccactatatagttttcaactatgactgtctcatgtctaccatgacctatttttcttaacttctatgcctttactaaaatacttttcctgaatctacccacattttaagttctactttttataagaatatgacacatcccctaatgactccagcagatggttatttctttttaacttgagtccctgcataattactgaccttaattctcagttagcatctttatgtatataagtcaactccaaaattaagaggtgacagtttttctcatacatctagttwtgcctcaaggaatgtattacacaaccttacaaatgattaaaaaatatttaattgacaattattatattgtcttttaactggtgagggcagaatcaattagtaacataactgatttactttctttttcttttcttttttttttttttttgagatggagcctcgctctga

SEQ ID NO: 326413 - DNA, 599 bp, Homo sapiens
gaatcaattagtaacataactgatttactttctttttcttttcttttttttttttttttgagatggagcctcgctctgatgcccaagctggagtgcagtggtgcaatctgggctcactgcaagctccacctccgggttcgtgctattcttctgcctcagcctcctgagtagctgggaatgcaggcactcaccaccayacccggctaatttttttggatttttttttttttggagacggggtttcaccgtgttagccaggatggtctcgatctcctgatctcatgatctgccctcctcagcctcccaaagtgctgggtttacaggcgtgagccaccacacccagccagaactgatttactttgtaaagaaagaataatttgaggatagttttgaacttcatcttgaagcaagtggtttgtgtattttgcatataagacaaaagtagaaaacaaaatctgtattataaacttggagtccaaagctagcaggctatttggtttgattttccttcctacgtagtgttttcaatagatatgaacctaggctggtattaaggcttgatctagatacaagtaatttactgatgtcttaacatgaac

SEQ ID NO: 326414 - DNA, 599 bp, Homo sapiens
gaatcaattagtaacataactgatttactttctttttcttttcttttttttttttttttgagatggagcctcgctctgatgcccaagctggagtgcagtggtgcaatctgggctcactgcaagctccacctccgggttcgtgctattcttctgcctcagcctcctgagtagctgggaatgcaggcactcaccaccatacccggctaatttttttggatttttttttttttggagacggggtttcaccgtgttagccaggatggtctcgatctcctgatctcatgatctgccctcctcagcctcccaaagtgctgggtttacaggcgtgagccaccrcacccagccagaactgatttactttgtaaagaaagaataatttgaggatagttttgaacttcatcttgaagcaagtggtttgtgtattttgcatataagacaaaagtagaaaacaaaatctgtattataaacttggagtccaaagctagcaggctatttggtttgattttccttcctacgtagtgttttcaatagatatgaacctaggctggtattaaggcttgatctagatacaagtaatttactgatgtcttaacatgaac

SEQ ID NO: 326415 - DNA, 599 bp, Homo sapiens
gaatcaattagtaacataactgatttactttctttttcttttcttttttttttttttttgagatggagcctcgctctgatgcccaagctggagtgcagtggtgcaatctgggctcactgcaagctccacctccgggttcgtgctattcttctgcctcagcctcctgagtagctgggaatgcaggcactcaccaccatacccggctaatttttttggatttttttttttttggagacggggtttcaccgtgttagccaggatggtctcgatctcctgatctcatgatctgccctcctcagcctcccaaagtgctgggtttacaggcgtgagccaccacacccagccagaactgatttactttgtaaagaaagaataatttgaggatagttttgaacttcatcttgaagcaagtgrtttgtgtattttgcatataagacaaaagtagaaaacaaaatctgtattataaacttggagtccaaagctagcaggctatttggtttgattttccttcctacgtagtgttttcaatagatatgaacctaggctggtattaaggcttgatctagatacaagtaatttactgatgtcttaacatgaac

SEQ ID NO: 326416 - DNA, 599 bp, Homo sapiens
gaatcaattagtaacataactgatttactttctttttcttttcttttttttttttttttgagatggagcctcgctctgatgcccaagctggagtgcagtggtgcaatctgggctcactgcaagctccacctccgggttcgtgctattcttctgcctcagcctcctgagtagctgggaatgcaggcactcaccaccatacccggctaatttttttggatttttttttttttggagacggggtttcaccgtgttagccaggatggtctcgatctcctgatctcatgatctgccctcctcagcctcccaaagtgctgggtttacaggcgtgagccaccacacccagccagaactgatttactttgtaaagaaagaataatttgaggatagttttgaacttcatcttgaagcaagtggtttgtgtattttgcatataagacaaaagtagaaaacaaaatctgtattataaacttggagtccaaagctagcaggctatttggtttgattttccttcctacgtagtgttttcaatrgatatgaacctaggctggtattaaggcttgatctagatacaagtaatttactgatgtcttaacatgaac

SEQ ID NO: 326417 - DNA, 598 bp, Homo sapiens
ttgaggagaccaactaaataatgttacaataatacaatcatactaatgattgtatcttaaaataaggtattcattgagcatattaatatatgctaaaatgtgctaatcatttacaagcccaaacaatattaactatatccactttgaatgaataaaatgaggcttagcgatactaagatagttgtctaatatatggctaataagtgacagaacaaggaacaaacccagaactatctatcttgaatgtttaaactctcttttaaamgacaagggcttggcttgagtttgaatcttaacttctgcacttactagtttaccttaacctaatctcttcaaccctcataccatatatctgtaacaccaatgtaaagaaacccaattcagaatattttggtgagcattaaagagataaggagtagaaagtagctaagacagagtttggccggtaagatagactcagcccatcttggtggtaaacaggatagaaagggaaaatcaggaaagtcctcgcagaagtagaattgacagaatttgaatatgtactcaatggaggagcaaaaagaaagctggaaatacaatgtcatcactattgttttca

SEQ ID NO: 326418 - DNA, 598 bp, Homo sapiens
ttgaggagaccaactaaataatgttacaataatacaatcatactaatgattgtatcttaaaataaggtattcattgagcatattaatatatgctaaaatgtgctaatcatttacaagcccaaacaatattaactatatccactttgaatgaataaaatgaggcttagcgatactaagatagttgtctaatatatggctaataagtgacagaacaaggaacaaacccagaactatctatcttgaatgtttaaactctcttttaaaagacaagggcttggcttgagtttgaatcttaacttctgcacttactagtttaccttaacctaatctcttcaaccctcataccatatatctgtaacaccaatgtaaagaaacccaattcagaatattttggtgagcattaaagagataaggagtrgaaagtagctaagacagagtttggccggtaagatagactcagcccatcttggtggtaaacaggatagaaagggaaaatcaggaaagtcctcgcagaagtagaattgacagaatttgaatatgtactcaatggaggagcaaaaagaaagctggaaatacaatgtcatcactattgttttca

SEQ ID NO: 326419 - DNA, 537 bp, Homo sapiens
acaaggcctctgacaatgtgaagattttctgctcagaatatttttactgtttttaatgcaaattaaattttaatttaaaaattggacattgcctaaatttattaatactcaaaacaagctacatagtaatggatctaatactaacgttaagtgctgactttggttactttacagtattagataattacggagctgagagcaatttcttgaaacaccagggargaagacaattaatgtccatgagttccatttcactagtcaagttgtagcaattgtctatgtgaggaaaagaaagtattaagaagtattttggtaaaaaaaaaaagtattaagaagtatttggtaagaagctagcaaagtctgagcaaggtaaaaaagcaatcttttataagagtccttaaatcttgtggttaatgctttaaaagccctgggggaagtccactgggatattttctggttggttttctatgctttgtcattctctgtggcgagataaattgtaattaattcgacaattaattggctcagattataatg

SEQ ID NO: 326420 - DNA, 584 bp, Homo sapiens
taaaaatttaattttgaaatgtgttaaaattactttgtttgcttacggtatattctttgttgttttgcttatggtatattctttctcttacaatctttatgagttatttgcagtttatattttcaaaaaatatttcaattgccttgcttaaaaattctagttttgagttgttcataacagatcgttatgatactttaaaactctctacccattgactatgtcacattttctttttgagtgttgttcatttttgttttctctcctgattgttctrtttgacagaaattggctcacttcattttcccttttcttaatcctcactattttgccttccttttctgtttcaatgtttgctttttcctttgtgcattcattccttctataatttttattttattctggtattcgttccatgtcttcctaaaatatatgattaactaatgaagtgtcacttttttcctctcatataagcatttaatatcatttatttaaagattacaatttcaactaagtgtgccatgcttttttaaagtagtttagctattagcctgcaattttgaacactgtctactttttttaaaatt

SEQ ID NO: 326421 - DNA, 584 bp, Homo sapiens
taaaaatttaattttgaaatgtgttaaaattactttgtttgcttacggtatattctttgttgttttgcttatggtatattctttctcttacaatctttatgagttatttgcagtttatattttcaaaaaatatttcaattgccttgcttaaaaattctagttttgagttgttcataacagatcgttatgatactttaaaactctctacccattgactatgtcacattttctttttgagtgttgttcatttttgttttctctcctgattgttctgtttgacagaaattggctcacttcattttcccttttcttaatcctcactattttgccttccttttctgtttcaatgtttgctttttcctttgtgcrttcattccttctataatttttattttattctggtattcgttccatgtcttcctaaaatatatgattaactaatgaagtgtcacttttttcctctcatataagcatttaatatcatttatttaaagattacaatttcaactaagtgtgccatgcttttttaaagtagtttagctattagcctgcaattttgaacactgtctactttttttaaaatt

SEQ ID NO: 326422 - DNA, 584 bp, Homo sapiens
taaaaatttaattttgaaatgtgttaaaattactttgtttgcttacggtatattctttgttgttttgcttatggtatattctttctcttacaatctttatgagttatttgcagtttatattttcaaaaaatatttcaattgccttgcttaaaaattctagttttgagttgttcataacagatcgttatgatactttaaaactctctacccattgactatgtcacattttctttttgagtgttgttcatttttgttttctctcctgattgttctgtttgacagaaattggctcacttcattttcccttttcttaatcctcactattttgccttccttttctgtttcaatgtttgctttttcctttgtgcattcattccttctataatttttattttattctggtattckttccatgtcttcctaaaatatatgattaactaatgaagtgtcacttttttcctctcatataagcatttaatatcatttatttaaagattacaatttcaactaagtgtgccatgcttttttaaagtagtttagctattagcctgcaattttgaacactgtctactttttttaaaatt

SEQ ID NO: 326423 - DNA, 521 bp, Homo sapiens
gttttttcttgtaaatttgtttaagtcctttatagattccaatatcttatttcaacgtacccaaatataaattattctaaactactaattgaaagaagaaaattagctcatttcctttctrtaatgtcatttgtgtaatttaaacaattattttaataatttaaatatttataaatgccatgttgggactacactgaacaaagtaactttgtgtatctctgtgtgtgtgtgtatttttgtgtgtgtaaatgttcatttgaaatactgctgctagaaaaaaaggtatcattattacataaactcccaaatttatacagtcttcccaaataatatttaacatatacctaaggtggaccatcacaattagttccctattactccttgcattcatgacataaattttaaagtataatttattttaaatattgaaactctatcctacttgaatatttaatgcaaattttagttcaggtttgtacagctattttaaattttaattttgattataagtctctcacaga

SEQ ID NO: 326424 - DNA, 521 bp, Homo sapiens
gttttttcttgtaaatttgtttaagtcctttatagattccaatatcttatttcaacgtacccaaatataaattattctaaactactaattgaaagaagaaaattagctcatttcctttctataatgtcatttgtgtaatttaaacaattattttaataatttaaatatttataaatgccatgttgggactacactgaacaaagtaactttgtgtatctctstgtgtgtgtgtatttttgtgtgtgtaaatgttcatttgaaatactgctgctagaaaaaaaggtatcattattacataaactcccaaatttatacagtcttcccaaataatatttaacatatacctaaggtggaccatcacaattagttccctattactccttgcattcatgacataaattttaaagtataatttattttaaatattgaaactctatcctacttgaatatttaatgcaaattttagttcaggtttgtacagctattttaaattttaattttgattataagtctctcacaga

SEQ ID NO: 326425 - DNA, 599 bp, Homo sapiens
gtttacttaatttcagttagagtttttatgatgcttaaagactactacattgacgtctcaaaatgaaaatgcatttttcattttcacagtgtaagagaagttatagaartctacagtaaatagagttaattcctttcttagaaacttttgccaaattgagacatcagaatgtttctgctgagagttgctcaccctaaaacccataaactttttttaggctgcacaaatgaagaaaatacctagcaacttttgtagaaagaaggaacacattgattggcatccatatagcacttaccctacagtataaattaattccccttgaatgatttgtatgcccaaatagccactatttattactgcacagtattagtctctgtaggatataaacaatgaaggcttgtttttatgtagcaatatggggacagtggaacgggaactatctgagaaaacagaagaaaaccaacatttaaaaataacagggttgcagaggtttagtgggaataatcctcaaggtaggagatgccaattagttcctatactgaagctttagagaaagctaacctagtaagactgagtaccagaaacactattataaaagt

SEQ ID NO: 326426 - DNA, 568 bp, Homo sapiens
gcatttctgctctttaggctttatctcacttttccaataactatattttgtcttatatatgttaaaatctatataaaataaaaaaattggtgayaatatttcttcttgatttaacataagcattgcactttttataatgattacttctttaaaacataaaatttcttattgtatcagtgtatataacttagaagttgtgtgcccactagagtaaatatccaaagatttattctagtttgaaaaatactgctctaagtaaatacaccaagtcataaagaaaataattcagttcagctagtttctgtctaatagttcttccttatttagttaaactgatatgcaagaactccctccagtgattgcttgcctcatgatagatacaggagttctgtttctttgtctagttttccaataattctactattgaaaataagcctgccatatattatcttcttataatatgttgtatcatttttaggtatattatgttttaaatattgtaaatatttattattaaatattacaaaattttaaaactttaataatctgcgttatttcttccttcgaa

SEQ ID NO: 326427 - DNA, 501 bp, Homo sapiens
  misc_feature (1)...(501): n = A,T,C or G
nnnnnnnnnnnnnaaaaagtgaacactcaaaatatttagcaaacaatgaatagaaagagtgatgaattattcttctttgtaggcagtatagtgacaatcacataataggtatcccataaatatttatagaattaataagaaattaaaatgtttaagaaattcaattttaataattaaattcaatgtaagcaatttaaaattaaagaatccagttcttgttaaaattagaggaaaaattctcctatcatgaatgttgaaaaatagtcaatcctgtaaatacagctaaactcctgtgtgttcacctgaaaattaagctgtaacaaacttaattttgtggtagaaaaagctaaactattttccactttttctcctattaraaatttaggaaaaaccctgggaacttttgcccagttagtcctgaaaaggatgaaatattaagtactaaagaaacaccatacatgtcttatacaactcactggactaatacacctgttatagtag

SEQ ID NO: 326428 - DNA, 549 bp, Homo sapiens
tttaaattactgacaatccttttgggtccatgtgtaaatagtcctcactgcatacattgaaagggtctgaagacatcttaaaatttgtyatagctttgtgatttatcatcattagtttattcaatgagatgtttgatttcttagcagaattctaagatgtagatattctcatgaggcaaaaaataaaaaaaaatgaaaggttaaattcctgaaaaatcaggtaagatgataaatgaagatactttactttcttacattgtaatttatgtcatttaactttaccctcatttcatcattctttggaaccagcataatagtcaaatcagttcctcttaatgtcagatgatctagttgccatcacattttggaagtgaattgagttgagaaaatatacctcttaaacaattatgcaagttaacatttcaaaacacaggtttgtataacatttcaaaacacatagctaatgctatggcattagattacaacatagaataacagttgttcgtgacttttgataaaagaatcagaagtatatacttaaattacaga

SEQ ID NO: 326429 - DNA, 549 bp, Homo sapiens
tttaaattactgacaatccttttgggtccatgtgtaaatagtcctcactgcatacattgaaagggtctgaagacatcttaaaatttgttatagctttgtgatttatcatcattagtttattcaatgagatgtttgatttcttagcagaattctaagatgtagatattctcatgaggcaaaaaataaaaaaaaatgaaaggttaaattcctgaaaaatcaggtaagatgataaatgaagatactttactttcttacattgtaattkatgtcatttaactttaccctcatttcatcattctttggaaccagcataatagtcaaatcagttcctcttaatgtcagatgatctagttgccatcacattttggaagtgaattgagttgagaaaatatacctcttaaacaattatgcaagttaacatttcaaaacacaggtttgtataacatttcaaaacacatagctaatgctatggcattagattacaacatagaataacagttgttcgtgacttttgataaaagaatcagaagtatatacttaaattacaga

SEQ ID NO: 326430 - DNA, 613 bp, Homo sapiens
tcttaaaatttgttatagctttgtgatttatcatcattagtttattcaatgagatgtttgatttcttagcagaattctaagatgtagatattctcatgaggcaaaaaataaaaaaaaatgaaaggttaaattcctgaaaaatcaggtaagatgataaatgaagatactttactttcttacattgtaatttatgtcatttaactttaccctcatttcatcattctttggaaccagcataatagtcaaatcagttcctcttaatgtcagatgatctagttgccatcacattttggaagtgaattgagttgagaaaatatacctcttaaacaattatgcaagttaacatttcaaaacacaggyttgtataacatttcaaaacacatagctaatgctatggcattagattacaacatagaataacagttgttcgtgacttttgataaaagaatcagaagtatatacttaaattacagatttggaagatattcttgaaagataataacattgacacataagattggcaaaaagaagattttttgataagtataggtccttcactgatcacctccccaagggccttccagacatatcaattacaagtttactaaatacc

SEQ ID NO: 326431 - DNA, 613 bp, Homo sapiens
tcttaaaatttgttatagctttgtgatttatcatcattagtttattcaatgagatgtttgatttcttagcagaattctaagatgtagatattctcatgaggcaaaaaataaaaaaaaatgaaaggttaaattcctgaaaaatcaggtaagatgataaatgaagatactttactttcttacattgtaatttatgtcatttaactttaccctcatttcatcattctttggaaccagcataatagtcaaatcagttcctcttaatgtcagatgatctagttgccatcacattttggaagtgaattgagttgagaaaatatacctcttaaacaattatgcaagttaacatttcaaaacacaggtttgtataacatttcaaaacacatagctaatgctatggcattagattacaacatagaataacagttgttcgtgacttttgataaaagaatcagaagtatatacttaaattacagatttggaagatattcttgaaagataataacattgacacataagattggcaaaaagaagattttttgataagtataggtccttcaytgatcacctccccaagggccttccagacatatcaattacaagtttactaaatacc

SEQ ID NO: 326432 - DNA, 490 bp, Homo sapiens
ataacattgacacataagattggcaaaaagaagattttttgataagtataggtccttcactgatcacctccccaagggccttccagacatatcaattacaagtttactaaatacctcatcaggattctgaggtattatatacctcctaacagcctttaygacaataattcctttcctcctgacttccatattttaggatacattttctggaaaacctctgtgattacctgttgcctaggaagtaagttcaaaattctcagcaagaaaataaaaggaaggaatgctactctgaatgttttaccattccatgaataagctaagacctttgataatgctattatttatttacagttattgtgcttcaaatcttctttatttggaaaagccaggtgtccagtaagagttttcttaatgaatgaatatccaaataagaattataataaacttttaaatttatgatgataatattaatcacttgcttttatggagc

SEQ ID NO: 326433 - DNA, 596 bp, Homo sapiens
cctacaaggactcagaagcaagactgcttatgattaaatccacagtgcttcataacagctgttctattacctgctaattcctatggaagccaaacctataggcattcacaaaaacgcacaactaattaaatatctcagtgaagcaaataagtaaaaaatagatatatgaatccacccattcattaacaaatatgcatcatgtacctaattcactccagaagctgtgcccagtatttgtgatataacagcaaacaaaatagaccttgacctcatcttcatgaagtttactttctcaatcttgtgtgattatgatatgagataaacaagatgcattttcaactcgacccaaagtttaggccacacaatagggggaaatcacaagtcacgcctaatcatgaggcttggtggatgaggtaactcctctgaaaagggcaagccaaattcaagcccaaggtctacagggaatttatttaccagcaagagtcctttgccaaaaaggaaaaatataacataccatgaagcagtttcccagggaaatggargcaagaccaccaaatactctattgataaagtttaggggcatattaaaaaaggaa

SEQ ID NO: 326434 - DNA, 578 bp, Homo sapiens
gggtaacataactctttttgtttttttctcattctgtctccttgatataaacatgctaggagaagtagaaagaaaataatatgaaacaataaattttctcctcttaaataatctggaaaaacattgtggaagttttgggtttataagaggactagttagtgggaatactagttttgcaatagggctttggtggaagtgaaaaatactccacataagcaaaagctccgaagttagaaaatgaatcatattggcaaataggtcacatcattatcctggataagcggaaaataggaggaagtgaaaaatatctaaatgactttgtccatggtagagacatttaagcaacraaatacaacattgctaggtcaggtagctgcctcataggtaccagaagtacctatttaatacaataccctgcagcaccattgatatttatgaactcatttgagtaaaagtaagtagatatttcttctaaacatgactttttaatttttgttttgctctatgaggccacctatgaacacatgaaaaagaaattatctagaatcattttctaattttgcctgcatgaaaagaag

SEQ ID NO: 326435 - DNA, 573 bp, Homo sapiens
atttgagtaaaagtaagtagatatttcttctaaacatgactttttaatttttgttttgctctatgaggccacctatgaacacatgaaaaagaaattatctagaatcattttctaattttgcctgcatgaaaagaagtacattggcaagtagtttgagttctcaatttaaactagtgaggaacacataccgaatgaaattttaatttttagtatcggtcttctttaaataacctaaggaatttgttgtaataaaaatgagatgtgcttatttgatttttggctgaccattctctgacaggtacaaggagggggacttggcttgatgcagaagctagaacctaggaaacagagaggagagctaagatcagtccttaaaaggcctcttggatgtttctattacttaaaggtgttcttatcttgaaaaagtcttttcatacacaaaattgggaattagttatgagtcataacaatataacatgacagaaaactgctgtattagttctttcttacgttgctataaagaaatactcaggtctgrgtaatttataaagaaaagggatttaattgactcac

SEQ ID NO: 326436 - DNA, 618 bp, Homo sapiens
ttactgagttgtcatttaatacatcaaaaaaaagttttttgcatagtaagttacagagagattttaaaaaacatttgtaacaattaaatgcaccatataggaaataaaaacaaataaaaacagaagcattctgataaaaatgaataattgggaagatcattttggagaattcaaataaaattcccacagaagtatcaggattgtttaacatcatttagtctgtaaccatatttgatggtctgaatggagtacattaggcagtacaaaatgactgtacatgtatgtctaagtcagatgcttattcaaattaacattacctttcaatgccaggatgtcagcattgtaatgataatagttatctctacaaaagagatgtcaaaatacttttgctgtttgttacttctaagtgaaaatagaaaatagaggtagcaattgaaaatgaatcaatagtatacatgattatgaatctagctaatctcttaattcaaataagaatattatcagcctgtcattgcaaatgtgtcacttacattcacattaatgtaagaatcacattaatgattctacattcayatttcccttaacagtagtaagacagttctggcttcatcccattat

SEQ ID NO: 326437 - DNA, 495 bp, Homo sapiens
tacttatcaccctgctaaaatattcaatattttacaatattcccatagagggcaatattgtataaaagatggtgaatgaagactctgccaattcatctctgttgatatgctttaaagaaaactgctgttaccataaatttggagctccacttcccctcaaactctaatatataaactgatgcacacaaaaacataacacagagtctcatcaaaggcaaagaaaattaatttggtatcacttactggtagattacttgagtgaatagcctccagtttcacctttaatttgatttaatcactgcatctcagatctcagatagcagattgaattctcctatataacttacatctataatacacacatgtacatatatatacacaataccatttagtttatttgaaatattaataaggtagtgccttcttcagtgcctggaaagtaaaggtaaaytacaggtaacatataaagtgcggcaaattttgtaaaatcgaagt

SEQ ID NO: 326438 - DNA, 633 bp, Homo sapiens
cagaattggctggctgccatgagctcggtgcttgggctaattttgcatacaagttccctgaattttcttcactaaatgcaaacataggccaccattaacatctgctctctgtgattcttttgcagcaaagctgcagatccctgaggccaaggctgatgaaagatgtgggtagccgattctgtcctgtgacctggaggctctgaatttgtgattgaagagatcctgcacagtcctctcccctgtcatatcaggcatctgcaaggcattctaaggacctctaggagcacacagttcaatccagcaacctctactaagggtcacaaatgcctatgtccaagtctatgctggccctgtcaaagtcccgtctctgctctgcccccagggtcttacgggctacaaatgggacaactttttaaatactcacacatgttgtgatcatttgtaagtccaagtcacaaaaacagcagaagtagaaagttttaccttagagtgaaaatcaagggtggtgttgctaccagatggtgccactcagttgcaggttcytggtgtcccgaacaaagagttggacaagacacatacatagcaaagcaaagcgatgaaagtgtatgaagctcagtattacactctcggagc

SEQ ID NO: 326439 - DNA, 646 bp, Homo sapiens
gggccaagcataactaggaggctgattcttgactctctgctgactcttgacataaattgcagtaaaatatagaaaataattatgtagtgatgggatttcattgttttttaatgtaatgtatttaattaaattaattgtaagcctgaataatttaattttagagaatggctctgtttaacaatcggctcatggagtttctgaaaacttagcagccagctctcacaggctcaytcaaacccacttcctggttacaattccagtccctgcccagctgtgagaactggggcaaatgatctcagttttttcacctgggaaccggaagtggttcctaccgagctgtgctctgaataatcggaaataatgtatacaaagagctcagcagctagaattcagtaactggtgcccacagcaataaaagaggagctgcattaatgattcgtatttctctttggttatggccttcaggccagttcataaaagatagaagctggaaagaagggaggtgagatccaaggagatacaactcgcctcttttaagtgcctcgcctgtaccaatcactaggaagtgattccaatcctttattcactgaatcttcatcgcaaacctttgagtgtattgtctttcctattttacagctatgaacca

SEQ ID NO: 326440 - DNA, 646 bp, Homo sapiens
gggccaagcataactaggaggctgattcttgactctctgctgactcttgacataaattgcagtaaaatatagaaaataattatgtagtgatgggatttcattgttttttaatgtaatgtatttaattaaattaattgtaagcctgaataatttaattttagagaatggctctgtttaacaatcggctcatggagtttctgaaaacttagcagccagctctcacaggctcactcaaacccacttcctggttacaattccagtccctgcccagctgtgagaactggggcaamtgatctcagttttttcacctgggaaccggaagtggttcctaccgagctgtgctctgaataatcggaaataatgtatacaaagagctcagcagctagaattcagtaactggtgcccacagcaataaaagaggagctgcattaatgattcgtatttctctttggttatggccttcaggccagttcataaaagatagaagctggaaagaagggaggtgagatccaaggagatacaactcgcctcttttaagtgcctcgcctgtaccaatcactaggaagtgattccaatcctttattcactgaatcttcatcgcaaacctttgagtgtattgtctttcctattttacagctatgaacca

SEQ ID NO: 326441 - DNA, 430 bp, Homo sapiens
tgttctgaccaaaaactaagccataaagctcatgctgttgatgagaacgtaaattgatcagggagatctgagtaacagggaagtgccgggtgacatatgcggccctggattccccttgtcctgcaaaccaattgaatctgagsttttccgaagacaccatctaaagatcatattcacctcactgctcctgcaagttacctggtgcagtgcttgctcccatcctgggcatttaacacatgttgacaggcaactttcctgccatgtggccaattttcagcctttcctacctaaactcccctgctggttttgactggctctgctagatccttcttcactcgcacagatgtgtttgggaaactatttgactcacttgtcagactctccctgccagatttcagttgcctaaggtttgggggaccgttccagacct

SEQ ID NO: 326442 - DNA, 579 bp, Homo sapiens
caagttaagaattttaggaactattaggaaggaatgattgtattttgtaatgtgagaagaacatgagatttggggggccaggggagaatgcttggatgtttgggacatgggggaggatctttcatgaatagattaataccctccctggggaggagagagtgagtgagttcttgctccattagttcctgatatggtttggctgtgtacccacccaaatctcatcttgaattgtagctcccgtaattcccacatgttgtagaagggactcagtgggaaataattgaatcatgggagggtttcccctatactgttctcgtggtagtgaataaatctcatgagatctgatggttttataaggggttttcccttttgcttgactctcattctctcttgtctgctgccatgtaagtagtgcctttggcctcccaccatgaytgtgaagcctccccagtcatgtggaactgtgagtccattaaacatctttttcttaataaattacccagacttgggtatgtctttattagaagcatgagaacagactaatgcaatttccaggagaactggttgttaaaagaacct

SEQ ID NO: 326443 - DNA, 562 bp, Homo sapiens
tttcttttaaagggcatatgatataatgaattctataaagaactcgagcaaaattgcatcacccaggatttgagaatatatatttgactgatacaaataacaccatttgaagacaggaggattgtgtagaaaaatgtaaaaatgcacagccagcctttgttaagagctgtgagtgtcaatgtatttgggactttaggtttggaaatttgacttccaacaccaaccagactgaagatagcaccactctttctagactgaatcttggagaaatgagtttcccrgaacctctgatgcccaccatcagaaaaggggaatcccaacagccattgcaatttgacattattataaatgagaccttagttcctgtgaaaatgccattaaagctttgctttcagtttgtcttgttttagtctgttctgttttgacttaccatttttgtggttggttttatttgttttttcaccagttgtggtcatttctccaagaggtttcaatgaagtttcttatgattatttcaacataccatgtctgcttctattctgagtttatttacacaaagtgg

SEQ ID NO: 326444 - DNA, 628 bp, Homo sapiens
gagggataaatcctccctcttctatgtaactggagggcgattttgaagcacacttmctctatttgactcattgaagtatgcccagtgggatccagcctcagttgcccgtagtcacaatcaactttgtagcactcttggactggcttcctcttttcccattttcctgcttctccactttgagttcacttccccccagtccgccgccccccaaccaccaccaaaaaactatttgcactcagtgcttgcctcaagctttgcttttttgctgaaacctaggctaagaaaatattttatcactgaagcacccgacctatttagtttctctttaaagtgttgcacattgaatattttaagtaatgtattaaaacttatcttgattggaaatgtatttaaaatacttactaccctttacataagttaagttttttcaggatatgataaaacagctttggcagtcactagtttaacaagaatggcatgcaattttggtctgtaaatagtttttttttttttctttttggtttcttgttttgttttgttttttatagagatgaggtgttgctatgttgcccaggctgagttgttgttgttgttgttttgttttgttttgagacagtgtctcacggtc

SEQ ID NO: 326445 - DNA, 628 bp, Homo sapiens
gagggataaatcctccctcttctatgtaactggagggcgattttgaagcacacttactctatttgactcattgaagtatgcccagtgggatccagcctcagttgcccgtagtcacaatcaactttgtagcactcttggactggcttcctcttttcccattttcctgcttctccactttgagttcacttccccccagtccgccgccccccaaccaccaccaaaaaactatttgcactcagtgcttgcctcaagctttgcttttttgctgaaacctaggctaagaaaatattttatcactgaagcacccgacctatttagtttctctttaaagtgttgcacattgaatattttaagtaatgtattaaaacttatcttgattggaaatgtatttaaaatacttactaccctttacataagttmagttttttcaggatatgataaaacagctttggcagtcactagtttaacaagaatggcatgcaattttggtctgtaaatagtttttttttttttctttttggtttcttgttttgttttgttttttatagagatgaggtgttgctatgttgcccaggctgagttgttgttgttgttgttttgttttgttttgagacagtgtctcacggtc

SEQ ID NO: 326446 - DNA, 506 bp, Homo sapiens
cgatgaggcaactcaggaattagtaacatcaggatgtcgccaccawcctaaggctggagtagagaagggatgatgtggtgctcccatatccctggcgctgagttcatcctaaagaactgtggtcttgcttggctatggactttggtggggctggtgctcccagctgccaatctggaggcgttcccacagctgggcagaattttgcgccgcgcgtgtctgttgctgctgctgctccccaggatgtcgccccctacaaatacacctcctgtgtccgcagccctcatcctgccatacagcctcagccggcgccccagcctgcggtccgtgtgcaggggcggagccactcactgcctccatgttggctgcagcaccccgcacggaacagaagcagatgctgggagaacgcgtgttcccactcatccaaacaatgcattcaaacctggctgggaagatcacgggaatgctgctggagatcgacaactctgagctgctgcacgtgttagagt

SEQ ID NO: 326447 - DNA, 587 bp, Homo sapiens
ttgctttgcttgggtatgccattgtctaaaacagtttctttgttttattaataatgagtggatatcattattaatattaattattaattacttataataatttataatatggatattttccarcatgtaaaataactccttgatataacaatatattgagtagaaacttcctgaagagaagttccctcaaagtatatctaatcctaatacaataattataagaaaaacactaattctaagaataaaatggtatgagggtaaatagaatttttaaaaactaggttaaaaaaatcaaagttttttattgccattaatatgctaatataggttataaatcaccaagaggaagatccaatatacaatattttcaaaattacataaccattcatttagttgacaaatatttattgatcaaccattctatgcctgaaattctttgaggtgctaaagatgcaacaataaacaaagtagacaaaatctttgacctcagggagagcagattctagtggaaaaagtcaaaaaattaaacaagtaaatatatagtatttactttttcccacaatgcttattttcaaattaatattcag

SEQ ID NO: 326448 - DNA, 550 bp, Homo sapiens
attgagtagaaacttcctgaagagaagttccctcaaagtatatctaatcctaatacaataattataagaaaaacactaattctaagaataaaatggtatgagggtaaatagaatttttaaaaactaggttaaaaaaatcaaagttttttattgccattaatatgctaatataggttataaatcaccaagaggaagatccaatatacaatattttcaaaattacataaccattcatttagytgacaaatatttattgatcaaccattctatgcctgaaattctttgaggtgctaaagatgcaacaataaacaaagtagacaaaatctttgacctcagggagagcagattctagtggaaaaagtcaaaaaattaaacaagtaaatatatagtatttactttttcccacaatgcttattttcaaattaatattcagtgattatactttgagttacactatataatgcatgtaattttattgttagtctccttccagtcagatcacattccaatctcttcccctacccagcattatctttttcatctttttaat

SEQ ID NO: 326449 - DNA, 587 bp, Homo sapiens
aatgcttattttcaaattaatattcagtgattatactttgagttacactatataatgcatgtaattttattgttagtctccttccagtcagatcacattccaatctcttcccctacccagcattatctttttcatctttttaatgtagaaacgatgatagtggttaaatgtgtaggctttgggataaggccacccttcttcaggtcctagctctgtccttccctgtgtgtgtaacccgtgagcctcattcattcattcattctgcatacattcatcacgctggcccagagctagaaacccagggcccatctgtgaacagatgaagagcctgaccttaggaaacttatgtttaggactcaayatcttcagtagaaaatgaggatattcctcacattggcctcatcaggtcatcatgatgattaaatgacttaacccctggcatgcacttggagcactgcctggtgcatcctaagagctgactaaaggttagcatttattcatcccgttatgtccacatttaaaatccttcaatgggtcacttctgcctgtagggtaaattccaaattgtttagtacaatagacacaag

SEQ ID NO: 326450 - DNA, 587 bp, Homo sapiens
aatgcttattttcaaattaatattcagtgattatactttgagttacactatataatgcatgtaattttattgttagtctccttccagtcagatcacattccaatctcttcccctacccagcattatctttttcatctttttaatgtagaaacgatgatagtggttaaatgtgtaggctttgggataaggccacccttcttcaggtcctagctctgtccttccctgtgtgtgtaacccgtgagcctcattcattcattcattctgcatacattcatcacgctggcccagagctagaaacccagggcccatctgtgaacagatgaagagcctgaccttaggaaacttatgtttaggactcaacatcttcagtagaaaatgaggatattcctcmcattggcctcatcaggtcatcatgatgattaaatgacttaacccctggcatgcacttggagcactgcctggtgcatcctaagagctgactaaaggttagcatttattcatcccgttatgtccacatttaaaatccttcaatgggtcacttctgcctgtagggtaaattccaaattgtttagtacaatagacacaag

SEQ ID NO: 326451 - DNA, 587 bp, Homo sapiens
aatgcttattttcaaattaatattcagtgattatactttgagttacactatataatgcatgtaattttattgttagtctccttccagtcagatcacattccaatctcttcccctacccagcattatctttttcatctttttaatgtagaaacgatgatagtggttaaatgtgtaggctttgggataaggccacccttcttcaggtcctagctctgtccttccctgtgtgtgtaacccgtgagcctcattcattcattcattctgcatacattcatcacgctggcccagagctagaaacccagggcccatctgtgaacagatgaagagcctgaccttaggaaacttatgtttaggactcaacatcttcagtagaaaatgaggatattcctcacattggcctcatcaggtcatcatgatgattaaatgacttaacccctggcatgcacttggagcactgcctggtgcatcctaagagctgactaaaggttagcatttattcatcccgttatgtccacattyaaaatccttcaatgggtcacttctgcctgtagggtaaattccaaattgtttagtacaatagacacaag

SEQ ID NO: 326452 - DNA, 587 bp, Homo sapiens
aatgcttattttcaaattaatattcagtgattatactttgagttacactatataatgcatgtaattttattgttagtctccttccagtcagatcacattccaatctcttcccctacccagcattatctttttcatctttttaatgtagaaacgatgatagtggttaaatgtgtaggctttgggataaggccacccttcttcaggtcctagctctgtccttccctgtgtgtgtaacccgtgagcctcattcattcattcattctgcatacattcatcacgctggcccagagctagaaacccagggcccatctgtgaacagatgaagagcctgaccttaggaaacttatgtttaggactcaacatcttcagtagaaaatgaggatattcctcacattggcctcatcaggtcatcatgatgattaaatgacttaacccctggcatgcacttggagcactgcctggtgcatcctaagagctgactaaaggttagcatttattcatcccgttatgtccacatttaaaatccttcaatgggtcacttctgcctgtrgggtaaattccaaattgtttagtacaatagacacaag

SEQ ID NO: 326453 - DNA, 493 bp, Homo sapiens
tgctgcagatgtagaggaacttccaataaatagtgatagcattgagctcacctatttacttcccatccctcccaaattccctcataaataatggtaaagattctttaaaatatatgataaacttttgtgctaaaaacacacatggatattattagtggctctgaaattgtaagctatttcttaatagtagaaattagaagaggttgaatgggagcacaaccaacatagaaaaatctagaactccaagtacccacaggcaaagyctgctgcagagagaagtcctgacagaggtctgaggaacaccccactggggttaacaaatgcacacagtaaatgagggctggaggcaatcatccaagttcaaggttaaagcactgtttccagatcagctaggtaagccagctcctctctgtcactgacatatacagagcagctggctggagcacttgttcactagatagaattctatgaactcttttctaaataactagaa

SEQ ID NO: 326454 - DNA, 608 bp, Homo sapiens
tgggatgcaaaattggtttagtgtaaacaaattgagaaataagatttatcacataaacagaactaaaaatgaaaaccacgtggtcatttcaatagacgcaggaaaggcttctgataaaattcaacatcccttcatgttaaaaaccctcagcaaactaggcactgaagggacataccacaaaataataagagccttctatgacaaacctatggtcaacatcacactaaatgggcaaaagctggaagcattccccttgaaaaccaaaacaagatgaggatgcccattctcaccactcttatccaacatatcaccacttctatccagaagatttctgcttctggaagtcctagccagagcratcaggtaagagaaatgaaaggcatccaaatagaaagagacggtgtcaaactaactctttttacagattatatgattctatccctagaaaatccccatagtctcccaaaagctcttagatttgataaacaacgttaataaagtttcaggatacaaaatcagcgtacaaagatgagtagcatttctgtatgccaataacattcaagctgggagccaaatcaagaatgtaatcccattcacagtagccacaa

SEQ ID NO: 326455 - DNA, 608 bp, Homo sapiens
tgggatgcaaaattggtttagtgtaaacaaattgagaaataagatttatcacataaacagaactaaaaatgaaaaccacgtggtcatttcaatagacgcaggaaaggcttctgataaaattcaacatcccttcatgttaaaaaccctcagcaaactaggcactgaagggacataccacaaaataataagagccttctatgacaaacctatggtcaacatcacactaaatgggcaaaagctggaagcattccccttgaaaaccaaaacaagatgaggatgcccattctcaccactcttatccaacatatcaccacttctatccagaagatttctgcttctggaagtcctagccagagcgatcaggtaagagaaatgaaaggcatccaaatagaaagagacggtgtcaaactaactctttttacmgattatatgattctatccctagaaaatccccatagtctcccaaaagctcttagatttgataaacaacgttaataaagtttcaggatacaaaatcagcgtacaaagatgagtagcatttctgtatgccaataacattcaagctgggagccaaatcaagaatgtaatcccattcacagtagccacaa

SEQ ID NO: 326456 - DNA, 539 bp, Homo sapiens
tgacccagcaattccattactgggtatatacccaaaggaaaataaattgttctaccaaaaagacacattcacttgcatattcattgtagcacaattcacaatagcaaagacatgaaatcaaccttgctgcccatcagtggtggactgagtaaagaaaatgtggtacatatacaacatggactactgtacagccataaaaaatgaaatcatgccccttgtggccacrtggatgcagttggaggtcattatcctaagcaaattaatgcagcaacagaaaaccaaatataacatgttctcacttataagtgggagctaaacactgagaacacatggacacaaataagcaaacaacagaaactggggtctacttgagggtgcagggctgtgggagtgtgagggtatgcttactacctgggtgacaaaattatttgtacatcaaactctggcaacatgcaatttacccatatactgcatatgtatccccgaacctaaaataagagttgaaaatgaaaaaaaaaaaaaagagaaaggtttaagaa

SEQ ID NO: 326457 - DNA, 638 bp, Homo sapiens
tgcctctccctcaaagtgtctgtttttgccttctggccggagactacgcatcccagcctgtcagaatggccaccctgcaggccgcaacccttgatgagtcatccagctctttttgctaagtttataaaccgagtcattcttcacttggcaacagtgataagattcaattcttttaagaacccatctgttttgtagggagtgtgttaggaagaagccaactggaagcagcgtctagttgtgggattccatttgggagccgatgagtcctgagcactctgctggcactggagagtcaaaggagtagaccaatgtgccctgtatgtgggaagtagagtccataaaatatgcctgatgaattaggaataaaatggagagaaaakaaggaatcaagggtaactactgagtttatggtttgggtaccgaagaaaatggtggaataatttaccaagacagggaagccaggatgtttaaaaatatgtatatctgataaaggggaaataaataattcttttagagctgcttaagtgtgagacattcaagatccatttaaatgttgatggtgtgtgcaagggagtgagataagtatctaaaattcggagagaattccaagttgcagacatacattaagttttttaaaa

SEQ ID NO: 326458 - DNA, 638 bp, Homo sapiens
tgcctctccctcaaagtgtctgtttttgccttctggccggagactacgcatcccagcctgtcagaatggccaccctgcaggccgcaacccttgatgagtcatccagctctttttgctaagtttataaaccgagtcattcttcacttggcaacagtgataagattcaattcttttaagaacccatctgttttgtagggagtgtgttaggaagaagccaactggaagcagcgtctagttgtgggattccatttgggagccgatgagtcctgagcactctgctggcactggagagtcaaaggagtagaccaatgtgccctgtatgtgggaagtagagtccataaaatatgcctgatgaattaggaataaaatggagagaaaataaggaatcmagggtaactactgagtttatggtttgggtaccgaagaaaatggtggaataatttaccaagacagggaagccaggatgtttaaaaatatgtatatctgataaaggggaaataaataattcttttagagctgcttaagtgtgagacattcaagatccatttaaatgttgatggtgtgtgcaagggagtgagataagtatctaaaattcggagagaattccaagttgcagacatacattaagttttttaaaa

SEQ ID NO: 326459 - DNA, 638 bp, Homo sapiens
tgcctctccctcaaagtgtctgtttttgccttctggccggagactacgcatcccagcctgtcagaatggccaccctgcaggccgcaacccttgatgagtcatccagctctttttgctaagtttataaaccgagtcattcttcacttggcaacagtgataagattcaattcttttaagaacccatctgttttgtagggagtgtgttaggaagaagccaactggaagcagcgtctagttgtgggattccatttgggagccgatgagtcctgagcactctgctggcactggagagtcaaaggagtagaccaatgtgccctgtatgtgggaagtagagtccataaaatatgcctgatgaattaggaataaaatggagagaaaataaggaatcaagggtaactactgagtytatggtttgggtaccgaagaaaatggtggaataatttaccaagacagggaagccaggatgtttaaaaatatgtatatctgataaaggggaaataaataattcttttagagctgcttaagtgtgagacattcaagatccatttaaatgttgatggtgtgtgcaagggagtgagataagtatctaaaattcggagagaattccaagttgcagacatacattaagttttttaaaa

SEQ ID NO: 326460 - DNA, 638 bp, Homo sapiens
tgcctctccctcaaagtgtctgtttttgccttctggccggagactacgcatcccagcctgtcagaatggccaccctgcaggccgcaacccttgatgagtcatccagctctttttgctaagtttataaaccgagtcattcttcacttggcaacagtgataagattcaattcttttaagaacccatctgttttgtagggagtgtgttaggaagaagccaactggaagcagcgtctagttgtgggattccatttgggagccgatgagtcctgagcactctgctggcactggagagtcaaaggagtagaccaatgtgccctgtatgtgggaagtagagtccataaaatatgcctgatgaattaggaataaaatggagagaaaataaggaatcaagggtaactactgagtttatggtttgggtaccgaagaaaatggtggaatmatttaccaagacagggaagccaggatgtttaaaaatatgtatatctgataaaggggaaataaataattcttttagagctgcttaagtgtgagacattcaagatccatttaaatgttgatggtgtgtgcaagggagtgagataagtatctaaaattcggagagaattccaagttgcagacatacattaagttttttaaaa

SEQ ID NO: 326461 - DNA, 659 bp, Homo sapiens
atcccacaggattggtctgtgctcttggacctgtttcactttaggtargggttatgttttcaagctctgagatcaggatggattgagttccagtctacaatttcaccactttctaaaggaccttaggaaatgacttttcctactccagtcattgatagtagttatcaccctcgggattttttccccttttgctgtatttctatgcactaacatcactaataaaatattttttaaaatatagaattttacactaggttctgaggcatgggctgtggcctggaaatctgtattttaggaaaggctccttcagtgtgtctggtatgtggcctggagtcactggcagtgatgtaatgaatgcaaaacaatgaacacgatgcttaaatacattacccagtaccactattggtatcattccattgttatttggccacttcttataagcacagcccaggggcttccagccaatcaagaatctccaatgagaacaactttaaactaaagcccccatggtaaacctaagatataaattggacaaaaactatttttttccaaagaaaagtttgtttgtttttttttttcttttgggctgaaagtagaatctaatctaattgggcatcaggcatagaaccaacatgaaattcataacctccaagtcttca

SEQ ID NO: 326462 - DNA, 659 bp, Homo sapiens
atcccacaggattggtctgtgctcttggacctgtttcactttaggtaggggttatgttttcaagctctgagatcaggatggattgagttccagtctacaatttcaccactttctaaaggaccttaggaaatgacttttcctactccagtcattgatagtagttatcaccctcgggattttttccccttttgctgtatttctatgcactaacatcactaataaaatattttttaaaatatagaattttacactaggttctgaggcatgggctgtggcctggaaatctgtattttaggaaaggctccttcagtgtgtctggtatgtggcctggagtcactggcagtgatgtaaygaatgcaaaacaatgaacacgatgcttaaatacattacccagtaccactattggtatcattccattgttatttggccacttcttataagcacagcccaggggcttccagccaatcaagaatctccaatgagaacaactttaaactaaagcccccatggtaaacctaagatataaattggacaaaaactatttttttccaaagaaaagtttgtttgtttttttttttcttttgggctgaaagtagaatctaatctaattgggcatcaggcatagaaccaacatgaaattcataacctccaagtcttca

SEQ ID NO: 326463 - DNA, 583 bp, Homo sapiens
attaaatttctccctcaaggaaagactgctgggttgctcctgggagagaaaatcagtggcatgtggccagcaacttccagatcgttctgctctsatgaggcctgagatccctgctgcccaggcaggtgagggcatagtaatgtggtcgcagtgttccatgtcccttaccttcccatctgatttagtctgggtctttgttgtcacccaaatctcatgtcaaattgtaatccccaatgttggaggtggggcctggtgggaggtaattggatcatggaggtggatttttcatgaatggtttagcaccatcgcctggtactgttcttacaatagtgagtgggttctcatgagatctggttgtttaaagtatgtggcatctccccccacgttctcttgctcctgctcccgccatgtaaggcatctgctccccctttgccttctgctataattgcaagcttcctgagacctctccagaagcaaatgccagcactattgcttcctgtacaacctgcagaactacgagccagtcaaacctcttttcttcataaattactcagtctcagatatttctttatagcaatgtaat

SEQ ID NO: 326464 - DNA, 597 bp, Homo sapiens
gcctctatctaattaaagcatagctgccctacctttcttcccaaatatgtttgcaaatttcttgtaattaaatttctccctcaaggaaagactgctgggttgctcctgggagagaaaatcagtggcatgtggccagcaacttccagatcgttctgctctgatgaggcctgagatccctgctgcccaggcaggtgagggcatagtaatgtggtcgcagtgttccatgtcccttaccttcccatctgatttagtctgggtctttgttgtcacccaaatctcatgtcaaattgtaatccccartgttggaggtggggcctggtgggaggtaattggatcatggaggtggatttttcatgaatggtttagcaccatcgcctggtactgttcttacaatagtgagtgggttctcatgagatctggttgtttaaagtatgtggcatctccccccacgttctcttgctcctgctcccgccatgtaaggcatctgctccccctttgccttctgctataattgcaagcttcctgagacctctccagaagcaaatgccagcactattgcttcctgtacaacctgcagaactacgagccagtcaaacc

SEQ ID NO: 326465 - DNA, 597 bp, Homo sapiens
gcctctatctaattaaagcatagctgccctacctttcttcccaaatatgtttgcaaatttcttgtaattaaatttctccctcaaggaaagactgctgggttgctcctgggagagaaaatcagtggcatgtggccagcaacttccagatcgttctgctctgatgaggcctgagatccctgctgcccaggcaggtgagggcatagtaatgtggtcgcagtgttccatgtcccttaccttcccatctgatttagtctgggtctttgttgtcacccaaatctcatgtcaaattgtaatccccaatgttggaggtggggcctggtgggaggtaattggatcatggaggtggatttttcrtgaatggtttagcaccatcgcctggtactgttcttacaatagtgagtgggttctcatgagatctggttgtttaaagtatgtggcatctccccccacgttctcttgctcctgctcccgccatgtaaggcatctgctccccctttgccttctgctataattgcaagcttcctgagacctctccagaagcaaatgccagcactattgcttcctgtacaacctgcagaactacgagccagtcaaacc

SEQ ID NO: 326466 - DNA, 476 bp, Homo sapiens
gagttaagtttctacagcgtatttctggtcacaaaaacatccccaaactcctaaataaagaccaaaacacaatattcaacattgaaatacatgcaagctatacatacgtcgatgaaagattaataaacacaatgatgatgattgattacccagttatcccagttcagggtctcaggtggctggagtctatccctgcagctcagggctcaaggtggaagccagccctgggcaggacaccatcccatcacagggcrcgctcacacccacacccacgctccttcacactgggaccatgtagactaacctaacatgcacatctttgaaatgtgggaggaaaccaaagtacccaggaaaaacccaggcagaaatgggaagaacttgcaaacacagatggtggccctggccaggaattgatattttttattttttttctcatcaatgttataaaaagacattgaatgaaaagatgttatttg

SEQ ID NO: 326467 - DNA, 478 bp, Homo sapiens
acagggtgaattaaaagggctcagtcacagaataactatgttgatatctgctgagaaaagcagtctcgtgtacagtcttctgaccctccttggccacataagaatgggccatgagcctggaacacttccttaccaagtgtgggactatttttccctgtttcaggctcaatgagtatcccttagttctgcttaagtatgtatgtcaatgaccctcaggcatgtctccagttttctgtatttcatattccttggggtaggggtcagagtccttctgttgtgatgggagaggagtgtgtttaggtaaattgccctacttggatgccaggggttgtggggtgggaaccctctggccacggaggactgacatgccattgaagctgatctggctctgtctcttctctgtgtaagtaaagygttgtcccatctggtgcttgactgctttgttttccttggcaacgtcagtaccaaaatgcaatgg

SEQ ID NO: 326468 - DNA, 426 bp, Homo sapiens
tgtgtgtgtatgtgtgtgtgtgtgtrtatatatatatataaataaatatatataaatatatgtaaatatatataaataaatataaatataaaatatatataaatatatataaataaatatataaaaaatatatataaatatatattaatatatataaatatatatataaatatatatatttaatgtacacatgtaaaatcacattttgcttgtaacttttctctccaaaaggattatccattctttttggcaaggagagtgatatatttttttggaaagaaaagttacatgtaaaatgaataaaattactaccagacataaaaaagtagctgcctttgtttcccatggaatattcctggctcatgtaaaaatctattttgaggtgtctgtgaccatgccctaacatcatctgcaatcctgagtttt

SEQ ID NO: 326469 - DNA, 556 bp, Homo sapiens
tatttgcatcagtttcccttgtccaccaagtcccatggggcagtgcaaacaagaccagatagcttcatgcacataaggtgcccttatcacaggaaagaaaccctgagctgaagatatctaaattttttataatgaggcgtaagcatgtgtgtcctttgcttgcaaaaagttactatctctttcttctaaggctgaacaaacatcctttcaatgatagtacaaaatgaagacactcaatgtttcttctcacaagatgtgcaaaaatgcaaaatacccatgcaagattgtcttccagcaggtcttatgtccaaactttacagaaattacttcccattcctggatcttatattttcatatctttaaaggtattaaactggatcaaattcaaggtcatttcgtggcaacaaaaacaaaatgattatttctttttttaaagaccaaccttgtgaagattctgctcttcaaggtcttacaatctcaggtcacgcttaccttcaaatgatcactgctrgttggcattttaaacacaggcacacaccaattcaaagtatcagta

SEQ ID NO: 326470 - DNA, 537 bp, Homo sapiens
atacatcaatcaattcatcaatgatactattttgtgaaaagataaattaaaaaccagtattatatgtctttgtaacaaaaccccaaaaccatgaaaacttagatttgcatatttatctcatattgatgtgtttttatatacacagaaaaaagtctgaaaaatcacacacaaagtttttaccatgatgagagagagggggagcattgcaagggaatattaattactttttattgtttataaagtgtttatatattctttgaggtcccyccacttcctgtccccaagggatgtgtattactttcataatcaggaaaaatgacaaatttccaatatagacaaaaaattaaatgagtcacatagaaatattaaggcaattattacttatgaaaatattcctatggcacaagtagaagcatgattcccccaccagtaaagccaagaaaaataatctaaggagatgttttaatactatttaaaaattcaaatagtggatacttcttttgcagactcctttgaataaaacaatactttcatcga

SEQ ID NO: 326471 - DNA, 617 bp, Homo sapiens
gactttgctattgtggatagtgctgcaataaacatatgagagcaggtaattttttttttttttaaataagatggagttttgctcttgttgcccaggctggagtgcaatgtcgcgatctcagctcactgcaacctccacctcccaggttcaagcaattctcctgactcagcctcccgagtagctgggattacaggcatgcaccaccccgcctggctacttttgtgtttttagtagacattactgtttatgttaacatgtttatttatacaacttgtttctccatgttggtcaggctggtctcgaactcccgacctcaggtgatccacctgccttggcctcccaaagttctgggaatacaggcgtgagccaccgcgcccggccggtgagtttttaatgtaatatttttttttcccttcagatagatgcccagtagtgggattgctgggtcgaatggtagttctatttttagttctttgagaaatctccatactcttttccattaaggttatactaatttcccttcctaccaacagcgtataagtgttcccttttctcygcatccttgccaacatctgttattttttgactttttaataatagccatctgatttatgtaa

SEQ ID NO: 326472 - DNA, 513 bp, Homo sapiens
tttgttgcattgaaccctttatcattatataatgcccttctttatcctttttttaaactattgttgatttaaagtctggcttatctgatataagaatggctactcctgcttgcttttgttttccatttgcatgatacatatttttccatccctttatttgagctggtacatgtctttagccaataggtggctctcttgtaagcagaagatgattggctcttgtttttttattattcagttggccagtctatatcttttatgtagagcatttaggcctttgatgttcaatgttaatattgatgtgtgaggttttgttcctatcatagtcttgttagctggttgtcttgaagtctcagttgtgtatttgagacttcaaggcaactagctaacaaggctttgtaggatgtgtgtgcttyctacttatgtgtgcttttacgatgttgagtatcatcttttcatgtgcatgtatagaactactttgagcatttcttgtaggtctggtctagtggcaac

SEQ ID NO: 326473 - DNA, 513 bp, Homo sapiens
tttgttgcattgaaccctttatcattatataatgcccttctttatcctttttttaaactattgttgatttaaagtctggcttatctgatataagaatggctactcctgcttgcttttgttttccatttgcatgatacatatttttccatccctttatttgagctggtacatgtctttagccaataggtggctctcttgtaagcagaagatgattggctcttgtttttttattattcagttggccagtctatatcttttatgtagagcatttaggcctttgatgttcaatgttaatattgatgtgtgaggttttgttcctatcatagtcttgttagctggttgtcttgaagtctcagttgtgtatttgagacttcaaggcaactagctaacaaggctttgtaggatgtgtgtgctttctacttatgtgtgcttttacgatgttgagtatcatcttttcatgtgcatgtatagaactactttgagcrtttcttgtaggtctggtctagtggcaac

SEQ ID NO: 326474 - DNA, 601 bp, Homo sapiens
ccattaacaaagggctggctaagatgcattttttagttgtcctgtaggtgaaatttatgatctccacattgtaaagacttactgcattgctttcttgtttagaaagcttatcactacattaatatttgtaattatgagatagtaaactccaaagacaatttttttttttgttttgagatgaagttttgctcttgttgcccattctggagtgcagtgacacgatctcagcttgctgcaacctccacatcccgggttcaagcaattctcctgcctcagcctcccaagtagctgggattacaagtgcccaccaccacrcccggctaattttttgtatttttagtagagactgggtttcatcatgttggccaggctggtctcaaactcctgacctcaggtaatccacccgcctcggcctcccatagtgctgggattgcaggtgtgagccacagcaccctgatgaaagacaaattattaaatgtgtctcagcttacttttctatgaaataaaatgaattaaagtgtccatgtttttgtcttaataatatagatacactgtctcctatctggcagccaccattctaatgctgtacaaatactaatag

SEQ ID NO: 326475 - DNA, 531 bp, Homo sapiens
ggcctaggggaacttgcaaccctgaagtgaaggacacagtctagatggttttgccccctgctgagtcccagggccttgaggaaacataggcagtagccagagagtgattacaacagatgctgcgtaggacccagtgctgtgctggcttcaggtccacctagtggtggttgccataggggtgcttacgtcattccactcccagctccacgtggctcagaacagagagagacggagggagggagggagggagggarggagggagagagagagagagagagagagagagagagagagagaaagagactacatttggttggaagaaagtaagggaagagaacaagagtgtccatctgataatccagagaattcgcccaggtcttctttaagacgatcaagatgaatctgtatgagtctgcaagaaccatagtgttactggggtgctccctaaataaggaacagcttagatcacagcacccaagtaatttcaaatacctggaaagccttcccaagaaggacgggtacaaacaagcc

SEQ ID NO: 326476 - DNA, 594 bp, Homo sapiens
gatgtcaccatattcttctggcctaatttaaatcattgaagtataamaaaggagattctaaattcatcctcataatcctcaaaagtcaggtccttggaatatttgctgttcacctagtgctttgtaactaattattcaaaccttagtgtcttcaaacaaacatttattatctcgcagtttctctggatcaggaattcagtagtaatttgctgagcgagtctttcatgaggttgacgtcaaactgttacttgtggctgcatcattggaagcctcgtctgcttccggtaggtctcacttacctggctgacagttggtgctggctgggatgcctcagttctctgtggcctctgattctgtaatacctttcttcttcaagtagcctctcccgggggtcactgggcagagaaatagagagggaaaaggaaagaaagagaggaggggaggggaaagccagtaagtcaggaagttctccagataaaaactatgagtattttttaaaatataatccaatttagcagtgatatcccatcactactattattttcaacctgtgggaagtgagtcactaaatcccgtccacagttaaaggaaggg

SEQ ID NO: 326477 - DNA, 614 bp, Homo sapiens
ttttaaactaattatcattacaattattgtgatattctacatgcctttgcctttttctggctcttacaactggcttgcattggaaatactcagatttaaggaatgattacaagaagttttcaaagaaaaatatcataaaatttcaaaaactctttgactttcaagaattggcttaaccctgcggccatttaccattgacatgttctgctttcttttttcttgatactgattttgctcttttaaaatgattagcctaaaagaacatcaagatctgactgtgaaaataatayggataacactaaagataagtaaattaaatattattttgtatgtgaattttttagcaaatatcttctatatctaaaatgctcttaagtagagaaactactggccaaatttttaaaactgtaatgacttgtatatctggtgcaaatatgtgataggtgtcaagtgattacttgggaagcataaataagtctacagtttatcctatgaagttgattttattgtgctttaacagaaagaaaaagaaatctttaatgtatccttcatgtttcatgaataatcagtgttaaaaaaattcaaatagacatgttaaaagcatagtaaggaag

SEQ ID NO: 326478 - DNA, 614 bp, Homo sapiens
ttttaaactaattatcattacaattattgtgatattctacatgcctttgcctttttctggctcttacaactggcttgcattggaaatactcagatttaaggaatgattacaagaagttttcaaagaaaaatatcataaaatttcaaaaactctttgactttcaagaattggcttaaccctgcggccatttaccattgacatgttctgctttcttttttcttgatactgattttgctcttttaaaatgattagcctaaaagaacatcaagatctgactgtgaaaataatatggataacactaaagataagtaaattaaatattattttgtatgtgaattttttagcaaatatcttctatatctaaaatgctcttaagtagagaaactactggccaaatttttaaaactgtaatgmcttgtatatctggtgcaaatatgtgataggtgtcaagtgattacttgggaagcataaataagtctacagtttatcctatgaagttgattttattgtgctttaacagaaagaaaaagaaatctttaatgtatccttcatgtttcatgaataatcagtgttaaaaaaattcaaatagacatgttaaaagcatagtaaggaag

SEQ ID NO: 326479 - DNA, 614 bp, Homo sapiens
ttttaaactaattatcattacaattattgtgatattctacatgcctttgcctttttctggctcttacaactggcttgcattggaaatactcagatttaaggaatgattacaagaagttttcaaagaaaaatatcataaaatttcaaaaactctttgactttcaagaattggcttaaccctgcggccatttaccattgacatgttctgctttcttttttcttgatactgattttgctcttttaaaatgattagcctaaaagaacatcaagatctgactgtgaaaataatatggataacactaaagataagtaaattaaatattattttgtatgtgaattttttagcaaatatcttctatatctaaaatgctcttaagtagagaaactactggccaaatttttaaaactgtaatgacttgtatatctggtgcaaatatgtgataggtgtcaagtgattacttgggaagcataaataagtctacagtttatcctatgaagttgattttattgtgctttaacaraaagaaaaagaaatctttaatgtatccttcatgtttcatgaataatcagtgttaaaaaaattcaaatagacatgttaaaagcatagtaaggaag

SEQ ID NO: 326480 - DNA, 614 bp, Homo sapiens
ttttaaactaattatcattacaattattgtgatattctacatgcctttgcctttttctggctcttacaactggcttgcattggaaatactcagatttaaggaatgattacaagaagttttcaaagaaaaatatcataaaatttcaaaaactctttgactttcaagaattggcttaaccctgcggccatttaccattgacatgttctgctttcttttttcttgatactgattttgctcttttaaaatgattagcctaaaagaacatcaagatctgactgtgaaaataatatggataacactaaagataagtaaattaaatattattttgtatgtgaattttttagcaaatatcttctatatctaaaatgctcttaagtagagaaactactggccaaatttttaaaactgtaatgacttgtatatctggtgcaaatatgtgataggtgtcaagtgattacttgggaagcataaataagtctacagtttatcctatgaagttgattttattgtgctttaacagaaagaaaaagaaatctttaatgtatccttcatgtttcatgaataatcagtgttaaaaaaattcaaakagacatgttaaaagcatagtaaggaag

SEQ ID NO: 326481 - DNA, 607 bp, Homo sapiens
ttctccactactgtagtcacaatggacggttcctcagccacatgtgtgcaaggactgggacgactgaatcgactatttagagggccgaggccagaaactacaggcaagaataagccttccatctctggaaatattataaaattaattcttaaactgataatttatcagcacagtcattaatgaagcaaacgggttgcactaagaataattccagaactaatttcttttaatagaattggtagttggcaagatcaagaggctttcactgacaagtaaaaatcattggagaggaagcccccacccttatacatgcatayaccatttgaaataactactataataaaccagcctgcaggcgggtgccatattactcagctctcttggtgcagcagtggttggaactggagagacacggtaactttaccatgatttttcagcaaggtctttggcaaaatctgtagttgaaccttaaaactctagttaagttaactagcttttccttcagtatgcatttgtaacctcaaattaaatagacacagaccaagacgaaaggtgaaggaatctgctgcttttacaaagcgaaggcacctctcctcatctgtctcta

SEQ ID NO: 326482 - DNA, 607 bp, Homo sapiens
ttctccactactgtagtcacaatggacggttcctcagccacatgtgtgcaaggactgggacgactgaatcgactatttagagggccgaggccagaaactacaggcaagaataagccttccatctctggaaatattataaaattaattcttaaactgataatttatcagcacagtcattaatgaagcaaacgggttgcactaagaataattccagaactaatttcttttaatagaattggtagttggcaagatcaagaggctttcactgacaagtaaaaatcattggagaggaagcccccacccttatacatgcatacaccatttgaaataactactataataaaccagcctgcaggcgggtgccatattactcagctctcttggtgcagcagtggttggaactggagagacacrgtaactttaccatgatttttcagcaaggtctttggcaaaatctgtagttgaaccttaaaactctagttaagttaactagcttttccttcagtatgcatttgtaacctcaaattaaatagacacagaccaagacgaaaggtgaaggaatctgctgcttttacaaagcgaaggcacctctcctcatctgtctcta

SEQ ID NO: 326483 - DNA, 590 bp, Homo sapiens
aaatatgcaaataccaaataaaaccccaatcatcccttgactttgccttttcttcacaggaattgcttgtctctttcttcacttagtgggtgaaattattggaaaaataaccaataactgttgactgtagttcttcccttgccatttatttcttagggaagcattctggctcttattatcatctctaataacaacaataatggagtaacaggcacttataaccataaatgcattccatagaagatagaaattgttatacagttggccttttcttctgaaaaatctcagtgggtttggttatgttcttttggagacaagactagaagtgaactgatctgcacaatttggagatcaagaaggtaattctagaggaaaggaatagcagagcasggaagctgagaaggagccagtgagattgagagtagataaccctctctgcagtgtgactcccttactgtcacccccagctgtctagcaaatctaactgaataacatgcataccatgaataagcatgttcgtgtgtgaaaacgagggaagggctagtttttctctcccaggttagtgttggtaaacaaagatacatataggg

SEQ ID NO: 326484 - DNA, 590 bp, Homo sapiens
aaatatgcaaataccaaataaaaccccaatcatcccttgactttgccttttcttcacaggaattgcttgtctctttcttcacttagtgggtgaaattattggaaaaataaccaataactgttgactgtagttcttcccttgccatttatttcttagggaagcattctggctcttattatcatctctaataacaacaataatggagtaacaggcacttataaccataaatgcattccatagaagatagaaattgttatacagttggccttttcttctgaaaaatctcagtgggtttggttatgttcttttggagacaagactagaagtgaactgatctgcacaatttggagatcaagaaggtaattctagaggaaaggaatagcagagcagggaagctgagaaggagccagtgagattgagagtagataaccctctctgcagtgtgactcccttactgtcaccccyagctgtctagcaaatctaactgaataacatgcataccatgaataagcatgttcgtgtgtgaaaacgagggaagggctagtttttctctcccaggttagtgttggtaaacaaagatacatataggg

SEQ ID NO: 326485 - DNA, 574 bp, Homo sapiens
ttgttagaatttgatttgtggttttatatttagtctggaaaagatgaataggctactgtgttagttagttctcacattgttataaggaaatacctgagactgggtaatttataaagaaaagaggtttaattgactcacagttctgcatggctggggaggcctcaggaaacttacaatcatggtggaagggcaactcttcacagagtggaaggagagagagaatgaatgccagcaggggaaatgccaggtgcttataaccatcagatctcatgagaactcactatcacgagaacagcatgggataaaccacctctatgattcagctaccttgaaattttaaaaacttgaaatttttagcctaagtatttcttttcctcatgtaaaaattcacagaatcaaataaaattacagtgattgtcttaatcacctttgaagagcaagggcagtctacactgatttttttaaaccaaatatagaacayaagaagaaagagtgctctttattttattgtgaagtaaatgccctggtgattgttaataagtcaaagagaagtggttttgtcacagaactgtta

SEQ ID NO: 326486 - DNA, 609 bp, Homo sapiens
actgggtaatttgtaaaggaaagaggtttaattgacttacagttccacatggctgaggaggcctcaggaaacttataatcatggtggaaggggaagcagacacgtcttacatggtggcaggtgagagagagcaagaaggaaaaccaccactgataaaaccatcagatctcatgagaactcactatcatgagaacarcatcggggaaactgcccccatgatccaatcacctttcaccaggtccttccctcaacctgtggggattataatttgagatgagatttgggtggggacacagagccaaatcatatcaaggatgaactgagtaaatatgtgtgaaattactgagtgtatagtaacactctgacccagtaacgctcactgctactgaggaaaatgacgtgacaaaaatattttaaggcaacaccaggaaaagggcccctcaaaagaaaaaagggaaattcctcttttcctatgtttccagaatatagccagagactaccggcctctcctctggaggaagcatactgtctcaatggaagactttgggggtagaacaagggatatgctatgtcacaaatcatttaataaatccatcagccaacaagctt

SEQ ID NO: 326487 - DNA, 609 bp, Homo sapiens
actgggtaatttgtaaaggaaagaggtttaattgacttacagttccacatggctgaggaggcctcaggaaacttataatcatggtggaaggggaagcagacacgtcttacatggtggcaggtgagagagagcaagaaggaaaaccaccactgataaaaccatcagatctcatgagaactcactatcatgagaacagcatcggggaaactgcccccatgatccaatcacctttcaccaggtccttccctcaacctgtggggattataatttgagatgagatttgggtggggacacagagccaaatcatatcaaggatgaactgagtaaatatgtgtgaaattactgagtgtatagtaacactctgacccagtaacgctcactgctactgaggaaaatgacgtgacaaaaatattttaaggcaacaccaggaaaagggcccctcaaaagaaaaaagggaaattcctcttttcctrtgtttccagaatatagccagagactaccggcctctcctctggaggaagcatactgtctcaatggaagactttgggggtagaacaagggatatgctatgtcacaaatcatttaataaatccatcagccaacaagctt

SEQ ID NO: 326488 - DNA, 565 bp, Homo sapiens
atatgtttaagtaagaaaaaaaataaaagtaaaatttgaattgcagtctgaaggtttgtttacagtttccaatccaaatgcaatattattgaaatattcgagattcatctctgtgaatgagttttattgtccgtatggctttctattctttmgactaaaatcccatcatctgttagaaagacacataaaacaaagggatttgcagtctatgtttgctttttttttcctgataaatttatctgtaacaagtcatcttttcaaaagtataagtaaaatattggcagtttatatttttattccatctccaatgtatatcttctatacataaaaatgtgctagatgaaatataattatttactatttacaagatgaaagccaaaccaaaccaacaagcaaaaaacaaacagaaaaaacagaactcaagtataataaactaaagttctccctgctctggttctcagtggtatacagttcatacaaacactactaaattccaggaaagtttctgaccacagtattatctatttactgtttacaactagaaacagttctcaagacaatgata

SEQ ID NO: 326489 - DNA, 565 bp, Homo sapiens
atatgtttaagtaagaaaaaaaataaaagtaaaatttgaattgcagtctgaaggtttgtttacagtttccaatccaaatgcaatattattgaaatattcgagattcatctctgtgaatgagttttattgtccgtatggctttctattctttcgactaaamtcccatcatctgttagaaagacacataaaacaaagggatttgcagtctatgtttgctttttttttcctgataaatttatctgtaacaagtcatcttttcaaaagtataagtaaaatattggcagtttatatttttattccatctccaatgtatatcttctatacataaaaatgtgctagatgaaatataattatttactatttacaagatgaaagccaaaccaaaccaacaagcaaaaaacaaacagaaaaaacagaactcaagtataataaactaaagttctccctgctctggttctcagtggtatacagttcatacaaacactactaaattccaggaaagtttctgaccacagtattatctatttactgtttacaactagaaacagttctcaagacaatgata

SEQ ID NO: 326490 - DNA, 565 bp, Homo sapiens
atatgtttaagtaagaaaaaaaataaaagtaaaatttgaattgcagtctgaaggtttgtttacagtttccaatccaaatgcaatattattgaaatattcgagattcatctctgtgaatgagttttattgtccgtatggctttctattctttcgactaaaatcccatcatctgttagraagacacataaaacaaagggatttgcagtctatgtttgctttttttttcctgataaatttatctgtaacaagtcatcttttcaaaagtataagtaaaatattggcagtttatatttttattccatctccaatgtatatcttctatacataaaaatgtgctagatgaaatataattatttactatttacaagatgaaagccaaaccaaaccaacaagcaaaaaacaaacagaaaaaacagaactcaagtataataaactaaagttctccctgctctggttctcagtggtatacagttcatacaaacactactaaattccaggaaagtttctgaccacagtattatctatttactgtttacaactagaaacagttctcaagacaatgata

SEQ ID NO: 326491 - DNA, 541 bp, Homo sapiens
aagctgtaggttatttgtgcacctacctaaaattcatagtaaatggcagtttaaaaaawttaaaactacatcaacttctggttaaaaaaatctagtaagacagacattttttgataatatgaatcaccgaaaccacgtcagccaccttgaaactggccattttgaatgctgtaaaaatggcattctaggttacaaacaccatcatgggttaaaacgggaaattctttaccttttctcagtgaggcccctctaaatagagagagcctgttgatattactttcaggctatttgactattcctcatgaaattacaaatgctaattgccctttgaaagttaattttaacaataacgggttagaatagagtcaagtcttcgagggacacgatgtgtccctggacggtacgatcagttagattttaataatgtgatggaatatattaacaaatataggaaagaatgtgaacaggggcttggtcagcaaagaaagcataaaaagaaaggggagacagagaggaagtgaggatatggcccagttaagca

SEQ ID NO: 326492 - DNA, 530 bp, Homo sapiens
taacttaataacacaactggggcaataaataggatcaaattcagacaccagcaccttgaagcctgaacctctccacacagtaacactactgtatattacaaatgatctcaatacgtttatactatagcactaagattggtatatgattgtaaccatactaattttctttttcttaaaaaagttgtatttgccttagttacctttctcaattcttttactttcaaattttcttagttcctgtgtgttagacatgcttctcagaaatagtattttgctagatttaaraaaaaatcaatagttctgtcttttcagtatagtatttcttaatatatttctaccatcttattttgctttttctttttgattttcctttattccttcttctccccccccttttggttgatcaaatatttttaaaatatcgatttcccctacaattgctttgaaatgtatgtatgtcatatctagtattttagggattatccttattttttttcaaaaatacttattaaattccaacatagcttaag

SEQ ID NO: 326493 - DNA, 522 bp, Homo sapiens
gttctctttttttcttgatacccaaaagcttctcctattttactggatgctcagatatataacttaaaagatgtatgttacattttatttagcatttctaggtgtttgaaactggaaaattttcaggctcccatgttgcctygtcctaggaaatgtaatccttagagattattgtttctgtttcctattatgtgatgtgacattacagaatgttaagtattttaaataaattatcttatatcagaaaatttatgttataaacttttggggtgcagttaatattttagaaatgttttcagatacaaaaagccatgttttaaaatatctcagaatagacattataatcttgaaaaaaaaaccctgatttttattgaagggttttgttatgaatgaaatttggaggtgctcttgtagcattctgcatttacattctagcatcacgcttcatcaataaacatgaagacatttgtataacatgtaaaaccatcttatttataccaagtgcagaaaattgaaaagctt

SEQ ID NO: 326494 - DNA, 550 bp, Homo sapiens
ttttctgcaatgactataatgtaacaaatagaaataatttgtaacactgtgttctatgtcaattgtacttaaacacttttgagatatggcagaggatcttgcttccctcaggactaataatgtacacttcatctaagtccaaattttaattaacagttcttgttaagatagttttttctacctctaaacctaatcatacttggtatttaaatggcatattcaataaaagtcgtcccatttcacctgttttgaagtcaaaggtttttgctttaaaacatttttgaactagctctacagtttttagaagctgtttagggacttcacatactatatgcaggagtaagtaactaattggtgctatactttatggtattgacacattcaaagarcttcattgattcagtacactttctctttcttaaaaacatgagacccttaaccatggtagaattctcattgttaatttattttggctgctctattgcctgttactaagttattctgtttcaagggcaaaagtatattttttccacatggaaaaaaattcaaa

SEQ ID NO: 326495 - DNA, 637 bp, Homo sapiens
gattataatgtatttccagacaaacaaaaatcaagaaacattaagtagaggaaattctaaaggattttgtttccttctgagattctagaagcaatgggaaacagtgggtgactatgttgataraaatgaacaaataattataaaataggaaatataactttgtaagactaaaaatctagaatatatattttacactataatgtaaatctagaaagtgttttaaagttcttgaaatatctaagaggtgagtaaagagactgataatgttttgacatattaaatatccatgttttaatttttagggtaaccactaaaataatagaaagtgaagttataacattcaaaaagatgggggaaatagaatagtagaaaatatttattaattaattcaaacattcatctgacaaagataatgtgtgacaatagccagaaacaataggaacgactttatatttctattcatataagtttctttgtttttttttttttttttttttttttctttttgagatagagtgtctctcctctgctgcccaggctggagtgcaatggcctggtctcgtctcactgcaacctccgcctcctgggttcgagctgggattacaggtacccgccaccacacctggctaatttctgt

SEQ ID NO: 326496 - DNA, 637 bp, Homo sapiens
gattataatgtatttccagacaaacaaaaatcaagaaacattaagtagaggaaattctaaaggattttgtttccttctgagattctagaagcaatgggaaacagtgggtgactatgttgatagaaatgaacaaataattataaaataggaaatataactttgtaagactaaaaatctagaatatatattttacactataatgtaaatctagaaagtgttttaaagttcttgaaatatctaagaggtgagtaaagagactgataatgttttgacatattaaatatccatgttttaatttttagggtaaccactaaaataatagaaagtgaagttataacattcaaaaagatgggggaaatagaatagtagaaaatatttattaattaattcaaacattcatctgacaaagataatgtgtgacaatagccagaaacaataggaacgactttatatttctattcatataagtttctttgtttttttttktttttttttttttttctttttgagatagagtgtctctcctctgctgcccaggctggagtgcaatggcctggtctcgtctcactgcaacctccgcctcctgggttcgagctgggattacaggtacccgccaccacacctggctaatttctgt

SEQ ID NO: 326497 - DNA, 582 bp, Homo sapiens
ttttagttcagtacttctcaatattttaggtgcatacagatcatctgggatcttgtcaaaacaggtttggctcagtgtgattgaagagaacactgggattctgcttttctaacaagcttcaaaatgctgttgctgcagctgcttgtgggccacatcttgaacacagcagagctccagcctctgcatctgggcccccagatacatgaaaaatgcagctcaggtagtgacaaaaaagatcagtgatgtgggcctttggtgtgttatggtttataaaayagaaaagcctattttcttttcccttaccatttccagggaaaataaagtaatggggatgatgtagaaatcacctgaaatagtctggcacagtgcttgcaaggctgtaggaaccaactgaagtttgctcaaagctttatgtacttctgtttctcacttgtatcacctgttatctttggagtgtcatgttttacgttacatattagcaatggaaacagaaaatggtttttcaatcactcactgtgtctatgcatagaaaggctgggcgcagtggctcacacctgtaatcccagcactttgggaggccaa

SEQ ID NO: 326498 - DNA, 582 bp, Homo sapiens
ttttagttcagtacttctcaatattttaggtgcatacagatcatctgggatcttgtcaaaacaggtttggctcagtgtgattgaagagaacactgggattctgcttttctaacaagcttcaaaatgctgttgctgcagctgcttgtgggccacatcttgaacacagcagagctccagcctctgcatctgggcccccagatacatgaaaaatgcagctcaggtagtgacaaaaaagatcagtgatgtgggcctttggtgtgttatggtttataaaacagaaaagcctattttcttttcccttaccatttccagggaaaataaagtaatggggatgatgtagaaatcacctgaaatagtctggcacagtgcttgcaaggctgtaggaaccaactgaagtttgctcaaagctttatgtacttctgtttctcacttgtatcacctgttatctttggagtgtcatgttttacrttacatattagcaatggaaacagaaaatggtttttcaatcactcactgtgtctatgcatagaaaggctgggcgcagtggctcacacctgtaatcccagcactttgggaggccaa

SEQ ID NO: 326499 - DNA, 589 bp, Homo sapiens
agttgatttgtcttcaattacaatcagtttctcaacctgtggccacagggactatttcaagaacattcccatgattaaggccacacagcctgaaactcatgcgtgatcatgagcagcttggccttggactgaagacaaagtggagaacacaatcagaaagagaaataaaccacaatcttggtrgctgtcaagccactggatcaagtctacacccaactccacattgagccaataaagttcctttttttgtgagtgcagacttagttgggtttttggtttacagccgaaaccatcagaaccaatacaactccagtgttcacagtgccccatattttgtcctgagatccctccacagtcccctttgtttcagaatggccaactgttttcatatcttatttcaaatttaagaaaggaaattcgttggctcgatttatcttttatctccagaatctagtaatatgttgctcatcaacatatggttcggctgctaggtcaagtgcccagccataaaccagcctctggggctggatgggagggctgctgttcttctctgaagacctgtatccattttcctgccttgcagatacca

SEQ ID NO: 326500 - DNA, 555 bp, Homo sapiens
tgtgatctctccaaaactctctaatctgggtgtcattargtatttcttgagtctttgctatgccacttgctgtgctgggtggatcactagcagcagtcaaatttccttcccgacccagacatcttatcaaataaagcttagaggcagagattccactagacacacagggccacgagttaatctttgtgaataatttcattgttaactattgggacaaggtacaaaaaacaaaaacagaaacttgctaatggaatacactttctaagattataaattgcaccatttgccaaatgtatactgttagaaatgagagcaataatttgcacttactgtaagtccagcatacggagagggtcatatgttgaaatgccatctctattgaggtgtcataaaaaatatttcctccagcagcacccagtcattctaaggtattaggtataatttttaaagtattatttggtgttctgaataccaaaaaagtacatcttgagtaccacaattggtgacattaaagttaattattttcattaaatattgcagtgctgtcatgaggaa

SEQ ID NO: 326501 - DNA, 527 bp, Homo sapiens
caacaggtggagatataaggacttcttttaattgcaagacacatgatgaaaaataaaaggcacattctgtccacccttaaagttctttccctaattccctaaattaggttcttgtgaaatacctgtagttgttatgaaagtcatagaatttaatttataggtgtctcttaagttaggttagctagctgatgtttgtttcaaggatcatggaatcggccatgcagtaatttatatgcccaaagaaaaacctgattaaaatgcttaatatgatgaacagaccttgaataatcttcataattatagagtacamactacttacatttttgaagtggttccaaaaccatttgtccactgtgtgtatcttcgaggaataaacaattcactaaacctcctctctatggaaatgtatagacccttggcccatcacctcctcatccttgcagattttaatgcctggttcactgctccatgatccaataaccctcttgtagtattctttggagttttcaatatccatgtagaccatt

SEQ ID NO: 326502 - DNA, 602 bp, Homo sapiens
tatagacccttggcccatcacctcctcatccttgcagattttaatgcctggttcactgctccatgatccaataaccctcttgtagtattctttggagttttcaatatccatgtagaccattctttcaatgaacctatctctgaaatattggccctcctccattgataccatcctccagcatgtcttaatcactcagttccaagatcatctcctggaactcaacataatcattaactacaactactccataattgtgcttctcatttcctgcagctctctaaattcactgttaacaaaagttacatctatgtcttgttcactcatgtgctcacttcccttccacttagctttagtcccacattctatcattatgactcccttgcaatcacctttgatttctttgctcctctctctttcytaacacttgctcagaaaaacagcaatgctgattaagtgaaacttgtgcttcagcatctccctggggggaagaatggaagaatgtggctggggaaaaccacacacctatgctgattggtctcactttaaattcatagctcctaaccttcagtgggaccctggtgttgcaatcctacttcattccg

SEQ ID NO: 326503 - DNA, 581 bp, Homo sapiens
aatggtaattttatcttgagcagaattctatgcctgtaaaccaagattctgtatcagtcagtaatagggctgaatatgtgacgatgtgtacacagggagggtgtactttacctttaagctggccaaatgtgcttttttwtttttttaaataaaaaagagcctaaatagaaatcttatctgtaaatattcattggtcctaattatcttttatagagttgcttttaccttactcagttgtgatttcattattaaaacttcaagtcacagaccaactaagtgcttctttggtgtgtgtgtttgtttgtatcatggatatccagaacatttgtcattggatatgatcattataaaactcttgaacatgacttctctgaccgtggatctcaggagctgtacttgaagtttcaaatcagctggcagtcaaaatgtttaataattcctttccaccgagcaaagatttctttcaatttctattctaggagtttgtactttttctaatgtatcctgcacaactaggtccatcaagataaatttctgtgcttaatgtcatgaatagaacagaaaatatgttaaaaagtgat

SEQ ID NO: 326504 - DNA, 580 bp, Homo sapiens
ttggctgtaaatatttggctttttttctgggttctctattctgttccattggtgtacatccttgtttttataccagtaccttgctgttttggtaactatagccttgtagtatagtttgaagttgggtaatgtgatgcttccatatttgttctttttgcttagtcttgctttggctatgtggggtcttttttggtttcatattaattttaggattgtttgacttagttgtatatgctagatgtcaaagcaggaaatagatatttggtgtcagaaacatgaatctatttattcttgtgttctcatcccattttccctctcaactcaccatgagccaaatacaattattttctaagtaaacattttgacaaatgcattatatatttagctagaagaagtttctgccttctatgaggtcacagcctaggaagaaagagatttgataatgacccagttaattggcttgattacaaaattttggcttttagttagcagaattyctatttaactggtttttctaaccatctcaggattaacccatctgttcagtgaagatacttagagaaacctgtattctaagagg

SEQ ID NO: 326505 - DNA, 483 bp, Homo sapiens
tgggggtctctgtgcattgtgagatgtttggtgagcattcctggcctatacccactagatggcatagcaccccctccagttgtgacaagcaaattgtgtccagacattgccaaatagctcttgggagggataaggaggccaaatcagcccttactgagaatcgcagctttagaaggaagataagagacaaagctgtgttttttaaaaaatagaaatcatgctgaagttttctaccaaggaaattattagttcagttgtatgcccaaagtgtatgacattaagtattatttatcaatatcactayttcccacattagctacatgttgtgagtctcattggttatctaaaatatgcttcacaaaatttgcccagcaaagatttgtccagtgagcaccaagaaaccccatttggaccttgctgatagttccagcatatttccacacaatttctctcctctcatcctcctaatctcccaaccacagt

SEQ ID NO: 326506 - DNA, 558 bp, Homo sapiens
ataaaaattgaatactttccattttatggtgtcctattcaatttctttcgtgttttatacttttcattatagagatctttcatttccttaagattgatcattgttggcatatagaaatggtactaatttttaatgttgattttgtttcctgcaactttacataatttatcagttctaatagtttttttgtgtgcagtctttaggtttttccaaatataagatcatactatctgaaaacaaggataatttgacttcttccattccaatttgaatgccgtttatctctttcttttgtctgattgttttatctaggacttccattactacattaaataatagtggtgaaaatgagcaacttcgtcatgktacagatctcagaggaaaggctttcagtttttccccattcaatatgatgctagctgtgggtttgtcatatatggctttcattatgctgagatatgttccttctatccccagtttttgagagtttttatcataaaaggaatgctgaattgtatcagataatttttcagcatcagttgaaatgattatacggtt

SEQ ID NO: 326507 - DNA, 501 bp, Homo sapiens
gtcatgggtgtttgttgtacagattatttcatcacctaggtaatgagcctagtacccattagttatttttcctgatcctctccctcctcccatccttcactctctgayaggccccagtgtgtggttttcccctctatgtgtccatgtgttctcattagttagctcccacttataagtgagaacatgtgacatttggttttctgttcctgtgttagtttgctaaggataatggcctccagctccattcatgttcccacaagagatataatcttattatttgttatggctgcatagtattccatggtgtatatgtaccacattttatcactgatgggcatttaggttgattccatgtctttgctattgtgaatagggctgcaatgaatgtctgcatggattgtctttctaatagaatgatttatattctttggttacatacccagtaatgggatggctgaatcaaacggtatttctgtctttagatctttgaggaattaccac

SEQ ID NO: 326508 - DNA, 604 bp, Homo sapiens
taaggacattcccatgacacatcctcaggaagatctgaggacatgtggccaaggtggttggggtgtgacttggttttatacattttagggagacatgagacaacagtcaatatatgtaagatgtatgttggttccrtctggaaaggtgggacaactcaaagcaggggctcccaggtgataggtagatttaaatattttccgattggcaattggttgaaagagttattatttaaagacatggaattaatagaaaggaatgtctgggttaggataagcagtcatggggacccaactttgatcatccagatgaagcctccaggtagcagtcttcagagagaatggattgtagatgtttcttatcagacttaaagagactattctatcagtcttaaggtctctgtgttgatgtttgtgaggcatgtctgacctaaactagttttttttttttttttttcaggattatttggaatgtctttggctaaggggagggttcatcagtcagtatgatggcttagaattttatatttggtttatacagcagagacttaggaatcctatgatggcctttgagggtctaatgtgtagagggcctcatgtcagcctg

SEQ ID NO: 326509 - DNA, 591 bp, Homo sapiens
tccttgtgattctctcttgaaggaagaagtgagtggacctaactgtggctaaaggagtgtttctgaaggtttgggctctcaggttttcacacctggaaagaggctggagagaaaaagattgagaataagagttgagtcaggcatcttaagatgtttgccacaagcagtcaataatgcaagggttctagaaatgagtaaaagagagtaacaatgcaagaagaaacaaaaatgttatctctgggtattttacctttctcagagaatgttttggaaactgaaggttgatgacaatcctcctctctaagagcagattatcactaagggaatcaagctagcagcttccattgttagagagcaatttctgcccattatccaccacctccccttccagttctatgattgcttataaaatgtaactaaagayaccaaagaccctcaagagttaaacaaaagggattctgtcaatcacaaaggtttattgtgtaaacctgcagacacaggcttgttacatacatatatccaactctcttcctgacatttctacttagacgtccagtagacatttcaattcatgtccaaccttgaatttct

SEQ ID NO: 326510 - DNA, 643 bp, Homo sapiens
tggattacaatatttaaagtccaataactgtcatttgaatctcctwtaaggattaatcacaaaggtatatattatttcctattaacacagtactgtataaaaataagattgtatttgaattaacttcttgacttaaaaaaaatccacgtaaggctctactttaatgttaatatatggctcgtgtgtgtgtgtatgtgtattttctagtcaaccacatttttttcattcgcattgacttagtcccttcagaaaaatgctgatattaggtaaatgatctgtttataccagttgcgtgcacacatgattttcaattgtttaatcaagataaaattgaatagagtgtaatgtctaaacttagcagagagaaaacacccagttgtaacttactgaccactcttaagaagactgtcatttgtttctgttttttttttttttttgaataattgggagtctcaccatatccacactagctttgaaagatttcaaaatgaatggatgtatgtgtgaaaataaaagctgctctgaagcacagcagctgcataaataccgattactacaaattgggtataattaaggttgtaaaacaagaattcatcattcgcttataacaatgttctgtttgatcttggtaattttgaagttt

SEQ ID NO: 326511 - DNA, 603 bp, Homo sapiens
aaggttaagtataaaggcattagaggctgcaccttggtcttttgatcccttactccagggaagccagcctaaaagccatggaaaccctcaagtagtaagatggagaggcacctaggaggagaactaaagcctattaccaagttccagcagcagcttgctagccatgtgagtctgctatcttgaaatggagcctctaatcctagtcaagtcatcagctgattgtggctctaggaaacatgtatctgcagccttataagaaatatcaagtcaraactgcccagccaagctgctcctaaattactggcctcttacagaaaagtaagagataataaattattactacattgagccactgagttttgaggcaatgcactatgcagcaatatataactaatacaaagtataacaaacacatcctgctattataatctcaaatcagttttaataattagaacctgaagattactcacacctgtgaaacattatgtaactggtggaatattgacagttcccttagtcaacaatgagctaaagatgttggatctctgatactgaacctcctgctggtttaactcccttagaaacagaggagaacctattatt

SEQ ID NO: 326512 - DNA, 542 bp, Homo sapiens
cttgatcctcatatatgtattctatatgatcaaaccagggtgacttctgtggctttcaaagactctgaatattctgactcctgactctcactgcaaggtaaattcacatctcttttaggcagatttaggcatagagagatycctaaccctaaaaatcgtaggatacattcacccacttagagcatccctcttctgaaatttacaaattaaaacaatatgaattaaaccattaaatatgtgtaagaaaattatacatgagtttcactttttctgtaatatatactttactcttcaaggaaatctatcatatttagcaatagttctgccatgttattgtgtggctactttgctagttttcagagtgaatacttaagatgtctatccttggtcaccatgtttcagccatactcttctctatgcatctcaggaaaaccaaaccctttcttcctatttttctcacttgtacttttcatggctgagttatccatatgattcaggtcagttcaaatgtcaccttccaagaggccctcccagaccagtca

SEQ ID NO: 326513 - DNA, 619 bp, Homo sapiens
tggggcagggaggtcagcaaatcctctccctaaagaagaacaatacaagtgaaaaagctcatccaaaacaaccatctcaggactctgggaatttatcaaaagcaaataaaacactgggggaatattaggaacaattttatgccaataaattaaacaattttgatgaaatggaaaaaagtcgaagaaaaaaaaccccaaataattaaaactgactcaaaaagaaatagaaaatcagaatagacttcaataagcagacaaatggaattactaatcattaaaaatattcccacaaagaaaaactcaggcccagatgacttcactggtgaattttgctacatacttaaagaagaagtaatgcaaatcttttacaaactctttcaggaaatagaggaggaagaaatacttgtyggttttttctgtgtggtcagtactattctgatatctaagtcaaacaaaggcatcacaagaaaactacagaacagtgtctctcatgaacatgaattcaaattttctcagtgaaatattgacaaatcatacccagcagcataggaaaagtattatacaacatgaccaagttggattcagcctagaaaccaaatactgggttaacatccgataa

SEQ ID NO: 326514 - DNA, 507 bp, Homo sapiens
gactgggtggtccagagcagggcctctcaaccctggccctgggttaggatgcacagcctgggccttccctagagtctgcttcaattactcaccattgaggcctgctatcagcatatgtcaaagcaccccccatgcccacgccttgattctcatgtcagtcaaggtgcagaatcgctggtcccaaggaagtcagtcttgttaaggtcaatagtcatgggattgaagtacagtccaggatggaaagcttggggtctctgcctgtaccaccagaccagagacctaaggtggctttgtgttgttcaccctggatttttcacgcaacacagygtctggcatatggtaggtgctcagtatatatgtaggagagggagggagggagagaagaagggagggaattgtcatggaaagcttatgacctggttaataatgatctggcagttctagaatatggttgttgtatcaggtttcaagaagaaggagatgaccccagcacaactccactggtct

SEQ ID NO: 326515 - DNA, 565 bp, Homo sapiens
cagcccagcttaaagcctttgcattttgcagaatttaagactcacaagtttcttggccttctcccttcctttgctcacctaggagccaatgtggtagctctgagtcttgatgcctggactctataatgatatgtatggatggacaatgctctttgttgctcacaaaatgtagctgagggragatgtagttgaggggagatgtagctgaggggaagtgtagctgaggggaaaggtagttgagaggaccagatgatctgactcagttttcactgaaaatgtgagtcatgctttcattctggtacattgaagaaactggaatgaggaggagacacacattcaaagggagttcaaagggaaaggataaatgtcgtgctttgtgatccctggggatctccactcaggggatgtttgcttgaggaaggggaccccttgctatgggttggcagctgtgggaggcctgtgcacctgtggtgactgacatgcctgggaaggccatgacagtttttattcatggggacccagccttaagcacatgcctcatgaccaaatgagctctgtcttcttt

SEQ ID NO: 326516 - DNA, 565 bp, Homo sapiens
cagcccagcttaaagcctttgcattttgcagaatttaagactcacaagtttcttggccttctcccttcctttgctcacctaggagccaatgtggtagctctgagtcttgatgcctggactctataatgatatgtatggatggacaatgctctttgttgctcacaaaatgtagctgaggggagatgtagttgaggggagatgtagctgaggggaartgtagctgaggggaaaggtagttgagaggaccagatgatctgactcagttttcactgaaaatgtgagtcatgctttcattctggtacattgaagaaactggaatgaggaggagacacacattcaaagggagttcaaagggaaaggataaatgtcgtgctttgtgatccctggggatctccactcaggggatgtttgcttgaggaaggggaccccttgctatgggttggcagctgtgggaggcctgtgcacctgtggtgactgacatgcctgggaaggccatgacagtttttattcatggggacccagccttaagcacatgcctcatgaccaaatgagctctgtcttcttt

SEQ ID NO: 326517 - DNA, 619 bp, Homo sapiens
ccagcaagaaagaatgagtaaggagtcatctgtggaaccagatagactgtttgagttctaagagtactgttttcacttttactgtttattttcttatatggtattttccacctttagcagatgagctatttctacaaagcatcacttaaagagagaatggggctgggcgcagtggctcacacctgtaatcctagcactttgggaggccgaggcgggtggatcacttgaggccaggagtttgaaaccggcctggccaacatggcgaatccctgtctctactgaaaacacaaaatattagccaggcatggtggtgcatgcctgcaatcccagctacttgggaggctgatgcaggagaatcacttgaacctgggaagtggaggttgcagttagccagtagtgcgccactgcactcctgcctgggcgacagagtgagactgtctcaaaaaaaaaawatatatatatatatatatatgtgtatatatatatatatatgtgtgtatatatatatatatacatatatatatacataaattaaaaaataaagagagaacaggtttgagaaatagtagatagactcagtggaccatggtagataaactggataaggaagagaaggata

SEQ ID NO: 326518 - DNA, 468 bp, Homo sapiens
actctataatgatatgtatggatggacaatgctctttgttgctcacaaaatgtagctgaggggagatgtagttgaggggagatgtagctgaggggaagtgtagctgaggggaaaggtagttgagaggaccagatgatctgactcagttttcactgaaaatgtgagtcatgctttcattctggtacattgaagaaactggaatgaggaggagacacacattcaaagggagttcaaagggaaaggataaatgtcgtgctttgtgatccctggggatctccactcagrggatgtttgcttgaggaaggggaccccttgctatgggttggcagctgtgggaggcctgtgcacctgtggtgactgacatgcctgggaaggccatgacagtttttattcatggggacccagccttaagcacatgcctcatgaccaaatgagctctgtcttcttttccattttgttttattgccc

SEQ ID NO: 326519 - DNA, 457 bp, Homo sapiens
ctcaaggctgccccttctaggctgctgcaggtaggctcctaaccaagggtggtgatggagacggatggaatggaggcctgatgctttcttctttccagataatcttgtggcagcatcacagcctcctgccaaagattcccctcctttctgcatttttcctctatttcttctcagtttaaaaatatttagtagaataatccagtagacaaatggccagaattctaagtcttccttctgataggtaaactstacatggattttgcttttaaatgctattacaaagttgttgctgttgtttttcacaacatgttgcatagggttcctgtgaggagttatatcctaaatcccatgtcttgtctgattgtgcaatcacatttggcaagatttgccaacaggagagcagtatctacatttaattgaaataaactaccatgttatttgtagtattctcataaca

SEQ ID NO: 326520 - DNA, 660 bp, Homo sapiens
atagcacacacagaaggtataggacataatactcaataatgataataaatgactatattactgatttatgtatttattttttattgctatttcagagcatagtcattctacttatatgttaactgtaaaacagcatcagacaagtccttcaggaggtatttcagaagaaggcattgttgtcctaggagatgagagctccatgcatgttatttaccctgaagaacttctagtcagacaaggtggaagacagtgatattgatgattctgaccctgtgtaggcctaggctaatgtgtgtgttcatgtcttagtttttaacaaaaagcttaataaataaaaataaattgcaaaagtagaaaaaagcttatagaataaaaatactaatataaagaaagaaaacatttttttacagctatacagtgtgttttaagctcagtgttacaaaactcaaaaagttaaaaaatatttaaaagcttataaagtccaaaagttattcactaaggttaatttattattcaagaaagaaaaatatgtttagcacatttagtgtagcctaaatgtgcagtgtttacaaagtccacagyagtgggcagcagtgtcctggggtttcatattcactcaccactcactcacccagagtaactttcagtcttgcaggctgc

SEQ ID NO: 326521 - DNA, 221 bp, Homo sapiens
ccacaaccttcctaaatgaatagaatttttccataggtgaagagtgttctactgacactaggaaaggtggagctcaagacgcagttaatttaatctgtttatttattgttggtgctataatatctgcctgccagggaccygagacctaggcttacttgttggcactatgatcctattgttcatctgaacttggccatggagaaagcaacagggaggttgtg

SEQ ID NO: 326522 - DNA, 221 bp, Homo sapiens
ccacaaccttcctaaatgaatagaatttttccataggtgaagagtgttctactgacactaggaaaggtggagctcaagacgcagttaatttaatctgtttatttattgttggtgctataatatctgcctgccagggacccgagacctaggcttacttgttggcactatgatcctattgttcatctgaacttggcyatggagaaagcaacagggaggttgtg

SEQ ID NO: 326523 - DNA, 221 bp, Homo sapiens
ccacaaccttcctaaatgaatagaatttttccataggtgaagagtgttctactgacactaggaaaggtggagctcaagacgcagttaatttaatctgtttatttattgttggtgctataatatctgcctgccagggacccgagacctaggcttacttgttggcactatgatcctattgttcatctgaacttggccrtggagaaagcaacagggaggttgtg

SEQ ID NO: 326524 - DNA, 596 bp, Homo sapiens
ggaccataatgagagggatgtacacccagagtaccctaggagactgatccaggggaggtcacagtcatcgtggaggttgccgagaagggaaggggaaggaggagacagtgactcttcagagtagctcagtggctgagacattctgtggatygtagggaaatcattcagccagggtcttcgaccactatggtggcatccaccccatgaattggaaggcttgcttcatttcctaggaggttgacatcagagtagtggagtgctgaagatgcaatgcctttcctcctggggaagggaacatgggaggcttcattctaaagtaaaatagcaaaacacagcatcaattttaaaatgtgcatgcccagtatatccacttttaggaattcatcatcattttgtcattgggtacaggttaaatatgtttgccatatccgtaggatggaatattatgtagccaccaaaataaagcttgtagggtgtctttaataagctacgaaaatgatcttataatatgaaatgaagatgcagggtacagaattatacataatgtatgatctctactatttaatgaaagctcactgaaagaagactgtggaagt

SEQ ID NO: 326525 - DNA, 596 bp, Homo sapiens
ggaccataatgagagggatgtacacccagagtaccctaggagactgatccaggggaggtcacagtcatcgtggaggttgccgagaagggaaggggaaggaggagacagtgactcttcagagtagctcagtggctgagacattctgtggattgtagggaaatcattcagccagggtcttcgaccactatggtggcatccaccccatgaattggaaggcttgcttcatttcctaggaggttgacatcagagtagtggagtgctgaagatgcaatgcctttcctcctggggaagggaacatgggaggcttcattctaaagtaaaatagcaaaacacagcatcaattttaaaatgtgcatgcccagtatatccacttttaggaattcatcatcattttrtcattgggtacaggttaaatatgtttgccatatccgtaggatggaatattatgtagccaccaaaataaagcttgtagggtgtctttaataagctacgaaaatgatcttataatatgaaatgaagatgcagggtacagaattatacataatgtatgatctctactatttaatgaaagctcactgaaagaagactgtggaagt

SEQ ID NO: 326526 - DNA, 596 bp, Homo sapiens
ggaccataatgagagggatgtacacccagagtaccctaggagactgatccaggggaggtcacagtcatcgtggaggttgccgagaagggaaggggaaggaggagacagtgactcttcagagtagctcagtggctgagacattctgtggattgtagggaaatcattcagccagggtcttcgaccactatggtggcatccaccccatgaattggaaggcttgcttcatttcctaggaggttgacatcagagtagtggagtgctgaagatgcaatgcctttcctcctggggaagggaacatgggaggcttcattctaaagtaaaatagcaaaacacagcatcaattttaaaatgtgcatgcccagtatatccacttttaggaattcatcatcattttgtcattgggtacaggttaaatatgtttgccatatycgtaggatggaatattatgtagccaccaaaataaagcttgtagggtgtctttaataagctacgaaaatgatcttataatatgaaatgaagatgcagggtacagaattatacataatgtatgatctctactatttaatgaaagctcactgaaagaagactgtggaagt

SEQ ID NO: 326527 - DNA, 547 bp, Homo sapiens
catggccaactctgatgcataactcctcaytcattcagtaagcatgctgtgagccccaccatctgctggaaccaatcttttctcacagagaccgtgatacagggggattacagacaggcaacccatggctgaactgtgcattccttctggggtcctgtcttcttcttcccctctggcttatgcgcaggaccaaggtggatcttgaagggcaattgaagaagtgtagttgtgggcctggtagctcagaaagcagagcatgtttaccctgggtttggagtctgtgttcgttttctatgctgccataacaaagtaccaaacactgggtggcttaacccaacagaaatgttttgtgccacagccctgaaggctagaagtctgaaatcaagctattggcagggtcatgctgcctctgatggctaaaggggaggatctttcctcgtctgttctaacttctggtgattggaagcagtctttggctttccttggcttgcagatgtatcactccagccacatggccattatctccctgtgtgttttcacatcatct

SEQ ID NO: 326528 - DNA, 547 bp, Homo sapiens
catggccaactctgatgcataactcctcactcattyagtaagcatgctgtgagccccaccatctgctggaaccaatcttttctcacagagaccgtgatacagggggattacagacaggcaacccatggctgaactgtgcattccttctggggtcctgtcttcttcttcccctctggcttatgcgcaggaccaaggtggatcttgaagggcaattgaagaagtgtagttgtgggcctggtagctcagaaagcagagcatgtttaccctgggtttggagtctgtgttcgttttctatgctgccataacaaagtaccaaacactgggtggcttaacccaacagaaatgttttgtgccacagccctgaaggctagaagtctgaaatcaagctattggcagggtcatgctgcctctgatggctaaaggggaggatctttcctcgtctgttctaacttctggtgattggaagcagtctttggctttccttggcttgcagatgtatcactccagccacatggccattatctccctgtgtgttttcacatcatct

SEQ ID NO: 326529 - DNA, 609 bp, Homo sapiens
cctgtcagcatgatttgcaccaattctatgtgaatattaagtcttcctctggttaattgaggaggctgcaatattcagcccctatatcttgagtgctcattgacactcaaaaacctcaaatacgtttaattgtttgggcctatgtgtagcttctgtttctgaaacttaactttaacccgctgaatggagtcttgggcttctgggaaactccatgcctgctagattcctccttacaggaggtggctgcttacagagatgttgttgacagagrtaatcggacatggtaaacggccattatatttgtatgggacttctttaactctccaaggtgtttcaatgtctattattttcctaaaggacaagtaagagttaaccaaggtaggatctaggtaatgatcatggaggggtctgactaatgtatcacctgagagctgtgggcaaatgagatcccttccttgtttaataagattctctactcctgcttgacagtgggaaaacaatttatccagatcttgtaactgggtccagggcagtatttcttgagacatagggtttaaaatgctctcttggcaaatattaaaaatttagatattacaaagtcagtcatca

SEQ ID NO: 326530 - DNA, 609 bp, Homo sapiens
cctgtcagcatgatttgcaccaattctatgtgaatattaagtcttcctctggttaattgaggaggctgcaatattcagcccctatatcttgagtgctcattgacactcaaaaacctcaaatacgtttaattgtttgggcctatgtgtagcttctgtttctgaaacttaactttaacccgctgaatggagtcttgggcttctgggaaactccatgcctgctagattcctccttacaggaggtggctgcttacagagatgttgttgacagaggtaatcggacatggtaaacggccattatatttgtatgggacttctttaactctccaaggtgtttcaatgtctattattttcctaaaggacaagtaagagttaaccaaggtaggatctaggtaatgatcatggaggggtctgactaatgtatcacctgagagctgtgggcaaatgagatcccttccttgtttaataagattctctactcctgcttgacagtgggaaaacaatttrtccagatcttgtaactgggtccagggcagtatttcttgagacatagggtttaaaatgctctcttggcaaatattaaaaatttagatattacaaagtcagtcatca

SEQ ID NO: 326531 - DNA, 433 bp, Homo sapiens
cctctgctcataacatgctccattgtcccatcagactttattcacaaaacagaggttcaaagataaaattattaagaacttcaaggctgagcacagtggctcacacctgtaatcccagcactttgggaggccgacaggagaatggcttgaggtcaggagttcgagaccagcttggacaacataatgagacctccatctttgcaaaataaaaaacttagctggttgttggtggcacacacctgtagccccagccactcaggaggctaaaatggaaggattgcttgagctccggagtttgaggctgcagtgagctatgatcacactacygcattccagcctgggtgacaaaccaagacctcatcttaaaaaaaaaaactcaggacagagacagaagagattaaaaccaagctcaggatgcttctgagcacaggac

SEQ ID NO: 326532 - DNA, 562 bp, Homo sapiens
tgtctcattaaaagtgagtaatgggcctttgccaggcctctgcctctaatgctggtttacaacctaagatgaagaggagaatgggccctctcagggagtgtgggcccctgacagcgaggtgtacagaagcagtcctccaggtaatgaagcaggacctaggggcagacacagagacggctcccattctaatgagcttcccaattggcccttatccatcagtttctctgagcgacctttctgactccttgaagaagtacttygcatgctcataaggaaagtgcttctgaatttagagcctgctcattgaggcctaggtttcccctaccccatggcttcagatggatgtctcctggcccctccaactttccaggctctgcttgtggggtaaagaatggcagcagggagaatagaagacacaatgtggagtcaacctgacctgtctttaaccagagactcaccctcttcctaccagaggccctcagactccctccctttgaattcctccccatgaaattatggcattatcagtccttaccccattgtggggttgtgagtattcaag

SEQ ID NO: 326533 - DNA, 545 bp, Homo sapiens
cacaagactacaagtatcacgaaggatcagggacatgtggtagcaccaaagcaacacaatatactgtcagtaagtaaccaactccaaagaatagccattgaattcctgataagaatttgaactaaattgttctaaagaaactcagtgatctacaagagaacacagataaacaattaactaaatcaggaaaactttggaagaaaaataccagaagttcarcaaagaaaaaatataaaaagaaccaaacaaattttggagcttgagaatacaatgactgaattttaaaaatgcaatagagagcttcagtagctgactcaaccaagcagaagaaagaataagcaaacttaaagacaggtcatttgaagttgtccagtaagaggagaaaaaagatgaaaagaataaaaaaaatcaagaaagcctacataatgtatgcaacactatcaagagagcttatattcatgttttgggggtatttatatggctaagaaagaggtagaaagcttatttaaaggcatactggtggatatgttctcaaatatggagag

SEQ ID NO: 326534 - DNA, 576 bp, Homo sapiens
tcacccataaggatcccttcgaggcagccttgccattagaaattaggctgtgggcacagcttcaatgatacaaccatagtgtgaaagtttaaaaggttttagtacgtacagattctgggaatacatggcatgcctacaggccacacagagaacaggaagtgcaggctggtagagaaaaacagaccaatgggcctatgtttttactgagttcaaagcattaattaaacagattttccacggggagatttgtttttgtttttgttttttgagacagagtttcactcttgttgtccatgctggagttgcaatggtgcaatctaggctcaccataacctctgcctcccgggttcaagtgattcacctgcctcagcctcccgagtagmtgggattaacagcatgcgccacaacacctgattaattttgtatttttagtggagatggggtttctccatgttggtcagcctggtcttaaactcctgacctcaggtgatccgcccacctcaacctcccaaagcactgggattacaggtgtgagccaccacacccagccccatggggagttttaattgttggctt

SEQ ID NO: 326535 - DNA, 555 bp, Homo sapiens
aacaaatgggtcaaagaagaaatcaaaaggaaaatatcttgaggcaaatgaaaatgaaatcacaatatgtcaaaacttttcggatgtaggaaaggccattttaaaagggaatgwtataggaataaatagaaataaatgcctaaattttaaaagaagaaagatctcaaataaaaaacctaatgttatacgtcaaggaactagaacaagaacaaactaaaccctaaattagtaaaaggaaagaaataacaaagattagaacagaaataatggaaataaacactagaagaccgtataaaagatcaatgacaccaagtttgtttttttaaatagataaactaattgataaacctttacctaggctaagaaaaaaacagagacaagactcaaatagatgaaatcagaaatgaaagagaagacattacaactgataccactgaaataattttcaaaggatggtaagagactgctaagaacacttttataccaacaaattgtataacctaggaaaaatagataagttcctaaggacatgcaaccttccaagacagaataata

SEQ ID NO: 326536 - DNA, 555 bp, Homo sapiens
aacaaatgggtcaaagaagaaatcaaaaggaaaatatcttgaggcaaatgaaaatgaaatcacaatatgtcaaaacttttcggatgtaggaaaggccattttaaaagggaatgatataggaataaatagaaataaatgcctaaattttaaaagaagaaagatctcaaataaaaaacctaatgttatacgtcaaggaactagaacaagaacaaactaaaccctaaattagtaaaaggaaagaaataacaaagattagaacagaaataatggaaataaacactagaagaccgtataaaagatcaatgacaccaagtttgtttttttaaatagataaactaattgataaacctttacctaggctaagaaaaaaacagagacaagactcaaatagatgaaatcagaaatgaaagagaagacattacaactgataccactgaaataattttcaaaggatgrtaagagactgctaagaacacttttataccaacaaattgtataacctaggaaaaatagataagttcctaaggacatgcaaccttccaagacagaataata

SEQ ID NO: 326537 - DNA, 615 bp, Homo sapiens
cccaaggttatgtagagaggtggaaccacagctagaatcaggcctcctgactcagagccccacatgctacctcatctccccatggacctgggtctgtccctgagctgcacagtctgcctactccctcttccactgacagttctttgaaattttgcagcaggccagaatgtctccctgcagggagtcagcagaggatacagcttcagagtgcaggctccraagccagaaagacccaggttcaaatccagttccatttgactcaaggacattggataagtcagtgaacctctcagaaccctcagatgtggcatctgcaaaatgaggttaatagcagtacctatcgcagagggttgtcacaaggcagaactgtgtctgaaaggtaggaatgcctaaattaattctagcaatgaggaaagtgaaggcagaggagagcaagtagaagtgactaaagtgcttttgggagtctggccagcctgtcagcattatttgctgtctgtgtgaccttaggcaggtcatttgatatctcagcctcaattgtctccatggtaaaattaccctgctaatcccttcctcagatggatgctgtgcaggttgataacatgtgtaagaggcctg

SEQ ID NO: 326538 - DNA, 531 bp, Homo sapiens
gaggtggacagagttaagaccagtgtcagaggctaggagtcagtaggggctttgtctttctctagcccttcctgatagctccctgaactagcctgccaacccccacctctcacccctactccaagaaaacctaccctgagacaaaggcttgcatgcaggtttattgcaagagataggattgggtgactgagtagagtaaaacaaggaaagaggaaaagccaatacaaaagggcatcctggaggtggtcattgctgtgggcaagtggagctcggtttccctgggctttttggaggagccatgtggaacaattctgtccartagaactttctgcaatgttgggaatgttctctgtgctgttcaatattctgtctactagctacatgtgactagtaggtacttgaaatgtgggtcctttattatattaattttaattatttaaatactcatatatacccatatggaccactgaaacagacagctcatgtgtagactgggctttcaagttgtctattggggagttggaagatggt

SEQ ID NO: 326539 - DNA, 584 bp, Homo sapiens
atatacacttgccaaaattggtcaaaaatgtatactttaaatatgtgcagtttcttctacttcaattatacctcactaaagttgtaaaacaaaattttaaaggttggccagttaatgtaatggaataccataagaatagggaagttgagaaaaaaacatagttttttttcctaaggaaaatggaatacttggtatatgtaaattcacataattctctaaaacagcctagtgatgtaggtattgaattgccattttacaaattctgaacagaggctcagagatattcagtgacttacccagggtcacacagcttctgagtgatgggcagagccagcattctaagataggtctatccgatccccaaatcattgagccatttattttgtgtctctcaaaaatcaatgctctatctgaaagcatgccccagtgctcaggagagagagataaactgatgagccaaataacacttcaaaatctcagaagactaagttgctcatctttcaaaatggktttgggttgggaaaggattctaccatatgcttatcaggataactttagctcaacatttttaactcaaccaactg

SEQ ID NO: 326540 - DNA, 523 bp, Homo sapiens
actgaccttccacatgtatacctattgttatgtttgaatgtctgattattaacatgttttatatatcataaatataagtaaaaaatttatgaaagaaagtagggtgggaagaaaagtggaaggaaagaagaacagacagaaggaagaaagacctgaagagaataagtgtccgctctgggttatatgccaggatgagtgtgctgccatctcccctcccagacattcctttcacactgatgccctgggatcctctcrgatatccagctgttccaagaggattctattgcaatcactaaacaccatttcccaggtgttttagaaagagtcttcagcagtgctacttgagaaaaagtgcagctaattgagacacttttattccctcagtattttagcagaattcagattcccaagtccaagacatcatttctgtggtttgtatattggcttgaggaaatgctgatcaattgttttgattttccttcttctcactatgcccagttagcatctcctgcttcccaccaac

SEQ ID NO: 326541 - DNA, 523 bp, Homo sapiens
actgaccttccacatgtatacctattgttatgtttgaatgtctgattattaacatgttttatatatcataaatataagtaaaaaatttatgaaagaaagtagggtgggaagaaaagtggaaggaaagaagaacagacagaaggaagaaagacctgaagagaataagtgtccgctctgggttatatgccaggatgagtgtgctgccatctcccctcccagacattcctttcacactgatgccctgggatcctctcagatatccagctgttccaagaggattctattgcaatcactmaacaccatttcccaggtgttttagaaagagtcttcagcagtgctacttgagaaaaagtgcagctaattgagacacttttattccctcagtattttagcagaattcagattcccaagtccaagacatcatttctgtggtttgtatattggcttgaggaaatgctgatcaattgttttgattttccttcttctcactatgcccagttagcatctcctgcttcccaccaac

SEQ ID NO: 326542 - DNA, 546 bp, Homo sapiens
agctatgcatgatagtttgcttctccctggaggacatagctgtcacacacacacagagacacacacacacacacacacacacacacacwctctctctctctctctctgtctctctttctctctctctctctatggtgatactctctctcttcctcctgttccctctttagtactaatcactgtgtagcctccactccgtgctgaggatcctgtacgtggattcaagctgtcaccacacaagacagggccagaaagggctccatttgtatattattatttatctaatatatattatataatagcctgttcatgctcatttccaacaaggagcaaaattagaaatcacatctcttaatactttcagaaactgaatacaggtccctttaaactccattcccattagatagtgtcttcgaaacaccttaagttgctgtgtgtatagtgtggtgggggtaaaggcatttcaaatcccttatctccaaaaggaaagcaagctcttccttcttttccctttacatcacctcagcaaggtcagacacatcgtga

SEQ ID NO: 326543 - DNA, 546 bp, Homo sapiens
agctatgcatgatagtttgcttctccctggaggacatagctgtcacacacacacagagacacacacacacacacacacacacacacacactctctctctctctctctgtctctctttctctctctctctctatggtgatactctctctcttcctcctgttccctctttagtactaatcactgtgtagcctccactccgtgctgaggatcctgtacgtggattcaagctgtcaccacacaagacagggccagaaagggctccatttgtatattattatttatctaatatatattatataatagcctgttcatgctcatttccaacaaggagcaaaattagaaatcacatctcttaatactttcagaaactgaatacaggtccctttaaactccattcccattagatagtgtcttcgaaacaccttaagttgctgtgtgtatagtgtggtgggggtaaaggcatttcaaatcccttatctccaaaaggaaagcaagctcttccttcttttscctttacatcacctcagcaaggtcagacacatcgtga

SEQ ID NO: 326544 - DNA, 613 bp, Homo sapiens
ttctattttaaaaatagtaagaggctacttactgaattcaggctaatatcaccagatttgcatygcccaggattgggaacagtgaaaatatctagtaaaagctgtttgaacgaatagatgatgcattagtgtgtgaattaataataataataacagctaaggtttattatccttttttttttttttttttttttttttttttttttttgagacagagtctctctttgctgcctaggctggagtgcagtggcctgatcttggctcactgcaacctctgcctcctgggttcaagctattctcctgcctcagcctccctagtagctgggattacaggtgtgtgccactatgcctggctaattttttttttttttttttaagtagagatggggtttcaccatgttggccaggctgttcttgaaatcctgacttcaagtgacctgcctgcctcccaaagtgctgtgatgacaggcgtgagccaccgcgcccggccagatttatgatacttattatgtttaaggcactattctgagagttttatatgcaataactcatgtaatcatcatgacaacaccatgagataagtgctattttcatcatctccattttcctgagg

SEQ ID NO: 326545 - DNA, 549 bp, Homo sapiens
ttcagtggagtgcagtgtcattttgaattctatgacaaattactgctgagagaggccaaaagcagaatagagctgagagtgcctagaggaggtggcagttgcggtcactgctttggaagactcacaaatgggtaataaagttgtagcaaaggggcataatgattccaagagtgaaatgaygcagagcttgacagtgaagcttttacagcttcccagtgcatctataccagctactgagaggctatttctatactcacaaagtgaagtgtgtcatgggtaaaaagtccagacatcataatgactttgtgacacaaagcgcagtgcactgatctccaaatcatagcaaatgcacaggcaaatttttctgccattgcctcaggcctttgggaaggtgacatctgccagtttgggaatattgagggcaggtcaaagtggaaaaaacaggaacaggccccactttttggcgttgtcccctttgacctgccccagtaccagttcctctggtagccacaaggccaaaggactagagtgggtagtatacagtggttc

SEQ ID NO: 326546 - DNA, 580 bp, Homo sapiens
aaaaacatacctcatgctgggttgattttctctaatgatctgatccatgccgcttttttgggtgggaagttattacaaccataaatatttgtaattctttctctgatgtattatatttgttaacagcgccacagggtagatgctgcgcttgagaacataagcacattgaatggtggggactaaagaaagaaagccaggaaacggaggggttctgtccttgagcaggcctccccagcagtggcttcccagcagtggsttcccacagcagtgggcttccggggttcttcctgagcactggagtagggggctttacggagggcgttctggaccactggtcagggaacttggattctagttcagcctctgatgccagctggcattgtgcttttggacagaacagttagaagtctggacccgtctcctcttccacaggttatacaagggaagataaaataagttagtatgcaaagagattttataaagcagtaagctccacacatgcacatctcaacaaagggtttgtaagctaagcaagctacccacttcctcttcagcctcatagataaaatgattggcattc

SEQ ID NO: 326547 - DNA, 535 bp, Homo sapiens
ctgcatgtatatttatatctttctattccatccaaatcaatgtgaagaagcagctcagactgtatgtgaaaatccttacgtctcatgcatttttaccrgatttgttgaaacaagtgagagatgagggagaggacttctttgcactgagaacaggttatataaactaaaagtgatattgccatgatggtgaccacagaaatgtgggttaggggactcttcagggattgcaaatgtaacacaaaattgtggaagatttgggaaaccacagttaatatctatgacaaattaaagaggattggcatgcatccttattaagagaagatttgttttgattacaaagagattaaagttctttttaaatttttatttaaatttttggtagagacaaggtctcactatattactcaggctggccttgaactcctggactcaagagatcttcccacatcagcctcccaaagtgttgggattacaggcatgagccactgcacctggacagagattaaagttctaaggatgcctccaaatcaagaag

SEQ ID NO: 326548 - DNA, 535 bp, Homo sapiens
ctgcatgtatatttatatctttctattccatccaaatcaatgtgaagaagcagctcagactgtatgtgaaaatccttacgtctcatgcatttttaccagatttgttgaaacaagtgagagatgagggagaggacttctttgcactgagaacaggttatataaactaaaagtgatattgccatgatggtgaccacagaaatgtgggttaggggactcttcagggattgcaaatgtaacacaaaattgtggaagatttgggaaaccacagttaatatctatgacaaattaaagaggattggcatgcatccttattaagagaagatttgttttgattacaaagagattaaagttctttttaaatttttatttaaatttttggtagagacaaggtctcactatattactcaggctggccttgaactcctggactcaagagatcttcccacatcagcctcccaaagtgttgrgattacaggcatgagccactgcacctggacagagattaaagttctaaggatgcctccaaatcaagaag

SEQ ID NO: 326549 - DNA, 413 bp, Homo sapiens
tattcaaagacctgtgctcctaaatatttgccctggtatgtttatactggtccaagcaagcattaggtcatagcctgttcctcttctttattttaaaagtgtttttacctttctcagcattccacaagttacttcctccttcctttsttctcctctacctttgcctcttaaaaagttctaagttgctagccattcgggacaaatacagaatgtgaagtcccgttccagccaatggaaaccagacacagcagtagggtggacgcgtcaggttataaatgaccctgtctcctttgttcagtgtactctcgtggcaaaactgctggtgagtctaccctttctgcagaaagtaaaaatggccttactatctaaattaaatttatgttcaagtgctatttctttacagcactggggaa

SEQ ID NO: 326550 - DNA, 413 bp, Homo sapiens
tattcaaagacctgtgctcctaaatatttgccctggtatgtttatactggtccaagcaagcattaggtcatagcctgttcctcttctttattttaaaagtgtttttacctttctcagcattccacaagttacttcctccttcctttcttctcctctacctttgcctcttaaaaagttctaagttgctagccattcgggacaaatacagaatgtgaagtcccgttccagccaatggaaaccagacacagcagtagggtggacgcgtcaggttataaatgaccctgtctcctttgttcagtgtactctcgtggcaaaactgctggtgagtctaccctttctgcagaaagtaaaaatggccttactayctaaattaaatttatgttcaagtgctatttctttacagcactggggaa

SEQ ID NO: 326551 - DNA, 413 bp, Homo sapiens
tattcaaagacctgtgctcctaaatatttgccctggtatgtttatactggtccaagcaagcattaggtcatagcctgttcctcttctttattttaaaagtgtttttacctttctcagcattccacaagttacttcctccttcctttcttctcctctacctttgcctcttaaaaagttctaagttgctagccattcgggacaaatacagaatgtgaagtcccgttccagccaatggaaaccagacacagcagtagggtggacgcgtcaggttataaatgaccctgtctcctttgttcagtgtactctcgtggcaaaactgctggtgagtctaccctttctgcagaaagtaaaaatggccttactatmtaaattaaatttatgttcaagtgctatttctttacagcactggggaa

SEQ ID NO: 326552 - DNA, 429 bp, Homo sapiens
aacagctgtgtgatctgggcaagtcaaccatcatgaacctcagattcctcatctgtcaagtgaatgtaactgcaaagcctacctcttagtgtttttgtggggattaagtgaaatgagtaccatgcacttgataartgtcagttttcttgccactcatctttaaaatactgtaggatctgaataattcagtgtagcataatttctaactagttgtcagatatacttagcgataggtacatttgtttaatgaaaatgtacttagaaacctaatattaaattagccaaaagctgagctgtggggttgggaaacctggagccctagcacctcaggccagttttccttcaatcccagccctctgagggcatcccagaagcccatgggaatcacaagaagatggtttgttagttgttctggattatcctgatgct

SEQ ID NO: 326553 - DNA, 585 bp, Homo sapiens
gtaattacagggatttaatttgctaatcacttactcttagaatctcaaagctagaagggcccttccatcatagtggttttcaaatctgactgtgcatccatgtcacctggggagcttaaaaagctaccaatttccaggccataaactcgacctactaaatgagatccctggggctgagaaccaggaatctttgcatccaacctggtggtgtgctacctcagaaccatgggggccttgaaacagaggcttagatgttgtgtccttagcgaaattacattcgccctgtggttccccaaggtacacatagagccacagataccactcaaatactcaaactatgcaaaaaccattacacatgacatggttaatgaacaytgttatagtggccgaactgtgcttagtcatatacccatttgttcttagtgttcttatctctagaaggttgacttagtccaagcaacaacactgccttatgcaggaaaaagagcccaggttttagaattggatgtgggtcctgacactggctccaccacacactaagtgttatttggatgtgtgactttgggcaagtcacagatatccctc

SEQ ID NO: 326554 - DNA, 585 bp, Homo sapiens
gtaattacagggatttaatttgctaatcacttactcttagaatctcaaagctagaagggcccttccatcatagtggttttcaaatctgactgtgcatccatgtcacctggggagcttaaaaagctaccaatttccaggccataaactcgacctactaaatgagatccctggggctgagaaccaggaatctttgcatccaacctggtggtgtgctacctcagaaccatgggggccttgaaacagaggcttagatgttgtgtccttagcgaaattacattcgccctgtggttccccaaggtacacatagagccacagataccactcaaatactcaaactatgcaaaaaccattacacatgacatggttaatgaacactgttatagtggcygaactgtgcttagtcatatacccatttgttcttagtgttcttatctctagaaggttgacttagtccaagcaacaacactgccttatgcaggaaaaagagcccaggttttagaattggatgtgggtcctgacactggctccaccacacactaagtgttatttggatgtgtgactttgggcaagtcacagatatccctc

SEQ ID NO: 326555 - DNA, 518 bp, Homo sapiens
tggggaaggcactcatgtgcaggctcctgaaggtgagggttaccttgaaaaggcacagcctggagtggttatagargataaagataggtgtggaatccacttctcatttactcacgagttcagtgttttaatttttatttctccacttggtgtaacacctaaatatctctaccaaagacagagatgctagtgtttggagaaaaagcaacaagtagacttatatcactactcacagtagtggcagactatttatcagaggctgataaatagtgccatccatatgctaggtattttacaacattacttcttttcttttctttttttttttgaggcagaatctccctctgtcacccaggctggagtgcagtcgtgtgatctcagcttacggcagcctccaccttctgagttcaagtgattctcctgcctcagcctcccaagtagctgggactaccggcacacaccaccacgcctggctgattgttgtattttcagtacagacagggtttcaccatgttggt

SEQ ID NO: 326556 - DNA, 518 bp, Homo sapiens
tggggaaggcactcatgtgcaggctcctgaaggtgagggttaccttgaaaaggcacagcctggagtggttatagaggataaagataggtgtggaatccacttctcatttactcacgagttcagtgttttaatttttatttctccacttggtgtaacacctaaatatctctaccaaagacagagatgctagtgtttggagaaaaagcaacaagtagacttatatcactactcacagtagtggcagaytatttatcagaggctgataaatagtgccatccatatgctaggtattttacaacattacttcttttcttttctttttttttttgaggcagaatctccctctgtcacccaggctggagtgcagtcgtgtgatctcagcttacggcagcctccaccttctgagttcaagtgattctcctgcctcagcctcccaagtagctgggactaccggcacacaccaccacgcctggctgattgttgtattttcagtacagacagggtttcaccatgttggt

SEQ ID NO: 326557 - DNA, 518 bp, Homo sapiens
tggggaaggcactcatgtgcaggctcctgaaggtgagggttaccttgaaaaggcacagcctggagtggttatagaggataaagataggtgtggaatccacttctcatttactcacgagttcagtgttttaatttttatttctccacttggtgtaacacctaaatatctctaccaaagacagagatgctagtgtttggagaaaaagcaacaagtagacttatatcactactcacagtagtggcagactatttatcagaggctgataaatagtgccatccatatgctaggtattttacaacattacttcttttcttttctttttttttttgaggcagaatctccctytgtcacccaggctggagtgcagtcgtgtgatctcagcttacggcagcctccaccttctgagttcaagtgattctcctgcctcagcctcccaagtagctgggactaccggcacacaccaccacgcctggctgattgttgtattttcagtacagacagggtttcaccatgttggt

SEQ ID NO: 326558 - DNA, 534 bp, Homo sapiens
ttccaggccaatggattcagtgcttcggctgtatctcatgccttgacactagatgtcagcgaagggtaattgttgtctcaatttagaggccagcttaggtagctgctggcacccttggttcatgttttatagcaaakgtgaagtatggctccgttcccgttgcacacatatattacaataaaagggggtatcggcgcctagtgtttttaaaggctagtcataaaagatgaataacgaggcagtttaaagctaaaagacagctgccaagttcaatggccatgatggatgccaaatacccagtgtagagaaaacccgttcctctgacaccaccatccaaaaaattaattaccacaattcagcatctttaaatgtgccacttaatatactgctaccataattaaatttccagccctgtgaccttgaaaccatttcctgagataataaatgagatcaaggtttaatcgatgcagatgcaagtagaaactgtccaaggatgcaaagagccattgcgctctgagtcgaggttggtggggg

SEQ ID NO: 326559 - DNA, 551 bp, Homo sapiens
agcctccacccataatatgccagcagataccacctcctaccccgagctgtggccaaaaatgtctccagacaatgtcaaatgtaccctagggagacaaaatcacccctggttgacaaccataatcagggagaatgtacctttgacttgaagatcttgtttggtagagatacaagtaatttatgcccagtagaagagaaatgcccwaatattatgattggcagccccagctcatgtcagcccagagagaaaagtcgatcatgctagattataattttcacagaagtttaaaacttgactctttactaatatgcattgaagatgtcaaaaacttactcaacttactaattaatgagggaagaagtaagatagtaaagctgattcaaagggcaccttgagaaacgaaatatttgtagacatttataaaagaatgttggaataaagttcctagcttagacatagaactggctaatgccttatagggccatataaaatcgtaacatttgagcccttctcttctaccggatatacattatttgtatctctaccaaaca

SEQ ID NO: 326560 - DNA, 551 bp, Homo sapiens
agcctccacccataatatgccagcagataccacctcctaccccgagctgtggccaaaaatgtctccagacaatgtcaaatgtaccctagggagacaaaatcacccctggttgacaaccataatcagggagaatgtacctttgacttgaagatcttgtttggtagagatacaagtaatttatgcccagtagaagagaaatgcccaaatattatgattggcagccccagctcatgtcagcccagagagaaaagtcgatcatgctarattataattttcacagaagtttaaaacttgactctttactaatatgcattgaagatgtcaaaaacttactcaacttactaattaatgagggaagaagtaagatagtaaagctgattcaaagggcaccttgagaaacgaaatatttgtagacatttataaaagaatgttggaataaagttcctagcttagacatagaactggctaatgccttatagggccatataaaatcgtaacatttgagcccttctcttctaccggatatacattatttgtatctctaccaaaca

SEQ ID NO: 326561 - DNA, 569 bp, Homo sapiens
ataaaagacggtgtttaactttttttgagttatatttgtatggaaatgttattaacatatgtcttctaaaactgagatgcctagaaatcttttatttcttggtatatgttataggtcatacttctgattatgttaaattgttataggccacaaaaataaccaaatatccttgtcaattatgttataacgagctctcatcagatctttaaacatggtcattttaaatcggcatgtccacaattactttattctgatgcttttattcctgaaagccctttacaaatcctaaagtgttatgtcttcagaagatatgtaaaaagaacaaaaagaactctgacaaataacagctttctagtaattttgagttcataccattggcctgaacttccagaactctagtaaaatctggactcaaaaatgctaacataacattaagcaagataagaattaattacatgggactgaactaaggaaagattatgattttttgactttttatttraaatattgctgattgtttttatgtgttttttcttttaagctatctatagcttacagcaatgtgaagt

SEQ ID NO: 326562 - DNA, 513 bp, Homo sapiens
ctgttaaatatgacatgtgcaagtgaacttttcacaccagacctaggaacttcttcaggtccttaaatgtttcaaaaactatacacctaatttctgtttcrtgattagtttatttcctttttgctaattatattattttaaatatacttcataatctgaaccatttgtgttaagagcagctattccagaaagtaaatagaaaagactgctgctctttgacacagggagttttgaaaagcaagagaaagatatgtagaaagtaaccccctccatttccctgtttgagtcggatttgttttatatattttgcatttccaaagaaatagctaatcaatcaatcactgaaaaaatgtagagaatacaaaaaagcacatggaagaaaaacgttctctgtaacactacctgatggtgttataacttttttttgcaaaaatgtatgtatatgtagacattagtaaatgtatttttgagtttactactcttaagccttaaaaaaaaaaaaaaaaaaagagt

SEQ ID NO: 326563 - DNA, 592 bp, Homo sapiens
tgtttctatagccataatagctcatcaaaggcagtttccgatgtttctccccgctaagcataactttgtcaccagcactgattctacaggycacctttttctattacagtttgaaggatactgcagccacacttctctatcttccattcttttattggtattattattattttaaagacaggggacttgctctgtcacccaagctggactggagtgacgcaaccatagctcactgtaactttgaactcctgggctcaagtgatctcctgcttcagcctcccaagtggctggaactacaggcacatgccaccacactggctctcattctctttcattctgatgtctcctctatgcatctcaaatgttgcctctcttcccacattcaacttcccctcagaggaagaatatgataaggtcatttagtccctattctatatggagagtccctattaggtgtctttttcctcaggtacctaatcctcactcattcatcctggccaaggtcaaaactcataatccacaatccataaagaacttcccatttttctcaaaaggggagagagggaagaaccagaaagattaacagaagcat

SEQ ID NO: 326564 - DNA, 592 bp, Homo sapiens
tgtttctatagccataatagctcatcaaaggcagtttccgatgtttctccccgctaagcataactttgtcaccagcactgattctacaggtcacctttttctattacagtttgaaggatactrcagccacacttctctatcttccattcttttattggtattattattattttaaagacaggggacttgctctgtcacccaagctggactggagtgacgcaaccatagctcactgtaactttgaactcctgggctcaagtgatctcctgcttcagcctcccaagtggctggaactacaggcacatgccaccacactggctctcattctctttcattctgatgtctcctctatgcatctcaaatgttgcctctcttcccacattcaacttcccctcagaggaagaatatgataaggtcatttagtccctattctatatggagagtccctattaggtgtctttttcctcaggtacctaatcctcactcattcatcctggccaaggtcaaaactcataatccacaatccataaagaacttcccatttttctcaaaaggggagagagggaagaaccagaaagattaacagaagcat

SEQ ID NO: 326565 - DNA, 554 bp, Homo sapiens
gacatttggagcccattgatgcctatggggcaaaactgattctgcccagatgaaatccagaaataagctatctgtgaaagaaatttgtggtgggtggattcatcttttaaatttttcttttaatctagcaggttggaaacaatctttttgtagaatctgtgaagggacatttgggagcccattgaggtatatggggaaaaatccaatatcctaatatagaaactggaaagaagatatctgtgaaactgctttgtgatgtgtgaattcatctcacaaagttaatcctgcctgttgattaagtaggtggacaacaccctttttggaatatctgggaagggacaatttttagarcatttgcatgtatggggaaaaagagaataaagaagataaaaactaaaaagatgctatctttgaaattgctttgtgatgtgcagattcatctaacggagttcagtctttcttttgattcagcatgtgggaaacactcttttgtagaatctcccaagggtcatttgggagtttatagaggcctatggggagaaactgaatatctc

SEQ ID NO: 326566 - DNA, 483 bp, Homo sapiens
aacctttctcttgtttcagctgtttggaaacactgcctttgtacgttctgcaaatggatatttccgatctctttgaggcctatggtgaaaaagaaaatatcttcagataaaaattagaaagaagctttctgagtaactgttttgtgatgtgtgtcttcatctcaaagagttaaacctttcttttgattcagcagtttggaaacacagtttttgtagaatcttcaaagggagactttagaactcattaaggcctactgcaaataagtgaatatccccagataaaaactacaaggaagcactctctgaaactgctctgtgatgtgtgcattcaacctatcttttgattcagcggtttggtaacgctgttgttttagaatctccaaaggaacatatgggagctcattgaggccaatggtgaaaaagcaaatatcytaagattaaaactaaaaagaagctatctcagacactgctttggatgtgtgc

SEQ ID NO: 326567 - DNA, 554 bp, Homo sapiens
gacatttggagcccattgatgcctatggggcaaaactgattctgcccagatgaaatccagaaataagctatctgtgaaagaaatttgtggtgggtggattcatcttttaaatttttcttttaatctagcaggttggaaacaatctttttgtagaatctgtgaagggacatttgggagcccattgaggtatatggggaaaaatccaatatcctaatatagaaactggaaagaagatatctgtgaaactgctttgtgatgtgtgaattcatctcacaaagttaatcctgcctgttgattaagtaggtggacaacaccctttttggaatatctgggaagggacaatttttagagcatttrcatgtatggggaaaaagagaataaagaagataaaaactaaaaagatgctatctttgaaattgctttgtgatgtgcagattcatctaacggagttcagtctttcttttgattcagcatgtgggaaacactcttttgtagaatctcccaagggtcatttgggagtttatagaggcctatggggagaaactgaatatctc

SEQ ID NO: 326568 - DNA, 563 bp, Homo sapiens
tgtgccatgcagattcatctcatggaattaaaactttcttttgattcagcaggttagaaatactctttttgtagaatttgtgaatggacatttgggagcccatttaggtatgcaaatgaaaactgaatatctacagataaaaactagaaagaagctctctgagaaactgctttgtgatgtgtggactcatctcacagaattaaacctttcttttgactcagcaggacggaaacactctttttagagaatctgagaagggacrcttgggagcccattgtggcctatgggtaaaaataaataatccaaaataaaaactagaaagaagctatctgtgcaactgcttttcattgtttgggtgcatctcacagagttaaacatgtcttttgatacagaaggttggaaacactctttttgaagaatctgagaatggacattttggaaccctttgagtcctatggggaagaactaactatccccagataaaaactggaaagaagctgtctgtgaaactgctttgtggtgtgtggagtgttcaaactttcttctgattcagcaggttgaaa

SEQ ID NO: 326569 - DNA, 563 bp, Homo sapiens
tgtgccatgcagattcatctcatggaattaaaactttcttttgattcagcaggttagaaatactctttttgtagaatttgtgaatggacatttgggagcccatttaggtatgcaaatgaaaactgaatatctacagataaaaactagaaagaagctctctgagaaactgctttgtgatgtgtggactcatctcacagaattaaacctttcttttgactcagcaggacggaaacactctttttagagaatctgagaagggacgcttgggagcccattgtggcctatgggtaaaaataaataatccaaaataaaaactagaaagaagctatctgtgcaactgcttttcattgtttgggtgcatctcacagagttaaacatgtcttttgatacagaaggttggaaacactctttttgaagaatctgagaatggacattttggaaccctttgagtcctatggggaagaactaactatcyccagataaaaactggaaagaagctgtctgtgaaactgctttgtggtgtgtggagtgttcaaactttcttctgattcagcaggttgaaa

SEQ ID NO: 326570 - DNA, 575 bp, Homo sapiens
ctgtgaaactgctttgtgatgtgtagattcatctcacagagataaacctttcttttgatccaaaacgttagaaactatttggaaagtctgtaaaaggacatttgggagcccatttaagaatgcacacatcacaaagcagtttctcagaaagcttctttcttgtttttatctgatgatattttctttttcaccagaggcttcaawgtgctcccaaacgtcctttcacggattctacaaaaaccctgtttaaacactgctgaaaaaaagaaaggattaactctgagagataaatgcacacaaaaagaagtgggttctcagatagcttccttctagtattttatttttttttttttggtgggggagatattcgctttttcaccactggccacaatgagctctgaaatatccattcacagaacgtacataagcagtgtttccaaactgctgaatcataagaaaggattaaatctgtgagaagaatgcacacaccatgaagctgtttctcagatatctccctgttttgatcttgggatattggctttttcatcattagcctcaatgagctatgaatgtcc

SEQ ID NO: 326571 - DNA, 575 bp, Homo sapiens
ctgtgaaactgctttgtgatgtgtagattcatctcacagagataaacctttcttttgatccaaaacgttagaaactatttggaaagtctgtaaaaggacatttgggagcccatttaagaatgcacacatcacaaagcagtttctcagaaagcttctttcttgtttttatctgatgatattttctttttcaccagaggcttcaaagtgctcccaaacgtcctttcacggattctacaaaaaccctgtttaaacactgctgaaaaaaagaaaggattaactctgagagataaatgcacacaaaaagaagtgggttctcagatagcttccttytagtattttatttttttttttttggtgggggagatattcgctttttcaccactggccacaatgagctctgaaatatccattcacagaacgtacataagcagtgtttccaaactgctgaatcataagaaaggattaaatctgtgagaagaatgcacacaccatgaagctgtttctcagatatctccctgttttgatcttgggatattggctttttcatcattagcctcaatgagctatgaatgtcc

SEQ ID NO: 326572 - DNA, 593 bp, Homo sapiens
tctgccattggcctcaatgagctcccaaatgtcaattcgcagaaaggacaaaaacmgtgattccaaactgctgaatccaaaggatggtttaagtctgtgagataaatgcacacatcacaaagcagtttctcagaaaggttctttctagtttttatctgaagttgtctcctttttcaccataggctcaatactctctgaaatatccccttgcagtttctaaaaaaactgtttctacactgctgaatgaaaagaaaagtttaactctgtgagatgaatgcacacatcacaaggcagtttctcagataccttccttcttgtttttagcctgggatattcacttttctgccttctgcctcagtgagatctgaaatgtccattcagagaatggccaaaagcagtgtttccaaactaatgaatccaaagaaagtttgaagtctgtgagatgaatgcccacataacatagcagtttctcaggcaccttctttctagtttttatcctgggatatttacattttcatcattggcctatatgagctcccaaatgcccatgaggaaaatggacaaacacactctttccaaactgctgaatccaa

SEQ ID NO: 326573 - DNA, 593 bp, Homo sapiens
tctgccattggcctcaatgagctcccaaatgtcaattcgcagaaaggacaaaaaccgtgattccaaactgctgaatccaaaggatggtttaagtctgtgagataaatgcacacatcacaaagcagtttctcagaaaggttctttctagtttttatctgaagttgtctcctttttcaccataggctcaatactctctgaaatatccccttgcagtttctaaaaaaactstttctacactgctgaatgaaaagaaaagtttaactctgtgagatgaatgcacacatcacaaggcagtttctcagataccttccttcttgtttttagcctgggatattcacttttctgccttctgcctcagtgagatctgaaatgtccattcagagaatggccaaaagcagtgtttccaaactaatgaatccaaagaaagtttgaagtctgtgagatgaatgcccacataacatagcagtttctcaggcaccttctttctagtttttatcctgggatatttacattttcatcattggcctatatgagctcccaaatgcccatgaggaaaatggacaaacacactctttccaaactgctgaatccaa

SEQ ID NO: 326574 - DNA, 593 bp, Homo sapiens
tctgccattggcctcaatgagctcccaaatgtcaattcgcagaaaggacaaaaaccgtgattccaaactgctgaatccaaaggatggtttaagtctgtgagataaatgcacacatcacaaagcagtttctcagaaaggttctttctagtttttatctgaagttgtctcctttttcaccataggctcaatactctctgaaatatccccttgcagtttctaaaaaaactgtttctacactgctgaatgaaaagaaaagtttaactctgtgagatgaatgcacacatcacaaggcagtttctcagataccttccttcttgtttttagcctgggatattcacttttctgcyttctgcctcagtgagatctgaaatgtccattcagagaatggccaaaagcagtgtttccaaactaatgaatccaaagaaagtttgaagtctgtgagatgaatgcccacataacatagcagtttctcaggcaccttctttctagtttttatcctgggatatttacattttcatcattggcctatatgagctcccaaatgcccatgaggaaaatggacaaacacactctttccaaactgctgaatccaa

SEQ ID NO: 326575 - DNA, 612 bp, Homo sapiens
tatgagctcccaaatgcccatgaggaaaatggacaaacacactctttccaaactgctgaatccaaataaagatttatctctgtgaaatgaatgaacacataacaaagcaatttttcagaaagcttctttgtagtttttatctgaagatgtttcctatttcaccataggtctcaatgctctccaaaatatcccctcgcagattatacaaaaactgtgtttccaaactgctgaatgaaaagaaagatttaactctttgagactaatgcacacatcaaaaaacggtttctcagttaaatttcttaagattttttctcgggatatttgcttattcaccattggcctctattaagtcccaaatgtccatttgcagaagggagaaaaaagtgtttccaaactactgaatgaaaagaaaggtttaactgtgtaagattaatgcatacatgacaaagcagtttctcaaatagcttccttctagattttatcctgggatatttgctctttcactattggcctttaatgaactcccaaatgtccctttgcagaattgagaaaaaccgtgtttcctaattgctgaatgcaatgaaaggwttaaatccataagattaatgtgca

SEQ ID NO: 326576 - DNA, 553 bp, Homo sapiens
ttgatgctaagtatatttatttttttcttatgatacgttggcttctgcctcttcatattatcatgtctcaaaggctcagaagaccttggaactttctgcaacacttctcaatcttctcattccagctctattggtgactggttcataaactccaggtccagaagcagagctggctcatgaccaagctttgctgtgtgcagcagccttctcagatgcttgctctgggcaaccactcttcagatgcagccccgcagggctctgaaaagcagagtgtgtccttcagcaccccctttcctgaagttgtagccagctctgccrggctgcctccaccactttcacggcatcagctaaccatagtgcttccattttcatcaggaggcttatgcataagcttatatttaaaatgtggtcagaaaaatgtctacaagtagatatttgagctatacgtcatgttgcactgttcaacatgaacctctaattgacccacttctaaaaaatcacctgcaatataataccgtcaataaatggatgctatttttttgtatttatattt

SEQ ID NO: 326577 - DNA, 553 bp, Homo sapiens
ttgatgctaagtatatttatttttttcttatgatacgttggcttctgcctcttcatattatcatgtctcaaaggctcagaagaccttggaactttctgcaacacttctcaatcttctcattccagctctattggtgactggttcataaactccaggtccagaagcagagctggctcatgaccaagctttgctgtgtgcagcagccttctcagatgcttgctctgggcaaccactcttcagatgcagccccgcagggctctgaaaagcagagtgtgtccttcagcaccccctttcctgaagttgtagccagctctgccgggctgcctccaccactttcasggcatcagctaaccatagtgcttccattttcatcaggaggcttatgcataagcttatatttaaaatgtggtcagaaaaatgtctacaagtagatatttgagctatacgtcatgttgcactgttcaacatgaacctctaattgacccacttctaaaaaatcacctgcaatataataccgtcaataaatggatgctatttttttgtatttatattt

SEQ ID NO: 326578 - DNA, 514 bp, Homo sapiens
gaatggacaaaaacactctttccaacctactgaatccaaagaaagttttaactctgtgaggtgaattaacacatcacaaagcagtttctctgaaagcttccttctagtttttagccaaaaatgtttcctttttaaccataggcctccatgctctgcaaaatatcctttgcagattctaaaaaacagtgtttcaaattgctgaatgaaaaggaatgtttaaatctgtgagatgaatgcatacatcacaaagcaggtttctcagatcccttccttctagtttttactcttgggtatttgcttttttttgccagagtcytcagtgtgctcccatatgtccattcacatcttggactaaaacagtgtttccaaactactgaatccaaagaaaggtttaagtctgtgagatgaatgcacacatcacaaagtagtctctcagaaaattctttctaggtttatctgaagatgtttcctttttcaccttaggcctcaatgctctcgaaatatgtgtttgcag

SEQ ID NO: 326579 - DNA, 514 bp, Homo sapiens
gaatggacaaaaacactctttccaacctactgaatccaaagaaagttttaactctgtgaggtgaattaacacatcacaaagcagtttctctgaaagcttccttctagtttttagccaaaaatgtttcctttttaaccataggcctccatgctctgcaaaatatcctttgcagattctaaaaaacagtgtttcaaattgctgaatgaaaaggaatgtttaaatctgtgagatgaatgcatacatcacaaagcaggtttctcagatcccttccttctagtttttactcttgggtatttgcttttttttgccagagtcctcagtgtgctcccatatgtccattcacatcttrgactaaaacagtgtttccaaactactgaatccaaagaaaggtttaagtctgtgagatgaatgcacacatcacaaagtagtctctcagaaaattctttctaggtttatctgaagatgtttcctttttcaccttaggcctcaatgctctcgaaatatgtgtttgcag

SEQ ID NO: 326580 - DNA, 514 bp, Homo sapiens
gaatggacaaaaacactctttccaacctactgaatccaaagaaagttttaactctgtgaggtgaattaacacatcacaaagcagtttctctgaaagcttccttctagtttttagccaaaaatgtttcctttttaaccataggcctccatgctctgcaaaatatcctttgcagattctaaaaaacagtgtttcaaattgctgaatgaaaaggaatgtttaaatctgtgagatgaatgcatacatcacaaagcaggtttctcagatcccttccttctagtttttactcttgggtatttgcttttttttgccagagtcctcagtgtgctcccatatgtccattcacatcttggactaaaacagtgtttccaaactactgaatccaaagaaaggtttaagtctgtgagatgaatgcacacatcacaaagtagtctctcagaaaattctttctagktttatctgaagatgtttcctttttcaccttaggcctcaatgctctcgaaatatgtgtttgcag

SEQ ID NO: 326581 - DNA, 405 bp, Homo sapiens
tttaagtctgtgatatgaatacactcatgactatgcagtttcccagaaagcttcttcctagtttttatctgaagatgtttcctttttcaccataggccacgaagctctctaagatatctttttgcaaattctacaaaaagagtgtctccaaaccgctgaatgaraagaaaggtttagttctgcaagatgaatgcacacaagttccttcctagtttttatctgaagatgtttccttcttcacagtactcctcagtggtctctgaaatatccctttgcagattctaaaaaaaacagtgtttccaaactgcagcatccaaagaaagatttatctctgagagatgaatgcccaaatcacaaagaagtttctcagaaagcttctttcttgtttttatttgtagacgtttc

SEQ ID NO: 326582 - DNA, 614 bp, Homo sapiens
tatccctttgcagagtctgaaaacagagtatttccaaactgctgaatgaaaagaaaggtttaactctgtgagatgaatgaacacatcaataagcagtttctcagatagcttccatctagtttttatcctgggataattgctttttcaccattgrcctcaaagaactcccaaatgtccatttgcagattggacagaaacagtttccaactggctgaatccaaagaaatgtttaacttttttagattaatgtacacatcacaaagcagtttctcagaaaacttctttctagtttttatatgaagatgtttcctttttcaccatagtcctcaatgcacactataatatcactttgaagattctacaaaaacagtgtttacaaacagctccatgaaaagaaaggtttatctctgagggatgaatgcaaatatcacaaagctgtttctgagatagctttcttgtagtttttatccttggacacttgcttttttgccattggcctcaatgagctacaaaatgtgcaattgtagaatggacaaaaacagtgtttcccaactgctgaatccaaagaaaagtttaactctgtaagatgattgcacacatcataaagcagtttc

SEQ ID NO: 326583 - DNA, 614 bp, Homo sapiens
tatccctttgcagagtctgaaaacagagtatttccaaactgctgaatgaaaagaaaggtttaactctgtgagatgaatgaacacatcaataagcagtttctcagatagcttccatctagtttttatcctgggataattgctttttcaccattggcctcaaagaactcccaaatgtccatttgcagattggacagaaacagtttccaactggctgaatccaaagaaatgtttaacttttttagattaatgtacacwtcacaaagcagtttctcagaaaacttctttctagtttttatatgaagatgtttcctttttcaccatagtcctcaatgcacactataatatcactttgaagattctacaaaaacagtgtttacaaacagctccatgaaaagaaaggtttatctctgagggatgaatgcaaatatcacaaagctgtttctgagatagctttcttgtagtttttatccttggacacttgcttttttgccattggcctcaatgagctacaaaatgtgcaattgtagaatggacaaaaacagtgtttcccaactgctgaatccaaagaaaagtttaactctgtaagatgattgcacacatcataaagcagtttc

SEQ ID NO: 326584 - DNA, 614 bp, Homo sapiens
tatccctttgcagagtctgaaaacagagtatttccaaactgctgaatgaaaagaaaggtttaactctgtgagatgaatgaacacatcaataagcagtttctcagatagcttccatctagtttttatcctgggataattgctttttcaccattggcctcaaagaactcccaaatgtccatttgcagattggacagaaacagtttccaactggctgaatccaaagaaatgtttaacttttttagattaatgtacacatcacaaagcagtttctcagaaaacttctttctagtttttatatgaagatgtttcctttttcaccatagtcctcaatgcacactataatatcactttgaagattctacaraaacagtgtttacaaacagctccatgaaaagaaaggtttatctctgagggatgaatgcaaatatcacaaagctgtttctgagatagctttcttgtagtttttatccttggacacttgcttttttgccattggcctcaatgagctacaaaatgtgcaattgtagaatggacaaaaacagtgtttcccaactgctgaatccaaagaaaagtttaactctgtaagatgattgcacacatcataaagcagtttc

SEQ ID NO: 326585 - DNA, 391 bp, Homo sapiens
tgaatgcacacctcacaaagtggtttctcttatagcgtcattctagttttagactgggatatttgcttttttgccattggcytcagtgagctccaaaatgtccattcacagaatggacaaaaacagtgcttccaaactgtggaatccaaagaaaatttgaactctgtgagataaatgcacatatgaaaaagcagtttctcagaaagcttccttctaatttttatctgaagatgtttcctttttcaccttaggtctcaatgctctccagaatatcccgttgcagaacctacaaaaacactgtttccaaacagctgaatgaaaagaaagaaagctctgattccatgagacgaatgcacacatcacaaagcagtttctcagatagcttccttct

SEQ ID NO: 326586 - DNA, 391 bp, Homo sapiens
tgaatgcacacctcacaaagtggtttctcttatagcgtcattctagttttagactgggatatttgcttttttgccattggcctcagtgagctccaaaatgtccattcacagaatggacaaaaacagtgcttccaaactgtggaatccaaagaaaakttgaactctgtgagataaatgcacatatgaaaaagcagtttctcagaaagcttccttctaatttttatctgaagatgtttcctttttcaccttaggtctcaatgctctccagaatatcccgttgcagaacctacaaaaacactgtttccaaacagctgaatgaaaagaaagaaagctctgattccatgagacgaatgcacacatcacaaagcagtttctcagatagcttccttct

SEQ ID NO: 326587 - DNA, 516 bp, Homo sapiens
gtttttatcttgggatgtatgatttttcaccacaggcctcaatgagttcccaaatgtccattggcagaatgtacataaacattatttccaaactgctgaatcaaaagaaagttttaactctatgaaatgaatgcatgcatcaaaaacatttctcagaaagrttctttctagtgtttatctgaagatatattatttttcaccataggcctcaatgcactttcaagtgtcctttcacataatgtaaaaaacagtgtttccaaattgctgaatcaaaagaaagctttaactctgtgagatgaatgcacacatcacaaagcagtttctcagaaagcttctttgtagtttttatccgaatatattttctttttcatcattggcctcagtgagctgccaactgtccattcgttgaaagtacataaacagtgtctctaaattgctgaatcaagataaggtttaactctgtgagatgaatgcacacattacagagcagtttctcagaaaggttctttttagttt

SEQ ID NO: 326588 - DNA, 549 bp, Homo sapiens
gggtacatttaactcaaagagttaacattttattttgattcagcagtttggaaataatgtttttgtacattctgtcaatgagcatttggaagttcattgaggccaatggtgaaaaagaaaatattccaagacgaaaactagcaggaagctatatgagaaactccttcgtgatgtgtggattcatctcacagagttaaaacattcattggattcagcagtttaaaaactctttttttgtagaatctgagaaaaggcatttgggagcactttgaggcctatcrtgacaaagaaaatttcttcagataaaaagtagaaagaagctttctgagaaacttctttgtgatgtgtgccttcatctcacagagttaaacctttcttttgattcagtagtttggagacacagtttttgtccattctgcaaatagacatttgggagctcactaaggccaaaggcaaaaaagcaaatatcttaggatacaaataggtaggaaactttatgtgaaacttctttgttatgtgtgcattcatcccacatagattaacctttct

SEQ ID NO: 326589 - DNA, 556 bp, Homo sapiens
gaacctgtgaagcaacatttgggagcccattgagaaatatgggaggaaaaaygaatatcctcagacaaaaactagaaagaagctatctgtggaagttctttgtgatgtgtagattcacctcacagagtcaaacctttcttttgattcagcaggttggaaaactctttttagagaatctgtgaagggacacttggagcccattgagtcctatgggaaaaaaacagaatatgcccagataaaaactagaaagagggtatctgtgaagctgctttgcgatgggtggattcatctccgaaggttaaacctttcttttgattcatcaggttggaaacactctttttcgagaaactgagaagtgacacttgggagcctttgagtactatgggaaaaaacccaatatcaccagataaaaactagaaagaagcaatctgtgaaactgccttgtgatgtgtgaattcatgtcagagagttagctctttctttttttcagcaggttggaaacactctttttagagaatctgtgaagggacatttgggagcccattgaggccaaagg

SEQ ID NO: 326590 - DNA, 512 bp, Homo sapiens
gggcattcatctcacagatttgaatcttttgattcagcagtttggagacactgtttttgtaatatctgtgaaagkacaattgggagtgcatttaggcctatggtgaaaaaaatatctttatataaaaactagaaggaagatttctgagaaactgcttgttgaaatgtccattcatcacacacaattaagcctttcttttgattccacagtttggaaacagagtttttgtaccttctgcgaatggacattcaggagctcactgaggccaatggcaaaagagagactatcccaggatagaaagtacaatgaagctttctgagaaactggtttgtgatgtgtgcattcatctggcagagataaaatttcttttgattcagcagtttggcaacactctttttgtacattctgtgaatggatatttgggagctcattgaggccaatggtgaaaaagaaagtatcccaagacaaaaattagaagaaagcaatctgtgaaaccgctttgtgatttgtgc

SEQ ID NO: 326591 - DNA, 556 bp, Homo sapiens
gaacctgtgaagcaacatttgggagcccattgagaaatatgggaggaaaaacgaatatcctcagacaaaaactagaaagaagctatctgtggaagttctttgtgatgtgtagattcacctcacagagtcaaacctttcttttgattcagcaggttggaaaactctttttagagaatctgtgaagggacacttggagcccattgagtcctatgggaaaaaaacagaatatgcccagataaaaactagaaagagggtatctgtgaagctgctttgygatgggtggattcatctccgaaggttaaacctttcttttgattcatcaggttggaaacactctttttcgagaaactgagaagtgacacttgggagcctttgagtactatgggaaaaaacccaatatcaccagataaaaactagaaagaagcaatctgtgaaactgccttgtgatgtgtgaattcatgtcagagagttagctctttctttttttcagcaggttggaaacactctttttagagaatctgtgaagggacatttgggagcccattgaggccaaagg

SEQ ID NO: 326592 - DNA, 513 bp, Homo sapiens
ttaaataaactgtatttgtagaatctgggaaaagacatttgggagaactttgaggcttatgctgaaaaagaaaataccttcagataaaaactggaaggaaacttcctgacaaactgctttgtgatatgtgcatttatctcattgagttaagtctttcttttgatacagcattttggagatgctttttttgtacattctgcaaatggacatttgggagctcactgaggccaatggcataaaagcaaatatcctatgataaaaagtagaaggaagctttctgagaaattgcttctgatgtgtgcattcatctcacagaattaaacctttcttttgattcggcaatttcaaaagactatttttgtactttctacaaatggacctttgggagttcactgaagccaatgacaaaaaagaaaatatcccaggataaaaactacaaggaagctatctgggaaactggtttgcgatgtatgcattcatctggcagasataaacctttcttttgattcagca

SEQ ID NO: 326593 - DNA, 408 bp, Homo sapiens
tggcagacataaacctttcttttgattcagcagtttggaaacactgtttttgtaatatctgcaaaaggactttttggagcgcatttaggcctatgttgaaaaataaaatatctttaaasataaaaactagaaggaagctttctgagaaactgctttgttaatgtgtccattcatctcacaaagttaaaactgtcccttgattcagcagtttggaaacactatttttgtgctttctgctaatggacatttgggagctcactgaggccaatggtgaaaaagtgaatatcccaggataaaaactagaaggaagctttctgcgaaagagctttgtgatctgtgctttcatctcatggagttaaacacttcttttgattcagcaacttggaaacactctttttctatgttctg

SEQ ID NO: 326594 - DNA, 556 bp, Homo sapiens
gaacctgtgaagcaacatttgggagcccattgagaaatatgggaggaaaaacgaatatcctcagacaaaaactagaaagaagctatctgtggaagttctttgtgatgtgtagattcacctcacagagtcaaacctttcttttgattcagcaggttggaaaactctttttagagaatctgtgaagggacacttggagcccattgagtcctatgggaaaaaaacagaatatgcccagataaaaactagaaagagggtatctgtgaagctgctttgcgatgggtggattcatctccgaaggttaaacctttcttttgattcatcaggttggaaacactctttttygagaaactgagaagtgacacttgggagcctttgagtactatgggaaaaaacccaatatcaccagataaaaactagaaagaagcaatctgtgaaactgccttgtgatgtgtgaattcatgtcagagagttagctctttctttttttcagcaggttggaaacactctttttagagaatctgtgaagggacatttgggagcccattgaggccaaagg

SEQ ID NO: 326595 - DNA, 601 bp, Homo sapiens
aaaatctgcaaagggacatttgggagtccattgatgtacatgaaaaaaaaaagaatatccccagataaaaactagaaagaaacaatctgttaaacagctttgtgaagtttggattcatctgacagagttaaatgtttcttttgattcagcaggttggaaacactctttttgtagagtctgcgatggcatatttgggagacctttgaatcctatagggaaaaatggaatatccactgatataaactagaaagaagctatctgtgaaaccactttgtgatgtatggattcatctcacggagttaagactgtattttgattaagcaggttggaaatactgtttttggagaatgtgcaaatagacgtttggaagtcagttgaggcctatggaaaaaaaatgaatatctgcagataaaaactagaaagaagttatccatgaaactgctttgttatgtgtggattcatatcacagatttaaaactttcttttgatgcagctggttggaagagctctttwtgtagaatctgcaaaaggacattttggaacccattgaggcctactgggaaaaacaaaatatcctcagagaaaaactagaaagaaatta

SEQ ID NO: 326596 - DNA, 550 bp, Homo sapiens
gattcatctcacagagtcaaaactttttgttgattcagcaggttgaaaggactgtttttagagaatctgtgtagggacatttgggagaccattgagatctatggaaagaacgaatatccccaggtgaaaactagaaagaagttatttgtgaaactgctttgtgatgtgtgsattaatctgcaatagtaaagcctttcttttcattcaggaggttggaaacagtcattttggggaatctgtgaagggacacttgggagcccattgaggcctatggggaaaaaaggaatatccccagataaaaactacaaagaagcaatctgtgaaactgctttgtgatgtgtggattcagctcagagatttaaacctttcttttgattcagcaggttgcagatcttctttttatagaatatacaaaggtcaatttaggggccctttgaggcctatggggaaaaacagattatccccagatagaaagagaagaatctaccatgaaactgcattgtgatttgtagactcacctcacagagttaagcctttcttttatgcagaa

SEQ ID NO: 326597 - DNA, 572 bp, Homo sapiens
aaaaactcaaatgaagctgtctgtggaactcttttgtgatatgtggattcatctcaaagagttaaagtattcttttgattcagtagattggaaacactttttggagaatatgtgaagggaaatttttgagcccattgtggcctaaggaaaaaaaaatggaatatctcctgaaaaaaactagacagaagttctctgtgaaactgcttgaaatatgtggattcatgtcacagagataaacgtttctcttgatgcggcaggttgaaaacactccttttgcagaatctatgaatgaacatttgggagcccattgaggtgtatggggaaaaactggatatcctaaratagaaactccaaagaatttatgtgggaaactgttgtgacgtgtggattcaggtcacagagttaaaccattcttttgattcagcaggtgggaaacactctttttggagaatctgtggatggacttttcagagcccattatcacctatggggaaaaccaaatatctccagataaaaaccagaaagaaactgttaacctgctttgtgatacatggattcatctcacagagata

SEQ ID NO: 326598 - DNA, 506 bp, Homo sapiens
aagggacattgggagcccattgtggcctatggaaaaaaacactaatattcctggataaaaactagaaagaatctatctgtgaaactgctttattatgtttggattcatctcacagagttgaacttttcctttgattcatcaggttcaaaacactctttttagaggatctatgaagtaacatttgggagcccattgaggcctatggggaaatatctaatatcccatgatagaaacttgaagaagctatctgtgaaactgaggagatttatggatttaactcagagagttaaaccattcttttgattcaactgagtagtggttgcttttttaagatgttagaccctgcattttartttagatcactatcccctaaccaccaatttttaaattatttccctaaaaatacataatgtaatgaaagtgctttacaaaaaataaaattatttgaaatcacttttgcataattatttaaaaatatattagtaaacataagcacacaggaaatc

SEQ ID NO: 326599 - DNA, 506 bp, Homo sapiens
aagggacattgggagcccattgtggcctatggaaaaaaacactaatattcctggataaaaactagaaagaatctatctgtgaaactgctttattatgtttggattcatctcacagagttgaacttttcctttgattcatcaggttcaaaacactctttttagaggatctatgaagtaacatttgggagcccattgaggcctatggggaaatatctaatatcccatgatagaaacttgaagaagctatctgtgaaactgaggagatttatggatttaactcagagagttaaaccattcttttgattcaactgagtagtggttgcttttttaagatgttagaccctgcattttagtttagatcactatcccctaaccaccaatttttaaattatttccctaaaaatacataatgtaatgaaagtgctttacaaamaataaaattatttgaaatcacttttgcataattatttaaaaatatattagtaaacataagcacacaggaaatc

SEQ ID NO: 326600 - DNA, 453 bp, Homo sapiens
ccactgacttcttccactctacttgctgcctttcattttaacccattaaaaatactaaagttgttttccttgtagaggtctttcacctccttggtttcttctattcctaaatattttgttttttcagmtactataaaaggggtgagatcttggtatgattctaacttggctgctgttggggtataacagtgctactgatttgtgtacagtaattttccctcctgaaacattgttgaattcatttatctgttctaggagctttttagaggagtctagggttttctaggtatacgatcattatcatcagcaaacagcaacagtttgacttctttaccaatctggatgccttttattgctttctcttgagtgattgctctgcctaggtcttccagtactatgttgaatagaagtggcgagagtgggcatccttgtctttttccagttctcaggggg

SEQ ID NO: 326601 - DNA, 494 bp, Homo sapiens
tcgctgccaaataaatccacacgtcaaaagcagtttcacagatggcttctttctagtttttttctggggatatttcgtgtatccctttgggsctcaatgtgctcccaaatgtcccttctcagattttccaaaaagagtgtttacaacttctgaatcaaaagaaagatttaaatctgtgagatgagtctgcacatcagaatgcagtttcacagatagcttcttcctggtttttatctggaaatattttatttttacctttaagcctcaatgggctcccaaatgtccttttgcagattcttcaaaaaggctgtttcaaacgagctgaatcaaaagaaaggtttaacactgtgagatgagtcaaacagcacaactacattttacacatagcttctttctagtttttatctgggtatattcagtttttcccccatagggctcaatggactcccaaatattcctttatagattctacaaaaagagtggtcccaaactgc

SEQ ID NO: 326602 - DNA, 622 bp, Homo sapiens
atctgggtatattcagtttttcccccatagggctcaatggactcccaaatattcctttatagattctacaaaaagagtggtcccaaactgctgcatcaaaagaaagttttacccctgtaaggtgaatccacacatcacaaagcagtttctcaaatagcttctttctagtttttatccagggataatcaatttttccccttaggcctcacagtcaccaaaatgtaccttcgaagattctccaaaaagagtgttgtaaatttactgaataaaaaggaaaccttaactctgtgagatgaatccacatatcacaaarcagtctcacagatagtttccctctagtttttatctggggatattcagtttttcaccataagccaaataagctccaaaatgccccttttcacattttccaataggagtgtttccaatctgctgaatcaaaagaaaggtttaactttgcaaaatgaatccacacatcagaaagcattttcacagatggcttccttgtgctttatatttggggatattcagtttttcctaataggccacaatgggctgtcaaatatcccttggcagattctccaaaaagagtgtttaccaaattttaaatcaaaagaaagtt

SEQ ID NO: 326603 - DNA, 576 bp, Homo sapiens
cttctttcccatttttatctgaagatatttgttttttccccatagacctcaatgggctcccaaatgtcccttcactgattacacgaaaatagtgtttctaacctgctgaattgatagaaaggttyacccttatgagacaaatccacacatcacaaagaagttttactgattgctttttttctactttttatctggggatatttctttttattcctaaacctatatgggctcccatatgccctttcacaaaatctacaaaaagagtgtttccatcattttcaatcaaaggagaggtttaactctctgagatgaatccacatatcacaaagtagtttcacagatagcttctttcaaattttcatctggggttttcagtttttttccatagccatcaacgggctcccaatttccctactgccaattctccaaaaatagtgtttccaacctggtgaatcaaaagaaaggtatagctcactgagatgaatagacgcatcataaagcagtttcacagatagtttctttctaatttttaatttggaaatattcgattttttcctgtaggcctcagggacttcg

SEQ ID NO: 326604 - DNA, 504 bp, Homo sapiens
aatctgctgaatgaaaagaaagctttaaatctgtgagatgaatacacatatcacaaagcagtttcataaatagcttctttcaagttttaatctggggatattcagatttccccataggcctcaaggaactccaaaatgtcccttttgcaggttgtccaattacagtgtttccaaactgctgaagcaaaagaaagctttaactctgtgagatgaattgacacattacatagcaatttaacagatagtttctttctagtttccatctgtggatatttagtttttccacataggtttctttgagtgccaaaatgtccccttgaagattgtccaaaaagagtgtgtccaacctctggaatcaaaagaaagatttgactctctgagatgatttacacatcasaaagcagtttcacagagatcttttttctacttttcaactgggatattcatttttttcctaaacctctacaggctcccaaatgtccctttgcagtttctataaaaaca

SEQ ID NO: 326605 - DNA, 484 bp, Homo sapiens
ggatccaaaatatcccttcacttatcctctaaataaagtgtttccaacctgctgaaacaaatgaaagatttaactatgtgagatgaatccacacattacaaagcagtttcacagatagcttctatcaagtttttatctggggatatcctgtttttccccacaggcttcaataggctcccaaatgtcccattgcagattttctwaaaagagcttttccaagctgctgaatgaaaagaaagttttatctctgtgaaatgaatgcacacatcacaaaacagtttcacacatagcttcattttagcttttatcttctgatgttcaattttccccttagttttcagtgggctcttaattgttcttttgcaaattctacaaaaagagtgtttccaacccaatgaataaaaagtaaaatttacctctgtgagaaaaattcactcatcacaaagccatttcacagataggttccttctagtttttatctgga

SEQ ID NO: 326606 - DNA, 548 bp, Homo sapiens
tctttctggtttttatctgcagacactcgggttttctccattgtcttcaatgggctctaaaatgtcccttcacagattcttcaaaaagactgtttagagcctgctgaattaaaagaatggtttaattttgtgagatgaatcaacacaacacaaaccagtttcacagaaaggttctttcagtttttatctgggaatatttgctttttctccataggtatcaatgggctctcaattgtcccttcacaagttcttcaaaaagacagtttacagcctgctgaattaaaagaaaagtttcattttgtgagatgaatcaacacrtcacaaagcagtttcacagaaagattctttcagtttttatctgtgaatattcagtttttcttcttaggcctcaatgggctgtcaaatgtgccttcacagattctacaaaaacagcgtttccaacctcctgaatcaaaagaaaggtttaactcttttgtaaaatccacacatcacaaagcagctttatagatacttcattctaatttttatctttggatattcaggttttc

SEQ ID NO: 326607 - DNA, 537 bp, Homo sapiens
tcccaattgtccctttgcagtttctccaataaaatgtttacaatctgctgattcaaaggaaaggtttaaatccatgagattaatccacacatcacaaagcagtttcacaggtaggtttaccttttttacttaaaacatcacaaagcaatttcacacagagcttctttctagtttttgtctggggatattcagtttcttcaagtaggccacaatgggttcctgaatgacccttcacagattctccaaaaagactgtttccaacctcctgagtcaaaagaaagttataactctgagatgaatgcacacatcamaaaacagttccacagataacttctttctagattttaactggggatattctgtttttccaaataggcctcactgggaacccaaaggtcccttcacagatactacaaaaagattgttttagccagctgaatcagaaaaagttttaactctatgagattaatccacacatcacaaagcagtttcacagatagcttcattctagttttttatctggagatatttggtttt

SEQ ID NO: 326608 - DNA, 537 bp, Homo sapiens
tcccaattgtccctttgcagtttctccaataaaatgtttacaatctgctgattcaaaggaaaggtttaaatccatgagattaatccacacatcacaaagcagtttcacaggtaggtttaccttttttacttaaaacatcacaaagcaatttcacacagagcttctttctagtttttgtctggggatattcagtttcttcaagtaggccacaatgggttcctgaatgacccttcacagattctccaaaaagactgtttccaacctcctgagtcaaaagaaagttataactctgagatgaatgcacacatcacaaaacagttccacagatarcttctttctagattttaactggggatattctgtttttccaaataggcctcactgggaacccaaaggtcccttcacagatactacaaaaagattgttttagccagctgaatcagaaaaagttttaactctatgagattaatccacacatcacaaagcagtttcacagatagcttcattctagttttttatctggagatatttggtttt

SEQ ID NO: 326609 - DNA, 580 bp, Homo sapiens
tcctgagtcaaaagaaagttataactctgagatgaatgcacacatcacaaaacagttccacagataacttctttctagattttaactggggatattctgtttttccaaataggcctcactgggaayccaaaggtcccttcacagatactacaaaaagattgttttagccagctgaatcagaaaaagttttaactctatgagattaatccacacatcacaaagcagtttcacagatagcttcattctagttttttatctggagatatttggtttttccccataggcctcaataggctcccaattattccttcacagattctataaagtgagtgtttccaacctgctgaataaaaagaaaggtttaactctgtgagaagaatccacacatcacaaagcaatttcacagatatattgtctgcagtttttacctggggatatttggtttttcaccgtaggcctaaataggctacaaaatgtcccttcacagattctacaaagagagtgtttccaatctgctgaatcaaaaatagttttacctctgtgagatgaattcacacatcataaagcagtttcacagata

SEQ ID NO: 326610 - DNA, 397 bp, Homo sapiens
attgtctgcagtttttacctggggatatttggtttttcaccgtaggcctaaataggctacaaaatgtcccttcacagattctacaaagagagtgtttccaatctgctgaatcaaaaatagttttacctctgtgagatgaattcacacatcataaagcagtttcacagatagcttatttctagcttttatctgrggatattcaatttttaaccacagaccccaaaggtgtcccaaatttccctttgcagatactagaaaacgagtgtttctatcctgctgaatcacagaaaagtgttaactctgtgagatgagcccactcatcccaaaacagttgcacagacagctgatttccagtttttatccagggacattcggtttttccctgcagacctcaatt

SEQ ID NO: 326611 - DNA, 397 bp, Homo sapiens
attgtctgcagtttttacctggggatatttggtttttcaccgtaggcctaaataggctacaaaatgtcccttcacagattctacaaagagagtgtttccaatctgctgaatcaaaaatagttttacctctgtgagatgaattcacacatcataaagcagtttcacagatagcttatttctagcttttatctgaggatattcaatttttaaccacagaccccaaaggtgtcccaaatttccctttgcagatactasaaaacgagtgtttctatcctgctgaatcacagaaaagtgttaactctgtgagatgagcccactcatcccaaaacagttgcacagacagctgatttccagtttttatccagggacattcggtttttccctgcagacctcaatt

SEQ ID NO: 326612 - DNA, 619 bp, Homo sapiens
tcctttttttcccttaaacctctatgggctcccaaatgtaccttcacagatcctacaaaaagtgtttccaacctgctgaatcagaagaaacatttaactctgtgagatcaatctacatatcacaaagcagtttcacagatatcttctttctagtttttctccagatattctgtttttccccrtaggcctttttgagcacttaaatgtccctttgcagattctgcaaaaagtgtgtttccaataaataaataaataaataaataaaataaaaaagaacaactgtaacaaaagaaaggtttaactctctgagatgaatccacacatcacaaagaagtttcacggataactactgtccagttttttctggggttattctgtttttcccgtaaaccactctggactcccaaatgtatctttgtagattttacaaaaagagtgtttccaacctgctgaatcaagggaaaggtttaactctttgtggtgtgtgatgtaatccacacatcacaaagcagtttcatatatccttctttttagttttcgtctggggatactaggtttttccccataagtctgcatgagctcccaaatgtcccttcacagactcttcaaaagaagtgtt

SEQ ID NO: 326613 - DNA, 619 bp, Homo sapiens
tcctttttttcccttaaacctctatgggctcccaaatgtaccttcacagatcctacaaaaagtgtttccaacctgctgaatcagaagaaacatttaactctgtgagatcaatctacatatcacaaagcagtttcacagatatcttctttctagtttttctccagatattctgtttttccccataggcctttttgagcacttaaatgtccctttgcagattctgcaaaaagtgtgtttccaataaataaataaataaataaataaaataaaaaagaacaactgtaacaaaagaaaggtttaactctctgagatgaatccacacatcacaaagaagtttcacggataactactgtcyagttttttctggggttattctgtttttcccgtaaaccactctggactcccaaatgtatctttgtagattttacaaaaagagtgtttccaacctgctgaatcaagggaaaggtttaactctttgtggtgtgtgatgtaatccacacatcacaaagcagtttcatatatccttctttttagttttcgtctggggatactaggtttttccccataagtctgcatgagctcccaaatgtcccttcacagactcttcaaaagaagtgtt

SEQ ID NO: 326614 - DNA, 619 bp, Homo sapiens
tcctttttttcccttaaacctctatgggctcccaaatgtaccttcacagatcctacaaaaagtgtttccaacctgctgaatcagaagaaacatttaactctgtgagatcaatctacatatcacaaagcagtttcacagatatcttctttctagtttttctccagatattctgtttttccccataggcctttttgagcacttaaatgtccctttgcagattctgcaaaaagtgtgtttccaataaataaataaataaataaataaaataaaaaagaacaactgtaacaaaagaaaggtttaactctctgagatgaatccacacatcacaaagaagtttcacggataactactgtccagttttttctggggttattctgtttttcccgtaaaccactctggactcccaaatgtatctttgtagattttacaaaaagagtgtttccaacctgctgaatcaagggaaaggtttaactctttgtggtgtgtgatgtaatccacacatcacaaagcagtttcatatatccttctttttagttttcrtctggggatactaggtttttccccataagtctgcatgagctcccaaatgtcccttcacagactcttcaaaagaagtgtt

SEQ ID NO: 326615 - DNA, 335 bp, Homo sapiens
gatttaccaccatagcaattaccgcaatcatagcctccatactgaatgaatcccactgtttstacgttaatttattttagcctagcagttacgttattagaagctgagaagggggtgtttgttaaaataactgggcagaataaaggcggatttaagatatgagcttaacaaagtttagcaggtataagcagtaggcaaagtgagagaattaaaaatgagtaaattatttagcttagtgttctgcctcttcagcataatgtctggggcctgtgttgcttgtggaaggtgcgttgttgaggctgtagttcctgtagggtcttttttaggctggcttg

SEQ ID NO: 326616 - DNA, 293 bp, Homo sapiens
agattctccaaaaagagtgtttccagcctgctgaatcaaaagataggtttaatactgtgagacgaatccacacatagcaaagcagtttcacagataacttcattctactttttactggggatattcacttttcacattaggctacaatgggagaccacatgtcccttaaaagattctcctaaaagagtttttccaacktgctaaatgaaaagaaaacttcaacaagttgattcaacttgttgaatcaacaagttgaattcaacttgtgagatgaatccaaacattgcaaagca

SEQ ID NO: 326617 - DNA, 499 bp, Homo sapiens
gctgaatcaaaagaaaggtttaamtctgtgaggtgaattcacacatgacaaagcagtttcacaattagcggctttctggtttttatcaggggatattcagttttttccataagcctcaatgggcttccaaatgtccccttgaaaattttctacaaagaatgtttcccagctactgaataaaacgaaatatttaactctgtgagacatatccacacatcacaaagaagtttcacagataccttctttctagtttttatctggagatatttggtttttcactgtaggtctcaacaagctcccaaatatccgtggccacattctacaaaaagaggttttgcaactggctgaatcaaaagaaaaggttgtctctttgagatgaatccacacgtctgaaagcagtttcaaacgaggtttctttctagtttttatctgggcatatgttgtttttccacataggcctcaaagggctcccaaatgtcccttcatagaatctccaaaa

SEQ ID NO: 326618 - DNA, 499 bp, Homo sapiens
gctgaatcaaaagaaaggtttaaatctgtgaggtgaattcacacatgacaaagcagtttcacarttagcggctttctggtttttatcaggggatattcagttttttccataagcctcaatgggcttccaaatgtccccttgaaaattttctacaaagaatgtttcccagctactgaataaaacgaaatatttaactctgtgagacatatccacacatcacaaagaagtttcacagataccttctttctagtttttatctggagatatttggtttttcactgtaggtctcaacaagctcccaaatatccgtggccacattctacaaaaagaggttttgcaactggctgaatcaaaagaaaaggttgtctctttgagatgaatccacacgtctgaaagcagtttcaaacgaggtttctttctagtttttatctgggcatatgttgtttttccacataggcctcaaagggctcccaaatgtcccttcatagaatctccaaaa

SEQ ID NO: 326619 - DNA, 581 bp, Homo sapiens
ccctttgcagattctccaaaagtgtgtttccaacctactgaatcaaaataaaaggtttcactctgtgaaaggaatccacacatctcaaagcagtttcacagatagtttctttctagtttttatctttgaatatttggttttgccctttaggcatccatgcactcccaaatatttattagaagattctccaaaaagagtctctccaacctgctgattcaamagaattgttcaactctgtgagatgaatccacatatcacaaagcactttcacagataacttcattttagttttcatctggggatattccatttttccccataggcctctctgggctcccaaatgtccatttgaagattttgccaaaaagagtgtttccaacctgctgaatcaaaagaaaaatgtaactctgtgagatgaatccacacatcacaaagcggtttcacaaatagcttctttctagtttttatctggagatatttgttttttccctgtagtccacaatgagctccggaatgtccattcactgattcaacaaaaataatgtttccaacctgctgaatgaaaagaaagttttaactct

SEQ ID NO: 326620 - DNA, 581 bp, Homo sapiens
ccctttgcagattctccaaaagtgtgtttccaacctactgaatcaaaataaaaggtttcactctgtgaaaggaatccacacatctcaaagcagtttcacagatagtttctttctagtttttatctttgaatatttggttttgccctttaggcatccatgcactcccaaatatttattagaagattctccaaaaagagtctctccaacctgctgattcaacagaattgttcaactctgtgagatgaatccacatatcacaaagcactttcacagataacttcattttagttttcatctggggatattccatttttccccataggcytctctgggctcccaaatgtccatttgaagattttgccaaaaagagtgtttccaacctgctgaatcaaaagaaaaatgtaactctgtgagatgaatccacacatcacaaagcggtttcacaaatagcttctttctagtttttatctggagatatttgttttttccctgtagtccacaatgagctccggaatgtccattcactgattcaacaaaaataatgtttccaacctgctgaatgaaaagaaagttttaactct

SEQ ID NO: 326621 - DNA, 480 bp, Homo sapiens
tgctgaatccaaagaaaagtttaaatctgtgagatgattccattgatcacaaagcagtttcttagatagcttctatctagatttttttctggggatattcagtttttccccataggcctgtttgagtacccaaatttccattcacagattctacaaacagattgttttaaacctgctgaatcaaaaaaaagtttgaactctctgggatgaatccacacattgaaaagctgtttcacagatagcttctttctagtttatatctgggatatttggttttccccctaaacctctctgggctcccaaatatcccttcgcaaattgtacaaaaagagtatttccatcctgctgaatcaaaggaatagtgtagctctgtgagaagaatccacacatcacaaaggcagcttcacagatagcttccttctagttttttctcagaggatattttgtttttcccytaggtctcgatgtgcttccaaatgt

SEQ ID NO: 326622 - DNA, 480 bp, Homo sapiens
tgctgaatccaaagaaaagtttaaatctgtgagatgattccattgatcacaaagcagtttcttagatagcttctatctagatttttttctggggatattcagtttttccccataggcctgtttgagtacccaaatttccattcacagattctacaaacagattgttttaaacctgctgaatcaaaaaaaagtttgaactctctgggatgaatccacacattgaaaagctgtttcacagatagcttctttctagtttatatctgggatatttggttttccccctaaacctctctgggctcccaaatatcccttcgcaaattgtacaaaaagagtatttccatcctgctgaatcaaaggaatagtgtagctctgtgagaagaatccacacatcacaaaggcagcttcacagatagcttccttctagttttttctcagaggatattttgtttttcccttaggtytcgatgtgcttccaaatgt

SEQ ID NO: 326623 - DNA, 380 bp, Homo sapiens
ccaatgtccctttgcagattttcaaaaaagagcttttccaacctactgaatcaaaagaaatttttaattctttgagatgaatcaacacatcacaaagaagtttcacagatagtttctttcaagtttttatctggggatattctgtttttcccctaggccacaatgtgctcccaaatgtcctatcacagattgtagaagagaatgtttccaaactcgaraatcagaagaaagattagatctgtgagataaatccacacatcacaaaaaagtttcacagatagcttctttctagtttttatctggggatattcagtttatccccataggcctcaatgggctctcgaatattcactcacagattttacaaagaaagtgttttc

SEQ ID NO: 326624 - DNA, 534 bp, Homo sapiens
ctgtttttcctgataggccacaatgtgctcactaatgtcctatcacagattctccaaaagagtgtttccaaactactgaatcaaaggaaaaattaaacctgtgagataaattcacacatctcaaatcagtttcacagatagcttctttctatgtttttaactggggatatttggtttctcaccataagcctcaatgggctctggaatattcattcacagtttctacaaagagagtgtttctaacctgctgaatcagaagaaaaagttaactctgtgagattaatccacgcatcacaaagcagtttcatggatagcttcttctagattttatttgcaaatatttagttattccacatcagtttccttgagcgccaaaatgtcyctttgctgatgctccaaaagagtgtttccaacctgctgaatcaaaagaaagtttgattttctgagatgaatccacacatctaaagtagttccacagatatcgtctttctagtttttagttggggatattctgcttttctccacagtcctcaa

SEQ ID NO: 326625 - DNA, 534 bp, Homo sapiens
ctgtttttcctgataggccacaatgtgctcactaatgtcctatcacagattctccaaaagagtgtttccaaactactgaatcaaaggaaaaattaaacctgtgagataaattcacacatctcaaatcagtttcacagatagcttctttctatgtttttaactggggatatttggtttctcaccataagcctcaatgggctctggaatattcattcacagtttctacaaagagagtgtttctaacctgctgaatcagaagaaaaagttaactctgtgagattaatccacgcatcacaaagcagtttcatggatagcttcttctagattttatttgcaaatatttagttattccacatcagtttccttgagcgccaaaatgtctctttgctgatgctccaaaagagtgtttccaacctgctgaatcaaaagaaagtttgattttctgagatgaatccacacatctaaagtagttccacagatatcrtctttctagtttttagttggggatattctgcttttctccacagtcctcaa

SEQ ID NO: 326626 - DNA, 560 bp, Homo sapiens
tcgtctttctagtttttagttggggatattctgcttttctccacagtcctcaataggctcccaattttccctttgcatgttctccaaatagagtgtttccaacctgctgaatcaaaagaaaggtttaactctgtgagatgaatcttcacattaaaagtaggttaacaggtagcttctttcttgtttttatttgtggatattctctttttctttgtcatcaatgggctccaaagtgycccttcgcagattccacaggagaagtgtttccaatctgctaaatcaaaagaaaggtttaactctctgacatgaacacacacatcacaaagtagtttcacagatagcttctttttaatttttatctgacaatacttggtttttccccatagaactcaatgggtccccaagtgtccgttctcagattctccaaaaggagtatttccccagtgatgaatcaaaagacagtttaaactctgtgaggtgaatgcacacatcacagagaagttccacagatagctttcttctagtttttatcttgggatatttggttttgcaccgtaggc

SEQ ID NO: 326627 - DNA, 560 bp, Homo sapiens
tcgtctttctagtttttagttggggatattctgcttttctccacagtcctcaataggctcccaattttccctttgcatgttctccaaatagagtgtttccaacctgctgaatcaaaagaaaggtttaactctgtgagatgaatcttcacattaaaagtaggttaacaggtagcttctttcttgtttttatttgtggatattctctttttctttgtcatcaatgggctccaaagtgtcccttcgcagattccacaggagaagtgtttccaatctgctaaatcaaaagaaaggtttaactctctgacatgaacacacacatcacaaagtagtttcacagatagcttctttttaatttttatctgacaatacttggtttttccccatagaactcaatgggtycccaagtgtccgttctcagattctccaaaaggagtatttccccagtgatgaatcaaaagacagtttaaactctgtgaggtgaatgcacacatcacagagaagttccacagatagctttcttctagtttttatcttgggatatttggttttgcaccgtaggc

SEQ ID NO: 326628 - DNA, 560 bp, Homo sapiens
tcgtctttctagtttttagttggggatattctgcttttctccacagtcctcaataggctcccaattttccctttgcatgttctccaaatagagtgtttccaacctgctgaatcaaaagaaaggtttaactctgtgagatgaatcttcacattaaaagtaggttaacaggtagcttctttcttgtttttatttgtggatattctctttttctttgtcatcaatgggctccaaagtgtcccttcgcagattccacaggagaagtgtttccaatctgctaaatcaaaagaaaggtttaactctctgacatgaacacacacatcacaaagtagtttcacagatagcttctttttaatttttatctgacaatacttggtttttccccatagaactcaatgggtccccaagtgtccgttctcagattctccaaaargagtatttccccagtgatgaatcaaaagacagtttaaactctgtgaggtgaatgcacacatcacagagaagttccacagatagctttcttctagtttttatcttgggatatttggttttgcaccgtaggc

SEQ ID NO: 326629 - DNA, 545 bp, Homo sapiens
atgcacacatcacagagaagttccacagatagctttcttctagtttttatcttgggatatttggttttgcaccgtaggcctcaacgggctcctaatgtccctttgcaggttctccaaaaagagtgtttccaacctgctggatgaaaataaaattctaaccctgtgagatgawtttacacaacacaagcagtttcacagatagcttctttctggtttttttctggaaatattctgtttctccccttaggcttcaatgggctccaaaatggcctttctcagattctccaaaaagagtgtcaccaacctgctgaagcaaaataaagatttaagtttgtgagatgatttgacacgtaacaaagcagtttcacgatatcttctttctagtttttatctggggatattcagtttttctccatagaacaaaatgggctaacaaatgtcccttcaaagattctccaaagtgagtgtttccaacctgctgaatcaaaaggtttacctctgtgacatgaatccacctatcacaaaatatttcacagataacttct

SEQ ID NO: 326630 - DNA, 545 bp, Homo sapiens
atgcacacatcacagagaagttccacagatagctttcttctagtttttatcttgggatatttggttttgcaccgtaggcctcaacgggctcctaatgtccctttgcaggttctccaaaaagagtgtttccaacctgctggatgaaaataaaattctaaccctgtgagatgattttacacaacacaagcagtttcacagatagcttctttctggtttttttctggaaatattctgtttctccccttaggcttcaatgggctccmaaatggcctttctcagattctccaaaaagagtgtcaccaacctgctgaagcaaaataaagatttaagtttgtgagatgatttgacacgtaacaaagcagtttcacgatatcttctttctagtttttatctggggatattcagtttttctccatagaacaaaatgggctaacaaatgtcccttcaaagattctccaaagtgagtgtttccaacctgctgaatcaaaaggtttacctctgtgacatgaatccacctatcacaaaatatttcacagataacttct

SEQ ID NO: 326631 - DNA, 558 bp, Homo sapiens
gataaatgtccctattaaaatgaaatcttcacaatttatgttcctctgccatggctccagccggtccctccattttggggtccctgacttccctcaacatctctcctttctttttatataaatgtgccatggagatgaatgcttgctcattctctcagttttgatgaaggattcttttacttgtccagcacactaaaaacaagccaattaaacagagaaacgtaaatccaaaatttactacagtggagccaccaatagacttaatccaagtattggggtttagtccrgaaagactttctgccacctgatcagacgcctcagcagcaggcacaatggataaatgagcttgagaggctccaaaaatttgtttctttaatttagttatgtctaaggataagttatcttccctacccaaaaggtgtcctttcatcatttcccatgaatgatcagtcttgctgtaggaatatggtgtgatacagaaatcagtagtattccaattgcactgcatttgcatgcaatgttcaagactcactagcagatctccaagccaaataacag

SEQ ID NO: 326632 - DNA, 621 bp, Homo sapiens
gtactctcaaatatttcttcacagaytctccaaaaagagtgtttcaaacctgctgaatccaaagaaaggttcaactctgtgagatgaatctatacatctcaaagcagttttacagatagtgcctttttagtttttatctgggtatatttagtttttactggatagcctcaatgggcttcaaaatatgtctttgcagattctccaaaaagagtgtttcccttctgctgaatcaaaagaaaaaaaatagctcagtgagatgaatccacacatcaaaaagcagtttcatagacagcttccttctagtttttatttgaggagatttgttttttctttttttcataggcataaatgggctcccaaatgtcccttcacagattctgcaaaaaggtcttctgaatctgatgaatcaaaaggaaaattatccactctaagatgaatccaaacatcacaaagccatttcacagataccttcttatatgtttatctggggttattcaatttttccccataagcctcaatgggtgatcaaatgtccgttcacagattcgccaaaaagagcgtttttaacatgctgaatcagaagaaagttttaacattgcgagatgaatacacacattacaa

SEQ ID NO: 326633 - DNA, 621 bp, Homo sapiens
gtactctcaaatatttcttcacagattctccaaaaagagtgtttcaaacctgctgaatccaaagaaaggttcaactctgtgagatgaatctatacatctcaaagcagttttacagatagtgcctttttagtttttatctgggtatatttagtttttactggatagcctcaatgggcttcaaaatatgtctttgcagattctccaaaaagagtgtttmccttctgctgaatcaaaagaaaaaaaatagctcagtgagatgaatccacacatcaaaaagcagtttcatagacagcttccttctagtttttatttgaggagatttgttttttctttttttcataggcataaatgggctcccaaatgtcccttcacagattctgcaaaaaggtcttctgaatctgatgaatcaaaaggaaaattatccactctaagatgaatccaaacatcacaaagccatttcacagataccttcttatatgtttatctggggttattcaatttttccccataagcctcaatgggtgatcaaatgtccgttcacagattcgccaaaaagagcgtttttaacatgctgaatcagaagaaagttttaacattgcgagatgaatacacacattacaa

SEQ ID NO: 326634 - DNA, 621 bp, Homo sapiens
gtactctcaaatatttcttcacagattctccaaaaagagtgtttcaaacctgctgaatccaaagaaaggttcaactctgtgagatgaatctatacatctcaaagcagttttacagatagtgcctttttagtttttatctgggtatatttagtttttactggatagcctcaatgggcttcaaaatatgtctttgcagattctccaaaaagagtgtttcccttctgctgaatcaaaagaaaaaaaatagctcagtgagatgaatccacacatcaaaaagcagtttcatagacagcttccttctagtttttatttgaggagatttgttttttctttttttcataggcataaatgggctcccaaatgtcccttcacagattctgcaaaaaggtcttctgaatctgatgaatcaaaaggaaaattatccactctaagatgaatccaaacatcacaaagccatttcacagataccttcttatatgtttatctggggttattcaatttttccccataagcctcaatgggtgatcaaatgtccsttcacagattcgccaaaaagagcgtttttaacatgctgaatcagaagaaagttttaacattgcgagatgaatacacacattacaa

SEQ ID NO: 326635 - DNA, 608 bp, Homo sapiens
aaatatctcctttctaatttttattgggaagattctgttttctcccataagcctcaatgtgctcccaaatgtcatttcacagatgctagaaaaagagtgtttccatcctctaaataaaagaaagttttaattstgtgcgatgaatccacacatcacaaggcagtttcacagacagcttcattccaatatttatctggggatattcaattttttcaaataggtctcaaatgcctaccacatttccctttgcagattctataaaagtgtgtttccaatctgttgaatcaaaggaaaggtttaaatttataagatgaatccacaaatcacaaagcattttcatagataccttctttctagtttttatcaggggatattcggtttttccacaaacatcaatgggctcccaaatgtttcttggaaaattctccaaaagactatttccaacctgttgaatcaaaataaatgtttatttctgtagctgaatccaaatatcacaaagcagtttcacagacagcttctttctagtttttatctgggaatattcagtttttgggggctacacttcaatgtctcttcgcagagtgtacaataagagtgttttcaactgg

SEQ ID NO: 326636 - DNA, 564 bp, Homo sapiens
agttatcttccctacccaaaaggtgtcctttcatcatttcccatgaatgatcagtcttgctgtaggaatatggtgtgatacagaaatcagtrgtattccaattgcactgcatttgcatgcaatgttcaagactcactagcagatctccaagccaaataacagattgtcttaaatcattaatttgattagctaatttttgatcaatgccctgttgagaattccacatttgggtgtaattggcttgccaatccttaacaaaatgagagatttgaatagattaatgtaatgccattctggcagtagcggccagtgcactgactctaattaggcccaagatcacagcaattaaagtgaaaacaaatctattagttcttttaagaattcgttgtaacacttcattaattaaatgtactaagtgggaagattctcaaggtctgtgtaaggttactggtatccagattccttctcgagctcgaaccaatattacacttttcctggagtcaaaatgggagttaatacaagtgtataaatgacaattaatgcattagacagtttgattgttca

SEQ ID NO: 326637 - DNA, 442 bp, Homo sapiens
cacagacagcttcattccaatatttatctggggatattcaattttttcaaataggtctcaaatgcctaccacatttccctttgcagattctataaaagtgtgtttccaatctgttgaatcaaaggaaaggtttaaatttataagatgaatccacaaatcacaaagcattttcatagataccttctttctagtttttatcaggggatattcggtttttccacaaacatcaatgggctcccaaatgtttcttggaaaattctccaaaagactatttccaacctgttgaatcaaaataaatgtttatttctgtagctgaatccaaatatcacaaagcagtttcacagacagcttctttctagtttttatctgggaatattcagttttkgggggctacacttcaatgtctcttcgcagagtgtacaataagagtgttttcaactgg

SEQ ID NO: 326638 - DNA, 632 bp, Homo sapiens
attcagtttttccccataggtgttaatgggcaccaaaatgtcccttcacagattctccaaaaacaatgtttccaaccagctgaatcaaaagaaatgtttgaatctgtgagacgaatctacacattacaaagtagttttaaggtaaattctttctagtttttatttaggctattccttttttcccccattggccacaatggtttcccaaatgtctcttcacagattctacaaaaagagtgttttcaacacgctaaaccaaaagaaaggtttaaaactgtgagwttaatccacacaccacaaagccatttcacagatagattctttccagtttatatctgaagatatttgaatttttccctgtaagcctattgtggctcccaaatgtccctttgcatgttctccacagtgttgccagcttgctgaatcaaaagtagggttcaactctgtgagatgaatacatgaatcacaaagtagaattttaatgtgggtatacttctttttttcccttaggcctcaatgaggtctgaaatatgccttcacaaattctataaaaagagtatgtataatctgctgaattaaaagaaggatttaactctttgagatgaatccacacatcccaaagcagtttgtaa

SEQ ID NO: 326639 - DNA, 588 bp, Homo sapiens
tattttgttttttccataggcctcaaaggactctcaaatgtcacatcatagaatctgcaaaatgagattctgctgaattaaaagaaatatttaaccctgtgagatgaatccacacatctcaaagcagtttctcagataccttcttcctagttcttatctggggatattccatttttcttcataggcctcaataggatcccaaatgtccctttgcaaattctccaaaaacagtgtgtccaacctgttgaataaaaagaaagttttaattctgtgatattaatccacacatcacaaagaagtttcatggayagcttcttagtagtttttatctgggatgttcaaattttccccacaaggcacaatggactcacaagtgtccactcgcagaaccaccaaaaagagagtttccaatgtagtgaatgaaaagaaagatttaccactttgcaatgaatccaaacatcacaaaacagtttcaaaaataacattttctttgtttttatctggggatattcacttttacccataggcctcaattggcttccaaatttcccttcacagattttacaaaaatagtgtgtccaagctaca

SEQ ID NO: 326640 - DNA, 556 bp, Homo sapiens
ctctgagataaatcgacacatcaaaaaagagtttcacagatagcttctttctagtttctatctggggatatcctgtttttccccatggacctcaatgagctsccaagtgtccctttgcagattctccaaaagtgtgtttccaacccgctgaatcaaaacaaaggtttaactctgtgagatgaatccacacatcacaaaggagtttcacagatagcttctttctactttttatctttggatattggttttgccttttacacacccatggactcccaaatatttattcaaagattctccaaaaacagtgtttccaacctgctgaatcaaaagaaaggttcaactctgtgaggtgaaatccacacatcacaggcaattttacaaatagcttcattttagttttatctggtgtattttgtttttccatataggtctcattgggttcccaaatgtcccctcacagatattccaaaaaaagtatttatcttctgcttaatcaagataaagttttaactctgtgagatgaatcaacatgtcaaaaatcagtttcacagatagc

SEQ ID NO: 326641 - DNA, 564 bp, Homo sapiens
tataacaatggtttaactctgtgagatgaatccacacatcacaaagcagtttcaaaattttatctggggatatttagtttttccccttagccctcaatgggctcctaagttttttttcacagattctggaaaaggagtgcttccaacctggtgaatgaaaaggaagaattaatcctgtgagaagaatccacacatcctgaagcagtgtcacagatagcttcttttgaatttttatctggggatattatgtgtttccccattggcttcaatgggctctcatatatctcctcgcagattcttcaaaaatagtatttccaacttgctgcatcaacaggaaagaatttatctccrggagaggaaagcacacatcacaaagcagtttctctgatagcttctttttggttattatttgggtatatcccgtttttccccatagcaatcaatggtttcacaaaagttcgtttgcatattctacaaaagagtgtttccaacctgctgaatcagaaaaacgtttaactctctgtgataaatccacacatcacaaagcagtttcacagatagctc

SEQ ID NO: 326642 - DNA, 564 bp, Homo sapiens
tataacaatggtttaactctgtgagatgaatccacacatcacaaagcagtttcaaaattttatctggggatatttagtttttccccttagccctcaatgggctcctaagttttttttcacagattctggaaaaggagtgcttccaacctggtgaatgaaaaggaagaattaatcctgtgagaagaatccacacatcctgaagcagtgtcacagatagcttcttttgaatttttatctggggatattatgtgtttccccattggcttcaatgggctctcatatatctcctcgcagattcttcaaaaatagtatttccaacttgctgcatcaacaggaaagaatttatctccaggagaggaaagcacacatcrcaaagcagtttctctgatagcttctttttggttattatttgggtatatcccgtttttccccatagcaatcaatggtttcacaaaagttcgtttgcatattctacaaaagagtgtttccaacctgctgaatcagaaaaacgtttaactctctgtgataaatccacacatcacaaagcagtttcacagatagctc

SEQ ID NO: 326643 - DNA, 416 bp, Homo sapiens
gctgagttacaaatgcttcagcaatggcatgcctccaggctacagccagcaaagcttttgcttttgtttcagtagatttactaacgtgagggtgagggtatgcttgtgtttttgcagaagataaacaaaccatgtagatgccctcaagacgtgtatgaccatggaacaggagactggaaggacccatggatcccaaccatggaccggtttccccagtatgagccatgctgagaaaccactggaatgcaagattttacctacagacgcttgacagaccaatgytttcttactgaactcctctctaccctgaatacaagagacacaaatatgtaggcaggagtatcaatgcccctattcagcatgaagaagttacagaagatggaccttcatcctcctgcaacccctaggattaaggg

SEQ ID NO: 326644 - DNA, 567 bp, Homo sapiens
ttatgtttacctgtagacatgggtcctggtaaagtagtatgagatctaatatgtgtaatatagaaaggatgtctatgttggaaaaccacctgttgtaatcttgaaaataaagaagccaattcagaattatcaatatgtttgacagtagcggtttctacatttttagtgggaagtacaacataagcagaatcagagagaatatttaaaggtttggggaaatcttgtaaggcagtaattacagtaattaactctgcyttttgagaagaggtgtaaggggtagaaataagcttgtctgtaggactcacttaacaagcatttccattactggagccatcagtgaacactgcaacagcctcaggaatgggctggtttttggtcaatcaagggaccacccaataagtcatttttataaaatcaaacaatttgttttttggataatgactgtcaataaccaataaaatcagccaagtgaatttgccacagtatggaatgttgaaaagcagcttgaacttcgagccaatttgaaggatccacaattagatttggatcaaatccagagagttaagt

SEQ ID NO: 326645 - DNA, 517 bp, Homo sapiens
cacatatagcttctttctagtttttctctagagatatttgatttatccccataggcccctgtgggctcccaaatgtcctttcgcaggttctccagaaagtgtttccaaactgtagtagcaaaagaaaggtttatctctgtgtgatgactccacaaatcacaaagatgtttcacacagagattctttcttgtttttatctgcrgataattcatttttccctgtacacatcaatgggctcccaaatgtcccttcacagattctgcaaaaagagtgttttcaacttcctgcatcaaaagaaaggtttgtctcagtgagatgaatccacatctcacggagtaattttacagatagcttctttctagttttgatctgaggatattgtgttttttgctactggcctcaatgagctcccgaatgtccctttgcagattctctaaaaagagtgtttccaacctgttgagtcaaatgaaagatttacctctgtgaaatgaatccccacctcaaaaagcagtttttc

SEQ ID NO: 326646 - DNA, 517 bp, Homo sapiens
cacatatagcttctttctagtttttctctagagatatttgatttatccccataggcccctgtgggctcccaaatgtcctttcgcaggttctccagaaagtgtttccaaactgtagtagcaaaagaaaggtttatctctgtgtgatgactccacaaatcacaaagatgtttcacacagagattctttcttgtttttatctgcagataattcatttttccctgtayacatcaatgggctcccaaatgtcccttcacagattctgcaaaaagagtgttttcaacttcctgcatcaaaagaaaggtttgtctcagtgagatgaatccacatctcacggagtaattttacagatagcttctttctagttttgatctgaggatattgtgttttttgctactggcctcaatgagctcccgaatgtccctttgcagattctctaaaaagagtgtttccaacctgttgagtcaaatgaaagatttacctctgtgaaatgaatccccacctcaaaaagcagtttttc

SEQ ID NO: 326647 - DNA, 517 bp, Homo sapiens
cacatatagcttctttctagtttttctctagagatatttgatttatccccataggcccctgtgggctcccaaatgtcctttcgcaggttctccagaaagtgtttccaaactgtagtagcaaaagaaaggtttatctctgtgtgatgactccacaaatcacaaagatgtttcacacagagattctttcttgtttttatctgcagataattcatttttccctgtacacatcaatgggctcccaaatgtcccttcacagattctgcaaaaagagtgttttcaacttcctgcatcaaaagaaaggtttgtctcagtgagatgaatccacatctcacggagtaattttacagatagcttctttctagttttgatctgaggatattgtgttttttgctactggcctcaatgagctcccgaatgtccctttgcagattctctaaaaagagtgtttccaacctgttgagtcaaatgaragatttacctctgtgaaatgaatccccacctcaaaaagcagtttttc

SEQ ID NO: 326648 - DNA, 481 bp, Homo sapiens
ttgttgttgttgttgttaggtttcaatggcttccaaactgtcctttcagtgattctacaagagtgtttcytacctgctggatcaaaagaaagttttaactctgtgtgatgagtccaagcaacataaagcagtttcagagttatcttctttatagtgcttgtctgatgattacctgtttttacttataggccttaatgggctcccaaatatctttttgcagttcccacaaaaggagtgtttccaactttctgtatgaaaagaaagttttaactctgtgagttcaatccaaatatcacaaagcagttttacagacagcttctttcaccttttatatggggatattcactttatccccacagacctcaatgggctcccaaatgtcttttcagaggttctagaaaaaagagtatttccaacctgcagaatcaaaagaaatgttgaaatttgtgagatgcatccacgtgtaacaaagcagtttaac

SEQ ID NO: 326649 - DNA, 632 bp, Homo sapiens
aatgggctcccaaatatctttttgcagttcccacaaaaggagtgtttccaactttctgtatgaaaagaaagttttaactctgtgagttcaatccaaatatcacaaagcagttttacagacagcttctttcaccttttatatggggatattcactttatccccacagacctcaatgggctcccaaatgtcttttcagaggttctagaaaaaagagtatttccaacctgcagaatcaaaagaaatgttgaaatttgtgagatgcatccacgtgtaacaaagcagtttaacagataacttcattctactttttatctggggatattcagtttttctgctaggcatcaatgggctccaaaatgtacattcacagatcctacaaaaaaagtgtttccaacmtgctggatcaaaagaaaggtgtaaatctgtgagatgaatccacacatcacaaaccagtttcacaaacttatttcagttttcatctggggatattcaatttttccttataggcttcaatggacttccaattatcccttcacagattatacaaagagagtgatttgaacctgctgaatcaaaaataaaagtttaactctgtgagatgaatcctcacattgcaaaacagtttcacagat

SEQ ID NO: 326650 - DNA, 316 bp, Homo sapiens
agaggtaaatttttcttttgattcaccaggttcaaaacactttttttggagaatctgcaaagggacatttgggagtccattgatgactatggggaaaagtcaaatatttgcagataaaaacttggaagaaagtatctatgaaactgctttrtgaaggtgattcatttcacagagtttaacttttcttttgattcagcatgttgggagtgctctttttggagaatagtcaaagaaatatttgagagccctttgagtcctatgagggaaaaactgaatatcccgagataaaaactagaaataagctatctatgaaact

SEQ ID NO: 326651 - DNA, 574 bp, Homo sapiens
tcatctcacagagttaaaacttcgttttgattcagcagtttgaaaacaatatttttaaagaatctgagaagggacattggagaacccattgaaacctttggggaaaaacttagtatcccagataaaaaccggaataaagttatctgtgaaagtgcgttgtcacttgtgaacttatctsacagagttaaacctttcttttgattcagcattttgtaaacactatttttagggaatctgcatagagacattttggagccaatggaagcctatggggaaaaaaggaatatcccaagataaaaactagaaagtaggtatccatcaaactgcttggtgatttgtggatttatctcacatagttcaaacattctttaggttgagcaggttggaaaaactttttttagaatatggaaaataatattttgaaggcatttgaggcctagagggtaaaactgaatatccccagataaaaactagaaagaagttatctgataaactgatttacgatgtgtggattcatctcacagagttaaaactttcttttgattcagcatgttggaaagtacctttttagaga

SEQ ID NO: 326652 - DNA, 620 bp, Homo sapiens
taaaagacacagactggcaaattggataaagagaatctgctttttgatatgtcgattcatctcacataggtaaacgtttctcttgattcagtaggttgaaaacacgctgattggagaatctctgacgggacacgtggaagcccattgaggccaaaggagtaaagccaaatatcccccatataaaaactagaaagaatctacctgtgaaactgctttgtgatgtgtgaattcatcttacagagtttaaaatttcttttgattctgtgggttggmaacactctttttgtagaatatgaaatgggacattttggagatcattaaggagagtggagaaaatggaatattcacatataaaagctagaaacatatttccaaaaactcctttgtgatgtgtggattcatctcacagagttaaaccttcctgatgattcggcagattggaaaaccactttttggaggctctgtgaagggacgttttagagcccattggggtctaagaaagttactgtgaaggtgctttatgattgctggatacatatcagagagttaaactgttgtatttattcaacagtttggaaacattctgtttgtagaatctgtgaagggaaatttgggcactg

SEQ ID NO: 326653 - DNA, 620 bp, Homo sapiens
taaaagacacagactggcaaattggataaagagaatctgctttttgatatgtcgattcatctcacataggtaaacgtttctcttgattcagtaggttgaaaacacgctgattggagaatctctgacgggacacgtggaagcccattgaggccaaaggagtaaagccaaatatcccccatataaaaactagaaagaatctacctgtgaaactgctttgtgatgtgtgaattcatcttacagagtttaaaatttcttttgattctgtgggttggcaacactctttttgtagaatatgaaatgggacattttggagatcattaaggagagtggagaaaatggaatattcacatataaaagctagaaacatatttccaaaaactcctttgtgatgtgtggattcatctcacagagttaaaccttcctgatgattcggcagattggaaaaccactttttggaggctctgtgaagggacrttttagagcccattggggtctaagaaagttactgtgaaggtgctttatgattgctggatacatatcagagagttaaactgttgtatttattcaacagtttggaaacattctgtttgtagaatctgtgaagggaaatttgggcactg

SEQ ID NO: 326654 - DNA, 450 bp, Homo sapiens
acatggtttgtatagttgctttttcttttttcttgtactaagaatgaaaaaaaactggtcacttctgatacaaataccataaaataaaagtagttgttaacatcttattgattactcgtatgtaaaatgagaaaatattccatttaaaaaaattattttcagcwatttataatttaaattatctagcacgataaatctcataaagtaaaatctaaaaacttagttttactttttgaccttaaactaggtcaaaagttttttgtttctattacatacaaatgaaagaatactcatgtacaaaagtaaagggcaaaaaaattaggccagatgaaaaatttagctaataaaaaagtttaactgttgcatatatgatccatgatccattaatattctctcattctgcatttacacatagcttactttgattatcagactctaagagctaacagc

SEQ ID NO: 326655 - DNA, 500 bp, Homo sapiens
tgtgtggatttatctcacagagtaaacctttatttgwttcagcaggttgcaaatattctctttggataatctgtaaaggaaaatttgtgagccaattgaggcctatgtggaaaaagtgaatattcctagataaagactaaaaagaatctgtatttgaaactgctttgtgatctatgcactcatctcacagagttaagcattttttttttggttcagcaggttgaaaatatgttttttgtagcatctgcaaagggacatttgggaacccattgaggcctttgaggaaggaccacatatcctcaaataaaaactagaaagaagctatctgtgaaacccctttgtgatgtatgaattcatctcacagaattaaaccttttttttgattcagcagtttggaaacgctctttttggagaatctgcgaaaggacatttgggagccctgtggcctatggggcaaactgtatatcccaagataaaaagcagaaagaagctatctgtta

SEQ ID NO: 326656 - DNA, 579 bp, Homo sapiens
aatctttttgtggaatctgcaaagggacatttgggagcccattgaagcctatggggaaaaacaaaatatcctaatatagaaactagaaaaaagcttcctttgaaaccctttgtgatgtgtgaattcatctcacaaagctaatcctgtctgttgattcagcagatgggmaataccctttttggagtatctgggaagggacattttttagtccattgacatctatggggaaaataatataaccaagataaaaactagaaagaatccatctttgaaattgctttgtgatgtgcaggttcatttcacagagtttagccattcttttgattcagcatgtgggaaacactctttttgtagaatctgtgaaggatcttttgggagtttatagaggcctatggggagaaacaaaatatcttgagataaaaattagaaacaagttatctgtgaaattgctttttgatgtgtggattcatctcacagtgttaaaccttttatttgacccagcaggttggaaacacttttgtcgaatctgcaaagtgaccttttgtagctgtttgtggcctatggggaaaaacagaatat

SEQ ID NO: 326657 - DNA, 579 bp, Homo sapiens
aatctttttgtggaatctgcaaagggacatttgggagcccattgaagcctatggggaaaaacaaaatatcctaatatagaaactagaaaaaagcttcctttgaaaccctttgtgatgtgtgaattcatctcacaaagctaatcctgtctgttgattcagcagatgggaaataccctttttggagtatctgggaagggacattttttagtccattgacatctatggggaaaataatataaccaagataaaaactagaaagaatccatctttgaaattgctttgtgatgtgcaggttcatttcacagagtttagccattcttttgattcagcatgtgggaaacactctttttgtagaatctgtgaaggatcttttgggagtttatagaggcctatggggagaaacaaaatatcttgagataaaaattagaaacaagttatctgtgaaattgctttttgatgtgtggattcatctcacagtgttaaaccttttatttgacccagcaggttgraaacacttttgtcgaatctgcaaagtgaccttttgtagctgtttgtggcctatggggaaaaacagaatat

SEQ ID NO: 326658 - DNA, 406 bp, Homo sapiens
gagggacatttcagtgcccattgaggtctctggggaaaaactgaatatccccagattaaaaactagaaataagcatctgtgaaactactttgtgatgtgtggattcatctcaaagagttaagccattctgttgatacatcaggttggaaacactctttttgtagaatctgcaaagggatattttggagccctttgtgkcctatggggaacaattgaacatccccagataaaaacgagaaaaaagttgtctatgaaacttctttgtgatgtgtggattaatctcagagagttaaacctttcttttgattcggaaggttggaaatactcttctttttgcagaatctgtgatgggacatttgggagcccattgaggcctatgggaaaaaaacaaatatcccgagacaaa

SEQ ID NO: 326659 - DNA, 406 bp, Homo sapiens
gagggacatttcagtgcccattgaggtctctggggaaaaactgaatatccccagattaaaaactagaaataagcatctgtgaaactactttgtgatgtgtggattcatctcaaagagttaagccattctgttgatacatcaggttggaaacactctttttgtagaatctgcaaagggatattttggagccctttgtgtcctatggggaacaattgaacatccccagataaaaackagaaaaaagttgtctatgaaacttctttgtgatgtgtggattaatctcagagagttaaacctttcttttgattcggaaggttggaaatactcttctttttgcagaatctgtgatgggacatttgggagcccattgaggcctatgggaaaaaaacaaatatcccgagacaaa

SEQ ID NO: 326660 - DNA, 405 bp, Homo sapiens
tggagcccgttgaggccttggggaaaaactgaatatatccagataaaaactagaaagaagctatctgtgaaamtattttgtgatgtggggatccatctcacagaattaaactttcttttggtttagcagtttggaaacactctttttgtagaatctgtgaagaaacatttttggtcaaattgaggcctaaggggaaatacaaattatccccagataaaaacaacaagaagctaactgagaaactgctttgttttgtgtggattcatctcatggaattaaacctttctttggattcaccagtttataaacactttttttggagaatctgtgaggagatatttgggagcccatggaggcatatggaggaaaactaaacattcccagataaaaactagaaagaagcta

SEQ ID NO: 326661 - DNA, 405 bp, Homo sapiens
tggagcccgttgaggccttggggaaaaactgaatatatccagataaaaactagaaagaagctatctgtgaaactattttgtgatgtggggatccatctcacagaattaaactttcttttggtttagcaktttggaaacactctttttgtagaatctgtgaagaaacatttttggtcaaattgaggcctaaggggaaatacaaattatccccagataaaaacaacaagaagctaactgagaaactgctttgttttgtgtggattcatctcatggaattaaacctttctttggattcaccagtttataaacactttttttggagaatctgtgaggagatatttgggagcccatggaggcatatggaggaaaactaaacattcccagataaaaactagaaagaagcta

SEQ ID NO: 326662 - DNA, 507 bp, Homo sapiens
atacccccagatgaaaactagaaagaagctatctgtgaaactgccttgtggtgtgtgcattcagctcacaaagttaaaagtttctattgattcagcaggttttaaacattctttttagagaatctgtaaaaggatatttcagagctcatttagacctatggagaaataccaaataaatcaagataaaaattagaaagaagccctctgtgaaactgctttgtgatgtgtggattgatcccacagagttaaacttttcttttgatccagcaggttgaaagcacaccttttgtagaatctgcaaatgaacatttggctgcctgttgaggcctatgagaagaaagtaaatatcctcagatgaaaacaggaaggaagctctctgtgaaacaactgatatgtgtggattcatctcacagagttaaactttgttttgattcagcaggttgggaacaatgtttttggtgaacctgygaatggaaatttcagagcccactgaggcctataattaaa

SEQ ID NO: 326663 - DNA, 538 bp, Homo sapiens
accacccttctgattcaggaggctggaaatgcttttgttggagtatctgcaaagggacatttggaagcccattgagtcctataagtgaaaactgaatatccccagatacaaactagagagaagatatctgtgaaattgttttgtgatgtgtgaattcatctcaaatagttaaacctttcttttgatccagcaggttgaaaacactctttttgagaatctgacaagggacatttgtgagcccattgaggactatggggaaaaactggatatccccagagaaaaactagaaagaagctatctgtgatacttctttgtgatgtatggattcatttcacataattaaatatctctgttcattcaacagattagaaacaatcatttgtagaatctgcaaagagatatttgggagccaactgatgcctataagtraaaactgaatattcccagataaaacctagaaagaagctatcagtgaaaatactttgtgatgtgtggattcagcccacaaagttaaatctttctttttcaagactgaaac

SEQ ID NO: 326664 - DNA, 555 bp, Homo sapiens
gggcccccaaatatctcttcacagataatataaaaagagtgtttccaccctgttgaatcataagaaagattttactctgtgaaataaatccacatatcaaaaagcagtttcaaagaaagcttcttttaaaatttttaatggagatattctgtttttcccaacagtcctcaataggttaccataagtcccttcacagattctccaaaatgagtgtttccaactggytgaaataaaagaaaggtttaatcttgtgcaatgaatccacacatcacaaaacaagtttatagatagcttctttctagtattcatctggctatattcgatctttctctctaggcctcaatgagctcccaactatgccttctcagattctcctaaaagagtgtttgcaacctggtgaatcaaaagaaagatttaattctgtgagatgaatccacacatcacaaaacatttgcatagatagcttctttctagtttttatctggggatattctgtttatttctattggcctcaagaggcttccaaatgtctcttcacagattcttcaaaaagtg

SEQ ID NO: 326665 - DNA, 430 bp, Homo sapiens
aatcaaaaggcatttcacagatagcttctttctagtttctatctgctctatctggggatattcagctcttccacattggccttaatgggctccaaaatgtttcattgcagattctctaaaaagtctttcaaacctgttgaatcaaaataagaggttaactctgtgagatgacccacacatcacaagtggttttaagagaccttctttgtactttttatcagggaatactcggttttgcccataggcttcagtgtgctccaaatgtgcattcgtagattttcaaaatagatggtttccaaactgctgaatcaaatgaaagctttaagtctgtgagatggatccacacatcacaaagcaatttcacagatagcttctttctagtttttatctggggacattcgrattatttccattggcctcaagtggctcc

SEQ ID NO: 326666 - DNA, 521 bp, Homo sapiens
gtttccaatctgctggatcaatggaaatgtttaattcttgcagatgaatccacacatcacaaagcagtttcacacatagcttctttctaggttttatatggggatgttcattttttccccataggacttaatgggatcacaaagrtccctttgcagatgctccaaaaaaggtgtttccaacctgctgaatcaaagaaagatttaactctgtgagatgaatccacacatcacagaacagtttcacagatagcttcattctacttttttatctggtgatattcacttcttccccacagtcctcactgggctctaaaatgttccttcgtagagtctccaaatagagtgtttccaaactgctgaatcaaaagaaagttttaactctgtgagattaatccacacatcacagagcagtttcacagatacgttctttctagtttctatatagcgatatttgccttttacacttaggacttaatgggctcccaaatgtttcatcgcagattctccaaaaagagtgtttc

SEQ ID NO: 326667 - DNA, 606 bp, Homo sapiens
agattcacagatgtcttctttctagttttatctggggatattctgtttttcaacataggcctcaatgggctactacaacctcctgaacagaagaaaattttaagtctgtgaaaagaatccacacatcataaagcagtttcacagagacyttctttcttgtttttatctgaggatattcattttttcgatataggccctatgagttcccatatgtcactttgtagattctagaagaagcatgtttcaaacctgcagaataaaaagacacatttaataccgtgaggttaatccacacatcacaaagcagtttaacagatggcttcttttcagtttttttctggggatattgattttccccatagtcctcaaagtcctcccatatgtccctttgtagattctccacaaagagtgtttccaacatgctgaatcaaaagcaaggtttagctctgtgagacgaatccacacatcacaaacaagttttgcagatggcttctttctagttttcatctggagatattcagtttttccaagtaggcctcagtgggcttccaaatgtccactcacagattctccaaaaaagagtatttccaaactgctgaatcaaaa

SEQ ID NO: 326668 - DNA, 606 bp, Homo sapiens
agattcacagatgtcttctttctagttttatctggggatattctgtttttcaacataggcctcaatgggctactacaacctcctgaacagaagaaaattttaagtctgtgaaaagaatccacacatcataaagcagtttcacagagaccttctttcttgtttttatctgaggatattcattttttcgatataggccctatgagttcccatatgtcactttgtagattctagaagaagcatgtttcaaacctgcagaataaaaagacacatttaataccgtgaggttaatccacacatcacaaagcagtttaacagatggcttcttttcagtttttttctggggatattgattttccccatagtcctcaaagtcctcccatatgtccctttgtagattctccacaaagagtgtttccaacatgctgaatcaaaagcaaggtttagctctgtgagacgaatccacacatcacaaacaagttttgcagatggcttctttctagttttcatctggagatattcagtttttccaagtaggcctcagtgggctyccaaatgtccactcacagattctccaaaaaagagtatttccaaactgctgaatcaaaa

SEQ ID NO: 326669 - DNA, 603 bp, Homo sapiens
ccaaatagatgtgtttccaacctcctgagtcaaaagaaagggttaaatctgtgagatgaattgacacatcasaaagtagtttcacagatagcttctttctagtttttatctggggatatttcgcttttccccataggcctcaatgggctcttaaaagtccattcacagattctccaaaatgatgtgcttccaacgtgctgaatcaaaagaaatgttgtattctgtatgatgaattcacacatcacaaagagctttcatagatagcttctttaaatttttatcttaggattctcagtttttcaccatttgcctcaatgggctccaaaatgtcctttgtagattctccaaaaatagtgtttcttacctgctgaataaaaagaaagttttaactctgggagttgaatgtacacatcacaaggcagttttacagatagcttccttctattttttgtctgcagatatttggtttctacccagaggcccaaatgggttcccaaatgtcctgtcacagattttccaaaatggatacggaaatttaatttcctacctatgaaattaaaaaaatgtttcaacaatgtgagatgaatttacacctcagagagc

SEQ ID NO: 326670 - DNA, 603 bp, Homo sapiens
ccaaatagatgtgtttccaacctcctgagtcaaaagaaagggttaaatctgtgagatgaattgacacatcagaaagtagtttcacagatagcttctttctagtttttatctggggatatttcgcttttccccataggcctcaatgggctcttaaaagtccattcacagattctccaaaatgatgtgcttccaacgtgctgaatcaaaagaaatgttgtattctgtatgatgaattcacacatcacaaagagctttcatagatagcttctttaaatttttatcttaggattctcagtttttcaccatttgcctcaatgggctccaaaatgtcctttgtagattctccaaaaatagtgtttcttacctgctgaataaaaagaaagttttaactctgggagttgaatgtacacatcacaaggcagttttacagatagcttccttctattttttgtctgcrgatatttggtttctacccagaggcccaaatgggttcccaaatgtcctgtcacagattttccaaaatggatacggaaatttaatttcctacctatgaaattaaaaaaatgtttcaacaatgtgagatgaatttacacctcagagagc

SEQ ID NO: 326671 - DNA, 611 bp, Homo sapiens
gctgaatcaaaagaaatgttgtattctgtatgatgaattcacacatcacaaagagctttcatagatagcttctttaaatttttatcttaggattctcagtttttcaccatttgcctcaatgggctccaaaatgtcctttgtagattctccaaaaatagtgtttcttacctgctgaataaaaagaaagttttaactctgggagttgaatgtacacatcacaaggcagttttacagatagcttccttctattttttgtctgcagatatttggtttctacccagaggcccaaatgggttcccaaatgtcctgtcacagattttccaaaatggatayggaaatttaatttcctacctatgaaattaaaaaaatgtttcaacaatgtgagatgaatttacacctcagagagcagtttcacagatagcttcattccagtttttatctggataatcggtttttccccataggcctcaatgggctcttacatgtctcttcacagaatatccaaaaacagtgtttccaacctgatgtattaaaaggcagttttacttgtatgagagaaatccacacatcacaaatcgtttcacagatagcttctttctagtttttatctg

SEQ ID NO: 326672 - DNA, 592 bp, Homo sapiens
tctacaaaaagagggttttcagcctgctgaatcaaaagaaaagtttgactctttgagatgaatccacatatcacatcaatttcaaagatagcttctttttattttctatctgggaatatttggttatcatccatagtctttaataggctcccaaatgttccttcacagattctccaaaaagattgttttcaaccagctgagtaaaaaaatattaactctgtgagatgaatatacacatcacaaagcaatattacatatatgtctttctagtttttatctggggttatccaatttttacgcatatacttcagtcagctacaaaatgtccattcacataatctccaaaaacagtgtttccaactgctgaatcaaaagaaaggttgaattctgtgagataaatycacacatcacaaagttgtttcacacatagcttctttctagcttttatctgtggatatttggtttttccccacaggactccatgggctccaaaatgtaccttcacagattctccaaaaaagtgtttccaaaatgctaaatcaaaagaaagttttatttctgtgagatgaacatacacatcacaaagcagttt

SEQ ID NO: 326673 - DNA, 478 bp, Homo sapiens
tcatatatatcttctttctagctttttttctggggatatacagttttttcttaaacacataaatggactctcaaatgtgcgtttaaatattctccaaaaagagggtttccaacctgctgaaacaaaaaaagagttttatctctgtgagatgaatctgcacattacaaagcastttcagagagagcttcttactatttttttctgaggatattcagttttaccccaaaggactcaatgggctccaaaatgtcccttcactgattctccaaaaagaatgtttccaaagtactgaataaaaacaaaagtttaactgtttgagatgaatccccacttcacaaaatagttacacacatagcttcttactagtttttatctggggattgttggtttttccatttaggccaccaagggctcccaaatgtctctccgtagaatctgtaaaaacaatgtttcccaactactgaatcaatagaaaggt

SEQ ID NO: 326674 - DNA, 524 bp, Homo sapiens
gttttaccccaaaggactcaatgggctccaaaatgtcccttcactgattctccaaaaagaatgtttccaaagtactgaataaaaacaaargtttaactgtttgagatgaatccccacttcacaaaatagttacacacatagcttcttactagtttttatctggggattgttggtttttccatttaggccaccaagggctcccaaatgtctctccgtagaatctgtaaaaacaatgtttcccaactactgaatcaatagaaaggtctatctctgtgggatgaatccgcacatcacaaggaagtttcacagatagcttatatctagtttttatctgggtatactccttttctccctttaggtttcaacgggatcccaaatatctcttcacagattctccaaaaagagtgtttccaacctgctaaatcaaaagaaagttttaactctatgagatgaatccacaaatcactatgcagtttcatggatagctactttctagtgttgatctggggatattcagcttttct

SEQ ID NO: 326675 - DNA, 483 bp, Homo sapiens
aacctttctcttgtttcagctgtttggaaacactgcctttgtacgttctgcaaatggatatttccgatctctttgaggcctatggtgaaaaagaaaatatcttcagataaaaattagaaagaagctttctgagtaactgttttgtgatgtgtgtcttcatctcaaagagttaaacctttcttttgattcagcagtttggaaacacagtttttgtagaatcttcaaagggagactttagaactcattaaggcytactgcaaataagtgaatatccccagataaaaactacaaggaagcactctctgaaactgctctgtgatgtgtgcattcaacctatcttttgattcagcggtttggtaacgctgttgttttagaatctccaaaggaacatatgggagctcattgaggccaatggtgaaaaagcaaatatcctaagattaaaactaaaaagaagctatctcagacactgctttggatgtgtgc

SEQ ID NO: 326676 - DNA, 617 bp, Homo sapiens
gctgtgtataaacacgtgcattaaaattaattttatgtggactctttcatgaaaatgttcctaaggtattttattttttattgtggtaaaatamacataacataaaatgtactctgttaaccattttaagtgcacagttcagtggtactaaatacagtcataacattctgcagccatccctaccatccatctccataactcgtttcatcttgtgaaactgaaactctatacccattaaacaatacttccccatgtcttcctccccccagcttctggcaaccatcattgtactatctctgtgattctgtccactttaagttccttatacaaatggaattatactgtatttgtccttcactgactaacttatttcacttggcataatatcctcaagtttcatccaagttgcaacatatgtcagaatatttccctcatgtttaaggctgaataatattccactgtattcatatatcatattgtgcttatccattcatctgttgttggacacttcaattgcttctacgttttagctattgccaataacgctgctgcaaacatggatgtgcaaatattttttcaagactctgctttcaattcttttgctatcctgagatgtg

SEQ ID NO: 326677 - DNA, 545 bp, Homo sapiens
atgggtcaacctattggggaagcaatgtagttagagacaatgcccaaaaccatgtgagcaaatactctgtagagcgcacccctgcaatgctgccattgtgaggccaattctctccttgtcttgctactgagccctccattctgcctccatcattgtcactgtagctgccacaaaatgatccctcaaccaccgctgcccaggaamaaagaaagaattctgtccttctgcgctctcagatcaatttccaacagcaggtgagcctttgatgggcactgttcagttcccatatccctgaaatagacgcagtaaaaacatagaaattgcctatgtgtttcccagtaagacacatatggaagcctgttttcccacaacaggaaggggtttgcatgatgggtgttcaaaggaacaatagtccctgtaaaccatactttgcccatatgaagaaaagcaataaggattatttaataaatagacatggaagctcatccagggttggttgatgagaagctggttagcaaggggtctgccttcagttaggacaaggt

SEQ ID NO: 326678 - DNA, 545 bp, Homo sapiens
atgggtcaacctattggggaagcaatgtagttagagacaatgcccaaaaccatgtgagcaaatactctgtagagcgcacccctgcaatgctgccattgtgaggccaattctctccttgtcttgctactgagccctccattctgcctccatcattgtcactgtagctgccacaaaatgatccctcaaccaccgctgcccaggaacaaagaaagaattctgtccttcygcgctctcagatcaatttccaacagcaggtgagcctttgatgggcactgttcagttcccatatccctgaaatagacgcagtaaaaacatagaaattgcctatgtgtttcccagtaagacacatatggaagcctgttttcccacaacaggaaggggtttgcatgatgggtgttcaaaggaacaatagtccctgtaaaccatactttgcccatatgaagaaaagcaataaggattatttaataaatagacatggaagctcatccagggttggttgatgagaagctggttagcaaggggtctgccttcagttaggacaaggt

SEQ ID NO: 326679 - DNA, 597 bp, Homo sapiens
agaaatattttaaactacctataggtatatatgtatgtaattgaactatcaaatgcaagtaagatcatttccttagcgtgtgaaatccactcaatttattaaaatattttctaatatctattacaataatatttcttawttagctaacataagagaagttttaagacatttatttatatgtacttactagattcaaacttgattccactattttcagaaatcatactctgagacaagtcctttttttaatctaactatgtttctgcctatattaaaagacagatatgtcaattttgctaatcgtgcttttccaaacctctccttcctgattattttttggtttgttccaccagtcactcagagacttacttatattcaaatttctctctaggtttaacatttgtgtatgtcttcttggttttgtctatttttgctgtatatattttattgacatatatcatacatgcagaaaagtacaatgattaaatatggatagcttgattaatgaaacacatgtatttgcttataaccatgtatgaaaatagaacattattaaaaatagtgatacttctcctgcccctttccaaacactaaccc

SEQ ID NO: 326680 - DNA, 597 bp, Homo sapiens
agaaatattttaaactacctataggtatatatgtatgtaattgaactatcaaatgcaagtaagatcatttccttagcgtgtgaaatccactcaatttattaaaatattttctaatatctattacaataatatttcttaawtagctaacataagagaagttttaagacatttatttatatgtacttactagattcaaacttgattccactattttcagaaatcatactctgagacaagtcctttttttaatctaactatgtttctgcctatattaaaagacagatatgtcaattttgctaatcgtgcttttccaaacctctccttcctgattattttttggtttgttccaccagtcactcagagacttacttatattcaaatttctctctaggtttaacatttgtgtatgtcttcttggttttgtctatttttgctgtatatattttattgacatatatcatacatgcagaaaagtacaatgattaaatatggatagcttgattaatgaaacacatgtatttgcttataaccatgtatgaaaatagaacattattaaaaatagtgatacttctcctgcccctttccaaacactaaccc

SEQ ID NO: 326681 - DNA, 597 bp, Homo sapiens
agaaatattttaaactacctataggtatatatgtatgtaattgaactatcaaatgcaagtaagatcatttccttagcgtgtgaaatccactcaatttattaaaatattttctaatatctattacaataatatttcttaattagctaacataagagaagttttaagacatttatttatatgtacttactagattcaaacttgattccactattttcagaaatcatactctgagacaagtcctttttttaatctaactatgtttctgcctatattaaaagacagatatgtcaattttgctaatcgtgcttttccaaacctctccttcctgattattttttggtttgttcmaccagtcactcagagacttacttatattcaaatttctctctaggtttaacatttgtgtatgtcttcttggttttgtctatttttgctgtatatattttattgacatatatcatacatgcagaaaagtacaatgattaaatatggatagcttgattaatgaaacacatgtatttgcttataaccatgtatgaaaatagaacattattaaaaatagtgatacttctcctgcccctttccaaacactaaccc

SEQ ID NO: 326682 - DNA, 548 bp, Homo sapiens
acttgattccactattttcagaaatcatactctgagacaagtcctttttttaatctaactatgtttctgcctatattaaaagacagatatgtcaattttgctaatcgtgcttttccaaacctctccttcctgattattttttggtttgttccaccagtcactcagagacttacttatattcaaatttctctctaggtttaacatttgtgtatgtcttcttggttttgtctatttttgctgtatatattttattgacatatatcatacatgcagaaaagtacaatgattaaatatggatagcttgattaatgaaacacatgtatttgctyataaccatgtatgaaaatagaacattattaaaaatagtgatacttctcctgcccctttccaaacactaaccctcatcctcaatagtaacagatttttttatcatacagtaatttggtctattttcaaatttttattaaataaatcacagtatctaagtctatgtttctttcattgttgttattttgcttatagtatttatctgctaatggacatggtag

SEQ ID NO: 326683 - DNA, 548 bp, Homo sapiens
acttgattccactattttcagaaatcatactctgagacaagtcctttttttaatctaactatgtttctgcctatattaaaagacagatatgtcaattttgctaatcgtgcttttccaaacctctccttcctgattattttttggtttgttccaccagtcactcagagacttacttatattcaaatttctctctaggtttaacatttgtgtatgtcttcttggttttgtctatttttgctgtatatattttattgacatatatcatacatgcagaaaagtacaatgattaaatatggatagcttgattaatgaaacacatgtatttgcttataaccatgtatgaaaatagaacattaytaaaaatagtgatacttctcctgcccctttccaaacactaaccctcatcctcaatagtaacagatttttttatcatacagtaatttggtctattttcaaatttttattaaataaatcacagtatctaagtctatgtttctttcattgttgttattttgcttatagtatttatctgctaatggacatggtag

SEQ ID NO: 326684 - DNA, 548 bp, Homo sapiens
acttgattccactattttcagaaatcatactctgagacaagtcctttttttaatctaactatgtttctgcctatattaaaagacagatatgtcaattttgctaatcgtgcttttccaaacctctccttcctgattattttttggtttgttccaccagtcactcagagacttacttatattcaaatttctctctaggtttaacatttgtgtatgtcttcttggttttgtctatttttgctgtatatattttattgacatatatcatacatgcagaaaagtacaatgattaaatatggatagcttgattaatgaaacacatgtatttgcttataaccatgtatgaaaatagaacattattaaawatagtgatacttctcctgcccctttccaaacactaaccctcatcctcaatagtaacagatttttttatcatacagtaatttggtctattttcaaatttttattaaataaatcacagtatctaagtctatgtttctttcattgttgttattttgcttatagtatttatctgctaatggacatggtag

SEQ ID NO: 326685 - DNA, 548 bp, Homo sapiens
acttgattccactattttcagaaatcatactctgagacaagtcctttttttaatctaactatgtttctgcctatattaaaagacagatatgtcaattttgctaatcgtgcttttccaaacctctccttcctgattattttttggtttgttccaccagtcactcagagacttacttatattcaaatttctctctaggtttaacatttgtgtatgtcttcttggttttgtctatttttgctgtatatattttattgacatatatcatacatgcagaaaagtacaatgattaaatatggatagcttgattaatgaaacacatgtatttgcttataaccatgtatgaaaatagaacattattaaaaatagtgakacttctcctgcccctttccaaacactaaccctcatcctcaatagtaacagatttttttatcatacagtaatttggtctattttcaaatttttattaaataaatcacagtatctaagtctatgtttctttcattgttgttattttgcttatagtatttatctgctaatggacatggtag

SEQ ID NO: 326686 - DNA, 483 bp, Homo sapiens
aacctttctcttgtttcagctgtttggaaacactgcctttgtacgttctgcaaatggatatttccgatctctttgaggcctatggtgaaaaagaaaatatcttcagataaaaattagaaagaagctttctgagtaactgttttgtgatgtgtgtcttcatctcaaagagttaaacctttcttttgattcagcagtttggaaacacagtttttgtagaatcttcaaagggagactttagaactcattaaggcctactgcaaataagtgaatatccccagataaaaactacaaggaagcactctctgaaactgctctgtgatgtgtgcattcaacctatcttttgattcagcrgtttggtaacgctgttgttttagaatctccaaaggaacatatgggagctcattgaggccaatggtgaaaaagcaaatatcctaagattaaaactaaaaagaagctatctcagacactgctttggatgtgtgc

SEQ ID NO: 326687 - DNA, 495 bp, Homo sapiens
tatctgtaaaactgctttgtgatgcgtagattcatcttacagtgttaaacctttcttttgattcaacaggttggaaataatctttttgtagaatccatgaagggacatttgggatcccattgaggcctatcaagaaaaacctaatatctccagataaaaactagaaagaagctatctgtgaatctgctttatgatatgtggattcttctcacatagttacatctttctattcattgaacagatttgaaacactctttttctaggatctggtaatggatatttcagagcccattgaggtctatgttgaaaaaaattatccctagaaaaaactagaaagaagctatctgtgaaactgcttcatgatgtgttgattcatctgacagagttaaactgatctttttattaagcagkttggaaacactcttttctgagaatctgtgaagagaaataaaggagccaattgggggccaggtgtggtggctcatgcctgtaatc

SEQ ID NO: 326688 - DNA, 317 bp, Homo sapiens
aactcctttgtgagatgtggacatttgagtgccctttcaggcctattgggaaaaactgaataaccccagataaaaaccagaaagaagccgtctgtgaaactgctttgcawtgtgtggattcatctcacagagttaaaactttcttttgattcaccatgttggcaacactctttttgtagaatctgcaaagggacatttgggaacacattgagtccaatagggaaaaattgaataccccataaaaaagtagaaaaaagctatatgtgaatctgcttggtgatgtgtaaattcaactcacagaggtaaacatttctttt

SEQ ID NO: 326689 - DNA, 571 bp, Homo sapiens
tggagattctgcaaaaaaaacatttgggagcccactgaggcatatggggaaagaycaaatattcccagatagaaactagaatgaagctatctgtggaactgatttgtgatatgtggattcatttcacagtgtgaaacttttcttcttgttcaacaggttgtaaacaatctttttgtagactctgtgaagggacatttgggagcccgttgagacctacgagagaaaaaaaaatccacagataatgggaagaaagaagctacctctaaaactgctttgtggtgtttggattcagctctcagagttaaacttttcctttgaatcagcaggttggaagcactctttttggagaatctgcgaagggacatttgagaacccattgaggcctatggagaaaaactgaacatcccgaaataaaaactacaaagaagttatctgtgaaactgctttgtgacttgtagattcatctcacgaagttaaacttttctttagatacagtagtttggaaacactcttttggtagaaactgcaaacagatatttgggagcacattgaggcctatggggaaaaatgg

SEQ ID NO: 326690 - DNA, 571 bp, Homo sapiens
tggagattctgcaaaaaaaacatttgggagcccactgaggcatatggggaaagatcaaatattcccagatagaaactagaatgaagctatctgtggaactgatttgtgatatgtggattcatytcacagtgtgaaacttttcttcttgttcaacaggttgtaaacaatctttttgtagactctgtgaagggacatttgggagcccgttgagacctacgagagaaaaaaaaatccacagataatgggaagaaagaagctacctctaaaactgctttgtggtgtttggattcagctctcagagttaaacttttcctttgaatcagcaggttggaagcactctttttggagaatctgcgaagggacatttgagaacccattgaggcctatggagaaaaactgaacatcccgaaataaaaactacaaagaagttatctgtgaaactgctttgtgacttgtagattcatctcacgaagttaaacttttctttagatacagtagtttggaaacactcttttggtagaaactgcaaacagatatttgggagcacattgaggcctatggggaaaaatgg

SEQ ID NO: 326691 - DNA, 571 bp, Homo sapiens
tggagattctgcaaaaaaaacatttgggagcccactgaggcatatggggaaagatcaaatattcccagatagaaactagaatgaagctatctgtggaactgatttgtgatatgtggattcatttcacagtgtgaaacttttcttcttgttcaacaggttgtaaacaatctttttgtagactctgtgaagggacatttgggagcccrttgagacctacgagagaaaaaaaaatccacagataatgggaagaaagaagctacctctaaaactgctttgtggtgtttggattcagctctcagagttaaacttttcctttgaatcagcaggttggaagcactctttttggagaatctgcgaagggacatttgagaacccattgaggcctatggagaaaaactgaacatcccgaaataaaaactacaaagaagttatctgtgaaactgctttgtgacttgtagattcatctcacgaagttaaacttttctttagatacagtagtttggaaacactcttttggtagaaactgcaaacagatatttgggagcacattgaggcctatggggaaaaatgg

SEQ ID NO: 326692 - DNA, 537 bp, Homo sapiens
aaaactgaatatccctaggtataaactagaaagaagctatctgtgaaactaccttttgaagtgtggattcatctcatagaattaaaccattctttagattcagcaggttggaaacaccctttttggagactctaaaaagggacatttgtgagcctgtggaggcttattcagagaaaccgaatattcaaaggtaaaaactagaaagaagctttctgtgaaactgctttttgatgtgtgcattcatttcacagagttagaactttttttgattcagcagtttggaagcactcttactgtagaatatgtgaagggagatttgagagctcattgaggcctatggggaaaaactgagtatggccagataaaaactagaaataagctatttgtgaaactgctttgtgatgtgtggattcatctcacagaggttggaaattctctttttgtagaacctgtgaagggacatttcatakgccatcaaggcctatggggaaaaacagaatatccccaaataaaaactaggaagaagctatttgtgaa

SEQ ID NO: 326693 - DNA, 603 bp, Homo sapiens
gtagggacacagccaaactgtatcagcagagattctcattaatgggttctgagcattagggctagtataggaagccaaaagagggtaaggaagcaagaaaactgcagagattaccaagcacattcctgtcagataaaaaccacacagtgccagctcacaatgaagatattaaaagactatttacacatctccacccggagtattagttcaagcagcaataactaaccataaggaaatatctctgtggtggagaatgttagttgtccaccaaaatctatctccttttcttccagaaatgtagagtttaagccaggccatggatacttaactagagattccacttcccagcctccttagtggctggctgtggacayataactaagttcaccaatggaatgtgagccagaaatgtgtgtgacttgtgcctggcttgcttttaaaaagaaattgcttcctttgtctttttcccttttacctctctgtgatgtaaagtgatgacttcccagtcatcttcaaacacatggatgaggctgggtgcagtggctcacacctgcccagcactttgggaggccaaggcgggtggatcacctgaggtcaggagtt

SEQ ID NO: 326694 - DNA, 580 bp, Homo sapiens
ccaaaatgagtcttgaaaatttcttaaataactcagaaaatactgcacacatagagacrtgtatatattctcttatgccaacatgtacgtataaatgtaaaacacacttcttacatatataattaaaattacatataaaaacatatataactaaaattacatattaaaagcgtatttcagggccgggcgcaatggctcgcatctataattccagcattttggaaggccaaggcgagagggtcacttgagcccaggagttcaaacaacatagtgagaccccatatctaccaaaaaaatataacaattagccaagtgtgttggtgtgtccctgtagtcccacctacttgcgaggctggggaaggagggttgtttgagcccaggagttcaggctacagggagccaaaatcatgccactgcactccagcctgggtgacagagcaagacttcatttagaaactaaagcgtatttcagaatgtttaattacataaaagaggaaaaaggggaagaaaggccagtgttgtggaattcatgtaagttaattatatgtatgatgtaactcctaaactactttacataatt

SEQ ID NO: 326695 - DNA, 580 bp, Homo sapiens
ccaaaatgagtcttgaaaatttcttaaataactcagaaaatactgcacacatagagacgtgtatatattctcttatgccaacatgtacgtataaatgtaaaacacacttcttacatatataattaaaattacatataaaaacatayataactaaaattacatattaaaagcgtatttcagggccgggcgcaatggctcgcatctataattccagcattttggaaggccaaggcgagagggtcacttgagcccaggagttcaaacaacatagtgagaccccatatctaccaaaaaaatataacaattagccaagtgtgttggtgtgtccctgtagtcccacctacttgcgaggctggggaaggagggttgtttgagcccaggagttcaggctacagggagccaaaatcatgccactgcactccagcctgggtgacagagcaagacttcatttagaaactaaagcgtatttcagaatgtttaattacataaaagaggaaaaaggggaagaaaggccagtgttgtggaattcatgtaagttaattatatgtatgatgtaactcctaaactactttacataatt

SEQ ID NO: 326696 - DNA, 563 bp, Homo sapiens
cactctgtctcaaaaaaacaaaacacaacaaaacaaacccacaaatatgttatcttacagttctatagaccagaagtccaacacaggtctcaccaggctaaaatcaagctgttaacagggctgcttcctcactgggagctttagatgggaatctgtttcctgctcattaggtttattcacagactttagggccatgcagttgtagaactgaggtcccctttcccttgtagttggctggtggttcccttcctccattttcaaagcctgcaatggagggacaggctcttttcatgtcacattcctctgacccattcttctgtcttcctcttctactgctgacaattcatgtgattagactgggctcccctggataatccaggatactctcctcatctcaaagtccataccctaagcacatgtacaaagtcccctttgctatgtaaggtaacatattcacaggttccaaggattaggatgtgaacatctttgaggaaccatcattctgtccaccacaagggctttgagcaatgsagcaactgctcactctgcagccaagaatgtgt

SEQ ID NO: 326697 - DNA, 506 bp, Homo sapiens
aagacccctatctctaattttaaaatcaacatttattaaaataaataaatatataagaatgtggccattgagctcttgacaccacctagtctctccccgaccgcaccaggatgcatcaacatagcactcagaattgagatgcaaccctgcggtgaagaggagagaggcaagagtttgattggctgagaaagccctattggctaaagattacatttctgccactaggcagaatggggactcaagctgaaagtcaagtttattaagctaggcacagtggtgtgcacatttaatcccaactacttgcggaggctgaggtgggaggattgctggagcccaggggttagacattagcctgagtaacayagtgagatcccatctcaaaaaataatagtaagaataatcaagttcacttagaacaaaaattagaaaagctttgtttcttgcatacccaagtatgtgtattgaaatttgttcaagatacactagtttttatctgttcacatgac

SEQ ID NO: 326698 - DNA, 408 bp, Homo sapiens
agtcttgaatctctctttttgtacaatctgcaagtggatatttggagcgatttgaggcctacatttgaaaatcaaatatcttcccttaaaaactacacagaaacattctcagaaattgtttgtcatgtgtgctttcmaattaccaagttgaacctatcttgtgattgagcagtattgaatctctctttttgtggaatcggcaagtggatatttttagccctttgcggactgtggtggaaaaggaattatcttcaaatccattctacacagaagcattcagacaaacttctctgtgatgagtgcattggtcacacagaattgaacctttcctttgattgagcaattctgaaacactcttttagagggtctgcaagtggacattttagagctttggggcaattgtggaaa

SEQ ID NO: 326699 - DNA, 408 bp, Homo sapiens
agtcttgaatctctctttttgtacaatctgcaagtggatatttggagcgatttgaggcctacatttgaaaatcaaatatcttcccttaaaaactacacagaaacattctcagaaattgtttgtcatgtgtgctttcaaattaccaagttgaacctatcttgtgattgagcagtwttgaatctctctttttgtggaatcggcaagtggatatttttagccctttgcggactgtggtggaaaaggaattatcttcaaatccattctacacagaagcattcagacaaacttctctgtgatgagtgcattggtcacacagaattgaacctttcctttgattgagcaattctgaaacactcttttagagggtctgcaagtggacattttagagctttggggcaattgtggaaa

SEQ ID NO: 326700 - DNA, 408 bp, Homo sapiens
agtcttgaatctctctttttgtacaatctgcaagtggatatttggagcgatttgaggcctacatttgaaaatcaaatatcttcccttaaaaactacacagaaacattctcagaaattgtttgtcatgtgtgctttcaaattaccaagttgaacctatcttgtgattgagcagtattgaatctctctttttgtggaatcggcaagtggatatttttagccctttgcggactgtggtggaaaaggaattatcttcaaatcmattctacacagaagcattcagacaaacttctctgtgatgagtgcattggtcacacagaattgaacctttcctttgattgagcaattctgaaacactcttttagagggtctgcaagtggacattttagagctttggggcaattgtggaaa

SEQ ID NO: 326701 - DNA, 542 bp, Homo sapiens
agaaatagtgtagtataatgtttcccttgtaaagtattcataaacattaattagtatgtattaaaattaaaatataaattccttaaatctagcaattcacttctaagaatatattctacacataaaatagcattcatgattaaaatatatgtacaagtatatttgttgcaacactgattgaatagcaaaaaacaaaaatacatcaagagagctggtagaatgacatataatacataaatacaatgaaactctatacaatcataaaaaatacaacacatgtacatgtattgaaccagaaatatgttcagaatatactcttaagcagaaacaaatttgyaaacagatatttttcctatgatggatcattttatgatgtatgtacatgtgtacacattagtgtgtgtatacacatgcaacacagatggccataaagttaaattgcaggtaaatatgttgtgatacatatataaatatttacatgattatagtatgtaaatttagaaataattcaagaaggacatgcataaattgatagtaattgc

SEQ ID NO: 326702 - DNA, 517 bp, Homo sapiens
ccactttaagatctaccacctatatccctggcgggcagaaaaaactaccacttcaaatcaatatacgagtttgcatgtaaaaactataatctaggaactataaaataattcacatagctacagccttgctaaatgacatgaggtacatgatctaygtggcaaaaaggaacaaaatatccattttgcactgaagaagcaagagattgatttgacacttaatccactaagggatacattttgaaagaatatgcacaagtgacaagccctcaaatatcattcagcccactcttgaagaaattacaaggacaaccactgagcgtataaatgaaaatagcatttattttccctttacaaagtcacgtacctatcatatgccagcatctcagaatttacttaaaattcagtgcaatcatattggaagacaggtaagtcattttaagacaaataaaatgaaagctggctattgatactccaaaacttgagaatccccagtgtagaagaatttagcagtaacact

SEQ ID NO: 326703 - DNA, 489 bp, Homo sapiens
cagtttggatgtaccagcctggcagaggaagtccacttttcctccccacgtatcccctgagattcacagaggcaaggcagagaacaagacctgtgcttctttactccaaactcttagcagtgtggacactgattaactgcagctggggtctgatttgcccagcctgtctttgatattgatcaatgaactccttctcaaggaatgctttcctctaactgcggtgaaggtggtggctctggtggtyctctccaacatgggtgtctgggttttgactgcctaagagaaggtaagggacagatggatgaggcatgggacagtgtgcctttgcaaagcacattggagactttgcacagggctgcctgaatggtcccttacatggaaaaggtagcttggatttcagcctgaatgctactgaagtttgggtttatttcattactttattgctaaacactatgctgtggtgttatggactgtgctttactgggaaat

SEQ ID NO: 326704 - DNA, 595 bp, Homo sapiens
tattattattattattatttcaatagttttggggaaatcaggtggtgttccattacatggctaagttctttaggtataatttctgagatttyggtgcacccatcacttgagcagtgtacaatgtaccgcattgtgctgtcttttatccctcaaccccctcccacccttcccccaaagtccccatagtccattatattattcttatgccttttcatcttcatagcttagctcccacttataactgagaacacacaatgtttggttgtccattcctgagttacttcacttagaataatggtctcgaactctattcaggttgctgtgaatgccattatttcattccattttatgactgagtagtattccatgatacatatatacacacaaacatacacatacacacacacaccatatatatatatatgacacattttctttatctacttattagttgatggatatttaggctggttccatattttcgcaattgcaaattgtgctgctataaacatgcgtgtgtaagtgtctttcatataatgacttattttcttctgggtagatactcagtagtgggattgctggatcaaatagtatt

SEQ ID NO: 326705 - DNA, 581 bp, Homo sapiens
acttatgtttcttagcgatatgacacagaggatgatgctgtcatcaaatttctacttcattactatacataagctacttaatgtatgtcagtcatagtatgagggtcttagatgttcaatagttagcaaaagagaggcatacttgccctccctcagcttayagcccagtgaaaaaggcagacacaaatgaacaggaaaactgtaattaatagagaatgggctgcctgaagaaaaatatcgggatgaaatatatttagacagagatgttatggtgagaagataaaattaagctgagaggtgaaagacctgaatgagaacattattgactgaaggaataatgtaagcacaagtgctagaacagaaaaaaaactgtttatttcaaaaactgaaagaatttccatgtttttggagtatatggaaaggagaatgacaagagatgagcaaataaacgtgtatagagaagcagagtatacttttaatcttgtaaggcaaggaaagaaaggaaaattgcctttatttaaagtggaatgagaagccactaaagggttttgagtaagtgactgaaatcataaaagtgactc

SEQ ID NO: 326706 - DNA, 522 bp, Homo sapiens
attcacaatttcctagggaagatgggccattctatttataattggtttctacttcagagctttggtatattgtttcagagctttaaatatgtataaaagagctacaaagatcaagaaaaaaatggaaatttaaccacagcaactaaatcatgacatcgataaatcctgttgatccaactcaaatgcaacaaagaagctttggaagatttttcagattgttgggtggtagcatgaatacgttaccctatattgggaccccactcttcttgtgtgagtttacactctttgtagccactaccaaaatgacttatgtttcttagcgatatgacacagaggatgatgctgtcatcaaatttctacttcattactatacataagctacttaatgtatgtcagtcatagtatgagggtcttagatgttcaatagttagcaaaagagaggcatacttgccctccctcagcttatagcccagtgaaaaaggcagacacaaatgaacargaaaactgtaattaatagagaat

SEQ ID NO: 326707 - DNA, 544 bp, Homo sapiens
cacttgtaatacctgttttggaaacaaaagagcaattgctttttatacagacttctctcacaaaatgttgtcatcatgacattataatgaactggatccgcgggttttctgatgacagttcagtttattaattattaaccccatgaaacactatttgctttatctgtactggccctctcacttttggccaaacacttagtaggaaaacagcagcaatcaaaggtcaaatagaaaatcaaacaagaaactccaagtttgtatgaaacaatatacttggaaagagccagcttctaagcaagaaattccacatattgaaacacgagaaaaagttaaaatgttagtgcccaatttgttaactcccattgtttgggctatttaraaccatagattttcaccaaattttatgactgaacactggcaatgacagcatttttacaactcactgtaaacacatgatcattacccttaaaaatatagcctaaaaggttaagcaaagtacttcttttttggagacggccaagcaatcatggactcacaatttaga

SEQ ID NO: 326708 - DNA, 602 bp, Homo sapiens
acacatgatcattacccttaaaaatatagcctaaaaggttaagcaaagtacttcttttttggagacggccaagcaatcatggactcacaatttagagaactgggtgagaagcaggggaagaggtacacccaaagactctctaccacacttctctcttgcagtcaaagaaaccaaaaaaagaaaaataaaaaaaaaaaataaaaaaatagaggataagtgacttcaccaagatcatacagctaggtcatgacagaactaggcttgaacctgagtcttcatattcccaagaccactactctttctgtaatgacacatttttacaaaatggaatagccaagaacccatattgatgataacccaagcactgcatcatagttctaacaaatgctgccagaggtgtttgtttgtcctctgctatygctacaacaatctctttctctttcttgttttttatctttccactttatttgttttacatgctgcgttttgtttgaaagtatctttagagtagaagtacttaaatatcttacatctataaaaacaaggatgctttcattaacctgatcatattgtgagcagtgcaatcccctacttgggttgta

SEQ ID NO: 326709 - DNA, 602 bp, Homo sapiens
acacatgatcattacccttaaaaatatagcctaaaaggttaagcaaagtacttcttttttggagacggccaagcaatcatggactcacaatttagagaactgggtgagaagcaggggaagaggtacacccaaagactctctaccacacttctctcttgcagtcaaagaaaccaaaaaaagaaaaataaaaaaaaaaaataaaaaaatagaggataagtgacttcaccaagatcatacagctaggtcatgacagaactaggcttgaacctgagtcttcatattcccaagaccactactctttctgtaatgacacatttttacaaaatggaatagccaagaacccatattgatgataacccaagcactgcatcatagttctaacaaatgctgccagaggtgtttgtttgtcctctgctattgctacaacaatctctttctctttcttgytttttatctttccactttatttgttttacatgctgcgttttgtttgaaagtatctttagagtagaagtacttaaatatcttacatctataaaaacaaggatgctttcattaacctgatcatattgtgagcagtgcaatcccctacttgggttgta

SEQ ID NO: 326710 - DNA, 602 bp, Homo sapiens
acacatgatcattacccttaaaaatatagcctaaaaggttaagcaaagtacttcttttttggagacggccaagcaatcatggactcacaatttagagaactgggtgagaagcaggggaagaggtacacccaaagactctctaccacacttctctcttgcagtcaaagaaaccaaaaaaagaaaaataaaaaaaaaaaataaaaaaatagaggataagtgacttcaccaagatcatacagctaggtcatgacagaactaggcttgaacctgagtcttcatattcccaagaccactactctttctgtaatgacacatttttacaaaatggaatagccaagaacccatattgatgataacccaagcactgcatcatagttctaacaaatgctgccagaggtgtttgtttgtcctctgctattgctacaacaatctctttctctttcttgttttttatctttccaytttatttgttttacatgctgcgttttgtttgaaagtatctttagagtagaagtacttaaatatcttacatctataaaaacaaggatgctttcattaacctgatcatattgtgagcagtgcaatcccctacttgggttgta

SEQ ID NO: 326711 - DNA, 610 bp, Homo sapiens
atttgacagcagcaaccctaataaataggtgcttaaatttttaatgctgaaaatgttatttttyaagaataactaaaaaaaatgaaatgttacatattgctcatattaagtggaaaataactgcattttcttttatatgcatgtacaaagctcaaagaaagggaaaattaccatgacatcaactgtcaatgcattttctaaatataagtaaaatcaattcagcacaacttgatttttaatatatctgatgatttattcaaagtccctgcattatccaaacacatatgcctatatcctaaagatctataagctttaagaacaattttatttcatgtttaacaactataatcctttctttaaaatatgctctcatgtaatttatatagcattagacaaatattaattgaaaataaaggtaagccatcattttaaattaaaaatacatgtgaaatagacaatttgagaacgcttattttagtatataatcaaatccaagccaataatattcttaaaaagtccatcaataattataaaagtagtagaatatgcctaatgtatttgaataatgggtggctgccataatccaggactgttaatgtaataacatgct

SEQ ID NO: 326712 - DNA, 610 bp, Homo sapiens
atttgacagcagcaaccctaataaataggtgcttaaatttttaatgctgaaaatgttatttttcaagaataactraaaaaaatgaaatgttacatattgctcatattaagtggaaaataactgcattttcttttatatgcatgtacaaagctcaaagaaagggaaaattaccatgacatcaactgtcaatgcattttctaaatataagtaaaatcaattcagcacaacttgatttttaatatatctgatgatttattcaaagtccctgcattatccaaacacatatgcctatatcctaaagatctataagctttaagaacaattttatttcatgtttaacaactataatcctttctttaaaatatgctctcatgtaatttatatagcattagacaaatattaattgaaaataaaggtaagccatcattttaaattaaaaatacatgtgaaatagacaatttgagaacgcttattttagtatataatcaaatccaagccaataatattcttaaaaagtccatcaataattataaaagtagtagaatatgcctaatgtatttgaataatgggtggctgccataatccaggactgttaatgtaataacatgct

SEQ ID NO: 326713 - DNA, 610 bp, Homo sapiens
atttgacagcagcaaccctaataaataggtgcttaaatttttaatgctgaaaatgttatttttcaagaataactaaaaaaaatgaaatgttacatawtgctcatattaagtggaaaataactgcattttcttttatatgcatgtacaaagctcaaagaaagggaaaattaccatgacatcaactgtcaatgcattttctaaatataagtaaaatcaattcagcacaacttgatttttaatatatctgatgatttattcaaagtccctgcattatccaaacacatatgcctatatcctaaagatctataagctttaagaacaattttatttcatgtttaacaactataatcctttctttaaaatatgctctcatgtaatttatatagcattagacaaatattaattgaaaataaaggtaagccatcattttaaattaaaaatacatgtgaaatagacaatttgagaacgcttattttagtatataatcaaatccaagccaataatattcttaaaaagtccatcaataattataaaagtagtagaatatgcctaatgtatttgaataatgggtggctgccataatccaggactgttaatgtaataacatgct

SEQ ID NO: 326714 - DNA, 610 bp, Homo sapiens
atttgacagcagcaaccctaataaataggtgcttaaatttttaatgctgaaaatgttatttttcaagaataactaaaaaaaatgaaatgttacatattgctcatattaagtggaaaataactgcattttcttttatatgcatgtacaaagctcaaagaaagggaaaattaccatgacatcaactgtcaatgcattttctaaatataagtaaaatcaattcagcacaacttgatttttaatatatctgatgatttattcaaagtccctgcattatccaaacacatatgcctatatcctaaagatctataagctttaagaacaattttatttcatgtttaacaactataatcctttctttaaaatatgctctcatgtaatttatatagcattagacaaatattaattgaaaataaaggtaagccatcattttaaattaaaaatacatgtgaaatagacaatttgagaacrcttattttagtatataatcaaatccaagccaataatattcttaaaaagtccatcaataattataaaagtagtagaatatgcctaatgtatttgaataatgggtggctgccataatccaggactgttaatgtaataacatgct

SEQ ID NO: 326715 - DNA, 490 bp, Homo sapiens
catatcattttgcttctgtctccttccaaatctcatgtcctcaaatttcaaaacacaataatgcctttccaacagtcccccaaagtcttagctcattccagtattaacccaaaarcccaagtccaaagtctcatgtgaaacaaggcaagtcccttctgcctatgagccttaaaatcaaaactaaggtagttatttcctagatacaatgcaggtacagacattggttaaatacacccattccaaatggaagaaattggccaaaagtataggccaatttcttggggtctatggggcccaggcaaatctgaaatccagtggggcagtcaaaccttaaagttcctaaatgatcacctttgactctatgtctcacatccaggtcacactgatgcaaaaggtgcattcccatgggcttgggcagctctgcctctgtaggtatgccatgtatagcttacctcctggctgctttcatgggctgccattgtgtgtctgc

SEQ ID NO: 326716 - DNA, 490 bp, Homo sapiens
catatcattttgcttctgtctccttccaaatctcatgtcctcaaatttcaaaacacaataatgcctttccaacagtcccccaaagtcttagctcattccagtattaacccaaaagcccaagtccaaagtctcatgtgaaacaaggcaagtcccttctgcctatgagccttaaaatcaaaactaaggtagttatttcctagatacaatgcaggtacagacattggttaaatacacccattccaratggaagaaattggccaaaagtataggccaatttcttggggtctatggggcccaggcaaatctgaaatccagtggggcagtcaaaccttaaagttcctaaatgatcacctttgactctatgtctcacatccaggtcacactgatgcaaaaggtgcattcccatgggcttgggcagctctgcctctgtaggtatgccatgtatagcttacctcctggctgctttcatgggctgccattgtgtgtctgc

SEQ ID NO: 326717 - DNA, 490 bp, Homo sapiens
catatcattttgcttctgtctccttccaaatctcatgtcctcaaatttcaaaacacaataatgcctttccaacagtcccccaaagtcttagctcattccagtattaacccaaaagcccaagtccaaagtctcatgtgaaacaaggcaagtcccttctgcctatgagccttaaaatcaaaactaaggtagttatttcctagatacaatgcaggtacagacattggttaaatacacccattccaaatggaagaaattggccaaaagtataggccaatttcttggggtctatggggcccaggcaaatctgaaatccagtggggcagtcaaaccttaaagttcctaaatgatcacctttgactctatgtctcacatccaggtcacactgatgcaaaaggtgcattcccatgggcttgggcagctctgcctctgtaggtatgccatgtayagcttacctcctggctgctttcatgggctgccattgtgtgtctgc

SEQ ID NO: 326718 - DNA, 629 bp, Homo sapiens
gtttctatatctctaaaggtatatttgttatatactgataattccaattaatcagcatgatataggaattttcaatttaatgtgcctactaaaatattttattgccatattttcttccctttgttttttggggaatttattcctctattttcacagttttcaagatgaatgatttaaattttaatatttgtcatttcctgtgttagcagttttcacactgctataaagatactacctgagatgggtaatttatgaaggaaagagatttaattgactcacagttccacatggctggggcctcaggaaacttacaatcatggcagaaggtgaargggaagtgagtaccttcttcacggggcaggcaggagagagagagagagagaaagagaaagaagggggaagcatgagacacttatcaaacaacaagatctggtgagaactcactatcatgagaacagcatggaggaaactgccccatgatccaatcacctccctctaggtcccacccttgacatgtggggattacaattcatattacaattcgaggtgagatttgggtggggacacagccaagccataacatttgtgaacacttcagactataattctctaagtcccaatttagctgt

SEQ ID NO: 326719 - DNA, 629 bp, Homo sapiens
gtttctatatctctaaaggtatatttgttatatactgataattccaattaatcagcatgatataggaattttcaatttaatgtgcctactaaaatattttattgccatattttcttccctttgttttttggggaatttattcctctattttcacagttttcaagatgaatgatttaaattttaatatttgtcatttcctgtgttagcagttttcacactgctataaagatactacctgagatgggtaatttatgaaggaaagagatttaattgactcacagttccacatggctggggcctcaggaaacttacaatcatggcagaaggtgaaggggaagtgagtaccttcttcacggggcaggcaggagagagagagagagagaaagagaaagaagggggaagcatgagacacttatcaaacaacaagatctggtgagaactcactatcatgagaacagcatggaggaaactgccccatgatccaatcacctccctctaggtyccacccttgacatgtggggattacaattcatattacaattcgaggtgagatttgggtggggacacagccaagccataacatttgtgaacacttcagactataattctctaagtcccaatttagctgt

SEQ ID NO: 326720 - DNA, 595 bp, Homo sapiens
atagaatttgtttgaagccacaaacattttgtttatttagttatcatcatctaatctttggcaattttgttgccaaaataataatccatataactaggggtgtctctgtggttatttctaatgtcaaaaatggtgcttggcacattgtagggtaggcacttactacattttaaaatrtatattctcattccatttgactttttgtgactgctgtgaactaaactgtgtccacacaaaatccatatatggaacctctaatgctcaatgtgactatatttggagttggacttttaggaggtaattaagattaaatgaggtcataagagtgaggtcctaactcaatagagttggtggtcttaaacaaagagaaagatctctctctctctttctccctgtttctctctctctctctctccgtttctctctctttctttcttccttcctctctctctctttctctgcaccctcaaagaaaagcatgtgaggacaaagcagacatctgcaagccaagaggagagcccacaccagaaacagaactctgctagaaccttcatcctggaattttcagcctccataactatcagaaaacaaattt

SEQ ID NO: 326721 - DNA, 525 bp, Homo sapiens
catactctctgctcatgagaaacatgccactaaaacggcagagtgcaggatgagcaatctgtaagtcaaaataatacatcaacagataagtcagcctcagcatttggcccattatttcctgctaaatgtgtggtcctcttatcctgactttkgtcttattctcaatgtcctacctttcttctttagaattcctctttatccttgaagctttccccaatcctgtggcaagtaggtaatgcctccacccaatatatagcattatagctcttggattaccaagtagcctaacaacaacaaaagaaaagaaatgtcatctttcatatttaactgtgaatatttccatctatctgtcttttctcacaatgtctggatatttggttattctcacttgtagatgagatccatcagaggacactcagagtacttgtggatgcagagcataggttttactgaatagtcttttgtgattatttcaagcagatgtgttcatgtctacagtttttttttaaaacaagtgttacttct

SEQ ID NO: 326722 - DNA, 573 bp, Homo sapiens
attgcctaattatcttttttccattctattacaagtgtctaattaggccctaacaatacataaaatagcaaagtatggtttatgattattttttataaatattacatttttgagaactatagcaataacataggaaaatgatataaaagaaatagagtaaacttgactgtaagaagtaggaaaatttaaataactcttcgttctccattctctacttgttgaaatgctttacattctaaggatccaacttaagtgcctccttctccctctatctttccaagcatarttaattactccctttatactttcaaagcccattgcacatacttttatgtgatattgcttcagttctgctttgttgttaatgctgtttgttaaatctgggtctctcccactaagttagaaaatactctgcagcgagggctatatgccttggtttctgttgctcacggtatctaatacacgacttgtacaaaagtggtgatcaatgaaattttgttgagtaaataaacaaaggaataaataactaaagaggtggaaatagaaaagaaacattgatacaaaagttaaggc

SEQ ID NO: 326723 - DNA, 573 bp, Homo sapiens
attgcctaattatcttttttccattctattacaagtgtctaattaggccctaacaatacataaaatagcaaagtatggtttatgattattttttataaatattacatttttgagaactatagcaataacataggaaaatgatataaaagaaatagagtaaacttgactgtaagaagtaggaaaatttaaataactcttcgttctccattctctacttgttgaaatgctttacattctaaggatccaacttaagtgcctccttctccctctatctttccaagcataattaattactccctttatactttcaaagcccattgcacatacttttatgtgatattgcttcagttctgctttgttgttaatgctrtttgttaaatctgggtctctcccactaagttagaaaatactctgcagcgagggctatatgccttggtttctgttgctcacggtatctaatacacgacttgtacaaaagtggtgatcaatgaaattttgttgagtaaataaacaaaggaataaataactaaagaggtggaaatagaaaagaaacattgatacaaaagttaaggc

SEQ ID NO: 326724 - DNA, 573 bp, Homo sapiens
attgcctaattatcttttttccattctattacaagtgtctaattaggccctaacaatacataaaatagcaaagtatggtttatgattattttttataaatattacatttttgagaactatagcaataacataggaaaatgatataaaagaaatagagtaaacttgactgtaagaagtaggaaaatttaaataactcttcgttctccattctctacttgttgaaatgctttacattctaaggatccaacttaagtgcctccttctccctctatctttccaagcataattaattactccctttatactttcaaagcccattgcacatacttttatgtgatattgcttcagttctgctttgttgttaatgctgtttgttaaatctgggtctctcccactaagttagaaaatactctgcagcgagggctatatgccttggtttctgttgctcacggtatctaatacacgacttgtacaaaagtggtgatcartgaaattttgttgagtaaataaacaaaggaataaataactaaagaggtggaaatagaaaagaaacattgatacaaaagttaaggc

SEQ ID NO: 326725 - DNA, 554 bp, Homo sapiens
tttaggacattagccaggcgtagtgtaatctcagcaccttgggaggctaaggtgggatgatcacttgtggccaggagttcaagcccatcctggtcaacataacaagactatgtttttacaaaaaatgttaaaaattagcttgtaatgatggtgcatgcctgtagtctcagttactcttgaggctgaagtgaaagactctcttgggtccaggagcttgaggctgcactgagccatgatcacaccactgtactccagcttggatgacagagtgagaatctgtttctaaaaaaaaaagaaaaagaaaaagaaatcaggatgccacatcttaactggcatcctataatagatttgcttaataaacgttattgaaggacacttttcagcattgaaattcacacgttttaaaatgtatatgccctggtaaccactaccctaaagaagataaagaatttttccacctccaaaagtttgtattcartcttgccaccctaaactctcacaacaaataaccactaatctaatttttattagcgtatagtagttttaccagtttt

SEQ ID NO: 326726 - DNA, 506 bp, Homo sapiens
aagttaataatacacttactatgcaccctagtcactctacttttgtttatttacccaagagaaataaaatttgtttatacatgaagacttgcaaattaatgaccttagtagctttattatagtggctccaaactggaaaacctcctaggtgcctttcaatagcagaatgataaacacatagaatattaatatactggaatactaaacagcaattaagaagaatgcattagtgtaacaagaaatggcatggttgaatctcaaaaatattatgatgagtgaattgcrtgattccatttatatgaaactttagaaaagattaatataatccataattatagacaatatatcagtgattgcttctatctgagggtctagaggagattgactgggaataagcaaaagagagcttttttggtgattgaaatattctatatcatgattgtggtgttggttacacatgtctatatatgtatcaatgctcataaacactacatttaaaataattt

SEQ ID NO: 326727 - DNA, 506 bp, Homo sapiens
aagttaataatacacttactatgcaccctagtcactctacttttgtttatttacccaagagaaataaaatttgtttatacatgaagacttgcaaattaatgaccttagtagctttattatagtggctccaaactggaaaacctcctaggtgcctttcaatagcagaatgataaacacatagaatattaatatactggaatactaaacagcaattaagaagaatgcattagtgtaacaagaaatggcatggttgaatctcaaaaatattatgatgagtgaattgcatgattccatttatatgaaactttagaaaakattaatataatccataattatagacaatatatcagtgattgcttctatctgagggtctagaggagattgactgggaataagcaaaagagagcttttttggtgattgaaatattctatatcatgattgtggtgttggttacacatgtctatatatgtatcaatgctcataaacactacatttaaaataattt

SEQ ID NO: 326728 - DNA, 617 bp, Homo sapiens
gcacctcataaataggtacaattattaaacatcaaytttttaaattcatataaaaacaggcatccaaattgcaaaacaagaattgaaactatttctacttgccaaaaataaaacaaaacaaaatgattggagatgatgatgatatacatttcattttaaaaagggggggcttacagaaaagatttccaaaatataaaaaataatttcctttaaatagcaagattcctacattttaagcaatgtattatattttcataaatatagccctttatcaaatatatcctaaaatacccaaaagtgagggtaatgaaagaaaacttagactattttatgaatttcagtcatgactccttttcctttaccccataagtgctggtaagctctcccacacgttcctggagtgcaaagctgggtctggcacttttttattccatatgcttctaaaactcagcaaggatggagctttatcatctcctgcataaattaggggtgtgatttgccaatatgactgggcgatagtccagctgtcttgaaaaattaagaaaaggaagagaatagtgtattttttaaatctctctcaacctggaaaaggaagacacaagttgaagctaagtgga

SEQ ID NO: 326729 - DNA, 563 bp, Homo sapiens
tgctatatcctggaggacattatcccagccttcaaagcattgccacccagccagtgccataactgaatattccaaaaaccacttaacccatcaggtcagctgcttcgggttgatggtgtattagtcagttctcatgcttctaataaagacatactcaagattgaataatttataaacaaaaaaggctttaatggactcacagctcctcatggctggggaggactcaccatcatggcagaaggcaaaggaggagaaaggcacatcttacatggtgtcaggcaagagagcttgtgcaggggaactcccatttataaaaccatcagatcttgtgagacaaccatgagaacagtgtgggggaaaccgsccccatgattcaattatctccaccagagtccctcccacgacacatgagaattatgggagctacaattcaagatgtgatttgggtggggacacagcaaaatcatattagatggggacatgataacatcaataaattttattagcatgagccaatgccacattttatttgccgtaaacttaatttccatgtcaaagacaat

SEQ ID NO: 326730 - DNA, 586 bp, Homo sapiens
ctcacaataaccttggacaagttgtttaacctctttaagcctcaattttgtcactggtaaattgggataatagtacctatatcagagtgttatcttgagaatcaaataagtaattgatatggtttggctgtgtccccacctaaatctcatcttgaattgtgactcccacaattcccacatgtcaggggaggaacatggtgggaagtgattgaattatgggggcaggtcttccctgtgctgttcttgtgatagtgaatgaatctcacgagatctgatggttttaaaatgggagtttccctgcacaagctctctctttgcctgccaccatctatgtaagatgtgacttgctcctcctttccttctgccatgattgtgaggactccctagccatgtggaactgtaagtccattaaacctctttcttttgtaaattacccagtctygagtatgtctttatcagcagcatgaaaatgaactaatatagtaatctatttagcacagtgcactgcaaataaatagtactcaatatatggttgcttccattaccatgattattattcttattgtctttgttgatacttactata

SEQ ID NO: 326731 - DNA, 589 bp, Homo sapiens
gtacaggaggtctgctaatactatccttttctgcacccatggtaggcaatgctattagatcatatgctatttcttactgggcctgggtatagcctcaaaactcttattaacgaatagatattcattagaagattttaactgatttagaacaatttattcttcctaggatcactttaattttcttatagggaattaccacaccaccattttaagcaagctgaataaaattgcaaatcaaattaaaccattatttttatggaggatgaagggttttctagaggctataacaggttacttctgccagatcttactgcctcagtaggaccaaaaattgagcatstgacttaagcttgaccagacaaaagccttctgttcaaagagttaaaatctcaagcaaagttattcaggattaaagtaagaaaaacaaagaaacaaccccaccctgctgtccccccaaagaaaaaccccaaaacaactacattcctttcagagcaaaaaccctaatgattagaggcagtagagggtgacctgctacttttctggtttctttttttatttctaagcatcttttctacccttcctatttatt

SEQ ID NO: 326732 - DNA, 517 bp, Homo sapiens
acaaaattctggcttaccagcttgtctctctctttgtccagatatagcaaaggttatggatataccctttcttttcatttttktctcctctactttcttctgtatttccacttgtttctggttcttttagtttaccatttatctttagtatgggaacttcaataagtgagatgttttttgctttttaaatttgtttaaggcagtttctgtagcagaagaacttaatgaaaaaaatgaacttgtggcatgctaccattttcagtaaaactacaactaattgcaaggaaaggtaattttaataaaacttacatctgacacacagaaatacacacatacgcacatgcatacacatggtggtatatatttccaaaataaatgcagtgatattcttttgatgcatattgtataaatagaactaagatggaagaaataaaaatacataatataagaggttgtttagttgttcaagttagataaaaaggtagtatttagttgtggtgactctttttcaaggctt

SEQ ID NO: 326733 - DNA, 512 bp, Homo sapiens
agccttgtttaggttctaattatttatttcttcattctcaacagctwtaattaaccatagtgacatctagtatggctaatctcctggtttccccaagactgagggtgttcccagagcatggactttcagtgctaaagccaagtaagtccctggcaagctggaatgaggtagttaccctagactcctgggaccttctctttgactgaattttccttacttctgataagaggtataatttcttacttatagagaaaatagaggctatcaggtagaaaatttctcaatatcctttcctacccattaaaaaatatctggctagggacctgcttttattagttatctccacttttcatgtcttattcacatctaaccactcatcatatctaataattcttttccatcagtgtagtgttaaagaaaaatttgccaagttcaatcatgcacttaggaaactgtccctacatgactctaaacttggtagaactttttttctatgtccacattttttttta

SEQ ID NO: 326734 - DNA, 710 bp, Homo sapiens
ttctaggctggtagatggccatctgcttctactgtttccacaaggtcatctttccgtgtctgtgctctaatctccgctaataaggacaccagtcatttactttagggtccacccctctggtcacattttaccttgattatctttctaaaggccctatctccaaacacagtcacrttcggaaatactggtggttaggacttaaacatatgaattttgaagagacataatttagtccgtaacagcatgcctgttaaaaagtgatgtattttccttctgtttcctattttttgggacagaattcacgtgctataaaattcactcttttaaagtgtacaattatatttataggattctttgggataggagtctacctatatttgcttccaagaggaggcttgtgttttctctactttttctttcaatcattttgagctttatttaacacttgtcccgccagctatcattagtgatactttatggtggcaatttggtttaagaaaaaaaaatagatggtttggtgaaagtctgggctctatagccctcatgaattaagtgttattgacctctctttaaagtgagccccaacattctcccagcctaaacctcagaggtgggaagctggggcctaagcactaaagtttcgttatccagccacgcggcagcaaggagaatcagctccttgagggctgagatgatttccacttcatagt

SEQ ID NO: 326735 - DNA, 587 bp, Homo sapiens
gtatgactttacggcatatctccataaaaggaaaaaatctgctcttgcgagggttatgtcaaatcttcaagtcaaaaactataataaattctgcatatgaaattggaaatgttaatccattatgattttataagtaactccatagcctcactttcaaaaaggaagaaaaagaaaacccttgacaattaacatttagttctttctgaaaaagtagctttaatttttttctgatcttttttacattatgacttcctaaaattgtgctccaagtataagacccagtacctgcatagactgcataagacctagtacctgactcagctaagttatgaggctgctggaacctggaaagatagctttattatcattattattattattatatattatatctttaatatatcacatatttcttacacattcatctgttgatgaacacttaggttgactctatatcaacctaagttggcttaggttggctattgtgaataatacttcaacaygggcatgtagatatctctttgatgtactgattttatttcctcatagtttataccgagtagtggggttgtgaatcatatggtagt

SEQ ID NO: 326736 - DNA, 710 bp, Homo sapiens
ttctaggctggtagatggccatctgcttctactgtttccacaaggtcatctttccgtgtctgtgctctaatctccgctaataaggacaccagtcatttactttagggtccacccctctggtcacattttaccttgattatctttctaaaggccctatctccaaacacagtcacgttcggaaatactggtggttaggacttaaacatatgaattttgaagagacataatttagtccrtaacagcatgcctgttaaaaagtgatgtattttccttctgtttcctattttttgggacagaattcacgtgctataaaattcactcttttaaagtgtacaattatatttataggattctttgggataggagtctacctatatttgcttccaagaggaggcttgtgttttctctactttttctttcaatcattttgagctttatttaacacttgtcccgccagctatcattagtgatactttatggtggcaatttggtttaagaaaaaaaaatagatggtttggtgaaagtctgggctctatagccctcatgaattaagtgttattgacctctctttaaagtgagccccaacattctcccagcctaaacctcagaggtgggaagctggggcctaagcactaaagtttcgttatccagccacgcggcagcaaggagaatcagctccttgagggctgagatgatttccacttcatagt

SEQ ID NO: 326737 - DNA, 614 bp, Homo sapiens
ccatgtaaatgtcaggttcttcatcattctcatcatcataattatcatgattttggatgagttcaaactacctagataagggaagggaaggagtttttatcaacattacctagaatatgaatgagctttcaataaatttttgttgaattaaataggtggataaacaaatttacgaattatcattggttgcttaacaaattctatccaaacgaattttgaagttgtttcttttagattattttctatttttccaaaaggaagagtaatgacagctatctacaagactgaaaaggaaaatatggtcttgtgaggaccagaccacaaaatttgccaaggaccctgagtatctgttcagaggtcaggcaaaagtaactgccaytgtcttatttaattctgagaaagctcctttcagaaagtagaatttccgagacacttcaaatcaaagggtaggtggttttgtgaatatcttgagatataaaccttctggagaacaattcagcaatatttatcaaaagctttaaaaattgagtaatgccttctctagaaatatcctaaaatgataattaagaatatgaacaaatgtttgactttatagatacttgtagcaacatggt

SEQ ID NO: 326738 - DNA, 621 bp, Homo sapiens
tgcttgcatctcacaaaaaaagggaaaggtaaagttgatacatgcaagttttaaggtataaaaaatacataggtagtatactgccaactaatttctgtacatgtacaatataggtgggctgacaataagaatatgcattagtcttcaggaaaactgcacaacataggcactcctcaccaataagttcatattgagtagcatttaagatttatacaacttgaaattgtatatatatatatatatatatatatatatacacacacacacacacacacacacacacataaaaaacagaatttataaagcytaaaaggtcacaagcatattataataataatacatataagattaatgcagtaaccaaatctccatccacactaagggacacattgtacaatatttacgcagctgggcatttcataactttctctaataataatggctgtcaggctgtattctgtcagaaaactatattcataacaaaatattgaggagcacagatattacagaactagaaaatttacaaccatcataagaaaagaacggtatcaagatttataaattgataaacacatgtataatttcaacatgaagtaaaaggttgaggagaggcaaggagaa

SEQ ID NO: 326739 - DNA, 585 bp, Homo sapiens
tcagttgagttgcagataagcttatgttaattttttattcactccttccatttctatccatcctagctataagacatttagaggtgggaacttggcatactcttccctatacttgagagcctgttgaagtcacatgaataacgaaatgtacactgaccatttaattcatataactaaatataaatattttatatttaaaatgtattgaaaagtttttattgcttaaatttattatgacagytattatttagatttttcattatttaaaactcaaacaatacaggaaacaaacatgtagggaaatctcaagtaattcattatttattgttctttttatcacagaagacacaagccatctccttactggttagggccatattatccagaaccgtcagaacatttcacttttcatttcccattgaaatctgaggagtgtgttttgaactctatagtgaaatgcctacaactacccagtgtaactctgtcttcttaggagggtatgattctgcaagatgaatatgataatgtcctaaaatatcacccttacatttaattatataaaacaccactaatgcaataataata

SEQ ID NO: 326740 - DNA, 591 bp, Homo sapiens
attctaaaattgagtacataattggaagtaaaacactcctcaacaaaagcaaaagaacagaaatcaaaacaaaccgtctctcagaccagggtggactaaaattagaactcaggattaagaaactcattcagaactgcacaactacatggaaactgtaaaacctgctcctgaatgacaactgggtagataacaacgttaagaaagaaagaagttgcttgaaaccagtgagaacaaagacacaacctaccagaatctctggcacacagctaaagcagtgttaagaggaaaattaatagcactaaatgcccacatcagaaagtgggacagatttaaatcaacactctacagtcagaatgaaaagaactagagagacgggcatggtggctcctgcctgttatttcagcacttcgggaagttgagccaggcagttagcctgagttcatgactccaagaccagcctggacaaccarcatggtgaatctctgtctctacaaaaatgtagccgggcaaaatggtgcacaactttaatcccagatactcaggagggtgaagttgggtaatctcttgaacccaaaagataaaagtcgcagt

SEQ ID NO: 326741 - DNA, 630 bp, Homo sapiens
ggggcctcagggccatgttgaatgagaactgtggtcttgatgctaagagccaagggtggtttcacagagcagggaaatgacgtcatcagatctgaagactactccagcagctgagtgaagagaacgtggcaagtttcaaaaatattaagaacaaggaaggtgccatagagggatagaagcccatgaaagagacagaggagcacctggggaagcaggaagaaaaccctagaagtgaagggaagaatgctcaaacgtgaaatccaagaagctagggactgaaaagtgtctgctcagctcaaatttctctggagcagactataggtgaccttggccagaccttggcccacagagtggtgggatcaagccagattccagcggtttgaggtataaatggaagtgaggraacagggttgaatgtaaacaactcttgccccaagcagggcaattaaagagagtagagagatagcttgatggcttatggtaagggccaaatgagataatgcatgcacaaggacctggtgactggtgctctaggacacttactcatgattattagagcatgaagtcctatccacatccccgccaccagaagctagagtcctaagtgccaaggagggcttcctgcctgcc

SEQ ID NO: 326742 - DNA, 630 bp, Homo sapiens
ggggcctcagggccatgttgaatgagaactgtggtcttgatgctaagagccaagggtggtttcacagagcagggaaatgacgtcatcagatctgaagactactccagcagctgagtgaagagaacgtggcaagtttcaaaaatattaagaacaaggaaggtgccatagagggatagaagcccatgaaagagacagaggagcacctggggaagcaggaagaaaaccctagaagtgaagggaagaatgctcaaacgtgaaatccaagaagctagggactgaaaagtgtctgctcagctcaaatttctctggagcagactataggtgaccttggccagaccttggcccacagagtggtgggatcaagccagattccagcggtttgaggtataaatggaagtgagggaacagggttgaatgtaaacaactcttgccccaagcagggcaattaaagagagtagagagatagcttgatggyttatggtaagggccaaatgagataatgcatgcacaaggacctggtgactggtgctctaggacacttactcatgattattagagcatgaagtcctatccacatccccgccaccagaagctagagtcctaagtgccaaggagggcttcctgcctgcc

SEQ ID NO: 326743 - DNA, 418 bp, Homo sapiens
cctcgcctggccaagggaaacatttgtgaaagtgagtgagaataacattcttcttaactctccacaatcaaaacttggggcttctttatgcacttgagcgagttattgaagaagaaacaagaaatacagtgtttttcccagttatttttccagctggttgttaggccaacaagaaagaggtggaggcaggcagtggtgtgatgggtgggtacaggagttgccaagtactctgggactgttacttatttccttctgtttcgggcccttggaggatgttaaagtctaaatagttaggttttttcttttctccctaaattggcaggagaataaaatgtgcgaatgtrtttaaaaaactaaagtattacagaaaaggaaggcggtattattagttcatttagagctcaccatgactctataa

SEQ ID NO: 326744 - DNA, 418 bp, Homo sapiens
cctcgcctggccaagggaaacatttgtgaaagtgagtgagaataacattcttcttaactctccacaatcaaaacttggggcttctttatgcacttgagcgagttattgaagaagaaacaagaaatacagtgtttttcccagttatttttccagctggttgttaggccaacaagaaagaggtggaggcaggcagtggtgtgatgggtgggtacaggagttgccaagtactctgggactgttacttatttccttctgtttcgggcccttggaggatgttaaagtctaaatagttaggttttttcttttctccctaaattggcaggagaataaaatgtgcgaatgtatttaaaaaactaaagtrttacagaaaaggaaggcggtattattagttcatttagagctcaccatgactctataa

SEQ ID NO: 326745 - DNA, 554 bp, Homo sapiens
ctgacatagaaaatggaacatgtattctaagtatcaccccatttccatcggttacctcctacaatggacacaagttttattttrgaggctaatatggggccccactcctggtggtactggttgggcttactaccttgggaagtgaggaatatgggctggggctagttggataagggtgcctgataaacttggggtggacttcctcagaactgggggactgaggagactccaggaaagatgtaggccttctagtgggaacagctaggagggaaacccttaggcatggcttccgggttcctgggagtaatatgagccaataaaggaccataaaagcctgtacataaaggacctcctcccattttccttattttatatagaataagtccaattgtaaaatagcgtcacaatatatagaaccaaatctatatattaggccaaatctcttggttttctaatttgttttggacccaagtggtgctacaatagaaaatgagtttctttttctttaggttgaatttgaatttgctccaacagcctaaaagacaccctagtgg

SEQ ID NO: 326746 - DNA, 554 bp, Homo sapiens
ctgacatagaaaatggaacatgtattctaagtatcaccccatttccatcggttacctcctacaatggacacaagttttattttggaggctaatatggggccccactcctggtggtactggttgggcttactaccttgggaagtgaggaatatgggctggggctagttggataagggtgcctgataaacttggggtggacttcctcagaactgggggactgaggagactccaggaaagatgtaggccttctagtgggaacagctaggagggaaacccttaggcatggcttccgggttcctgggagtaatatgagccaataaaggaccataaaagcctgtacataaaggacctcctcccattttccttattttatatagaataagtccaattgtaaaatagcgtcacaatatatagaaccaaatstatatattaggccaaatctcttggttttctaatttgttttggacccaagtggtgctacaatagaaaatgagtttctttttctttaggttgaatttgaatttgctccaacagcctaaaagacaccctagtgg

SEQ ID NO: 326747 - DNA, 587 bp, Homo sapiens
ctcacctgcactggggagggtcctctgctttcctcaatctatccattcaaatgctaatatcatctgaaaacaccccaaagacacacccaggaataatgtttaatcaattatctgggtaccccataacccagtctatacttaaaattaaccatcaagactatatatgcatttatagaaaaatatatatgaaatgtatctaaaaacattttaaatttaaaagtcagccctccctcagagtggtctcaccccacrgacaagggagtttaccctccaactcccatcaggcattggctgagagttgcttcaggaggtgttaactcgtcacacttctggccttccagatgcataggctggacgtactcctgcagccaggggaagccccaaacaaagttgcaggtatatgtgtgagataccttgatcagggatgtgggggatgggggcagagcactatcagacatgttgcgtttttgcaacaatgggcataagaaggatatttgaaaatctttaagcacactattagtggttaagaagacctattgatttttggatgcccatcatgtgctgaataccatgcccgacccccaagt

SEQ ID NO: 326748 - DNA, 587 bp, Homo sapiens
ctcacctgcactggggagggtcctctgctttcctcaatctatccattcaaatgctaatatcatctgaaaacaccccaaagacacacccaggaataatgtttaatcaattatctgggtaccccataacccagtctatacttaaaattaaccatcaagactatatatgcatttatagaaaaatatatatgaaatgtatctaaaaacattttaaatttaaaagtcagccctccctcagagtggtctcaccccacagacaagggagtttaccctccaactcccatcaggcattggctgagagttgcttcaggaggtgttaactcgtcacacttctggccttccagatgcataggctggacrtactcctgcagccaggggaagccccaaacaaagttgcaggtatatgtgtgagataccttgatcagggatgtgggggatgggggcagagcactatcagacatgttgcgtttttgcaacaatgggcataagaaggatatttgaaaatctttaagcacactattagtggttaagaagacctattgatttttggatgcccatcatgtgctgaataccatgcccgacccccaagt

SEQ ID NO: 326749 - DNA, 551 bp, Homo sapiens
ttactttgcccagatccatctgaggaatcactatctatgamaactgtagccttacaaaatgtatttcttaaatcatacacttgaaagttgaaattactcaattcatgagctgcagaagaaatgtgttaggcataaaaacgttaatttccttgtaaattttcaccagagctcttaggtgaccaggtgcattgtcagtgagcagtaatatttttaaaggactctttgttctgagcagtagacccatagcgggcttaaaatattcagtgaaccatgttgtaaaaagatgtgctgtcatcaagactttgttgttccactgatagagcataggcagagatttagcgtaattcttaaaggccctaggattttcagaatggtaaatgagcactggcttccacttaaagtcaccagctgcatttgaccctaacaagagtcagcctgtcctttgaagccaggcattgatttctctctagctgtgaaagtcctagctagcatctttttcccatagaaggctacatggaaaaatctgtcgtttagcgtaaccaccttcatca

SEQ ID NO: 326750 - DNA, 551 bp, Homo sapiens
ttactttgcccagatccatctgaggaatcactatctatgaaaactgtagccttacaaaatgtatttcttaaatcatacacttgaaagttgaaattactcaattcatgagctgcagaagaaatgtgttaggcataaaaacgttaatttccttgtaaattttcaccagagctcttaggtgaccaggtgcattgtcagtgagcagtaatatttttaaaggactctttgttctgagcagtagacccatagygggcttaaaatattcagtgaaccatgttgtaaaaagatgtgctgtcatcaagactttgttgttccactgatagagcataggcagagatttagcgtaattcttaaaggccctaggattttcagaatggtaaatgagcactggcttccacttaaagtcaccagctgcatttgaccctaacaagagtcagcctgtcctttgaagccaggcattgatttctctctagctgtgaaagtcctagctagcatctttttcccatagaaggctacatggaaaaatctgtcgtttagcgtaaccaccttcatca

SEQ ID NO: 326751 - DNA, 498 bp, Homo sapiens
accaatcatgtttaatatatctgtgattgtaaaccaaggaataggatgtagaagtaagggacaaacaatttcactaaagatacttatcctaactcaaaagtaagtaaactttcccttttttctttctaatcactgtataaacacatacagatataaagctaagcagtcttttactgacttagaaatccctgttaatctaaattataaataattaaatcacatttggtacagatagatcttgtagaacagttgaaaatgggcaatcttatttaatgcacatacgataatcctctattaatagaataactactttatcaaactattccttaacatggttaatatttttctacatttatatgtgcagtwtgcattcatgaactcctttaacatgagagctgtttcaggtattgtttctttactaacacctagcatggtgactggcaaatattaggcagtcaaatgtttgttgaattcatcaatgagtacaaatcattattt

SEQ ID NO: 326752 - DNA, 572 bp, Homo sapiens
gggggctgggtgaggcctgtcagtgctggctttccccaacttccctggtgacatgtatgacagagcagaggcagccataatccccctaaaacataactccattggactgagaagcatcctgccattccccaccgtggccacagcacaagaagagtctgagctcagacccacctaaccctgcttctatctgatggtttttctcaacctatgctggtagccgaagacaaaaggcactcttgggagctctacagccccatccactgccagagaaacctgaatacttatcctggctaaggtagggcaagcttatatccccccattctcctacgacagatggtgccctcttgraagtgccacctcctgactggaggccaatcaactcaagccattacagcaactcgtaacagaaccaccctgctccaaagaaggagaaaacaacagctaatttcaccgcctgcaacatcctggctaagcagaggtcctgagtctgtccatgtgacaacttcactgccagtgtaaccagcatttgagaaaaccagcacactaaacaaaactataaccaaggattccca

SEQ ID NO: 326753 - DNA, 572 bp, Homo sapiens
gggggctgggtgaggcctgtcagtgctggctttccccaacttccctggtgacatgtatgacagagcagaggcagccataatccccctaaaacataactccattggactgagaagcatcctgccattccccaccgtggccacagcacaagaagagtctgagctcagacccacctaaccctgcttctatctgatggtttttctcaacctatgctggtagccgaagacaaaaggcactcttgggagctctacagccccatccactgccagagaaacctgaatacttatcctggctaaggtagggcaagcttatatccccccattctcctacgacagatggtgccctcttgaaagtgccacctcctgactggaggccaatcaactsaagccattacagcaactcgtaacagaaccaccctgctccaaagaaggagaaaacaacagctaatttcaccgcctgcaacatcctggctaagcagaggtcctgagtctgtccatgtgacaacttcactgccagtgtaaccagcatttgagaaaaccagcacactaaacaaaactataaccaaggattccca

SEQ ID NO: 326754 - DNA, 415 bp, Homo sapiens
gaaaaaagcatcaggtaacctataaaggaaaacctatcagatttacagtagatttctcagcagaaaccctacaagtcagaagggattggggtcttacctttagactccttaaacaataattwtcagccaagaatattgtatctagcaaaactgagcttcatgaatgaaggaaagataaagtctttttcagacaaacaaatgctaagagaattcaccactgcgaagccagtattaaataaatgctaaaaggacttatgaatcttgaaacaaaatgtcaaaatacaccaaaatagaagctcataaaagcataaatttcacagggcctataaaacaataacacaattaaaaaaaaaacacccaaggtattcaggcaacaactactatgatgaatagaacagtaccctatatctcaaga

SEQ ID NO: 326755 - DNA, 612 bp, Homo sapiens
tttgtagtggtgaattgaaagcgcaatagatggacatatcaggggattggtattgtcttgacctacctttcccactaaagagtgttagaaagatgagattatgtgcataatttagggggtggtagaattcatggaaatctaagtttgaaaccaaaagtaatgataaactctattcatttgttcatttaaccctcattgcacatttacaaaagattttagaaactaataaaaatatttgattccaaggatgctatgttaatgctataatgagaaagaaatgaaatctaattctggctctacctacttatgtggtcaaattctgagatttagtgtgcttatttataaagtggagatgatacttcactgcctacttcaaaagatgactgtgagaagtaaatgggcctattttggagaaaattcttttaaattgtaatataccatagaaatatgaaatattatatataatatagaatcaagaggcctgtccaaaagtcctcccaaagtattataatyttttatttcactgggacaaacatttttaaaatgcatcttaatgtagtgattgtagaaaagtaaaaatttaagacatatttaaaaatgtgtcttgctcaa

SEQ ID NO: 326756 - DNA, 452 bp, Homo sapiens
ttgagtttcacagaaagcaggcagattttaytatatatttttcaattccttcagatcatttactggaatagccaatactgattacctgaaaggcttttcaaatggtgtttccttatcatttgatggaaggactacccataagagatttgtcttaaaaaaaaaaactggagccattaaaatggccagtggactaaacaaacaacaatctttttagaggcaatccccactttcagaatcttaagtatttttaaatgcacaggaagcataaaatatgcaagggactcaggtgatgtaaaagagattcacttttgtctttttatatcccgtctcctaaggtataaaattcatgagttaataggtatcctaaataagcagcataagtatagtagtaaaagacattcctaaaagtaactccagttgtgtccaaatgaatcacttattagtggactgtt

SEQ ID NO: 326757 - DNA, 646 bp, Homo sapiens
tatggcctatatcaaaggtcttccctgccctttggctttccattgggtcctgccactggggagtgctggtaggaactatgaggaacataagagattcccttgactccctccttgtggagtagacccaggatggctgtgtctctcaagcaaggaacccagattacctcaaggtggcactctgggtactttttccttctgagtgattctggtaatcttcccttgtccctttaagcctagggagggtggtacttttgctgttagcaactccagggtacttgtaccatcccttgcagtttccctgaactctgaccatagctttttaaatagtccttttattaaatcctccttttgattgagtatgccatctatttcctgctgggactcagatacagtaattgtatcagaaatagccccagaaaatagaccctcaaaataggattctgggactgggttgttcatatattcaaggaatgcaaggataataggacatgggaaatctacggratgtagtagcatcgcaattactgaacttatcatcaatggtagaatgggatgaaatgcagacagatggcaagatgttgtgaggtcaaatggctgtggcacttagttgctacagaaacaacagttataaaaattatgattatta

SEQ ID NO: 326758 - DNA, 659 bp, Homo sapiens
ttctacttttccctcaaaaacaacactatatccttttccatcctgatcttcagcctgctaagtcaaattgtgtggaatacattaatgtattttcttgccttctggtttctagctgagtttgaccacatgggattcctggtaagaggtgaatgtgagatcaccatgggatagctgtatcacttgaccaaagatgaaattcccctcaaagttgccttttattacctatctttcaaggttctagtacctactcctctatayttctcttcaggcctaggtgcagtagctgtttccctgtgtgatgaaagcaaccaatacaggcaggtcttgcaggtttcagtcctcaaaagaaggaatgcacacaacagacattattgctttttcctgagggcattttccaaattgtgacataagaaaatggaacccaagaatgaaggaatgaagtggcagtcctatgaggagttaagaggcaggagtagttgagggttgtcaaagtagatggaatttaagtgacaaaaccccataaaggaatgacctgcagggaaggaacccatgtatctacatataaattcccctcagttcactggctgatccatcagctgcttatggaatataagacacttcccaaccaccaaaagatatggcagaaaacagcaggtagg

SEQ ID NO: 326759 - DNA, 620 bp, Homo sapiens
ttctgcgtcgctcatgctgggagctgtagactggagctgttcctattcggccatcttggctccaccccccaagccttaggatttctaagaacttggagcagctgaattcacacaggagctacaaatgctgagctttgctcatgtttttgaatctctttctggagtcttttaaaaacaccagcacacttgatgttttccaacatttctcccatatctaaagttaggcgatgattgtatccactgtggattaaagctgcactgtgcttttcagagtgcagtgtttcttaggctaacatggaaatatcacactaggcaattgtctgcattggcagccaagagataccttactacttaaatgtgatgagaagaggaaaatcttcaaaacctttggaaatttactttttgtgtaaatatgacaagtcacacagcagttactagaggtagaatatgatagtcttctgacagtaacggtaatggatttgcaaagtgcttcaagtttataaagcactttcacatctrtttatctcatttcacatcttttaatttaccacaaaatagttaaggaaagaaacatgtgtttcatatgggcagaactttttttcttcatacattaagaatta

SEQ ID NO: 326760 - DNA, 319 bp, Homo sapiens
tgtttcattcttgtttaaacaatggattatttgtattctccattttcatctttagctctctttggtaatttgctaacatttagatttatcttattaatttccttggaataatcttcccatcagtatttcaggctaggcaaactctacaaagacacgctatgagtcatccctcactatttcaaattacttgacacttggtgacttcagctatttctctaggaagccaagtttctcatttcmtatcccagtaattctctgaatgaaagtaatttctaaatccaccctctcaatttcctttaccacttgtttgtggtcacca

SEQ ID NO: 326761 - DNA, 464 bp, Homo sapiens
cctgctaatgcacttagacccagaggcttatccttgcccatcaataagagcctaacaggccctggatggagggagacattggattcactcaaccaaaattcccatcaggaattcagcatttctcttctttattaatattttttgtgcacagtttgtttgaaatgtctggatagcttgggaaagaactacagccagtcctcaaactaaggacaaaagaggtggattgggatgacagattactctatttctatttacacactggtttcaaaggcaaatggcccatttagttaagcragagcttcactaattaccaacattagtgtgttaagctgtagctgtcagtctagtttcctgcatgaaatacagactttggcatctcaccaaacagtgttctgtattaatagtagtaatcatgtaattacatacaccattaggtttggaatcaaatctaaacagaaccatat

SEQ ID NO: 326762 - DNA, 556 bp, Homo sapiens
ggctgccctactgtatgttcccatcagcaggatatgaggcttccccttctaacataaagtcatttcagttcagggtttgttaagcctgtcacagtatgcctatgctcctgcccagaagaaaaacgtgagtccctgtaaaactaaaatccatctcaaatttatacaaggactttgacctcagcaggtatcagaacaaatgagtgattatgtgaaaatttacagtagtgacaattaataatttaacatttttctttgtgtgtaatgttctgttggttttttgagacggagtctcattctgtcacccaggctggagtacagtggggcaatcttggctcactgcaacctccacctcctgggttcaagtggttctcctgcctcagcctctcaagtaactgggactacaggtgcacaccatcacactcagttaatttttgtaactttagtagagacaggatttcaccatgttggccrggctggtctccaactcctgacctcaagtgatccatgcgcctcagcctcccaaagtgctgggattataggcatgagccactgcgcc

SEQ ID NO: 326763 - DNA, 553 bp, Homo sapiens
ctcgtaacaagctactttcaggaaaaaattaagacattctttccctgctccttggacaggagagtctaacatgaaacaaatctctataaagagttggttgcccatttttatagcctttcctccctccctacccccagggaagtgggcagaaaaacgcctgcaggtggaggtgggagcagcaagatgatccacacctgggccctattttcccctctaacttggccttgtgcaaagggacaagcttcacctgagctgagtttcttggcacagctatttgaaaacagcattctgartgttccccattccacacttcaccaaggttaagacctcagaagcataaacaaaagcaaccaactacaattgaggttttacccaaggggcaggactgatgcaaagcagacggagaatgactccacttgagtagggagaggtggaaagtctaggagggcttcatgggggcaatggctcagctgggtgtagaaggtgagtagcaatttgccagtcagattcacaacaggaggtaagaaaccagaagtatccaggcacctaccct

SEQ ID NO: 326764 - DNA, 565 bp, Homo sapiens
aacaaaaaaaaaaaaaaaaaaggaaattctttgtgaaaagtgatttttgatgccactcttgctttcctagttctccaaactcatgctcaatacatctgctgattaatccagttctgcctttgtggatctaaatcccactcaccattgagtactctgctcattttataagtgaaattggataaatgaatgaatgaatgagcaggctagtctactcagtcaaagggaagacgttttgtgttttatttcttccatttttacctttttggtacctgtatagtagattaataaaccctgactgacggccgggcgtggtggctcacacctgtaatcccagcactttgggagcgcaggcgggcagatcacctgaggtcaggagttctagaccagcctggccaacgtggtgaaaccccgtctctactaaaaatacaaaaattagccgggtgtggtggcrggcgcttataatcccagctactcgggaggctgaggcaggagaatctcttgaacccgggaggcagaggttgcagtgagcggagatctcgccattgcactccagcctgggccacag

SEQ ID NO: 326765 - DNA, 565 bp, Homo sapiens
aacaaaaaaaaaaaaaaaaaaggaaattctttgtgaaaagtgatttttgatgccactcttgctttcctagttctccaaactcatgctcaatacatctgctgattaatccagttctgcctttgtggatctaaatcccactcaccattgagtactctgctcattttataagtgaaattggataaatgaatgaatgaatgagcaggctagtctactcagtcaaagggaagacgttttgtgttttatttcttccatttttacctttttggtacctgtatagtagattaataaaccctgactgacggccgggcgtggtggctcacacctgtaatcccagcactttgggagcgcaggcgggcagatcacctgaggtcaggagttctagaccagcctggccaacgtggtgaaaccccgtctctactaaaaatacaaaaattagccgggtgtggtggcgggcgcttataatcccagctactcgggaggctgaggcaggagaatctcttgaacccgggaggcrgaggttgcagtgagcggagatctcgccattgcactccagcctgggccacag

SEQ ID NO: 326766 - DNA, 565 bp, Homo sapiens
gcagctccatgaggttgcctggggccctgaaccctgctgctccagaatgcacatgaagattccaggggactctggttctggctgccacccctttgaggttgggtagagggacaagagagtagatgctcaccacgctcagatcctctccttttacttggtatttttcttaccctgctccttacctccttcccagggttttagcctaggggagggagcagcaatgtgggaccgtttctcaggtcacgccagagtttagctaacctcyctttgcctcccctctaattgtcttcctttccctatgccactaacctgtgaacctttggaggaattaagggtcaaagggaaggctgtctccttctcattaggtcttctttatgccctgagcccctcagcacctatgcttttaaaaggcatagcctttttttctgctataataacttgaagcaaagaggttgcatgcctaagtgatagagtggggcaaaggaaaatggagtgcagagagacaacagtcttttcctccaatcacatgtacccacctggcagtatataatatatgccaactgtg

SEQ ID NO: 326767 - DNA, 599 bp, Homo sapiens
tggaattatgtgaacataagaaatggccactgggtgagtgcccagcaggaatatgggctcaccaaccaagagagtaaacaagtgtcctctgggcattccagcctcagaaggtaacttagaattctaccaaattctaccaacagtagaagcaatcttcagggagtactaaaaatgtgtgtggcaaaccgaagcagtggtattagcacgagcctaccttggaattagcctgagctgcttggtgcaacattcaagtgagaccaaagtagggcagaagaaggaacaggggcctgtgtacccagggagtgtctgtcatgccaatctgtgccttgtctccaagttatcttaggacacaaatctgcgctcaggaagctcatctgtttctgtgcttctkttttttcccttttttggtcttcttgtgctttcctctcatttctcattcaaatttctttttgaatattctagcttttgtctctaaataattaacatctaggcctttagtcttgatcaccctcaccaacccatcctctttgtgccaaccagagggcctctctccttctgtcttttaaaatcagatttattgagatataatttatatataa

SEQ ID NO: 326768 - DNA, 595 bp, Homo sapiens
gttcttgtagttatttctaaacaaaactaacgtcagaatcattggaatcataagaatcatctatttcagaaaaatcagattcgtcaaatgaatcttcagccaacacctgtttgagaatgaycttaacatcacctgtaggaatgctacattttctaggatttgacaatttcagcaactgacaattactgcattttgtaaatggaaataccactactaaaaacagactgttataaatagaatgatatattttgtttccaaagtaaatatattacagcaatgtgaaaataataaaaatgagctatttcatggcaaagttatcttaaggtaaacactgcagctgtaaggacccctggcaagtattctcagggcaaatgggaaaagagtgaagatgcatcattaggttatttgaagtttttcttattttttgatgtaggcatgtatagctataaattcctatcatacatactactgtttttgctgtatctcataggttttgagatgtgtttcaagaaaattttcaatttacttcttagtttcttcattcacccactggtcattcagggacatactgtttaatgtctatgtgtttgtatag

SEQ ID NO: 326769 - DNA, 595 bp, Homo sapiens
gttcttgtagttatttctaaacaaaactaacgtcagaatcattggaatcataagaatcatctatttcagaaaaatcagattcgtcaaatgaatcttcagccaacacctgtttgagaatgaccttaacatcacctgtaggaatgctacattttctaggatttgacaatttcagcaactgacaattactgcattttgtaaatggaaataccactactaaaaacagactgttataaatagaatgatatattttgtttccaaagtaaatatattacagcaatgtgaaaataataaaaatgagctatttcatggcaaagttatcttaaggtaaacactgcagctgtaaggacccctggcaagtattctcagggcaaatgggaaaagagtgaagatgcatcattaggttatttgaagtttttcttattttttgatgtaggcatgtatagctataaattcctatcatacatactactgtttttgctgtatctcataggttttgagatgtgtttcaagaaaattttcaatttmcttcttagtttcttcattcacccactggtcattcagggacatactgtttaatgtctatgtgtttgtatag

SEQ ID NO: 326770 - DNA, 621 bp, Homo sapiens
tggcagtgatgcatctacaagccaagaaatgccaaggattgccaagccacagaagccaggaaagaggcatggagtgggttctccctcagagcctccagaaggatccatgctgccaacaccctgattttggacatctggcctccaaaacagaataaatttctgtggttttaaaccacccagtttgcagtaatttgttacaacaatcccaggaaactaattcaagaatatgatgtggtattttgtggcaacaaattgtaacctgaggggttcttccagcctgctgcacaaagaaagaccacagcattgcagcaaagaaaacagtttagtagacatgaagctggccataccacatgggagatggagttagtactcaaatcaatctcatccaaagctcctttctcaagggcrgtctgggggaaggggtgggagtggctaggcttgctgctgtttggttggaatagagatgaaattataggggtcaaagctgtcctcctaggcactgaatcacttctgggtggggccacaggagcagaattggtggttccaggtggagccatgggtgtcagacatgcaaaaaacctgaaaaggtatcgcaaaaggcaaatctacaatagtggtgtg

SEQ ID NO: 326771 - DNA, 615 bp, Homo sapiens
accagctgactgctgcaacataatatctgcaatgagcttgccagatagtctaaatttttaaagaatagccagcaatctgagtctatgcaaaaactcagatttctggctattttattattttaaatactggccaccaatgaaaaagttttacacattgtgtaacccaaataaatcaacactctgtacccatccttcttgagcacacacacatctgagtggcacggccgtyctaaggcagacaactcttcgcactgccttggcttggcctggctttggtgcaaggaggtgtgagatcaaaggaaatgatctcactgaagagagcagcagcaggggttacttggcctgcaggacatgggccagcctggcattcttcagggacaggcacacagcccaccccaggagtatgtcagagcccagagaggtggaggccaaaaaggcacattcaaaaaaggctgctgctttgctgtgttttcattatttatatttaagatgttagacaccattaatgaagaatgtgaaaatgtttatgcttgaccaaaaataagaaagacatagggtctaggttcttccttgaggtggggagaggcaattcaaccttcatttttaaagagtaac

SEQ ID NO: 326772 - DNA, 496 bp, Homo sapiens
acatgagataatggcctaacaaagaaaagaactaagggtgatctccagcaaagagttatggactcttaaggtgatcagaaacttaacatttaatgtgtgccaactacataagaagtaccacactcaataggtactttatagacattacgctgctttgagagcaccaaagactctgaagtaggcactcttcactccatggcttgcagaagtgaaaacaggctaaaaaaaactaagtgaactaggtaggattcagtgactaaygtgacagtcttcctactccaaattcctctttaccatgttgtccttgtccaactaaaactctatttcctactatgtacttttatataaaatgaaataattggtaagaaacactttaataacaagcagagttagccaggcatggcagctcacacctgtaatcccagcacttttggaggccaaggagggtggatcacttgaggtcaagagttcaagaccagcctaaccaacatggtga

SEQ ID NO: 326773 - DNA, 534 bp, Homo sapiens
ccgtgtaatattgatttatgcaacttttcaggacacaacatggcccaccaggagacgcagacccctgaaatttaactaaagggacaaaatcaaagctcaagattccaatttttgacctatttttcctaatctgtttctgggacaggagagagtttgagaaaagaagagaaaacatcctaaaagttgcacagactcattatgcagcagagactgtgtggagcggtggaaggcggggcacagagaggagctgcagatggttcctcccttgactaccgctggctctgtggccctggaagagtatgtgccctttccaagtctcggtgtctcacgcatacagcaaggggctcaarcaagaacctttcgacatttctaccaaaaaagctctaccgctgaggagggcaaaaatacagaggtaagggaacacggcatgaattgaaaacttgtgtttttcttcttaaaagccatgccaactttacatcctgtgctattatgtaccagtgcttctcttaagagttttaaatggagttttccccc

SEQ ID NO: 326774 - DNA, 290 bp, Homo sapiens
ggcaattcttttccatctttgctgttgagtattgataggaaaacagcatagtttggggcaatttaagtagagaacaaacctccgggggcttgkggtggtgtctcagaaggccggatctgggaagggcctttgaaaagcttgcacggaaagctgcgaaataaatcgtttctttttctctttctttacgttctaaaatctcgtgatctgtttctacaatacacaggctaattgatgttatccttttggcatgattcttgctgtcctggggtctatcacttgcaggctatgag

SEQ ID NO: 326775 - DNA, 490 bp, Homo sapiens
gcataaggcaaggactcaacaaacatccactgtttttgttagagggggtgctaggtgctcaagaaatgtctgctgagtggccaggcatggtggctcacgcctgtagtcccagcactttgggagactgagttgggtggatcacgtgaggtcaggagtttgagaccagcctggtcaacatgatttaacctcgtctctactaaatatacaaaaaaaaaaaaaattagccaggtgtggtagtgggcgcctgtaatcccagctactcgggaggctgaggcaggaraatcgcttgaacccaggaggctgaggttgcagtgagccaggatggcaccactgcactccagcctgggcaatagagcaagactctgtctccaaaaaaaaaaaaaaaagtctgctgaataaactacatttatagaagtggaatttaagtttgtttgaagggtatgtcaagatcgtaagcacttactatttatgagggttgataaaatcatgt

SEQ ID NO: 326776 - DNA, 563 bp, Homo sapiens
gcctcagcttccagaacaagggrcagaggaatgaagggggaagggtgggggcagggtggggggacgactttgtttctggaaacaagaattcaaatcctgcttctcctaaaccctgagtcacctccctctcttccaatagatcagcctggtgggtaaacatttccaaatatggagaagcaggctggaggatgtcagaaaaatcacccttctctcttctctggcacttgaagaacatgccccactttaacaaagaattccttactcggagtaaattattaaccgctaaagaagtggattctcaacccttccatacactgtcctattccaggaaaaaacctcctccaccccaaacaaggaagtgactggtctgaaaggctttaagctcatcttaagaatgagaccatccagaatgcaactaaatttatgaaataaatcattaatttggtggaggggagatattttgggagatgcacctgaaaaggtcacaagaatttaagctatggttcctatgatggcaggtgagtctcaaaacaactcctctcggccgggcacagtggctcaca

SEQ ID NO: 326777 - DNA, 655 bp, Homo sapiens
ttctgtttcaacatcaagttccattcagttgatgtttcttgacctcataatgtctaacctttatatctttgttttttccctttccaaacttatccaagaaggagacttcaaggcctgattcattaatttttccttctgctgggaactcaggtgtgtggtggaaggcagcacatgtgacctaatctatattttgacaargaagaaagctccctgccctcccttgcaccagttcgtttggtaatttttaatcccaaaagccactgctaatacgtttttaaaaattgatgctagctattacgttgttagataaagctcatcttccaactctaaacttgctctttctaaaagtgaaataacactcaggttgcaaacatagtgaactggaatttcagaggcttgaactgacctacaaaacttgtaactgtagctctagttatacatccactgtggtcttggacatgtgaggtgtttgtctaccctcaggagttttagaagaagaaattttatggaattgctttccatattaagaaattaaaatagccaggtgctattttaattttacagattcacaactgtaatcccagcacttgggaggccgagcagggaggatagcttgagtccaggagtttgagtggagtggtcaacacagccgaga

SEQ ID NO: 326778 - DNA, 655 bp, Homo sapiens
ttctgtttcaacatcaagttccattcagttgatgtttcttgacctcataatgtctaacctttatatctttgttttttccctttccaaacttatccaagaaggagacttcaaggcctgattcattaatttttccttctgctgggaactcaggtgtgtggtggaaggcagcacatgtgacctaatctatattttgacaaagaagaaagctccctgccctcccttgcaccagttcgtttggtaatttttaatcccaaaagccactgctaatacgtttttaaaaattgatgctagctattacgttgttagataaagctcatcttccaactctaaacttgctctttctaaaagtgaaatarcactcaggttgcaaacatagtgaactggaatttcagaggcttgaactgacctacaaaacttgtaactgtagctctagttatacatccactgtggtcttggacatgtgaggtgtttgtctaccctcaggagttttagaagaagaaattttatggaattgctttccatattaagaaattaaaatagccaggtgctattttaattttacagattcacaactgtaatcccagcacttgggaggccgagcagggaggatagcttgagtccaggagtttgagtggagtggtcaacacagccgaga

SEQ ID NO: 326779 - DNA, 616 bp, Homo sapiens
gcttgaactgacctacaaaacttgtaactgtagctctagttatacatccactgtggtcttggacatgtgaggtgtttgtctaccctcaggagttttagaagaagaaattttatggaattgctttccatattaagaaattaaaatagccaggtgctattttaattttacagattcacaactgtaatcccagcacttgggaggccgagcagggaggatagcttgagtccaggagtttgagtggagtggtcaacacagccgagaccccacatctacaaaaaatttaaacattagctggcatggtgactcatgcctatmgtctcagctactcaggaggctgaggtgggaggatcgattgggcctgggacatcaaggctgccgtgagctgagattctgccactgggtgactgggcctgggacgtcaaggctgccgtgagctgagattgtgccactgggcgacagagcaagagtgtctcgaaggaaggaaggaaggaaaggaaggagggagagaaagaaagaaaaaaggaaagaaaatatacaaaaatctttgtgtagctctgaaataaatatatatatatgtatgcagtgtatatattatatgaaataaaattgcttgtgc

SEQ ID NO: 326780 - DNA, 555 bp, Homo sapiens
gtgaaggaggaagagttaaaggatgggaaccatttttggcataacttagctcacagctgatgtttaaaaatgctcttccacaggctgcatgtatacagtagcctgcccttttctgtaatccacccaacagttaacaaatatatattgagcatttgctatgtgccagatggaaagataacatgtgacttacatatgtggtctccaacctgggcatggaaatacagagacatttgattctaccgtatgtaatggatatccawgttttcccctgcacgatttggtcaacaaaaaatcccatgcacacggtgcattttgacaaatgtgtggaagagcgaggattatcactcaggaaaatggacgttgatgtcactgactgtcctcccaggatggtactgggagatgttccacttagtgactcatgaatcattttcaggtatagcctgagttttctcttcactgattatgttgacctttctggaggcaaagatttacactgtgaatgtatttcctgtttcaaaaatcatctgtttgtaaatgaaatggtgctgtggtgcc

SEQ ID NO: 326781 - DNA, 570 bp, Homo sapiens
atggtatattcatctctgccctcatgttcttcctsatttggcaagcagcccaaaatgtatatgaaatgttctgctgctatgaaacctcatgacaaaatactgtgctttcacaaattaaagtgaagttgtcatagtccattattggaaagcaataaaacttgcattcattcattcaataactgtcctatggcttctgcaatatgctttagtctattctgtaactatatcaacatacaaaggaaaagcaatacagacaccctacaagtaggggagaggggggttagagtttaattatcatgtcacaattcatctgttttgtgaaccatcccaaacacagtgaaaagaatgctttatcacagcagaagagaggttatcatttgaaacttggaataaactgagtctatgaaaataaaagacagttttaaagtggatttttactatacttaaataaccttcatgcctttctcctacagttgcaaaatatttacatattatcacatttgccacaacctctcatagcaaagcctgccaactcactttaaagaaaaaaaaacagagagataaaccaac

SEQ ID NO: 326782 - DNA, 520 bp, Homo sapiens
ataatcatcgcagggtgtgatatgtgctgtgtgaaaatcatatgcagggtgcactgaaaacacaaaggacaaggtaatacctgagaggtcagagtcacaaatcatagtaaaggtcacctattctgagcctaagaacagtagtagaattttcccaggtaagcaagcagacagaaggacattacagcaaagggaacagatatgcaaaggttcagaagtctttttgagaaatacaaattctgggaaatggcaagtgaattatggctgcagtagaggaagcacagatcccagctatagacaggacctggatggaactstggtctgggtgagacctgaatggcccctaaatggcacataaaggaatctggatttaatattgcaggacaccaaaaagattttgagaatttttatcttcaaacacatgatctcattttatgagacagtgaaggttaaatataagggctttggggtcacggggttgttgagatgattaggttgatgtctgtatgtatagctgtatagc

SEQ ID NO: 326783 - DNA, 520 bp, Homo sapiens
ataatcatcgcagggtgtgatatgtgctgtgtgaaaatcatatgcagggtgcactgaaaacacaaaggacaaggtaatacctgagaggtcagagtcacaaatcatagtaaaggtcacctattctgagcctaagaacagtagtagaattttcccaggtaagcaagcagacagaaggacattacagcaaagggaacagatatgcaaaggttcagaagtctttttgagaaatacaaattctgggaaatggcaagtgaattatggctgcagtagaggaagcacagatcccagctatagacaggacctggatggaactgtggtctgggtgagacctgaatggcccctaaatggcacataaaggaatctggatttaatattgcaggacaccaraaagattttgagaatttttatcttcaaacacatgatctcattttatgagacagtgaaggttaaatataagggctttggggtcacggggttgttgagatgattaggttgatgtctgtatgtatagctgtatagc

SEQ ID NO: 326784 - DNA, 620 bp, Homo sapiens
acattttgggactctaagtccagtgctgtctcttttcttaacatcataatgtgtcgcttccatgttttagtctgttttgtgcttctacaacaaaatatctaagattgggtaatttataagaaatgaaaattgttttcttactgttctggaggcatggaagtccaaatcaaggtgccagcatttgatctagagagggccttccggctttgtcctcacatggcagaagggcaagcttgctgaacgctgcatgaagtctcttttagaagggccttaatcaaattctcgaggaagcagccctcatgacctaatcaccccttaaaggccccacctcttagaactatcacattgacaacacctggattttggaagggacaaattcataccatagcatcctaactttttcactyacagtcagcccagagggagcaaaatgacactttctaaaacactgtcccttcagttcctccacaaaggaaggctaagagaaaagacaggattgggctaaccattagcctggttgcaaataacatcaatgataacactaacacagcaggaataaccacagcgttaaaaaccactaacttttaccgagcactaggtgccaggcactgagctaagta

SEQ ID NO: 326785 - DNA, 609 bp, Homo sapiens
ttgcccacagggatgatttgcttgttaatactgttmattggctccttctattcttcccatattggcatttactgggttcacctcccaaataagcaatttgccctcgaatctctgactcggagccttctgcttagggcccccaaactaagacactggtaaactgttagtaatcttctcagtgtgttagatcatcctcataaatgcccctgatgagtgggagaacatacaaaattgaagggctgtgcggaatcaagagagtttgaatacatgacttgatgacatcacagggttgacctcttttcctccttcttattgaaatctcttcctaaaactggagagaattcctatcataagctcttttgacgtatacttatgtgactcccaacaaccccttaagtgcctgtttcacccacaaaggaggggtcctgggaaccttgtttgttgtctctgaccctggctatagatgattgaaccagagtggactttatttgctaagctgggcaaataaagtccgatctctcagggatatggagttaggacttaagacagtttagctcaatcccagctgagaaaaataaaacctaggaacaatgagacagccattttcca

SEQ ID NO: 326786 - DNA, 537 bp, Homo sapiens
aattaactctgccattgatttactccttaataaataaacagagggagagtcatgaagattaaccaagattctcgtggatgatggattccagatacccaaataatttctcttatcaactctcatatttaaggaaaagattggaagcaaaaatgtacaggtgaatgagacagataaaatttttgggccgggtgaggtggctcacacctgtaatcccagcactttgggaggctgaggcgggtggatcacttgaggccaggagtttgagaccaggcttggcaacatggcgaaaccgtgtatctactaaaattacaaaaattagccaggcatggtggtgcacacctgtaatcccagctactcgggaggctgaggcatgagaatcacttgaactcgggaggtggagattgcagtgagccaagatcgcgccactgcactccagcctgtttgacagcrcgagactctgtttaaaacaaaacaaaaccaacaaataaaaaattctatctaaatttgtcttaattgaaatatatgagagagatgcat

SEQ ID NO: 326787 - DNA, 555 bp, Homo sapiens
ttcttgaacacctctgatttctctttctaattcaaatatggctacaagtgaggtggaaatgctaggcagcctggagcccgatcacacatgagctgtctgtctatcagcaaaccccactgtcaatattggattaattgmttgcataacctcacattctctgtagctttcccctccgagacaaaattaccagtctccttcagcaccaacttggcaataagaggaagccttgaaatgattatcctaatttaaagacagcatgaattcctggctctcttttgggaacgtaaaattgtgagtgtcctttgttcttgcaaaagtgatgcacttaaaaaaaaagtcatttagtttgccttcttgacttttctgaacttaaagattacttccagttttatttttcaaagacttggcatttcagtattttaacattggacattttaacttcagcctttgaatgtttctatagattttttttttctattccatttcacccctgcttctctagctccctcctccccacattcaccaactgactgctcatttctcatgctgaataaa

SEQ ID NO: 326788 - DNA, 550 bp, Homo sapiens
gaacgattttaaaagtgtcttaccttatatatgatgtggaaaggaagagatggcatttgttggtaacttgtcaaagctgtgtgggagaattgtggaacaggtgtgggatgaggctgcagtagtaagtggagttgagaaatccctatgtggtgaggcatgcaatgccagttgggaaacaatattggtctcagactatagctaaaggcaattcacggggtgagaaggacggagccaacatgctcagaacacttgtggttaagagcatagcacttggtttgccaggagtctgggtgtgagtccatgtcttctcaccaactcacgctcccattcctatccattctgaattctccattactgctccgaatcgccttcctgcttgtgcttttctgaagagtgtcaggcctcactggacaccaccccartgccttcactccacatcacaacccagacaaaggatagtatatgcgttcctctacagatggcttagaaaagagtgaacgggcagagggcagaggaggggaagtgtacccacagcactttacagagattg

SEQ ID NO: 326789 - DNA, 563 bp, Homo sapiens
cacattttttgtagagacggggtatcaccatcttgtctaggctcctgggctctggtgatcctcccacctcggcctcccaaagtgttgggattacagtgaaaatcttaaatacgacttgttactctctgtgaaaaccccagcctagtgcttatgtttccatatagattcagtcacaagtggactctaatcaggcttctttcagtacctatrtctgtgacctgggctcatatacttcccttccctgggcctctgagatgccactcattaaggaatccgagatgtctttctagtgggtgtgctaattggtggatcccctcaacctcatggctttgtttgtggtaaattgtttgggtaattgactgagtttctagcctcattctctgagcactctgggcctggctaaggttgagttgcctcagcccagccttttcttctgggcatcggctgaagaacagttacaactggctttgaaaaacaaaagcccttacgtttgtattgagttttaaagctttgtaaagtggcatgacaacacaatttctcatttataatcccatataaccctg

SEQ ID NO: 326790 - DNA, 314 bp, Homo sapiens
ccagggtagtgatggaaagtaaccttgttggggacaaggtctttggggtcagtccaatagaccagtgtctgaatgccaacactgccactcacaagcttcaagggacaggactctggacatattacttcacttttctgagcatcagacaccacttttaartaacagcaatattaatactgcctacttcagtgactagttctgatgaagagaaaataattggaaagaactttgtgtttactggtacacagtaaacaaggactcttagctattgccattgctatcattggcactttgatgggtagggactttgatgg

SEQ ID NO: 326791 - DNA, 571 bp, Homo sapiens
atacacaagatggtgaaatttcctatattttgaaaccttaaattctttgtaaaacatgtttgaatgaagtctcctacttacttttattgttttatttttgctcactgagcagaaattgtttttatcccaatcatcttttctgttctgccaaataaaaatgaaatatgatcatatacacacacacaaagcttcctgagagaatcattccagaatctctcagcttattagcagtgaggaggaaacagagcagttgtcagaaatgaagtcattcctagcagctgcctcatgtgkgagaattgcctgtctcaccatgaaaaggctgctccttgacaacagcgttttaatcactgttttgtttgagggaagaccaaagttttggttattatgtgtgttagtctattttcatgctgctaataaagacatacccaagactgggtaatttaaaaaggaaagaggtttaatagacttatagttccatatggctggcaaggcctcatagtcatgacagaaggcaaaagagaagtaaaggcacaccttacatggcaacaggcaagagagcgtgtgcagggga

SEQ ID NO: 326792 - DNA, 571 bp, Homo sapiens
atacacaagatggtgaaatttcctatattttgaaaccttaaattctttgtaaaacatgtttgaatgaagtctcctacttacttttattgttttatttttgctcactgagcagaaattgtttttatcccaatcatcttttctgttctgccaaataaaaatgaaatatgatcatatacacacacacaaagcttcctgagagaatcattccagaatctctcagcttattagcagtgaggaggaaacagagcagttgtcagaaatgaagtcattcctagcagctgcctcatgtgggagaattgcctgtctyaccatgaaaaggctgctccttgacaacagcgttttaatcactgttttgtttgagggaagaccaaagttttggttattatgtgtgttagtctattttcatgctgctaataaagacatacccaagactgggtaatttaaaaaggaaagaggtttaatagacttatagttccatatggctggcaaggcctcatagtcatgacagaaggcaaaagagaagtaaaggcacaccttacatggcaacaggcaagagagcgtgtgcagggga

SEQ ID NO: 326793 - DNA, 569 bp, Homo sapiens
ccttagtagcaaattaggttcctgagctctatttcttgctacacatgaagctgggaccatctgtaaggatctcacaagagygtccatgaatgctcttgctagaataagtagtgtaagcagctagattttgcatgattgtgtctgttggcagaggctgcccattgtgaacctgagttggagggaaccgtgaatgagtagtttttagcttcttagcctctagcatctgtaaggcatactacaaagggaggaaataaagaggcatgagtccatctgccacatctaccacatctgttgtttgtgtttgcctggcaccacatcatcctgtttcttatggaaacagaacttttttttttttttttcctgtaagggaataatgcagtcaacggtatacactgactcagatctaccagttagactaatctgtcccctagacactgtaatttgtttatagatgtgccattgatccattttggttctggaagactcgtccccaaggctcctctgccaaagctatgaaaagagacttgttcttactaccaagaatcctaaacatgcaggatatgaatgtg

SEQ ID NO: 326794 - DNA, 508 bp, Homo sapiens
gtaagacagaagtaagaaaacagatatattatttaacatgtaaaattcttccttttggataacataaatgcaagaatagattttgcataccaagaatcttgttttaaggctacttaggagtcagctgtggatttataacagtcacataaggcagctaagggataatgtacaatattaaaamattttcaatttatttagttctagataaaatgtgaatgaagcataataccaattatttgcacacttcaacagtaagcattagaattgtgagtagttttatttctacacacttaatgagatttaaaagaaatattaaatatttaataagaatttaaaaaaattaaataaaatatgtgttttatttagtgttgatttaaaatttgaatactccattaattattttaaattttgtcttttaattttagtagataatttaaaacattttagaagacaaaatgtgaaggcaatactttaagtaatattaaatagtttattaaataatgtataa

SEQ ID NO: 326795 - DNA, 659 bp, Homo sapiens
acacaaatactagaattgtttgctataaagctatggttgtcagtgggaaagtctccatataattgcttattagtcatagatacacctggaagtttattccgttacttatttctcattcattcattcaacacatactgagcattacttagggcctaacactgggaatacaaagataagattttgtcctttagttcaaggaatttataatctaagagaaagcacagacagatatacaaatagctacatgtgtatttattgagcgcttaactctgttccaataactcttcaaaccatgctcagtgaatttcctcaattttcaccattacctaaatgaaatcagtagtattattattatcccttcatgcagatgaggagactgaggcacagagaggttactttgtccatggttacttagccagtaagtggtagaactaggaatcaagacaaggcactctgtctccagagtccaagctcctaatctctattttctgctgcatcaaagagtayatcaaagaacagtaggttccaggacaggattcataaaggaagaagtggtaagctctaatgtgggaagggattagaaaagaggagtttcaggaaagacattggaactcaaaaaattatttcattttaagagaaagtccaataaggagggagaa

SEQ ID NO: 326796 - DNA, 581 bp, Homo sapiens
gaaaagaggagtttcaggaaagacattggaactcaaaaaattatttcattttaagagaaagtccaataaggagggagaatatgtagatgcttggcatacatacccacagtactgtaactctggcttgtcagaaatattttattttctatttgtcctgtatctgcctactgtgtcccaatattccatgggagctgcaagaggaccagttgaagtagtctgatagcccttcgagtgtgggtgggcccacagatgtatcagtgtctggtgggacaatggagccactgggctgaggagaaggatggaacacttgcattgggagtaaggccaactctgtggccttcatccagcagataaaagtgcatcactgtattagtctgttctcatgctgctaataaagacatacctgagactgggtaatttataaagaaaaagaggtttaatgggttcacagttccacatggctggggaggcctcacagtcatggcagaaggtgaagaaagarcaaagacacatcctacatggtggcaggcaagacacaatgagtgccagcaggggaaatgccagatgcttataaaacgatc

SEQ ID NO: 326797 - DNA, 514 bp, Homo sapiens
agtaatgatatgtgctataacaacaaattagtcctgagatctcagtggtttaacacacaaaaagacactagtcattcatgtaatcatttaatggaaatagaggcctctactacattcaagaactttggcttcttctatgtgatagctctgtcatcttcaatatggcttcacaatcaccctatcatcattcagcctgcagatggggaaagagcaaggatagggargatgaaccaggccattttaaaggccaggcctagaagctgtaaacattactttcatacacaatccattggtcaggactcaattttctggtaatgcctgacttcaggggagggggcagggtggctgttaactgtagtttattctgtgctcaggagaaaaataaaatgggtttggtgaattcattgtctctatctcctgagctttttctccttttctgctctgtcattttcaaagtcactccttctcttctggtagcaagatggctgcagcagttccaggtgccctatccaac

SEQ ID NO: 326798 - DNA, 565 bp, Homo sapiens
gataatcatggggatggaggctagataaagaaacccgaatggaaatggaaacagtcgtcagaagctctgcttctcctggaagagcgagcagcacacctccagaggcatggcttatggcaattcctgtctttatcttcttatcttagaggtcagctcggctgcattttttctgcctcagtgatttatagaacrttcagcattttcagaatcattttcctacccgtcatttctttcccagagtgctgaggagtggctaatcaagagaaaaatactaagacccaatttttgagctagaaataaggctcaaaaagtggcaatttgtgcgttatctgatgttgggttatgcccttaaattacttattccttacaaatactttacttttttgcaaaccagaatcactgactgtcaattttatgagacacactgctcagaagtctccagagcatgcccccatttaaaaaaagaattctctgatctgtctgactgagttgagttttaggttgtgattagaactcctagttaatctctgcaaacatggagatgtggaaaggaactcagcagaaa

SEQ ID NO: 326799 - DNA, 565 bp, Homo sapiens
gataatcatggggatggaggctagataaagaaacccgaatggaaatggaaacagtcgtcagaagctctgcttctcctggaagagcgagcagcacacctccagaggcatggcttatggcaattcctgtctttatcttcttatcttagaggtcagctcggctgcattttttctgcctcagtgatttatagaacattcagcattttcagaatcattttcctacccgtcatttcttkcccagagtgctgaggagtggctaatcaagagaaaaatactaagacccaatttttgagctagaaataaggctcaaaaagtggcaatttgtgcgttatctgatgttgggttatgcccttaaattacttattccttacaaatactttacttttttgcaaaccagaatcactgactgtcaattttatgagacacactgctcagaagtctccagagcatgcccccatttaaaaaaagaattctctgatctgtctgactgagttgagttttaggttgtgattagaactcctagttaatctctgcaaacatggagatgtggaaaggaactcagcagaaa

SEQ ID NO: 326800 - DNA, 548 bp, Homo sapiens
ggagcccttgaagagttagaaatgaaaaggccagccaactcacgtagagacctagaggactcttccaagcaagacatacaatttataatgataasaactaaatatttattgagctcttgctatgtgccagaccttgctaagcactttacctttttatttcatttaatatcacaacagttttatttctggtttagagatggggaaactgagtcttacagatttggggcagcttgccttagattctacctctgctaagttaatttagatcaatgctgactgttccaggcagagctacagaaggaacttttgagaggtaacagagacaatgaggcctaaagtagatgagagccactcagatgctgcaactaacatgcgaccatcactgcgaaaaattttatgagcttttccttccaaaaaatgcagacctatccaccaagtcatctgcctattcttcctctgttctcagagaatctttttttccaggttgaattcggactccaagtgacttctccactttttaatgatttctctttggagagatcacttgt

SEQ ID NO: 326801 - DNA, 548 bp, Homo sapiens
ggagcccttgaagagttagaaatgaaaaggccagccaactcacgtagagacctagaggactcttccaagcaagacatacaatttataatgataagaactaaatatttattgagctcttgctatgtgccagaccttgctaagcactttacctttttatttcatttaatatcacaacagttttatttctggtttagagatggggaaactgagtcttacagatttggggcagcttgccttagattctacctctgctaagttaatttagatcaatgctgactgttccagrcagagctacagaaggaacttttgagaggtaacagagacaatgaggcctaaagtagatgagagccactcagatgctgcaactaacatgcgaccatcactgcgaaaaattttatgagcttttccttccaaaaaatgcagacctatccaccaagtcatctgcctattcttcctctgttctcagagaatctttttttccaggttgaattcggactccaagtgacttctccactttttaatgatttctctttggagagatcacttgt

SEQ ID NO: 326802 - DNA, 448 bp, Homo sapiens
tggacagtggtttactttacaatgtgcccacttctcttccctgctcaytgacaggcaatggggcttaagaggacagattctagagttttgcaaatgttcttgtcactgctctgacaccactctagaatgtatttttggtggttaggaaagaaggaaacagtaattggaatcattttcctagtattatttaacaacacagttatcttaaaagagtgatcacatggtgtttggtattgagctacaatttaattgtaactttgaaacaacaacaagaagaaaatcaatattttagccttctctgagtatgtgcctgaaggctcctatttgagctaagggtctaggagttaaaacttcatggttaaagcttccaattatttagaggatggagtattgtttttctgcacagtatctattctatatcagttaggataattcaggtttttgccgc

SEQ ID NO: 326803 - DNA, 448 bp, Homo sapiens
tggacagtggtttactttacaatgtgcccacttctcttccctgctcactgacaggcaatggggcttaagaggacagattctagagttttgcaaatgttcttgtcrctgctctgacaccactctagaatgtatttttggtggttaggaaagaaggaaacagtaattggaatcattttcctagtattatttaacaacacagttatcttaaaagagtgatcacatggtgtttggtattgagctacaatttaattgtaactttgaaacaacaacaagaagaaaatcaatattttagccttctctgagtatgtgcctgaaggctcctatttgagctaagggtctaggagttaaaacttcatggttaaagcttccaattatttagaggatggagtattgtttttctgcacagtatctattctatatcagttaggataattcaggtttttgccgc

SEQ ID NO: 326804 - DNA, 582 bp, Homo sapiens
ttagaaacttcctaagaaccgggtatattttccctttttctttgcctcacagtttcgcagatttaatggacagtggtttactttacaatgtgcccacttctcttccctgctcactgacaggcaatggggcttaagaggacagattctagagttttgcaaatgttcttgtcactgctctgacaccactctagaatgyatttttggtggttaggaaagaaggaaacagtaattggaatcattttcctagtattatttaacaacacagttatcttaaaagagtgatcacatggtgtttggtattgagctacaatttaattgtaactttgaaacaacaacaagaagaaaatcaatattttagccttctctgagtatgtgcctgaaggctcctatttgagctaagggtctaggagttaaaacttcatggttaaagcttccaattatttagaggatggagtattgtttttctgcacagtatctattctatatcagttaggataattcaggtttttgccgctgtaaccaacaacccccaaatcttggtggtgcataacaagaaggacttatttcttgcttagatgcatg

SEQ ID NO: 326805 - DNA, 448 bp, Homo sapiens
tggacagtggtttactttacaatgtgcccacttctcttccctgctcactgacaggcaatggggcttaagaggacagattctagagttttgcaaatgttcttgtcactgctctgacaccactctagaatgtatttttggtggttaggaaagaaggaaacagyaattggaatcattttcctagtattatttaacaacacagttatcttaaaagagtgatcacatggtgtttggtattgagctacaatttaattgtaactttgaaacaacaacaagaagaaaatcaatattttagccttctctgagtatgtgcctgaaggctcctatttgagctaagggtctaggagttaaaacttcatggttaaagcttccaattatttagaggatggagtattgtttttctgcacagtatctattctatatcagttaggataattcaggtttttgccgc

SEQ ID NO: 326806 - DNA, 448 bp, Homo sapiens
tggacagtggtttactttacaatgtgcccacttctcttccctgctcactgacaggcaatggggcttaagaggacagattctagagttttgcaaatgttcttgtcactgctctgacaccactctagaatgtatttttggtggttaggaaagaaggaaacagtaattggaatcattttcctagtattatttaacaacacagttatcttaaaagagtgatcacatggtgtttggtattgagctacaatttaattgtaactttgraacaacaacaagaagaaaatcaatattttagccttctctgagtatgtgcctgaaggctcctatttgagctaagggtctaggagttaaaacttcatggttaaagcttccaattatttagaggatggagtattgtttttctgcacagtatctattctatatcagttaggataattcaggtttttgccgc

SEQ ID NO: 326807 - DNA, 580 bp, Homo sapiens
taatcaaggtttctcagtgtcagatttgtggaggtccacaatgggtgatttcagggggctcatgaacctcttaaaactgtatgtagttttctgtatatgagcatttttcaagagaaaagtccacagctcccaccaagattcacaaagtactaataataagattcaccaaaatactaataataatcagccatgtgattgtcatcttcaaaaaattataaattcattgtaaagattttacttttggtcaatatataccttatcgaccaagggatgctaatagtcacacaccaccatcatcatatggaagttcaaaaartatttgacaattaaaacagggctaatcacagtattaaaggcttataaattccacctacagggaactgtttatttggcactgcagttgttttttaatcttttttatatttgagaacaatttctgacataattcaaatgcaccccatctccatgcatttttaccttcctgaatatttccattagaatctttaattttctaacatagctgtttaaatagacactgagaagagaggataaagtcatgatgcatttagcaagtagctca

SEQ ID NO: 326808 - DNA, 544 bp, Homo sapiens
accatgcctagctaacttttgtatttttagaagagatggagcttcaccatattgcccagacagttctcaaatttctggcctaagttatccacctgcctcagcctcccaaagcctccctagggctcccaaacgtggctcacattacaggtgtgagccaccggtcccgactagccatatgcattctttaaacaaataagtcttggatgcctataatgtgccaggtactgttctgggtgctgagggacagtaataatgaagcaaaagaagtcccatcatcatgagcttacatactaggtgaaggagacagacaacaaacaaacaaamcaaaaaattaaattacatcagttggtaaacagagtaagaattttaaaagatgttgggggggataatggtcaaagaaggcctctctgagtagagacatgaaggaaatgagggagcaagccaggaggaaatgtagggaaagagagtcaagcagagggaacagcaaaggcaaaggccctgcagtacgaccatgcctggtgtgctccgggaactgcaaggaggc

SEQ ID NO: 326809 - DNA, 570 bp, Homo sapiens
gtggctggccactactatattggacatttccatcactgcagaaagttctattggccagtactggtctgaaacatccactccggctaccctcaaagtaattaattttctaatttgagggaccaaccaaacaagcttgttaaaaccattcrtagtaagagcaagctaaatatcagtcaaggcctgatgaattttcctaggagattctgtgcctgggctttctgacctatgctttatccttcaggatcttttatttcttggctttgatttttcactgatgttcctgatgaggtgttaggtagatggcctgcaaatagcaagctgctacagtatcacatcttccatgtaaaaaatgcctcctttactcagaaatctgttttgtcagtctttggagataaaggacatgtggcacaactgtcagaagtaaagacgggactggaataagatcctctttgtggctggggatcagaaaaggggtaagtggataggaaaataggaagtggaccgattatgaagataggcagacagaacattataactcccagggggtgacattcacattgtgagagaaac

SEQ ID NO: 326810 - DNA, 560 bp, Homo sapiens
ggagggcttgccaaaactcatattcagactgctgagatggttaattttcctctggctacggctggtctaaatgctccctccgtggtggcattggctgcgttccacccgatgttgctttccgctgtgactgggcagcactgarttccaatgtgaagtcccacaatccctttcctctctctccctcaagcacatggatactctctctgcaccgtacacccacagctggggtgtaagggaggggtggtgtaagctattcaagactttctttcctacctacttcagtgtctctttccttaaatggtgttaaaactacccactttagtgtctctttccttacatgatgttaagaacagatactgtgattgctcacctgatttttagttcttatggtggtggtttttgtatggatagtcaatcaatttggtgctcctgtagagggaataatcacgggaggtttctgttcagccatcttactccaacttcctcccaatctcttttaggaacctcatttgccattggaattttggtcactcaagtcctaaatgccttggcagttcaga

SEQ ID NO: 326811 - DNA, 563 bp, Homo sapiens
acctattacagtgctttcgtttattgtactgattgtttaaaaatagcccaaatatcaaacaataaggaatgggtaaattgtggcagaccttttccaaaatttagtatgaattaattcaagtgtcttttgtagagaatgtttacttgaacagactgacagtacagtgttaaaaatacagttacaaagcacttcgcttataggctatactagaaaaatttatgccaaagcatatgtaatcgactatatacaagtatattatttgtggttaaaatagtgactttggggtatagaaatatgtggatttttgttgttctttttgcttatactctctctaaagtattaattgggtgcagattatattttagacataagtgtaaaagttaaaatatgcattagaatcagtaaagcagatgatcaacccaacagaaaatcaaatcagtaatgtggagggttagtttgaagaayaaatttaaatagtaaaataagattcaaataccagaaaaaagtatacatgatatttgttatttaaattgacaaaatctatctagaaaagctttattact

SEQ ID NO: 326812 - DNA, 519 bp, Homo sapiens
ttgttgttctttttgcttatactctctctaaagtattaattgggtgcagattatattttagacataagtgtaaaagttaaaatatgcattagaatcagtaaagcagatgatcaacccaacagaaaatcaaatcagtaatgtggagggttagtttgaagaacaaatttaaatagtaaaataagattcaaataccagaaaaaagtatacatgatatttgttatttaaattgacaaaatctatctagaaaagctttattacttttgaatattccaattttctctttattttarttatatatttccagttttgttgcattgtgattaacaaaatatgacctatagagtttttaccttgtgatatacattatgcttttaatgtaccctaatataccttcaatattcatgaacatttaagaaggagtcctttttcattttggagtacaagatttgacatatatcttttaaaacaaaacctagtgcatacctggctgttattagtcaccttttctgcttttacact

SEQ ID NO: 326813 - DNA, 390 bp, Homo sapiens
ctacttctctttacatccagcaccaggattctagccaaatacataatcatctcttcccagcaatatcmtcttaaacattttctgtctggctttatgttgccttcctcttattgcccataatatgttttctgcactttaatgagatggacctttgaaagacacccatataaccaggtaatacccttgctttacactttttagtgtcttctgttgctcttagaattaaggctcacttccttaatctggcccacaagaccctgtgtgctgtcctgaaaacccatgtcacttctttttgcggtgacttttctccttaattcttttccttttagtcataacagttttctttcaatttctcataagctctatggtcatttttatctcaacttctgc

SEQ ID NO: 326814 - DNA, 390 bp, Homo sapiens
ctacttctctttacatccagcaccaggattctagccaaatacataatcatctcttcccagcaatatcctcttaaayattttctgtctggctttatgttgccttcctcttattgcccataatatgttttctgcactttaatgagatggacctttgaaagacacccatataaccaggtaatacccttgctttacactttttagtgtcttctgttgctcttagaattaaggctcacttccttaatctggcccacaagaccctgtgtgctgtcctgaaaacccatgtcacttctttttgcggtgacttttctccttaattcttttccttttagtcataacagttttctttcaatttctcataagctctatggtcatttttatctcaacttctgc

SEQ ID NO: 326815 - DNA, 390 bp, Homo sapiens
ctacttctctttacatccagcaccaggattctagccaaatacataatcatctcttcccagcaatatcctcttaaacattttctgtctggctttatgttgccttcctcttattgcccataatatgttttctgcacttyaatgagatggacctttgaaagacacccatataaccaggtaatacccttgctttacactttttagtgtcttctgttgctcttagaattaaggctcacttccttaatctggcccacaagaccctgtgtgctgtcctgaaaacccatgtcacttctttttgcggtgacttttctccttaattcttttccttttagtcataacagttttctttcaatttctcataagctctatggtcatttttatctcaacttctgc

SEQ ID NO: 326816 - DNA, 544 bp, Homo sapiens
cttttctgtgtacccacccatggggctagccccatcttccatggtgacaggagaccatggtgacyaggctccttgcattgtgtctgaacaacttctgagtacatctgagtacaactcctgtgactggagttagggcaagtaccttacatggttctttccagcactctgaaaatatcaatttgaaatgaatgtgttgattgccttcaatctcagctgaaggggaaagatagagattggatttttgactggttcctcacaaacactatagtattttacagctttataaattattttctcttaccgttttggctggacaaatgaaaaaaaaatatcctgaaggagcaattgcatttccttagctgcattcagcatcttcatttgtttttatttgccagtgcattttgccttattatttgaagtgtgtttttcttatctgttgtaggcactacactttattcctatttgctgatttaaatagatctctaaccaaggaaaagcacaagattctcacattgctgtatactaaatttctggcctggaatta

SEQ ID NO: 326817 - DNA, 544 bp, Homo sapiens
cttttctgtgtacccacccatggggctagccccatcttccatggtgacaggagaccatggtgactaggctccttgcattgtgtctgaacaacttctgagtacatctgagtacaactcctgtgactggagttagggcaagtaccttacatggttctttccagcactctgaaaatatcaatttgaaatgaatgtgttgattgccttcaatctcagctgaaggggaaagatagagattggatttttgactggttcctcacaaacactatagtattttacarctttataaattattttctcttaccgttttggctggacaaatgaaaaaaaaatatcctgaaggagcaattgcatttccttagctgcattcagcatcttcatttgtttttatttgccagtgcattttgccttattatttgaagtgtgtttttcttatctgttgtaggcactacactttattcctatttgctgatttaaatagatctctaaccaaggaaaagcacaagattctcacattgctgtatactaaatttctggcctggaatta

SEQ ID NO: 326818 - DNA, 566 bp, Homo sapiens
attggtgcacgctgatattcttaggtagaaacgatagaatatgatctacaaggcttagttacattaaatttgaaaacaaataaggagataaaaaatttcagggaggataaagattagtctgcatgtgcccattgcagtgaattgtaacagttttattaaaagggcaatgtgtgggtgcatgtgtggggaacaacactcgggcacactggcggtgatcttgagaagcagggtgctgatgtgaatacatttgtttcaagtactgtctgtttttctgaatgmcaacattagtggtacattagtacattgatgaaactagtacatctactcctgagacattgtatttactagtagatgaatggtggtgaaggttggagagagaacctatgggctaaataatagagaattgaaggagaaaaagtcaaagcaaaatgttgggtaggcagactaaatgcattatcaccttctaagccatgagggaaaatccatgtaggagaaaatgggatggaaataaggaggagatggggcagatggttatgctgggaggcagagaactggagacaaagcct

SEQ ID NO: 326819 - DNA, 551 bp, Homo sapiens
taagaaggagtcctttttcattttggagtacaagatttgacatatatcttttaaaacaaaacctagtgcatacctggctgttattagtcaccttttctgcttttacactggaatttgatgaaaccattttagctttttagttgccactggccagtgtaataagagccatagccatggtagtctcagctagaaaacctcattctgagttatttttgccgtgtttggtaaagttctttcactagggacaaaaattttccaactagccctcagtttgccttgaatcccatcaaaggtatgaggtgtctttgctttttgactaatttctaaataagtccttggatttccaacctaccctkgatattctaccttcctaatgctatgtgcaattgacctacttattggttttgtactgggatataaagcactttgttgtttttgttttttttctttgtgtatgggttgggggtggtaaggggtagttcaagctctcttgaatgaaccagatgctttaccgtaaacactaatacaaagcatcaatacaggcaatattt

SEQ ID NO: 326820 - DNA, 589 bp, Homo sapiens
ctaggactctggataaataaactcaggttctttttctttttcatttcattttcttcttttctttctttctttcacttttttttgtttgtttgtttcctgagacatagtctcactctctcacccagtcttcaatgcagtggtgtgatcacggctcactgcagcctctatctcctgggctcaagcagatcctctcacctcagcctcttgagtactgggactatgggcatgtgccactagacgtggataattttttttcttttttagagagacaggttctcgccatgttttccaagctcrtttcatatacctgagctcaagtgaaccacatgcctgggcctcccaaattgctgggatttcagacctgatccattatgcctggccaataaactcaggttcttacctacttgtgaaaaaccacaaaaatattccctcctttgaattatgaaagaatgaattatctgtgtcacaccagtagtacttagcatgtgccagtatggaattggcatacagtagacatttaataaatgatgaagctaaccctcttaccaccataactcaatgagttaatcgaagatactcaattttataa

SEQ ID NO: 326821 - DNA, 551 bp, Homo sapiens
taagaaggagtcctttttcattttggagtacaagatttgacatatatcttttaaaacaaaacctagtgcatacctggctgttattagtcaccttttctgcttttacactggaatttgatgaaaccattttagctttttagttgccactggccagtgtaataagagccatagccatggtagtctcagctagaaaacctcattctgagttatttttgccgtgtttggtaaagttctttcactagggacaaaaattttccaactagccctcagtttgccttgaatcccatcaaaggtatgaggtgtctttgctttttgactaatttctaaataagtccttggatttccaacctaccctggatattctaccttcctaatgctatgtgcaattgacctacttattggttttgtactgggatataaagcactttgttgtttttgttttttttctttgtgtatgggttgggggtggtaaggggtagttcaagctctcttgaatgaaccagatgctttaccrtaaacactaatacaaagcatcaatacaggcaatattt

SEQ ID NO: 326822 - DNA, 589 bp, Homo sapiens
ctaggactctggataaataaactcaggttctttttctttttcatttcattttcttcttttctttctttctttcacttttttttgtttgtttgtttcctgagacatagtctcactctctcacccagtcttcaatgcagtggtgtgatcacggctcactgcagcctctatctcctgggctcaagcagatcctctcacctcagcctcttgagtactgggactatgggcatgtgccactagacgtggataattttttttcttttttagagagacaggttctcgccatgttttccaagctcgtttcatatacctgagctcaagtgaaccacatgcctgggcctcccaaattgctgggatttcagacctgatccattatgcctggccaataaactcaggttcttacctacttgtgaaaaaccacaaaaatattccctcctttgaattatgraagaatgaattatctgtgtcacaccagtagtacttagcatgtgccagtatggaattggcatacagtagacatttaataaatgatgaagctaaccctcttaccaccataactcaatgagttaatcgaagatactcaattttataa

SEQ ID NO: 326823 - DNA, 589 bp, Homo sapiens
ctaggactctggataaataaactcaggttctttttctttttcatttcattttcttcttttctttctttctttcacttttttttgtttgtttgtttcctgagacatagtctcactctctcacccagtcttcaatgcagtggtgtgatcacggctcactgcagcctctatctcctgggctcaagcagatcctctcacctcagcctcttgagtactgggactatgggcatgtgccactagacgtggataattttttttcttttttagagagacaggttctcgccatgttttccaagctcgtttcatatacctgagctcaagtgaaccacatgcctgggcctcccaaattgctgggatttcagacctgatccattatgcctggccaataaactcaggttcttacctacttgtgaaaaaccacaaaaatattccctcctttgaattatgaaagaatgaattatctgtgtcacaccagtagtayttagcatgtgccagtatggaattggcatacagtagacatttaataaatgatgaagctaaccctcttaccaccataactcaatgagttaatcgaagatactcaattttataa

SEQ ID NO: 326824 - DNA, 461 bp, Homo sapiens
ttctatttacattgtcttgaacaggcaaatacctgcaataataataatactaatcttaaagaaaaataaactcaacccaaggtgcttttggggaaatgagaatcatagtgtcagcagttctgtagtatacagaattttaatgaaatataagctctttttctgagattctaaaaatatgtatctaatcccagataacctcagtaccgtcaagtaacgcacctagagtttctgagcagtaaggaaaacwtgccatgtgaattgaatcacagagaagtatgtaaggtgttaaaaaaatccaactctttttttttttctatttctactcattcttaaaataatttttacactctggatttctattgaatatatttttggtgacttatattaaccaagtcacaaacttttcctcgtgcttgtggtatttgcacacatactaattttggatttttttttttttactg

SEQ ID NO: 326825 - DNA, 599 bp, Homo sapiens
ccctgtgaatggacaaagcacaatttcccagaggaagaggattttattaactaaatgcctaacagctgcctcacaagcatgagcctagataaaccaaacaagctgcaaatctgtgcaccctgcatgaaaggccacataatacaaactgattacttcagggcttgcattaatgtggctgtgaacaaaaataaccaaccaayaaatccttgcctaattttaacaaatactgatgaggaaatctagacagatggatcattatgaggcatggatctatgatgaattagtattgtgatcaaagggtgggaggatggctgccgaatggtacaggaggtagaattactaatcctcaccaaataagagttctaatctctctttggaaagccaagcatctgatactttcatctgaatttgatagaaacacagtaacctttgtataaacagaaagaatagcatcttttgatttacattttaataaagacaaggcttttgatgtagcagcttcccagagataaacaaaataaaatgatgagttgctataatatttgttgaaatccacttttatattggaatattaaatgccaacactgtaaggatgagca

SEQ ID NO: 326826 - DNA, 599 bp, Homo sapiens
ccctgtgaatggacaaagcacaatttcccagaggaagaggattttattaactaaatgcctaacagctgcctcacaagcatgagcctagataaaccaaacaagctgcaaatctgtgcaccctgcatgaaaggccacataatacaaactgattacttcagggcttgcattaatgtggctgtgaacaaaaataaccaaccaataaatccttgcctaattttaacaamtactgatgaggaaatctagacagatggatcattatgaggcatggatctatgatgaattagtattgtgatcaaagggtgggaggatggctgccgaatggtacaggaggtagaattactaatcctcaccaaataagagttctaatctctctttggaaagccaagcatctgatactttcatctgaatttgatagaaacacagtaacctttgtataaacagaaagaatagcatcttttgatttacattttaataaagacaaggcttttgatgtagcagcttcccagagataaacaaaataaaatgatgagttgctataatatttgttgaaatccacttttatattggaatattaaatgccaacactgtaaggatgagca

SEQ ID NO: 326827 - DNA, 551 bp, Homo sapiens
ggaatgccaatctatcttatcaacagcttttctaagaaggtccaaatgtagcttgaattgttgtcagtgtattttagcatataatatcattaattgaattttgctctttttccaatttcaaaaggatggggaaagttctaatgatcgccactggatatatacaatcccctaacgtggcattgtatttcctactgatgcacaatctgtatctgtctcctgacwtgcatgcactatagcaatccactggagtgcttcgaatggcacacaatgcctggttcaaagcatgtcagtttatttagcttcctctgtacacattcagatttatctgtgtatccatggaaagaacactttacctttaccatcaagcaggtatctggtactccttcctattttgtctctctaaatattgtaagagattaccctcttaaaacttgatgttaactgtcatctccccagaagtccactagaaaaatttattgatgaagtaaagctaaatttattagaactactgcaacaaatgggtaaactacttggggttattattgtcttaa

SEQ ID NO: 326828 - DNA, 550 bp, Homo sapiens
taaagggaccaataatgacccaggaatgccaatctatcttatcaacagcttttctaagaaggtccaaatgtagcttgaattgttgtcagtgtattttagcatataatatcattaattgaattttgctctttttccaatttcaaaaggatggggaaagttctaatgatcgccactggatatatacaatcccctaacgtggcattgtatttcctactgatgcacaatctgtatctgtctcctgacttgcatgcactatagcaatccactggagtgcttcgaatggcacacaatgcctggttcaaagcatgtcagtttatttagcttcctctgtacacattcrgatttatctgtgtatccatggaaagaacactttacctttaccatcaagcaggtatctggtactccttcctattttgtctctctaaatattgtaagagattaccctcttaaaacttgatgttaactgtcatctccccagaagtccactagaaaaatttattgatgaagtaaagctaaatttattagaactactgcaacaaatgggtaaact

SEQ ID NO: 326829 - DNA, 550 bp, Homo sapiens
taaagggaccaataatgacccaggaatgccaatctatcttatcaacagcttttctaagaaggtccaaatgtagcttgaattgttgtcagtgtattttagcatataatatcattaattgaattttgctctttttccaatttcaaaaggatggggaaagttctaatgatcgccactggatatatacaatcccctaacgtggcattgtatttcctactgatgcacaatctgtatctgtctcctgacttgcatgcactatagcaatccactggagtgcttcgaatggcacacaatgcctggttcaaagcatgtcagtttatttagcttcctctgtacacattcagatttatctgtgtatccrtggaaagaacactttacctttaccatcaagcaggtatctggtactccttcctattttgtctctctaaatattgtaagagattaccctcttaaaacttgatgttaactgtcatctccccagaagtccactagaaaaatttattgatgaagtaaagctaaatttattagaactactgcaacaaatgggtaaact

SEQ ID NO: 326830 - DNA, 551 bp, Homo sapiens
ggaatgccaatctatcttatcaacagcttttctaagaaggtccaaatgtagcttgaattgttgtcagtgtattttagcatataatatcattaattgaattttgctctttttccaatttcaaaaggatggggaaagttctaatgatcgccactggatatatacaatcccctaacgtggcattgtatttcctactgatgcacaatctgtatctgtctcctgacttgcatgcactatagcaatccactggagtgcttcgaatggcacacaatgcctggttcaaagcatgtcagtttatttagcttcctctgtacacattcagatttatctgtgtatccatggaaagaacactttacctttaccatcaagcaggtatctggtactccttcctattttgtctcyctaaatattgtaagagattaccctcttaaaacttgatgttaactgtcatctccccagaagtccactagaaaaatttattgatgaagtaaagctaaatttattagaactactgcaacaaatgggtaaactacttggggttattattgtcttaa

SEQ ID NO: 326831 - DNA, 609 bp, Homo sapiens
ttaccatcaagcaggtatctggtactccttcctattttgtctctctaaatattgtaagagattaccctcttaaaacttgatgttaactgtcatctccccagaagtccactagaaaaatttattgatgaagtaaagctaaatttattagaactactgcaacaaatgggtaaactacttggggttattattgtcttaaatattgtgccttagtttcccattttaacgagtttagggtctgggctgaataattttaagacaagtcttgtaagaagagaaatggttgagactgagcagagttcacracacgatagctttgtattggtgtggatggcaaaataagaattttgaagtgagcctaagtaagcaagctgtttagattccaggagcaaagatttcctggaacaagaaattaggttaattttgtttagttcaaatataattttaacagatttagggccttactttcaattctcattaatttcatttttaaggtactagatcactcttaagcttatttttagtttgatatattaatatatgcttacattattatcttctatgacttctaggaaatttaacaaaagtgattatactatattttttaaatat

SEQ ID NO: 326832 - DNA, 519 bp, Homo sapiens
agaaatataccacaatgttggcaatgtttgtctctggatgatagttataattattctatttttaaaatgttgttacagatacatgttttttaaatttttaataaagtgaactttattatacatctattaaggaaygtaagaaaaactaagattaagagaccattggattgcccgactgcctattgaagaggtgtaagttctaataaacattctcgatgagcaggtgggaaatgtgttttcaaatggcctagtacaaaggctgaattaccagcactagaaagtgatattgacatggatcctgggtagatgcagcataatgtggaggcattccaaagagtctgactgcactgctagctcttgagtagtgggaaacagggaagagcagaactccaggattaatatgaagctagtttacctggcaatggactttgaagagtacagaagctaaagactgaagactgtgaatgcaagaccttgaagtgtgtcttctttgatcagaaaataagttatctcacctgg

SEQ ID NO: 326833 - DNA, 631 bp, Homo sapiens
aagcagaggcaaaaactggatccatcctgaaagttctccgttctttcaggacatagaactgtgtagctggtaaagctcagagtagttctgaaggtaatgttttatttagggctttgacctttcaaatgagcagagcttaaactatccaaaatacaggtccatttggatgctaccaactaagaatttgtaagtcattgagcaattattgtgcgtctttctatgttcatcttgtatcagtgctggacatggctactcataaaggaactcacagcagaaacaaacctgggaagaatgggttgataatgacatttcagcagattaattacagtacaaaatagtaggtactttgaagaaggatgaacaaatgatttgaaggaagtaacagtccatggggaaacactgatagccttgcaaaatgttgtgtggctgggttttagaagatgagtaagagatggatatgcggaagtttaattctttctaagcagaagaaattgaatatacagcactgcttcctttttatgggacttgaacccacttgttaggtatttatttgtaggttttcttctaagcatccataattmatataaattccagctacatggttcagtctttttaatcttttttaaaacaa

SEQ ID NO: 326834 - DNA, 592 bp, Homo sapiens
gtttaggggtttttttttttttttttttttttttggattttttgttactggaccaccatgatactctgggaaactgatactgatgaacattaatttatcttgtaaatatccaagattctataatgtcataatctctaatacatatcattatttccctgaaagtcaaagatgtgttcaacttcttacagtgaaaggtattttaatctattatagattttttgttatagtattaatgagatgaatcgtagtttatttttcactcrtcaaaaatattcttttttctttcttgtactttcagataaacccatattctagaatattccatctatcaatatcattctgcttagaagaaaccagtatttgagagtctgttgtgtgtctcaacaacataatgcaaacattttcttattttctcataagtactgttctttctgcaatccaatgacataatgcaaacattttctcattttcttataagtgctattctttctccctaaatctagcatcacaaaagaaaacaaagcagtagacaataacagaagagagaatttccagttagtaataatatgcttctgctccgtgatttgctgtg

SEQ ID NO: 326835 - DNA, 592 bp, Homo sapiens
gtttaggggtttttttttttttttttttttttttggattttttgttactggaccaccatgatactctgggaaactgatactgatgaacattaatttatcttgtaaatatccaagattctataatgtcataatctctaatacatatcattatttccctgaaagtcaaagatgtgttcaacttcttacagtgaaaggtattttaatctattatagattttttgttatagtattaatgagatgaatcgtagtttatttttcactcgtcaaaaatattcttttttctttcttgtactttcagataaacccatattctaraatattccatctatcaatatcattctgcttagaagaaaccagtatttgagagtctgttgtgtgtctcaacaacataatgcaaacattttcttattttctcataagtactgttctttctgcaatccaatgacataatgcaaacattttctcattttcttataagtgctattctttctccctaaatctagcatcacaaaagaaaacaaagcagtagacaataacagaagagagaatttccagttagtaataatatgcttctgctccgtgatttgctgtg

SEQ ID NO: 326836 - DNA, 588 bp, Homo sapiens
aattgtttgttttattttgtttttttcatttacctttaggaagttggtatctacaccatgggtaagtatctattaamatatagatacttgaggcagccacgagtgacatatatccaaagcatcaaagatcccaaaggtcagctctttcctactcaaacttaacatgtttatcatgtaaactgttcaggtgatgtaattacaggcatcccaagcttctttttttctggtttccattaacattcttgccagtggaaacatagagtcacaacatctctcttactgtcatattgtcatgggagcagggatatatcaggagcctcattaattccaaatgtcgaagagaggaattccttacacaagtcaaaaattttactttaatgtggcccaagtaactatttccctaattaaaataattgtcattgtcgaaaccgcaaaaattttggtgacatcatttgacattttaaaaagttctacaaattagacacaaaatttttgattttaatgtaaatcaaacttctaggagacttcatagactctttttcctttccctgccatacgtccaagatcttaacatcccttgactgcctg

SEQ ID NO: 326837 - DNA, 588 bp, Homo sapiens
aattgtttgttttattttgtttttttcatttacctttaggaagttggtatctacaccatgggtaagtatctattaacatatagatacttgaggcagccacgagtgacatatatccaaagcatcaaagatcccaaaggtcagctctttcctactcaaacttaacatgtttatcatgtaaactgttcaggtgatgtaattacaggcatcccaagcttctttttttctggtttccattaacattcttgccagtggaaacatagagtcacaacatctctcttactgtcatattgtcatgggagcagggatatatcaggagcctcattaattccaaatgtcgaagagaggaattccttacacaagtcaaaaattttactttaatgtggcccaagtaactatttcyctaattaaaataattgtcattgtcgaaaccgcaaaaattttggtgacatcatttgacattttaaaaagttctacaaattagacacaaaatttttgattttaatgtaaatcaaacttctaggagacttcatagactctttttcctttccctgccatacgtccaagatcttaacatcccttgactgcctg

SEQ ID NO: 326838 - DNA, 446 bp, Homo sapiens
tgcagtcagggtgacagagtgagactctgtcttaaaaaaaaaaaaaaaaaaaaaaaaaaagccacacatttcagtgattcaaccatagcaaaaaggcatcttccagctacttgtaggaatctcatgtccgccatgttctgactcctatctttttgaatatacttagctcttaccagttaccctggtgaactctaatcagtcaaatagaaatacctcattttccatatataycaacctatttttaatctgggttttggaacatgcatgtctttgcttggaatgtcttcttttccacaccacagattcttattttaccatctgttgcgtagctctccctggtctatctgctatttactctgtggtattcctacttcactttatgcatgccatcattattgtgctcacctctctgtgttttgctgggtggtgatttttgctgtttataa

SEQ ID NO: 326839 - DNA, 598 bp, Homo sapiens
ttttaaaatattatttatggagatcatgactcatctttgyatatctcatgtgctaactcccagaccacagaccagtgcagtaaaacagctcgatgacatgagtgccatttaagaataagctgtctgtgcaaggcacttttttgtttgttattattttttaccatgttttacattttgtgtcatacctccttcccttccataaatgtgcaattcatatttggaatgatgtgtatctgtgctaaaagcagatgtggatgaggtacgatgacaatccagtttgttctgccttatgtctacaatgcttctaatctaccaatactcttccacatcaacaatacctggaattctcaccattttagatgagaaacttaaagctctgagaggttacgtgacttacttgatatcatgcagggagtgttacagccaccattcaggctagtcctatttacctctaaattctattttcttctcttctcctatgtttttcaagcttttctgattggagtttattgtaaaaatcacactttacataggaccaaatacatacacgcaatagaaattgtccaaaaaatgcttatttttacaatatgtcacttac

SEQ ID NO: 326840 - DNA, 575 bp, Homo sapiens
caatccacaatgcatggtttaaaaaatcactaatctgcatcttatttcttggcgttatcttgcatgtgagtaaatagtttttggaaattaacttcagagggctatagaccaattgaggtaaaagaagtagaaaaactggtggagagagtgaatgtctcttaaatgtaattaaatttaatttaaatttaaaatctgttaaagacctatgtttagctcctttgcaaataaataggacttgttttggtaggaaaccagtaagtcttaatcctgatatttcttcaagtgtattttgagaaaastcatgcttacattaatgagttttaccaaatcagtaatgataataatagttttaaatctaatcagagcaaagcacaaacaagtctatttggaggagcaaaattgagttaagggtaagagcacactttgaaaatgatttctctggattgttgtattcttagagatatctggaggaatttatttgggcaaacctgaggcagtcatttgctattatttctccttctaggtttctgtgctgagccagcatattcctggcactgtagcgctttcaaagctgt

SEQ ID NO: 326841 - DNA, 553 bp, Homo sapiens
caataataacaataacgaagtatctgtttattgattaccttctgcgtgtcaagcaataattagataaacactttccctctatccttttattttcataaaaatcttayagagtattactttaaccattttgcaaatgatgaaattataacttcctagaaaacctataaatttgctgtacaactattgtcaaaggtaaaatccaaacctgtattagtccagttccaagtgggtttgcttttctgccatgctgctttaaaaattcactttctcttctcccaccttgaaattcttaaatactgttggagaccaaaaacaaaattataaaaacaaaaatcgtacaaccagtgtggtttgaaaccactgaaagttcatggtgtctgttttcctttggcttctccataatgcaagtcagtccttatttatctttttgactctttatcaccccttcccatcagcaattcttctgctgcttctcttgaatccttgagctgcccattttgccatttctctacttccttaagaaaatagcatcttttctcatacctgtctgtgt

SEQ ID NO: 326842 - DNA, 553 bp, Homo sapiens
caataataacaataacgaagtatctgtttattgattaccttctgcgtgtcaagcaataattagataaacactttccctctatccttttattttcataaaaatcttatagagtattactttaaccattttgcaaatgatgaaattataacttcctagaaaacctataaatttgctgtacaactattgtcaaaggtaaaatccaaacctgtattagtccagttccaagtgggtttgcttttctgccatgctgctttaaaaattcactttctcttctcccaccttgaaattcttaaatactgttggagaccaaaaacaaaattataaaaacaaaaatcgtacaaccagtgtggtttgaaaccactgaaagttcatggtgtctgttttcctttggcttctccataatgcaagtcagtccttatttatctttttgactctttatyaccccttcccatcagcaattcttctgctgcttctcttgaatccttgagctgcccattttgccatttctctacttccttaagaaaatagcatcttttctcatacctgtctgtgt

SEQ ID NO: 326843 - DNA, 553 bp, Homo sapiens
caataataacaataacgaagtatctgtttattgattaccttctgcgtgtcaagcaataattagataaacactttccctctatccttttattttcataaaaatcttatagagtattactttaaccattttgcaaatgatgaaattataacttcctagaaaacctataaatttgctgtacaactattgtcaaaggtaaaatccaaacctgtattagtccagttccaagtgggtttgcttttctgccatgctgctttaaaaattcactttctcttctcccaccttgaaattcttaaatactgttggagaccaaaaacaaaattataaaaacaaaaatcgtacaaccagtgtggtttgaaaccactgaaagttcatggtgtctgttttcctttggcttctccataatgcaagtcagtccttatttatctttttgactctttatcaccccttcccatcagcaattcttctgctgcttctcttgaatmcttgagctgcccattttgccatttctctacttccttaagaaaatagcatcttttctcatacctgtctgtgt

SEQ ID NO: 326844 - DNA, 596 bp, Homo sapiens
gctatgtgaagattggacttactgacacaagccaaagtactattagaagctaaggaaaaggcctggaacagactcttctgtggcaccttcagagggggcttsatcctgctgacacttgatcacaaacttctggtctccagaactgtgagataatatatttctgtttctaagccattcagtttatggtactttgtcatggcagcccttgtaaactcatacacaaggtagcatcagagaaacatacttcatccttctcccctaaacccaagtactcttctctatgcttcccctggagcctcttcctttctccctgaggaatttctctccccagttttttttctgaagaaagttaaggggcaataaagtcctatttgattctaattaatataaaatggcagtctcaaatggccagatggacattacaagccatctcttgcttctgtaaagagcactgtgggttcctggaacccctccccactgggtgctgtcactggggatcatctcctacttttctttccacagaggccagtacatttccaccatctggttggttacagtgctaattcaggctaggtcgtctggcgcctcacctcccc

SEQ ID NO: 326845 - DNA, 559 bp, Homo sapiens
gatcacaaacttctggtctccagaactgtgagataatatatttctgtttctaagccattcagtttatggtactttgtcatggcagcccttgtaaactcatacacaaggtagcatcagagaaacatacttcatccttctcccctaaacmcaagtactcttctctatgcttcccctggagcctcttcctttctccctgaggaatttctctccccagttttttttctgaagaaagttaaggggcaataaagtcctatttgattctaattaatataaaatggcagtctcaaatggccagatggacattacaagccatctcttgcttctgtaaagagcactgtgggttcctggaacccctccccactgggtgctgtcactggggatcatctcctacttttctttccacagaggccagtacatttccaccatctggttggttacagtgctaattcaggctaggtcgtctggcgcctcacctcccccatcttgcatctgaggtctccttgcccttctagctggccccttagggaggatctatggcaatactaggcctgctgtgttt

SEQ ID NO: 326846 - DNA, 459 bp, Homo sapiens
tgcaaatctgaaagtccatactagcttacttttataagttccacatagttatttaaccacctaatgaacatttttgaagcaatacaattttgaactgttatacttgatacaaaattttgcaaccaagcaattgaggaataattaactagaatttaaaaaaattatgagatgttttttccaaaaaagggggggagcaattattgagtttgaataaaagggggaaaagaaagtaaacagattcttaatcatttaatcactttattttaacagtaattttattcattgtgatktatttttagtaagtagttaggttattttacaaagtattaatattatttcaatggacatgtgtaacccatttaaaaaccttctgttacaattcagaaacaacagtattttaactcattctatcaattaattaaccatgcatttttttcttttcaattcctgacatattct

SEQ ID NO: 326847 - DNA, 526 bp, Homo sapiens
caaatttctcaaaggtaaaatttgtaggtgattctccttcaagaagggaccttttatctcctagtgggaagcataatggggcaacttgacacatccataagaaaggatcaataaatgctgctcccaaggggacatccttggaggggcaaaaaaggaaaggaacatgttaaatcctttgaaaacgtgtggygttgaatggagtggcagacgttctagtcatttggccgacccatatgaatgaaagtatgtaatgggaggggacccacgggggcactgctgatccaatcacaccacagggaaaaattaagttaatgtcattaggtagggagaactatttaaaaatatacaactctttattagattttcttatgagaggtcaatgctaatcatgtatttgaactcaaatcccatcagcttataattctctttggcaaatgttgactagatgctatcacataaatatatatcagctgtctatacctccatttctttctacagatgcactccagttcagtacagacaatgt

SEQ ID NO: 326848 - DNA, 445 bp, Homo sapiens
tagtcacaatgagcagcatcattgaagggtggtgctcagagaggacgggaggtgaaaggatgtcaaatgcagaaagggctcagttcaaatgttgcacagttctgaaccaagaaaaggggtagaaagtttttttttwcttcctcatctttactccattaatcacagccagattcggttactaaatctacaatcactgtgcagcgaattaagtacaagacacatctatactatgacttagaggaaggaaaaccttcttccatcatccaggcttaactttatggtgggaagataaacagtctggatgaaataggcagaccactagaagacaggtagaattgagataaggccaggatcagtgtgtgctgccaatttttactgatactgtaagaaaaattatccatgtatctatgtgatggttaattttatgtgccaacttgactgggcc

SEQ ID NO: 326849 - DNA, 564 bp, Homo sapiens
tgtctactgtttgcaaggcacactctgtgctaagtgcctgataatttcagtttaacaacattctgggttgaaaaggaatttctcaattgactggagaatataattatcatttataatatcatttctatggaaaaatagatttcaggttccaaacttagtgatcctaattatttcttgcaaaatggtaacaascaatcagatatgtcttatcctatgtctcccttttctttgcaaaccatccgcatttatattgtgtgtgttatgctacatgtcagctctaaaagccttagcaaccctctcataacatacactaaggatatcacaaaatggtgcacaaaccgattccctttgaaagacaagaaattcgacttagtagatatggtttcctgctgaagagagtgaaacggatgagatgtcgtagcatgtctcagtctcagaccgattgttctgatatgtagttcagtctacattagctgctgaaagaacttccatgataataatgtgcattgcctaaataatcccattttccacatatataaattctagccttatatgtgcagcaat

SEQ ID NO: 326850 - DNA, 564 bp, Homo sapiens
tgtctactgtttgcaaggcacactctgtgctaagtgcctgataatttcagtttaacaacattctgggttgaaaaggaatttctcaattgactggagaatataattatcatttataatatcatttctatggaaaaatagatttcaggttccaaacttagtgatcctaattatttcttgcaaaatggtaacaaccaatcagatatgtcttatcctatgtctcccttttctttgcaaaccatccgcatttatattgtgtgtgttatgctacatgtcagctctaaaagccttagcaaccctctcataacatacactaaggatatcacaaaatggtgcacaaaccgattccctttgaaagacaagaaattcgacttagtagatatggtttcctgctgaagagagtgaaacggatgagatgtcgtagcatgtctcagtctcagaccgattgttctgatatgtagttcagtctacattagctgctgaaagaacttccatgataataatgtgcattgcctaaataatcccattttccacatayataaattctagccttatatgtgcagcaat

SEQ ID NO: 326851 - DNA, 580 bp, Homo sapiens
aatttaaacatattttattactaaaaaatgcttacaatcatctgaagcaccacgtagtcataatcttttcgttggtggaaggtcttgccttgatgttgatgcctgctggctgaacaggatggtggttgctgaagtttgagatggctgtggcaacttttgaaaataaagacaaagrtgtttactgcattttcttttcacaaaagatttctctgtagcatgcaatgctgtttgatagcattttactcacagtagaatttctttcaaaattgcagtcagtcctctgaaactctgccactgatttattaactaagttaatgtaatattctaaatcctttggtgacatttcaaacaatgttcaaagcatcttcactaggagttgattccatctcaagaaaccactttctttgctcacccagaacaattccagatccattcaagttttattttgagattgcaacaactcagtaacatctttaggctccacttctaattctagttctcttactatttccatcacatatgcagttacttcctctgctgaaatcttgaagtgctcagtcatccatgagggttggaatca

SEQ ID NO: 326852 - DNA, 580 bp, Homo sapiens
aatttaaacatattttattactaaaaaatgcttacaatcatctgaagcaccacgtagtcataatcttttcgttggtggaaggtcttgccttgatgttgatgcctgctggctgaacaggatggtggttgctgaagtttgagatggctgtggcaacttttgaaaataaagacaaagatgtttactgcattttcttttyacaaaagatttctctgtagcatgcaatgctgtttgatagcattttactcacagtagaatttctttcaaaattgcagtcagtcctctgaaactctgccactgatttattaactaagttaatgtaatattctaaatcctttggtgacatttcaaacaatgttcaaagcatcttcactaggagttgattccatctcaagaaaccactttctttgctcacccagaacaattccagatccattcaagttttattttgagattgcaacaactcagtaacatctttaggctccacttctaattctagttctcttactatttccatcacatatgcagttacttcctctgctgaaatcttgaagtgctcagtcatccatgagggttggaatca

SEQ ID NO: 326853 - DNA, 580 bp, Homo sapiens
aatttaaacatattttattactaaaaaatgcttacaatcatctgaagcaccacgtagtcataatcttttcgttggtggaaggtcttgccttgatgttgatgcctgctggctgaacaggatggtggttgctgaagtttgagatggctgtggcaacttttgaaaataaagacaaagatgtttactgcattttcttttcacaaaagatttctctgtagcatgcaatgctgtttgatagcattttactcacagtagaatttctttcaaaattgcagtcagtcctctgaaactctgccactgatttattaactaagttaatgtaatattctaaatcctttggtgacatttcaaacaatgttcaaagcatcktcactaggagttgattccatctcaagaaaccactttctttgctcacccagaacaattccagatccattcaagttttattttgagattgcaacaactcagtaacatctttaggctccacttctaattctagttctcttactatttccatcacatatgcagttacttcctctgctgaaatcttgaagtgctcagtcatccatgagggttggaatca

SEQ ID NO: 326854 - DNA, 566 bp, Homo sapiens
tcatcagttcgaagatgcaatgttatgatacaccatcaatttcaaagatgtcaaaatgggaaaagatcagcatcttaaaatggaagaatatatttaaggtacttacaaatagcacttaatataagttgtttatcattttatcatgaaatcttcattgctgttgtaattaaaattaatagtatatcaacacataaaatagagataacagatgtattgaagaagttcatctgtaacttcccaaataaatttattgtggaaaaccataaaatagrttctgattactttgattagatatctctacaagcaggtacgctgatgcctcagctctaaaagtgagtccgcattggtggagttaattttcttaggttcgtccattacaaatcccaattctatcagcatctgacatagcagctcacacatttcactgcaggccccttaagaaaattagctttattaactaagtactaaaaatagtttataatccagagcaaacaagaactgctatacagcacagctgtgttttccttgaaccatttccgaggctctccagaatcaattatcaccag

SEQ ID NO: 326855 - DNA, 600 bp, Homo sapiens
atcaattatcaccagtcgtctattgtgccttatatttatatggaaaggtcaggttaaattaattaactttaaataactaccaaagtgtgtgtgacactgctgtcatccttctaatctaacacgtttctgggaatgtgcgtgctccctagaatcacagtctcagagaatgggtcatatattgagggcatctgctcttgaattgatttccttagtggatcaaaattccaggccactgtgcttttgaggccctacttcaggctgtaatcgatgtttgggtacagtgtttgctgggttggtgctcaktttcatacagagccaaagcagggtagttatgaaaatgcccattcctatgcaaacagaaagagtatctgaaatgaccttgtttatcgagtctcagtgttttggtgttccacatggtaagttttgcctttttcctgtacaggtcacttagggcaggcgaataaacctgatcccatggtagttacaaccctctaggggttcacagtaatggtgttttactgcaaaagcaaatggatcatagaaattaaactgagctttaattgtgttaacagttgctcttaatccttccttggaatggga

SEQ ID NO: 326856 - DNA, 552 bp, Homo sapiens
acaatgaagtattatttggccattcaaaagaaggaaatattgtaatatgtgacatcatagatggaccttgaaaacgttatgctaagtgaaataaaccagtcacaaaaggacaaatayggcatgattctacatacagaagttatctaaagtggtcaaactcatcaaagtagaaagtaaaatggcagtttccaggtcctaagcggaggcagaaatgggaagtttctgttcaataggtatacaatttcagtcacacaggatgcaaaagttctgcagatcagctgtgtaacatagtgcttatagttaagaataccatactgtacacctaaaaaggaaagaaggtggatatcaagttatgtgtttttaccacaataagaaagagaaaatatggcaataagtagatacatagaaaaaatgtagagtattatatgtgagaacaggaaaagagctgagactatatcacggctatgccacttcctgtgtgcctttggataatccatttaaattgatgagatttatttatctgtaaactaactttaaaaatataccgcccat

SEQ ID NO: 326857 - DNA, 552 bp, Homo sapiens
acaatgaagtattatttggccattcaaaagaaggaaatattgtaatatgtgacatcatagatggaccttgaaaacgttatgctaagtgaaataaaccagtcacaaaaggacaaatacggcatgattctacatacagaagttatctaaagtggtcaaactcatcaaagtagaaagtaaaatggcagtttccaggtcctaagcggaggcagaaatgggaagtttctgttcaataggtatacaatttcagtcacacaggatgcaaaagttctgcagatcagctgtgtaacatagtgcttatagttaagaataccatactgtacacctaaaaaggaaagaaggtggatatcaagttatgtgtttttaccacaataagaaagagaaaatatggcaataagtagatacatagaaaaaatgtagagtattatatgtgagaacaggaaaagagctgagactatatcayggctatgccacttcctgtgtgcctttggataatccatttaaattgatgagatttatttatctgtaaactaactttaaaaatataccgcccat

SEQ ID NO: 326858 - DNA, 637 bp, Homo sapiens
cacaatttgcctcgagtgtccatgtaacagatggataacatgtccacaatgcaataagaattcagtcaaagaaagtattattgtaattgaaaatactgtgctctgttcaggtacaaacatattatcttctaacytatttagatgctggaaaatagtttttactttctatctaatttacatatgtgaactaatacgctttacatgtttaattgctgtgtaataactctccactgtgtccaatggttggaaccaagaattgtcccacaatgtctcagctgaccagcacattaaactggtagatatggtaatagtacaaaaacatttgtctctgaatagatgacgaggaagaaaatggaaggaaggaatttcttattaaggatgattcatgtgaagaagatgcctgctttggttcaaataaaatgttaaccagaagtggaaaggggaatgttaaagcaagtgcttgtagtagcagtgagacccttgcttagagtagctatatactcacattcccctattattttctcattcataaaatcatagaattatcatgagcaggggtctttaaatatggcccataggcaaaatttttcctgttgcctcttttgtaaatatatgtttattagtacacagccatagc

SEQ ID NO: 326859 - DNA, 637 bp, Homo sapiens
cacaatttgcctcgagtgtccatgtaacagatggataacatgtccacaatgcaataagaattcagtcaaagaaagtattattgtaattgaaaatactgtgctctgttcaggtacaaacatattatcttctaacctatttagatgctggaaaatagtttttactttctatctaatttacatatgtgaactaatacgctttacatgtttaattgctgtgtaataactctccactgtgtccaatggttggaaccaagaattgtcccacartgtctcagctgaccagcacattaaactggtagatatggtaatagtacaaaaacatttgtctctgaatagatgacgaggaagaaaatggaaggaaggaatttcttattaaggatgattcatgtgaagaagatgcctgctttggttcaaataaaatgttaaccagaagtggaaaggggaatgttaaagcaagtgcttgtagtagcagtgagacccttgcttagagtagctatatactcacattcccctattattttctcattcataaaatcatagaattatcatgagcaggggtctttaaatatggcccataggcaaaatttttcctgttgcctcttttgtaaatatatgtttattagtacacagccatagc

SEQ ID NO: 326860 - DNA, 624 bp, Homo sapiens
gctctttttaatgaaacttctagttcaatatcagtaaattattttgcttggatatgaactctaatatgttttaccaacatgattttatgctactggcctctaggattttgaggatagtggactttataaatatttatgtgtgtattttcaaatatctatccctctttacaagcatagtatttgcatatattttcacatatttgtacacaaagtgagataaagtcagaaaaggargggtaagtggacttttcagactaaatcaagtggagtgggatgtaggatgacattagtctgcctttattaagctccagaaattctgaaacagctgagaccacttgtaactgagctaacagttcagtttgacttgaagttaggtctttcttaggtcaaagagctgttggcaaaactatctcagatctgtggcagcagatgtaacagggaccatgctaacagaaaaagaacttctataaggagcccttggggaggcacagctagctgctggcctggacatcttcatctgggctgcaggatgatggcctcccaggcccattggttctctctaattcaattagctctctttagcatacgtctttatgctggaatgctatacacataatataatgg

SEQ ID NO: 326861 - DNA, 624 bp, Homo sapiens
gctctttttaatgaaacttctagttcaatatcagtaaattattttgcttggatatgaactctaatatgttttaccaacatgattttatgctactggcctctaggattttgaggatagtggactttataaatatttatgtgtgtattttcaaatatctatccctctttacaagcatagtatttgcatatattttcacatatttgtacacaaagtgagataaagtcagaaaaggaagggtaagtggacttttcagactaaatcaagtggagtgggatgtaggatgacattagtctgcctttattaagctccagaaattctgaaacagctgagaccacttgtaactgagctaacagttcagtttgacttgaagttaggtctttcttaggtcaaagagctgttggcaaaacwatctcagatctgtggcagcagatgtaacagggaccatgctaacagaaaaagaacttctataaggagcccttggggaggcacagctagctgctggcctggacatcttcatctgggctgcaggatgatggcctcccaggcccattggttctctctaattcaattagctctctttagcatacgtctttatgctggaatgctatacacataatataatgg

SEQ ID NO: 326862 - DNA, 624 bp, Homo sapiens
gctctttttaatgaaacttctagttcaatatcagtaaattattttgcttggatatgaactctaatatgttttaccaacatgattttatgctactggcctctaggattttgaggatagtggactttataaatatttatgtgtgtattttcaaatatctatccctctttacaagcatagtatttgcatatattttcacatatttgtacacaaagtgagataaagtcagaaaaggaagggtaagtggacttttcagactaaatcaagtggagtgggatgtaggatgacattagtctgcctttattaagctccagaaattctgaaacagctgagaccacttgtaactgagctaacagttcagtttgacttgaagttaggtctttcttaggtcaaagagctgttggcaaaactatctcagatctgtggcagcagatgtaacagggaccrtgctaacagaaaaagaacttctataaggagcccttggggaggcacagctagctgctggcctggacatcttcatctgggctgcaggatgatggcctcccaggcccattggttctctctaattcaattagctctctttagcatacgtctttatgctggaatgctatacacataatataatgg

SEQ ID NO: 326863 - DNA, 624 bp, Homo sapiens
gctctttttaatgaaacttctagttcaatatcagtaaattattttgcttggatatgaactctaatatgttttaccaacatgattttatgctactggcctctaggattttgaggatagtggactttataaatatttatgtgtgtattttcaaatatctatccctctttacaagcatagtatttgcatatattttcacatatttgtacacaaagtgagataaagtcagaaaaggaagggtaagtggacttttcagactaaatcaagtggagtgggatgtaggatgacattagtctgcctttattaagctccagaaattctgaaacagctgagaccacttgtaactgagctaacagttcagtttgacttgaagttaggtctttcttaggtcaaagagctgttggcaaaactatctcagatctgtggcagcagatgtaacagggaccatgctaacagaaaaagaacttctataaggagcccttggggaggcacagctagctgctggcctggacatcttcatctgggctgcaggatgatggcctcccaggcccattggttctctctaattcarttagctctctttagcatacgtctttatgctggaatgctatacacataatataatgg

SEQ ID NO: 326864 - DNA, 544 bp, Homo sapiens
ttaatatatattaatgaatcatgttgccactgagttgttaggatataactattaaggatataaaaattaagttgtttacacctaactgattaacaaacagaactcacatatttcttttggcctaggggtaccgtgtaaatattactaagacactaaaattgctgcaaaatgagaaagtttagaaacctccaggttgaggagttattctaagtgttactaaggctccttagatccttgtgagcctataaaataattaaaaactcccatcatgagaatgtgtcaaaaactgtaattttgagaatattgatccctatgtgtttacttgaaacaaaaaacatattggggcaagttacttagagacaaatttcatctgctgtgggtcaaacatcacctaatatgtaagtgttaaaatggaatattcaggcrttgaagttgtcattgttataagacccttgttacagcaaagaaactgaggtacagagagaattattaacacagcaaagcaatcagaagacgtgactcaatattgtgctttagaggacat

SEQ ID NO: 326865 - DNA, 579 bp, Homo sapiens
ttagtttatgtatgatataaaaggcaatggaaatgtttagttttggaacttttttgaaagaatcataaaatatattaagtagcaggtacatttttatactattgtataaaaagattttgataccagtcatcaaaaattaatccataattatatgaaataaatatatttaagtgactgttttaggccaasctcggagttagtagttaaatttgaagtatttaattatcacaaccactttctgagttaggttttattattatctatattttaaaggtgagaaaactgaggtttagggggattccaaaatcatcaagtaagtaatgacatcaggacttaaacccaggccatttgaccttaaaagtatagtccattttttttcacattttaataattctgatatcaggttgtggcttaaaattaaggcaaacaattttgtatcatgttgatgttgattgatgcctctcctaatgaggccttttattaaattcaaaatgtgttttaaaattttatggtgtcttaggatcaagaaaatgtcacgttagagagtaaaacaaagaccactagatcttgggaatggaa

SEQ ID NO: 326866 - DNA, 557 bp, Homo sapiens
tcttaaaaatctttgaatttggcattgtcctaagtgtgttctgaagaatgctggttctgcaggatggtagtatgagcaactgtgaaaagacaaaggggaattatatggttaaatttagtaaatactragttaaacaaagctaattctagtctgcctgcagcaattatcagagcttttaatatgcatgtgaatcatgctctcttgaagtggaaatgtggctgtggcaagaaactgttcccaaacttctctgctcacagtctgtctcccactacttgttttgcttaccttttttgaattgagatatgatttacatatagtgaaatacacgggtcttaagtgcacagttcagtgactattggtaaatgcctacatcgttatagctcacaacaatatcaaaatatagaacattccatcctagaaaggcaggcagctttcaaagtgcattataattgtcattgtgtttgcagccaaaatgaaatgtcaaactccctgatgccaggcaacatgtattttacatctttgaactcctagtgccaagctcagttcctgatatatgg

SEQ ID NO: 326867 - DNA, 557 bp, Homo sapiens
tcttaaaaatctttgaatttggcattgtcctaagtgtgttctgaagaatgctggttctgcaggatggtagtatgagcaactgtgaaaagacaaaggggaattatatggttaaatttagtaaatactgagttaaacaaagctaattctagtctgcctgcagcaattatcagagcttttaatatgcatgtgaatcatgctctcttgaagtggaaatgyggctgtggcaagaaactgttcccaaacttctctgctcacagtctgtctcccactacttgttttgcttaccttttttgaattgagatatgatttacatatagtgaaatacacgggtcttaagtgcacagttcagtgactattggtaaatgcctacatcgttatagctcacaacaatatcaaaatatagaacattccatcctagaaaggcaggcagctttcaaagtgcattataattgtcattgtgtttgcagccaaaatgaaatgtcaaactccctgatgccaggcaacatgtattttacatctttgaactcctagtgccaagctcagttcctgatatatgg

SEQ ID NO: 326868 - DNA, 557 bp, Homo sapiens
tcttaaaaatctttgaatttggcattgtcctaagtgtgttctgaagaatgctggttctgcaggatggtagtatgagcaactgtgaaaagacaaaggggaattatatggttaaatttagtaaatactgagttaaacaaagctaattctagtctgcctgcagcaattatcagagcttttaatatgcatgtgaatcatgctctcttgaagtggaaatgtggctgtggcaagaaactgttcccaaacttctctgctcacagtctgtctcccactacttgttttgcttaccttttttgaattgagatatgatttacatatagtgaaatacacgggtcttaagtgcacagttcagtractattggtaaatgcctacatcgttatagctcacaacaatatcaaaatatagaacattccatcctagaaaggcaggcagctttcaaagtgcattataattgtcattgtgtttgcagccaaaatgaaatgtcaaactccctgatgccaggcaacatgtattttacatctttgaactcctagtgccaagctcagttcctgatatatgg

SEQ ID NO: 326869 - DNA, 557 bp, Homo sapiens
tcttaaaaatctttgaatttggcattgtcctaagtgtgttctgaagaatgctggttctgcaggatggtagtatgagcaactgtgaaaagacaaaggggaattatatggttaaatttagtaaatactgagttaaacaaagctaattctagtctgcctgcagcaattatcagagcttttaatatgcatgtgaatcatgctctcttgaagtggaaatgtggctgtggcaagaaactgttcccaaacttctctgctcacagtctgtctcccactacttgttttgcttaccttttttgaattgagatatgatttacatatagtgaaatacacgggtcttaagtgcacagttcagtgactattggtaaatgcctacatcgttatagctcacaacaatatcaaaatayagaacattccatcctagaaaggcaggcagctttcaaagtgcattataattgtcattgtgtttgcagccaaaatgaaatgtcaaactccctgatgccaggcaacatgtattttacatctttgaactcctagtgccaagctcagttcctgatatatgg

SEQ ID NO: 326870 - DNA, 564 bp, Homo sapiens
gcttctccaaaagagaagatcctaattttgtggttcaccggtgtatgactttggagaaatagataaatacatttggtgaattgatccatgacctgagcagcggtcagctaaatcagctagtttgccatgtgaatatgcacactgcattaagtaaaattaagagatgattactgagttcagcttaagttcatattactgtgaactgatttcttaatttttagagagctctgaaattgagaagcataactcaaaatgtaagrcttattaatctgaattcctcaaagaggaaatgaagcataattacttatgtttccagtataaacacatgagttcatcagcttcatatgtcaaggcacacatttaaacaatttttctttaagacatttcacaaagttaggtaattccacaatgtaggttaacatggcaattctagttaagggtaggattaagaaacttacatcaattgggcagaggatcactgagccagacacacaataaaagcaacgaaataagtttttgaagataaacatttaccatggtgtaaaattcttagtccagaaaaaa

SEQ ID NO: 326871 - DNA, 569 bp, Homo sapiens
ttcatattgatagcgaatttgtaatgttttctatgtaaatgagagttacaaaactcattaagaagtactcatctgtactgctctataaaatgaagatgaaggtcttgacctagtaagtactttacatatatatcyacatttctataattttattcatcaatgaatttgctcatttattctggaaaaaattaaatgtgtcataaaataatataaaataataatcttaatttgattttcaaatttttttctcctctctcatcccataacactaatgagcattttcttgtcaaagttgggagttaagaaatttaacgtttctaaatgattctgtaaacctagttattctcccacccttcagctgaactgctttgaaaatacaatgtgcaaagctgcagattaacagtgcttaaatgtacagggttgacgtaatttcaggctgcttgaattaactctcttcgacaagcctttccttgcgaaccaccagcagaaaagttcctctttgtctacagttacaagccaggctccagtcactgggagttttcgcattgtttctaatatattggtgctcg

SEQ ID NO: 326872 - DNA, 512 bp, Homo sapiens
ttttcatatgttgaaaaaaggaatagagaaatatcagtagacaccgtcatagttcgtggtttgtcagaaacttataaaataacgcaaacaagacaaaagtttccaaagacctctaaaacaaaaagacccagggaagaaataaaaaaggaaataaaagaactggaaagaagtgaggcatgttcagagaaaattcatttagctctaacttttccttcctcactggttagtctaaaaatgctttcattcttctttccctgggacaacttaatactcttccattcatcactccctatgtgaattttytccttttgccaaatgagtttactcagtgccatctgaacaaggaactgtgctttacttatatagatctcttacatctgaggccttcccttccaatgatagaaaagctttccattccttttccaaagtctttctcctatcgaatctagtgcttaaaaccttcagcctacaatcacagtaagccttgatataatctcatggcatcagttatt

SEQ ID NO: 326873 - DNA, 512 bp, Homo sapiens
ttttcatatgttgaaaaaaggaatagagaaatatcagtagacaccgtcatagttcgtggtttgtcagaaacttataaaataacgcaaacaagacaaaagtttccaaagacctctaaaacaaaaagacccagggaagaaataaaaaaggaaataaaagaactggaaagaagtgaggcatgttcagagaaaattcatttagctctaacttttccttcctcactggttagtctaaaaatgctttcattcttctttccctgggacaacttaatactcttccattcatcactccctatgtgaattttttccttttgccaaatgagtttactcartgccatctgaacaaggaactgtgctttacttatatagatctcttacatctgaggccttcccttccaatgatagaaaagctttccattccttttccaaagtctttctcctatcgaatctagtgcttaaaaccttcagcctacaatcacagtaagccttgatataatctcatggcatcagttatt

SEQ ID NO: 326874 - DNA, 512 bp, Homo sapiens
ttttcatatgttgaaaaaaggaatagagaaatatcagtagacaccgtcatagttcgtggtttgtcagaaacttataaaataacgcaaacaagacaaaagtttccaaagacctctaaaacaaaaagacccagggaagaaataaaaaaggaaataaaagaactggaaagaagtgaggcatgttcagagaaaattcatttagctctaacttttccttcctcactggttagtctaaaaatgctttcattcttctttccctgggacaacttaatactcttccattcatcactccctatgtgaattttttccttttgccaaatgagtttactcagtgccatctgaacaaggaactgtgctttacttatatagatctctyacatctgaggccttcccttccaatgatagaaaagctttccattccttttccaaagtctttctcctatcgaatctagtgcttaaaaccttcagcctacaatcacagtaagccttgatataatctcatggcatcagttatt

SEQ ID NO: 326875 - DNA, 455 bp, Homo sapiens
acaaggaactgtgctttacttatatagatctcttacatctgaggccttcccttccaatgatagaaaagctttccattccttttccaaagtctttctcctatcgaatctagtgcttaaaaccttcagcctacaatcacagtaagccttgatataatctcatggcatcagttattgarctcatcacaaattgttttaagacatttctaatataatttttatttaacacttgatttctctccattcatctatattttctttttttattataaggactggatatttaattccttctatactatatttaggagctcaacagggcttgattgaatgattattgttttaaaatacaatgcaacttataatttacaatatataattggtggatggttttttttgtgaacaagtgtatagtttttagaggcctaaattctttctgagttctatggtaaaaagtt

SEQ ID NO: 326876 - DNA, 593 bp, Homo sapiens
attattttaaattattttaatctattttttaagtttatctaataggattctgaattccttctctgaattatcttaaatttctttgagtttcctcaaaacagctattttgaattattagtcacatatctctgtgtctctgggtttggtcactcatgcctatttagttcatttggtgaagtcacgttttcctggatggttttaatgcttgtcaatgttattggtgtcagagtattgaagaattatatatttattcttaccttcatagttcagcttgtttgtacctgtccttcttgggaagcatttccaagtattcagatggtcttgggtgctgtaatgtaaatctttcatcaccgcagctatatctgccttaggggacacccaagctcaataacacagtaactcttgcagacttayagagatactggattggaggtcttgggtaaaatctggaagagttctctggaataccaggcagagactcttgttctgctcacttactatcacccaaacaaatggagtttctatccctttctgagctgtctggagctgagatagggtgacacaggcacccctgaagccaccaccaccactgg

SEQ ID NO: 326877 - DNA, 593 bp, Homo sapiens
attattttaaattattttaatctattttttaagtttatctaataggattctgaattccttctctgaattatcttaaatttctttgagtttcctcaaaacagctattttgaattattagtcacatatctctgtgtctctgggtttggtcactcatgcctatttagttcatttggtgaagtcacgttttcctggatggttttaatgcttgtcaatgttattggtgtcagagtattgaagaattatatatttattcttaccttcatagttcagcttgtttgtacctgtccttcttgggaagcatttccaagtattcagatggtcttgggtgctgtaatgtaaatctttcatcaccgcagctatatctgccttaggggacacccaagctcaataacacagtaactcttgcagacttacagagatactggattggaggtcttgggtaaaatctggaagagttctctggaataccaggcagagactcttgttctgctcmcttactatcacccaaacaaatggagtttctatccctttctgagctgtctggagctgagatagggtgacacaggcacccctgaagccaccaccaccactgg

SEQ ID NO: 326878 - DNA, 620 bp, Homo sapiens
gaaagaatgtcctagagggtctcataattcttatactatttagcataattaattttatctaaaatattccttaatcaagcccacatctaaacctttagtgatccctttccaccatttcttgcaggtctaaatttgttagcctaccattcaaatatctctcttctgttttccttttgttatcactccattcactccacttgaagaaaacaaaatcctccaagtatgctgatcttcccactggtttaaaaaaaaaaaaaaaaacaactatccgaaacttgaaaatgaagtaaaagggtgagtaccatgtcctttaaaactcatttggagtcattacttcaaaggtccactcaaggattatttaggrgtatataccttgttcaaattatgtttatcattaaagacctagatgtagtggagtcacatgttaacatgtagatttttgtccagttgaaaacataacccccatggttaccacttattatctcatagaacattacctggttttgtatttaacccaggaatcacatcctacctttgctttattaaattagtaaacatctctagttcctcaaatggccttggaaccagccatgtcactatactaatttcctcattagtta

SEQ ID NO: 326879 - DNA, 346 bp, Homo sapiens
aaccattaaaatgtacaccccattcaactaagaaattctgcttataggagtgtcataaggaaaacatcagaaattcataaacagatttatttgcataaacaagattgcagtgttatgcataatagtgacaaactgaaaatactctaaaggtccaacatcaagaggagctggttaattgaataatgggatattcgtatatagtttactttaggaaatgtttatgatctattattaaaaaaagcaggttacaatatacttgtgaagtattwtatatatatatatatatatatatatatatatatatatatatatatatattttttttttttttttttttttttttttt

SEQ ID NO: 326880 - DNA, 346 bp, Homo sapiens
aaccattaaaatgtacaccccattcaactaagaaattctgcttataggagtgtcataaggaaaacatcagaaattcataaacagatttatttgcataaacaagattgcagtgttatgcataatagtgacaaactgaaaatactctaaaggtccaacatcaagaggagctggttaattgaataatgggatattcgtatatagtttactttaggaaatgtttatgatctattattaaaaaaagcaggttacaatatacttgtgaagtattatatatatatatatatatatatatatatatatatatatatatatatatwttttttttttttttttttttttttttttt

SEQ ID NO: 326881 - DNA, 559 bp, Homo sapiens
ctgacacaagatcattagaactttggtgcttttagactctactgtgtcagtaacactctaaatttgtgagatraaacacaatgatttttccaggatccattatctttcaggacccatattattaaagacatagacaggcacatttcagaacttcctaagtaattatatgacaaactgtaatggcaaaaacatcttataaaacgatccctgaacattttgtgtcttcattaacataggtgtaggttggcagtctaccaggaaagtgtaacaactttgatattctttctctgaacatatatttaaaataactgctctggtgcttttagaatacctatgtatctatctatatacatatgtatatatgtacacacatatacatacatacacacacacacatatttgaatctctaaggacctaaattaaaacatacacaaagatcagagtcatcagtatgcatttcatacgtatgtcttttaatacccgtatgtccaaggtctttattttctcattagatatactatttgctataattttaaaaatcaaaggaaaaaaccatcc

SEQ ID NO: 326882 - DNA, 559 bp, Homo sapiens
ctgacacaagatcattagaactttggtgcttttagactctactgtgtcagtaacactctaaatttgtgagataaaacacaatgatttttccaggatccattatctttcaggacccatattattaaagacatagacaggcacatttcagaacttcctaagtaattatatgacaaactgtaatggcaaaaacatcttataaaacgatccctgaacattttgtgtcttcattaacataggtgtaggttggcagtctaccaggaaagtgtaacaactttgatattctttctctgaacatatatttaaaataactgctctggtgcttttagaatacctatstatctatctatatacatatgtatatatgtacacacatatacatacatacacacacacacatatttgaatctctaaggacctaaattaaaacatacacaaagatcagagtcatcagtatgcatttcatacgtatgtcttttaatacccgtatgtccaaggtctttattttctcattagatatactatttgctataattttaaaaatcaaaggaaaaaaccatcc

SEQ ID NO: 326883 - DNA, 545 bp, Homo sapiens
tgtatgagacagagattggaaaatgtaagatttttttgtcctttcagctggacctaggagaacagtgaccaaagggcagatggtatctcagtttcatcatctttcaaatgtaagcaataattgtccttacttcatccaastgttgtgtagaatagatattatgtgttaagggcataggtttgttactgggaaaaacctgattatgtcgatgaccagtttccttgcaacctaatatttatggcagtgattttcaactcaggtagcaagtgagaacatcccatggagatttttggagccacaaatacctgggctctgctttagtcctatcaaatcagaatttctcttgctgaagtcagagtttcagagtcctaggggtgatttatcctatcaataatgactaagcatatgctagggatactactgtatttactaaaacttatttatgattaaagtaatatgaaagttatttatgattactcaaaatacaatagtaacagatgtgtactattagataaattcacagatttaaaaataactactatatt

SEQ ID NO: 326884 - DNA, 545 bp, Homo sapiens
tgtatgagacagagattggaaaatgtaagatttttttgtcctttcagctggacctaggagaacagtgaccaaagggcagatggtatctcagtttcatcatctttcaaatgtaagcaataattgtccttacttcatccaactgttgtgtagaatagatattatgtgttaagggcataggtttgttactgggaaaaacctgattatgtcgatgaccagtttccttrcaacctaatatttatggcagtgattttcaactcaggtagcaagtgagaacatcccatggagatttttggagccacaaatacctgggctctgctttagtcctatcaaatcagaatttctcttgctgaagtcagagtttcagagtcctaggggtgatttatcctatcaataatgactaagcatatgctagggatactactgtatttactaaaacttatttatgattaaagtaatatgaaagttatttatgattactcaaaatacaatagtaacagatgtgtactattagataaattcacagatttaaaaataactactatatt

SEQ ID NO: 326885 - DNA, 526 bp, Homo sapiens
ttttccttctgaagagctttctagtttaatggtgacttgaggtgtttggagctagaagtctgaacttctgaaaagattgaaagtgcctggaaaccatctgagaggcaatccagtcaaggtggcctcccttctctatgtgctcaggacaaatgcttttctcttggcccygaatcttcccgggaatctcaatttcaaatcaaacagcacaagctcagggaagaatatgtattctaggacactaagaatccagtccttacctttccttttgttctgtttccttatttcttctgcattccctttttccttccttctcccaaccttcaatatttcttcttttttcttccttgtctgactttactcgtgtccttccctctttctccctttctccctctttctccttttctccatttctccattccttcttgccttcctatctagcattctttcctttgattctttttagttttgattaggtaatataacaatataccttaaatttgaaaatcattttccttcctaaaaattg

SEQ ID NO: 326886 - DNA, 566 bp, Homo sapiens
ccctctttctccctttctccctctttctccttttctccatttctccattccttcttgccttcctatctagcattctttcctttgattctttttagttttgattaggtaatataacaatataccttaaatttgaaaatcattttccttcctaaaaattgcaactctataaccaatctccatagaagaaaagttagtaagtataatacttctttcagtaccagctcttcagcaagcagctgacgagttctagttctagtgattcttgatgagattgtttagagagtgcttcattctgcttgaaggacagatgaagcctcttatataaccaaaacattgagtagtttaataatatggttacattttttttatttttccgttcacaaataacttccaagaagtatataatgccaaagtaaggtcacagcatctgttgtacatggctttcgcccatgtctagttcaggaattttccatgcccaattaagaaattctatcctttttcagattctgcttrccacaggatggctttagtcactttctataaaactaacttagaatagaggtgtc

SEQ ID NO: 326887 - DNA, 541 bp, Homo sapiens
agtaagtgctttctgaggacagaagaaaacttaacaaaagtgattaaattgaagccagttgaaattgtaagctgtttataaattatatcattggaaataaacttgttcattaattttaatgctttctgagatttcatgacttactttcacaactcaggatatagattccccttacccttaataaagcttcaacattataaaatttgaaactttgtttttttcttcaacatttttatttactattttctcatgtcctctaccctggacttactatagtactttctatgactagaacagatgtttgtccatttgaaaatagtttcatccttttatawtctttcatcacagtgtgtcctaggatgggaagaactttcatagaaacctatttcactttcctaagtgaaatttgagataatgaagcaagtactcaactctctcttataaaatacaacagaaacaattagcaatgtctaccatataatgacatattaaatataaagctttacaacttaggaatgtttttcttgaaagcgggttactt

SEQ ID NO: 326888 - DNA, 636 bp, Homo sapiens
atatacagaagattatatcccttctgcctacttcccatagccttgccacatgtatgtaaatagataagtacattagactgtaaaagtgaatacttatcttggcccctaaatctccttataaaaaatactacattttaaaattattcaaacagtgtttaattttaaacatgttagcagttttaatcttctaaactcctttcattctctaataatactgggtcaatgtaaagacgttgtggcaagttgcaacaagcttcagtaaaacattgaccgttcttcagcattctcttcagttacagcagcagtcactgtattccctggagaaaatctgcttttagttaattcactcaagttcagagactcttttgatttcagacaatggactttcaggtagtatacttcgtggcacagaatatgattcatatttactaggtggtacartttatctcccataacaattctttatttgctagtgcttttgattggaaccatttttctttctagttatgggtagggaaagagtcacaacttctgactcattttcgtgccactgttgcctgttgtcgtttttatgttgaatgtaatagaaattcatgattctaaaaaatgaagaattgaaaaatcactaagaagtac

SEQ ID NO: 326889 - DNA, 559 bp, Homo sapiens
tcatatgtttcaaaaaaatctacaccaaaaagtattctcagagaagtttcaatctcatccatacaccttctactccattttcatccatacctattaataaccattgtccttagtgtttgtttcatctcccctgtattttcttttgtaaaaataagcaatgctctactaaatcttaatttttttaaatcaacattatatcctggaaatcaattcataagtgttcataaagatctcatacattctttttaacattggaataacagtcttgcrtaagtctaccataccttcaaatcagacttttatggatatttatttagtttgttttccaaatttgcaatttctaataactttggatgaataaccttgtgtataagttgtttagtatgtgtggaggtatatcctcagggcatgtggctataaatggcattcattgctggcttcatgggaaatggttatgtaattttgaaaaatattgccaaattcctcctgagaggggttctgcaggcctatgagccatgtatgaaagtaggtatttcgtcacagttttgtcggtagagtg

SEQ ID NO: 326890 - DNA, 550 bp, Homo sapiens
agacacctattgagtttcctctatctaggctcagacttgcaacsttttcagtctagagactgcaagtccaatatgacacagttgagataactacatttaaagcctagaaatccagtctaagactcttctgattgtctctgaatggacatgaggttccaatggacctaatactacaaaaacagtctagggccaaaatggatcccagactcacctcgctcagagccagaagagaaccaggtgaactttttccagatgtatcactatctcctcataagaatttaacaatttctgagcttctgtatgaataattattttgacagatggtgctttgggttgtttatattttgaacagggaaattaatgtaaggacagctatttcaataaattatgtctgcaattttttctttccctttttcctcccatcctcccaccactcaccctcattgaaaatatcatctactcagaaccaaagatacatgaatacatgaaataaaatcctggatagactatttcaatggatcataattgaaaaggttttattgccaatata

SEQ ID NO: 326891 - DNA, 450 bp, Homo sapiens
ataggatgggactcccacatttattatttacctaagcaaataattaatagaataagatactaaagaattatttccctgccaattacagaattcagtttaaagcaaaccagcttactgtcaagcattaaacatgatgtcagctgatgcgttttatagcagcactttatcaatttataaygccttaattagcatataaatactgataacagctaaatagattgcaaacatgcgcattgcactatgattttcagttgtctatgcaccataatgcatcatacagagatataaaccctctcatatcatgaacacctaagtcaacttgaaagaaaatatctacgcttttcacacctttcagcagattatctccttccttgccaccatccttgggcagccccacagctcactgtcattcatttccaacattctgcttcatcagtttagcacctggtg

SEQ ID NO: 326892 - DNA, 430 bp, Homo sapiens
atcttctcattttccttcctgcctagaacaaaagtttgtgtttcaaaaattttaggggctttcttagctcacagtggcctgaggagagtagccccggagagtcatctggacttccaatttactttgcagaagtcagcaatagtcctctgctgtgttaaagcactgaagttttgggggttgtttctgcagcataacctagtctatcctgacatccatccttacagttcaagctcctagcctgcctctataagtggcaaattgtaaaacgctaagatctaataaaagtttattgaatytatctatcaatctatctatctatcctgtccatccatccatcggacacacacacacacacacacaaacacacacacacactttctcatttaatttaaaatggcttaattggaataatagtttctaattttttaat

SEQ ID NO: 326893 - DNA, 572 bp, Homo sapiens
gtggggatcagggaagaggcaaagtcctgaaaataaaaattgggagtctaaagaaggcaaataaacagaacacaaaataaaagtacacagttctctgttccttaaaaataatgtgtattccaggctgctcttcgcaagtgtttcctccctcmctgaggtcttttcttatttttatcccccttacccatgtcttatggagggcacagaatcacaagccttccaaatgatatggctgaattgaagtaatgatggtagaaggagcagtcaaatgagattgcaagggattaaaacaaaagtgagaatgagaggaagcagagtggcaactgagtctgggcaggaatcacctcaactcacatttatgcttggtgccaccaattagctcagtctatttagagtccatatgctttaaactcaaagatcaggactgagtaaacatgctcataatattattatcatgcacatatcatgtttatattaacatttgaaaacccagcggcatagaccactaaaaaggatcacactgagaaactaaatctgatttcttctttcaaattaaagttttacatcaaaac

SEQ ID NO: 326894 - DNA, 523 bp, Homo sapiens
aacactttttgccagaaggaacagcttccccatccccagtagtggcaacataccctcctcacccatgctgccatcagcctttccacytctgtctaaggacatgaactatgcactgcctgaggcaacagtgatggcctcccctgaggcagttgccaggaaagataatgttgattctccttagaagccacccccaaaacctctgtttgcttgtggacctataactaaagtcctagagggtccctagaggtgacgttgagagtgtgacccatgaggaggtgtgctacactcgaaaagaactttgagttctctaatctatataaacagcaatctggagaacaggcatgggaatggattttaagggtatggaataatggtggaagaaacatagagttggatcagggtgaatttatcgatttgggccctgtaagtaggaactctgcatttaatgttgcagctcagggagtttaaaaaggttctaacagtttatttgcttggttagctgaaatatggattaaaagatggc

SEQ ID NO: 326895 - DNA, 523 bp, Homo sapiens
aacactttttgccagaaggaacagcttccccatccccagtagtggcaacataccctcctcacccatgctgccatcagcctttccacttctgtctaaggacatraactatgcactgcctgaggcaacagtgatggcctcccctgaggcagttgccaggaaagataatgttgattctccttagaagccacccccaaaacctctgtttgcttgtggacctataactaaagtcctagagggtccctagaggtgacgttgagagtgtgacccatgaggaggtgtgctacactcgaaaagaactttgagttctctaatctatataaacagcaatctggagaacaggcatgggaatggattttaagggtatggaataatggtggaagaaacatagagttggatcagggtgaatttatcgatttgggccctgtaagtaggaactctgcatttaatgttgcagctcagggagtttaaaaaggttctaacagtttatttgcttggttagctgaaatatggattaaaagatggc

SEQ ID NO: 326896 - DNA, 578 bp, Homo sapiens
tgagaaaggacccccctacattaccgacaatttatgtggtgaatctttctcccatccttccccaaggaaacctctagccttttaccaggtaactgcattggggaaagggaaatgatgagacatttcagggactactggacgctggctctgagctgttgattttaggggatccagaatgtcactgtggtcctccagttaaagtagggacttatggaagtcagacaattaatggagttttagctcaggtcctacttacagcagatccagtgggtcctcggactcatcctgtggtcatttccccaatgccagaatgcgtaattggcatagacatatttagcagctggcagagtcctcacattgacttcctgagyggtagagtgagggttattatggtgggaaaggccaaatggaagccattagagctgcctctacctagaaaaatagtaaatcaaaaacaatattgcatccctggagggattgagaacattagtgccaccatcaaggacttgaaagatgcaagggtggtgattcccaccacgtccccattcaactatttcatttggcctgtgcagaagaca

SEQ ID NO: 326897 - DNA, 560 bp, Homo sapiens
tcaatatggcaccattcctcggggtgatcagccagctacctggtggcaggttgattatttcggacctcttccatcacggaaagggtagaggtttgtcctcactggagtggacatttactctggatatgggtttgcctatcctgcacacaatgcttctgccaagactaccatctgtggacttatgggatgccttatccatgatcatggtattccacacagcattgcctcaraccaaggcattcactttatggctaaagaagtgtggcagtgggctcagattcatggaattcactggtcttcccatgttccccatcatcttgaagcagctggatttataaaacattggaatggcctttggaagtcacaaatacaatgtcaactaggggactatactttgcagggctggggcaaagttctctagaagaccatgtgtgctctgaatcagcatacaatatatggtactgtttctcccatagccatgattcatgggtccaggaatcaaggggtggaagtggaagtggcaccactcaccatcatccctagtgatccactagcacagt

SEQ ID NO: 326898 - DNA, 445 bp, Homo sapiens
cttgctgaaggcaaggaaaacacagaataaatagtagataaaaggtaatcatcaataccagctataaccacatgaccagctatggaaacgaggactgttatcatgagtatttccttcttcttttgttaaaaacatgtttgtgcatatatacacttgtactaagaaaatgtcttccttttatttcctttttctttatcacgtgacatgagattttttgacttcatatcacatttaagtgttgttaactttctgtaatagtatttgggttggggattggtgcatttctagttgtatgaagggtagttgtattatgttaggcgtaattatgacattktctttatttgaagattatgtatgatctcgggagatgtgtatgggttcaagttgacaaggggtggacttgtgatggttaatactgagtatcaacttgattggattgaaggat

SEQ ID NO: 326899 - DNA, 493 bp, Homo sapiens
attttccttacacatagcccacatctttgtaaatgyttcctttattaaaccttttacaaattatcctaatttgagtacatcatctgttgtctgctgtaattctaattgacacaagactaaattcttcatattattcacatttaattcttactacactttaaggaaggtttggttattacgtcattttatagataagggaacttaagtgcacagagactaattaatatgtccaacatcaaacaaaaaaatgtgttacagatcaagggttgcaagcccagcaatgtgactccaaaggctacagtcctgatgggtgatgggaaattgtaattttgattttctaaaatggggaaaaataaatttcagaaactacacattgataaaaagaaataatgataatcacacattttctgaacaggttattaaatgtgtagtctcagatggtatgatggtatgctttttggacatggtaaagaattatgggaacaaggtctta

SEQ ID NO: 326900 - DNA, 493 bp, Homo sapiens
attttccttacacatagcccacatctttgtaaatgtttcctttattaaaccttttacaaattatcctaatttgagtacatcatctgttgtctgctgtaattctaattgacacaagactaaattcttcatattattcacatttaattcttactacactttaaggaaggtttggttattaygtcattttatagataagggaacttaagtgcacagagactaattaatatgtccaacatcaaacaaaaaaatgtgttacagatcaagggttgcaagcccagcaatgtgactccaaaggctacagtcctgatgggtgatgggaaattgtaattttgattttctaaaatggggaaaaataaatttcagaaactacacattgataaaaagaaataatgataatcacacattttctgaacaggttattaaatgtgtagtctcagatggtatgatggtatgctttttggacatggtaaagaattatgggaacaaggtctta

SEQ ID NO: 326901 - DNA, 575 bp, Homo sapiens
tgattttccttacacatagcccacatctttgtaaatgtttcctttattaaaccttttacaaattatcctaatttgagtacatcatctgttgtctgctgtaattctaattgacacaagactaaattcttcatattattcacatttaattcttactacactttaaggaaggtttggttattacgtcattttatagataagggaacttaagtgcacagagactaattaatatgtccaacatcaaacaaaaaaatgtgttacagatcaagggttgcaagcccagcaatgtgactccaaaggctacagtcctgatgggtgatrggaaattgtaattttgattttctaaaatggggaaaaataaatttcagaaactacacattgataaaaagaaataatgataatcacacattttctgaacaggttattaaatgtgtagtctcagatggtatgatggtatgctttttggacatggtaaagaattatgggaacaaggtcttagacttcaggagacttggcaatttttggtctacagtttagggaaacacagaaaagactatcttattcaatttgctgatgct

SEQ ID NO: 326902 - DNA, 524 bp, Homo sapiens
tccagtaaagagctaaaggagaggggctcttgagaaatasgaatgggagatgatatccagaactgaagaagagaggctggtcttccacagaattgggaaccccctccactgtgaagccaggaagagagtcctataagctcccacttctcttttaatttctaccccatttccagttcctagcaaggtatttagaaattcaggtgtgagttcttcatgtgctacttttcacccttaacagcacccgcatagtgtagacagttttctgtgggttttactctcatttctagtgctgagtaaaggtggtattttaaaaataattttatgtctaatatgctgtaatcactttcgagtattattcaaaatatctcacttctatttttttttgtatttcagatttctgaccattctctcaaaccaatggagcctggcgacactaagatcatgacctggcgatttctataaggctacctggggccccagctgcccttgagaagtaaaactcaaaactcgagctctttgccact

SEQ ID NO: 326903 - DNA, 671 bp, Homo sapiens
tccagtaaagagctaaaggagaggggctcttgagaaataggaatgggagatgatatccagaactgaagaagagaggctggtcttccacagaattgggaaccccctccactgtgaagccaggaagagagtcctataagctcccacttctcttttaatttctaccccatttccagttcctagcaaggtatttagaaattcaggtgtgagttcttcatgtgctacttttcacccttaacagcacccgcatagtgtagacagttttctgtgggttttactctcatttctagtgctgagtaaaggtggtattttaaaaataattttatgtctaatatgctgtaatcactttcgagtattattcaaaatatctcacttctatttttttttgtatttcagatttctgaccattctctcaaaccaatggagcctggcgacactaagatcatgacctggcgatttctataaggctacctggggccccagctgcccttgagaagtaaaactcaaaactcgagctctttgccactcatcagaggtagaattataatggagatctaaacaaatttctctatctccaagccccaggtgtagagctagggactattcatatcaattgcctccagggaagaaaaawaatgagggagggaatctgaatgactgaacattactgaaca

SEQ ID NO: 326904 - DNA, 634 bp, Homo sapiens
atattaactgaataatatcataaggccaaaatcctttgggtttattccttattcatttacttttcttctgtccaaatgtattttagtccccccatttctttctacttttcctgcttccacctattctaagacattgttacccctagattactgtacccacatccctgctggaagtcctgcttaaacgtttaccccacagagtttattctctcaagagcagctagaatctcactcttaaaagtataccagattatgtcactcttttcttctcaagcctcccacaataactccaaagtcttcaattcctatggtctccaagactcaggatctgatcctcaattacatgtccagccccatttcttgtcactctctttcaacagttcatccatacaatgagtgtcgattctagaatatattaagtgttatcttgtcaaagaggccttctatgaccatcacatcaaaaatatgtctttccttcctctccctttgccctctaccactgcctctgtacacacacactccacctgctattaccttttcctgattcatagcgctyatcacaatctggattacctttctttacacatctagttatttgtttattgattgtctctgccactaaagtgtaagatgt

SEQ ID NO: 326905 - DNA, 610 bp, Homo sapiens
ggtcttatggaatatttaagattagaaggaacagagctaggatccagttcaatggtttgagggakatgtaagctgtagttacattcctcattctcttttttttcatcagtcacctggctaatgaaattcacagatgtgacagtgtccctaggctgtgattagcttgggttactaattgtcataaccatggataaagaacatcagctgtggcagtttatggttggctatggcatacataggataggctgtgggtcatgggcatttcttctttcatttctttattcaacccatatttattgaggacctactatgtgccaggcatttttctgggccctggggatcgagggctgaataaaactgacataaagcagcataaacaagtcaaacatatcatgatctaagtatgctaggtgttgggcatcaacttccagtatggcagtgtgaggagcatggtagactctttaatcaacaaaacaatcatttgccgaaaattattttaaaatataagcaaccttttaaagtttctggaaattgtcccaagggtatacaacaaatggaaaaacacaaggaaatctaaatcttagtaagaagagtgagagtctatggcatt

SEQ ID NO: 326906 - DNA, 579 bp, Homo sapiens
ggagcttatttaatgagtgaatggatatatgaatgaatgggtgaagcatgtattcatctcaaaaatatagttgtcttgtcctggtgtatagtttcagaagagggagcccgcctcttggtcatttttactcctttatttcctagattcatagcagttcaaagcatttgtattgtatcatatggaaaatggcatatcagtggctcacccacattagatagaactttgagatatgctctaggaataaagatgattttgcagtcttccctttaccgctttctccccaccttttgaattttaactggttacttaactaatttgcgctgaagttaatggtggaagcwtgattgtttctattaatattaccaatagctaacacttattgagtgtttgctatgtaacaggctcagtgttaaatgattcacattaatgctcattggattctcccaatggccccatgcaggtaggcactatcattatgccctaggttacatataaggacctcaggcctcaagtcatagacctagcaagtgtcacagccagagtctgaccccaggcaatccattttagactccatgttat

SEQ ID NO: 326907 - DNA, 582 bp, Homo sapiens
cccaaaagtattcaacaaaagctctatctgaggtctaggaaatgtggattctgacccatccttgctgaaatcctggtgtgactttagaaaagtcctttctccagttgtctccattttctaatctgtaaaatgaggagatggaagcaatgctctctgagggtctcagggtcttcagatgccctgggaaggtttatgctttgtcttcttctgcatgcagttggaattggggtaaggggttaaagggcagctgactaactcaccacccaagcacgtgaggaaaggagtcacttgtgctttatttcgaggtgcacaaaaactcaaaggtgacatagtctcaggccaaaaaacaagcaacayccgaaaatgaaagttgaagagagaagagaaagaaaaaaaaaaaggagaggcatttttgaaggcttgacacagcatttaattaaaaaaagagtgctctgattccactcctaggttggtgcagcatataatctgaaacaggcgctcaggttgataattgtgcccagatctgaaccttggcacctaagagcacagcttttaagaagaaaaaaaataggcatgtgtctt

SEQ ID NO: 326908 - DNA, 594 bp, Homo sapiens
cgccccgctgggttccttagctgcggccgctacccctgcccctgggtctccaaccccctttccccggctcccccscagtttcccgggccggcagaggcgccgcagcgtcggagcaatgcaaggctaagccgggtaagtggcccccccatagccggggagcacagagggcggcgcaggggcatgtttgctcctggtttcaggagctcccctgaaaaaggggccttgcagctggaaactaagctctgggagagatgcgctttgccacccagacgctgggaagtcaggagccccgcggtggggacctggtgaactgagggtctgagtgtcagccacctttcgcgcagccactttattaaccagcaatggtaatcataatatcacgaggcgatggtggtattattgtattaggactacttaagagggaacatgaaaacatccctggacttgctttttaaatagcctttattctcttagaattcattttcccctaaatatttaaaaggtatttactgttaatgacctagttattttctattcaaaatatttcttaacatctccaggaagatctactttaaaacatgacttacttcttcc

SEQ ID NO: 326909 - DNA, 594 bp, Homo sapiens
cgccccgctgggttccttagctgcggccgctacccctgcccctgggtctccaaccccctttccccggctcccccgcagtttcccgggccggcagaggcgccgcagcgtcggagcaatgcaaggctaagccgggtaagtggcccccccatmgccggggagcacagagggcggcgcaggggcatgtttgctcctggtttcaggagctcccctgaaaaaggggccttgcagctggaaactaagctctgggagagatgcgctttgccacccagacgctgggaagtcaggagccccgcggtggggacctggtgaactgagggtctgagtgtcagccacctttcgcgcagccactttattaaccagcaatggtaatcataatatcacgaggcgatggtggtattattgtattaggactacttaagagggaacatgaaaacatccctggacttgctttttaaatagcctttattctcttagaattcattttcccctaaatatttaaaaggtatttactgttaatgacctagttattttctattcaaaatatttcttaacatctccaggaagatctactttaaaacatgacttacttcttcc

SEQ ID NO: 326910 - DNA, 379 bp, Homo sapiens
agtcaggacttggtgaaggttgggattacaaatctggrgtgcctgggcagccgtgccctgggaaattttaaaaccaaaataatcaggaaagattgtgggtaggtgctgggtaagatttaaaagatgaggtttcagctccccccacccatctgttcacttgtgtgtacctaagcaagaggttgagaatcgaatgcagagggtcagtttactttttttttttttaagatgaggcagctggaagacatgccttccaaaattggagcagagtctgatgtgtggattgccaaattccatttccgcccatattaaattattttggcttctagaagcccttattttgctgggccggcctttatttgcagttgtttaggtggtgtga

SEQ ID NO: 326911 - DNA, 573 bp, Homo sapiens
gctgctgtgttatgcttagggagagtgttcatttcctagggctgctgtaccaattaccacaatcttgtgggcttaaaaccacagaaatttattctcttactgttctggaagccagaagtttgaaagtcagggtgttggctgtctctgggagagagtctgtcccggcttcttgtggctgccaacaatccatccttggctttccatggttacagccgcatcactccagtagctgcctccatcttcacattgctttcccctctgtgcatgtgtcaaatttccctctgcctctctaaggatacttgaggtgacatctagagcccacttgtataatctacataatctcataatctcttcctttcaaaaccttcaatttaattatatctgcaagggcttcttcytcaaatatgttatgattttcaggttctggggatcaggacatggacatatatttgggaggccattttgcaacctaccacggaggcacattgactcaagcattaggagacttggatcaagttctcacttagctacgagctcctcggtcccaggaagaggcagcaagggtgtttaaac

SEQ ID NO: 326912 - DNA, 558 bp, Homo sapiens
ccacaaaaggcttagtgaaagcaccttgatccttcagataaagctagatttcaagatgatggattcttttttcttccatggtcagtaacttatgttattgaataagtctgtagtgtttaatctggcatgaagtgtgatctttctgtgggcagcatttttcctcagaacagatctgaaaaaacagatagctgcactggcttgtcagcctcagatctgggctttggcctctcccaatgtgtttagaactgggagtgtacagtcccttctccttggaaaacacaattcatcccttatgcttacacggagtgactcaggctggcacagccaccatttataccactgcaatgcagaagccttgcagaagygctttaactttgccagcccctaaacatgcctctaaagcagcttgcagcctgcgtaatcatagcattagaagtagaaataataacaacatcaagaacaactgacattattgagtgtttatatggactggatgtttttctaagtactttctataaactaaactcactcagtcctcacaacaaccctatgaggtag

SEQ ID NO: 326913 - DNA, 541 bp, Homo sapiens
tgaaaaaacagatagctgcactggcttgtcagcctcagatctgggctttggcctctcccaatgtgtttagaactgggagtgtacagtcccttctccttggaaaacacaattcatcccttatgcttacacggagtgactcaggctggcacagccaccatttataccactgcaatgcagaagccttgcagaagtgctttaactttgccagcccctaaacatgcctctaaagcagcttgcagcctgcgtaatcatagcattagaagtagaaataataacaacatcaagaacaactgacattattgagtgtttatatggactggatgtttttctaagtactttcyataaactaaactcactcagtcctcacaacaaccctatgaggtaggcatggttgttattcccattttacagatggtgtacatgaggcactgagaggctgaatagcccaaggccacattgcttggaagtagaaaagcagaatttaaacttgggcattctagctacagagcttgtgcccttaaacactgtgctatggctgatg

SEQ ID NO: 326914 - DNA, 572 bp, Homo sapiens
gattgctgggttgaatggtagtttggtttaagttctttgagaaatctccaagctgcttttcacagtggctgaactcacttacatttgcaccaatcgtacataagtgttctcttttctccacagcctcaccagcatctgttgttttttgactttttaatagtagccattctgactggtatgagatagtatctcattgtgcttttgacttgcatttctgtgatgattagtgacgttgagaattttttcctatgtgtgttggtagctcgtatgtgttcttttgagagtgtcttttctgttttttgcccatttctttcaacttttattttaagttcacaaagttacatgcaaacatttgttatgtaggtaaacttgtgttatgggggtttgttgtacagattatttcatcacccagctattaagcctagtacccrttagttatttttcatgatcttcctccttctaccctccaccctccaatagatcccagtgtgtgttgttcccctccatgtgtccatgtgttctcatcatttagctcccacttataagtaagaacatgtagtatttgatttcct

SEQ ID NO: 326915 - DNA, 499 bp, Homo sapiens
gctggaccccaccgtatgctgcagattytcagccctttgaggttatcatggtggaggctgcacaagaaaagctgaattctcagagtgaagggcaaaagcatatccctgggcccccgtgtgtctgggggcccttggcctggtgccagcaccaaccaccgctgctaattcccagagctgctatcctcttgggcaaacttgccccttgtgagggaggagaacctgggctttggggcaggatacacaataccagccttgcttgggtggaggagcagagatggctagggaggaggaggtgagcggtccacctgggctcctgaagcaactcccaggaaatcagttgagtcaatgtgtccccctcttgttcctagggtgcgggcttcatggccttctcctccaggaagctccacctgatcatgtcctgggtggatatccagcccccatagttcagggcctactagcagctgctagatcttgaactccaggagcgccccacgccttg

SEQ ID NO: 326916 - DNA, 499 bp, Homo sapiens
gctggaccccaccgtatgctgcagattctcagccctttgaggttatcrtggtggaggctgcacaagaaaagctgaattctcagagtgaagggcaaaagcatatccctgggcccccgtgtgtctgggggcccttggcctggtgccagcaccaaccaccgctgctaattcccagagctgctatcctcttgggcaaacttgccccttgtgagggaggagaacctgggctttggggcaggatacacaataccagccttgcttgggtggaggagcagagatggctagggaggaggaggtgagcggtccacctgggctcctgaagcaactcccaggaaatcagttgagtcaatgtgtccccctcttgttcctagggtgcgggcttcatggccttctcctccaggaagctccacctgatcatgtcctgggtggatatccagcccccatagttcagggcctactagcagctgctagatcttgaactccaggagcgccccacgccttg

SEQ ID NO: 326917 - DNA, 608 bp, Homo sapiens
aagcactctttacctttaataaataagcatatgccttcttctacaattatgatttcagtatgattaaatagttgcatagaactatacttctcaagactcctttgacggaaagtcatagaaactcaaagtaacttatgtaaaaaagaggatttatagtcccataacctggatactgcatctaggaactcaacagtgtcatcaagacagtaatgccctccctcaatcactgacatgttctctctctctttctctctgtcccccttctgtgtctatcagcaattctaggatgtacattcttaacagaagaagagcttctttttctgaagagttatatcaaaagtcccaggtgaccacttatgtttagttttatcagtatttatcagttccatgcatatttttgtttttatggctactacacacacacacacacacacatacaatctttaaacaagataaagtaggcttttcatattttatatgacacattgtacattatacttaataaacatgtatgtaattattatataactattttayattagttacattcatataatgtataggtatattatatatatacaaaattatatatataatgtgcatgtact

SEQ ID NO: 326918 - DNA, 558 bp, Homo sapiens
gatgtgatggccaagcaagacaacaccacagcatagttcctgcttgctgtgttctttcctgcaggtgagcagttccactctaagctcgtctatgagatgtgaggccagtctagatttgggtttttggctcttggtgtggtctctgctccactgcacagagacaataaatagaaatatcaacaattcagtgyggagccattgcccccatttttgcattttctctttccctataagacctttctatcattgactccattgagggcaattttgagagatattgggatccctggcttagaacctttgacagtgtgccctgatagactctctttggtcagaatttttttgcgagtttcatagaatcgtctcatttatatgcacttaaacacctaaaaacattcaagagaaaaataataataataatttaaaaaccacaccaaaacacctcaaatattgttgcatgtcgccattcaccctcgtcctgatactattttgtcagatttgtctgccttggttgctgccttcctctctcatgtctcctatttaggcagaaaaaaaagg

SEQ ID NO: 326919 - DNA, 558 bp, Homo sapiens
gatgtgatggccaagcaagacaacaccacagcatagttcctgcttgctgtgttctttcctgcaggtgagcagttccactctaagctcgtctatgagatgtgaggccagtctagatttgggtttttggctcttggtgtggtctctgctccactgcacagagacaataaatagaaatatcaacaattcagtgtggagccattgcccccatttttgcattttctctttccctataagacctttctatcattgactccattgagggcaattttgagagatattgggatccctggcttagaacctttgacagtgtgccctgatagactctctttggtcagaatttttttgcgagtttcatagaatcgtctcatttatatgcacttaaacacctaaaaacattcaagagaaaaataataataataatttaaaaaccacaccraaacacctcaaatattgttgcatgtcgccattcaccctcgtcctgatactattttgtcagatttgtctgccttggttgctgccttcctctctcatgtctcctatttaggcagaaaaaaaagg

SEQ ID NO: 326920 - DNA, 604 bp, Homo sapiens
ggctattttcatcagttgtccattcttcgatgagtcaactctggtcaaggagtgggtacacgttggagaatagggtttgacccaacctgtcaactggagacaggagccatggacatgtagggctcaatggctgccctggatctacggccattatgatgaggatgtgatgtgcacctatacaccaacacaccagagactgtcctaaagagtgataacttaattcagtcgctttaattttttaaaaaaatcaattttaaaaagtcaatttgcttagaagaaaactacaatsataactattacttgggtctgtttaaacaattttatttttaaaaactttgtgattttggtgatgcataaacacactgtggttatttttatttgcctattgggaattctgatgaaaaattaggtgagcaaagggacatattttttaaactataagacagctgttcttattcagtcactgagtgataaggagggaagtttaaggcttagaattcttggttgttgtagaagatacttgagttgctgactttaccctttcatgtttgctttcctgccctgcagaaacaagaaagtgaaatccttcttatatccctgaatc

SEQ ID NO: 326921 - DNA, 608 bp, Homo sapiens
ttctgagtcattattttccatcttgcacattaaaataatttaaaattacatgtatcccttctcaataagtttaatcagctaaccctaagctagaggtcaaaatctacttcctctaatatcaaaacgaaaatttaaagttttccaaatattaattcaatattaattgaatattcaatgaattaattcatttaatgttagattaattcattgaatattaattcratgaatgactaattaatagtattttaacaagattttggtatatttaacaacattttggtaataaagacaataatttgagagtgtgtggaagtccccctaatagaagccaactatctaatcaatgccaaaagtgtgaacaaaatagagaaaggaagcagtgaaaaagaatgcaactttttcttaccattcaaagtacaggatcacagcataaaagaatcataagataaaacatcaaactacccagcaacctgagaagcacagagtgttaaagcctccaccgtgtggagaaactaaattagggtaactagctattgagtatattgagtaccttcaaagcactcaactgacaggttttacagactggaaattataatacttatgacatt

SEQ ID NO: 326922 - DNA, 628 bp, Homo sapiens
ctggtggtctcaaatatttcaataaaatgcaatgtcatatgctaaacatgggagggcactgagagaattaagaggaaacatgaattttgaatgaaattaatccaaagataaaactttctctaacttaatttggtagccacgttgcaaggaagaagtcaagtttttagactgatccaagttttagagctttgctgagaaggtgggacagaagtaaaaaggggcatgaatcaaaacaatgatgtgcaagaacaaaatggaaactggtcatggtgggaaaggaaatgaagcagaagacacctgacaaaaggaatcataacttagaaaaacggtgggtgttacaatttacaatttaagatttcagaacaagaacaaycatagagcacacagtcacaataatgttgccaaatcagagaaaagagtattgcagactaaacgaacttttatccatggaacatttacagtggctacagggtcacaaacctcctggatgcagtttataatcaatgtgaacgccccactgcacacccccatgcactcagctcaaaatatgcctatttatatttaccctcagtttcttatagctctgcacacacacacacaatatatatatatacacatatcccacctg

SEQ ID NO: 326923 - DNA, 568 bp, Homo sapiens
taaagatagccttaatttcctcaactaaaatattagcaaatcaaatacatcaatatatatgtaaagaacaattacaaggaggagttacccaagaaatgtaagatkgtataacattctaaaatcaatataattcttcatattttcaaaaaacgataaaaaccatatgattctttcattagaagcagaaaaatattgacaaaactcatcatttatccatgtcaaaactctcagcaaactaaaactagaagaaagctgggcacagggatgcatacctgtagtcctagcttacttggaggctgaggtgagaggatcacttaagcccaggagtttgagtccaacctaggcaacataccaagaccttcatctaagatgaattaaagaatgaataataaattttaaaaattgcccttctgggctggtctaaaacaaactggaaggaaacttcaatttgttaaagagtatctataaaatcttacaagtagcattgtacttaatgaaaaatattgattacattccccctaatattggaaataagtcaataatgaccactttcatctcttttactcac

SEQ ID NO: 326924 - DNA, 568 bp, Homo sapiens
taaagatagccttaatttcctcaactaaaatattagcaaatcaaatacatcaatatatatgtaaagaacaattacaaggaggagttacccaagaaatgtaagatggtataacattctaaaatcaatataattcttcatrttttcaaaaaacgataaaaaccatatgattctttcattagaagcagaaaaatattgacaaaactcatcatttatccatgtcaaaactctcagcaaactaaaactagaagaaagctgggcacagggatgcatacctgtagtcctagcttacttggaggctgaggtgagaggatcacttaagcccaggagtttgagtccaacctaggcaacataccaagaccttcatctaagatgaattaaagaatgaataataaattttaaaaattgcccttctgggctggtctaaaacaaactggaaggaaacttcaatttgttaaagagtatctataaaatcttacaagtagcattgtacttaatgaaaaatattgattacattccccctaatattggaaataagtcaataatgaccactttcatctcttttactcac

SEQ ID NO: 326925 - DNA, 557 bp, Homo sapiens
acaagcatcttcactttgaccctcttccatctaaattctaagaaagcatgtacatactcctcagatgactacatcgttyactttcatgtacttattttcatctgcactttccaatttctgaagaaataaacacaatttagtaagattaaatgctttttttttttttcatttcctaggtttccaacaattgttctgggaagaatgggctcagttctccctctgcttgtcagaatgattaattagatttaatttcatgctgtctcctctgctgtcttttccctctctccaatgactaataactcttctacaaagtccaaacaaatggcctccgtatctagtttttatttttggaagttttccccagccaaaatgcatagaacctcttcacagacagcagcttagaaattcctggctaggattcctgcccttaacagtcgcacttgatacggctagatggcccgttgactgatatctggggtggcatcatgccagctcaaaagttgtcaagccatttgaatcaagaatcagcactaggcagtgaaaaatacggatgggca

SEQ ID NO: 326926 - DNA, 574 bp, Homo sapiens
tttatgttcttttggtttacatgttatgcttatcaaactaaagtttattttgatgtttgtgtgatgtatgtaaattgatattttggagtagttagtcaatttcaccatctatatctttgatataaatatatccttttattgtcatctactatattctttttattctgggatctgctttaggtctatctattcttttttattgacacaygggtaccttctcatacctttgtcacttgtgtttttttccttccctttttcttatttttaccatttgaaccatttttaagtgtataatttggtgacatctgttacagtcacagtggtgtgcaatcatcaatactaactcctcatttccctctccccaccccacacacatggttttcattactatggatttgtaatatatcttaatgtctagtaggcataatgtcacccaacccatggctcttgtttaaagttgatactcttaattttacatatctgtggtgttgttttggctgcttctccttgcttatctcttgttctgtgaatgagtgttccacccttcaccagtcaccaaagcatcaagtttggg

SEQ ID NO: 326927 - DNA, 574 bp, Homo sapiens
tttatgttcttttggtttacatgttatgcttatcaaactaaagtttattttgatgtttgtgtgatgtatgtaaattgatattttggagtagttagtcaatttcaccatctatatctttgatataaatatatccttttattgtcatctactatattctttttattctgggatctgctttaggtctatctattcttttttattgacacacgggtaccttctcatacctttgtcacttgtgtttttttccttccctttttcttatttttaccatttgaaccatttttaagtgtataatttrgtgacatctgttacagtcacagtggtgtgcaatcatcaatactaactcctcatttccctctccccaccccacacacatggttttcattactatggatttgtaatatatcttaatgtctagtaggcataatgtcacccaacccatggctcttgtttaaagttgatactcttaattttacatatctgtggtgttgttttggctgcttctccttgcttatctcttgttctgtgaatgagtgttccacccttcaccagtcaccaaagcatcaagtttggg

SEQ ID NO: 326928 - DNA, 596 bp, Homo sapiens
ataattcttatttcagggtttctttaaaacattagttttgctaaggtgtaatacaagtgtaccacgtttacatagaatttaatgaattagaaggcactttcacacataatgtatcatggagcgactctgttataggtttttgatgcagaaaaggaaaactggtttcagagaaggtgtttttcatcaaagtcattcagctagtaagtggtaaagaacaggaaagaaccatagcttctcacccctggctaatcattctttctcctcttgtttttcactgcttccttgccaccaatacaaaatgtgatctagtttacagggggacaaattcaattaacaaagtacctttaagtgcagttatcttttgacagagggaaaaactagtgcctatcaccttctyccctctgaagcacagctcatggttctaggaccaccctgaccagaaggaaccagaaacaggtgacagttaaggcaagtaccgtctggtgaaagaccattacgtatcaagtgtttacaggaatcccttctcactgcatggttagcccatcctgactggcctgtgtcatgctggttttgaaatatttggaatatcacctcca

SEQ ID NO: 326929 - DNA, 563 bp, Homo sapiens
ttttttttctttaaatagaatttatattttggagtagctttggttcataacaaaattgatcagaaagcacagagttcccatgtatccctaacctccctatagatatacaacattctccattatcaacatcctccaccaaagtggtacagttgttacaattgaggaacctatactgacatatcattatctcccaaagtccatagtttatgttaaggttcactcttggtgttgtatgttctatagattttgagaaatgtataatgacgtatgcaccattatggtatcacacagaataatcccagtgtcctaaaaatcctttgtgcttcacctatttatccacccctccttctgattactagcaaccmctgttttttttttttaattgtctccctagtttttccttttcccaaatgtcatacagttagaatcatactatgtagtctttttggattggcttctttcacttagtaatagcattgaattttccttcatttcttttcatggcttggtagctcattttttttggtgctaaataatattccagtatctgaatgtaccatagt

SEQ ID NO: 326930 - DNA, 618 bp, Homo sapiens
cgtatttcaaaatggttatttttccctcttcctgccaaaagcaggaggagatatttcttcagtattcactgtgagaacctcagcaggtttcaggaggtaaagctcactaaagtaaggtgcctccagataactgagtctccctggagtttttatctttcaggcttatctacactccagaaaytcatcaattgcagcacaggctttcctagcccagcatcagttcccacagaaatttatgctttggtttccattccagtaagagtagtgattctctgattcacctgtttgtgtcttcaattttgtgggcagtggtttgccctatgatatcacatctctgatgggttcaagaagagttgttgattcagtttgttagcctttcacttgttattaggatagagtagtgatgctcatgctccttagatgctgaactggaaactggaactcttagtttgaatgttgacagtaactattcaaaattatcagtttagttagaccttttgacatataaaactaaaacccaccttgtactggcattataaaagtggtttaatgtagcaatgcatattatttaaaaattttgctgtatgttttgctgtgcctagcccaattcctggtaca

SEQ ID NO: 326931 - DNA, 598 bp, Homo sapiens
attcaataaccattgattgcgcagtccaaagcagtttattgttgatatcttttccctaaaatgaaatcagttattcttgctggtgcatttttattaarggatctgctgtttggactagaattataaatttaagtacagtggcatattgaaaataaagtgtttttcagtgacctcaaaatgttgatctaatgaatcacaaattatattaaagcttagtggagaaggcaatagaagtaatgataacatttaatggattctaaatggtagctctaaacactttaaatttaacatcaaataaaattttttctcctttttataagatagaaacttttctgcttataaaagttattaattggtctaatcaaaatgattagaatttgcatgttccttgtaattttcattcagtttttctgtaaacaattactgtaactatcttgtcacagagaataaattaagatgaaagtatgagagttttatattcaagggagaagtaattcggattgcatggttttgaaaagagtgatcaaaacagctatgtttagaatacaaatttcaaatttaaggacatgtttaaatagttaatggaaaaaatttttta

SEQ ID NO: 326932 - DNA, 598 bp, Homo sapiens
attcaataaccattgattgcgcagtccaaagcagtttattgttgatatcttttccctaaaatgaaatcagttattcttgctggtgcatttttattaagggatctgctgtttggactagaattataaatttaagtacagtggcatattgaaaataaagtgtttttcagtgacctcaaaatgttgatctaatgaatcacaaattatattaaagcttagtggagaaggcaatagaagtaatgataacatttaatggattctaaatggtagctctaaacactttaaatttaacatcaaataaaattttttctcctttttataagatagaaacttttctgcttataaaagttattaattggtctaatcaaaatgattagaakttgcatgttccttgtaattttcattcagtttttctgtaaacaattactgtaactatcttgtcacagagaataaattaagatgaaagtatgagagttttatattcaagggagaagtaattcggattgcatggttttgaaaagagtgatcaaaacagctatgtttagaatacaaatttcaaatttaaggacatgtttaaatagttaatggaaaaaatttttta

SEQ ID NO: 326933 - DNA, 610 bp, Homo sapiens
acagcacagtgataagagtgtgggctctgggaccagactgcctgggtttgaatctaggaaatgagctacgacaagttactaaatattcctgtgcctcagtttctctagctactcataggattattacagaattatttcgtaagtcatgacttgtgctgaggagtcctgacctagaacagtacctaacatataacaaatgctggaaaccactgtaacctaacttcatagggtgttgagaatgttacaggagttatgaataaagtgtttaggatagtgcttgatacataaaaagtgctagggtgttagtcattattactatgaatgttgttataatagtaaccaataattagtagtaccagagttccttaacatagtatgtcccaagagagccaggtcatgagcttatgaatgacagggtgatgtctaaactcaggttatcaaactggcagctccagggccacacrtgacctgtaagtacgctcgttttgcctgagctatgtttagaaatgttttaaattatttgcacacttcagaaatgtctatagtttatttaaagttatgggtttgtggattctctttaaaaatcaagagctcatttcacattgggcct

SEQ ID NO: 326934 - DNA, 523 bp, Homo sapiens
ccaggttgcattggcctctccagctgtagtgtggactgccagctcccacatctgtgagtggccagagaatccagaaacttcagctgggtaacgragaggtcccactgcccagccacagcctcaagagaacattcaacactcccagagcaggtgacgctggtggtggaaacttagttccccaggtgggaggaagcatagccaagggagtatgaagatgtgcataagacttttgtctgatacacactgctatccttttttgtgctaatgaattcattgctactatacctttctttgttattttttaacaatgtaaaaggctttgatattagggtgcctcatattagaaaccactgtatggtgaccacctggctggatgtagagcatgaatgtaaaatagttcgccacattctttgccctctttgcctttggaaggaaaaataaagtgagtcctagttagttatttatcacataatgcaatgaaagagagcagctttaagagatttcacatttctaaaaaaatatt

SEQ ID NO: 326935 - DNA, 474 bp, Homo sapiens
aggttgcattggcctctccagctgtagtgtggactgccagctcccacatctgtgagtggccagagaatccagaaacttcagctgggtaacggagaggtcccactgcccagccacagcctcaagagaacattcaacactcccagagcaggtgacgctggtggtggaaacttagytccccaggtgggaggaagcatagccaagggagtatgaagatgtgcataagacttttgtctgatacacactgctatccttttttgtgctaatgaattcattgctactatacctttctttgttattttttaacaatgtaaaaggctttgatattagggtgcctcatattagaaaccactgtatggtgaccacctggctggatgtagagcatgaatgtaaaatagttcgccacattctttgccctctttgcctttggaaggaaaaataaagtgagtcctagttagttatttatcacataatgca

SEQ ID NO: 326936 - DNA, 537 bp, Homo sapiens
attctttgccctctttgcctttggaaggaaaaataaagtgagtcctagttagttatttatcacataatgcaatgaaagagagcagctttaagagatttcacatttctaaaaaaatattaaaggcttgttttttcattgcctttttamtgttttaaatattagcaggcaccactgtcaaaatgtgttctcaattcctactctggaatttttttaataggaaaattttctgataaagatcacaggtttcctgatgttttattttggcccactttcttttgttttactagaataatcattatgtttgggaagttatatccatcagtattccctagcaaaaagatataatggcattttagaaaatgtgaaaatcatactcgtttgcttcttcctaaagggtggcatagttttgtgtgtagtgaaatggatttttgatcattgccttctgatcaatttcatgatagccaactagatgaaagggtatcagaatgaagcaggcagactcagggaaattggcttcccaaaatgctggcatgcagt

SEQ ID NO: 326937 - DNA, 537 bp, Homo sapiens
attctttgccctctttgcctttggaaggaaaaataaagtgagtcctagttagttatttatcacataatgcaatgaaagagagcagctttaagagatttcacatttctaaaaaaatattaaaggcttgttttttcattgcctttttactgttttaaatattagcaggcaccactgtcaaaatgtgttctcaattcctactctggaatttttttaataggaaaattttctgataaagatcacaggtttcctgrtgttttattttggcccactttcttttgttttactagaataatcattatgtttgggaagttatatccatcagtattccctagcaaaaagatataatggcattttagaaaatgtgaaaatcatactcgtttgcttcttcctaaagggtggcatagttttgtgtgtagtgaaatggatttttgatcattgccttctgatcaatttcatgatagccaactagatgaaagggtatcagaatgaagcaggcagactcagggaaattggcttcccaaaatgctggcatgcagt

SEQ ID NO: 326938 - DNA, 626 bp, Homo sapiens
ttcttttctgacctgattttggcatttacttatcttgatgttgagaagttgatggtcttcttacatcataaacatgaaacaatcagtattttctattcatctgtatcagttcttttataagtactacatacaaggaagagagtgaacccaagcaatttatagttcttacaaatatttttaactttctcagttttctgaattttatggaagcattgatctcctgcattgaaaggagatttaagtgtttactaagatagtcgctaaaaatctagataattgaggaaagtattgataactgctttggagttgctacctcacacttttttccaaaatctttatrtctgctctatttggtatttaacttaagactgtcagttgatgattaaaataaaatctctttgcagaatcaatttgccataattgggttcttctttgtgtttaactggctgtccaaatacttacaagaatgcacctgagtaacacggtaccttgccttgccatctgcttcagtcttgtccaacaacgttcaagttccacccatgcttcttgttccaaagtggattcattgagttctagcaccccacccatacttgtggtgctgttttcttaagctgtaatgataaaac

SEQ ID NO: 326939 - DNA, 484 bp, Homo sapiens
actgactagtttatatatgttggagtctgacatcctattgaggtaatttggcagctttaccaccagggagccatagaaatctccrtgttgcttgttatctatggaccttatctgatgaagcaatcctttcagttatggccatcaggtgacgtgtaaaatgtttgtccctgaaattcaagtggcccctgcaaagcgatactcctaagtttgccttttataggaccagaatgattgttaaaaccagaagccaaattcattaatttcttgctgtgatatataacatagccatacaatactacacatttagtaaatgtcagcagtattaatagaactgtctgtaatataattgagtaagatttctgtgtataaaactaaattatgatggatgagttactcaaaggatgaaggaaaataacctttaagtagtgtcaaaggctgggcggcactgggttgtatacagagaatgaggtactgagactgaagc

SEQ ID NO: 326940 - DNA, 641 bp, Homo sapiens
gaaggaacctgaaaaagaaattactattatcatagataaggacaaggaattctgtacagctataggatctgtatttttgagtggaaggtagagaagctactgtcaatgaaaattgcctcctttcacttgaatatgtaatggaggaaaggtcctctacaaagatttcagtctttccatagctgtagcccttgtggcaatccactggtaactgatgtttttgaatagaaaattgattaatttaccggcacaccaattttaacactattaactttgtctggctttattggataatgttggctttcctcctcctccttgttatcttataatctggggatttgcacagtatcctagacactccaggacaggatcctggtaaaggttgagtgcatggccacacacacacacacaaaaaaaaagcctatttacgttatggacatcattgattcaacttgycccttggaaagtatgatcactatttattctggctgatatattgacttcttccaggtccctggctcttgatccacggatctaattggatcagtcataccttggcttctgaaagggttcctcctcatgacccctactctgtttaggattcataataaagtttccctggtcactccaccagcttggataat

SEQ ID NO: 326941 - DNA, 641 bp, Homo sapiens
gaaggaacctgaaaaagaaattactattatcatagataaggacaaggaattctgtacagctataggatctgtatttttgagtggaaggtagagaagctactgtcaatgaaaattgcctcctttcacttgaatatgtaatggaggaaaggtcctctacaaagatttcagtctttccatagctgtagcccttgtggcaatccactggtaactgatgtttttgaatagaaaattgattaatttaccggcacaccaattttaacactattaactttgtctggctttattggataatgttggctttcctcctcctccttgttatcttataatctggggatttgcacagtatcctagacactccaggacaggatcctggtaaaggttgagtgcatggccacacacacacacacaaaaaaaaagcctatttacgttatggacatcattgattcaacttgtcccttggaaagtatgatcactatttattctggctgatatattgacttcttccaggtccctggctcttgatccacggatctaattggatcagtcataccttggcttctgaaagggttcctcctcatgacccctactctgtttaggattcataataaagtttccckggtcactccaccagcttggataat

SEQ ID NO: 326942 - DNA, 558 bp, Homo sapiens
ctgtcctatctgataataccatagccactagctgcatgtggctggctatagagcatttgaaatgtagctagtccaaattgagatgtgctgtaagtacagaatacataccagattccaaatcttagcaaccccccaatatgaaaccttaataacgtttagattgattacatgttgaaatgggaaatttttggcattaaataaatattattaaaattaatttcacatttttttatatttgcttacatgtgactacagaaaatttaaaattacatatgtgacacacataatatttctactggatagtgctggcctagccccataccctgttggtgggactatcttttatctctgcgacaagttaactttctgaatgccgatcttactttatccccacattttccctctgagttggttaatttctttttargtagttgttttatctgttttggaaagtttatttttaatgtaggaggtggagatgagtaaagagaatgtatagcataattggagaattattttcatggacaagccctacagacaatccctttgaaataaagg

SEQ ID NO: 326943 - DNA, 604 bp, Homo sapiens
tattctccatacttaactctcttatgcccacccatttccattccttctcacagctggcatgctaatgtaagcccccatcaactgtcccctggactatcactggggccttgagctcatctccctgtgtccccttttgctccttctgacccatcttcttcacatcacaggaacaatctctcaaaaccaacaatgggccttacctctttttcctgcttgaaatcctctgatggtttcatatgtttcttgcaattaaaaaaaatgaaataagtggstgggcgtggtggttcatgcctgtgatcctagcactttgggaggccgaggcaggcagatcacaaggtcaggagatcgagaccatcttggctaacatggtgaaaccctgtctctactaaaaaaatacaaaaaattagtcgggcgtggtggcgggtacctgtggtcccagctacttgggaggctgaggcaggagaatggtgtgaacccgagaggcggagcttgcagtgagcctagatagagccactgcactccagcctgggccacagagggagactctgtctcaaaaaaaaagaaaaaaaaaagaaaaagagaaatctatgacatcacttgccag

SEQ ID NO: 326944 - DNA, 575 bp, Homo sapiens
tcaagctgcatatatgattgtatattctactgtagccacmttttaaaatgccaaaagaaacaggtgaaattaactctaatgatgtattttattataccagtatattgcaaatagtataattttaccatgcaatccacataaaaattattagtaaggtattttgctttctttatattattcttcaaaatttggtgtgtattttacagttcattttgatgtggactagcgtgtttcaagtgctcattagctatgagtggctagtggctactataatggattacactgagagagggagggaaggagggagaaagaaagtaataacatataatagggtaaacattggcaaataagacttcctgtatttctgcatgcttctgatcttcccttctttagtctttcttctcaaagtcaaacacaatttcttacatactttttggagttattctgtactcaggtaaagtgtgtgttcgtgtgtgtgtaggtatgcatgcatgtgcatctgcatgtatgtgtacatatatgtgtggtccattcaattcaacaaatgcttattgacaacctactatgtgccacac

SEQ ID NO: 326945 - DNA, 303 bp, Homo sapiens
aatgacagctacaatgtctatttttaatttttctagataatgccaagttgcctctgaaaaagctgtacaaatgtatgtgatccacagtgtttgggagtgattgttttcctgttatcactatggcatttcatcaacaattttacttctgccaatctaataagcaaaagtattctcttattggcrtcactttgagcaatcactctgcactctaaattataaataatgtagattctaccccgctcttcctcttctctgggctgtcaaatggatttgcactttacagcgattatagcaaatattgct

SEQ ID NO: 326946 - DNA, 619 bp, Homo sapiens
aacttcttccaaattcctgttaatgttgatattttgaccacctcatatgaatcacaaatgttctgactgccatctagaatggtgattcctttccaaaaggttttcaatttactttgcccagatccatcagaggaatcactattgatggcagctataaccttacaaaatatatttcttaaataataagatctgaaagtcaaaattactccctgatccatgggctacagaatggatgttgtgttagcaggcatgaaaacaacattcatctccttgtatatttccaatcagagctcttgcatcacggtacattgtcaatgaacagtaatattttgaaaggaatctttttttctgagcagatctcracaatgatcttaaaatattcagagtagatttagcatttagtaggaagagtagatttagcataattctttcttttttttaattgagacagagtctcactctgtcagtgctggagtgcagtggcagtatctcagctcactgcaacctccacctcccaggttcaagcaattctcatgcctcagcctcctgagtatctgggattacaggcacgtgccaccacacctggctaatttttgtatttttagtagagaaagcgttt

SEQ ID NO: 326947 - DNA, 489 bp, Homo sapiens
ccaaaaataagataccaagagggtcatctacaaaaaaaaaaaaaaaaaaaactcatacatggtatttcccatgcccagtgtgctggggagaaggtgacggaccacagtactgaactgttatgcaggaaaagtacttaattcaaatttgaaaaaaaaatgtatattacctttctctctctctttttatgtgcctttggctgccctgtcactttaatgcctgaaactttaatggcattctatcaatagaatattctgtattcttgggaagaaaagacactaagcaagtgtggaaagcataattattaaccttraaataaaagctgtttttatcattgttggttaaataacaaagggagactataagcctactcttctggctttggagtcatacagcccatgaagttttctagacacacacatttattcttagagagatctcattagatattttctctgcctgtggatttcattattttaaggaggattact

SEQ ID NO: 326948 - DNA, 623 bp, Homo sapiens
gttggtacccaaagccttgtatccaaatgcctctatatcaaatacaattgacccttgaataacacgggtttgaactgtgtgggtccacttatatgtagatttttttttcactaaaagttacacctgctcctcttgcctccccttccaccttctctacctcttctgtctctgcaacttctgaaacagcaagaccaatccctcttgttccttctcctactcagcctactcaacataaagatgataagcataaagacctttctaggctaggtatggtggctcacacctgtaatcccagtactttgagggggctgaagccagagtatcacttaaggacaggagttcaagaccagcctgagcaacatagtgagaccctgtttctaaaaaacagttacaaaattggctaagcatgttggtgcacacctgtagtcccagttacttggraggcggaggtgggaggatcatttgagcctggaaagttgaggctgcagtgagctgtgattgtgttacttcactccagactgggcgacaccgtctcaaaacaaacaaacaaacaaaaaaaaaacaaaagaatgaagacctttttgatgacactcttccacttaatgaaaaggaaatacattttc

SEQ ID NO: 326949 - DNA, 530 bp, Homo sapiens
  misc_feature (1)...(530): n = A,T,C or G
gaattatacctaattaaagtttaatgactagattacattcctgtctgatatggtttgattctgtgtccccacccaaatctctcttgaattgtaatccccatgtgttgagggggaaacctggtggaaggtggtttgatcatgggggtggttccycctatgctcttctcatgagaagatgagatagtgagttctcatgagatctgatggcttataagtggcagtttccccagtgctctctctcctgcagccctgtaagatatgatttgcttctcctttgccttctgccatgattgtaagtttcctgaggcctcctcagccatgtggaattgtcagtcaattaaacctcctttctttataaattagtctcacgtagtatctttatagcagcgtgagaacagactaatacactatcctacagtaacatagaaacatatatgctgaactcttcacataaccttatgtgtttccttttaatgttatcattaacccttcnnnnnnnnnnnnnnnnnnnnnnnnnnnnnnnnnnnnnn

SEQ ID NO: 326950 - DNA, 530 bp, Homo sapiens
  misc_feature (1)...(530): n = A,T,C or G
gaattatacctaattaaagtttaatgactagattacattcctgtctgatatggtttgattctgtgtccccacccaaatctctcttgaattgtaatccccatgtgttgagggggaaacctggtggaaggtggtttgatcatgggggtggttccccctatgctcttctcatgagaagatgagatagtgagttctcatgagatctgatggcttataagtggcagtttccccagtgctctctctcctgcagccctgtaagatatgatttgcttctcctttgccttctgccatgattgtaagtttcctgaggcctcctcagccatgtggaattgtsagtcaattaaacctcctttctttataaattagtctcacgtagtatctttatagcagcgtgagaacagactaatacactatcctacagtaacatagaaacatatatgctgaactcttcacataaccttatgtgtttccttttaatgttatcattaacccttcnnnnnnnnnnnnnnnnnnnnnnnnnnnnnnnnnnnnnn

SEQ ID NO: 326951 - DNA, 581 bp, Homo sapiens
tcacctgaataacatacattgtatccattaaggaatatctcatcgttcacctccctcccttatccttccaagtctccagtgtctatccttctacaccctacatccctgtgtacacattatttagctcccactcataaatgagaacatgtagtatttgtcaccctgtttatgagctgtttcacttaaaataatgacctccagttccatccatgtttttgcaaaagacatgattttattctctttatggtttaatagtatgccattgtgtatatatgccatattttctttatctggtcatccattgatggacatttaggttgatttcatgactttgctattgagaatagtgctatgataaacacacgagtgcagycatctttctggtataattatttctttttcaagacaagaagtagatacccagtagtgggatttctggatcaaatgtagttctacgcttagttctttgggtaatctgtagcagtagtctagggattggcagggcgagttacacacactcccttcctagggcctgtacctcagcttcctggagaaatggccttgattactctgataactac

SEQ ID NO: 326952 - DNA, 563 bp, Homo sapiens
aatgccagacttgaagcccagcttcccctttccctagtgctccyctgtggcaagtgacttcacctttctcagcttcattctacccatctttctcttatcaataatcatatccagcttatagatttcttgtgagagttgaacaagaaataaatgtacatgtctggtgcataatttgtactcagtacctgttgcctgctatccacaacagcaatgaaaacaataataataccttggaaatagtctgcatggagcatgtgctgtaatttttgttagccaaataatgggaaaacccattactcaatcactacaccttttattatacagttaacatatgtagattagcacacatgtgcatacacacatccacacatactgcacctgaaattttttttttaattttaattttttagagcctttaagtgaaccatgatgcacctgaaatttttaaggagaggttctagaatttaaatccttttgtacatgtacacatatactcgcaaggtcaatacttcctcacatcttctgaaaggtaggaagaaacatgggcacataactttgctata

SEQ ID NO: 326953 - DNA, 637 bp, Homo sapiens
ttgagacagttccatctactagatagtatttgaaattttgcaggggtgtttttggtggtctcagtgattacaggaactacttccttttaagatggtggaaaaacggtagcaagaaaacaaacaaagaagtttaccaatgggccaagaacctgaacagacatttctcaaaagatgacacacaaatggccaataagttcatgaaaaaaatgctcaacagcactcatcattaggaaaatgcaaattaaagccacaatgagatactacatcacatacaaaagataacacatgttagcaaggatgtggagaaaagggaaccctttacactgttagtgagaatgtaaattagtacagccattatggaaaatggtatgggggtcctcataaaactaaaaatagaactaccatatgatcaagcaatcccacctctgggtatgtattcaaaagtgttgaaatcaacatgcaaaagagatatctgcattcccatgttcactgcagcattattcacaagaatgtgaatgccaaastacggaagcaacctaagcgttcatcgacagatgagtggataaagaaacgtggtacatagacacagggaaatactattcagccttaaaaaagaaggaaattctgccatttgtga

SEQ ID NO: 326954 - DNA, 621 bp, Homo sapiens
tttgataatattgtggtagtaattattatgtctgtgttcatgaaggctatttgtctatagtttccttttcttgtgaggtctttgtttggctttggtactagggaaatactggtctcatagaatgaattaggaagtgttccctcctttacttcctaaacaaatttgttaaggactgacaatacgtctttaaatattagatagaattcaccagtaaagctatctgggcctgggtttgtctttgtgggaggatttttaataactaatttactttatttatttattatatgcctactcaaattttctatttcttcctgggtcaaatgtgttaattgcractttttggaaatgtgttcttttcatataagtttcctaagttattggaataaagttattaataatatcccttacaatcctttgattttttattttggtaatttgtgtctttttaaatttttttctttatttattctaaaaaaaaaaggatacatgggcagaatgtgcaggtttgttacataggtatatgtgagccttggtggtttactgcacctattgacccatcctctaagttccttcccctcacaccttaccccccaccccccaataggccctggtgtgtgttgt

SEQ ID NO: 326955 - DNA, 580 bp, Homo sapiens
ccaggccacgccccagggccccacttacggtcatgaagtgggcagcagtcccacagaccatgttggtgtgggtgagggatctttccacaatataaagagagagttttaggcccccaaaatgatgtccaatacaccatgtgtgagattttagggaggaaaaygttagggaaatgtgaacattttcttgccaagatctgactaaatgtagcttaatgttagattattgaaacattgtttttgatacaccaggaattcagtaacttctatgagataatttgaaatcagttggggaaatccagtgtgaatttcctacttattttgatgtaaccgtcacgaggtgcacggcaaaagatcagaaatagaacggcagactttttatgattggctggggtgagcaacgtagcatttgagtatagtcacttctctgcaccagcaggtggggtcagaggtagaaggaggggaatgggctaaaacaatgcacttatagaagaaaaagcactgcactgattcctctaggggtcattctggaaaagtctcaattacagaactaggtgtgagtgcagagagtggtggtgaggaa

SEQ ID NO: 326956 - DNA, 580 bp, Homo sapiens
ccaggccacgccccagggccccacttacggtcatgaagtgggcagcagtcccacagaccatgttggtgtgggtgagggatctttccacaatataaagagagagttttaggcccccaaaatgatgtccaatacaccatgtgtgagattttagggaggaaaacgttagggaaatgtgaacattttcttgccaagatctgactaaatgtagcttaatgttagattattgaaacattgtttttgatacaccaggaattcagtaacttctatgagataatttgaaatcagttggggaaatccagtgtgaatttcctacttattttgatgtaaccgtcacgaggtgcayggcaaaagatcagaaatagaacggcagactttttatgattggctggggtgagcaacgtagcatttgagtatagtcacttctctgcaccagcaggtggggtcagaggtagaaggaggggaatgggctaaaacaatgcacttatagaagaaaaagcactgcactgattcctctaggggtcattctggaaaagtctcaattacagaactaggtgtgagtgcagagagtggtggtgaggaa

SEQ ID NO: 326957 - DNA, 522 bp, Homo sapiens
ttgttgaccataaagattgcattgtccatatgatatttaacttgaaaatacaaacttgcaagcaaaaattataaatgggtcaattctgctgagaaaaaaattaagcccaaaggcacatttagaattaatgacataggaataaagaaaataaaaaaaataggagttgctttaatttgttctacacacacacacacacacacacacacacacacacacacacaaatacacacacagaggtcagcaatatccctagagtcattttaggtatggcggccagcaaggcatatgggggcagyggtcctgcatatcacaaatgaattcccaattgttttctgcagagtatttgatacttctttaaatcaaatctaattgaacatttcagatagatttagttacatatgaaaaagacttgatatagaccttggaaatgtaataatttttttctgaaatccttttttgttcttggggaatgtaagatcatgtgtttgagaatatgttggtttaaagattatttctagttgg

SEQ ID NO: 326958 - DNA, 564 bp, Homo sapiens
aaaaagccacgttcacattcctgcaccgtaacaacggacgaacccagggagtcgcattttggagccaaggaagctcaggctgccccgcacccctgcacccccactcccccctcctcctgccgactgcatcgcctttgggaagatgaatagcttggccgaagttgtttttcctttccggtggccctgatcaggtgtccccgccccctcctgccgttcgccttctctcgccgccttctcccgacgcccccgcccggcccggcccctcctcccccgcccccctccgggctggaccgcggatggtacgttccgcacgtgagctgggtgctggtctggccggcgacgcgcgtgccctgtggccaaacactgcctggagtgagagcaaactaccagcgcagtggggccggcgcgagtgtgcgtgtgtgtgcgtgtgtrtgtgcgagcgcggtggaggggggggaccaactgcttcacactttcaacactgcactgaagagggagagcgagagagagactggagacgcacagatccccccaaggtctcccaagcctaccgtcccacagatt

SEQ ID NO: 326959 - DNA, 574 bp, Homo sapiens
aaactatagtcgctcaaaacattttctttggaaaatgtcatcaatgatgatttaaaaaccatccaaaataatatcattcttattacttaatgctagtgtaaacttagtctgttatttttatttttaaaaaagattaatcaccaacctaggacagaaatttggagtcagaggtaatcactccatccctcatcttctgttatccactccccatagtgaatgctcagtacacctctatggaatgactgagtgactgactgaatgagtgagtaacgactccagtgaggctcacatcagttgtttgactaacccgtggtcttactacgagtagaggacagtgctggactcaaatccaggagagcccattcccagtwctaaactcttctgatcctgacacgtgatttactcacctctaaacaactgtcaattgttccaaagcctaaagccatccttcaagaatactattggctcccatatagactattcaaaataacgtgtcacacagagtttaaaagcaatgctaaaaaaaataactaacaaaaatacatggagaaatagcaagactgtatgagtggaa

SEQ ID NO: 326960 - DNA, 471 bp, Homo sapiens
agctcagcactgcaatcatagaaaatagagttgaattgcaaagcccagagtaaaggggatggttgttgatctggttcaggggtaggaaaagtaactttaaattgatctgaaaaaaaaaaacagaggggttaaaagagatcatctctgggctcagtaatcctgtcttctttcccagcctgcactaccaggcaattacttttcaggagtggtgggaagccaaacaaattctgaacatccttatctggaacctgtttcatgcagagaaggcctgcttgtaaacacaacaggasgtacaagctgatgaggagaaggctatctttttgaacgttgcccctgggggactgggaggtctgctagccctggctcctcgggcaagaccacaaccctctaactgggcctcactttctgctttggctgagctgggaacggccagcaagggaggagtcgcgggtgagggagcacattggcctc

SEQ ID NO: 326961 - DNA, 548 bp, Homo sapiens
cactagtaaggaagtgacctggacctggacctcccactccaggacattttaaccagccctgtgtcaacagagcatgcgcaacccagaggacattttctttgagccccactttacagtctcatttacctggagcctggctgggctccatcagcccccattcagttaagaaactgccaaaggagcagtttatccatatgcctgcaggatattaagggaaaygaattttgtgttctggctgagagggcctcagtggacacttccaaaaggaaccctgattcacagtatttgatacttggttattggctttggtagagcttggttttgtgttctgtcttctgagaggcaggtactggacaccagaagcagcaggataatggccctgaaggagtcctgactgcaaccccctgaccaccaccaccggagaatttgctccagctttactctcttctgattttccagaaatctggcattttaaatagctattttgtgttggcctcttttcttcctttctaaaaagtatgttttaattaaatgttctttggttgctg

SEQ ID NO: 326962 - DNA, 524 bp, Homo sapiens
tcattttaaacagtgacatataagcaagagcacaacagctgcaagattgaaacagctgtatmagcaaaggatgcagttgttggagggtatcattaaaaccagcttcaagtgcagccgccagcacacccactcacttcccggggccaagccatgtgagatggaccttgtggctgcagtcctttgaaacccaactgctgaggacaggcacacatttttttttattattatcctttcatttaatgagttattaagcagctttactgagttcagttagacacatggtccccacccttctggaacttttacaatattatggtaaaacaaagatgtcctcctcatctactggctaaggattcccagagtcttaggccagctagagatgagcaaaatatacagcagtctctgacgtgtttatattaccaaggagataattaaaaacatagcctgtacattccccactttccaactcttcttttatttccctgttttagtggtatgtgggtctttgggttgtgtattgtaat

SEQ ID NO: 326963 - DNA, 581 bp, Homo sapiens
acaatcaagtaaaaccatcaggacctgagggatctgactcacactgcctcacagctcagacatcctctgacacaaatgtgttaatcaagaaaatcagctgaagaacacctgggttcccaaatatttgcattctaatagggaccccttgaaaaccaaacttttccagacccaagtactgagactggaaggatggagtgacctgtggttgggcaaatgctttggctgacagtcatcattttyctggatattcatttcacacctctcttctcaaaattccaatgcttcctctgatcttcattctcaacttatgaccttttttctagtccactgaaaaatagaaacaatctggagggagtcccagtgtcagccacatctccctccaaagaggcatctgtctccatacatcctactttctctccacgaactgaggatgacttgtctctgcttctatccaagtctaagccctctacttgatcatcctctctcagtttctcattcacatcctttaattttctctctcctgtatcaatattttttttccttttctactggaccatttccaccagcatgcaaatgtgcca

SEQ ID NO: 326964 - DNA, 598 bp, Homo sapiens
agtgagggtaaagaaacagaggaggagattataggtaagaggggtagaaactgatcatgaagggctgtgtagacctcagtcaatactctgaattttactgtcagtaaaacggaagccatgcaaggttttaagcagagggaagacaggcaagacatgactttgattttttttttttttttttttttgagacagagtcttkctctgtcacccaggctggagtgcagtggcacagtctcagctcactgcaacctctgcctcctgggttcaaacgattctcctgcctagacctcctgagtagctaagactacagatgaatgccaccatgcccagctaatttttgtatttttagtagagacagggtttcaccatgctggccaggctggtctcgaactcctgacctcaagtgatctgccccccttggcctcccaaagtgctgggattgcaggcgtgagccaccatgcccagtcgactttgatttttttaaatgctcactcacactgctgtgttaggaataggctgaagaaggaaagagggcttcatgaggctcataggataagatgaaagataatagtggttctgacatgggtggtagcagtca

SEQ ID NO: 326965 - DNA, 584 bp, Homo sapiens
ctttgattttttttttttttttttttttgagacagagtctttctctgtcacccaggctggagtgcagtggcacagtctcagctcactgcaacctctgcctcctgggttcaaacgattctcctgcctagacctcctgagtagctaagactacagatgaatgccaccatgcccagctaatttttgtatttttagtagagacagggtttcaccatgctggccrggctggtctcgaactcctgacctcaagtgatctgccccccttggcctcccaaagtgctgggattgcaggcgtgagccaccatgcccagtcgactttgatttttttaaatgctcactcacactgctgtgttaggaataggctgaagaaggaaagagggcttcatgaggctcataggataagatgaaagataatagtggttctgacatgggtggtagcagtcaagatagtagataagggagactagggtgatagcaggctatgagtaaggaagaaaaatggttcaagaactaccagagacaaattgtatcctacaaaggaaaaattcacacactccacgtatattgatattgtttatattgaatat

SEQ ID NO: 326966 - DNA, 598 bp, Homo sapiens
agtgagggtaaagaaacagaggaggagattataggtaagaggggtagaaactgatcatgaagggctgtgtagacctcagtcaatactctgaattttactgtcagtaaaacggaagccatgcaaggttttaagcagagggaagacaggcaagacatgactttgattttttttttttttttttttttgagacagagtctttctctgtcacccaggctggagtgcagtggcacagtctcagctcactgcaacctctgcctcctgggttcaaacgattctcctgcctagacctcctgagtagctaagactacagatgaatgccaccatgcccagctaatttttgtatttttagtagagacagggtttcaccatgctggccaggctggtctcgaactcctgacctcaagtgatctgccccccttggcctcccaaagtgctgggattgcaggcgtgagccaccatgcccagtcgactttgatttttttaaatgctcactcacactgctgtgttaggaataggctgaagarggaaagagggcttcatgaggctcataggataagatgaaagataatagtggttctgacatgggtggtagcagtca

SEQ ID NO: 326967 - DNA, 578 bp, Homo sapiens
attcactattatttcatttacccaatttaagaagaaagaggtgttacccaatggccttkctgtataccacgaatacactagttgtaactttaaaagcagccaactgacaagttcttctcatttgatattcatagaacatggttttgctttttttcccctaaaaagtcgatattcaataaagaatagatgtcctctagtagtctgatagagatctagatatcactcctaatacagtttcccattataaaaattaatctatcctgagctccacagattgttttctctgtcattacactgtcatgcccagcttcctcaccatacactaccatcaccatccctcaaaccctgggcccaaaccccactactttctcatataattctggtccaggatctgatgtggcaccatgttactgggcccaattctactctgccctagacctctctgccccttaatctgcattctgatcatacacaaacagaaaacactccagaagattcatattaacaataatcgaatgtacagtagatactgggttctcagctgaaatgtttacctacttatctcagttaatctttat

SEQ ID NO: 326968 - DNA, 558 bp, Homo sapiens
aagtaactttaacttgtgattcactattatttcatttacccaatttaagaagaaagaggtgttacccaatggcctttctgtataccacgaatacactagttrtaactttaaaagcagccaactgacaagttcttctcatttgatattcatagaacatggttttgctttttttcccctaaaaagtcgatattcaataaagaatagatgtcctctagtagtctgatagagatctagatatcactcctaatacagtttcccattataaaaattaatctatcctgagctccacagattgttttctctgtcattacactgtcatgcccagcttcctcaccatacactaccatcaccatccctcaaaccctgggcccaaaccccactactttctcatataattctggtccaggatctgatgtggcaccatgttactgggcccaattctactctgccctagacctctctgccccttaatctgcattctgatcatacacaaacagaaaacactccagaagattcatattaacaataatcgaatgtacagtagatactgggttctca

SEQ ID NO: 326969 - DNA, 566 bp, Homo sapiens
tggccagcatggctggaatgaagtgctaagtcagacaatggcaagatgaagttggaagggaggctgcagccagataagataggcccttactgggcatggtaagagcttgagtcttcttctaggaacaacaggaagacgttgaagggtttaagatgggaagtgatatggtacatacattttaaaaatatgactgcctcctgtgtggagagtggactatgagacacagataaggaatgaaccagggagaacaactagaggctattgcagggatacaggtgagcagtgagggtgatgagaacaattgttgcagtagggaagtggtcaagatatgttttggaggtagagtctgcatgattggctgttggattaaaatacagtgataagggaaagagagatggcatttataattactatggttttaccctgacatagtgacttctaagagccagttcttaaattttcaggaattttgcaagmcagttgctaaacatagccattattaaaaattaaatgttataaatttataattaaataaattatattaggcaaaagtaacgcatgcctaa

SEQ ID NO: 326970 - DNA, 607 bp, Homo sapiens
ctcctcattactgcaggctcctgtccgcacatcaaagtagaaaaggagcgctgctttactgtgtgacttccttgttgtaaaccagaaacatgaaatgggcctcaaacagaaatcctgcttttaaaataagatagcaccaacttttgtagctagacatatagcacacaaaattatgtattggttggatccctttgttgttttacatatttggatgtgtcttgaatgtgactgtcttctctcaattcttctcccaggaagaagtagaactggagatattyctcctgtgtttcatataacttctaacttaatgtaatagaagcgtattttcccccaacttttagaaaccaatcttttgtacattatcagtccaccatatattaggttataatgtacaattcctcatttattttaaaagcaaccattaagcacctttggtatgcttgacccctgtggggtcacctgattctcatttaagatcatacaaggtttacttttgagcaccatcagaaaatacccaatggagcttctttctgcaaactggatatgaaaacaattacctgaacccttcaatttgtggcagatttagttattgaaattaaacagccat

SEQ ID NO: 326971 - DNA, 586 bp, Homo sapiens
tcatctgggaccagctatgtgacttgtttcaggtggaggcacatttctttccctgctcagtgacatgtgagtcctcgacaagctttcagaagggattcctgaacttggtgaggcacagccmtctccaactgccttgtggagcatccctgggcagcatgcagaggagaggtgagaggctgcctacccgtgctgtggctgtccctcccacctcccttaaagcctccacgtcaggcgccagtccaccaggttcactgcgtgcatctttggacagcagttgcaaaactgagagttccagaaattgtgctacactcagttttgtgtatacatgtggctcaggtctcatcatcttcagctcatcacatttcaaaatgctgagagtagaaagcgtttctcattctggctttaaaagagagatttccccaaggatcacacctcttcagtctttgggcccaagcttcttgaaggagctacttgcctactttacagggcaaaattttagaacacataatttgaaaaccccaccaactttaatgtgaaaaaaaaaaaatcaattccttttgatttattatccccaggagacaaggtg

SEQ ID NO: 326972 - DNA, 586 bp, Homo sapiens
tcatctgggaccagctatgtgacttgtttcaggtggaggcacatttctttccctgctcagtgacatgtgagtcctcgacaagctttcagaagggattcctgaacttggtgaggcacagccctctccaactgccttgtggagcatccctgggcagcatgcagaggagaggtgagaggctgcctacccgtgctgtggctgtccctcccacctcccttaaagcctccacgtcaggcgccagtccaccaggttcactgcgtgcatctttggacagcagttgcaaaactgagagttccagaaattgtgctacactcagttttgtgtatacatgtggctcaggtctcatcatcttcagctcatcacatttcaaaatgctgagagtagaaagsgtttctcattctggctttaaaagagagatttccccaaggatcacacctcttcagtctttgggcccaagcttcttgaaggagctacttgcctactttacagggcaaaattttagaacacataatttgaaaaccccaccaactttaatgtgaaaaaaaaaaaatcaattccttttgatttattatccccaggagacaaggtg

SEQ ID NO: 326973 - DNA, 640 bp, Homo sapiens
ctttcaaaatcaatattaaaagtgaataaactctgactggtgccaagtcaatcatttaattttagcatctacattatgctagacacacatactaatccactttgtcacatgarccttgcaaaataataattatttcacaaaagagaaaatggaaatggagggactaatctgcccacattttaaacaattggttgcgagaggcactgagattctaacccagatccatgcaactcctagaaccttccactgcgctgtctttctgattttagacaatgatttagcccacaaaatactatgaccaacagaggacttcataccttttcatcctgaactctgactttttagaggtggaagggtacaattctaatatttttcaacagagacctattatttaaatgacttagtaagcactattaaactgaggtacgaatactatatagagaactgaaataattagtaatagccttcaatagttttagaagtataatttttaataccaataataggatccatattccttaaactaaaaagcaagggtagcagccaaagaccaatgcttgtactgaggcaaccagagatgaccccccaaaatcagagctgtcttctataactattgagtaactttgtgatttggcttcat

SEQ ID NO: 326974 - DNA, 640 bp, Homo sapiens
ctttcaaaatcaatattaaaagtgaataaactctgactggtgccaagtcaatcatttaattttagcatctacattatgctagacacacatactaatccactttgtcacatgaaccttgcaaaataataattatttcacaaaagagaaaatggaaatggagggactaatctgcccacattttaaacaattggttgcgagaggcactgagattctaacccagatccatgcaactcctagaaccttccactgcgctgtctttctgattttagacaatgatttagcccacaaaatactatgaccaacagaggacttcataccttttcatcctgaactctgactttttagaggtggaagggtacaattctaatatttttcaacagagacctattatttaaatgacttagtaagcactattaaactgaggtacgaatactatatagagaactgaaataattagtaatagccttcaatagttttagaagtataatttttaataccaataataggatccatattccttaaactaaaaagcaaggstagcagccaaagaccaatgcttgtactgaggcaaccagagatgaccccccaaaatcagagctgtcttctataactattgagtaactttgtgatttggcttcat

SEQ ID NO: 326975 - DNA, 640 bp, Homo sapiens
ctttcaaaatcaatattaaaagtgaataaactctgactggtgccaagtcaatcatttaattttagcatctacattatgctagacacacatactaatccactttgtcacatgaaccttgcaaaataataattatttcacaaaagagaaaatggaaatggagggactaatctgcccacattttaaacaattggttgcgagaggcactgagattctaacccagatccatgcaactcctagaaccttccactgcgctgtctttctgattttagacaatgatttagcccacaaaatactatgaccaacagaggacttcataccttttcatcctgaactctgactttttagaggtggaagggtacaattctaatatttttcaacagagacctattatttaaatgacttagtaagcactattaaactgaggtacgaatactatatagagaactgaaataattagtaatagccttcaatagttttagaagtataatttttaataccaataataggatccatattccttaaactaaaaagcaagggtagcagccaaagaycaatgcttgtactgaggcaaccagagatgaccccccaaaatcagagctgtcttctataactattgagtaactttgtgatttggcttcat

SEQ ID NO: 326976 - DNA, 582 bp, Homo sapiens
attttatcccactacatcttttcgtatttccagtcaagtcactgtggctctttgctgtaccaccagcccacctgccactgttccctgacagctttttaactcctgcaagccactagttgctgtgatggcaacaccacaacctggatgctgttgcttaaatttttactttaattgcacaatggaactctctctctcttttgtggtggaatgaagatattaaatatttcatctatgctgttagaaatgtaggatttgcatttctgttatataattctatcatacatttttatttctattacatayttctgttataactatctattgtactaggttttggtctcaagattcctttatgctcttaataattgaggatctcaaaaatcttttgtttatttgggttatatctgtggatattaactatgctataaacatttttctttcttttttttttttttgagacagagtcttgctctgttacccaggctggagtgcagtggcacaatctcggctcactgcaacccccgccttctgggttcaagtgattctcctgcctcagtctcctgagtagctgggattacaggt

SEQ ID NO: 326977 - DNA, 673 bp, Homo sapiens
cctgtgcctataattccagcatgacacctggtaatgggcactcagtakatgcttgttgatctaaactcagtgtgtgtgtgtgtgtctgtgtgtgtctgtgtgtgtgtgtgtgtgtgtgtgtggtcttcctctcacatccaaagctactagcactgaggaagttgggcatggtgtaggaaagagaaatctttgctgttaaatctcatttccagcataactgtcaatggagaggtggcatggaagggacaaccagttcgtgtaccaaattactctcagcttgcttgttgtcttaggcatatgttctgggagtggccaacacctgttttacatctgtgttagtctttgcggaataaaaagcaaattagggtttaatggggactattaatcttgtcacctaattgagtagatctaataaatcttttcattcaaaacccaatgggaatttctagttggaaatgagtgtggggaatattcaatctcaaaaatattttcatacacaaagattatatatgagtttgtgaaagatgttgaatattcaatgaaatttaatgagtatgaattgaacacttatcctgggcctagaactgttggcagttgcttttgagagttacagagtacatttatggtaattactgcacttacgaattttgctatgtggtttgggagtatctga

SEQ ID NO: 326978 - DNA, 507 bp, Homo sapiens
gcttactgtcttctggtttagttttaactttaggttcaactcattcaagttcttttgtgcccrcaaaatcacaagaatgaagtgaggctttagctgggctggcatcagtcatctgtcacctgcataggctggggttcagcagtgcacagcaatgacttatttcatcttcaggtttgtatttggtgtgagaacctgcagggagagggagatcatttggcaagggcagggaggggcatataagcatcgggaggtgagccagagtcagaagtcagctcagaggccttcacatccagcccagatcaggagctaagtaaaggtggcaccttcagtactgggtcctctgaactgggggccatccaggacttcatgagacatccaggcccactttaactgggcccttaactggagttagagccacactaggtacacagattctaaagacagggatacttgtacccagggtacccacttcacagccacactcccagttctttctccctgtccaag

SEQ ID NO: 326979 - DNA, 590 bp, Homo sapiens
gagtgtggccatgaggagaccagggctctgctgtgtgactttaactgttgtggccctcaattctattaaaaggggggtaaaaatatctgctcttattaggaaaaatggctaatgcatgctgggcttaatacctaggtratgggttgataggtgcagccaaccaccattgtacacatttacctatgtaacaaacctgcacatcctgcacatgtaccccagatcttaaagtaaaaataaaaattaaaaaaatacctgctcttcctaccttctgaggttttgtgaaggtatatgagattttagatgtaaaagtaacttgaaaatattgagtgcattatattcttttataaaggagcataaaaatttaactccacaatcctgagatagaatgcttattacagatggtaaatatgtaagtgtcaaccctaattgaatgatagtggctgtctctgtgttgagaaggatatgaggctgcatccaggctcagctggcaatggtgccagtcatttagtgatgtcagttatgtgtatacgaggcagaagtggcatcacaagtgccatgtatttgctgtcttggtttaggacattcttcct

SEQ ID NO: 326980 - DNA, 590 bp, Homo sapiens
gagtgtggccatgaggagaccagggctctgctgtgtgactttaactgttgtggccctcaattctattaaaaggggggtaaaaatatctgctcttattaggaaaaatggctaatgcatgctgggcttaatacctaggtaatgggttgataggtgcagccaaccaccattgtacacatttacctatgtaacaaacctgcacatcctgcacatgtaccccagatcttaaagtaaaaataaaaattaaaaaaatacctgctcttcctaccttctgaggttttgtgaaggtatatgagattttagatgtaaaagtaacttgaaaatattgagtgcattatattcttttataaagkagcataaaaatttaactccacaatcctgagatagaatgcttattacagatggtaaatatgtaagtgtcaaccctaattgaatgatagtggctgtctctgtgttgagaaggatatgaggctgcatccaggctcagctggcaatggtgccagtcatttagtgatgtcagttatgtgtatacgaggcagaagtggcatcacaagtgccatgtatttgctgtcttggtttaggacattcttcct

SEQ ID NO: 326981 - DNA, 590 bp, Homo sapiens
gagtgtggccatgaggagaccagggctctgctgtgtgactttaactgttgtggccctcaattctattaaaaggggggtaaaaatatctgctcttattaggaaaaatggctaatgcatgctgggcttaatacctaggtaatgggttgataggtgcagccaaccaccattgtacacatttacctatgtaacaaacctgcacatcctgcacatgtaccccagatcttaaagtaaaaataaaaattaaaaaaatacctgctcttcctaccttctgaggttttgtgaaggtatatgagattttagatgtaaaagtaacttgaaaatattgagtgcattatattcttttataaaggagcataawaatttaactccacaatcctgagatagaatgcttattacagatggtaaatatgtaagtgtcaaccctaattgaatgatagtggctgtctctgtgttgagaaggatatgaggctgcatccaggctcagctggcaatggtgccagtcatttagtgatgtcagttatgtgtatacgaggcagaagtggcatcacaagtgccatgtatttgctgtcttggtttaggacattcttcct

SEQ ID NO: 326982 - DNA, 590 bp, Homo sapiens
gagtgtggccatgaggagaccagggctctgctgtgtgactttaactgttgtggccctcaattctattaaaaggggggtaaaaatatctgctcttattaggaaaaatggctaatgcatgctgggcttaatacctaggtaatgggttgataggtgcagccaaccaccattgtacacatttacctatgtaacaaacctgcacatcctgcacatgtaccccagatcttaaagtaaaaataaaaattaaaaaaatacctgctcttcctaccttctgaggttttgtgaaggtatatgagattttagatgtaaaagtaacttgaaaatattgagtgcattatattcttttataaaggagcataaaaatttaactccacaatcctgagatagaatgcttattacagatggtaaatatgtaagtgtcaaccctaattgaatgatagtggctgyctctgtgttgagaaggatatgaggctgcatccaggctcagctggcaatggtgccagtcatttagtgatgtcagttatgtgtatacgaggcagaagtggcatcacaagtgccatgtatttgctgtcttggtttaggacattcttcct

SEQ ID NO: 326983 - DNA, 491 bp, Homo sapiens
acaacgatgaaaaacgtgtatttctttayacgctgtctttactaagaacccatttctcaagcctttaaaagccacatacactaaagttttaaaggtaatgggggttaaatgctaagctaaatgggccacaggtgtcccaatctgaagtcgcctttagttctcttcgcaaagggacctcctcccatctccactcctcttgagtccccctaagtaaatgtgtctcgcaccatctgactcttcgacacactgcagcttgcaaatgtgagtgagcggagagggaactaggttaagaggcggcgggcagattctggggcccctcgagcaggccctggggctggcagcttccgccgggcagagggctgcagcgcagaaaagcagcgtgacctcggcgctccacacctccccggccatggctccccccagccacattccggcccggggaccccagcctcaccttgaagcgcaccggcatgtcgcccggcgccggagcc

SEQ ID NO: 326984 - DNA, 585 bp, Homo sapiens
cagctccaagatttcataaactatgaaggttttttttttctcaaagaaatatggttttaaacttaggatgctgtctatagtatttcaacagcaataaaagacaaacagctaaattaaagactctatatatggagagmgtctacacacacacacaattctctgtcatatgtacctggataaatcaaaaagggataggatttaaactgctttcaagcacttaacattgagttgctcagaatacaatcatgtgctttttttctttttctccttcttctcaagggaatctctttcattctagagataaataacctttttagctgatgctactctattaacttacatctgaataacaaaaatatgcatcagtgcttgactattttagatgattctgagttatctcaaacttaatttaactataaaatgactttgatttccactgcctctgctttaggcattcctaccatagaaaatgaagccaccacattacaaatactcatacctgaagtctagatgtgaatgccaactacatgcttttcctcatttctacatctcatccttcagcatattttatcagttcagtttgca

SEQ ID NO: 326985 - DNA, 585 bp, Homo sapiens
cagctccaagatttcataaactatgaaggttttttttttctcaaagaaatatggttttaaacttaggatgctgtctatagtatttcaacagcaataaaagacaaacagctaaattaaagactctatatatggagagcgtctacacacacacacaattctctgtcatatgtacctggataaatcaaaaagggataggatttaaactgctttcaagcacttaacattgagttgctcagaatacaatcatgtgctttttttctttttctccttcttctcaagggaatctctttcattctagagataaataacctttwtagctgatgctactctattaacttacatctgaataacaaaaatatgcatcagtgcttgactattttagatgattctgagttatctcaaacttaatttaactataaaatgactttgatttccactgcctctgctttaggcattcctaccatagaaaatgaagccaccacattacaaatactcatacctgaagtctagatgtgaatgccaactacatgcttttcctcatttctacatctcatccttcagcatattttatcagttcagtttgca

SEQ ID NO: 326986 - DNA, 585 bp, Homo sapiens
cagctccaagatttcataaactatgaaggttttttttttctcaaagaaatatggttttaaacttaggatgctgtctatagtatttcaacagcaataaaagacaaacagctaaattaaagactctatatatggagagcgtctacacacacacacaattctctgtcatatgtacctggataaatcaaaaagggataggatttaaactgctttcaagcacttaacattgagttgctcagaatacaatcatgtgctttttttctttttctccttcttctcaagggaatctctttcattctagagataaataacctttttagctgatgctactctattaacttacatctgaataacaaaaatatgcatcagtgcttgactattttagatgattctgagttatctcaaacttaatttaactataaaatgactttgatttccactgcctctgctttaggcatycctaccatagaaaatgaagccaccacattacaaatactcatacctgaagtctagatgtgaatgccaactacatgcttttcctcatttctacatctcatccttcagcatattttatcagttcagtttgca

SEQ ID NO: 326987 - DNA, 595 bp, Homo sapiens
acttccacacattcacagctgtaatctgcgggtgtgagttaagagattgtcttccactagtttgctcctgggccttgggagagcttctctgatcactggcgctatgactgtatttctttttcatgtgttcctggctgcagggcccctttgagcacaggacttggttgggagataggtcacactcttcccgggccagccctgtgaagggasgtatgccacactccaacaccagcccacaaatttatgcatctcaccattctcagtattctaagaatggaggtttctcttcaacttgagtgccagctgaagaactctgctcagtactcccaagacacacattgcagccctggggtgccaggtccagccggcagctctgtcctctggaacctcaggactagtcactggctgtgctagaggatctgaagtacttccaggccactgagaaaatattcagctggaggtgatggcaaagtacccaggctggacaacagaggctgcactatgtgcttgctcctatggggcagctaggcaagagccctgggaagggttggagggaaggaaggcctatagaacagacatatcctagtcccaggag

SEQ ID NO: 326988 - DNA, 585 bp, Homo sapiens
gtccactgataaattcattccagaattggactacgccttcaaaaatatgggaaaggaatttcaacttctattagatactgaaatcaaagaaagtgaacagactgtcatgattgtatcttaagtagttttgtggccaaagagccacaaaacgcctaaatgcctgtaagatgcaaagcaatttattttgattttgaaacaccttgggatataaagagatgagmtaatctttgtggtaagaaaatgcagtaaaatgcttggtttactgtatgttagtgttacttggtggcaggctttccccttgaatatctgtggggctttgtggtgggtctttaaaggagtgagaaaagaaagtgaaagggtgaataaaggactgactcaaggttatttctgttctgaaccctctcaattcttatcagcatgcaatattttctaacaagagtttcaatctgttgataaatgtaagacaatgaatagagggcagtgcaaacctactctcatataaattttaatgtatctcttaaaactataagtagattcctgttttcaaatcacaatacaggaacttgtagactcagtcgtttttaa

SEQ ID NO: 326989 - DNA, 597 bp, Homo sapiens
tatctgtgtcataggagtcactgttctattggtgtgagcatagcttcattttaataatcagtgattattaaggaaaaaatgaattttggattaaaacatatattaatattttatcaaaatccagcaaggagtaatttttgtgmaaattattaaaattttctatcctgataatttttctgaagaaaagagctaaaagatagttatataacaggactcttaaaagcattactgagattacatagggagataagtggaacaaaatgatagtttaattcaataagtcatttattgtaagatctctactaactatgcactttgctctgtgactggtctgaatatactcacaggttttctttacagcacttttattttaataaatgtctcatgtcccatttatttctggtttactcccttcctttactctcttttttggaaagtctattgggcaggactagctctctctgcagcctgattggggctgatgatgagtaagaaccatgtattagtccatttttgcatttctgtaaatacctgaaactgtgtaatttatagagaaaagaggtttaattggcacatggttctgcaggttgtatagga

SEQ ID NO: 326990 - DNA, 597 bp, Homo sapiens
tatctgtgtcataggagtcactgttctattggtgtgagcatagcttcattttaataatcagtgattattaaggaaaaaatgaattttggattaaaacatatattaatattttatcaaaatccagcaaggagtaatttttgtgaaaattattaaaattttctawcctgataatttttctgaagaaaagagctaaaagatagttatataacaggactcttaaaagcattactgagattacatagggagataagtggaacaaaatgatagtttaattcaataagtcatttattgtaagatctctactaactatgcactttgctctgtgactggtctgaatatactcacaggttttctttacagcacttttattttaataaatgtctcatgtcccatttatttctggtttactcccttcctttactctcttttttggaaagtctattgggcaggactagctctctctgcagcctgattggggctgatgatgagtaagaaccatgtattagtccatttttgcatttctgtaaatacctgaaactgtgtaatttatagagaaaagaggtttaattggcacatggttctgcaggttgtatagga

SEQ ID NO: 326991 - DNA, 597 bp, Homo sapiens
tatctgtgtcataggagtcactgttctattggtgtgagcatagcttcattttaataatcagtgattattaaggaaaaaatgaattttggattaaaacatatattaatattttatcaaaatccagcaaggagtaatttttgtgaaaattattaaaattttctatcctgataayttttctgaagaaaagagctaaaagatagttatataacaggactcttaaaagcattactgagattacatagggagataagtggaacaaaatgatagtttaattcaataagtcatttattgtaagatctctactaactatgcactttgctctgtgactggtctgaatatactcacaggttttctttacagcacttttattttaataaatgtctcatgtcccatttatttctggtttactcccttcctttactctcttttttggaaagtctattgggcaggactagctctctctgcagcctgattggggctgatgatgagtaagaaccatgtattagtccatttttgcatttctgtaaatacctgaaactgtgtaatttatagagaaaagaggtttaattggcacatggttctgcaggttgtatagga

SEQ ID NO: 326992 - DNA, 540 bp, Homo sapiens
ttcttatttgaatttctatcaagtggatgttctttggctatgttaggagtcatgcactctctctgacccagagtaaggatatatgtcaagaatttatggccacattctggcacttacaactctatcgaaatttccatttcatgataaagttgataatgcatatctccagttaggttttcttatccataaagaactgttcttaaaagctttctatacaacaaccggtttaactttatttctgcaaatcagttcagtcaggagtgtatgcttgtaactttgctaaaggaaaaaattacttatgtttttagaatgacaagagacaggcaacacaggataagtttttaaaaagctagaagcagttgctttcataaaatgaggaaagyacatacttttatctgagaggcaagctgttttccctctgataaagtggccataatcagataataaatgctgtggcccttggttaatcatttaaatgtatttaaaagtaagttagatagcctaagatatttttatattctcaatattaatattttaaat

SEQ ID NO: 326993 - DNA, 588 bp, Homo sapiens
tataacccaaaatgggattgctggatcaaattgtagttctattaatctccatactgttttccatgatggctataccaatttactttcccacacaatgtgtcagagkattaccttttcttcacatcatcgccaccaaaactgttttttaatagccaacctaacagatgtcaggtaatattcattatggttttgatatgcatttatctgatgattagtgatgttgagtaccttttcgtatatcaagtagccttttctatgttttcttttgataaacgtttattcaagtttttttgcccatttaaaaaattaggttatttgtatttttgctattttcttgtacaaaatccgtgtatattttggacatatgctccttaatgaataaaaggtttgaaaatattgtttcacattccacttgttgcattttactatgttgattgtttcctttgctgggaagaaagtttttggtttgctgtaattccacttgtttatttttgcttttgttgtttgtgcttgcttttggtgtcattaacaaactattactgcaaagacaaatataaaggagcattttccctatgttttcttctatga

SEQ ID NO: 326994 - DNA, 476 bp, Homo sapiens
gtaatgtggagttgaagccccatcacacagtccccaatgggcaccgcctagaggtgctgtgagaagagggccaccatcttcaaggccccagaatgatagatccaccgacagcttrcacaatttgccaggaaaaaccacattcaacaccagactgtgaaaacaaccaggaggagaattgcaccctgcaaagccacaggagcggagcttcccaaggccatgggaacccacctcttgcatcagcatgacatgtatgtgagacatggagtcaaaagaaatcatttcagagcttaagatttgactgccctgttggatttcaggcttgcatggggcctgtgcctttgtctgagccaatttctcttatgtggagtggctgtatttacccaatttcactgtacccccattgtatctaggaagaaactaacttgcttttaactttacaggcttataggcaggaagggcttatcttgtctctgatg

SEQ ID NO: 326995 - DNA, 617 bp, Homo sapiens
tttttattagggattttaaaaggggagggggtgtaaggacagggagtaagtcacaaagaacacatgctccaaaaggcaataaagatcacaaggcaaaggcaaaattagaattactgaggagggtctatgtcccactgtgcacatattgtcttgataaacatcttaacaggaaacagggtttgagaccagagaaccggtctgactagaatttaccaggctggaatttcccaatcctagtaagcctgagggtactgcagaccagggcgtatttcaatccttatctcaactgcataatacagacactcccagagcagctatttatagcccttccccccaggaatgcattccttccccagggtattccgygctgcgaaaagaattcagtgatatcctcttacttgcacgtctgtttataagctctctccaagaagaaaaatgtggctgtattctccccgacccctgaggcagtcagatcttatggttatcttactttgttccctgaaaattgctgttcttccatttttttcaaggtgtactgatttcttattgttcaaacacatgtgttttacaatctgtttatacaacagtggtcctgaggtgacgtacattctcagctt

SEQ ID NO: 326996 - DNA, 617 bp, Homo sapiens
tttttattagggattttaaaaggggagggggtgtaaggacagggagtaagtcacaaagaacacatgctccaaaaggcaataaagatcacaaggcaaaggcaaaattagaattactgaggagggtctatgtcccactgtgcacatattgtcttgataaacatcttaacaggaaacagggtttgagaccagagaaccggtctgactagaatttaccaggctggaatttcccaatcctagtaagcctgagggtactgcagaccagggcgtatttcaatccttatctcaactgcataatacagacactcccagagcagctatttatagcccttccccccaggaatgcattccttccccagggtattccgcgctgcgaaaagaattcagtgatatcctcttacttgcacgtctgtttataagctctctccaagaagaaaaatgtggctgtattctccccgacccctgaggcagtcagatcttatggttatcttacyttgttccctgaaaattgctgttcttccatttttttcaaggtgtactgatttcttattgttcaaacacatgtgttttacaatctgtttatacaacagtggtcctgaggtgacgtacattctcagctt

SEQ ID NO: 326997 - DNA, 576 bp, Homo sapiens
ggggtccctgacttcctgcaacaacagcctccagagtagttgggactaaaggtgcttgccaccaaacttggctatttttaaaattactttctagagagggggtcttgctatgttgcccaggctagtctagaactcaaggatctgattctgtgggaaaatagtttacacttgtattccaatactttttgtatttattatttgactttaatttgtctaggatttatttttgtcaaggattaatcattctcatatttgttacaatagaccttattaatttctgataaaatgtgttttatatatgagtattaattcaagttaatatgaagttgagtaaacacagggataagctatttcatttcagaagaattaagctaagaataattgaaaataaatgtagacaactaagttaagcctgacgagtgtttactgtcacctcaaataccttttaattctttctattggtattttacatttatttaagagaagataaatcatttaattcctaatttcaatgtgtggcttcaaaygtaaatgtccctgaacatggtacctcattcatcccaagatatagaatac

SEQ ID NO: 326998 - DNA, 571 bp, Homo sapiens
gttttataaggcagttttccctgctcttgctggctctctcttgcctgccactrtgtaagatgtgcctcttccccttccaccctgattgtaagttttctgaggtctccccagccatgcagaactgtgagtcaattaaacctctttcttttattaattacccagtctcaagtatgtctttatagcagtgtgaaaactgactaatacacaaatcttccctttttttcattctactaacctagcaacagttaaataaatagaatgctctccataccaaggacaatgcttgctatataggcgagttaaaaaaaatcgctatttttaacattgatatttgaaaaagttaatatgaagtgttacaggacaaaagtagatcaaaatattatttctttaggttgaagtgaggatgtgtttttcccttctgtgagggagaatttatctctacatttaaagaaaaacagtatcatctaattttttattaataaaatatggtttaatacaataacaatttagtggcaagaagaagaaaataagtagcttatgttgctccaactcttaatccctttattcatcc

SEQ ID NO: 326999 - DNA, 571 bp, Homo sapiens
gttttataaggcagttttccctgctcttgctggctctctcttgcctgccactgtgtaagatgtgcctcttccccttccaccctgattgtaagttttctgaggtctccccagccatgcagaactgtgagtcarttaaacctctttcttttattaattacccagtctcaagtatgtctttatagcagtgtgaaaactgactaatacacaaatcttccctttttttcattctactaacctagcaacagttaaataaatagaatgctctccataccaaggacaatgcttgctatataggcgagttaaaaaaaatcgctatttttaacattgatatttgaaaaagttaatatgaagtgttacaggacaaaagtagatcaaaatattatttctttaggttgaagtgaggatgtgtttttcccttctgtgagggagaatttatctctacatttaaagaaaaacagtatcatctaattttttattaataaaatatggtttaatacaataacaatttagtggcaagaagaagaaaataagtagcttatgttgctccaactcttaatccctttattcatcc

SEQ ID NO: 327000 - DNA, 571 bp, Homo sapiens
gttttataaggcagttttccctgctcttgctggctctctcttgcctgccactgtgtaagatgtgcctcttccccttccaccctgattgtaagttttctgaggtctccccagccatgcagaactgtgagtcaattaaacctmtttcttttattaattacccagtctcaagtatgtctttatagcagtgtgaaaactgactaatacacaaatcttccctttttttcattctactaacctagcaacagttaaataaatagaatgctctccataccaaggacaatgcttgctatataggcgagttaaaaaaaatcgctatttttaacattgatatttgaaaaagttaatatgaagtgttacaggacaaaagtagatcaaaatattatttctttaggttgaagtgaggatgtgtttttcccttctgtgagggagaatttatctctacatttaaagaaaaacagtatcatctaattttttattaataaaatatggtttaatacaataacaatttagtggcaagaagaagaaaataagtagcttatgttgctccaactcttaatccctttattcatcc

SEQ ID NO: 327001 - DNA, 571 bp, Homo sapiens
gttttataaggcagttttccctgctcttgctggctctctcttgcctgccactgtgtaagatgtgcctcttccccttccaccctgattgtaagttttctgaggtctccccagccatgcagaactgtgagtcaattaaacctctttcttttattaattacccagtctcaagtatgtctttatagcagtgtgaaaactgactaatacacaaatcttccctttttttcattctactaacctagcaacagttaaataaatagaatgctctccataccaaggacaatgcttgctatataggcgagttaaaaaaaatcgctatttttaacattgatatttgaaaaagttaatatgaagtgttacaggacaaaagtagatcaaaatattatttctttaggttgaagtgaggatgtgtttttcccttctgtgagggagaatttatctctacatttaaagaaaaacagtatcatctaattttttattaataaaatatggtttaatacaataacaatttagtggcaagaagaagaaaatawgtagcttatgttgctccaactcttaatccctttattcatcc

SEQ ID NO: 327002 - DNA, 471 bp, Homo sapiens
cttgttcaatgacacaataaataactttatataatattgtttgagtgttctttctacttaacaatactgtgtwctccttttcttcttcttcatgtatttgatgtatctctgttaggttgtacggatacaaagaagatttttttacagatcttaatgtgttattggagatgtagaataaatattcaaagagactacttcaggacctctttggaaaatggatggaataaacactcagtgtacttgagagagtattgtagttatttttagcttcagagctctttggtcaatatgacttaaatgtttacatgagtgtttaaagcaactgactaggctaatgtttttaaaataaacatactatcttcttcccctatccctccttccttctgtaccttgctatcttctttttttccttaattctttcctcttttcctgaaaaagtcagtctaaaaggtattccttaggggtgtcgag

SEQ ID NO: 327003 - DNA, 533 bp, Homo sapiens
tatctttcactgatttttatatgaaaaaatattattatctgtaacaattagaaactcaggatttttttctttcatgtttgctatttttatcctatattacaaattttcaattttccagttttattccttggatttttttttcttttgacaaaactattcaacatattggtaaatctttttaaactaaaatgagagacttctgttttacctaacaaatttgtttgttctgtatttactgtaagtgctggcatacgagttcttacttttgatcactgtttctgcttcttccttgtttccttatctattggctggctgtagttttgtctgtcttaaaatctatataattttttctcgattattgatgttgatcattgctttatttattgactgatttttttaagacagggtctcactttgtcactaaggctggagtgtagtggcatgatcactcagctcaccacacagcctcatcctcccagactcaagcaatcctctcatygcagcctcccaagtagctagggctacaggtatgt

SEQ ID NO: 327004 - DNA, 610 bp, Homo sapiens
ctagtttcctagggggcccaaatatcttaccgcaaaacaacagaaatttattcttttatagttctgtaggcaagttcaaagtcaaggtgcattcagggtcatgctccctttgtaggctctagggatgattctttccttgcctcttcctagcttctgttggctcctaagaatccttgcattgcagggcttgcttctgcatcatgccaatctctactttcatcttcaaatgaccttttctctgtgtctctatctcttgaatattcgccttctttattttataaagatgtggtcagtgggtttagaacccacactaatccagcctgacctcttcttaagtaagtacatctgcaaagactctgtttccaaataaagtcatattctggggttctaggtagacatgaattttgggaagatactaatcaactaattatagtctctatgaagcagataaaatayaagaaaacatttcaagcaagtaaagaatcttacagataaaccattttttaaaaggtaatatcaactcaatcattcaattgtcataaattcctagtaagactagtacacctacctgcaccagacttacctacactgactatcacagcacacaagg

SEQ ID NO: 327005 - DNA, 486 bp, Homo sapiens
gctttgaattcattgaacacaactgtctcatagtgaaatggagctctgaaaacactgattttccaaggtttcaaaagcaaagacttaattagaaaaaaatgcacgtgttcttaaaataaccaatactcatttttttttctagtaataacattaaactgcttatctttaaatggttaaaaagcttcctttatttaaaaaaatagagattgttgtttgtttatttatttgtattaagcctgacacggaggcaggatatcartaaacaacataaccagaggaatggtatataccaaacggggggaaaaatggtgtccttcttctgcctctaatgcctgtgtgcaggtttgagcaaattgatccggagtcataaattagcatctgttctcttccacacttccttgtaagaacaactggaggtatataaaatttagatgcttacatatacattttttttcttagttgacttttacttgaaatatttgtctt

SEQ ID NO: 327006 - DNA, 541 bp, Homo sapiens
gacctccaaactgcatggtgtacctcaaaagagcaagacccaagcaaaaaggtagagtcagcaaaacgctggcaggcttggggaagggctggagtgaacaactgtcccatgttatctggggtaattcatggaatacaggactttcattgttaaaactaggaaagytctaggcaaatcaggatgattttgttactgtagggagaactaaggggcaactatgatggagtggagattagaagaacttgtcctgatctgtgggcacctggtatgtcttcttcaactgggggttacatagacgggacagagtgttccagccatgactttgggggactcagattcaactttaagttgtttgaaaagaaacatccaaaggaatgtttttgcatagcatagcttgggccctgagattcatgcctaacacacaggttaaagaagtccacaattcctcaacaaaactttgggaccagacacatttcgggattcagaactttttgggttttaaagatataagagtaagtgttctttatattattacatggca

SEQ ID NO: 327007 - DNA, 645 bp, Homo sapiens
agaatgtaagcatttcttttcyttttttaatcttaggatttatggcaatttcatagaaatctgacagagttggataagaaactgtaatactgtatatgagatagagaagatatttgaggtggcggacggcggggggctgtccttgagcaaaactgaaataggccaagagtttcttctgaggctcagttttcataattcacaatctgttcccctcttctccagcctcttcccctgggtacctgtcatgaatcgttaccccaaacgaactgcatgagctaatttatctgaagttaggtaagatacattatgaatatcccttttttataaaagaggaaactgaggcttaaattaagcctggcttagagttgcacaactcgttactggcaagcacagggcttgaaaacaggttttctgctttaaattcagtacttttccatatgccagtgacgcccaaactagcatcggttttatttttgtctataaaatgatatgtacatagaattggcttttgcatctttttaaaatcagagatgtcgatggctactgttaataatatctgcgtagagggtctaataacctctcttttggggccattgtgataatggaattcaatgagatctatgaagcccccagcatggtgtctga

SEQ ID NO: 327008 - DNA, 536 bp, Homo sapiens
gatgcctgggttacagtcccatgcacatttaagttagagtggcacaagcaagtgctcctggggcaggccctgagatgctgcagttataaccagcacccaggtgaagccaaacgcaggtccacaggccacatatgagaaaatattagaagttcaaatcttggggtgctaccccagacttaccaaactatcagctccagggatgggtttcatctgtggttcaacaagccttccagatgattctgatataaattcaagtttgagaaccactggtctaaagcagttctcaggtgactrtgataaaagaacagtattttaaaaaataatgatctggaggaattgactggtaaaagaaccacattttaagaattaacaatctagaggaattgacacttgtgggaatgtatgaggaaaagaagagaaaatgaccctagatgatcacagttaccctcttaaactcttttactgggcagtaaagctaagctctggttttcccttgcaaaacaccagaaagaatccttgtcattttgaggctgctg

SEQ ID NO: 327009 - DNA, 570 bp, Homo sapiens
aggagtaactttatttgaaaagacaattgcaataaagagaatgctttgacctcaggatgaggaagtgtcttaaaattaagcagaaaaaggtttttcttatatagggaagggtaagcagagatggcagggactatatgggtgaggaggacaagcaggtgggtgaacagggggcaaaatcaggtacttcaacaagtaatgtttctcttgtggttagtcagttctcagaaggagctgttaagggaggatgtttcacagcttagtgctttaggccttgctcgaacttgggrgctagccaaagtttgggagcccactggaaggagagaagcctgattaaaatttggtcaagcaaaagttccgtggataagtaacagacaatcgtgagcacttggtcaaaaactatagtcatttttcgtgaaaataattatgtgtttataagcaatgagtctgttattttgtggattagtaaatatttttaaatgtctcaggtttaaattttatgcagtaaatgtcaagagatacaacccccataaacaaaagctctttggaggcctcaataatttctaagagtat

SEQ ID NO: 327010 - DNA, 560 bp, Homo sapiens
ccagcatctatggagataagcagcaggaaggcatagacaggctgtttagtgagccaccatgcagggaataagatgaagccatttccattttggcccattacactgaagagtggaatttcaggaagacatcctcyaaccagctctgaactgtttttacaacaccacttctggcaccaaatgtgtgcgttttcccttacaccaaccaattctccactctccagatacccacttggtattgtataatttgattccattctgacactaactacccagggttagcatagaccccacagattaaaggtgcagtcccacaagtctgggccacttgaacttctgatcaaccactctaaagccagaggggtcccatagacccctccttgggtttgataatttgttagaatggctcccagaacgcaagaaaacactttacttgctattaccagcttattagaaaggatacaacccaggaacgatcaaatggaagagatgcacagggcaaggagtgagaagggtgggtagggaaagacacagagcctccatatcctctccaggctcatcac

SEQ ID NO: 327011 - DNA, 560 bp, Homo sapiens
ccagcatctatggagataagcagcaggaaggcatagacaggctgtttagtgagccaccatgcagggaataagatgaagccatttccattttggcccattacactgaagagtggaatttcaggaagacatcctctaaccagctctgaactgtttttacaacaccacttctggcaccaaatgtgtgcgttttcccttacaccaaccaattctccactctccagatacccacttggtattgtataatttgattccattctgacactaactacccagggttagcatagaccccacagattaaaggtgcagtcccacaagtctgggccacttgaacttctgatcaaccactctaaagccagaggggtcccatagacccctccttgggtttgataatttgttagaatggctcccagaacgcaagaaaacactttacttgctattaccagcttattagaaaggatacaacccaggaaygatcaaatggaagagatgcacagggcaaggagtgagaagggtgggtagggaaagacacagagcctccatatcctctccaggctcatcac

SEQ ID NO: 327012 - DNA, 533 bp, Homo sapiens
tctagggccccaagagtcaatcattagcataaattcaggtatggttaaaaggggttcactatgaataaaaaaagatgttctttttaccccatcactcagagaatttcaagggttttagaagctcttgtgccaggacccagggatmagcaaatacatatttctcattgtatcacaatatcacatcagccttgctcaagtcacatacttatcccttggccagtggaggactgggcactgtgattgacattgtcaccaagaacaaggggaactgaggctgtgctggagaaaacgcagatgtcacaggagcacagaaacacaggcttccaggcttcataatagggtgcagatcagactctgagaaatctcaagtcacatgataacttttaacagcccaattcgtagcttagatgtaaataattcttagcaaccctctgttatggactggactgtatcccttaaaattcatatgttgaaggcctaacttccagtgtgactgtatacagagataggcctttatggatgtaattaaggtt

SEQ ID NO: 327013 - DNA, 697 bp, Homo sapiens
tctgttcccactaagattcaattatttttatttaaatttttatttttatcttagtgtctaatgccttttttacactatgggtggttataatagaataacttcaggttgttttaaaacttttctttgctgttatttctcagtaaagatctagaacaaagctttttttgtaaaatataaattactatgcaaatacaaaagattagagtctctatggcatctatcccattttccaaatgcagataccaccctactgtcactgtgaaaygcaaagttatttgaaaggttgagtgttaccttcttcaaggtattgcagtgagaaatacaactttttttgtgccacacattttcagcaagatggggaggaacaaactccctctagtcttctaccattaattcatttcaagagatctctctccccacctaaacataaaatgagtcggcaaaattcttcttgttttctctgcccccaccaaaataaaacttacccataagtgtctttaaatttcatgtatagctgaaggcatgcagaatctagtgaatcttagaattgtgaaaactctacttcaatcttgcaaaagccctgaagcaaaaatttaattcattattattcaatggcaaagcagaccccatctgacctgaaaacctggctctgaccgctatagacactgcctgcctctataaaaacactaacatgcat

SEQ ID NO: 327014 - DNA, 604 bp, Homo sapiens
tatttaaatttttatttttatcttagtgtctaatgccttttttacactatgggtggttataatagaataacttcaggttgttttaaaacttttctttgctgttatttctcagtaaagatctagaacaaagctttttttgtaaaatataaattactatgcaaatacaaaagattagagtctctatggcatctatcccattttccaaatgcagataccaccctactgtcactgtgaaacgcaaagttatttgaaaggttgagtgttaccttcttcaaggtattgcagtgagaaatacaactttttttgtgccacacattttcagcaagatggggaggaacaaactccctctagtcttctaccattaattcatttcaagagatctctctccccacctaaacataaaatgagtcggcaaaattcttcttgttttctctgcccccaccaaaataaaacttacccataagtgtctttaaatttcatgtatagctgaaggcatgcagaatctagtgaatcttagaattgtgaaaastctacttcaatcttgcaaaagccctgaagcaaaaatttaattcattattattcaatggcaaagcagaccccatct

SEQ ID NO: 327015 - DNA, 470 bp, Homo sapiens
aatcttgcaaaagccctgaagcaaaaatttaattcattattattcaatggcaaagcagaccccatctgacctgaaaacctggctctgaccgctatagacactgcctgcctctataaaaacactaacatgcatcttcactctaattataaaatttactttattatcaaattgttatatattaagctaagttctgatgacttcttaaaaacctatcccactcaaatattattgtgccatcaaacttaaaagaatcctctgaagatatttaggcaaaatgaaagttcacaaagctagtgagatctgaaactattattctgggcagaatatataaacattcagatttatattatcaccctctcaaattaaaagacaggaaaaggcctgatgygtctgcagtagcttgagttcctccataacaaagcacatgggagggcgggagtacgctccagtgatacagcatctcttaaact

SEQ ID NO: 327016 - DNA, 648 bp, Homo sapiens
ctaaactataagctctgtgcttgatttttctcaccattgtacctccaacattgaagcatggtgcctggtacctggtaagcactcaagaaatatttgcagaataaatgaatgcagcccacccagcatgttctccagagctcttccttcatggaacccctccataaagttcttggggactcctctactcagagataaagctattccaggccagtaaactgtccagggactacagaaggtaaacaatttagaaagcattttcactgatgttttaccttaaaatactcagcatcactgtgacccccatactatggtttgaatgacagtgttccctccaaaagtcatattgaaacttaatccccatcatagtggtattaagaggtgaagtctttttggaaattgattgagaggactctgtcctcccgaaatgattagtgccttataaacgggctagaaggaactagcttaggcccttkttgcccttccttcccttacaccatgtgaagatacagcattcaaggtgccatcttggaagcagagaccagggccctcagcagataccaaacctgcctatgccttgatcttgaatttcccagcctcccaaactgtaacaagtaaatttctatgatttataaattacccagtctctgg

SEQ ID NO: 327017 - DNA, 619 bp, Homo sapiens
attatccaccataacttttgaaaaaaacatgaaatggcattaatcattattttctactactaataatatactttcaatgcaaatttcaccattttccaaatatctagaaggaaattattctccttcaccaccctggcaaatcaccgcctctcctttattcttggtttgcatctgggagccttggtgactgatgttcattataacatgcattgccccaaagggaagatttagacttttaaagaaaaattgaactcttgaccctacattcaaatacctagaatcataaaaacattgggccccaagagagcttagaatcatttaatccagtccctcatttgtcagatagggaaataaaagttcatttggtaaattgacttgcccaaggtcacccagcccgttaagggcatatggggaaatggaaaccagagctcctgacttcaggtcgaatattcactcccatgcatagaatgagcagcacaacattacccttagaaatgarggctttgggccaggcaccatggttcactctataatcccagcactttgggaggccaaggtggccaggtgtggtggtacacacctgtagtccagctacttgggaggctgcgatgagaggatt

SEQ ID NO: 327018 - DNA, 619 bp, Homo sapiens
gtgtcatttaatgacaggaatacattatgagaagtgttttgctaggcaatttcatckttgtgtggacatcacacagtgttatatttacacaaacctagattggtccagcctactacattctgaggctatgtgtatagcctattactcctaggctacaaacctgtacagcatgtgactactgaatactgtagccattgtaacacagtgattagtatttgcatgtctaaacatagaaaaagatacagtaaaatatagtatagttttttttaaacagtatacctgtatagggcacttaccatgaatggagcttgcaggcctggaagttgctctggttgagtcagtgagtggtgagtgaatgtgaaggcctaggacaaagctgtatactactgtactgtagaattcataaacattgtacacttaggcaacactgaatttacgtttttaatttttctttcttcaatagtaaattaacatgagcttactgtaatttttttactttataagctttttttaactttttgactctttcataataaaacttagcttaaaacacaaacacattgtacagctatataccattttttgtatctttattctatatgctttcttattttcaatt

SEQ ID NO: 327019 - DNA, 619 bp, Homo sapiens
gtgtcatttaatgacaggaatacattatgagaagtgttttgctaggcaatttcatctttgtgtgracatcacacagtgttatatttacacaaacctagattggtccagcctactacattctgaggctatgtgtatagcctattactcctaggctacaaacctgtacagcatgtgactactgaatactgtagccattgtaacacagtgattagtatttgcatgtctaaacatagaaaaagatacagtaaaatatagtatagttttttttaaacagtatacctgtatagggcacttaccatgaatggagcttgcaggcctggaagttgctctggttgagtcagtgagtggtgagtgaatgtgaaggcctaggacaaagctgtatactactgtactgtagaattcataaacattgtacacttaggcaacactgaatttacgtttttaatttttctttcttcaatagtaaattaacatgagcttactgtaatttttttactttataagctttttttaactttttgactctttcataataaaacttagcttaaaacacaaacacattgtacagctatataccattttttgtatctttattctatatgctttcttattttcaatt

SEQ ID NO: 327020 - DNA, 619 bp, Homo sapiens
gtgtcatttaatgacaggaatacattatgagaagtgttttgctaggcaatttcatctttgtgtggacatcacacagtgttatatttacacaaacctagattggtccagcctactacattctgaggctatgtgtatagcctattactcctaggctacaaacctgtacagcatgtgactactgaatactgtagccattgtaacacagtgattagtatttgcatgtctaaacatagaaaaagatacagtaaaatatagtatagttttttttaaacagtatacctgtatagggcacttaccatgaatggagcttgcaggcctggaagttgctctggttgagtcagtgagtggtgagtgaatgtgaaggcctaggacaaagctgtatactactgtactgtagaattyataaacattgtacacttaggcaacactgaatttacgtttttaatttttctttcttcaatagtaaattaacatgagcttactgtaatttttttactttataagctttttttaactttttgactctttcataataaaacttagcttaaaacacaaacacattgtacagctatataccattttttgtatctttattctatatgctttcttattttcaatt

SEQ ID NO: 327021 - DNA, 542 bp, Homo sapiens
ttatatatgaagaatcccattaacagttatcttatgctccaaccactccgaacagctgctgaataatttggaagcaattgtgacatcagaaaaagtcttggattttgagatactggacaaaaaaaaaaaaactgaaggaactgtggatagcattcttgtatttaatccctgggaaaggtaagaaatttgaaagacaaaagaggaatgagagtccaggaaatgaattgcaagtattattagatgggkacagagaatggagtttgccatcctgaatggttgttcaaattctcagaacaacagacccacctggctagggaaaagttcgtctatataagaacccactgtctgtcaacaggagaaagaataaacaaatgttatagtcacataatgaaatactcttcacaattttctttaattaagtactaaacacacaacacatggatgaattgcaaaaacattgtgagtaaaagaagtcaagtacaagagcacatatatatacaaacatatacatatatgaagaagttctgttaagagacaaaact

SEQ ID NO: 327022 - DNA, 542 bp, Homo sapiens
ttatatatgaagaatcccattaacagttatcttatgctccaaccactccgaacagctgctgaataatttggaagcaattgtgacatcagaaaaagtcttggattttgagatactggacaaaaaaaaaaaaactgaaggaactgtggatagcattcttgtatttaatccctgggaaaggtaagaaatttgaaagacaaaagaggaatgagagtccaggaaatgaattgcaagtattattagatggggacagagaatggagtttgccatcctgaatggttgttcaaattctcagaacaacagacccacctggctagggaaaagttsgtctatataagaacccactgtctgtcaacaggagaaagaataaacaaatgttatagtcacataatgaaatactcttcacaattttctttaattaagtactaaacacacaacacatggatgaattgcaaaaacattgtgagtaaaagaagtcaagtacaagagcacatatatatacaaacatatacatatatgaagaagttctgttaagagacaaaact

SEQ ID NO: 327023 - DNA, 542 bp, Homo sapiens
ttatatatgaagaatcccattaacagttatcttatgctccaaccactccgaacagctgctgaataatttggaagcaattgtgacatcagaaaaagtcttggattttgagatactggacaaaaaaaaaaaaactgaaggaactgtggatagcattcttgtatttaatccctgggaaaggtaagaaatttgaaagacaaaagaggaatgagagtccaggaaatgaattgcaagtattattagatggggacagagaatggagtttgccatcctgaatggttgttcaaattctcagaacaacagacccacctggctagggaaaagttcgtctatataagaacccactgtctgtcaacaggagaaagaataaacaaatgttatagtcacataatgaaatactcttcacaattttctttaattaagtactaaacacacaacacatggatgaattgcaaaaacattgtgagtaaaagaagtcaagtacragagcacatatatatacaaacatatacatatatgaagaagttctgttaagagacaaaact

SEQ ID NO: 327024 - DNA, 395 bp, Homo sapiens
ctcttctgacagtgttctctaatcacctgtgaagtagaacacagttgcagcctaactctgttcagtcctcactggacrccccgcatctatacctcccttcggtctattctccacacatcagccagagtggtcctctgaaacataagtcagatcacatcacttctcaggtcaaatggcccctatttctctcaaagcaaaaaccaaagtcttcacagttgtctacaagaccctatataatctggccttctgttccctctcaaatctcttttccagttactatccacccccctaccctcactccactccaacctcctcactgtctgtcaaacatgctagtgtgctctcagcccagggcctttgcaccagctatttgttggcctcgaatgctctcttct

SEQ ID NO: 327025 - DNA, 596 bp, Homo sapiens
ggattccagccttgcatattgtatcagttagaaaatgtgctcaattgtgaggagcagagacctgaaaacagggcttaaacacactagatgtggtacaggggctctgcaacctcattgtagactttccatccctcttctctgacatctttgagttgtgactyctttcctcaaggctgcctcatacatataaagtggctactagaactccaaacggcattttctcattcctagtaggaagaagggaaaacacaaggaacaaaaggagcatgccagctgagtcattgcctatttttaaggagcattaccagaagacacacccaacaacttatgtttgcatctcattggctaggatttagtcttatgcacctctcatcttctaggaatcctgggaaatctagtatattttaggtaagcaaactacttctccaataaaatcaacattctatataagaaaaaaggtgatagtcaatattgagtaggtatctctcagtatcttctccagataaatacttaatttctgcaatagaggaatcaaaaaattatgagctattgtcgtagctcactaatgattttctagttacttttgcacaaacctg

SEQ ID NO: 327026 - DNA, 591 bp, Homo sapiens
ttcaaatgaccaagtgcatagtcacttgagacaaagcaatgaaaaacacattcatgcacacacactcccacatttttcctctcttccaagttcaatgctttccttttgttctctaagcaaaatagaccccacacccacacagagaaaggtaagccttcgatttttggtctgactttttttcctccttcatggagatggctctatggggctttcaacttgtcagatataatctattctggccacacagtcttgagagmacgacagccacagaatctgtggtgtcagatgaaaatgttgtagaatgcaagtgcaaagcattgcagaggtgatgaacatgaggttctccctccctgagaaggaatgaacaagatccggacctggaagagcagttgcaaaaaatgacaggggcctctgtggacagagtgtagcccagagcctcagctggccaagtggacaattcccaaaggctgcaagtcctcacatctctctgtcattcccactgagacattttgaaaagaaggtcaaatagcccttcatcaggatatgctgattcagacagacaactaagccgaggtggctttggtgaacaca

SEQ ID NO: 327027 - DNA, 596 bp, Homo sapiens
atttagaggaaggggactgcccagtgaatgagtgcccagcttataccaggtgcaccatcctcagaggctaaggcagtttgttcaattccagacagtcccctgactgggaagtcaatgtccctaatgatttccttctttcggtctggaatgattcagaactgggttagattgagcctttctttttggcagacagtcagcagtcatcttctttcccctttttaaaatgcctgtagaataggaatactgttatggaaattagttagcagctgctctacrcgaatgtttagaaaattaatattactcacattatacagtatggaagcagaattttaatgaagcacagaaactacaggcacattgaccctttccccttatcagagaaatctcagaatgcctcactttccttgagaaaacttctcatttccactaggcttctataggcttattagtgacaaaaatagcacattcacaacccaaaggagcaaatatttcagaacatattgtactaaaatatgacagtgtcagctaaaccattatctatacttatttctcattattaattcttaacagttagctgttctttgttgcatggtaac

SEQ ID NO: 327028 - DNA, 582 bp, Homo sapiens
ggcagcaaaataatcaagaatttcagagtcagaagatcgtggctgttgtttgtaacatgttgtcagcttaacttctgttcaatgtttttatatttgaagcaggataactaaataatatgtgctgatggcccttcccttagtcacagaaagtttttaggtatttcttaagctcctccttcacctgattttgattcagaggcaaattctctactacaaaggacaggtatctgattcatccattctatagatatgtgtttaaatgaactaaatgtttgtgattccccaaaatttttatgttgtaatcctaatccccaatgtcaaggtatcagagatggggcctgtggaggtcacttggtcatgagggtggagccctcataaataggactagtgcacttacaaaagggattccagagagctagcttgccatctttccaatgtgtgagaatataatgagaagacagccatctctgaacgaggaagtggccctcagcagacaccaaatcttccagcaccktgaccttgaacttcccaactcccagaactgcaagaaataaaggtctgttgtttaagcaacccagtcta

SEQ ID NO: 327029 - DNA, 591 bp, Homo sapiens
aacattacatggggtagtcagcaaagatctaaactgagacctgaatgacaagagtcaatcaaaggggggaagttgtctaggcaagacaacagcaacagccttaatggtgtcttcactgcttgcatatgtygtgtatatgaacattcttttgtgcctccttccctgcagaacacatttctcagattcttctgaatgtgtacattggtattccacctctctatggcatcttcatctctaactcttccttcatccttcccaacacgaggaaatgccttcccacaaatactattttgaacccttttcttatcctgttatcagtccttctctaggttgttttaatctaacattgaaatatatattggttaaaaccaagaatttttttattacttgaatttttcaaaaaataaacaagcttcagtaacaaccatgtattcccgtcccacagtcacaaactggataacttgatttttttgccctttacccccagcatgtgtaaatgagggattgcttcacctaccctatgtagctaccatttctccacctcaaagatacaaaactgtaggcctctaatcatagaaaatcttgtgaatc

SEQ ID NO: 327030 - DNA, 591 bp, Homo sapiens
aacattacatggggtagtcagcaaagatctaaactgagacctgaatgacaagagtcaatcaaaggggggaagttgtctaggcaagacaacagcaacagccttaatggtgtcttcactgcttgcatatgtcgtgtatatgaacattcttttgtgcctccttccctgcagaacacatttctcagattcttctgaatgtgtacattggtattccacctctctatggcatcttcatctctaactcttccttcatccttcccaacacgaggaaatgccttcccacaaatactattttgaacccttttcttatcctgttatcagtccttctctaggttgttttaatctaacattgaaatatatattggttaaaaccaagaatttttttattrcttgaatttttcaaaaaataaacaagcttcagtaacaaccatgtattcccgtcccacagtcacaaactggataacttgatttttttgccctttacccccagcatgtgtaaatgagggattgcttcacctaccctatgtagctaccatttctccacctcaaagatacaaaactgtaggcctctaatcatagaaaatcttgtgaatc

SEQ ID NO: 327031 - DNA, 516 bp, Homo sapiens
ccccctgtagaaattttaggacaaatccctttcagggattttgaataattttgaaaatccaaaraaagctatggctcctgtcactccctcaaccccctaggtaaatacacataagcatacagaaggtaattcaattatatgtaagggaagcattcctgagaacctattataacttaaaatccctatttttcagcaccaatttcccttaggaacaccatagactcctgtgaggcagcacaacactctacaaagactatctgcttcctgtaacaactcaaatttcccaattttgcagataaggaaaatgatgcatagagagtttaagcaacttcttaccatcacccacctcaaggaactgacagagtagacctggaagtcatgcagtctatctccaaagaccttggacatacatataaccaaagtgagatgctgcccccactcccatccctcttctagtaatatatcctttctaccaaaaaaaaaaaaaaaaaccgaaaaggaaaagaacctattcta

SEQ ID NO: 327032 - DNA, 595 bp, Homo sapiens
tcttgccttttttcaggaaaactgtcggggggtaataagccaagttgggttatagatggggaaatgtatttaagatttatttttttctaaagcttctgacaataaaatcatacttttctcaaacaagattaataccaactgcttgaagggcatttttcaaataatattcttcccattggaagagattaggatttttcaagaaattgaaagagaattgcttatgtccagaaatgaggaaagttaacctgtttcctccttacctgtttatgagccagttccaacagaattaattgtgctattcagtttccaagattaatatttggttttatcagtgacccaaactctaaaattctgtatcaaaataaaataatctcagtattttcatgtactttacaaattcaaaacaygtatatatatatttgccctaagaattgcaagtcctaaaagccctcaagaatggcatctctcatattcacctaaaaaatttatcaagtactcctttcacttttcctgggggaaaatctacagaaataataattattgattgttatttatgaattaaataattcatcagaatcagcactgccctaacacc

SEQ ID NO: 327033 - DNA, 614 bp, Homo sapiens
attgtttccacctctaaaaatcacaggtttactaacttcttctaagaatctagacaaagaggccttctaagaaatgttttcgatggtgccacctggtggattcatcctaaaagtgctatctgctcttgctcacaattaaactgacttaagaggacaaattctcatacataatgagatatttgacccactaattttttcccccagctttcctttattttctctctaggcatcctcagcctcccttccattccactacaatcaactgatccttggagttcccatttcatttcatagcctttctgctgcattagagcaattttacagcaagatttacaacaatrtcaggaataaagaaaactgttgtaaaatagccatggacaacattacaaactggcaataaaatcgaccataatgcacagctggtatttatgtaagccacctgttccatttttagctactcctgatccctgcttttatcccattcactgtgctttgaaataccttttacttgtctccttctcctctaaaggtcttcagaactgataagttccagaatttgctgagccctcatattggggtacccttgctcatctatgagcccaaaggcccaacat

SEQ ID NO: 327034 - DNA, 453 bp, Homo sapiens
cctgtggtcccagctacttgagaggtgggagcattgcttgagcccaggaggtcgaggctacagtgagctacgattgtacgactgaactccagcctgggcaacagagtaagaccctgtttcaaaaaaaaaaaagaaaaaaggcaattcaagctacacatagtggctcccttccaaagaatatgttatgaaaagagggaaaaaatgagagtggggaaacctgaaaactctgcctcaaggccagcatccatggtgataagccatgctgatagtgcgtacycttgatatgatgtcatgagaatgggattttacctctgtgctcttcttccacaaaacaaataacctctatctaatcgtgaggaaaatagcagaagcattccaacagagggacattctacaacacccctgaccagtactcttcaaaactgtcaaagtcataagaaataaggaaagtct

SEQ ID NO: 327035 - DNA, 597 bp, Homo sapiens
cctacttttttcaaccaaatctgtaatattcttccagcactcagaaacactcaaagtccgttcaccccagctgccagctggggaactccatccaagaaggatcctaaccacttcgtaagcatctcatttactgccatgctyacctccctctaagccagtggaaagatgatccgtgaagcttaaaaacaaacaaacaaacaaaaacccattcaacagcaacacatttagaataacaatatgttctgaaaaccaccacaacatgtgtgatttttttttctaattaaactgacaccccactttgaaaaaaaaacaaaagaaagaagggaaaacagcttcaagtgataattgtcttttctttgattgtcaaaagtgatataaaaaaaggaaaaaagtaacttaccagttagtaaactagaacactattaattattcttggaacatacaccacattgacctgaaagtttccaaggtggagtgatttacaacagcagtgaatcctctcgttctattgcgaatggtcctcagacagagctcgctcaggaagaggactgacgaggaggctttcccggagaagtagcagaagtagcaggcttttat

SEQ ID NO: 327036 - DNA, 348 bp, Homo sapiens
atgaagggcagtggtctctgagagaaaggatgaatctaggtgaattgtccctagctcgtggcctggagagagtttctgggctgtagtgcggggagaggaaatccaaggagkgcccagagacctccctgagatgaggagagagaaatagcataggtaataaaattactagaccaggatatttaaagttattttaatgtattctgtatattcaacaggctacaagaaacactgaacatactaagtaaagacatagaatacataaaaaggcccacagtgtccaaggtgaaaaatgcactggttgggataaccattagaagaaacgatttgtgagcttgaagacttagcaat

SEQ ID NO: 327037 - DNA, 586 bp, Homo sapiens
aaacagagagggtggaagcaacagaaagagggaaaaggagaaaattaggaaagtgtgagacccaggaaagttagaagagaggaagataattaaaacaaacaaacaaacaaacaaacaaacaaaactacagcctgtaagaagaccactgcagctgagcacttggtgagacacttcttgctgcctggcggagctgaaatcagatgcctgacatcatccatgagacaagaccagaacatctggacgagatggagtaacgcaggcttcattgattctctcacctcaaaaaagaaagagaaaatatatgaaataatggttttcaagatattgggcattaggcaatgaagggcagtggtctctgagagaaaggatgaatctaggtgaattgtccctagctcgtggcctggagagagtttctgggctgtagtgcggggagaggaaatccaaggagtgcccagagacctccctgagatgaggagagagaaatagcataggtaataaaattactagaccagkatatttaaagttattttaatgtattctgtatattcaacaggctacaagaaacactgaacatactaagtaaaga

SEQ ID NO: 327038 - DNA, 504 bp, Homo sapiens
taggaattttttagctccgttatagtcttatgtggtctgtkgttgaccaaaatgttatatggcacatgactgtacatgaagacaaagccactagaagcctgcttcctagggccatgggcagaactgtactgaactggatgctggtgtggtacaccgtggccttctctgggggcaccatgagaacttgttggacctcatgctggatttcctataaggatgctcattatccaacacacagttgactctttgggagagaacctgaagagtacgttctccctggcctcagtatcaagaaattcatgtgctttttatacaagcagccaacacttactaaacatgtactatttacgtatttaaaagaaccatctttagtgccctacagccattatcttattgactcccttcaagtcttgagaagcgatgctatagtttttaccacttgacaggtagggtgttctcccttcctttttgacactttgattcttgtgacttttgaggctcatc

SEQ ID NO: 327039 - DNA, 504 bp, Homo sapiens
taggaattttttagctccgttatagtcttatgtggtctgttgttgaccaaaatgttatatggcacatgactgtacatgaagacaaagccacyagaagcctgcttcctagggccatgggcagaactgtactgaactggatgctggtgtggtacaccgtggccttctctgggggcaccatgagaacttgttggacctcatgctggatttcctataaggatgctcattatccaacacacagttgactctttgggagagaacctgaagagtacgttctccctggcctcagtatcaagaaattcatgtgctttttatacaagcagccaacacttactaaacatgtactatttacgtatttaaaagaaccatctttagtgccctacagccattatcttattgactcccttcaagtcttgagaagcgatgctatagtttttaccacttgacaggtagggtgttctcccttcctttttgacactttgattcttgtgacttttgaggctcatc

SEQ ID NO: 327040 - DNA, 572 bp, Homo sapiens
caattcataataaatctcctatgcatgtatctatatctcctactggctcagtttctctggagaaccctgactaattcactccccttatttccctttgttcctttcctcctggcayttaccttgaggcatcctgcatacagtcagtggggccaaatcctaaggttttcatttgctttgaatttctggtacctccttttcttggagagttgacaggccaaggcccatctgaaaaccatcagtgaagtatttacctcgattttcttttacttctgcaagtaacgtatctacctacctgaaggcatgaagtacccagctggcaattataattacctgcaaggtgaaagatatgattatattctcacatatttgacataagaccttatgctttgcttgtatcatcttgacactttacttagatgcagtgatgctccatctagatacatttcaatatatattggcaacaagcatccatttaagaccttatatattaggagtgactgatgaacatacgcccttctaccacttatcatatgctgggctgctcttttaaggagcaagacttggcttaaaca

SEQ ID NO: 327041 - DNA, 403 bp, Homo sapiens
attcaaatgaactaatgtgggactcaaaaatgtaaaacaactagaaaacaacacagaaggaagctctatgacattggtctggaaaataattttttggaaatgaccccaaaacacagrtaacacaagcaaaaattgaccagcaggattatatcaaaataaaaatcttctgtacagcaaagaaaacaatcaacagagtgaagagacaacctacagatgtgagaaaacatttgcaaatcatacatctgacaagcagttaatacctaaactatataaggaattcaaataattcaagtgtaagacaacaaacaatcttgatataatttggatgtgtgttccctccaaatctgatgttgaaatgtgacctccagtgttggtggtgggacctggtgagaggtgttggggt

SEQ ID NO: 327042 - DNA, 574 bp, Homo sapiens
aatacattgcaaccattatcgagtggccccatgtgctgaagcaccagggacaaagacatgagtgagtcagaggacaagcctagccctcttctcccagagcgcctggtcaaggaagtgtatcagaaggaagcagatgattctrctgcttgcacatcagtatcagaaggaagtcatcccagggggtggctttgaaaaaacagagaagggactctcacaagcccaggaggtcaaacaagatcctggagaagatgaggtcctacctcagagggtaagtgtgagtcaggccaagaaaaagaagagtacattgaggcagtagcaaaagaacaaaaatggatctcagagagcacaggaaaactcaagtggctcacacaggctggagcacaggatgtggaagcaagaggcctggatgaggttagagacataggagaagccggatcaccaaggacctcactgtgtcattcacaggtgttctttttacctagagcggcacttcccagttagttctctggaagacttgtttaagtgggagcggaacagtgagaacacttggacacagggagaggaataacacaca

SEQ ID NO: 327043 - DNA, 574 bp, Homo sapiens
aatacattgcaaccattatcgagtggccccatgtgctgaagcaccagggacaaagacatgagtgagtcagaggacaagcctagccctcttctcccagagcgcctggtcaaggaagtgtatcagaaggaagcagatgattctgctgcttgcacatcagtatcagaaggaagtcatcccagggggtggctttgaaaaaacagagaagggactctcacaagcccargaggtcaaacaagatcctggagaagatgaggtcctacctcagagggtaagtgtgagtcaggccaagaaaaagaagagtacattgaggcagtagcaaaagaacaaaaatggatctcagagagcacaggaaaactcaagtggctcacacaggctggagcacaggatgtggaagcaagaggcctggatgaggttagagacataggagaagccggatcaccaaggacctcactgtgtcattcacaggtgttctttttacctagagcggcacttcccagttagttctctggaagacttgtttaagtgggagcggaacagtgagaacacttggacacagggagaggaataacacaca

SEQ ID NO: 327044 - DNA, 603 bp, Homo sapiens
gccaaatgttaatagccaagacaacgggaaaaatgcctccaagtcatttcagagatctttgcagcagcctctcccatcataggcctgggtctaaaagggaaaaaatgtgttttttttgtatagccaagcctcatcttgaatgctttgctgcttagaaatttcttccactagataccctaaatcatctctctcaagttcaaagttccacagatctctagagtgaggcgcaatgccaccaatctcyttctttgctcaagtatagtgggagtgatctttattccttttcccaaaaagctcctcatctccacctgagacctccttagcctggacttcactgtccatatcgctatagcattttggagacaacctttcaacaagtctctaggaagtttcaaactttccctcatccttctgtcttcttctgagcctgccaaactgttccaacctctgcctgttacccagttccaaagctgcttccacattttcaggtaactttatagcaatggcccacttctctggtaccaaattttgtattagttcattctcacactgctataaagaactacctgaaaaactgggtaatttataaagaaaagaggttta

SEQ ID NO: 327045 - DNA, 603 bp, Homo sapiens
gccaaatgttaatagccaagacaacgggaaaaatgcctccaagtcatttcagagatctttgcagcagcctctcccatcataggcctgggtctaaaagggaaaaaatgtgttttttttgtatagccaagcctcatcttgaatgctttgctgcttagaaatttcttccactagataccctaaatcatctctctcaagttcaaagttccacagatctctagagtgaggcgcaatgccaccaatctccttctttgctcaagtatagtgggagtgatctttattccttttcccaaaaagctcctcatctccacctgagacctccttagcctggacttcactgtccatatcgctatagcattttggagacaacctttcaacaagtctctaggaagtttcaaactttccctcatccttctgtcttcttctgagcctgccraactgttccaacctctgcctgttacccagttccaaagctgcttccacattttcaggtaactttatagcaatggcccacttctctggtaccaaattttgtattagttcattctcacactgctataaagaactacctgaaaaactgggtaatttataaagaaaagaggttta

SEQ ID NO: 327046 - DNA, 550 bp, Homo sapiens
tttttgcttggtgtttgggtggggtagagtgtttgttgcccaaaacatttttgtcttgctaggtcgccctgtttctggtcctttggttaaaaacagaaaccttttcttggaactattttatctgtgcctaatggtgcccccaggttaccagctttttcagttacaattaaaggacatataaggcaaaaagaacatccaataaactcaccaccatgtcattcctcgggtgccaaagccacttttcagagtcatcttatgcttgttttatatayaacatccaaggtacttaatacatttatggcagaagaagaaaagtacatctactccatctcctcctgtatcatgtatcattggaaaatccttgaaaatgagacctgaggagattttgacatttatatgaactcactttgttttacgtaagtaggaagctagagagacgttgaaagtttatccaaattacacagctggtcactgctggatttgttgctagaagccaggtgacctgatgtttagccagaattctgttatctttaagtcccaccctgagata

SEQ ID NO: 327047 - DNA, 472 bp, Homo sapiens
actctttatactgagaatgggtatgactgagttatccaaatgaggtctcttcttggaagatgcagcatctgctttgagtgtgcctgcaagccctaccctcctgcactcctgtaaataaagtgcagcaccacatactctggtcaaggaagggctctgttcggagacaactgctgtattgcatctatggtggcataagagaagtctstaaatttccagcagtcctaaagagcagatgataaggtcacagaagacagtgactcaaggccaacgtcatgcaactcgcaggtcttccctaccctgcagccctgagctctgggcttatccccagaagtcccacctcttataagctttaccgggagcctaaaatcatgagaaacctcaggcttcctggataaagaccaagagagcatgccaaagaggacaccgtttctctaaacccaacctgtgaaggaagacctgggataaattactt

SEQ ID NO: 327048 - DNA, 603 bp, Homo sapiens
gggtatgcagtgcacaccccaccaagcaccaaccccaagggtgctccacttccaaaagcctctgtggttcaacttgtttgagatgcactccyaggtccaacctcctcttggagactcacagtgcatgcaagcattgtaaaggctctgagaagtcccaaagtacataaatccactcctcctgcaaattccttttgatttgagcatcccgtcatcaattttgcagagcatggtgagctaatttattgagagaatctgatacatttccatgctggtggaagagtccaataaaagagagctctgctccccatcttaggccattgtgttgcagacatgggacttcctttgtgtctaaggtcaagtttaaatatctttgcatttaaaaaaattaactggcacaagaagtagagtggggctctagagtttgagggaggtagacttcagcatcaagtcctaatgagaagagatttatcgaacaagaagaggcctctagcttggagtttagagtttctgtcttgagaagggacagtctctgagtgaggggatggtggacatacaggtcctgtgcacctgcagctaagcctcaggaaagactcaaatggacaa

SEQ ID NO: 327049 - DNA, 493 bp, Homo sapiens
ccacccaaatgaactgatattatatctcctcctaaaagtataggctcttctcagtgaccctacccatgcccccatccaaagcaagaaggtcttctctatgatctggccaagtcaggcatctttgcaagagctgggaacatgtaaggatctgcgaggtgcaataaagtgaggtgtacctgcattatgactttctaggtcataaattctcctttggtttgagattatttctgtagattcaagtccctgacaattgcagtggaattttaagcagagatttggccatacttctggaatcagattagcttccgaatttgatatgaccaggattacttcaaaggcagctgcggtttcataaaatagaggctccctgctgtaggcacttcttgtagagcttaggaatgcacccctgggggayggcaggcagtctgaatttcttccaccaggtcagagagtcaatgtcacagctaaaatctgcacctggggcgggacaact

SEQ ID NO: 327050 - DNA, 533 bp, Homo sapiens
tgaggaaggccgggtgcagtggctcaagcctgtaatcccgacactttgggaggccgaggcaggtgaattacccaaggtcaggagtttgagaccagcctgactaacatggtgaaaccctatctctactaaaaatacaaaaattagctgatcgtggtggcaggcacctgtaatcccagctacttggggggctgggacaggagaatcacttgaacccaggaggyggaggttgcagtgacccaaggtggcaccattgcactccagcctgggtgacagaacgagactctctctgtctcaaaaaaaaaaaaaaaaaagacaagaaaaattccagtgaggaatccaaaactgttttataacacaatttgtttatcttgtaaataccattttacatgaaacttatttattgtgtaaattcatgattttgatatcagaatttcctaaagcatgttcatatgttttctgcatagttttcaaaattaagatttagaaaaaccaaaaggcagtagtagtcctttggcccatgaatattattaaag

SEQ ID NO: 327051 - DNA, 533 bp, Homo sapiens
tgaggaaggccgggtgcagtggctcaagcctgtaatcccgacactttgggaggccgaggcaggtgaattacccaaggtcaggagtttgagaccagcctgactaacatggtgaaaccctatctctactaaaaatacaaaaattagctgatcgtggtggcaggcacctgtaatcccagctacttggggggctgggacaggagaatcacttgaacccaggaggtggaggttgcagtgacccaaggtggcaccattgcactccagcctgggtgacagaacgagactctctctgtctcaaaaaaaaaaaaaaaaaagamaagaaaaattccagtgaggaatccaaaactgttttataacacaatttgtttatcttgtaaataccattttacatgaaacttatttattgtgtaaattcatgattttgatatcagaatttcctaaagcatgttcatatgttttctgcatagttttcaaaattaagatttagaaaaaccaaaaggcagtagtagtcctttggcccatgaatattattaaag

SEQ ID NO: 327052 - DNA, 556 bp, Homo sapiens
aagtttttcacaaagaggacccaggcagaaaagctgatgagagtggcaggaggaataagacaatagtgattgcagggagtggaggttgagcagattcaaaaatatctgattgaatgctgtaatagtccaaggaatcagagggaactaatatgaggtcaattgtgggaggaggaacaggaagaaaatatgataaaccaggaagctctgyaagatgaaaggtacaataaaaactatcttgtaaactaattttcagataaaggtcacacagaacaccaatataattattttggggaaaagtatgtgattccttatttgaaaaattgagaagtggtgtttttattgtttgtttttcttttcctcttcagatacggaggtggagtagagctcccagataacttaaaatctctgtttcgcccagtggcaatgatggtgccccattatcaaatgattgctgaaataatattgttttcatttggtttcaaatctgcaaattcactctctggaaagctaactaacctttatgaattagcgcgcaaacagctctcacaacaggtaa

SEQ ID NO: 327053 - DNA, 569 bp, Homo sapiens
agacatgttttcataagaccagttctgtagatgattttggccattgttcccagctggatagcttgcaagcctagttctggccctcctagagatttttaaataaatcagtatgttattttttattttacattagcctaaattcatttcttttatttgcagctaaaaacctttactgatacagtacctttctctgattcaatgtctggggattggtgttgctcttattgttctagaccagtcagagcctatttctggagctggggatctgattaattccacccaaaccatatggctgctatccagtgagagagaggagggaaggacattgggatagccacccctaaaacagaatgttaatggtcttcagtgtctgcagagcagactcsctaatttgttctctgtgtttgttttcttctaccattgaagtgataccagtgacagtctttctgaagcagatgaaaccttgattgttatcgaggctataagagaagctagtttgccaaaatgtcctcctgaagatgtcccactttttgaaaatattataggagatatttttccagaagtgacag

SEQ ID NO: 327054 - DNA, 562 bp, Homo sapiens
attagtccccctttatctgcagttttgctttccagtttcagttactatggtcaattgtggcccaaaaataagtgagtatattacaataagatatttagagagacagatcacattcayataacatgtgaatgtgagtgtatttttctactgttctgttttattatgtcattgtttttcatctcttaatgtgcctcatttataaattaagctttattatagttatttatgtataggaaaaggcatagtatggtatatagagggtctggaactatatgtggtttgaactatacgtatcctctgtttgggcgggggcgggggcggtcctgaaacatattccatgcagataaggggacattactgcaccctactactgcttttccttctttctcttttctactgtccctccacctcatttttacttctttctgctttgtcttcctgacctgattaggcccttttgatagttacattctcccatttccatctagacagagggcagtatctttccatgggcattcagagctctacctccagcctcttctttccgctgtgctgttaattc

SEQ ID NO: 327055 - DNA, 498 bp, Homo sapiens
gcctaggagggggaaatgcaaaaggcctttgcttggtttgggtagcatggggagaacacatacaaattaatatcccagtaaattttctcaccattataataattttagtaakcaatctctttttttttttaaaagatagtgagaaaatttttctttggactagttcagtcaggagcatggagttgttttgatgaattcaatctaattgatttggaagttctctctgtcattgcctcacagatcctaacaattaaggctgcaaaagacaactattctgccaggtatttgtcgaatgtgtttataccttttgaattgaaatctgatacacacttaatgtttagttaattattgttaaatattttccccaataagtgtttaggtctttggggtgttttttttttaaagcacataccaaaaggaatggcagttaccttgaatgtttccattacttggcaaataatgtgaatatatttataactctaactttcaggccaactt

SEQ ID NO: 327056 - DNA, 526 bp, Homo sapiens
gcctttgcttggtttgggtagcatggggagaacacatacaaattaatatcccagtaaattttctcaccattataataattttagtaagcaatctcttttttttttwaaaagatagtgagaaaatttttctttggactagttcagtcaggagcatggagttgttttgatgaattcaatctaattgatttggaagttctctctgtcattgcctcacagatcctaacaattaaggctgcaaaagacaactattctgccaggtatttgtcgaatgtgtttataccttttgaattgaaatctgatacacacttaatgtttagttaattattgttaaatattttccccaataagtgtttaggtctttggggtgttttttttttaaagcacataccaaaaggaatggcagttaccttgaatgtttccattacttggcaaataatgtgaatatatttataactctaactttcaggccaacttagaagtacccaaattcttgcccaagctttggaacagtctcctgagctaccag

SEQ ID NO: 327057 - DNA, 526 bp, Homo sapiens
gcctttgcttggtttgggtagcatggggagaacacatacaaattaatatcccagtaaattttctcaccattataataattttagtaagcaatctctttttttttttaaaagatagtgagaaaatttttctttggactagttcagtcaggagcatggagttgttttgatgaattcaatctaattgatttggaagttctctctgtcattgcctcacagatcctaacaattaaggctgcaaaagacaactattctgccaggtatttgtcgaatgtgtttataccttttgaattgaaatctgatacacacttaatgtttagttaattattgttaaatattttccccaataagtgtttargtctttggggtgttttttttttaaagcacataccaaaaggaatggcagttaccttgaatgtttccattacttggcaaataatgtgaatatatttataactctaactttcaggccaacttagaagtacccaaattcttgcccaagctttggaacagtctcctgagctaccag

SEQ ID NO: 327058 - DNA, 589 bp, Homo sapiens
tcttgttgggatctaaccatcttacgtcacctcagggatttataatgatttctatattggtttgatgaatccaaaactggtttcagagagagaattgggagcctgtgctaatctgccatctyaccaaaaactgcataaaaccagtatttgaatgtagggattctgacttcagagacaataccaatatcttatctataatactacatgattttctgaatctgtttatccctccttacatatgttttactacttttcatgattacgcctttgtgtgattacaacttacacctggaattctgaacaggcttttttcactatttctaactcagagaatctttaaaatacgcgaaaacattcttctttaatagagaccctctagtggttctttacaatcatttttcctgtgatccttcaacacttgtatgatactaatttacttttgatatgttcctctataaatggtttttaatttgttccatgtgcatatctgctgttggtccaaatagactaaaaatgcctgctctttgaaaaattttctaaaatctaatagacggtgatgaattagcattgactagctaagatatatcat

SEQ ID NO: 327059 - DNA, 589 bp, Homo sapiens
tcttgttgggatctaaccatcttacgtcacctcagggatttataatgatttctatattggtttgatgaatccaaaactggtttcagagagagaattgggagcctgtgctaatctgccatcttaccaaaaactgcataaaaccagtatttgaatgtagggattctgacttcagagacaataccaatatcttatctataatactacatgattttctgaatctgtttatccctccttacatatgttttactacttttcatgattaygcctttgtgtgattacaacttacacctggaattctgaacaggcttttttcactatttctaactcagagaatctttaaaatacgcgaaaacattcttctttaatagagaccctctagtggttctttacaatcatttttcctgtgatccttcaacacttgtatgatactaatttacttttgatatgttcctctataaatggtttttaatttgttccatgtgcatatctgctgttggtccaaatagactaaaaatgcctgctctttgaaaaattttctaaaatctaatagacggtgatgaattagcattgactagctaagatatatcat

SEQ ID NO: 327060 - DNA, 589 bp, Homo sapiens
tcttgttgggatctaaccatcttacgtcacctcagggatttataatgatttctatattggtttgatgaatccaaaactggtttcagagagagaattgggagcctgtgctaatctgccatcttaccaaaaactgcataaaaccagtatttgaatgtagggattctgacttcagagacaataccaatatcttatctataatactacatgattttctgaatctgtttatccctccttacatatgttttactacttttcatgattacgcctttgtgtgattacaacttacacctggaattctgaacaggcttttttcactatttctaactcwgagaatctttaaaatacgcgaaaacattcttctttaatagagaccctctagtggttctttacaatcatttttcctgtgatccttcaacacttgtatgatactaatttacttttgatatgttcctctataaatggtttttaatttgttccatgtgcatatctgctgttggtccaaatagactaaaaatgcctgctctttgaaaaattttctaaaatctaatagacggtgatgaattagcattgactagctaagatatatcat

SEQ ID NO: 327061 - DNA, 550 bp, Homo sapiens
agcacacatgctacacccaccactgtgctccacaattttagaaaatccawtggtcaggataggggaggtatgaataggtcactatgcagacagaaaatagataaccactgaaaagatattaaaatatcccagaagaatccaagagtagagctaggatccatatagccactactgctaagaggtgctctgacaaatacctgccctaggaatggcctcaaagtcccatgaaggaaaccaatggtgcctaatcactgtactctccccaaaataacacacaaatattcagtaaagtagaagcagaagtagaaatctcttttaaagtctggatcatatatgtactaatggtggatgtgttgacatgaggtgcaacctggagtggggaaagcaatggtcagtgctcctccagtagactgacaaggtcatatacatattttgtcccactggcacatagtaaagtgtctggcatattacaggtgtgcagttcattttagataaatctacttgggttgtatgctttggcctggaaatgtacaaattgtttggagtccca

SEQ ID NO: 327062 - DNA, 550 bp, Homo sapiens
agcacacatgctacacccaccactgtgctccacaattttagaaaatccattggtcaggataggggaggtatgaataggtcactatgcagacagaaaatagataaccactgaaaagatattaaaatatcccagaagaatccaagagtagagctaggatccatatagccactactgctaagaggtgctctgacaaatacctgccctaggaatggcctcaaagtcccatgaaggaaaccaatggtgcctaatcactgtactctccccaaaataacacacaaatattcagtaaagtagaagcagaagtagaaatctcttttaaagtctggatcatatatgtactaatggtggatgtgttgacatgaggtgcaacctggagtggggaaagcaatggtcagtgctcctccagtagactgacaaggtcatatacatattttgtcccaytggcacatagtaaagtgtctggcatattacaggtgtgcagttcattttagataaatctacttgggttgtatgctttggcctggaaatgtacaaattgtttggagtccca

SEQ ID NO: 327063 - DNA, 479 bp, Homo sapiens
tttagaatacatagaattacctgcagtttgttaaattacagattgtaacacctcatccttggagattctaattgaataggtttgggatgaagcccagaatttttcacttttaatgaaaattaaattatcctgagttattctaatacatgtcatttttacaccaacctttgagaaattctgatgtatgtatattaacatattaactccttattatcttgagatggggaggcttaattattcatctctgtaaaagagctgagtaatatatcatcagcttattggcactggtttccttaactatcaatagtagtcagggagaaaaccaaataayagagctatgctgggggcacagtgtaggttctaaaagagagagacaaaggtgctcatgtttcaaccaggtcccagcaaatagtaatcaattcctactaattcccaccctcatcacaaagtaagcaagtcctaggctatttccaattatt

SEQ ID NO: 327064 - DNA, 587 bp, Homo sapiens
tgtgaccttacctggagcttagtcaacttagatagctgagcaaaatacaggggtagaggaagcagcaggaaaagcactgtgggctcactgggtcccctagcaagccatttctgccttgcctcacaggggtccttgctgggggctgacagaggcattgagaaaaggccacagggagaagaaaacctctagctcaactttgtaacaatttgaactgattgagaagtctcctggtcagaactcagggaagggcgtgaatccagtgtgcagactccataggcggaggaagcatgaaagccctacttgcttttgcagctgggagatgggtagccggggcaagttctcagccctgctcaccctctgcctggaaacagacccggtgctattgcggggacacagtgggagtgagactagccctttgggttgtgtgggagctgggtgaggcctgtgactgytggctttcccccacttccctgacaacctgcatgacacagtagaggcagccataatcctcctaggaacataactccattgatctgggaaccatactcctatcccccacagcagccacagcaagacccgcccaagga

SEQ ID NO: 327065 - DNA, 515 bp, Homo sapiens
tatttgcacacacatgttcatggcagcccaattcacaattgcaaaaacatgaaaccaacccaaatgcccatcaatcaacragtggataatgaaactgttgtatatatatgtatactatggaatactacagccataaaaatgaattaatggcattcacagagctctgcatgagattggagactattattctaagtgaagtaactcagtaatggaaaaccaaacatcatacgctctcacttataagggggagctaagctatgaggatgcaaaggcataagaatgacacagtggactttggggatccagggggaatgggtaggaagggggtgagagataaaagactacaaattgtgtgcagtgtatactgctcaggtgatgggttcagcaaaatctcgcaaatcaccactaaggaacttactcatgtatccaaataccacccgttccccaataacctatggaaataaaaataaataaataaataaataaataaatttcttaaaaatgtgagactgtgg

SEQ ID NO: 327066 - DNA, 524 bp, Homo sapiens
ttgctataaagaaatatctgaggctgagtaaattataaagaaaagaggtgtatttggttcataattctgatggctgaaaagttcaagatttggcacctggtgagggcctctggctgcttccacacatggcagaaagtgaaagggagctgccatgtgtagatgtaacacggtaagataggaaacgagagatgggcamgatgccaggctttttttaataaccagctcttgaaggaactattagagtgagaacacattcacccctgagggaaggcattaatctattcatgaaggatcccccacaagatataaacacttctcattaggccccatctccatcagacatcaagtttcaacatgatttatgaaggtgacaaatattcaaactgtaccactgtgtactttcaaatagcctgtctttgagctcactggttgttctgatggatctgctattaagaccctctaatgcattattttaaattaagtttttatactagacttacagcgtacatgtacaggtttgtgac

SEQ ID NO: 327067 - DNA, 545 bp, Homo sapiens
tcccaaatttctgcccatgtgtacttaagatttacctgttacttgtaagtgagaacttgtgatatttgattttccgtttcagtgctaatttgtataggataatagcctccatctgcatccatgttgctataaaggacctgatttcattcttttttatggatgcakagtattttatggtgtatatttgtgacattttcttgatccagtccaccgttaatgggcacctaggttgatttcatatctttgctactatgaatagtgcttcaatgaacatatgaatgtagatacctttttggtataatgattaatttttctttgggtacataccctgtaataggattgctggggcaaatggtagttctatttttagttctttgagacatctccaaactgctttccacagtgactgaactaatttacattcccaccaacagtgtataagtatgcccttttctctacagcatcaccagcatatgtttttgttttacattttagtagcagcctttcaaattgatgtgaaaccaattcattgtggttttcatttc

SEQ ID NO: 327068 - DNA, 643 bp, Homo sapiens
agttacccagactgtggtattttgttgtggcagccctagcaaacacataactaccaatccagtagaactgataccaacttcacttcaatagcagacattaattctactccttcccagctctgttgcctgctttatgttgttagtgtcacaaactatatctttatatattgtgtacccattaatatagattcattattattgtttatgcatttatttttttaattwtataggaaaaaaagaggagttacaaatcaaaaataaagtaatagtggcttttatatttaccttaaccagagatctttatttcttcaaatggctctgagttactatttattgtttttttcatttgagcctgaagcatttatccctttattcataccttcagcattttcagtagggtaggtttcccagggatgaactatttagcttctgtttatctgagaatgccttagtttctccctcactttcataagatggttttgctgcatatagaattcttggttgacagttttggtttttagtttgtttcagcactttgtatcatcccatgccttctggcctttgtgctttctgatgagaattgacttttaattttgctgaggatcccttgtattgcctctctcctgctactttcaagattttg

SEQ ID NO: 327069 - DNA, 642 bp, Homo sapiens
aataatccttttaatatactattgaatttggttttattagtcttttgaggatttttgcatctatgttcatcagggatattggtctgtaattgtctgttcttgtaatgttcttttctggytttggtattaggataatgctggccttgtgaaatgagtttggcagtattccctccacttcaatgttttggaagagttggagaaggagtggtattagttcccctttaaataattggtagaattcagcataaaccatccaattctgggcttttctttgatgggtcactttattactgattcaatttctttactatgattggccattcctattttctatttagaagaaaatatttacttttcaaaagtattaacaactagattcatttatttaaatgagaaattctacccatggccataccaccctgaaagtgcccaatcttgtctaaatgagaaattcttacatttatttttaaaataaccaaattttaagtcgattttttttatataaagggcagctataaactattttccttcaggaaaaatgcacctaaaacatacaaataaagctttccataatattggtttttgttggcttagaaatatatgtccttattatcaaatgtaaaaatactctattcttctttt

SEQ ID NO: 327070 - DNA, 590 bp, Homo sapiens
tatttctgtgcaattatttttgttacattgaacctaaatcagaatggcttccttttttttttttttytttttgagatggaatctcgctctgtcaccaagctggagtgcagtggcacaatcacggctcactgcaaactccgcctcccaggttcacaccattctcctgcctcagcctccctagtagctgggactacaggcgcccaccaccacgcccagctagttttttgtatttttagtagaaacagggtttcaccatgttagccaggatggtctcgatctgacctcgtgatccgcctgcctcggcctcccaaagtgctgggattacaggcgtgagccaccatgcccggccagaatggcttactttttaaacaaatatagaaattcaaatgcacttttctctctgttcaggtccttctctggaaatcataagccctatatttcagaactgactgccacttaaactttctaggcctcagattcctcatctataaaattaagtggttgcattacaaatggtttcatgtctcagacaaacttgggcccaggatcctgaataaggcaaactggcatgtgagcgctatcaggtcaga

SEQ ID NO: 327071 - DNA, 590 bp, Homo sapiens
tatttctgtgcaattatttttgttacattgaacctaaatcagaatggcttccttttttttttttttttttttgagatggaatctcgctctgtcaccaagctggagtgcagtggcacaatcacggctcactgcaaactccgcctcccaggttcacaccattctcctgcctcagcctccctagtagctgggactacaggcgcccaccaccaygcccagctagttttttgtatttttagtagaaacagggtttcaccatgttagccaggatggtctcgatctgacctcgtgatccgcctgcctcggcctcccaaagtgctgggattacaggcgtgagccaccatgcccggccagaatggcttactttttaaacaaatatagaaattcaaatgcacttttctctctgttcaggtccttctctggaaatcataagccctatatttcagaactgactgccacttaaactttctaggcctcagattcctcatctataaaattaagtggttgcattacaaatggtttcatgtctcagacaaacttgggcccaggatcctgaataaggcaaactggcatgtgagcgctatcaggtcaga

SEQ ID NO: 327072 - DNA, 405 bp, Homo sapiens
  misc_feature (1)...(405): n = A,T,C or G
aaacctatgcaggtcaataatgagtaataaagagttttccatcaaagaaaagcccaggatgtgatggcttcactgctgaattctaccaaacttttaaagaagaactaataccaattctactcagattcttcaagaaaatgattcccaatgtgttctatgaagctggcattactctgatatcaacaccagataagaacacaacaaaaaaggaaaccactgactaatatccttgatgaacatagatgcaaaaattctgaatgtaatactagcaaactgaatttaacaagacattaaaaagatcattaaccatgatcaagwgggattcatnccagcaatgaaaggattgttcaacatatggcaaacagtaaacacgatatatctcatntaacaaatctgggacaaatc

SEQ ID NO: 327073 - DNA, 600 bp, Homo sapiens
agatctcacctaaggtcaccctgctagttaagtggtggagtcattattcaaacctaggatatctaatgacatatattttcgaattatcataccataccacccctcaatcttcatttagccatttgcsaaacaaacatcttctaaatgcctatcaggaattcccagtgccagatagcaagtgggataagtgctgaggactacctaggactagtatggaccctgcctccaagcacattacaacctaagaagtgcaatgcatttctgtcagtgctataacgtcagtgctgtgacagacctatgcacacaatatagtggtggaacaaaggaggaaggagtaatttattctacctgattttaggggagagggagatggtcagacttcaaataagaggtagcccatgaccttggtgtgaaagataagcaagaatttgccaagtaaaccaggaaaggacatgtggaaacttgcagaactgtagtggtaaactaagggaagattctttttctcagactgttgctggaactacaagatatttctagcaacaggagttcttaacctgggatccacagaccctcaaagcgttcttaaataaaaccatattc

SEQ ID NO: 327074 - DNA, 593 bp, Homo sapiens
ttttgacaaacttgttcatgaattatttggaaacagttcacaagtaggtaagttctgtgggaaaaatcataactatacttattttaaaatattaatttaaagcaatgcttggcttataatgattaggttcatcttttaaaatgttaagattgaaggaaaaagaaggtttataatatacccaataccctcattatagtgaaagaagctgaagaaaattacattcctgtttggttttaggtgctacgaaaacctataatgccagtaaggcagaagataaagccataaaactatcaattcagttactctgagctcatctgctgtgtttctggatctgtattatccatatcrccatgtagcaagaagttctgtaggatcataatattatagtcttatatttcttttttttaaaaaaatccaaattattttataaagccttagatttccttagtacttgtgctttttgaatcggttctaacaaatggaatccatcctattactttgaaacagtaaacatttgcaattagctgttgttgactaaaagaactttgagtaggtaaagtgattgttgatgcaggtaccaaaaagagacaaaa

SEQ ID NO: 327075 - DNA, 460 bp, Homo sapiens
aactatttctctcattcaattccaacaacaacagaaacaaaactaaaattaatatattaatggcttatcacatcacatgtgggttttgcttcccttttccaaagggagaaaataatgataatcttctgtaaaggaaaatttatacaccaaggctgacatggcccttacattttcttatcctctaagatgagataaccrttaatagaacttcagtgtttttatacatacctctgtattcttgcttctaagctgaatgccccctctgtcttctattcacatcaaagctctactcctttaaaacacagattaaataacgtcttctccaagaagctcttgacagatcccatttctgctctagatcgtcagtaaccctttgttttattacatttcttaggacacagattgtttctacttaccttatgcagaatttctatacatctgtcttccactgtatactaag

SEQ ID NO: 327076 - DNA, 648 bp, Homo sapiens
tttgtccatttttcctgtggttgtctgtgctcataaggtactactcaagaaatctttgcccagtctaataaaatagagaatttccacagcgttttcttttagtagtttaatagtttgaggtctcagatttaagtgtgaaatccattttaatttgatttttgtatatggcgaaagataggagtctagttttattcttctgcatatagatatccaatttttcctgcatcatttgttgaggaacctgccctttttccaatgtatgttcttggcaccttggtcaaaaatgagttcactgtagatgtacggattcgtttctggatttctcattctgttccactggtctatgtgtctgtttttatgtgactastttgctattttggttgctgtagttctgtgatacagtttaaagtcaggtaatgtgattcttccagctttgttctttttgcccagaatagctttggatattctgggtcttttgtggctcagtataaattttaggatagtttttctatttctgtgaagaatgtcattggtactctgatagggactgcattgactctgtacattgctttgagtagtggggacattttaacaatattgattcttgcaattcatgtaatatggaatatctttccattttttggtgtc

SEQ ID NO: 327077 - DNA, 627 bp, Homo sapiens
ggcaggtgcagaaatgccatccaagaggcaaggcctggaatcagagaccccaagtgcctgcttggtgctctaccccattgtagccaagctggtacctaagctgtaaggcaaagtccactttacactttacactgtgcttttctcaagcaaaagaagtcttccctcatagccaaaacagctgggaacatgttgggtcacatatgaagccagaatgtctcagagtctcacccaaggcccatggcatgtactacctggctactgttgctgattattcggggcccaagggctgtttrgttagcaggtgatgaatcctgctaggactggatccttctgttcaaggcagcaggttcccttctgacccagagtgtgtctagaaatgtcatacaagatctagggcctagaatgggagcctcatgaccctgccaggtgccctatcctactatggctgagccagtatccaagttggaagaaaaagtcctctttagtcttccctctcctgtcctgaagtggaggtaacaagtctcttttggagctgggagctgtgctgcctggggttgggggagaggtgatgcaagctctcctttagttgcttcagctggtgtctcaatagatcatgtgtccccccag

SEQ ID NO: 327078 - DNA, 527 bp, Homo sapiens
aaataatgtataattaattagcatttccaaaagcttagtacccttcacatgtaattgtcttctccctacccaaacagcaggtactaatgagatcaggtttttgtcttggagcaatcagtgcctgttatttggtaattatggagtgtttagggaatggaactcaatttctctacgttcatccatttaaaatcagccttgttactatggaatggatagaaatattttacgtgggaaatcttatttaacacagttagagaaaagagactcttgctccaaggaaattttaatatgtactgcctaagagaacttaataattctgaattaaagagaatatagaagtcagtagagatgatgatcacatttttgagcagggtttgatctgccatcataataamtgcataaggccttactcaagcaaatttaaataaataaagttcattttcttggactagatttttaagaatacacacacacacaaacactcacacacaccacttgttactcttatggtaatacctatttttgtt

SEQ ID NO: 327079 - DNA, 527 bp, Homo sapiens
aaataatgtataattaattagcatttccaaaagcttagtacccttcacatgtaattgtcttctccctacccaaacagcaggtactaatgagatcaggtttttgtcttggagcaatcagtgcctgttatttggtaattatggagtgtttagggaatggaactcaatttctctacgttcatccatttaaaatcagccttgttactatggaatggatagaaatattttacgtgggaaatcttatttaacacagttagagaaaagagactcttgctccaaggaaattttaatatgtactgcctaagagaacttaataattctgaattaaagagaatatagaagtcagtagagatgatgatcacatttttgagcagggtttgatctgccatcataataaatgcataaggccttactcaagcaaatttaaataaataaagttcattttcttggactagatttttaagaatacacacacacacaaacacwcacacacaccacttgttactcttatggtaatacctatttttgtt

SEQ ID NO: 327080 - DNA, 452 bp, Homo sapiens
atgacatattggtcaatagtggactgaatatataaaaatggtaccataagattataatggagctgaaaaaatcctgtcgcctagtgacattgcagctgtcataacatcatagtataattacttattgttttaacatagttgtgtagcctaagtgtacagtgtttataaagtcttcagtagtatatagtaatcgcccaggccttcacattcactcaccactcacccactgactcacccagagcaacttccagtcctgcatgctccactcatgctaagtgctctgtacagatgtaccattttaaatcttttataccacctacatttttactgtacctgttctatgtttagatatctacataattactattgtgttacaattgcctacaataacatgctgtacakgtttgtagcctaggaacaataggctatgccatataacctaagtgtgtaga

SEQ ID NO: 327081 - DNA, 540 bp, Homo sapiens
ataaacaaaacacttagtaaaggtactacttcagcaacaagaaaaatgaacctagaggaaagtacctgttacaagaaaagataacaaacacagaaactgataagatgtgtcaataattttaatgaactattgattttattaaaaagattaaccaaaattagtgtgtgtgtttaaagcaggtagaacaaaaactctaagaaacaataacatgaggcagttaaagygtgacatcatcttatcattcagggaggaaaatagcattgaataaatttagtcttcattaagaaatgtatatttctctagaaatctaaaaattgagtgtagtaaaaagcataccaattggaaaggaagaaataaaatcatttctatttgcagatgacataattgtctatatgaaaaaattctaagaattaaaaaaaaactctcctagaactaataagtgagtgaagcaaggttacagaataatatgcacagaatcatatacagaatctttatgctgtaaattataaaatgtcaatgaaagaaagaaaagttctaaat

SEQ ID NO: 327082 - DNA, 499 bp, Homo sapiens
tgagctcaaacagatctccgtttctcctgctcgctacccttacttttcccttcccagcccctcacctcaagaaacactttaatagatatgtaagaacagtattttatgtagatttggtgggggggtgggtatagattttccagagagccgcttcagaatccaggactattttgtaagtactgttactgagctctgcttttgcctgatgacattttatctattaatagcrttcattagtgactgttgaatggatttttcatgtacttatacacgacataggaagtgaaaaaggagttgtctatgacatttgtctcatgatttatttgatatttattggagccagactagaatctggacatgttaaaaaaatcagctcattttgatgccacttattactagtcaagccaccttacttactgtagagaaattaataggctttatgtgcaaaggctactaatggtggcaaacagaaggcaaaagcagtgataagaagaagaac

SEQ ID NO: 327083 - DNA, 499 bp, Homo sapiens
tgagctcaaacagatctccgtttctcctgctcgctacccttacttttcccttcccagcccctcacctcaagaaacactttaatagatatgtaagaacagtattttatgtagatttggtgggggggtgggtatagattttccagagagccgcttcagaatccaggactattttgtaagtactgttactgagctctgcttttgcctgatgacattttatctattaatagcattcattagtgactgttgaatggatttttcatgtacttatacacgacataggaagtgaaaaaggagttgtctatgacatttgtctcatgatttatttgatatttattggagccagactagaatctgracatgttaaaaaaatcagctcattttgatgccacttattactagtcaagccaccttacttactgtagagaaattaataggctttatgtgcaaaggctactaatggtggcaaacagaaggcaaaagcagtgataagaagaagaac

SEQ ID NO: 327084 - DNA, 630 bp, Homo sapiens
aagaacaaagctattgctagcactgcagctcacctattctaatagccactgatgttgtaagagaggccttttattttaaagggcagaaagcagatgttcaagcacatccaatgtgagtaggtagaaaagaaatgactgtcaacaattgtttatatggtcagatgcatttggttaataaaacagggcatctttctgttgtgactttattagtgatttcccccaaccttgggctcaaattccagtaatgttaggaattaattaatgtagaaatatcaggtttgatgaagattatagacattctgggtaatgacatttaggatgcatatcttagatgttcttagagctgaaactwcaatgttggagattagattttcttagacctcgagaatcaactcagaggcttttatgccaactttactgggagaaataagcagagctgctcagcctcaacaggcctgcccaccataatcacttctgagggaagtggtcccatccaccctcctaccactacgtctccatgttattcccacagtcacaggtaatggatctactgataggtagtggacttaaagagggacaaccagctcataaactggccagtaacccacagcctagtaaaaaaaagattag

SEQ ID NO: 327085 - DNA, 574 bp, Homo sapiens
taggtgggacatttagaagagagatttgtacatttggtgaaactttaattaaaaatggaagatgcaaacaagtaaaattgtgtagctagaataactctcaaattatcttataattgtcttaattgatgtgtaaatgttattctgctcccatgtatgtctacataagtttctgccagagaaaattcatcttgcagatcaagcagatagggatattggttgatgagggacttattgactccatatacggaagccttttgtatttgtgagacacaattattaggcatcagcactaaaaacaccatttgcatatgtatcttaacttccacaaaataatcgaaaattatatccaaaagaataaactccttagcatttcagaagctgatttccaattatcccagtaaaatgtaaatgtgccagacaatatttttgtttctgggggatcaccagaaaaacttggactcktctaatggaaaataaaagagtgattttttattaacttttagctttggataactcgggtagaaattgtaatacacaccagcgtcatctcccatcttgctcctgagtacaagga

SEQ ID NO: 327086 - DNA, 590 bp, Homo sapiens
ttgatggaacagggcaactttggccttaaatattttttggcaacttaacatatttgcatttttgcctcaagctatttaaatattttaggattccattatttacagagagcataatgggggaactctccagagttactgaaggttaaaccggataaaaagtgaaagtatccacagaataaaataactccctagatatcttgtgtacacatgtccaaccaaaaaggacaatttatttccacatatggtagggatttcagattccttcagaaaatttcagattaactccttatatttaggagtcttaattaagctgtaggttatcacttacaacaaaatgtgaagtcagagtaaatgaaaaatgttactttttacccaagaatagagtgggtcctcactccattgcytcacaagataaaattgtaattgtcttttacttcaacgttaacagatattgatagttgagccttaatgggaacactttgttttgttgttctatattagttgctttgatacaaaatgctgtacattagaatttaatgtgatctgcctgaagtccagatgaaaaaagattaaggcaaaagacaagaatg

SEQ ID NO: 327087 - DNA, 662 bp, Homo sapiens
aggaaatactgtctacgaaggggcccctagtgctctgcaccctcccgttcacttaccttcctgcttcacatttgaaaggcagtttagatgaaataatgcccgtttttcctaccaagtatattgtatgcaaccgtaaatcatcaaagaaccactgccccgacctagaacatatttgracatcactagaaataaaaaaaaggaatattagatcatgtgttggatttttttagggttaatataaaggcagatgtccaaagttagggatgctttcaatgctttcctatttccagttctcttgctcctacgttggctctgtgttttataaatcttctttttcataatgtagattcattgacctgctggatagtagattatatatatatatatatatatatatatagtacctaatagagttggctccttgccttgtatttatcaaagattcttcccccaactctcatcagtccttccccaaacaagaagtttaacaaaagagactagggacttctttagctcacttgtcgccaccatcccacaggacctgaatatgagtcctgtccaggagcagtggtgaactggaacagagcaaatatagtacccacagtgaatgacgaaagaggattggatcaggattgaaaactctaaataactgatgtagctta

SEQ ID NO: 327088 - DNA, 537 bp, Homo sapiens
gactgactgacataatagtacaaaaagttagcccccgaaaccgcaaaagccagtgccctttggtggggaggaggagaccactgagtcatggtttaagatccagagccctccactgaaggtcagatcaaggacagactacctgagatcagatccagtttcttttcatccctccctcacaagtctttcttcaagagcacttcctcaaaaattcacttgcaccaaatctcctgtgtcagattctgcttctaggaaaccctacataagacaactacgaacaatgtaactccagagggaggtttgagatttcatttttttttttgcccatagaatgcatctcattaagaatatataatcaaaatgccatattataaagtcactttaaatgctttctrtatgtgtgtatagtaccagacggatatgcaattgggtacacttgggttttatttttaatttaaaaaatgttttaataatttagattttttaagaatattgcacttatgacccaaaagtcgtaactaggaaaactaagaaaactct

SEQ ID NO: 327089 - DNA, 581 bp, Homo sapiens
aaacacattttaactggctgggaacaaggccwgccagcctggccacagtgtggaagggcagctggtcacacagcctctggtcaggcctggaagtgctcagagagaacttccagcagctcctgcttcttcagcccatatgcctctttcagcatgggcacagtgaaattgcccagcatgcccttgctgatattggccttcagctcctcttctgaatacttcatcttgggtcttttgcttccaaaatcttcattattttgttttctcttggtaaatttcccttcaggattgtaatctggtgggtaaacaagctccttaaactcaaccaccagggagtccaatcttttattcattgcttcaaccttgggcaatgtcaggtccactgcttgttcagtctccatcaaatccaaggccaaggcctccaggttcctgaagtgctgctgcagcccagggttctcaaagctgtcacttctgcatgtgaagcggagcttctgaacgatagccttcatcttgtccacctgctctggagttgccatgactttcagtaaagggcatcttccttttatcatcagcaaagagtaaaa

SEQ ID NO: 327090 - DNA, 594 bp, Homo sapiens
tcacacagcctctggtcaggcctggaagtgctcagagagaacttccagcagctcctgcttcttcagcccatatgcctctttcagcatgggcacagtgaaattgcccagcatgcccttgctgatattggccttcagctcctcttctgaatacttcatcttgggtctttygcttccaaaatcttcattattttgttttctcttggtaaatttcccttcaggattgtaatctggtgggtaaacaagctccttaaactcaaccaccagggagtccaatcttttattcattgcttcaaccttgggcaatgtcaggtccactgcttgttcagtctccatcaaatccaaggccaaggcctccaggttcctgaagtgctgctgcagcccagggttctcaaagctgtcacttctgcatgtgaagcggagcttctgaacgatagccttcatcttgtccacctgctctggagttgccatgactttcagtaaagggcatcttccttttatcatcagcaaagagtaaaaagacaagctggaatcctggaggagtcaccagaaatttctggtcatccaactcctcttcctgtggcaccaaagccacaa

SEQ ID NO: 327091 - DNA, 590 bp, Homo sapiens
tctccatcaaatccaaggccaaggcctccaggttcctgaagtgctgctgcagcccagggttctcaaagctgtcacttctgcatgtgaagcggagcttctgaacgatagccttcatcttgtccacctgctctggagttgccatgactttcagtaaagggcatcttccttttatcatcagcaaagagtaaaaagacaagctggaatcctggaggagtcaccagaaatttctggtcatccaactcctcttcctgtggcaccaaagccacaaaataaagagagatgttcctgcggggtgtgtatctgcgtgatgctacaacctccttgtccagacactttatgtgcagagcactaaacagggttgagctcccaatcaccagcaactcctcagggcacatgaacagggagggcctcagatgatggtgcttcttcagcattaccaagggcttacaccccatgagcatcaaacctggatcatcaaactgttttaactcttctgtttcccctttctccattataatctgagactcccatagatctcagacctcttggtatcactargcagaagcaaacttcctgtatttgtattaaat

SEQ ID NO: 327092 - DNA, 606 bp, Homo sapiens
gtaggtgaccttgcctttctcttaacattatttgctgcccttaacattatttgtttcatttcgaccttagagatctgatgattatgtatcttggggataatcttttcatggagtatcttactggagttctctgcatttcctgaatttgaatgttggcctgtgttgccaggttgaggaagttctcctggatgatatcctgaagtatgttttccaaattggttccattctccctgtctctttcacgtaccccaatcagtcatagatttgatctctttacataatcacatagttcttggaggttttgttcattcctttacattcttttttatctattcttttctgccagtcttatttcagaaaaacagtcttcaagctctgaaattctttcttccacttgatctattctgctattaatacttgtgattgcattgtgaagttcttatactgtgtttttcagttctatcatgytcctctctaaacttgctattttggctgtcagcttctgcattgttttattatgatttttagattctttgtgttgggttaaaacatattcctttagctcagcgaagttcatttttatccacattctgaagcctacttctg

SEQ ID NO: 327093 - DNA, 582 bp, Homo sapiens
gagggctttctcccacttcttcctgctaaacaagttcctggagaggtttgaacaggcattagagatagtcggtggtacttgtccatatgcaatgctgtcagatgaatttttctatctgatgcagattggtccgaggccagcttcttgaccttaggttgcaagtggtgactaggagcagttgttcctgacaacttgtgttcttgcacatggctcataaccaaggataagacagcctccagaccatatatcctagaaataaatctagatatttctactcagactaatttttctctaaggggacagtgaagctcttctgggactgatccacctatctggcctcattccaggacaggcagaaggccttatgctgaatgcttactcaaggcctaagacagccaagacaaatagacttaacatgcttgacaactaatctactggtagtggctgcctagctagatatttgtagaattcccagtcctcttctgggcttagcataaattgtgtgcctcgatcagtgatgatgtctcccatagttactgcggagggttstcaaggcacacatgacagaattggaaacctcat

SEQ ID NO: 327094 - DNA, 591 bp, Homo sapiens
tgtgtcctttatttccagaagttgtgattgtgttttatttacattatttatttctctggagatttttctttcatatcctgtaacattttttaaatgtctttaagttggcattcacctttctttggtgcctcgttaagtaccttaataatacaccttctgaattctttttctggtgattcagcgatttcttcttggatccattgctggtgaacgagtgcgatcttttgggagtgttaaagaaacttgttttgttatattaccagaattctttttctggttccttcttgtttgggtacactatattagagggaagatctggggctcagtagctgctgttcagattgttttgtcccatggtgtgactccttcatgtggtgctctcccccctttccctargaatgggacttcctgagagctgaactgcagtgattgttatttctctcctggatctaggctcccagcagagcctcctgggctcaaggatggtactgaggagtgtctgcaaagggttccgtgatgtgattggtcttcaggtctctcagccatggataccagcaccagccctggtggacgtagcaagggagtgaagtg

SEQ ID NO: 327095 - DNA, 591 bp, Homo sapiens
tgtgtcctttatttccagaagttgtgattgtgttttatttacattatttatttctctggagatttttctttcatatcctgtaacattttttaaatgtctttaagttggcattcacctttctttggtgcctcgttaagtaccttaataatacaccttctgaattctttttctggtgattcagcgatttcttcttggatccattgctggtgaacgagtgcgatcttttgggagtgttaaagaaacttgttttgttatattaccagaattctttttctggttccttcttgtttgggtacactatattagagggaagatctggggctcagtagctgctgttcagattgttttgtcccatggtgtgactccttcatgtggtgctctcccccctttccctaggaatgggacttcctgagagctgaactgcagtgattgttatttctctcctggatctargctcccagcagagcctcctgggctcaaggatggtactgaggagtgtctgcaaagggttccgtgatgtgattggtcttcaggtctctcagccatggataccagcaccagccctggtggacgtagcaagggagtgaagtg

SEQ ID NO: 327096 - DNA, 565 bp, Homo sapiens
taagcagggctgagaacttgccccaggctaccagcttcctcactgagaaagcaagcagggctctcaagtttcacacmtccccacctgccaatggcttctgtgctgtgtctgcattcctggttcactctctcccccagattctgtccaggaaaacttcgcattcagtcaaaattgttacaaagttcagctggaagtttccttctccctgtagtctttccctaatttgactggcgagacacaggaccccagtgagacaaagtcttaagtggcttccctggggactgagagttcctacagggcttctctcaatgcttcctctagccctatattttcctcagctctctaaattcatctcagctccaggtaaggtcaaattctcccatgatctggaccttcaggttccccagtgaggatgtgtgtttggaggtggacatccctcttccacccattgggcactcacagttttttggctttctcacagaacctatagcctcaatctgcttccaccaaagggtctgtggattctcttggctttttgttgtgttcctgcagtagaccttggagc

SEQ ID NO: 327097 - DNA, 565 bp, Homo sapiens
taagcagggctgagaacttgccccaggctaccagcttcctcactgagaaagcaagcagggctctcaagtttcacacatccccacctgccaatggcttctgtgctgtgtctgcattcctggttcactctctcccccagattctgtccagraaaacttcgcattcagtcaaaattgttacaaagttcagctggaagtttccttctccctgtagtctttccctaatttgactggcgagacacaggaccccagtgagacaaagtcttaagtggcttccctggggactgagagttcctacagggcttctctcaatgcttcctctagccctatattttcctcagctctctaaattcatctcagctccaggtaaggtcaaattctcccatgatctggaccttcaggttccccagtgaggatgtgtgtttggaggtggacatccctcttccacccattgggcactcacagttttttggctttctcacagaacctatagcctcaatctgcttccaccaaagggtctgtggattctcttggctttttgttgtgttcctgcagtagaccttggagc

SEQ ID NO: 327098 - DNA, 565 bp, Homo sapiens
taagcagggctgagaacttgccccaggctaccagcttcctcactgagaaagcaagcagggctctcaagtttcacacatccccacctgccaatggcttctgtgctgtgtctgcattcctggttcactctctcccccagattctgtccaggaaaacttcgcattcagtcaaaattgttacaaagttcagctggaagtttccttctccctgtagtctttccctaatttgactggcgagacacaggaccccagtgagacaaagtcttaagtggcttccctggggactgagagttccyacagggcttctctcaatgcttcctctagccctatattttcctcagctctctaaattcatctcagctccaggtaaggtcaaattctcccatgatctggaccttcaggttccccagtgaggatgtgtgtttggaggtggacatccctcttccacccattgggcactcacagttttttggctttctcacagaacctatagcctcaatctgcttccaccaaagggtctgtggattctcttggctttttgttgtgttcctgcagtagaccttggagc

SEQ ID NO: 327099 - DNA, 592 bp, Homo sapiens
tctgtgaatatataaggtatacctcacacatggttatcaggtgctttttctttttctccttgtccacccttaaagccaccatttaatgttcttactaccttgactcctaaactttatgaaaaaaaaaaaaaacaccaaatcttctcctcttagtttctttatgtccttgtaatccagttttttactcccagaactctcttggaattgcattttgtaaggttgtctattgccccaataataagaaaatttagtagtcttttttaggagactttgagtctatgacgttacagacttacctgaaattctcttttctattgtccttgaagttctgaacactgcactccaatatatgccattctggcatattgattgttttgagttaaagaggaagtgggaagggggagagggagaaagaaaaaaaaagaatgagtgagagagaagaaagagagagaaagaaggamggaaggaaggaaggaaggaaggaaggaaggaaggaaggaaggaaggaaggaaggcaggcaagcaagcaagcacactccaaccttcctaaaagcaggagataaaactcccatgtggaatgtcttctcccctc

SEQ ID NO: 327100 - DNA, 619 bp, Homo sapiens
gtcttctcccctccactggaagaaggaagaccttcttatcaccagagttgaagagtcgaggctgagagaaatctccaccaacaacctgtattaaactaacccttatcttcctagccacttctctgtaawcaactacctcagcccaagcccccttgctttgttacattttcacaatttaccactctttttccaaataagtatataagttgtcaactctaattgcagctttgtgtttttatttccttatgatggctccatgtcaggtaaaactgataataaatttgtacgctttgctctcctgttaatttgccttgtgtaaatttaattctcaggcccagctaaaaactctaagagggtaaaggtaaaattgtgccttccctacaaccttaacatgctgtcttgtctctaggctgccctcacacctcccaaaccctcctacttggttttatttttgggtttctctgttttctctttgccctcttcttccttattctacaaactattccttgatcatcacgtatgtaaagcaggaaaaataattttttctctacccttctgagttcttagctgggactctttttcacaaaaggcagattaataagaaacttgaaacaagcag

SEQ ID NO: 327101 - DNA, 579 bp, Homo sapiens
cttgaaacaagcagaattttattaacatgtatatcttatatatatatatatataggtgatactcaggactaaaagactaattcttaaataggtggcttagaattcaggcttaaataacrtcttcaactgaaaacaaagaaagaagagtgtggggcaggctagttataggaaacttatgacagataaaaactagttagtaaagttcattatgtagatttctctgatgccctctccaggatgacaaaggtctaaagtaatctcaggtagttaactttagtttttactggtagagaaggaaggagggacatcattgtaaatttatgtcttgcttttaggcaaataggaaaaagacagagagatctgtatatatctgcttcttctcagttgccttcagctcaaaaaatcctcatgccaaagtggaacattttggggtggcatattctgctaccctggacatatgcttgcataaatacaaatgccattgtttatatctttttaactctaaagacaaaagcaaagacaccagttgtatcagttgtcaaccttctcaactgtgatgtgcttaaatcatcacacagt

SEQ ID NO: 327102 - DNA, 579 bp, Homo sapiens
cttgaaacaagcagaattttattaacatgtatatcttatatatatatatatataggtgatactcaggactaaaagactaattcttaaataggtggcttagaattcaggcttaaataacatcttcaactgaaaacaaagaaagaagagtgtggggcaggctagttataggaaacttatgacagataaaaactagttagtaaagttcattatgtagatttctctgatgccctctccaggatgacaaaggtctaaagtaatctcaggtagttaactttagtttttactggtagagaaggaaggagggacatcattgtaaatttatgycttgcttttaggcaaataggaaaaagacagagagatctgtatatatctgcttcttctcagttgccttcagctcaaaaaatcctcatgccaaagtggaacattttggggtggcatattctgctaccctggacatatgcttgcataaatacaaatgccattgtttatatctttttaactctaaagacaaaagcaaagacaccagttgtatcagttgtcaaccttctcaactgtgatgtgcttaaatcatcacacagt

SEQ ID NO: 327103 - DNA, 476 bp, Homo sapiens
ggcaacagagatttatttctcacagctctggagtctggaaagtctaaaatcagagtgccagcatggttggattctgctgaggatcttcttccaggctgcagactgctgatttcttgcagtgacttcacatggtagaaagggctatctggcttctgggggctcttttataagggcattaattccattcaaagccctcatgacttaatcmcttactaaaaaccccactgtttatactatcatctttgggattaggatgttaatgtatgaattttggggggacaaaagctttcagtccttagcactctgttatcaattatttttgtgcatgtctgtaaacttaaaaagttttattttattttatcttttattaatacataatgtttttgtggggtacaaaaatgcacatttcatgacatgcatagaatgtttaatgatcaagtcagcatttggggtatctatcaccttgagtatcattt

SEQ ID NO: 327104 - DNA, 602 bp, Homo sapiens
tttattcatgaaagggtattgaattttatcaaatgctttttctgcatctaataaaattatcatatgacttttgtctttaattctgtctatgtgatatatcacaattactgattttcatattttgaaccatttcttcatccctggaataaatcccacttgatcatggtatattatttttttgatatgctgttggattcggtttgctagtattttgctgagaactttggcatctatgttcatcagtgatataggcctgtagttttctttctttgctgtgtccttgtctgggtttggtattaggatgatgctatcattgtagaatgagttagggagaattccctcctctttaatttttaggatagtttgagggaattggtattagttctttatacatttggtgtaattcattgataaatctgtctgttcctggacttttctttgttgggagacattttattgctgatttaatctcattactcrctatttaactgttcaggttttctacttcttcttgggtcaatctcagtaggttgtatatttttaggaatatatccatttcctcagggttttccagtttgttagcttataatggttcataatag

SEQ ID NO: 327105 - DNA, 643 bp, Homo sapiens
ttatttctctataatattttcccttcagagagtaactgcaaatgatacargtagcaaaccaacaaccaaaaaaatgacctaaacgttttattatcaataaagtgctacaactgtgaaggtaactgaatagaaaaccaacaatcaaaaggaaaaaggcataacatgttttattattgatataatttgaggcatacttataatgatactttgaattccttgaattgaagaaaatcgaaaactgcatagtaaccctgcctacttatatgcactgggaatgttactacccttgtgattcacttaccatatacagcagtgtaaaaagagggtttccctactgtccttttcagagagctccaccctgattactttcagtgccacccatgtgtaagttcaaggctttccatttcccactagcttcctctaagttttcagagttccaacctcaatttcaggcatttaggtgtctccttggcaactgaagtggacactgtcctcaaaggaaccttggaatgcactgacgtgtgtcagttgtgctgcatagtctgcgggcagcctctgcacctctcagcaaaagtcacgtacggaccctgctccaacatggccccctggcactaagacagagctcactgttggagggagtgga

SEQ ID NO: 327106 - DNA, 643 bp, Homo sapiens
ttatttctctataatattttcccttcagagagtaactgcaaatgatacaagtagcaaaccaacaaccaaaaaaatgacctaaacgttttattatcaataaagtgctacaactgtgaaggtaactgaatagaaaaccaacaatcaaaaggaaaaaggcataacatgttttattattgatataatttgaggcatacttataatgatactttgaattccttgaattgaagaaaatcgaaaactgcatagtaaccctgcctacttatatgcactgggaatgttactacccttgtgattcacttaccatatacagcagtgtaaaargagggtttccctactgtccttttcagagagctccaccctgattactttcagtgccacccatgtgtaagttcaaggctttccatttcccactagcttcctctaagttttcagagttccaacctcaatttcaggcatttaggtgtctccttggcaactgaagtggacactgtcctcaaaggaaccttggaatgcactgacgtgtgtcagttgtgctgcatagtctgcgggcagcctctgcacctctcagcaaaagtcacgtacggaccctgctccaacatggccccctggcactaagacagagctcactgttggagggagtgga

SEQ ID NO: 327107 - DNA, 462 bp, Homo sapiens
agatagtccatgatcatctccccatctcatgatcctaatttaatcacatctgctcagtcctttattgccttataaggtaaaattcacaggttccaaggattagaagctaagtatcattggtggagrcaattattcagcctgctataaattagcttgatcattaaagtgcctacatgaacattcaagaatataatatgtgaaattcacttagaacaacatctaccatgccataaaagcattcaacaatatttatcctatgatagtgatattcatgatgttgcagcaacaagaaaatgcagacaaaagtttcaaggtagaaattatttttaaataaatgtatatggaagatctcatgtctggattttttaaatatatgttgcccttaaaatgttaatagtaatcaaaggattatctccccattgaataactataacccaatagtttaggcatataatacatgca

SEQ ID NO: 327108 - DNA, 534 bp, Homo sapiens
cagatcttacaagaaaggctttccatttatcttcatttagtataatactagctgtgagtctgtattatatggcttttcttaacgttgacgtatgtttcttctttacccaatttttagaggattcttatcatggaagsatgtagaattttatcaaatgatttctcagcatcagttgaaatgatcacatggtttttatccttcattctgttaatatgatgtattgcattgtttggtttgcatatattgaactattcttgcatccctttatttaatctttacatccttatatttattatatttataatcccatgtttatgaaggaaattcaatcaataattaatacccttcataaacagacagcatcaggcccagatgagttcacaggtgaattctactagacatttaaagaagaaattatgctattgttctatgacctcttttagaagatagaagcagtgaggttactccctaagtcatactctaagaccagcattactgtaataccaaaaccagagaagaaaatgacaagaacag

SEQ ID NO: 327109 - DNA, 534 bp, Homo sapiens
cagatcttacaagaaaggctttccatttatcttcatttagtataatactagctgtgagtctgtattatatggcttttcttaacgttgacgtatgtttcttctttacccaatttttagaggattcttatcatggaaggrtgtagaattttatcaaatgatttctcagcatcagttgaaatgatcacatggtttttatccttcattctgttaatatgatgtattgcattgtttggtttgcatatattgaactattcttgcatccctttatttaatctttacatccttatatttattatatttataatcccatgtttatgaaggaaattcaatcaataattaatacccttcataaacagacagcatcaggcccagatgagttcacaggtgaattctactagacatttaaagaagaaattatgctattgttctatgacctcttttagaagatagaagcagtgaggttactccctaagtcatactctaagaccagcattactgtaataccaaaaccagagaagaaaatgacaagaacag

SEQ ID NO: 327110 - DNA, 528 bp, Homo sapiens
tttttacatttctatcttgattttatttttgacccaaagctcattcaggatcagattactaaatttccatgtatttgyattgttttgaaggttccttttagagttgatttccagtttcattccactgtggtctgagagagtgcttgttataatttccattttcttaaatttactgaagctcgttttatggcctatgatatggtctgtcttggagattgttccatgtgctgttgaatggaatgtgtattctgtggttgttggatggaatcttctgtatatatctgttaagtccatttgttccaaggtgtagtttaaatcattatttctttgttgactttctgtcttgatgacctgtctagtgctgtcatggagtatgggaatcctccactattatttgttgctgtctatctcatttcttaggtctattagtaattgttttacaaatttgggaactccagtgttaggtgcatatatgtttagggttttgatattttcctgttggacaaggcctttcaccattatataatg

SEQ ID NO: 327111 - DNA, 495 bp, Homo sapiens
ttatttgttgctgtctatctcatttcttaggtctattagtaattgttttacaaatttgggaactccagtgttaggtgcatatatgtttagggttttgatattttcctgttggacaaggcctttyaccattatataatgtccctctttttctctcttaaccactattgctttaaagtttgttttacctaatataagaatagctacccctgctcacttttagtgtccatttgcatgaaatgcctttttctacccctttattttaagttcatgtgagtccttatgtgttacttgagtctccctaaggcaccaaatggttggtgagttcttatccattctgtggttctgtatcttttaagtggagcatttaggacatttacattcaatgttagtattaaagtatgaggtattgttgtattcatcatgctcttcattgcctgtgtactttgtttctttttcttttttgtttttgtttttaacttgtatttttgtttgata

SEQ ID NO: 327112 - DNA, 495 bp, Homo sapiens
ttatttgttgctgtctatctcatttcttaggtctattagtaattgttttacaaatttgggaactccagtgttaggtgcatatatgtttagggttttgatattttcctgttggacaaggcctttcaccattatataatgtccctctttttctctcttaaccactattgctttaaagtttgttttacctaatataagaatagctacccctgctcrcttttagtgtccatttgcatgaaatgcctttttctacccctttattttaagttcatgtgagtccttatgtgttacttgagtctccctaaggcaccaaatggttggtgagttcttatccattctgtggttctgtatcttttaagtggagcatttaggacatttacattcaatgttagtattaaagtatgaggtattgttgtattcatcatgctcttcattgcctgtgtactttgtttctttttcttttttgtttttgtttttaacttgtatttttgtttgata

SEQ ID NO: 327113 - DNA, 510 bp, Homo sapiens
tttgaattcttcttttcctatttggatacattttatttatttctcttgactgattgctctggctagcacttccagtgccaggtagaataatagtagtgagagtgggcatttttgttttcttcctgttcttaaggggcatgcttccaacttctgcccattcagtatgatgttggctgtgggtttctcttagaccgttcttactattttgaggtatgttctttctaagcctaattcgttgagtgtttttatcataaagccattttggattttaccaaaagcctgttctacatctattgagatcatcatttgatttttgtttttcattctgttatgtggtaaatcacatttactgacttgcatatgttgaaccaaccttgcatcccagaaataaagcccacttggtcatggtgaattaactttttgatgtgatttctagcttcagtttgctagcattttgttgagtatttttctrtctatgttcttcagtaatattgacctgtagttttcttt

SEQ ID NO: 327114 - DNA, 576 bp, Homo sapiens
ccccctcaatttttttgaatagtttcattaaaactagtatcagctcttctttgtacatcttgcaggacttggctgtgaatccatgtggggcttttttttttgttggtaggttttctactactgattcaattttggaattggatattggtctgttcagcattacaatttcttcctgatacaatcttgggaggttgttttgtttccaggagttgatccatttcctctggattttctagtttgtgtgcataaaggtgttcataatagtctttgatgatcttttgtatatttctgtgggattggttgtaatgtcaactttgtcatttctgattttgcctgttaggaccttctttctttttttctttgttaatctagctagtggtcaatcttgtttattgtttgaaagagccaatttttggttttgttgatyggttgtatggatttgtacatcttaattttgttcagttctgctctgattttggttattcattttcttctgctagctttggggttattttgttcttgtatttgtgtgatgttagatcattaatttgagatctttctaacttcttgatgtag

SEQ ID NO: 327115 - DNA, 413 bp, Homo sapiens
agacagggtacgataaccagtagcctggtatcacttaaatagaaagggaaaagcaaaatatatcttaaggtctaatgattttctcattgttaaaaactacctcataagtactgaatacaagttttttgtaattacaagtttcttcacatgttcacaaaccaagcttgttaatattgcttttccaaaacttccagtcttttttatttcttacttgactgtattattaattaaaaggatcttttgaactctccaaaataatgatggatttgtccatttcttctgcagtgcctgttagtgaaataaggtgaattggatcttacttatatayataaataaaatatatgtatatatgctttctttatatatataggctttcagttttagctttacattttagatattttagttttagc

SEQ ID NO: 327116 - DNA, 487 bp, Homo sapiens
acacagatgttacctcataataattataaccattttttcttactttctgatttattaacatgacattttctaatttgaagactcagtagttccagctgagcttattctcagcatctaaaattttagtgtcaaaagattaccaaatgattatttagtcagaatctatttcaaaattgtgtaattttaaacaagatatctaattcactttttttgtttmgaatatattttttcacatgtactatagatcctatggtgacgaaatattaaataatttagtgacttttttatatatccagaaaacattggcttttttttgaagaaaaggtttttagtgaatatcagagacccacatttacctggcttactccagaactacaatatgtgactttttcacagcaaacaccgcatctctgaaaacttattttcctcctaatattttaatgattcctttcctgaatcctcatagtagccatctcaaatttaatta

SEQ ID NO: 327117 - DNA, 618 bp, Homo sapiens
ggaagactagagggagcgagcattgaatagttacccttcagctgcctagctaagataacgctctgataaactcttttcactggggagtaagcctttgttacaggaaatgctctaygtatattttaaaatcattagatttcccttctctctgccagggacatcaggtgatattttttggtatatactgtgagaaccaagttgtattcctggaagtaaagcctgtaagtgtttagggggcgccttgaagactgcagcccccaggaggctccagtgctcacactggtccatactcagcctcttgccaaattcctgcttaggtgttcctgccagtttgtggttccactggcatcagctgcaggtgatctggtgtctgctgtgatgctctgtaatctcctctctctcccggtttcaggctggtagtttccttgagacctcagttctctgatgggtccaagacgtcattgatttttagtttctccagcttttttcgtggtgtcgagatatgagtgatgacttccaagctctttagatgttgaagctgcaaccagaagtcttccatgaactttcttttaaaaatagacagtatggcatagtgcagtgtttctcaaaagaaaataa

SEQ ID NO: 327118 - DNA, 599 bp, Homo sapiens
gcttttttcgtggtgtcgagatatgagtgatgacttccaagctctttagatgttgaagctgcaacyagaagtcttccatgaactttcttttaaaaatagacagtatggcatagtgcagtgtttctcaaaagaaaataaatatattgatctctataccttattaagtggtgatatattattttattataattttatgttaaaatagagaaacacgaatttagacctaaacactgtaagcctacacttcttaaccaagtttttgaaatataatgcatatgttaattaaattttaaaatctcgcaaaaaaattaaaattttaactaacaccaccaatttaagattgtgtgggcaagccaaaatattattataggtttaatagaaggaagatactattcaattctgatactgtccttggtctgtttctgtatttgacttcaataattctcatataggaaagttctgtttaataaggctatataaaatgttactggtaccttcacagttttctgcttatgattatcaaagaaaaagctctgccaatatgcaatttttcaatgtcaattttattaaagaatgttttgataattctgtaaatgctt

SEQ ID NO: 327119 - DNA, 599 bp, Homo sapiens
gcttttttcgtggtgtcgagatatgagtgatgacttccaagctctttagatgttgaagctgcaaccagaagtcttccatgaactttcttttaaaaatagacagtatggcatagtgcagtgtttctcaaaagaaaataaatatattgatctctataccttattaagtggtgatatattattttattataattttatgttaaaatagagaaacacgaatttagacctaaacactgtaagcctacasttcttaaccaagtttttgaaatataatgcatatgttaattaaattttaaaatctcgcaaaaaaattaaaattttaactaacaccaccaatttaagattgtgtgggcaagccaaaatattattataggtttaatagaaggaagatactattcaattctgatactgtccttggtctgtttctgtatttgacttcaataattctcatataggaaagttctgtttaataaggctatataaaatgttactggtaccttcacagttttctgcttatgattatcaaagaaaaagctctgccaatatgcaatttttcaatgtcaattttattaaagaatgttttgataattctgtaaatgctt

SEQ ID NO: 327120 - DNA, 573 bp, Homo sapiens
ggaaatcatcacatagggaagtggtcagcactgtggatatacaccaaacagtattacagagacatactgaaaataaagcacactgacagaaagaaacctcattaggataggattttgggagattggtgtcttgttattcccagagtctgacttttctaatcacgtagyattgtcagggatatctaaattttaaacttcagattttgtacaaaaaaacctaaaaggactatattttaaaataagaagcatgtacaaataattgtaaaggaaagagtgtgagttttgtagtctccagttctgtgtcagtaagaatttgatgaggaatagccaatagcatttatgctggtccaggctggatcaaattgtgatcgtacttctagtcttcaagctgcctggttagaaattatgcagcttactttgatgcctgtcctactactactattagccttttagtggttaccttaagaataactgaataatactgttactttgcatctctcaaagaccgtgcgctgttcccgcatactttcttgcagacgtattgtcttctgaaggatggtgcccatgggcaca

SEQ ID NO: 327121 - DNA, 480 bp, Homo sapiens
tattcgctcacagttctgagatgcagaagtctgaaatgcaggtgtcagaaagaccatgtgccctttcgaaggctctagagaagaatcttcctgtgcctcctcccagcttctacgggctmctggcagtccttagtgttccttgcctctgtagctgcaccactcatctttcccgccttctttgtatggtcttctctgtgtagctatttgttcttttcttacaaagacatcagtcattagattagggttcaccctaatccaatatcacttcattttaacttgattacatctccaaagaccctatttccaaataaacttactttcactggtacctatggttaaaactttaacatatctgttggtggcacagaattcaacccatatagcagtggtgaaacatgtttgcacaggttacgacaacagctaaaaagtagcaatactcagctgtatctcaacaggatcatttaagatgtcaggagaaag

SEQ ID NO: 327122 - DNA, 511 bp, Homo sapiens
tactctgaatatggggttccttttatccttttagttgaggtgttttgttgtctttgacttgagctagtaaatgcttgtttcataattacttgaggatgtgtgtgtgtgtgtgtgtgtgtcaatggacatttaaaaaattatctaatgtgcaactcaatgtgtatttgaaatgccattatctaacttcaaaaatgcagagaagcctgctgaagatctctggtatccacttaatgctatctgttgtggtttattaaggagatatatcctgaggggaggyagtggaaatactcaaaggcacctatgtgctaagattgtaaaagcgacaacagttttactagtttcctcgggaagatattacattttggagttagttgcccttggttatgtactttttttctttatgtttgtaatcttcagcttatagaacgctattttttttctcaaaatgctttgcctatttgtaaggaattagttacagataatccatatcttcctatctaattgtgtttgt

SEQ ID NO: 327123 - DNA, 480 bp, Homo sapiens
tattcgctcacagttctgagatgcagaagtctgaaatgcaggtgtcagaaagaccatgtgccctttcgaaggctctagagaagaatcttcctgtgcctcctcccagcttctacgggctcctggcagtccttagtgttccttgcctctgtagctgcaccactcatctttcccgccttcttygtatggtcttctctgtgtagctatttgttcttttcttacaaagacatcagtcattagattagggttcaccctaatccaatatcacttcattttaacttgattacatctccaaagaccctatttccaaataaacttactttcactggtacctatggttaaaactttaacatatctgttggtggcacagaattcaacccatatagcagtggtgaaacatgtttgcacaggttacgacaacagctaaaaagtagcaatactcagctgtatctcaacaggatcatttaagatgtcaggagaaag

SEQ ID NO: 327124 - DNA, 480 bp, Homo sapiens
tattcgctcacagttctgagatgcagaagtctgaaatgcaggtgtcagaaagaccatgtgccctttcgaaggctctagagaagaatcttcctgtgcctcctcccagcttctacgggctcctggcagtccttagtgttccttgcctctgtagctgcaccactcatctttcccgccttctttgtatggtcttctctstgtagctatttgttcttttcttacaaagacatcagtcattagattagggttcaccctaatccaatatcacttcattttaacttgattacatctccaaagaccctatttccaaataaacttactttcactggtacctatggttaaaactttaacatatctgttggtggcacagaattcaacccatatagcagtggtgaaacatgtttgcacaggttacgacaacagctaaaaagtagcaatactcagctgtatctcaacaggatcatttaagatgtcaggagaaag

SEQ ID NO: 327125 - DNA, 631 bp, Homo sapiens
tattgactactcttaatgcttaaattcaaccggtattaatcccagtacctaccatctgttcttcttccagtcaatgcytatcaattaggagaaactgcagattcagcccaggagtattttcatcttagatatggttgcatgatgactggcagaaaatgctatagagtgaggtaaaaagattatgattctcctctacttaccaaggtgtctcacagtgacaaacccagtgatcaggaaacccagactcccttaccatcagctcacttctttgttcaattttgtttgaccatttcataggctgacaggcatcaaaacatggactcccatacatcgggaaagtagctggatcttcctccagtgttgtaaaggccactgcggccaaagttttcaatcagaattactaagatcgaccgaggcaggaggcttacttaagaccaggagtttgaggccagcctgggcaacatagaaagaccctgtctctactaaaaatataaaaattaattactaagatcacagttactggaaaacttgttctcacttgtcattgaaaagaagtccttgttattttaaatgcttctgtatcttctgttgaatttagtgagacttgccttctcattttttctacattaat

SEQ ID NO: 327126 - DNA, 530 bp, Homo sapiens
aacatgtaatgtaacatttctaaataagcagatctacagtttctattatttagagttaagtacattgaatggccaaatgttctaaaaatttaccaagacaagtcacatgttgaagataattaagcacaagagaataatgagtaaattagctgtcacgtgataaagagtgtgaactcttcatcagccacatcgtgaggcaataatgatgacctaattgaatatgagatgttgcaaaaaaatttaatgattgagtatcctgaaatatacatttacatttattattattataaatgggttccttgagatattrgcaataatactttgaaaacatcatgattagcatgacattttaacaaatacaacagaaaggctggtaaaacagaacaagagcccggagaaagacccatgtgtagagagtcatttgatttttgacacagcttacactgcaatgttgttgggatgggaatgtctttttagtaagtggtgcaaggttaattaggtatctacataggaaagaccaaatcaaacct

SEQ ID NO: 327127 - DNA, 530 bp, Homo sapiens
aacatgtaatgtaacatttctaaataagcagatctacagtttctattatttagagttaagtacattgaatggccaaatgttctaaaaatttaccaagacaagtcacatgttgaagataattaagcacaagagaataatgagtaaattagctgtcacgtgataaagagtgtgaactcttcatcagccacatcgtgaggcaataatgatgacctaattgaatatgagatgttgcaaaaaaatttaatgattgagtatcctgaaatatacatttacatttattattattataaatgggttccttgagatattagcaataatactttgaaaacatcatgattagcatgacattttaacaaatacaacagaaaggctggtaaaacagaacaagagcccggagaaagacccatgtgtagagrgtcatttgatttttgacacagcttacactgcaatgttgttgggatgggaatgtctttttagtaagtggtgcaaggttaattaggtatctacataggaaagaccaaatcaaacct

SEQ ID NO: 327128 - DNA, 614 bp, Homo sapiens
gaatcatttatgatgcatctactgtgtttaccaatgctctccagaatgtcttctgggctctgatttcagtctggaatcgagctccatctcttttctagtactcarggtatcctctcagtttttcatgtttcgaattcttagctttcttacaatggtcattgatttttcccccacttctattttcacttatttgtatttggtatcagaggggagacttcaacattgatcagtctgctatcttgaattgaaagtgttgtctgtgctccttgaaaaagacacaactaaaaaaaagtggcaagtgtagtggctgtgaaaacacccctctcagatctgtgactacaagaagcggaatgactgaggcccaaattctctgttagtcacattcacctgcgttcacgcacctacaggctcccagctaatgacaattacacggagggctgctgctctagaaagatgcaggatagctctgacctgcaacttttgcccgatgttttccacaatgactttgctgaactttctttacaacatcactaatgtctaagatgctcccatacagccttccttttctgtctccttctctggatccctcttccagcctcttctggctcccttcc

SEQ ID NO: 327129 - DNA, 574 bp, Homo sapiens
gggctataacatataaactttgggggagacataattcaggccataccagtaggctaaagttactcataatgtgtatattagaaatgtgtatattagaaacttcattagcaaaagtaaaatgtgtctattgcatcattgttttaagcaatattttcatgatctatgaaaaggatatttcacagccttattattttgagaggcatatgtcttaatattcatttgttaatttatttatctatttaaacatgtattcaacatcactaagagatgctmtggcgttgatcttaaggacccagtctctggaggtgagcacacagggcctgaatcccctatctgccacctaatagctgagtgaccttgaataagctttattaatctctctctgcctcactttactagtttatacaataaaagtgataatagcacctatctcaaaactgttatgactattaaatcagttgccacagtgtcagatatgtattagattaaaaaaattaattcatattattaagtagttataagcatatattatatgccagtaatactatgtgactgcacataaacaataaacaca

SEQ ID NO: 327130 - DNA, 606 bp, Homo sapiens
cttcacccaggaaagaattaaagggcaggtcagtgctgttaaacagcaacttttgttgaagcagcagcatacagcatcagcagaggtactcatccttgcagagtagggctgcttcgtaggcaatgtgcccagagcagcatctcagaggcaattctgcagtcatatttatatgcacttttaattatatgcaaattaaagggtggattatgcagagatttctagaaaaaggatggtaacttcctagtcattgggttattgacatggaaagggacagtacctttcaggtgttgccatggcaattgtaaactgacatgacacagtggtaggcatrccttatggaaagctgtttcttccctggccctgtttaagctagtactcaatctcgtccagtgtccaagcctcatctctggagtcaagtcccatctcctgagtagagttctgctttctacctcattttcatacactggaacactatataacaataaaaaggagtatattactgatatttgtttcaacatgaataatttctttttagttttgctaagtgaaaaagatgaaaaatactacatagtttataatttgtttatattaaatacccagagaggg

SEQ ID NO: 327131 - DNA, 534 bp, Homo sapiens
ctatatacctttcttgtgtcagagaaaatacttgccaaactgtcacctttgaaaacttgaaaatcaagccatgtgcctactaagcttgcaattctaggggaaacatttgtatagatccagaatgtcaatatgtatcagtggtgtttcttaaggcttacagcaaagtactacaaacatagagatgagctctggaaaaactggatgttttacaggtgatagaaagaatttataaattcaagacattaaaggttgggaagcggtctgcaagtacatttcctactagggcaagtgtttcagatagcctcaagagatacaccatcgtgtgtgtgtgtgtgtgtgtgtgtgtgtgtgtgtgwgagagagagagagagtgagacagagagatgagagagagagagcactgaaaaaaagtaaataaatacagcaggaataagtacaatatccagaaaatattttgatatgattattaacccacatatgtgactataatgaaattttccaggaatctgtatgtttgagagaattatattactg

SEQ ID NO: 327132 - DNA, 534 bp, Homo sapiens
ctatatacctttcttgtgtcagagaaaatacttgccaaactgtcacctttgaaaacttgaaaatcaagccatgtgcctactaagcttgcaattctaggggaaacatttgtatagatccagaatgtcaatatgtatcagtggtgtttcttaaggcttacagcaaagtactacaaacatagagatgagctctggaaaaactggatgttttacaggtgatagaaagaatttataaattcaagacattaaaggttgggaagcggtctgcaagtacatttcctactagggcaagtgtttcagatagcctcaagagatacaccatcgtgtgtgtgtgtgtgtgtgtgtgtgtgtgtgtgtgtgagagagagagagagtgagacagagagatgagasagagagagcactgaaaaaaagtaaataaatacagcaggaataagtacaatatccagaaaatattttgatatgattattaacccacatatgtgactataatgaaattttccaggaatctgtatgtttgagagaattatattactg

SEQ ID NO: 327133 - DNA, 512 bp, Homo sapiens
ttttttttttttgttttttttcccaacatggaactgcaaaaaaaaaaaactcagaaaaatagaaaaaaaaactaaaattagtatgtatattattgtaaatgcaatcaatatgacattgtcattaaatttaagtttaattttcccaaatcggtgcattagaaatctagacactttccttcattcttgccttatatatgctatttcatctatcttgattgaagcagagcataatctaaacaaaagttcaagtatttctctgcttcaagaagaaacaggcaacttgtaatttcctgagtagataatggggtttatgtgaactataaactgatactgtggtattatgacagttgtcagcacagttagcttagactcttttggaaacctaattctaatggaaggtgggccagtggaaagtggccaatatagaaatgttgctttataatgatcawtgcagaacccatttctgttagtccacagtgtactgttaagttttccacaatatcagccacagg

SEQ ID NO: 327134 - DNA, 495 bp, Homo sapiens
cacaatatcagccacaggaacatggatggatggagcatagagaaagaggaccaggcaaggaaatgcataaagaaattagtctttttcagtgcagtcattcatctagggctcaatggtccacaggggtcttggtcttctgcatttaagccaataggtgtggtattataaatggattttgctgcctaacgaatggaaacagaatactcttcatttgtcctcatgcttaaacacagataggtattagaaatatctccaatgatcttggcctgcctcctccaaaagatacataaaataggaaacaaactataagccaaacctggatttggtggtggtgagaaacaaggaaggtggagaataaagtttgcctgacagcaaatgctccttatgatgttccaattcaaaactgaaccttgggycagtggagcaaggtatgggaactaaacttgagagtttacatcatgctatggcttgaagaaggataaagagctgccgttt

SEQ ID NO: 327135 - DNA, 581 bp, Homo sapiens
gcttgggcaatttatccaacccatttaaaccaaaaataaaacttttcatgtattacctggtcatttcaaacaaaaatattttgatcatgaaaaagaataccaatattcttttgttctaaaaatctcttatgggattacatgttatatttttggtttctctctactgatcaacagactacattttcacaactcttctttcctttacgttttaacacacagacccaagattcatactattaagattctagtagaactctagatggtatgcctctgtgtatctcagcatttttrttcccactcttgtataatgaacatgttaacacctacctcacagggttgttgtgaggatcaagtaagatattgtgtgtgtgaagatgctctgtgaaatcataaagtcctttaaagatgtaaggtatgcttcgcagtgatctctctgaactggaatagcttttccccgctggtataatgcagacatttttaatctgtaatcagaataggagtgaaagcaaaatgaaaatgcaagaagctgaataaatgtcatggcaaaaagagagatgctcgagaaaaagaaaagattttat

SEQ ID NO: 327136 - DNA, 578 bp, Homo sapiens
cattctcagttattctttatttgtttgtgtttccaccttcataactactccagctattgcctctagtctccctcctaaggatattactcagaaacatagtcttcctagaatgctcacaaagcttccattatcactaatgagagctacttatgtgcacctggggaagagctacctgttaatattctatctttattttgctaacgggctcagccttaacatttttcactattatttggctgctccaatgtctctctttttttattgtgtctttttttttaactccataatgtactttcttagtagcactagttatgagttagcagaactgagtgtacctgagtagggatggttccaggtaacttaggtaaatgctgctcatccttgacagttacatggtgtttagagctttctgtgggttcacaaattagcggtggctcacacgtgtaatcccagcgctttgggaggccaaggtgggtggatcasaaggtcaagagattgagaccatcctggccaacatggtgaaaccctgtctctaccgaaaatacaaaatttagctgggtgtggttgtgcatgcctgt

SEQ ID NO: 327137 - DNA, 605 bp, Homo sapiens
ctcttttctgctcataaagtctttmaaataatagcaaatatattttcatggaatatttctaaatttacaaggctaaagagcaaaagaatcccatgaacggatcataaattttgaattcttgaaaaaaggaaagacaactctaattggtggggtgaaaacaccatgcaaaatatataacccgtctagggtggaagtggaacaattctggaggtgtgccaagtatggagtcagtaggggcaaaacaggagagcgtctttcagtgatctcttaaggggccggagagcaactgggcatgtccttatttcctggcttcggcttggatgaggtaattggcattgatgatgactgtccctggggttaattcactctctttagaccctgaagcgagagtggtacacagtgttttatgtcttgtactctagatggagattgcctgaaggaaagggataaataaattctacatggaggaaagttaaaggactgttagacttggttcagtagcacattctgcatcccttctgagaatagaagtttcattctcaatcaagaacatgaagtttcccatgtgtgaatagaagctcaataaatatttaatcaaaagaaat

SEQ ID NO: 327138 - DNA, 605 bp, Homo sapiens
ctcttttctgctcataaagtctttaaaataatagcaaatatattttcatggaatatttctaaatttacaaggctaaagagcaaaagaatcccatgaacggatcataaattttgaattcttgaaaaaaggaaagacaactctaattggtggggtgaaaacaccatgcaaaatatataacccgtctagggtggaagtggaacaattctggaggtgtgccaagtatggagtcagtaggggcaaaacaggagagcgtctttcagtgatctcttaaggggccggagagcaactgggcatgtccttatttcctggcttcggcttggatgaggtaattggcattgatgatgactgtccctggggttaattcactctctttagaccctgaagcgagagtggtacacagtgttttatgtcttgtactctagatggagattgcctgaaggaaagggataaataaattctacatggaggaaagttaaaggactgttasacttggttcagtagcacattctgcatcccttctgagaatagaagtttcattctcaatcaagaacatgaagtttcccatgtgtgaatagaagctcaataaatatttaatcaaaagaaat

SEQ ID NO: 327139 - DNA, 573 bp, Homo sapiens
tttatcatgacttctttggcagcaagataatattttcttcccccttaaaacatctttctaatttacttggttttaataaaygggaaaaaatggaaacatagttttgaaaacctagactcatttttattttcaaagaaaagatttgacaagagatttcttgcatgaagttacattcttctgagaagcataagaataacatagcggctgatcagatattatgttggggaaatgtgaagttcaggtggcttggcttaaaaaaacacacagtgtaacctagggaaattaaggtgatatctcattcatcgaaagcaatttctctcagtttaatatcgtttggaaaactggtagggcaaattatcacaacaactgtgaaagaaaaggtgaaacttggagtttctttcgtagactatagaatctgtgtatttcctcctctaacaattcctttgattccttctaaacaatgatggttgaaaaaaataagtaataattgaagttttatatgttgtaaatattggggagatgatgtcaatgacaattttatgtaaattatgttttaatagactatgaaagcag

SEQ ID NO: 327140 - DNA, 567 bp, Homo sapiens
ctaaccaaatatatgtaattatacaataacattatgaagagagtgagaaagagaattgtttattttacttttcatgggatacaataaaacatttatacattaaatgttctttgaaggacctagagaaacattgtattattctgagatgtttttacccttacttaatcactgtttgctattctaggcaaaacaaaaacaaaacacagacacacacaaattcctctccagtaagtagtgtttcaagcagcagcttgttgagactatgatgcagagagatttggatctcatccaggttccacaacagcatagctgcatgacattgaacaaattacctaccttctctgatcattaagcttcatccctacaatgggaatacccctatgtccctactggcaagacagaactgagctagcagacacaatgtgccttttaacagtgtttggaacttgataaatattaagttatagtttatatcaatcctcttcctttttgccttcatatcactaatatgagttttctatgttatttgagaaaatgcarttctactacagaaaacaggaaaacaaa

SEQ ID NO: 327141 - DNA, 605 bp, Homo sapiens
ccttgtgtttcctttttattgttaatacggttgttacatttacagagaaaaagagcttttatataacataaagcacttttttgtgtgttactttcaactaatgttctgtttgttttgaagacaattcatcttaaattgatatagagagcctagagtacaaataaaagtataattttgtccaattgccaattaatcaggagttaaaagcccttgagcagcgaatgggccagaccctgcagtcagaggaaaacagggacccttctgtgtcatataaatgaagacctttyccactgaagggaaaaactcataaaaaatgaataggcattattgtcacattatccacatcatttaattttgtcttctctcttataacatttggcacagaacaaatggatgacattggatgtatgtgtactactactggtgacttaactatcagcatgatttagggattcctctacagctgggcgtatcttttcctttgatgctttgaaaattaaggcagagtcgatcacctctcctcagtcataatcatttgcattttagtcttctctcattgtggggccttaaatttagcaaggatgttatttcccagttcaaggaga

SEQ ID NO: 327142 - DNA, 602 bp, Homo sapiens
ttgaagaaggaggagagagacatcgggagcagagaaaaagcaatcaaaatgtttgagagctattyaaaaggtagaatttacatttgtgatgataaattagagatgagaagatgactcctacttttcaggcttaatcaacctggcaggtggactatatctccacttgcttctattatgggttctttttcttttttccttccatcttttctttcctttccttttctctcttttcctttttttttttttctttttgagacagggtctcactttttcacctaggctggagtgcagtggtgcgatcatagcccattgcagcctcaacctcttgggctcaagcaattctcctacctcagcctcgtaagtatcttgggttacagggacatgctaccatgactggctaatttttgtagtttttgtagagccatggtttctccatgttgcccaggctggtctcaaactcctaggctcaagccatcctcccgccttggcctcccaaagtgctgggattacaggcgtgagccactgcatccagctcttctcttttctttactttttaaaaactgtctcttattttcttttcaataccttaaaataaaaaagtt

SEQ ID NO: 327143 - DNA, 602 bp, Homo sapiens
ttgaagaaggaggagagagacatcgggagcagagaaaaagcaatcaaaatgtttgagagctattcaaaaggtagaatttacatttgtgatgataaattagagatgagaagatgactcctacttttcaggcttaatcaacctggcaggtggactatatctccacttgcttctattatgggttctttttcttttttccttccatcttttctttcctttccttttctctcttttcctttttttttttttctttttgagacagggtctcactttttcacctaggctggagtgcagtggtgcgatcatagcccattgcagcctcaacctcttgggctcaagcaattctcctacctcagcctcgtaagtatcttgggttacagggacatgctaccatgactggctaatttttgtagtttttgtagagccakggtttctccatgttgcccaggctggtctcaaactcctaggctcaagccatcctcccgccttggcctcccaaagtgctgggattacaggcgtgagccactgcatccagctcttctcttttctttactttttaaaaactgtctcttattttcttttcaataccttaaaataaaaaagtt

SEQ ID NO: 327144 - DNA, 487 bp, Homo sapiens
cacttaatatcaatatttggaaatcattactgcttgaatatcattggtatagacctgccaacataaaattacctggtatatttgattaatggtgtagagtgagaagcacacatggacaaacgactgtgccataattttgggaaaggttgctttaaatcgtaatcagaaaaatcactcatgaaacaatagatgataatgacccttaagaaacagctratacaattatggaaatatcacccacagtaaaaaataaaatgaaaaaacaacagatcttatgttcctttaactataagctgaaaggacatggtcaggtctaaaggctgccaaatttaagtgatctcaacaatgccttgaaaattgcttttgggcgctgaacaaaactgtaacatttacaaattccagtggtgatcctgggcaaagatagcacagtgaacttcagaccacagacagcattttactatgagaggtgaggtatgaagagctctac

SEQ ID NO: 327145 - DNA, 581 bp, Homo sapiens
tgctgtagctgggataaaaacagaaactgcaccagataattctttttcccttgtacaaaatcagacaccaagtctcaagaagttatctgatatcgagtgggaaatttttaccatataaagtacttctaatgaggaaataatgtaaaatttcatgcaatgaaatcatatgttatatgaaatatgcctgctaagcaaatcaaatacaagcattgcacayggtaaatcagaacttttaaatgtgtaagtgtcttgcaataactcaactaagtcaagaatgtttagatggcatcctaaccaccagcataacagtgtaagtttaggtcatcaacaaattgtttgttgactgcatgtccacatgatctgcataagttatgtgatctcattcagttcattggtgccaaataccatctgcatgctgaggcctcctcaggttctatctctatctctgagattgtctctctaagacatatatatgactcatatatatacatacaacttccttcttgatgtttatacctttgtacctcatagctacttcctattaattgtgttcaaaatgaagctcatgatttttctcccca

SEQ ID NO: 327146 - DNA, 525 bp, Homo sapiens
aattgcctatcatccagtgttttgtaacgcagacacccttagggagagtcatggaggtctccaagcccaggcttataaaagaagaaaataaagaaaattaaaaagttcttcaggaggaggaaaactaatgcattatcccaggtaaagggccctggaataggaaagtctcctgagaaccagaaaggcaattatatgctaagattgggattcaatgttctcgtaagtcatatgactagacttgacttcttcagtctccctctgcacttcatgtattgccaatggtcctccacatagaatgaaagggagagaattatggctgaaagtcttaaaatgtctggactcagaattctacagcgctgacagatcatcctgaaacaaggcttgcctagtttagcctctgtctctgcaaatctactttactgaaagttcatttcagtgccgctcattggtaggaataaaataaatttcaacagaaaaaaaaaacaggagagaaakaagttattaaatccatttctagcctagaat

SEQ ID NO: 327147 - DNA, 588 bp, Homo sapiens
acttcatttttggggcataacatctttataggaaatggataaagtcccaatactaacaggagaatgcttaggactctaacaggtttttgagaatgtgtcagtaagggccactaaatccgatttttctcggtcytctttgtggtctaggaggacaggcaagggtgcaggttttcgagaatgcatcagtaagggccactaaatccaaccttccttggtcctccttgtggtctaggaggaaaactagtgtttctgctgctgcgtcggtgggcgcaactcttctgatcaccagggtccagggaccattgcgggttctcgggcaagagatgtttctgctgctgcattggtaagcacaactcttctgatcagcagggtccagggatcattgcaggtttttgcgcagggggagaaacaaaccaaaactgcaggtggttttgtctttcagatgggaaacactcaggtatcaacaggctcacccttgaaatgcatcctaagccattgggaccaatttgacccacaaaccctgaaaaagaggcagctcatttttttctgcactatggcctggccccaatattctctctctgatgggga

SEQ ID NO: 327148 - DNA, 588 bp, Homo sapiens
acttcatttttggggcataacatctttataggaaatggataaagtcccaatactaacaggagaatgcttaggactctaacaggtttttgagaatgtgtcagtaagggccactaaatccgatttttctcggtcttctttgtggtctaggaggacaggcaagggtgcaggttttcgagaatgcatcagtaagggccactaaatccaaccttccttggtcctccttgtggtctaggaggaaaactagtgtttctgctgctgcgtcggtgggcgcaactcttctgatcaccagggtccagggaccattgcgggttctcgggcaagagatgtttctgctgctgcattggtaagcacaactcttctgatcagcagggtccagggatcattgcaggtttttgcgcagggggagaaacaaaccaaaactgcaggtggttttgtctttcagatgggaaacactcaggtatcaacaggctcacccttgaaatgcatcctaagccattgggaccaatttgacccayaaaccctgaaaaagaggcagctcatttttttctgcactatggcctggccccaatattctctctctgatgggga

SEQ ID NO: 327149 - DNA, 605 bp, Homo sapiens
ttctaggtgtagcacttagcagagtaactggaacctactcagttgaatgaatcctcagatgaatgaagaactcagatgaatatagatttggtggttgctcttattactactaccgtcatgcatcacttgatgatggggaaacattctgagaagagtaatattaggcaattttgtcattgtgcaaacatcctagagtgcacttacacaaacctagatggtacagcctattgctcctaggctacaaggctgtacagtcctgaatgtcatggtcctgagtactctgggcagttgtaacacaatgataagcatttgtgtatccaaacatatctaaacatagaaaaggtccaggaaaaatacggtattataatcttacgggracaccttcatatttgcagtccacagttgactgaaatgtcattatggcacatgactgtattatcatcatctattaaaatcaaatcatgtttccatggctcagaaccaaaaaacaaacaaacaaacaaacaaaaatcctgttgcctacctgctctgacttctctttataaattaagagattttatttgtctactctttctaggtactatgagagttactatataaaattt

SEQ ID NO: 327150 - DNA, 674 bp, Homo sapiens
gattgatgaagggtcagttcctttgggtttagtctctattcttgcgttgtggctttctatttggagagtgaataactcagaactaagttattgcttcactgttaaggctggcaggggaagaaagaggcagtagtggagcacagaatctatctgtgttagccctctgtcaccgactactcaatccagcttttggcttcacctaaatgataaatggtcctattgtttgggctttagtattttaaaaaatagaactaaatctagattaagcaaggacagagacccatttcattgcactgtactttaatattcctgagatccatggcattacgggtggctccttttaacagccatctctctccagggcagaacactatgctgtctttgtttcatctgatctttcagctaaataagagatggtcacttatcctcactactcccatatcctgctggatttctcttgcgaaaagagaaactcaccacacgggaaaaggtagaggtttcaggcagagcatttcagcgtgtgtttacaggcaggactgacttactcagcaaatcctgytcagaggagcttcagccaatgaagaggctatatcccggcttgcttgggggcttctgagtttgagctgcatgcagaaatgtaaggcagtgcttcctggcgctgatggcaaaatggg

SEQ ID NO: 327151 - DNA, 625 bp, Homo sapiens
acctcattttgcttatgtcaaaacaatttctgcttcacccactatcaccagatttcagggtgggagggtggaaaggcatgtatttaaatttgttgtaaacctaataaagacaatgggtaaggaaaatggcatttgccaaacattaacatcgtggaggaggctctgggacatagtggaaaagacatgggttatgtaccaaggtaccaagaaagcagtgccaggtcacttgattgctctatgcccagttttatctrtaacaaggatgttgagatgaactgttaccactgaataaagttctttgtaatgctccacacatgataggtgccgtctgtttttgagtcccatgccccacgtgttttcttagatattgaagtttgctttatttttcacattaccttaagcaatgagtggtttcctcaaacacatcactttgccaccagaaactggttacacttacttaaagtttgtctggggaaaaaagtgatcagtatacatctgaggttgtgtgtgtgtgtgtgtgtgtgtgtgtttatattgttggcaatcgtgtcaccctgtagtctgtgctagaaaaaaaatatggctgtgaacttcacattttattaatttgaaaaagtgcagaatg

SEQ ID NO: 327152 - DNA, 629 bp, Homo sapiens
caccaggcactggagggcctgttattgttatctaagaaatcagtagggacgctttcttttcctaaagggacaagggyactgtgacttgccacgtgcttcttcctttcccgaaattgtctttatctcatttccatgctgctattctctacccatgcttgaaaactcagcttgagtcaagtctttctaggaagatgtcttcaacaactccaaaaatgaagttgttattatgagtcacacaaaccacaaggagactggaaagaagaaataagaagcagcttcagcaccatgaaccctgtggaccactggctgtgtgctaagggctgtgcctgtcccatctcattcactcctcacaacagtcttattaaacgccattgtctccatgttatagatgaggaaactgactcagacgcaacctattcagaaccacagctagtgaagtggtagagccaagactcaagtccaaactctctgaatccgaaattggtactcttaatctttatatcacactgcacatttccttctgagtatgagaacagcctttggattacattgaaacagtctatttacatgtctgtctcctgagtggccagaagctacttgggcacaggaattctgccctactcatcttc

SEQ ID NO: 327153 - DNA, 588 bp, Homo sapiens
gtttattcagcaagatatagctgctgtgtcaaagcctccatctagaattgtgcatatgctctgctgcatatattcctatagaaacagcaaggcagccctctcaggggagttgaccaacagtcagtcttacaagccaaggttaggatgccatgtctaccttaattaataatcctttcatcgtcctacaacccagatgacaggatgcttaagcatgtgagtcagaaccccaaatgtaaaatcctgcagaagcttaaaaaataaaaaaagcatgatactggctgttatgaatttgtgagttcaagccctgtctaaaggcaacacaattcactttttaaacaaaaaagaaagaaagaaaatatattatgcaaggaaaacagagctgccccagtcytgtagcacacctattcccatcccattagaaagaattataaaatttctatgcaagagaagacttctgaattcatctatgccagcccttcacaggtgccctgaaccccctcacaacattcctgaccagatagcaacagagagattgctccctctcaaacctggccattctacttctggacaatgccaagtatgcctaag

SEQ ID NO: 327154 - DNA, 574 bp, Homo sapiens
ccaagtatgcctaagtctttaaattgcactgaaatctatttcttagaactactaaataagaaacctgaggccctttccacatgaaaactcaacatgagaatgaggagggttttcatactctgtacagcctaaagatttcaaattccttcaagcagggccctgtgacttcagggtggtaataagcatttaggtggctagccctattctaatgttttaatgtattagctcacttagtgctaattacagtctagttaagggaaagcatttattgtccccattttacagatgcagacaccaaagcccagaaagataagtaagttgcccaaagtcacatagttagcaagcaggagaggtgggatttggacccaggtaggctggctccacacctctgttctcccgcttctgagatgkagggaaaacacaggctttactgttacagtcctgcatttgaataaaagctccaacatgtcccctggccaactgactgcccctaagtaagcctctgtttctttatctgtaaggtgatggtcataaagcttacttcagtattgctgtgagattaaataaaataatg

SEQ ID NO: 327155 - DNA, 482 bp, Homo sapiens
cagcacagtgccttgcacatactgagcatgcagcaaagtctgaggaagtaaataggtgaataattaaataaagacctcctggtcctaccctcctgtattagtttgctaaggctgccatatcaaaatgcccgagtctgggtggcttaaacaacagtagtttattttctcacagttctggaggctgaaagtatcagatccaggtcccagcaggctggtttctcctagggyctctctccttggcttgctgacgaccgtcttctcaactgagtcctcacgtggtcttttctctgcgtttctcttcttgcaaaaacaccaccagtcctgctagattaaggtcccacccctaataacctcatttaaccataattacctccttaatggccctattattaaatgcagccacattgggggttggggcttcaaactatgactttgcagggggacacaatttagtccatagcacctccctcccaaagctttct

SEQ ID NO: 327156 - DNA, 614 bp, Homo sapiens
catcttgtactctaattctgcacagaatgtgggcagatgcatgatcctgcacagaagtagagccccccgggatctatctgggtcttcagacccaagggacagcattcatttcttcagtgtttttgaagcctctgtgatgtacaggcagagatcaggctctggaccaattacaatgaatactgccacccacctcatggcacttgcatattagtaggggaaaatagccatggggaacatcagtaactttaaacatagtgataaggctggaacataaaaacagggtaaatcattacagtgactgagggtgatggctaccaggaattgggcagacagrgaaggcatctctgaagaggtgcatttgagctgaggcttgactgatgggaaagggtcagcaatgcgaagagcccagtggggagcattccaggcagagggacctgcaagcacagaggactggacaaaggctggaataaattcaatgtagtattcaaggaatagaaaggtctttgtggaatactgtatcttttcatggtgggggttgcagttgtgtttaaaaaaaatcaataatctcaaatacttaagccctcctacttcattatactttttaaagaagcagt

SEQ ID NO: 327157 - DNA, 622 bp, Homo sapiens
aatcaaagcatgtcagacagcgcttaaacactcaggacattatcattataagaatttctaccttattctctgaataagatgagaagccactggggacttttaagaaaagaaatcactggcttctgtgcagaaaagaaacaagagtgaaaacaggaggaaaaaaaaaagtcactaggaggctagtgcaataatccaagtgagaaatggaccagaatggtagcagtggagatggtgaggagtgttggacattgggtacacaacaaaggcagtagtgaagaatgatgycaagatgtgtcggcttatatgactgcaagaatggagttatttactgagatggggacaggcaggttagaagatatttcatttgtattatgttttaggtgtccactagatataaactaggtgttacatatcatcaccccgacatgctgtgactccttactctgtgcaaatttctgtgcaaaagctttctgacttcataggatgtctgaatttgattaatattcatctttcacactggagtgcagttgcatgagagcagtggctatttcgatctctctctgtgtattcctagcaccaagcacagtgcctgacgaagtacacactcagtgactagtgaatg

SEQ ID NO: 327158 - DNA, 622 bp, Homo sapiens
aatcaaagcatgtcagacagcgcttaaacactcaggacattatcattataagaatttctaccttattctctgaataagatgagaagccactggggacttttaagaaaagaaatcactggcttctgtgcagaaaagaaacaagagtgaaaacaggaggaaaaaaaaaagtcactaggaggctagtgcaataatccaagtgagaaatggaccagaatggtagcagtggagatggtgaggagtgttggacattgggtacacaacaaaggcagtagtgaagaatgatgtcaagatgtgtcggcttatatgactgcaagaatggagttatttactgagatggggacaggcaggttagaagatatttcatttgtattatgttttaggtgtccactagatatraactaggtgttacatatcatcaccccgacatgctgtgactccttactctgtgcaaatttctgtgcaaaagctttctgacttcataggatgtctgaatttgattaatattcatctttcacactggagtgcagttgcatgagagcagtggctatttcgatctctctctgtgtattcctagcaccaagcacagtgcctgacgaagtacacactcagtgactagtgaatg

SEQ ID NO: 327159 - DNA, 605 bp, Homo sapiens
tgtgaattgtgtttcaaactttcttccattctagaatagaaatsaaaggcagactttgatggcttatagcctaaattgttctcacccatgcaacagggtcagccactgtgtaacagaggtcaaagacttttcctgaaagataataaaaaatattagtagtaactaccacatgttgagtatctatcaggtacccgtctagatgttttaccagaattatcttatttaattcctaaaacgactttctgagggaggaattcttattaagtctactttttagatgaaaaaacaggcacaaaggagttgagcaatttgaccagatcacacagctagtggctggtagtctggatttgaatccaggcctttggattccaaaatcagaaagcttaattaaccactctgttatcttttatgagaattagtttccatgtgggacaagttgaaacacctgtttttctggaaagtgctttgccatggtgtagggccacacaaccaatccatgagagcctgcaataaaatccagactaaccccagctctgtcctaaataacaatgaggaagatgattgatatttaacagaggtaaccacaacaatttcgtgaaccacgt

SEQ ID NO: 327160 - DNA, 571 bp, Homo sapiens
tcagcattgagatcaattcctgtttttgcatgtatcaactgttcatttctttttattgttgatttgcattccttttttttttttttttttttttgagacagagtcttgttctactgcccaggctggagtgcagtggcatgatcttggctcactgcaacctctgcctcctgggttcaagtgattctcctgcctcagcctcctgagtagctggcattacaggcgcgtgccaccacgcttagctaatttttgtatttttagtagagatggggtttcaccatgttagtcaggctgatctcgaactcttgacctcatgatccacccgccttggcctcccaaagtgctgggattacaggcatgagccaccacgcccagcctgatttgcatyccattatatggatataccataatttgtttattcatttaccttaatttaggttgttttcaatttttggctattacaaacaaaactactagaaacatttgtgtatgcttttacttttcttgggaaaatacctaatagtaggatggccaggtcatatgataagcatgtatctaacattttaagaaatgc

SEQ ID NO: 327161 - DNA, 571 bp, Homo sapiens
tcagcattgagatcaattcctgtttttgcatgtatcaactgttcatttctttttattgttgatttgcattccttttttttttttttttttttttgagacagagtcttgttctactgcccaggctggagtgcagtggcatgatcttggctcactgcaacctctgcctcctgggttcaagtgattctcctgcctcagcctcctgagtagctggcattacaggcgcgtgccaccacgcttagctaatttttgtatttttagtagagatggggtttcaccatgttagtcaggctgatctcgaactcttgacctcatgatccacccgccttggcctcccaaagtgctgggattacaggcatgagccaccacgcccagcctgatttgcatcccattatatggatataccatartttgtttattcatttaccttaatttaggttgttttcaatttttggctattacaaacaaaactactagaaacatttgtgtatgcttttacttttcttgggaaaatacctaatagtaggatggccaggtcatatgataagcatgtatctaacattttaagaaatgc

SEQ ID NO: 327162 - DNA, 595 bp, Homo sapiens
attgcctccctctagcttttcaygtgacaaagaaacaacaaaacttcatttgttgaagccactgcttagtcagctacagctgaatccaataccccatatgcaaatggagaaaggggatattatctgtgtataattaaacatcatttttatttctttcacaatataaaccaaacagtcatttttaggttttgaaaaggtaaaacagttcaggacaacccattttcctcatcctctgcctcaccactttcaacctttaaccaaaatttcaagtatcaaagcacaatagcactatgctagaatttatgtacaatatatttacatctctgtttatggactctgaaatccttgagggcaagatctgtgtgttatttatctttgtgcctttagaactgaaaacatatcctggcacttattagaagatcaggaaattattatttgaattacaataggagaagcagctctttaaacccatagtacaggctgtgtccacaggatacaaatcagtggtcagatatgtgatatgacaggcaagcggaagggagccaggagagaggaccagcactttgtcattgtaccagtgtcttgcttcctatag

SEQ ID NO: 327163 - DNA, 571 bp, Homo sapiens
tctttcttatttatttttactgtttaaatttgaaaaaagtaagtgtgcatgaggatttcattctggggtctgcattctgttcttttgatttatttcccaatccttccattagtctgtctctattattatataagtcatgaagcccagtaatgcaagtattctaacattgttcttctttttcaagatttatttgaattaaatcctttgcttttctatataacttttagattagcttaccaattttctaaaaaatatatgctgtgattataactgtgatcacatttatctattggtcaatttggagataaataacattttaacaatatggaatcttcaaatctatgaacatttaagccttaaaaaatttctctcaacagtgttctgtagtttagttttctgctacaataatatttyattggtacaaatttatagagcacatattaaatgtaagtggtatataatgcattgtgatcaagtcagagtactaaaggtgtccatcacctgaatacatttttgttaactatatttatcttactctgctatcaaacattgaatttattcattctaactg

SEQ ID NO: 327164 - DNA, 596 bp, Homo sapiens
ataaatgcatgcactgtggtggtgctggggaactgcaggcagggttggggggcaggagctaagtcagctgggaatgagacagagaggacaatggaaaggtttctgggtccttgaagaggtgcttgaactgtgctgaaactgaagaagttagcatcagtaagccaggcaagggaagaggaggatgggagaaacagacaaatagacaagagcactgtaagtgagttgttatgctgatgatgggtctgtgcaaggctttccaggtttggctgggggaacatacagaaaggagaaccagctgacatactaaggaagaacaagggagactagaagcagagtagggagacgacaatgacagagctcaagaggtcagcaggagacagatcatatttcccaagctaagcattttgaacctgactctgaaagccatggaggagccattgataggttttaagcacggaaatgtcatgatcacttttagttgattgcaaaattgtaaacccttctttcctaaccctctgtagggatggctgtgttagataatactacattgtttyaggacttaatgagtagaggtcatctacctccagctgtgttct

SEQ ID NO: 327165 - DNA, 652 bp, Homo sapiens
tctttgaaccagcctaaagcaaaatcaccagatacttaattgttctctttctatattgatcacatatgaatattacttttttccttttcttgtttgcttcccagattgacttcaataaaggaaaacactctgcctcgcatggtttcttcagaaaagccctgtggaatctacctgttgaaataagcacrtctagctgcttctacaactttaattactaaaaaaagaaaagatccaatgcaacactgagaaatgttatatattttttaaaatgactgcttcttatgagaaaagataatgttgcataaccaagacctgatattcaattctcatctatggtaactctggctgtttcaattatgtgaaatcatgttcatcaacaatttgacagagaaaagcaaaagaaaattatttcatgtcttctaacagctgcagatttgtgagcagagagcaaatgacaggagtatatttggatcaaaatgtgaagatgtgcttaattctattccaacactcattctcagccccatttttaacatataagaattcattctcatgtacaccaaccagatccagacttccatgggatttactaccatgagggacggtggagtttgttatgacataaacccttactccaaatatccaacctacaaga

SEQ ID NO: 327166 - DNA, 590 bp, Homo sapiens
tactgaaagccccagagttacctgggggttgggaagtggaagcttctagtgtgtgttaaagacctatttgttcctcccttgttctcaggaactaatgatcatatagtcagtataaaataatagtaactataacataggtaagggtacgctccatccactgagagtcactttcaaacacagccagttaagcataaattgataaaaacttttatgaaaggtaatttgggtaatagttatcaaaattcttcataaaacccatacccatttacctagtaattccacatgtggacaaaaatatagttgtgaagtgatagatgcatgtaaaaaagtaacttaaaatatatactctggttctcaactacttaagacataggggctggattttgtgtctttctttcttccttcctttctttctttttttggagacagaattttgcccttgtcacccaggctggagtgcagtggtkccatctcagctcattgcaacctccacctcccgggttcaagagattctcctgcctcagcctctggagtagctgagattacagacacctgccaccaggcctggataattttgtatttttagtaga

SEQ ID NO: 327167 - DNA, 628 bp, Homo sapiens
actgtgtcagagggtggccactctataaaatcagttcaggaaggactgwcacagaagtactgattcctctcacataggtctaatctagctttgaaggttcatcatgaatcattcagcgataaattgtcctttaacctggaacttttatgcacaattgggtatggtaaattgattgcaaaaatggctctacttctccactccttcttgaatttgtgccccttatatgtaatttttttttctttgatggcgtcttgctctgtcaccaaggccggagtgcaatggcacgatcttagctcactgcatcctcggcctcccaggttcaaaagattcttctgcctcagcctcccaagtagctgggactacaggcatgaacaaccacgcctggctaatttttgtatttttagtagagacagggtttcgccatattggccaggctggtctccaactcctgacttcaagtgattcgcccgcctcagcctcccaaagtgctgggattataggcgtgagacactgcacctggcctatatgtgattttgaagctcttcctacaaccttgaacctaggttgcccttgtggtttgcttcagctgacagaatgcagggaaagtgaagccctatcaggtccaagc

SEQ ID NO: 327168 - DNA, 515 bp, Homo sapiens
gaatattatcttaagcataaacacacatacacacaccattaatacatactaaaaattgtctttcctcagctctggacataaatgaaggtctagtgtttgtctctgaagctagatccacacttagttccccaagctgctggctttgtagactgttaacagaggtctatgaagaaaagtttcctttcttttcttttctttttttttttttttttttttttgagacagagtttcactcttgttgcccaggctggagagcaatggcacgatctcggctcaccgcaacctccgcctcctgcgttcaagtgattctcctgcctcagcctcgcgagtagctcggattataggcatgtgccaccacccctgrctaattttgtatttttagtagagatggggtttctccattagacaaattgattctttaaatactggatgaaagacagttaaacaggttttttgttttgttttgttttcattttaaaaatgttttatttccataggtttttgggggaacacgt

SEQ ID NO: 327169 - DNA, 558 bp, Homo sapiens
gcagcctgtccattcctaagccagtgattttatacctttaaatcccctataagtaactaaactaactacttaaacagtcttttttgaatataggttcatttattggcttaatggcttagaatgcattctttgcaaattcagccctgagggtccaaccagaagatgaaatatgtctggcttggccacggcaggaattgattaaaggaggctcttgcatgcttcctggtactctgccgaacaggaattaaaacacaaacaagatgctgtccttatcttcagtgatttggactgagaggttttcctcccactaaagtggaagtggctgagggtagttcaaaaggagaagcttagttaaaaaataaattaattaaattaaaagcttttcacaagggtgtaactatgaaacaaatgtgtgtttccaawatatcaacttttcaggaaattaaatgaaaattttaatgtgtgaagacttccagaccaggtaaacttgggagctctgggttcttctttctccaatcctctatagtcccagtaggatcagattatctagaaagcatc

SEQ ID NO: 327170 - DNA, 572 bp, Homo sapiens
aatgctatttctgagtaggttttgtgaactccggtgacaccttttcttgaagtggccaattactgagcctctctaccagttaacaatggaaaagtgaggagaagtagattgttagatacccaytggctttgacccatcctttgaaataatgcttacaggaactgattttcatatggctattgatacaatctaccatttggatgtgcaacaagccaatcatcatatgtagtgttctaatctaaacaagtaatcaccttgtaatgagtatgttaaggtaattttgtccctcctaagacttttggaggaagtaggcaaaacgtttgcaggaagaacttacatttgtcaattgattagaaaaatggaaggtgtgtccgctcttcctttaatacagttgatgtttctcagagctctggaaacagaaaacaaaatgtccttgactattaggtcatcaatttaagagactgttgttttctgggtagttagagttcaagatttgttatgtttgatggtcatttgtagcttccttctgagtagaatagattttcaaatcacaaaccacaaggcaagcatca

SEQ ID NO: 327171 - DNA, 530 bp, Homo sapiens
tttggacatttgggagagtgaaattgtctctttctagcttcttcccaagctcctggttgccaggagattctgtctcaactctggtgtccacttgaatgctgctttcaacctcaccactggccatgcccatcatccyctgctttgataactacaaaaaaaaaatcactaatttctttttacaagaggaaagaatactcattagaataaataggcaagattcattgtaataggaaggtgctactagcaagcagcagtcaaggtgatcttcctaaacaccctgtggatagtcatgggctgctttgtgcatttctctgccacgctgtctagctgcccttggctccaggtatatccgtaatcctggaatacagccagagaaggaatcagaagaggtgagggtttctgatggttgagcaacgtgaagtctttattctcagctagggctttcacttttctttatgggacttgaattttgaagaccctcatcatctggaagcttgcactacatcagaagttggaagcagactgttatt

SEQ ID NO: 327172 - DNA, 543 bp, Homo sapiens
aacacatctatgttttggacatttgggagagtgaaattgtctctttctagcttcttcccaagctcctggttgccaggagattctgtctcaactctggtgtccacttgaatgctgctttcaacctcaccactggccatgcccatcatcccctgctttgataactacaaaaaaaaaatcactaatttctttttacaagaggaaagaatactcattagaataaataggcaagattyattgtaataggaaggtgctactagcaagcagcagtcaaggtgatcttcctaaacaccctgtggatagtcatgggctgctttgtgcatttctctgccacgctgtctagctgcccttggctccaggtatatccgtaatcctggaatacagccagagaaggaatcagaagaggtgagggtttctgatggttgagcaacgtgaagtctttattctcagctagggctttcacttttctttatgggacttgaattttgaagaccctcatcatctggaagcttgcactacatcagaagttggaagcagactgttatt

SEQ ID NO: 327173 - DNA, 250 bp, Homo sapiens
aaaaaacattaacagtgaccrtctttgagtagtagatatgaccaatattattctctttgctataaatagtattccaaattttaataatacactttttaaatatttgtatacatacttttatatttcactatactgtgttgaaaagtatatattgtaataagctattttatacatgaaagaaaaaaatttttgcatcataagttgtatatattataataaactatttttaagttaccttgaaacataggtt

SEQ ID NO: 327174 - DNA, 515 bp, Homo sapiens
tttttgctacatgaatagcagataaaatagtctttaagaaaaagaaaacaaaacatgactagacacaaaggggtcatttcctaatgctaaaaggtttaattcactggaaaaatgaaaaagttataaatttgtatgtagttaataacattaccaaatcaatgaaatttgccaaattaacagaataaaggagaaaaatattacactgattacctcagtagaggaagatraaagcattttacaaaatttaatttctatgcatgagaaacacacttagcaaattaggaatggaaagaaacttccttaacttgattaaaaaaaaacaacagctatattacatattatagctaatggtagaaaccacaaagcaatattaagaaaaactaaattaaatacgacctaaataattgtagcaatataccatgtttcttgattggaagacttgatattgtaaacacattaattctcctcaaattgacctataaattccaaatcttaatcaacaactatatgagata

SEQ ID NO: 327175 - DNA, 516 bp, Homo sapiens
ttcaggcactggggtgggagggacaagtgcacccttgggggaactgagagacatctgaggycagctggaagtcagggagcaagggacagaactttaggaagggtgatgagtgggccaggttgtgtggacctcatgggccaggctggacaggtggatcctgtgggccagcttgggtggaagcgtcataggtcaggccaggaagaccttgtgggtcaggttgggggcatcttgtggacaggctggatgggcctcgtggaccaagctaagtggtcatgatgggccagattaaggatgttggacttcttcttgagaacaacaggaggcattctggggtgttaagtggctctttcatatggttaagaacttaaaaggaaggtagccaagaattcctggatcagagaggttaagtgatatggactaggccacacagcaggtatgcagctgaaatgggcccataacctggtctgtttgcttcttgaacgactcttctctcccccgtacctctttgcagggagg

SEQ ID NO: 327176 - DNA, 618 bp, Homo sapiens
tccatgcccatcatgatgccataacttacccaatcggattaaatgaaaatgcagccaaaggtgatcaaaacaatttttactttgacatgggttgttaagaaaccaataaaacccgtttccctccttgggtaggaggtcatccaagtgccatgaccacagccatccctggtcaaagaagggactgcccaacacttcaggctggatgccaatggggtgtggaggtaggtcaaggctcatctggccaaatgagacacaaacaggaagggtaacagccatgtggcacccctggtatcatcatggcttactgcccacaaattacgttcatatctgtcatttcttgaaccttcacatttaatgcctctgaggggactgatgattttcctgccctgacttttggcacacagcagctgagtgcatttaccaaacccagccacaggcaacaggyccggggcccagtcatacctgagtgagcctgaggtctggtccccggaggcaaggtcctcattgttgggcacccccaggtcccctctttcctggggcaggggcttcttccttttagtccttaggggcttctctgtagaggacagatgaacccaggcatggctctgtgactttaga

SEQ ID NO: 327177 - DNA, 555 bp, Homo sapiens
tggcccacaggtatatgaaaagatgctcaacttcattagtaacagggaaatacagatcaataataaaacgagacataatctcaaacctattcagasagctattatcaatttaaaaatagataagtgttggcaaggttatgtacaaactggaatcttatgtactgttggtaggaatggaaaaaggtgcagctgctgtggaaaacagtataaagatttctcaaaaaattaaaaatagaactaccatgtgattcagtaggtctcatttcttggtatgtttaattggatggaagtcaaaattccatgtttatatcagcattattcacgatagccaagaaaagaaaacaactcaagtgcccattcatggaagaatggataaataaaagttgctatattcatacaattgaatattattaagcctaaaacacaaacacacacacacacacatgagaaaatcttgctattgacatgggggaaactgcatggtgttatcttaagtaaaattagccaatatgttttttgtgttatctgatttatgatttgtttaaataattgtgt

SEQ ID NO: 327178 - DNA, 486 bp, Homo sapiens
acaaaataatgaactcagaaataaaatcaaatgcctacaataaactgagctttaacaaagtcaatacaaatattcactaagaaaaagataccttataaattgaatggtgctaggaaaactggatagtcatatgtaaaagaatgaaactggactcctagttctcaccacatacaaaaattaagtcaacattatttaaagacttaaatcaacttaaggccycaaactattaatatcttggaagaaaacccaggaaaatctcttctggacattggcctgggcaaataatttatgatgaagcctcaaataaaaattaaacaaaaaatagacaaataggacttaaataaaaagcttttgcactgcaaaagaaacaatcaacagagtaatagtacagcatgcagaatgagagagaatatttgcaacctatgcatctgacgaaggactaacattctgaatctacaagaaacccaaacaactgaacaagataaa

SEQ ID NO: 327179 - DNA, 590 bp, Homo sapiens
ttctcttgctctcccttgtccttctatcttccaccatgggatgatgcagcaagaaagccctcaccagatactggtgcctttatcttggacttcttagcctccaaaagtataaagaaataaaattktattctttataaattaccaagtttcaggtatttcattttaccaacacatatgggctaagacattatccaactgattcaacaacacttactcaaagactacacttttttcactgctttactagaggactgtactcataaattcagtgaccatatgtgggttagtttttgtattctctattaggttttacgcccatttgtttctttttgaccaatagcatcttgtctttattacactacctttatagaaaactttaatgtagaagcataagtcctaagtttgtcatacttctttaaaactaacttatatatttttgtcctatggcattccatggaaatatttaaatcagtttggcatttttcatatatcacaaagcctgaagtctttgggaatatgttcattacatagttcaatttgagaaaaactaacaacatctttgtaatattgagtcttctagtctatataga

SEQ ID NO: 327180 - DNA, 510 bp, Homo sapiens
cttctaaaaatcctgacaataaggctaatgaactaaaacaaatactgcttcactcaatattttgctatttacttaatcctattaaatatccaagataaatatcttcactaacttgcaaataaattttaaaaattgaatatttgtttttatttgaatataatttttagcatagaaagcaacttaatagaaatgaaatgaaagtagtaatatttatttgagacaagaaaacatctgatttctattatraaaaatgttatcctcataaggttttgtttttctcattctctaagtgccttacatgtaggattccattcctctctgtaataggtgaaagtgtatcatgtttaggtacttttagtaacttttctatgctatctggcatcttcttacacacacacacatgcacacacacacacacacacagaaaaatataatggcacagaaactgccaagtaggaaccgactattccaaatgattttgaactaccctttaaccatagttctcacaga

SEQ ID NO: 327181 - DNA, 510 bp, Homo sapiens
cttctaaaaatcctgacaataaggctaatgaactaaaacaaatactgcttcactcaatattttgctatttacttaatcctattaaatatccaagataaatatcttcactaacttgcaaataaattttaaaaattgaatatttgtttttatttgaatataatttttagcatagaaagcaacttaatagaaatgaaatgaaagtagtaatatttatttgagacaagaaaacatctgatttctattataaaaaatgttatcctcataaggttttgtttttctcattctctaagtgccttacatgtaggattccattcctctctgtaataggtgaaagtgtatcatgtttaggtacttttagtaacttttctatgytatctggcatcttcttacacacacacacatgcacacacacacacacacacagaaaaatataatggcacagaaactgccaagtaggaaccgactattccaaatgattttgaactaccctttaaccatagttctcacaga

SEQ ID NO: 327182 - DNA, 624 bp, Homo sapiens
tgccatttatctagtgatctgtaatatacacatttttttcaatgtaatatactctattggttcattttgaattggaaaaccaaggcaaacttcttcaagaaaatagatcagaattaacataacatagttatgctttatttatgaggaaaaattaggaagttaggttcttctcaaaarggacatgttcgggtaattgaggcctagatctgtaagtgccatataaaaatacaattttaaaaaggaattattcctggtatattataaattaatgcaccttatttgacaaatcatagtcaataagtcaaaatgcattgaattatcagaagtcaatgtctccctacatagttaaggcttatttatatatagttattttcttaccactaaggttatagggatatgaaagaatagagaaactcttagctaaatacacatttagctgccaccttcaagatattcaagctgagagcttttttctttcccataatgattactaccacttctttaagccaagccatttctcaaataaacagtagactctatacaaaattttccactaaattgttgtggctcaagcataaggatggcataggattcaaggatttttttttctgtaaactgttaata

SEQ ID NO: 327183 - DNA, 419 bp, Homo sapiens
atccaagaagaaactaaatttcttgagatttgtaatagattgttatatatgtttgaaaaatcattaagtkccagaaacttaatcaattgttttatacaaattaactcatttgttaagcacaaaaaatctatgataaagatctaggcgacattcaaaatttttccaactgctagaatatcaggtaatgcagctgaatgacgcacagaccatctagaacaagaagtaaccataaaggactggtgagaagtcattggcttactggtcagatatccactgatggtaagtactagtattatccccacttcagggataagaaactgaagcatagagagatgatgatgtattttacccaatgtcaaatggctggcaagtggtaaagccggaattcaaatgagacagtttgatccatgagcttgtgc

SEQ ID NO: 327184 - DNA, 625 bp, Homo sapiens
aaggactgagaagcaccgtctgcaaaatcccctatttatgtgatgaattttctctaatctgtttggatgattttaaaagctatgttacgcattgatcatgaatgcatgaatttatatacatccctccgagtatgttttaatgataatgtttttatatacatttgtttttcactttctagtattcattctacttctctaacattacatttgggcacaattaacccaattcttactctcttttatatttgtttgggattgtcgtcaacttatctctagggttgtgtactgaatggtgtaaagttaagcagattatcacatccttattgtcacagtaataactccagggtgactatgcaaataaagtcctccaattagggtgaacttgaagaattttatgggaagtgctggtgcatggatctcagatgttytgtcacaaatgtctaaagacatatttgctaccatttgagaagacagcctgaatagcagaagacatattagaagcaacgacagttatatgaagcttgagccctaacgtcatgaacctgtagcccaaaccataagataaagccaatctcaactggcaattttcagttacttgtattgattaatttattttttaccaaaa

SEQ ID NO: 327185 - DNA, 593 bp, Homo sapiens
gatgggctctggttagttatttgcagcaggaacatgtccttaaggcacagatcgctcatgctattgtttgtggtttaggaacacttttaagaggttttctaccctggctgggccgggtgttccttgccctcattccagtaaacccacaaccttcagcgtgggcatcatggccatcaygaacatgtcacagtgctgcagagattttgtttatggccagttttggggccagtttatggccatatttgggggcctgttcccaacagagtttgttgttgttgcttgttggtttattttccaaaacctgggaaaagaaagttctaggtctagcatcagatggtacttgctggtcaaaacattttaaaaaatgttttgatttcttatttagagatcttaacactatttttgaagataaaaatagtgccagaagtagaccaatccaaatttttatggatgtgcaccctggccagattgataggattgatgtcaactctaactgtaaagtaaataatttgttccaagaatacagattgaaatttttttaatattccaaaatttaaggaaatgtgcttaattcaacagaactgttataaaaa

SEQ ID NO: 327186 - DNA, 593 bp, Homo sapiens
gatgggctctggttagttatttgcagcaggaacatgtccttaaggcacagatcgctcatgctattgtttgtggtttaggaacacttttaagaggttttctaccctggctgggccgggtgttccttgccctcattccagtaaacccacaaccttcagcgtgggcatcatggccatcatgaacatgtcacagtgctgcagagattttgtttatggccagttttggggccagtttatggccatatttgggggcctgttcccaacagagtttgttgttgttgcttgttggtttattttccaaaacctgggaaaagaaagttctaggtctagcatcagatggtacttgctggtcaaaacattttaaaaaatgttttgatttcttatttagagatcttaacactatttttgaagataaaaatagtgccagaagtagaccratccaaatttttatggatgtgcaccctggccagattgataggattgatgtcaactctaactgtaaagtaaataatttgttccaagaatacagattgaaatttttttaatattccaaaatttaaggaaatgtgcttaattcaacagaactgttataaaaa

SEQ ID NO: 327187 - DNA, 609 bp, Homo sapiens
tattctttcacagttctggaggcaagaattttaaatcaaggtgtcagaaagcccatgctttcccactcaagaatctggaaaagaatccttcctcgcttcttctggcttctggcggctccattcaatccttggtsttctctggcctgtaagatgcaccactccaaatctccctccatcttcaggtgctcctctgtatgtcttcttccttactcataaggacacatcccattggacttaggtccccccgccagtccagtattacttatctttacttgattgcatcagtcaagtccctatttccaaataaggtcacatcctgatgttttagatggacaagaatttgtgggagatagtattcaaactattacactacctgatgtacaaagtgtgttgtgtatttacttacttgctgtcttaccacactagaatacattcatgaggacagggactttatttttcttcttcattcatgataatgttcctagatcctacagtggtattcagtaaattattgttttcaaataaaagaaaacattgtaatcctgtagtccaagtattatttaggaatgatattccttttgtgaatcaatattataaaccataaatcag

SEQ ID NO: 327188 - DNA, 609 bp, Homo sapiens
tattctttcacagttctggaggcaagaattttaaatcaaggtgtcagaaagcccatgctttcccactcaagaatctggaaaagaatccttcctcgcttcttctggcttctggcggctccattcaatccttggtcttctctggcctgtaagatgcaccactccaaatctccctccatcttcaggtgctcctctgtatgtcttcttccttactcataaggacacatcccattggacttaggtccccccgccagtccagtattacttatctttacttgattgcatcagtcaagtccctatttccaaataaggtcacatcctgatgttttagatggacaagaatttgtgggagatagtattcaaactattacactacctgatgtacaaagtgtgttgtgtatttacttacttgctgtcttaccacactagaatacattcatgaggacagggactttatttttctycttcattcatgataatgttcctagatcctacagtggtattcagtaaattattgttttcaaataaaagaaaacattgtaatcctgtagtccaagtattatttaggaatgatattccttttgtgaatcaatattataaaccataaatcag

SEQ ID NO: 327189 - DNA, 575 bp, Homo sapiens
ataaaataggccaagtaaatttctacacttctaagtcacagaggacaatattgagacacaggttattgtctctcttcttatactcccaatttgaaaaactgattctaagtataggaaaattctctattctcatctctatgactttcattttaatcaatgtggttaccagcacagtggagcatctggagtaatacatgaatatttcaaaaggataaatgaataaaatagacttttaaaacaaggcagtatttaaaaccatttatttaacaaaagagaaatgattttaaggtccatataaagtggaatggtttcatacttttaattttttcttgtcccaccaccaattcaattagtttaacatccaactcacaayaatgtataacatcaaatgagaaaaatatcaaattggatattgaagcagatttacactaaacatattgcaaatattgaacaattccttcaaataaccaacaggaaacttaatatttaaaaatgtggcatacaatatacatatttaaatatattatagaattattaagaaaagtagactatgaaaatatttcatatgatattgt

SEQ ID NO: 327190 - DNA, 555 bp, Homo sapiens
attttgggcagaacagttatatattgcgcaggaatatcctgtgtattcaaggatgttaccatttctgggggttgggcatggcggctcatgtctgtaatccaagcactttgggaggccacagtgtgtgaatcactagaggtcaggagtttgagaccaacctgaccaacatggtgaaaccccatctctactaaaaatacaaaaatcagccggtcrtggtggtgtacacctgtaatcccagctactggggaggctgaggcatgataatcacttgaactcaggagacagatgttgcaatgagctgagattgtgtcactgcactgcagcctgtgttacaaagttaaactctgtctcaaaaaaaaaaaagtatgttaccatttctatcctctccatctctgtgttcttccccatgaaattgaatgacagtcattgaggaaataagaaattccctctgacatttccaaaatcttttcagtagaaagcaatatgtgaaataggagattctgtttgttttcagatgctgcttttttaaagaggagtctctgtgaacctattaga

SEQ ID NO: 327191 - DNA, 555 bp, Homo sapiens
attttgggcagaacagttatatattgcgcaggaatatcctgtgtattcaaggatgttaccatttctgggggttgggcatggcggctcatgtctgtaatccaagcactttgggaggccacagtgtgtgaatcactagaggtcaggagtttgagaccaacctgaccaacatggtgaaaccccatctctactaaaaatacaaaaatcagccggtcgtggtggtgtacamctgtaatcccagctactggggaggctgaggcatgataatcacttgaactcaggagacagatgttgcaatgagctgagattgtgtcactgcactgcagcctgtgttacaaagttaaactctgtctcaaaaaaaaaaaagtatgttaccatttctatcctctccatctctgtgttcttccccatgaaattgaatgacagtcattgaggaaataagaaattccctctgacatttccaaaatcttttcagtagaaagcaatatgtgaaataggagattctgtttgttttcagatgctgcttttttaaagaggagtctctgtgaacctattaga

SEQ ID NO: 327192 - DNA, 596 bp, Homo sapiens
tagaaatactgaatcaaataagctttttaataaaattttaacccctaaacttacaaatggatgaccacagacaaaatagatacctggaaaatcagggtattgaacatgaacaacacttcccactcctaargcatgtgggactttattttatatgaaagaaactacatacaaaatgtttatctgtatccggaacctaattaacaatcttgaagtctctattccaattaatgacagagttattcaatctatcactgtcattttgaatttaccatagttttaaaagaatgacctaaagactatggagatgcaattgctactaactatagtgctggcatttacatgccatattgttgtcttacaaatgttgttatacccaatcatatctttcatattatcacactgcgttaaaatatttctttatgtggttgtcacttcccaatagtttttaggtccctttaaattaaataatatttatagttcacttttacttattgagcccctaacatcacctgatacatcacatttataagcattttgatgaaatgtataaaatcagttatgtaatttgggatttataggtttttaaaaacctacaa

SEQ ID NO: 327193 - DNA, 596 bp, Homo sapiens
tagaaatactgaatcaaataagctttttaataaaattttaacccctaaacttacaaatggatgaccacagacaaaatagatacctggaaaatcagggtattgaacatgaacaacacttcccactcctaaagcatgtgggactttattttatatgaaagaaactacatacaaaatgtttatctgtatccggaacctaattaacaatcttgaagtctctattccaattaatgacagagttattcaatctatcactgtcattttgaatttaccatagttttaaaagaatgacctaaagactatggagatgcaattgctactaactatagtgctggcatttacatgccatattgttgtcttacaaatgttgttatacccaatcatatctttcatattatcacactgcgttaaaatatttctttatgtggttgtcacttcccaatagtttttaggtccctttaaattaaataatatttatagttcacttttacttattgagyccctaacatcacctgatacatcacatttataagcattttgatgaaatgtataaaatcagttatgtaatttgggatttataggtttttaaaaacctacaa

SEQ ID NO: 327194 - DNA, 480 bp, Homo sapiens
tcactgttatttgagttgcctattccaccagtaaataagactgattaaaatcaaagataatgttggtgataatatctttaaaatattcttcaagatccaatgttattccaagcatctatcagtgaacacaagccactttaaacagaatcctccaatatgcaataaggttagagagaaaaaaagaaagagaggaggacagggatggatgtcagaaagacaaaaatgtggatgggtgggggaggaaaagaaaaatgtgctgaaaatagaaataggtgaaagggataaacaaggacaarcagaaacagttagagattagagagtgagcccaagtggagataggtccaagttatataggaaaataataattcctaacttagatatcactcattccttgcagccatgcaaagctaaccatacttactacccttcaataagcaaacagtgaacactcatttcattccaccaacagaaagaggaatt

SEQ ID NO: 327195 - DNA, 540 bp, Homo sapiens
tttagcaaagacacatagataagaagtggtgttcttgcccaagaacaactactctaactaaactgaaggagacttccccaaatgtggaaaagtttaattctataatctactaataaatttattaattaaaacttgtctcagcaattatattttttggtttcagaatgacttttaaatgtttaaaaaaatattgaggtctataaagagatgttcatgtgggctatatctgttaatatttttcatgttagaaataaaaattgagcaattaaaatattcacttgtaaaatcattataagataataaaaccattgcatgctaacataaacttataatatacaattcccaaataaaacactttagtgagcagaatkgcattgtattacacacattcaaatctctgtaatgcctggtttaatagaagacagtctatttctcatatttgcttctacattcagtctgtaacaatacattgttttggttgaggtaagttaagaaaattcagtctcacatggatagttaattagatatgtgataattgtg

SEQ ID NO: 327196 - DNA, 502 bp, Homo sapiens
caattctgacatgccttcctcagttacgttctaaggaaaatgctgttatgggaacataaaccccagtgaccatgaataaagcatgctgaccttgagttagagctgacagtggccttttctttatgaaaataatagcttttgtcactcaccttatgaggtgaaatcaaaaaaataaataaccaagaattctgcaaatacaaaatttttttatgtaagaacaaaactaccacctcatcaatattgtttcatagaacaaagtatatattcacagataatagaaactaagatctacagaactatacgtatgcaaggacccaaaaccragtttttctttgtccttaatttgtacacatttctcttcctttagaatactttcaatatacacaataaatgtcacatgtggttctttgcttcctttctctgtaacctttctcactaaggtaaataaaatatcaattttaatgtaagtcaacataaaatattaatatttcagatttaaaaa

SEQ ID NO: 327197 - DNA, 393 bp, Homo sapiens
aaaaaaaaaaggaaggccctactaagacataacttacaccttaamcaaaaataactcaatatgtattttaacctaaatgctagctgcaaaacttcaaaatatccagaagtacaaaccattagagaaagtctatgtgacctctgataccactatacatatatatagtggaatggaggtaaacgaattcatatggtaaaaagcatattttcactgttggagtgggaggtcacaacaaagaggggagaaagctggaatgactcacaagggaatgagtttgagttgcagatatcagtataaaataatgtatggtttaatatacatataagtggatacaggtatatatgtgtatatattatgtatccatatatgtaatttattgatatataattgaat

SEQ ID NO: 327198 - DNA, 597 bp, Homo sapiens
cctggcccaagttaatagaatcctctttttgtatccactgttctgaaatgtcctaacaatgtagctttttggagtaattttcattcatttttctggatgcttgtttgtgaggagaagggtcttttatctgaaaactttttcttgtgctctgagaaggtctattaaattattktgttttctgttctttccttaaaaacttccatgattttgatattgcaccactcatcttttttctattatccatttttttgcttttaattctattttctcaaatttatcttatttttttcatctattatcttttaaatttcaagctctttttatgcatttctgatgtttctcatagcattatatctttgctttataaaggtaatctcttatttttctgaaaatataaatgacacatttgaagttgttcttaattattgttgaacttttttctccctgcaaatctttcttctttgttgctttttaaacttttaaaatgtcttttatgttaaagttgtgttttgatccctaactgctgacatttaagagtgagttaataaaaaactccattcatgtgagtggggcttgctgcctgtggacctcactgta

SEQ ID NO: 327199 - DNA, 585 bp, Homo sapiens
gagagctgagaagtggcagtttttaatactaaattcatagatttttgtgtaaccctctagctttcattatggaagctttactcccaattagctttggttgcctactctaaattctttctggatcaccatatctagagggtaagtgttccatcttctgccagaattaagaagggacagtcattctgctgcatggagtgaaaaggggtttctcaggtctaactgttctttgttttttttggataaaacaacatgatatatgtgaactttatttgcgtaaytatgaaatattaaacaaatgccagattaatcaacatataagaacaaagtatactcagaatttagaagacaaaactaaacatgaatctagaaagggtaagcatataatggatgacatctctatctataacagtcatccaccataaaaagaccatttgagttcctctatcccaagtccaacaaggtaattaggtatttcagaaaaaaaaagtgactaatttgtaattactcacgcaatatttaaaccacatgttaaaaacgggatacatgttaaaacatgttaaacatgttaaaaatgggatagtgtct

SEQ ID NO: 327200 - DNA, 592 bp, Homo sapiens
atattgccgagtttattttaatgaggtgacctttgaggaccgtgaggttggatcttttcaagatgggagctggttgctaaaggaagaaaccacatgattagagggttggaactttcagcctcactcctgaagtgggaggggaaaggggactggagaccgaatgaatcaccagtggacgatgatttaatcaagcatgcctacgtaataaagcttaaaaaacaaaaaacaaacaaacaaaaacccctcttgaactatgaggtttgggaagcttctgggttggaacaaatcaacacatcaacacatcaaagtgctgcccgtggtacactggcaagagggcatggaaacctcgccctcatatcttgtcctgggctttcttcygtttggctgctcctgagttgtatcctttgtaataaaccagtaatctttagcaaagtgctttccaggactctgtgagtcatcctagggagttatcaaacctgaggagtggtcgagagaacccctgaatttttagttggctggacagaagtgtgagtagtctggagaccccatttgtagctggaatgagatgtaggcgtagtcttgtggaactgag

SEQ ID NO: 327201 - DNA, 595 bp, Homo sapiens
aaggagctccaatacgtctggcagcagacttttcagtgaaaaccttacaggctagtagagagtggcaggacatatttaaagccctgaaggaaaataacttttgtcctagaatagtatatccagtgcaaacatccttyaaacatgaaggaaaaataaatattttctcagacaaacaaaaactgagtgatttcataaatacaggcctgtcctacaagaaaggctaaagaaagtacttcaatcagaaagaaaagaacattaatgagcaataaataatcacctgaaggaacaaaactcactggtaataataagtacacagaaaaacacagaatactataacactgtaactgtggtgtgtaaactactcttattctaagtagaaagacaaaatagtgaaccaatcaaaaataataaccacaacaacttttcaagacatagcaattacaataaaatataaatagaaataataaaaagttaaaaagcaaggataggaaggtaaggtatagaacttttattagctttctttttgcttgcttgtttatgcaaatagtattaagttgttatcacgtgaaaataatggattataagacaatatttg

SEQ ID NO: 327202 - DNA, 578 bp, Homo sapiens
ctggtgttatattagtagagacgaagacccagaaaacttcattgtataagaagttcttaatgcatcaggagaatatgataccaaaactgttagtgaaatgattaaaggtaggacagacwgtacaccactaaaggcaaaaggtgataggttgttcttgattcacaaagaaaagaaatcaagtcaaaggtagttagatatgaaagattcagggtcttaacccagttctggatgtgggcatattacagtacagtagtaaccagtccactaaatactaaaacacactgagaaaccatctcttcaagccatcctctaagtccacatacctcagccaaaggagatgtctgggagacagaatgtgagcagctgccaagctgcaactcgaacccattcagccagcccagctgggaccatcccttgggtcccttcaggcatcaggagacttctcctgcttttgtagcctttccccaccttattcttctgtatagaatccactgcagaatggcaggggttgatacacatgaagtatttttaccacctttctagtgcttttccagatactcaacacaagcaatttgagt

SEQ ID NO: 327203 - DNA, 578 bp, Homo sapiens
ctggtgttatattagtagagacgaagacccagaaaacttcattgtataagaagttcttaatgcatcaggagaatatgataccaaaactgttagtgaaatgattaaaggtaggacagacagtacaccactaaaggcaaaaggtgataggttgttcttgattcacaaagaaaagaaatcaagtcaaaggtagttagatatgaaagattcagggtcttaacccagttctggatgtgggcatattacagtacagtagtaaccagtccactaaatactaaaacacactgagaaaccatctcttcaagccatcctctaagtccacatacctcagccaaaggagatgtctgggagacagaatgwgagcagctgccaagctgcaactcgaacccattcagccagcccagctgggaccatcccttgggtcccttcaggcatcaggagacttctcctgcttttgtagcctttccccaccttattcttctgtatagaatccactgcagaatggcaggggttgatacacatgaagtatttttaccacctttctagtgcttttccagatactcaacacaagcaatttgagt

SEQ ID NO: 327204 - DNA, 220 bp, Homo sapiens
ccattaccaccattcctgtctaagccatcctcattactcayctgttgcattagcctccagcttccatgctcgccaccccgctggtgctttcctcaccacatccacagtgatctttctaaaaaataaatcagatcaggccatcctatctaaaaatatctgggactttccttcaagtttagcatgaacctcaaactccatgcatggcctttaccgcctcaca

SEQ ID NO: 327205 - DNA, 614 bp, Homo sapiens
acaccctacgtaaatccaggccccacctcacacacacatacacacacacacatacacacacacacacacacacagtcacattggcattctctgcctccttggtgtacttcattgtttttcacagcacttgtgtccatcacaaattgcatttctttttctcgatgcccttcccatgaaaccataaactccaataaggcatggactttgctttgcatccccagtgcctagaactgggcctaacatcagttctgtactcattaaatatttgttgagaaatggaaaggatccttaaaggctttaaaaccttttggtattgtctatgacatactgataaaaggaacaatggaatttttagtagagagtaaattatttttttgaatttagaacttagattttaactatgaaaggaaaattcaagaccagtgctgacgccttctcactttctgcccrgagttctttccattacaccatgcatgttgtcttcctaaatgatacgtttcgtaagaacatgcttattcaagattccacactgcgcaatcatctatgataacacgtctagaataaaaattacaaaattaacaccacatcaccctgactattgacatgcctaagca

SEQ ID NO: 327206 - DNA, 621 bp, Homo sapiens
  misc_feature (1)...(621): n = A,T,C or G
nnnnncatagacttcgggaagactggattgcagagagataattcctattataaagtatatacaaactaatataaagtagtatgtgcygaaaatgatgatattctagaaatagatcttatagaaatgtattatatcataaaaaagcaaaaccagtgaaaagcctactaagtaaattttgtttttgccattggtcagttattggtaaaaaatacctattcagattttcaccttgaaaaatagaacaaaattatgttccatagagactaaagcctaaaaacatcatcactaaaacacaaaaagacaaaccctattaacaaaaagtgaaaataaaagccgactatcaaacacattaggagatattcaactttgaagaaataaaaaaattattctttaaacaaagaaataagaattttcttttcaccatgaaaagcgaaatagccaggctattatacacactaattaaggaaactcagaaagccgatacccatttagtaagatggacacatgaagcagaagcggctttccaggccctaaagaaggccctaacccaagccccagtggtaagcttgccaacggggcaagacttttctttatatgtcacagaagaaacaggaatagctc

SEQ ID NO: 327207 - DNA, 621 bp, Homo sapiens
  misc_feature (1)...(621): n = A,T,C or G
nnnnncatagacttcgggaagactggattgcagagagataattcctattataaagtatatacaaactaatataaagtagtatgtgccgaaaatgatgatattctagaaatagatcttatagaaatgtattatatcataaaaaagcaaaaccagtgaaaagcctactaagtaaattttgtttttgccattggtcagttattggtaaaaaatacctattcagattktcaccttgaaaaatagaacaaaattatgttccatagagactaaagcctaaaaacatcatcactaaaacacaaaaagacaaaccctattaacaaaaagtgaaaataaaagccgactatcaaacacattaggagatattcaactttgaagaaataaaaaaattattctttaaacaaagaaataagaattttcttttcaccatgaaaagcgaaatagccaggctattatacacactaattaaggaaactcagaaagccgatacccatttagtaagatggacacatgaagcagaagcggctttccaggccctaaagaaggccctaacccaagccccagtggtaagcttgccaacggggcaagacttttctttatatgtcacagaagaaacaggaatagctc

SEQ ID NO: 327208 - DNA, 621 bp, Homo sapiens
  misc_feature (1)...(621): n = A,T,C or G
nnnnncatagacttcgggaagactggattgcagagagataattcctattataaagtatatacaaactaatataaagtagtatgtgccgaaaatgatgatattctagaaatagatcttatagaaatgtattatatcataaaaaagcaaaaccagtgaaaagcctactaagtaaattttgtttttgccattggtcagttattggtaaaaaatacctattcagattttcaccttgaaaaatagaacaaaattatgttccatagagactaaagcctaaaaacatcatcactaaaacacaaaaagacaaaccctattaacaaaaagtgaaaataaaagccgactatcaaacacattaggagatattcaactttgaagamataaaaaaattattctttaaacaaagaaataagaattttcttttcaccatgaaaagcgaaatagccaggctattatacacactaattaaggaaactcagaaagccgatacccatttagtaagatggacacatgaagcagaagcggctttccaggccctaaagaaggccctaacccaagccccagtggtaagcttgccaacggggcaagacttttctttatatgtcacagaagaaacaggaatagctc

SEQ ID NO: 327209 - DNA, 535 bp, Homo sapiens
ttagcacatacctggtgctccaaagtgtttgttattttgaaatggattaaatttaattgacctatctgtgtggtggtttggccaataaaggaagacaatactaaaaatagaagaagcaattttgagagaaaatctcttgcaatgaaaaagctctttcccctcacagtgaaaagtcagtatggatttctgctccagaactcttctcactgccattgaaaagctgctgcctctaatgggacatatgccacattcattttcagtttttttaaatatcagaattaattctaggccaccagttgtagcttcaaaccaaagcatttgtgacaacaactcaagaatgaattaaaaaaaaccttcccaaataacaacatgctcttttttaaaaggcaatttttgtgaacagatttctcatactcatagattaatgattctttaggtacttttatcaaatagatartttatacccatattagaataagacgtaatctggagcttcataaaggtaacaatatctgactgggaggtaggccaagac

SEQ ID NO: 327210 - DNA, 606 bp, Homo sapiens
taggcatacatatgtaataatcacagcagggtaagtagagtatccatcaccttaaacattcctcttttctttttgttaggaacattccaattccactattttaattgttttaaaatatgtgataaattattgttgactatagtcaccccattgtgctatcaaataccrgatcttattcattctatctacctctatttttgcatttattaaccatcctcattttatcttttcctcgctccccttcccagcctctggtaaccatcattctactctctatctccatgagttcaattgttttaaatttttgctcccacaaataagtgggagaacatgtgaactttgtctttctgtgattggcttatttcatatcattatttttaataaaacgattggcttagtataacataattggatcaaaaacaaagaactccaggcttgtgacactagaactagtaccattttggaaaaaaaacaaaaaacaaaaaaaaccttctacctatccctgctttcttgtgtgaaatatacgttagccaaatcttgtctctttcttttcctttcctaagattgccagtggtgataatgactaaccacctgttcaaaacgaag

SEQ ID NO: 327211 - DNA, 531 bp, Homo sapiens
gaatgttctttagaaatatctctgttaaaatggctctaatctgtggtgttggggagatgctagccttggttgagggggcaggaggcatcccttccccattctatggtcagtgaacttaagttgggaacttgatgtctgccatgatgggaatatttgcaaaatggaaatcagaaaatgctgaaaattagaatttgtttatatgcatgtttcgagaacctatgttaaakttttacctgcacaccactgaatatggcacctagaaaacagtggttgcgattcagaaaagcagtggaaggaagtcactaaattgtaatgtagcataaatagaaagcattcggtccagatgagggcagaagggtagaggactgaaagaggatctctgcagagatgcccaagcgaagagaatgaatgagacctttacagaacttgagttttaaaaaaagtagagaaataaagaaaatctaaaggcagtaagatgctccagagaaggtgaaatcagcagacctaaagaaaaatgcatcttttgctcat

SEQ ID NO: 327212 - DNA, 552 bp, Homo sapiens
aacaaaaatagaaagtatgaacaaggtctagtatttgataatacaacagggtgactgtaagtaataatttaattgtacattttaaaatagctacaaaagtataattagattgtttgtaacaacaagaatgaatgcttgagatgatggataccycatttatcttgatgtgattatcacacattgcaagcctttatcataaaatcacatgtaccccataagtctatacacctactatgtacccacaaaattaaaaattaaaagcttaaaaagaatgaacaaaataaaataaaacttgaaaatcttagacacttaaaaaaagaacagtggaattatttctaaaagaaagctaaagtaggtaagaatctgtacactataaagaataggatgaaaataaatatcttgtattaaaaagttacaaagtaaaggcaatcaggatcttaataaaaaggaagaaaagaaggcaggaaagaaagaaggaggagaggagggaagtaagaaggaaaagaaaccaaatcatatacataacgaaagcatggttcaaaaataccaaaa

SEQ ID NO: 327213 - DNA, 505 bp, Homo sapiens
aggaggaaggggcatgttttaaaattcttcctgcagagtcaggtgttttcttatgaggctccaaggtgaaaataacatttcctgcaagtctatgaatcattagccatgccccgcattaactacctatactcccagtaacgcaagaaatgtccctgcttgcttatttcatcctcaagcaatgtatatagagacaaatgggagtgcctttaaaatacaatgtttcttattgacacattgatgtggtttgactttgtgtccatacccaaatctcatcttgtagctcccataattcccacrttgttggaggaacctagtgggagatgattgaatcatggggacaggtctttcctgtgcttttctcatgatagtgaataagtctcatgagatctaatggttttaaaaaggggaggttccctacacaagctctcttcccttgtctcccactaaatgaaatgtgtcattcacctcctgccatgattgtgaggcctccccagccatgtggaac

SEQ ID NO: 327214 - DNA, 659 bp, Homo sapiens
ctcatattttacagctaatggtatgctttttggagaagaaattcagcaaaatgtatcagaagcstttaacatctcctgttaaagaaagagcagaaaaaataactattcatgattgatgtaatattacacaaaatttaaaaatattaaccatgactttagtaacaacataaaaatgtttttcattaagtccaatttttaaaaagtcagtatgtcaattttctctatagtattatctcaacaataataagaaaaacaggagagaaaaaccatggaaacacagcagaatgagaataaactggaatcaaaatattcacggcagtggtcttcaaatgtttgaagcaaaaatggtgtttcttcttgtctttctagtttctgcaacttatatatgtaatatatattttttattatgagaaaagaactctaaccaaaaagaacccttaccctgttgacaaaaaagaagaagggaaaggaaaggaaaggaaaggaatgaaggaaggaagggagggaagaaaggaagggaggaaggaaggaaggaaggaaaagaaagaaagaaaacaaaatctaaagtcattgtctatttccagtagaacaaactattaagattgataacaactaccacttcaaaatgtagtgaaatgtaatggggaattaaaaaagtc

SEQ ID NO: 327215 - DNA, 590 bp, Homo sapiens
cagatgagtttcccaataaagaaattgacaaagtctcagttggacctgaacgagccctgagaaaaattacatcatatctcagtttcctcagctgtaccaagggaagttcactggcattgggctccttggccaccgcactgaaaataaataaataaataaataaataaataaataaataaataaataaaattgcacatgttaaggaaaggaggtaagagggaaagaagactccttcaccttactgagtgtctttaagttcggctccgttcttgacccaccccacccatctgaattagcttgcttcagaagagccagtgggactgygcactaatcacagggtgtttcccagggtctcaggcaccagtcccggagtttttcccagcaggctgtgcaccaatcatagcgcctcacccagaaatgccatgcaccatcatgaggtttctcccaaccgggccatgcaccaattacagggcttcttacaacggggccccgtgcccctggaccagtcctgactacacaccttcctcagcagctaccatgccagggccagagggtaacgaggcaggcacttgtccttgaaaaaaggaaga

SEQ ID NO: 327216 - DNA, 518 bp, Homo sapiens
cttttttctactttatgtccttcttttgagttgatcagttttttccattttcattttttcctttgtttcaaatatatatgagttatttactgtttttagttaccctacaaaaggtagcatacatatatgttatcaatgtttgaagttaatcattatcttttacttcttycaaagacaatataatcaccttagaacaccataattccccaaataggtattttctaatgtatactgttctattgacattattaatattattttattcagtcaatgttagtgtctggtttaccaatatatatacaccacttccttgttcatcatttcttcttgtctctcagactttctttctgaaaaatatttttcctcctaaagaatatactttccaatttgttaaatgagagtctcttgatggaaaatatttccattttttttcacttgaaggtatgtttatttcactgaaatacttttagacattttccattaggcacattttaatttctgtatattaaaaatgtgct

SEQ ID NO: 327217 - DNA, 357 bp, Homo sapiens
tatactaggaatttgtattattctccttgtgccagacaaaaacatatctgaactcttcttcttgtacatactcactcttcttcccatttcctrtaacaaaggagattctgtttcaagaatctataaaattccttaaaatttgtagcacctctaattttattgggtcacattaaatacactcaaggctttttatttgcatgcaaatccaatctgcatttttgctttagagagttttccttgagaactttactcttttaaactcatttctactctccatttttggataaacactgtttaatgtaactgcgtctcattgttcatagagaatgtctcaaattccaagttcaattcagccaa

SEQ ID NO: 327218 - DNA, 595 bp, Homo sapiens
tagggttttttttaaacatttaacactagaataattaatggaaaatagatgaagacagtctctcaaaataagcaagttaatcccacttttttcatttcgagtccatctttttattgcccacaacactctcaactcaattacatcttacttcaaactaaaaactaacatccattttcaataactatactttaataaacacatacccattacttcttgtgccttatatctccctgtacacaaagaacattataaatatattaagtaaacaaccacatgcatatgggttaattacttagcacaaaaactgcaagatcccttagagatgtcatctgtatgacaggattggtgtttacccaaggctaacagatatttagaataggaaggtaacaaatgcaatttaatcagtgaagagctctaatttacttgtatcaaacaatataattacataaggcaacataagcataaagtttcctatgataataatgattatgaaaaggaagaggaagagcacatcagtttttactgagtgcattttacayaaattttctaattattaaccaatttaaagtgcaaactccatcacatgatcacattt

SEQ ID NO: 327219 - DNA, 578 bp, Homo sapiens
tgttggcttgaatttacatgaagtggttattagtggccactgagagagcagctccattggaatggcaagggtccctttctttgggtagtaaatggragacttggaaatggaaacagtaaaaacgtatttctctttccagaaacttggctgatagaagagagatacaggataagagctggaggaaagttgcttttctcttaatattaaaaaagaagcttgaggcttgtttatatgatgaaaagaaagatctagcagttgggggagaaaaacagatgaagaaatatgtgatttctagaaggagttgaaggttttgggtggaggcagatttctctgagtcagacagagggagtgctttcagaaagagaaggtaagctgaggaagttcacaactgatagcatttaattcagcttttgaaataacaagcaatgtttgcagaacttgggggtgatgagagttcagtgagtgacttggggaaagcaatcaagatggaagaactggagtagaggatgcatggtgttctggatacacaccccatcacagttttaatcaagcacgttttggcgatttgctgaatacac

SEQ ID NO: 327220 - DNA, 582 bp, Homo sapiens
tctttattttactttaaaatatggggcttgttgaaacataggtcatagcattgtaaatatgtgtttttgtaatgttaacactttcagctaaagtgtggaatagtgattaattacatttattgcctataaaatcatcagaaaagtcattattcctataaagaaacttacaaatatggattcttcctggaagcaagaatgagggtgtggctgagatgaaagctcagggtgttgacagtgtatctccatatgaccacctgcatcagaggtcaaggacttaacacttagatccctgtcactagcagagaagccaggagacagagcatttgatagcttctgttttatttagcctctttatacacatatattctttaaaaaccttgaaaattaagaggctaatcaaactttcaaactttcctggtccttcaagaaacattccaatgtccacagagtatgagagcatgatgaaaagaaatgagtgtcccttgagagttgtttaaaagwgtttgtcccttgagatgttgaagagtaaaaacacccacataaagttgacgaagaccgtttcaccaggttaggtcacagctt

SEQ ID NO: 327221 - DNA, 542 bp, Homo sapiens
caaatgatgaagtcgcactctttgagatcaagcaatatccttgagcaatattgacagattgtttccttttgcctattttttgtgacattcttacctaaagcattattgtgttagtataagagaaggaatgagagtattcactccctaaatttttatggcatgatttattttatatctatatcagtgtctttagtgctgcttgaaaacaagtataaaaacccttcccttggcaagaacctgttagtaaaatgtaagattattttttaaatatgtaccaccaaaggaaatatttcaaatacttagttatgagaacctcatttcccagagttaagcaccatagcttgaaactctttatatttagttaagcyaactgggttgatataagagaagcagtgattaaaataatctctcacagtgaataacccaaaagttatttttagcaggctttaggtttctctacaggatgttatgtacccaatctgcagctattgtttgagttattctaattatatttagtttaatgtacattaagaaaacacttg

SEQ ID NO: 327222 - DNA, 559 bp, Homo sapiens
caggcatttttaaagaataatgctgtttatgaaacttctttaagyaagaaataaatcctttaatggtttcccagtacctgcaaggtaaattccgaagtctttaaccacgtgcatcttgcttttcttttctccttgtgaggcacattccaccatatgtgttctacactggagttatacaaactccaattcttggcctgcccatttttaggttggaaaatcaattcagtaggtctaggccagcattatataatcaaatataataaaatagaacagaacagaacaggttatggcacacataataaagttaaccattgcttcttgatgttttgtttcagtatgtatgtggtagaagatgtaaaatgtattacctattgtgggtggacacacaaacccacacacacacggagaaaatctgtttttaacacagataatttgagtttgttggctaaaatatttagaaaatttagaatagcaataatgtttaaataaccaatatttcaccattcagaggtaacttagatatatggatttaatattgtatgtttccatacacacagct

SEQ ID NO: 327223 - DNA, 559 bp, Homo sapiens
caggcatttttaaagaataatgctgtttatgaaacttctttaagtaagaaataaatcctttaatggtttcccagtacctgcaaggtaaattccgaagtctttaaccacgtgcatcttgcttttcttttctccttgtgaggcacattccaccatatgtgttctacactggagttatacaaactccaattcttggcctgcccatttttaggttggaaaatcaattcagtaggtctaggccagcattatataatcaaatataataaaatagaacagaacagarcaggttatggcacacataataaagttaaccattgcttcttgatgttttgtttcagtatgtatgtggtagaagatgtaaaatgtattacctattgtgggtggacacacaaacccacacacacacggagaaaatctgtttttaacacagataatttgagtttgttggctaaaatatttagaaaatttagaatagcaataatgtttaaataaccaatatttcaccattcagaggtaacttagatatatggatttaatattgtatgtttccatacacacagct

SEQ ID NO: 327224 - DNA, 536 bp, Homo sapiens
  misc_feature (1)...(536): n = A,T,C or G
tatatcaatacatcttggatatacactattttatgggcatgtagtattttatttttttgatatatcaacatgtacttttattatcctataatatcggacacttcatttccaagctctccctttataaacatcattttcatatcattatataagaccaaacatgtccatatgtatgtatgtaccaatatatatgtatgtgcatatgtatacatgggcatacgtgtgtgcgtgtgtgtgtgtgtgtgtgacagagagcaccaggcatggatttaaatgccttatacatattaactcatttcattaccaaaacaacaactaaagtttctattattttcctgaytttacagaggggaaaccgaggcacagagtttaaggatgttgctcagggtcacatttcagtataaatggcagagccaggatttgaaacaaaatggtctggcccaacagtctgaatatctcctactacataatgttgcttctacaacttgtgcaattaagaaaaagannnnnnnnnnnnnnnnnnnnnnnnnnnnnnn

SEQ ID NO: 327225 - DNA, 594 bp, Homo sapiens
acaccatcattcatgagggtcctctttttaaatctttagttgaatagttcacctgagcagccaggcagcatcagtgaaatagttcttcctcttcaaggctcattcttattacttaccttgaattgttcctttgcacttactgggaaaattttttgtcttgatcaagattcattttccttcaaggttggattcttctatcaactttagcttttgggcaggcaatttccagtaaaatattttagaccrtcaattcagagttcagtacatgaacaattgcagaggaaacagaactctcagtttccctcagctgcttacaatctatccattgtcttttataaacattcaaatatttttgcatctcatagagttctttttctgatggtagtttgaaattaaatcaaggatatatagcatctttccttttttatttaaacaaatacaacctactgaatctagtaaagtttttaagtcatatttatattttctttttgatatcttcctacctggacatttttcaaaatgaatcctaaaatgtgatgtttaaagaggaatggaggtagggtacagaatatctatattcagaaatagtatatc

SEQ ID NO: 327226 - DNA, 606 bp, Homo sapiens
caagagaattttggtgctgtgaagaaaccacacttttatagcttatattcaaatgcttttctgtgtttttgaagacaatttaaaactactgctgcagaatttttcatgcagtcgattgaagataagatcattgtagaagaacaataygtagaaccattattcttataagtgacattaagatttggattttcttgtgatgttgatttgcttcgaatgcaaaatcttagtgttgtgacatgtcaattaagagtacagtcttgatgatgaagaatttctggtgacatttgcaacaattaacaaattataaaagagaccctgataaacacgttttgtgacatttatttagtttttaaaaccagaatagcagtgtgtactactggatagccttataaaataaaactgcaccacatggtgagattatgattgatgagtattaagctgaagtgcccgcaggagcagaggagcctcagataacaattactcaatgctactcccacgtatgttacagaggcaaaacttaagtcatttaaattcttcggataaaatttttccatgtagacagttgaaggaaaaaaaacacagataatattaatcatttctaaacag

SEQ ID NO: 327227 - DNA, 606 bp, Homo sapiens
caagagaattttggtgctgtgaagaaaccacacttttatagcttatattcaaatgcttttctgtgtttttgaagacaatttaaaactactgctgcagaatttttcatgcagtcgattgaagataagatcattgtagaagaacaatacgtagaaccattattcttataagtgacattaagatttggattttcttgtgatgttratttgcttcgaatgcaaaatcttagtgttgtgacatgtcaattaagagtacagtcttgatgatgaagaatttctggtgacatttgcaacaattaacaaattataaaagagaccctgataaacacgttttgtgacatttatttagtttttaaaaccagaatagcagtgtgtactactggatagccttataaaataaaactgcaccacatggtgagattatgattgatgagtattaagctgaagtgcccgcaggagcagaggagcctcagataacaattactcaatgctactcccacgtatgttacagaggcaaaacttaagtcatttaaattcttcggataaaatttttccatgtagacagttgaaggaaaaaaaacacagataatattaatcatttctaaacag

SEQ ID NO: 327228 - DNA, 634 bp, Homo sapiens
gaattcaaattgatttgtgtgcatgcttttttatgagcattatttataaacttggaattggagtgtctttatggagtcattactaccattcagttcaacactaagtgattcttctttgcatccaaaattggtagagctagcagatgagcactgagttgaattcgtacactatttgtctcattgaagtactgacagcacatgccacagtccacgtgctgtttcagttatgctcatattcatgttatgttcggaaaactctctctgtgttttstattctcacactaaagcaatcatcaatacagaagaagacttctgtgaccatatgtgtggggtgtttttccccacacaccaagcagtgaacaccagctgggtgtcctctaattcaattctgactttatctacctggagacagtgtcagatctcacaggttgagggctcagtccctaagactgccctgccttccactcaccccgctaccagtcccaagtttgagcctccagaacttctgaccaccgggcttcaagttgggattcccatgatcctttctttaggctcatcaattttctggagtggctcacagaactcagggaaacatttacttacatttgctgatttattataaaatatattgcaa

SEQ ID NO: 327229 - DNA, 603 bp, Homo sapiens
aacatttacttacatttgctgatttattataaaatatattgcaaaggatcaagatgaggagatgtatagggtgaggtatgggggaaaggacatggagcttccataccctccctgggtgccctaccctccagcagcctccaggtattcagctccctggaagctcttggaactctgtcctcttgggtttttatggaagcctcatgacttcagcattcctacttccagagaatagggtgggatcctctaatgagagagtcttaagacccacaatcagaaagtccagggaagattagagtcctactttgggcaggtaaaaggagggccagacatcaatggcctgcctctgagtcctaatacacccaacattgtaacaaaagactktaacaagggctatgggagttatgagccaggaaccatggatgaacaccaatatatatcctaacaccacatatgtcatatatgtatatacataagtacagaaacacacatatatatgtgactatatatgtgaatcttaggacatgtatagacatgcatgaaaaatttcaaagaaatgactctatttttggagcattaattataagtgaagccatttggaacatg

SEQ ID NO: 327230 - DNA, 558 bp, Homo sapiens
tgtccatagcttatcttcaaagaatgaaagaatgttagagatggagggaagaaacagcttaaggaattataagtaacctgcaaaacagaaaagtatatagctgatgttcaccacctttgaatcatgaatagacttgggagactaattttaagaatggcaaaatgttgagacagtttctgtgatgtggtkgagtaagacacttcagaacgtgtttgctctgactcactggagcttgtctggcatcaaaaagggtgattcttaattgaccctttgtccaccctgtcaagagcggtcaaaagaacacacaatttagcaggttaaactattttaatttcatcatttaatgggatttcacagtataaataataaaatttactagatgtcatatgaaaccccatgtttcagttcatttgccatattacagcaattttgcaatattgcaactttttcctagattttataatttcctataaaatgtcttctataatccatctatgtgatttctaagggaaaaagtgatcttatgtaaaaggaaaataaccttggattttcacatta

SEQ ID NO: 327231 - DNA, 558 bp, Homo sapiens
tgtccatagcttatcttcaaagaatgaaagaatgttagagatggagggaagaaacagcttaaggaattataagtaacctgcaaaacagaaaagtatatagctgatgttcaccacctttgaatcatgaatagacttgggagactaattttaagaatggcaaaatgttgagacagtttctgtgatgtggttgagtaagacacttcagaacgtgtttgctctgactcactggagcttgtctggcatcaaaaagggtgattcttaattgaccctttgtccaccctgtcaagagcggtcaaaagaacacacaatttagcaggttaaactattttaatttcatcatttaatgggayttcacagtataaataataaaatttactagatgtcatatgaaaccccatgtttcagttcatttgccatattacagcaattttgcaatattgcaactttttcctagattttataatttcctataaaatgtcttctataatccatctatgtgatttctaagggaaaaagtgatcttatgtaaaaggaaaataaccttggattttcacatta

SEQ ID NO: 327232 - DNA, 546 bp, Homo sapiens
tgctcaactggctctgaaatttctgaacatgccttatgcagtttcaacattcttctgtaatctctgctgaaacatttttgtacctatattttatatcgatactttcagtgtgtgtgtgtgtgtgtgtgtgtatgtatgttctaggacccacttgagaaagattacccaaagttcatataaatgctgcatattgttaggtattgaataagtatttggtatctctttatgttatgargaagtaaacagtgtatccgcatttaaatatgaagacagggttacagtggaagcatgatgctatcatctagtgacactcatcttgcagtatcatatttttactagttaagtgttctttattttaagtaggaggtacaggattctgaagcatagtgtaaaagattggaaaaggtttcacagggaaacctgtgggtatgaatcatacatgctgtggaaaccaaggatcttctcaaagtcatagttactggacttcaaatgaagccctgtgattaaagaagcaagtcagcttagtaatagccaatattgactgaa

SEQ ID NO: 327233 - DNA, 546 bp, Homo sapiens
tgctcaactggctctgaaatttctgaacatgccttatgcagtttcaacattcttctgtaatctctgctgaaacatttttgtacctatattttatatcgatactttcagtgtgtgtgtgtgtgtgtgtgtgtatgtatgttctaggacccacttgagaaagattacccaaagttcatataaatgctgcatattgttaggtattgaataagtatttggtatctctttatgttatgaagaagtaaacagtgtatcygcatttaaatatgaagacagggttacagtggaagcatgatgctatcatctagtgacactcatcttgcagtatcatatttttactagttaagtgttctttattttaagtaggaggtacaggattctgaagcatagtgtaaaagattggaaaaggtttcacagggaaacctgtgggtatgaatcatacatgctgtggaaaccaaggatcttctcaaagtcatagttactggacttcaaatgaagccctgtgattaaagaagcaagtcagcttagtaatagccaatattgactgaa

SEQ ID NO: 327234 - DNA, 546 bp, Homo sapiens
tgctcaactggctctgaaatttctgaacatgccttatgcagtttcaacattcttctgtaatctctgctgaaacatttttgtacctatattttatatcgatactttcagtgtgtgtgtgtgtgtgtgtgtgtatgtatgttctaggacccacttgagaaagattacccaaagttcatataaatgctgcatattgttaggtattgaataagtatttggtatctctttatgttatgaagaagtaaacagtgtatccgcrtttaaatatgaagacagggttacagtggaagcatgatgctatcatctagtgacactcatcttgcagtatcatatttttactagttaagtgttctttattttaagtaggaggtacaggattctgaagcatagtgtaaaagattggaaaaggtttcacagggaaacctgtgggtatgaatcatacatgctgtggaaaccaaggatcttctcaaagtcatagttactggacttcaaatgaagccctgtgattaaagaagcaagtcagcttagtaatagccaatattgactgaa

SEQ ID NO: 327235 - DNA, 546 bp, Homo sapiens
tgctcaactggctctgaaatttctgaacatgccttatgcagtttcaacattcttctgtaatctctgctgaaacatttttgtacctatattttatatcgatactttcagtgtgtgtgtgtgtgtgtgtgtgtatgtatgttctaggacccacttgagaaagattacccaaagttcatataaatgctgcatattgttaggtattgaataagtatttggtatctctttatgttatgaagaagtaaacagtgtatccgcatttaaatatgaagacagggttacagtggaagcatgatgctatcatctagtgacactcatcttgcagtatcatatttttactagttaagtgttctttattttaagtaggaggtacaggattctgaagcatagtgtaaaagattggaaaaggtttcacagggaaacctgtgggtatgaatcatacatgctgtggaaaccaaggatcttctcaaagtcatagttactggacttcawatgaagccctgtgattaaagaagcaagtcagcttagtaatagccaatattgactgaa

SEQ ID NO: 327236 - DNA, 516 bp, Homo sapiens
ccattgaaatgaggtgaattaaaaataaaaactttataaattaattagctgcaaaaatacttatttttgtttgtttttccaaatggttgcaacttacatagtgtaaaatacaattcatgaaagtggaaagatgcagaaatcagaatggaaatgagaaccagcaacctgagagtaccacagaaatattcagtcacatctgtgtaaccaggggctgtacagtcttaggtggaggtattccagatttttgtttcttagtttctgtcagatgtaaaatgtgtatgtggaactattgtgcactttctttgtttggtagagacagtctctctgtgttgcccaggctagtctcaaattcctggcctcaagtgatcctcccacctcagcctctcaaagtgctgrtactacaggtgtgagccaccatccccagcctactgtgcattttctattatttgaagcaaaattggggccacaaggaaggtcatctgtagtatgccaataacataaacctctgacatttca

SEQ ID NO: 327237 - DNA, 594 bp, Homo sapiens
gccattaatctaaaaattaatttttagattaatgtttattgacagtatctactctataaaatacaaaaataaaatatgcttttatgatgtggaccatagtatccataagattgcttttctgtttgaattggctataaaaatggaaaaagtatcattttgtaactgtgtggcatttgytcatttattcaacaataataccagagcggaaagcaacaagttaggtgtgacataatatagaaatggttttgttttgtttgtttgttctacatatattattagtaaggtttctctagagtactgtctctctctatctctttctatctctgtctacacatagacacacacacacacacacacacacacacacacagatgttcctcaacttacaatggggttatgtcacaataaacccatcataagtttgttacaggaaagaggtccagatccagaccccaagagagggttcctggatcttgtgcaagaaagaattcagggtgagttcacagtgcaaaatgaaagtaagtttattaagaaagtaaaggaataaaagaatggttattccatagaaagagcagccccaagggctgctgattg

SEQ ID NO: 327238 - DNA, 594 bp, Homo sapiens
gccattaatctaaaaattaatttttagattaatgtttattgacagtatctactctataaaatacaaaaataaaatatgcttttatgatgtggaccatagtatccataagattgcttttctgtttgaattggctataaaaatggaaaaagtatcattttgtaactgtgtggcatttgctcatttattcaacaataataccagagyggaaagcaacaagttaggtgtgacataatatagaaatggttttgttttgtttgtttgttctacatatattattagtaaggtttctctagagtactgtctctctctatctctttctatctctgtctacacatagacacacacacacacacacacacacacacacacagatgttcctcaacttacaatggggttatgtcacaataaacccatcataagtttgttacaggaaagaggtccagatccagaccccaagagagggttcctggatcttgtgcaagaaagaattcagggtgagttcacagtgcaaaatgaaagtaagtttattaagaaagtaaaggaataaaagaatggttattccatagaaagagcagccccaagggctgctgattg

SEQ ID NO: 327239 - DNA, 594 bp, Homo sapiens
gccattaatctaaaaattaatttttagattaatgtttattgacagtatctactctataaaatacaaaaataaaatatgcttttatgatgtggaccatagtatccataagattgcttttctgtttgaattggctataaaaatggaaaaagtatcattttgtaactgtgtggcatttgctcatttattcaacaataataccagagcggaaagcaacaagttaggtgtgacataatatagaaatggttttgttttgtttgtttgttctacatatattattagtaaggtttctctagagtactgtctctctctatctctttctatctctgtctacacatagacacacacacacacacacacacacacacacacagatgttcctcaacttacaatggggttatgtcacaataaacccatcataagtttgttacaggaaagaggtccagatccagaccccaagagagggttcytggatcttgtgcaagaaagaattcagggtgagttcacagtgcaaaatgaaagtaagtttattaagaaagtaaaggaataaaagaatggttattccatagaaagagcagccccaagggctgctgattg

SEQ ID NO: 327240 - DNA, 594 bp, Homo sapiens
gccattaatctaaaaattaatttttagattaatgtttattgacagtatctactctataaaatacaaaaataaaatatgcttttatgatgtggaccatagtatccataagattgcttttctgtttgaattggctataaaaatggaaaaagtatcattttgtaactgtgtggcatttgctcatttattcaacaataataccagagcggaaagcaacaagttaggtgtgacataatatagaaatggttttgttttgtttgtttgttctacatatattattagtaaggtttctctagagtactgtctctctctatctctttctatctctgtctacacatagacacacacacacacacacacacacacacacacagatgttcctcaacttacaatggggttatgtcacaataaacccatcataagtttgttacaggaaagaggtccagatccagaccccaagagagggttcctggatcttgtgcaagaaagaattcagggygagttcacagtgcaaaatgaaagtaagtttattaagaaagtaaaggaataaaagaatggttattccatagaaagagcagccccaagggctgctgattg

SEQ ID NO: 327241 - DNA, 556 bp, Homo sapiens
ctaaattcctgttgcatttgtattaaatttgcrtatgaatctgttatgatgctattagatcttttatctcaaatcacaaggttttgtttgaaatttgagatttttaccttcataaacaccttttgccttttaaatgatttctaaaattctcatttgcaattatacacaacatcgtaattatgagttctgattttcaggggtgattataaaaactaacaaattaaattgtaggttattctgagtagccaatactagcattgattgagtttgcatcagcctaaagtgtgtttcccagattgtaactttgttgtaaaaaattaaatgttcccacatattcctcttcattgctggagacaattctctatgaatattacacatttctgcatgtccaggccctagagaaagacatttatatccaatgcaagatgttgctttggctgcaattttcactgtgaagaaaaattacctttttttctcagactcaggctgtatatatatgagttcatggggccaagcctggttctggggtgggcctggagccttgggccctggaggc

SEQ ID NO: 327242 - DNA, 556 bp, Homo sapiens
ctaaattcctgttgcatttgtattaaatttgcgtatgaatctgttatgatgctattagatcttttatctcaaatcacaaggttttgtttgaaatttgagatttttaccttcataaacaccttttgccttttaaatgatttctaaaattctcatttgcaattatacacaacatcgtaattatgagttctgattttcagggrtgattataaaaactaacaaattaaattgtaggttattctgagtagccaatactagcattgattgagtttgcatcagcctaaagtgtgtttcccagattgtaactttgttgtaaaaaattaaatgttcccacatattcctcttcattgctggagacaattctctatgaatattacacatttctgcatgtccaggccctagagaaagacatttatatccaatgcaagatgttgctttggctgcaattttcactgtgaagaaaaattacctttttttctcagactcaggctgtatatatatgagttcatggggccaagcctggttctggggtgggcctggagccttgggccctggaggc

SEQ ID NO: 327243 - DNA, 556 bp, Homo sapiens
ctaaattcctgttgcatttgtattaaatttgcgtatgaatctgttatgatgctattagatcttttatctcaaatcacaaggttttgtttgaaatttgagatttttaccttcataaacaccttttgccttttaaatgatttctaaaattctcatttgcaattatacacaacatcgtaattatgagttctgattttcaggggtgattataaaaactaacaaattaaattgtaggttattctgagtagccaatactagcattgattgagtttgcatcagmctaaagtgtgtttcccagattgtaactttgttgtaaaaaattaaatgttcccacatattcctcttcattgctggagacaattctctatgaatattacacatttctgcatgtccaggccctagagaaagacatttatatccaatgcaagatgttgctttggctgcaattttcactgtgaagaaaaattacctttttttctcagactcaggctgtatatatatgagttcatggggccaagcctggttctggggtgggcctggagccttgggccctggaggc

SEQ ID NO: 327244 - DNA, 556 bp, Homo sapiens
ctaaattcctgttgcatttgtattaaatttgcgtatgaatctgttatgatgctattagatcttttatctcaaatcacaaggttttgtttgaaatttgagatttttaccttcataaacaccttttgccttttaaatgatttctaaaattctcatttgcaattatacacaacatcgtaattatgagttctgattttcaggggtgattataaaaactaacaaattaaattgtaggttattctgagtagccaatactagcattgattgagtttgcatcagcctaaagtgtgtttcccagattgtaactttgttgtaaaaaattaaatgttcccacatattcctcttcattgctggagacaattctctatgaatattacacatttctgcatgtccaggccctagagaaagacatwtatatccaatgcaagatgttgctttggctgcaattttcactgtgaagaaaaattacctttttttctcagactcaggctgtatatatatgagttcatggggccaagcctggttctggggtgggcctggagccttgggccctggaggc

SEQ ID NO: 327245 - DNA, 486 bp, Homo sapiens
aaccactgacaaagagcatgcaatactttccaaccagctgatcaacttcttatgagagttttactccctctctctcgctttactattcactgatgcaattccttaaactgccactcttctccccctgccagaagaagggaacctcatgatggttataagtcagttaggggagtttctgtrcctcactcagattgatgagagactgactcttattgtgaactctgattcaatgttattcattgatggatcatacctcaaaactgatattgaaaattatcactaatttaagctctactttagaatatattttctatctgaggtaaaatcaacccatataatggaatttattacacttactagagcttgtcaattagctgaagaccatgtagtaaacatagagcaggtatgcttttagagtactacatgaatttgggatgctttggggaaaaaaagaaattcatcatctctgctggaaaccccatgaaa

SEQ ID NO: 327246 - DNA, 486 bp, Homo sapiens
aaccactgacaaagagcatgcaatactttccaaccagctgatcaacttcttatgagagttttactccctctctctcgctttactattcactgatgcaattccttaaactgccactcttctccccctgccagaagaagggaacctcatgatggttataagtcagttaggggagtttctgtacctcactcagattgatgagagactgactctyattgtgaactctgattcaatgttattcattgatggatcatacctcaaaactgatattgaaaattatcactaatttaagctctactttagaatatattttctatctgaggtaaaatcaacccatataatggaatttattacacttactagagcttgtcaattagctgaagaccatgtagtaaacatagagcaggtatgcttttagagtactacatgaatttgggatgctttggggaaaaaaagaaattcatcatctctgctggaaaccccatgaaa

SEQ ID NO: 327247 - DNA, 500 bp, Homo sapiens
gttgccactgctggctggggtggccagcttttattcccttattggcccctcccatattctgttcctgtcctatcagaatgcccttttttcaatcctccaggcaattggctacttttagaatctgctgactggtgcattttacagagtgctgattggtgctttatacaatcctcttgtaagacagggaagttccccaagtccccactggacccaggaagtccaactggcctcacctctcagtgctgacacaacaacmaaaagtcaagacctcacaatatagtttgcaatagagaccactcggcaatatcatagtggtgaagatgtgggtttctagctgcccctgaattggtcaatctctcgtaagtaagagaatgaccataatggggggctgagaggataaatattcaaatgagtagtggtcagatgatatgacaatagaattctgattcacaatctctgaagccaccagtccaggaagccaaaccgcatcattggcagta

SEQ ID NO: 327248 - DNA, 573 bp, Homo sapiens
ctgttcctgtcctatcagaatgcccttttttcaatcctccaggcaattggctacttttagaatctgctgactggtgcattttacagagtgctgattggtgctttatacaatcctcttgtaagacagggaagttccccaagtccccactggacccaggaagtccaactggcctcacctctcagtgctgacacaacaacaaaaagtcaagacctcacaatatagtttgcaatrgagaccactcggcaatatcatagtggtgaagatgtgggtttctagctgcccctgaattggtcaatctctcgtaagtaagagaatgaccataatggggggctgagaggataaatattcaaatgagtagtggtcagatgatatgacaatagaattctgattcacaatctctgaagccaccagtccaggaagccaaaccgcatcattggcagtaattggtcccaagtggtcaggatatcattaatgactgttagcttccctattttgccttgtttccaacttagaaccaaccaaataaagcaaaatatgttccccaaaccaaccacataagatactctgcttcta

SEQ ID NO: 327249 - DNA, 573 bp, Homo sapiens
ctgttcctgtcctatcagaatgcccttttttcaatcctccaggcaattggctacttttagaatctgctgactggtgcattttacagagtgctgattggtgctttatacaatcctcttgtaagacagggaagttccccaagtccccactggacccaggaagtccaactggcctcacctctcagtgctgacacaacaacaaaaagtcaagacctcacaatatagtttgcaatagagaccactcggcaatatcatagtggtgaagatgtgggtttctagctgcccctgaattggtcaatctctcgtaagtaagagaatgaccataatggggggctgagaggataaatattcaaatgagtagtggtcagatgatatgacaatagaattctgattcacaatctctgaagccaccagtccaggaagccaaaccrcatcattggcagtaattggtcccaagtggtcaggatatcattaatgactgttagcttccctattttgccttgtttccaacttagaaccaaccaaataaagcaaaatatgttccccaaaccaaccacataagatactctgcttcta

SEQ ID NO: 327250 - DNA, 549 bp, Homo sapiens
tttcccactcccaaactttgaattaatcacctgttctcatgtgggtagtctacctttatttctacagtaaggtgcatgcaagccttttctagtcacatttaaaatggtgaaaagcagcatcataccagaaatatttgattttctactttttgattaggtaagcagagagggatgatttctgagtcttacaaagagtacatatcacttcagaaacatatgagttgtggaaagtgatgtctgcttttctctatattatacataaaacatagcaaatatcttactttaatgagctggtgtgtggggatatrgagatgaccaagctgaaaggattgacaataagataacaactagaaactgaatccctgaagtgacatctctgtgcttgcagccttttctctgaatataaaatgcacatttttacacaacccctgtgaaatcttagcactttatatcacaagggtaagtaaaatgcacacgtttttaaaaatcaagtattttaaggtctccaaaatgacagatcttttccctctgtgagtcatatcatgattt

SEQ ID NO: 327251 - DNA, 447 bp, Homo sapiens
attcttatcctctttggttataaagaccctaaactgtcttttccatgcttggaatgggtaattttaaattttaaatacatagaataagcaggccttcaggaatttattacttcacacagtccatatgcagccctcttattttgtgccttagcccctgtggacacctcttcccaaagcaccagattttcctgctgttgtaagtgtgtacaggacccaaggmtaaagtaccttactgacacagcaggctgctgacctcacccctcatcttcaaagcattttcaagttggagcatatttgtgaaataaatattatctttcttccttctaattacaaaattaataaatgttactttgtaaaaataataatttaaaaatcactcctattttcatcattcccaaataacagctaaaattttagtgccatcttttttttaatctttcttgtgca

SEQ ID NO: 327252 - DNA, 604 bp, Homo sapiens
ttttccatgcttggaatgggtaattttaaattttaaatacatagaataagcaggccttcaggaatttattacttcacacagtccatatgcagccctcttattttgtgccttagcccctgtggacacctcttcccaaagcaccagattttcctgctgttgtaagtgtgtacaggacccaaggctaaagtaccttactgacacagcaggctgctgacctcacccctcatcttcaaagcattttcaagttggagcatatttgtgaaataaatattatctttcttccttctaattacaaaattaataaatgttactttgtaaaaataataatttaaaaatcactcctattttcatcattcccaaataacagctaaaattttagtgccatcttttttttaatctttcttgtgcactcatttacagtgtgaggtacagggaaatttaaggagcaaagaagaagtttaaytttttaaaatcattttgaaattactagaagtattaaatccttagaggttaagttcatttacattggaaaaactctctttttctctggcatgaaccacttggacagtccctctcatgataacaggtataaggcaagtgccca

SEQ ID NO: 327253 - DNA, 604 bp, Homo sapiens
ttttccatgcttggaatgggtaattttaaattttaaatacatagaataagcaggccttcaggaatttattacttcacacagtccatatgcagccctcttattttgtgccttagcccctgtggacacctcttcccaaagcaccagattttcctgctgttgtaagtgtgtacaggacccaaggctaaagtaccttactgacacagcaggctgctgacctcacccctcatcttcaaagcattttcaagttggagcatatttgtgaaataaatattatctttcttccttctaattacaaaattaataaatgttactttgtaaaaataataatttaaaaatcactcctattttcatcattcccaaataacagctaaaattttagtgccatcttttttttaatctttcttgtgcactcatttacagtgtgaggtacagggaaatttaaggagcaaagaagaagtttaattttttaaaatcattttgaaattactagaagtattaaatccttagaggttaagttcatttacattggraaaactctctttttctctggcatgaaccacttggacagtccctctcatgataacaggtataaggcaagtgccca

SEQ ID NO: 327254 - DNA, 641 bp, Homo sapiens
gtgcccaacgcatggttcaggggatggttgtaactatgtttgtcttatcaatggtctgataagtgaggttgctcctgcttctagaagtatctatttttcwtttgcaaatttatagagatataaaagagccatttgtgcagaagggaagtggcatccagaccatttctctttgagcttcagtgccatttagaacatgtttgataaactagggtgtctcagactcacaagtattgggagaaaagagcaacagtggcccattaaaggaaactcaatataagtgaagtgaggtactggctgggactgaacacttgggtcactgctgatagggagaatgtgtggcagatgctgacttctgtatcaggattatcagtggtgtttgaagcctgttgaagtggattgtggtgaatgctcgttcagtcacaccactcacccgttagttaaaggccataagaaggcagaaaggcaggttcatcctgagtcagggtttgtgagagtgatgccatgcgatgggcagagaggctagggaagcagctatcaaacgataatgtacttcagaggcgcatattccatttgcagatttcaagcttcattcattccagattgaatggggcctaggaatatgcattttagcaagtacccct

SEQ ID NO: 327255 - DNA, 641 bp, Homo sapiens
gtgcccaacgcatggttcaggggatggttgtaactatgtttgtcttatcaatggtctgataagtgaggttgctcctgcttctagaagtatctatttttcttttgcaaatttatagagatataaaagagccatttgtgcagaagggaagtggcatccagaccatttctctttgagcttcagtgccatttagaacatgtttgataaactagggtgtctcagactcacaagtattgggagaaaagagcaacagtggcccattaaaggaaactcaatataagtgaagtgaggtactggctgggactgaacacttgggtcactgctgatagggagaatgtgtggcagatgctgacttctgtatcaggattatcagtggtgtttgaagcctgttgaagtggattgtggtgaatgctcgttcagtcacaccactcacccgttagttaaaggccataagaaggcagaaaggcaggttcatcctgagtcagggtttgtgagagtgatgccatgcgatgggcagagaggctagggaagcagctatcaaaygataatgtacttcagaggcgcatattccatttgcagatttcaagcttcattcattccagattgaatggggcctaggaatatgcattttagcaagtacccct

SEQ ID NO: 327256 - DNA, 579 bp, Homo sapiens
acttcagaggcgcatattccatttgcagatttcaagcttcattcattccagattgaatggggcctaggaatatgcattttagcaagtacccctggtaattcagaggcagtagtttcatggaccacacttggagaaacacagttttgactaatgatagaagagaggaaatggtaaataatggacgatattcttcctaagcttgataagatgagaaacgaatacagcaggagctaatagatggggagaaagtcaggtggaatggatggaatgaatgcggttactgagtatcaggatgaggggaatttcatcctgaggagaatatgagtaagaagcattttcaagcaaaataaaaatcagatatgacttttcctactgaaaagtctgaagttaaaataattaaaactgctgtttgttcagaaatsgacaaatcaacaatgaaatgaggggtctcagaatatagtgtgcacgtatgaacataatgaaaggtaaaggtgacattataaatgtgtagggtcacagaatatgaacaaagtgacataataacatacagaaaggacattttgtcttttgtgtcacact

SEQ ID NO: 327257 - DNA, 553 bp, Homo sapiens
tttttctttgttaatatagctagtggtttaytgatcttgtttattcttttgaagaaaaaacactttgtttcattgatcttttctatggatttttgtgtctaaatttcattcagttcttctctaattttagatatttattatcttctgcttgctttggggttggcttgtttttttctagttcctctagttgcaaaggtacattgttaatttgagacctttctaatttcttgctgaaggttcttagtgctataaactttcctcttaatactgttctagctgtgttccagagattttggtaagctgtgtccctattttcatttatttcaaagaatttttttatttcttccttaattttattgttcaccgaggagttattctggagcaagctgttcaatttccatgtatttgtgtagttttggggagctaggactggctttcagcttcatcctccagacccttgagattgggccccagctgttctgggggatccaaagtgctcccaggccaccaggaaggtactcaggtgaagcaaagcacccaggcttggcagcag

SEQ ID NO: 327258 - DNA, 553 bp, Homo sapiens
tttttctttgttaatatagctagtggtttactgatcttgtttattcttttgaagaaaaaacactttgtttcattgatcttttctatggatttttgtgtctaaatttcattcagttcttctctaattttagatatttattatcttctgcttgctttggggttggcttgtttttttctagttcctctagttgcaaaggtacattgttaatttgagacctttctaatttcttgctgaaggttcttagtgctataaactttcctcttaatactgttctagctgtgttccagagattttggtaagctgtgtccctattttcatttatttcaaagaatttttttatttcttccttaattttattgttcaccraggagttattctggagcaagctgttcaatttccatgtatttgtgtagttttggggagctaggactggctttcagcttcatcctccagacccttgagattgggccccagctgttctgggggatccaaagtgctcccaggccaccaggaaggtactcaggtgaagcaaagcacccaggcttggcagcag

SEQ ID NO: 327259 - DNA, 585 bp, Homo sapiens
gccggtgaagccctgtctctgccaactctctttgaagatccccctgccagctcaaatgtccatggagaatgtgaagttctatrtacctaggatcccagaggtccacagtgagagtggcctgtccctccatcccttcacttatcccttccccaggaggcattcaggtctgggaactagccctgtcatgcaagtatcctgtgcagggtttccagcttcctccctcttcagccttgttgtctgcatcacctctgtaatgactctcagcattttctctctgaagatgggctcaaaatacattgctgtactcaatattttggtgtctctcagtgggagcagtgcttcctggctgtgtctagttggccatcttgttatggtaacaatttcttttggagattttttggagtccacttgtggcagtcaaaagataactagacagtggtggcagatgacaactgggtccacagattgcacaacgaagagtagcctgtggcagagagcttatttgaagaaatggctgaaaacttcccaaatctgaaaaacgaaatggacaaccaaatttcagcagcttgaaggactctgtctaag

SEQ ID NO: 327260 - DNA, 585 bp, Homo sapiens
gccggtgaagccctgtctctgccaactctctttgaagatccccctgccagctcaaatgtccatggagaatgtgaagttctatatacctaggatcccagaggtccacagtgagagtggcctgtccctccatcccttcacttatcccttccccaggaggcattcaggtctgggaactagccctgtcatgcaagtatcctgtgcagggtttccagcttcctccctcttcagccttgttgtctgcatcacctctgtaatgactctcagcattttctctctgaagatgggctcaaaatacrttgctgtactcaatattttggtgtctctcagtgggagcagtgcttcctggctgtgtctagttggccatcttgttatggtaacaatttcttttggagattttttggagtccacttgtggcagtcaaaagataactagacagtggtggcagatgacaactgggtccacagattgcacaacgaagagtagcctgtggcagagagcttatttgaagaaatggctgaaaacttcccaaatctgaaaaacgaaatggacaaccaaatttcagcagcttgaaggactctgtctaag

SEQ ID NO: 327261 - DNA, 585 bp, Homo sapiens
gccggtgaagccctgtctctgccaactctctttgaagatccccctgccagctcaaatgtccatggagaatgtgaagttctatatacctaggatcccagaggtccacagtgagagtggcctgtccctccatcccttcacttatcccttccccaggaggcattcaggtctgggaactagccctgtcatgcaagtatcctgtgcagggtttccagcttcctccctcttcagccttgttgtctgcatcacctctgtaatgactctcagcattttctctctgaagatgggctcaaaatacattgstgtactcaatattttggtgtctctcagtgggagcagtgcttcctggctgtgtctagttggccatcttgttatggtaacaatttcttttggagattttttggagtccacttgtggcagtcaaaagataactagacagtggtggcagatgacaactgggtccacagattgcacaacgaagagtagcctgtggcagagagcttatttgaagaaatggctgaaaacttcccaaatctgaaaaacgaaatggacaaccaaatttcagcagcttgaaggactctgtctaag

SEQ ID NO: 327262 - DNA, 620 bp, Homo sapiens
tactgtatatggcactatgttaaaggtttcataggcatcactcctcatcacaacaataatagcccacctcggcctcccaaagtgtctgtcccttctttattcaccagccacaatgacacacagaacatagtaggaagaaaatagtttatatttattcctaagaatataaacttctgttaccattctaaatttccagaaaaacttattgtgagtgctaaactaatatcatcctgacctaagrcaaattgtcagttcctaagggtgagatttataggagaaaaccatgtctacgcttgaggcagagttttagtagagatacaatagccagttgctattatttcaaagtttgtctgtccctaaatattgcctgcttaggtctgactatgctaggattagtgatcatctgctctgaattaaaggtttagatgcgctcttcccaggataaaattaagtttggggactttctcttttcctgggagcaaaaacctcaggaactaagtgtgccatatgctggaagatggaaatattccaacagccagaagtagagggaagataaaaatggcttcctaaagcaaggcaaatcagcgacagccagtcctgtggccaccactaatcacttg

SEQ ID NO: 327263 - DNA, 554 bp, Homo sapiens
agaagttcatcaccattaacctaccttgctagaattactaacggtagtcctttcagttgaaataaaagaaagctagataccaacttgaaagcatacaaaagtataaggctctctggtaaaggtaaacatatagtcaaatgcagaatctaggccatgcgcagtggctcaagcatgtaatctcagaactttgggaggctgaggtgggyggatcacgaggtcaggagatcgggaccatcctggccaacacggtgaaaccctgtctctactaaaaatataaaaaataaaataaaataaaagtagcagggcatggtggcgggtgcctgtagtcccagctactcaggaggctgaggcaggagaatggcatgaacccaggaggcaaaactggcagcgagctgaaattgcaccactgcactccagcctgggtgacagagtgagactctgtctaaaaaaaaaaaaaaatgcagaatcttgtcatactacaatagtggtccataaatcatttttaaatcaggtataaataagagcataaaaataaccataattattaaattata

SEQ ID NO: 327264 - DNA, 570 bp, Homo sapiens
attcagcagtacactatgaccaagtggtatttattcctgggatgcaaggatggttcaacatacaaaaattagtcaatgcaatacactatattaactgacagaaaggtaaaaaagtcacatgatcatctcaattagtgcaataataagmttttaataaaattcagcaccctttcatgtaaaattcaataatatagaaataaaagaaaattacatcaacatataaaaagccctataggtaatgcccatagctaccatcatactcaagctttccctctacaaatagaaacaaggcaagcatgcccagtcttgccatgtctattcaacacagtactgaaagttctagccagagcaattaggcaagaaaaaggagtaaaaagcattcaattttgaacggaagaaataaaattatctctgtttgcagatgatataaacttacatgtagaaaacctgaaggattacacacacacacacacacacacacacacacacacacacacagagagagacaactgttacaactaataaactaattcagtaaagttgcaggaaacaaaatcaacccacaaaaat

SEQ ID NO: 327265 - DNA, 641 bp, Homo sapiens
aatgaagaaaagccccaggactagacggtttcactgatgagttttaccaaacatttaaagagtagttagcatcactctttctcaaactcttctgaaaaatttcagaagaaaaaatactttcattttatgaggccagtattaccttaataccaatgctaaagaaggacaccacaaaaagactacacaccaataatcttgctaaatgttgatgcaaaaattctcaacaaaatatcataaacttaattcagcagtacactatgaccaagtggtatttattcctgggatgcaaggatggttcaacatacaaaaattagtcaatgcaatacactatattaactgacagaaaggtaaaaaagtcacatgatcatctcaattagtgcaataataagattttaataaaattcagcaccctttcatgtaaaattcaataatatagaaataaaagaaaattacatcaacatataaaaagccctataggtaatgcccatagctaccatcatactcaagctttcccyctacaaatagaaacaaggcaagcatgcccagtcttgccatgtctattcaacacagtactgaaagttctagccagagcaattaggcaagaaaaaggagtaaaaagcattcaattttgaacggaagaa

SEQ ID NO: 327266 - DNA, 570 bp, Homo sapiens
attcagcagtacactatgaccaagtggtatttattcctgggatgcaaggatggttcaacatacaaaaattagtcaatgcaatacactatattaactgacagaaaggtaaaaaagtcacatgatcatctcaattagtgcaataataagattttaataaaattcagcaccctttcatgtaaaattcaataatatagaaataaaagaaaattacatcaacatataaaaagccctataggtaatgcccatagctaccatcatactcaagctttccctctacaaatagaaacaaggcaagcatgcccagtcttgccatgtctattcaacacagtactgaaagttctagccagagcaattaggcaagaaaaaggagtaaaaagcattcaattttgaacggaagaaataaaattatctctgtttgcagatgatataawcttacatgtagaaaacctgaaggattacacacacacacacacacacacacacacacacacacacacagagagagacaactgttacaactaataaactaattcagtaaagttgcaggaaacaaaatcaacccacaaaaat

SEQ ID NO: 327267 - DNA, 568 bp, Homo sapiens
tgcctgcttaggtctgactatgctaggattagtgatcatctgctctgaattaaaggtttagatgcgctcttcccaggataaaattaagtttggggactttctcttttcctgggagcaaaaacctcaggaactaagtgtgccatatgctggaagatggaaayattccaacagccagaagtagagggaagataaaaatggcttcctaaagcaaggcaaatcagcgacagccagtcctgtggccaccactaatcacttgtaaatgaatgctgcgatgtgtttcaaaagccctcattctgactctgcctgatctgctactgaaatgttaattatatgcctaatcttctcttgcaagcaaaggcagcagagttgctaaagatcatagcaggtaaaagccttcaaggagaggtaaggagtaaatggagctgggagggaatggtgtctctcaggacagagcctggctcattgaaagggcatagtcctaccctataagggatgcctcccagtgtgaccaggtcttctatgatttctttttatgagaaaccagaaatctgattattttcatgagaaa

SEQ ID NO: 327268 - DNA, 590 bp, Homo sapiens
ctgtatactgaatactcttaatattgctgaaagtaattaatgaagacacgaataaatataaagacatcccatgttcctggattggaaaagaatatggttacagtgttcatactaccccccaaatctacagattcaatgcagtccgtataaaaatctcattggaattttttgcagaaacagaaaaaaaatccaaaatccattaggagtctcaaagtattccaaatagtcaagacagttatgagaaagaaaaacaaagctggaggtctcacrcttctcaagttcaaaaaacagtgtaaagctacagtaatcaaaatagcataatactggaataaagacacacatatagaccaatgggccagaatagagagcccagaaataaactctcacatatgtggtaaaataatctgccataagggcatcaagactatacaatggggaaaagatagtgtcttcaacaaatggtgctgagaaaacttgatattcacatgtaaaataatgaagttagacccttaccttcctgtacctatatacaaaaatcacttcagaatgaattaacggctaggtgcagtggctcacgcctgtaatcccac

SEQ ID NO: 327269 - DNA, 590 bp, Homo sapiens
ctgtatactgaatactcttaatattgctgaaagtaattaatgaagacacgaataaatataaagacatcccatgttcctggattggaaaagaatatggttacagtgttcatactaccccccaaatctacagattcaatgcagtccgtataaaaatctcattggaattttttgcagaaacagaaaaaaaatccaaaatccattaggagtctcaaagtattccaaatagtcaagacagttatgagaaagaaaaacaaagctggaggtctcacacttctcaagttcaaaaaacagtgtaaagctacagtaatcaaaatagcataatactggaataaagacacacatakagaccaatgggccagaatagagagcccagaaataaactctcacatatgtggtaaaataatctgccataagggcatcaagactatacaatggggaaaagatagtgtcttcaacaaatggtgctgagaaaacttgatattcacatgtaaaataatgaagttagacccttaccttcctgtacctatatacaaaaatcacttcagaatgaattaacggctaggtgcagtggctcacgcctgtaatcccac

SEQ ID NO: 327270 - DNA, 568 bp, Homo sapiens
tgcctgcttaggtctgactatgctaggattagtgatcatctgctctgaattaaaggtttagatgcgctcttcccaggataaaattaagtttggggactttctcttttcctgggagcaaaaacctcaggaactaagtgtgccatatgctggaagatggaaatattccaacagccagaagtagagggaagataaaaatggcttcctaaagcaaggcaaatcagcgacagccagtcctgtggccaccactaatcacttgtaaatgaatgctgcgatgtgtttcaaaagccctcattctgactctgcctgatctgctactgaaatgttaattatatgcctaatcttctcttgcaagcaaaggcagcagagttgctaaagatcatagcaggtaaaagccttcaaggagaggtaaggagtaaatggagctgggagrgaatggtgtctctcaggacagagcctggctcattgaaagggcatagtcctaccctataagggatgcctcccagtgtgaccaggtcttctatgatttctttttatgagaaaccagaaatctgattattttcatgagaaa

SEQ ID NO: 327271 - DNA, 568 bp, Homo sapiens
tgcctgcttaggtctgactatgctaggattagtgatcatctgctctgaattaaaggtttagatgcgctcttcccaggataaaattaagtttggggactttctcttttcctgggagcaaaaacctcaggaactaagtgtgccatatgctggaagatggaaatattccaacagccagaagtagagggaagataaaaatggcttcctaaagcaaggcaaatcagcgacagccagtcctgtggccaccactaatcacttgtaaatgaatgctgcgatgtgtttcaaaagccctcattctgactctgcctgatctgctactgaaatgttaattatatgcctaatcttctcttgcaagcaaaggcagcagagttgctaaagatcatagcaggtaaaagccttcaaggagaggtaaggagtaaatggagctgggagggaatgstgtctctcaggacagagcctggctcattgaaagggcatagtcctaccctataagggatgcctcccagtgtgaccaggtcttctatgatttctttttatgagaaaccagaaatctgattattttcatgagaaa

SEQ ID NO: 327272 - DNA, 593 bp, Homo sapiens
gttcaaagactgaagaaagtaagtgccctgtgcattttctaataaagaggctttgttgaccctggaagggaccgctgcagtagaatagtggagaagatgccaaactgcaggaggctggagagagaatgaaatgaatgaggaggggagcatggacaactgtaccgcgggtctgaagaatgtagaagatatagggaaatacttagaagcaaacatgatggttgagagtggtcatattgattggttaaagataggacagaaataaataagtgtaagtgttgctggggaagtgagccggtaggatggagaattttcaggtagaggagagagggataagctaactgaggtaatggctgagctaacagagtacaggtagaatggttgggcatggagggagatatatcttcccctaggcaaggtgggcacagagataggtgaatgcttttaggaacgaaggcagaagtgagagggaacaaactcaaatgttatacttttttctaccataatacccagcaccctttgcctggcacataacagatgtctagtaagtaagtgcasaataaatgaattacactttcatatggtgatgtaataaa

SEQ ID NO: 327273 - DNA, 474 bp, Homo sapiens
aatattgtactatataacaaaaccaattttaccatatgctaattgatataaataagagttaagttcctatggcatacagtatgtcttttcacttaaagttgcaatttcaaataacctatcaatgacattaagttatgacttactatacatgtaatgtgcctaagacattatgttttatgtgaacgttgagtgatatttgatgcccagagtatgggccctggagtcagactccctgggtgagctttgtaactatgtggccttgagacacttactccctgtattagagtcctctggataaacagattgtgtgtgtatgtgtgagtgcgtgtgtgtgtgtgtgcgtgcacatgtatgtgcgcgtgcgcatatgtgtgcatatgtgtgtgtgtgtgtacacatgcatatatataakaaaatttatgataaggaattggctcatgtaattatggaggctgagaagtcccaagatgtgca

SEQ ID NO: 327274 - DNA, 628 bp, Homo sapiens
ccttaccttcgccacaccttgccagccaaagcccacgggcccaggtccccagcgcagccaacacacccctgcctgaacacttaggctagtagtgactctgcacttccctgggccagagctcccagagttaactgacagttccgcctttttgctgctgctgcagcccccacccctactgccctgaggckgcagagggagtaagtgatgagcctaaggactatcatgtgtctccaacgcagtgcagctgccatgcaggaaagcagccagactatttcccctgtggattcctgcccctgctactcctcactgtgcagggcctcccaacctggaccccagcacagtcatcctgcccccgcctgagcacttcagtcagtggtggcactgcttttatctggagaggaaatcccagagacgacccaaaggctctctaccatctcagctgcggggatattgcccttgctgccctcgggctggggaaagaacaaagatcctgactgttttgctggtacctccagcatgctgcagctgtcctacagagaggaacccagtctcttttccctgtgaacccctgaccccctgctctacaccaggcagggcccctggattgggtctgccatgcagccacccc

SEQ ID NO: 327275 - DNA, 628 bp, Homo sapiens
ccttaccttcgccacaccttgccagccaaagcccacgggcccaggtccccagcgcagccaacacacccctgcctgaacacttaggctagtagtgactctgcacttccctgggccagagctcccagagttaactgacagttccgcctttttgctgctgctgcagcccccacccctactgccctgaggctgcagagggagtaagtgatgagcctaaggactatcatgtgtctccaacgcagtgcagctgccatgcaggaaagcagccagactatttcccctgtggattcctgcccctgctactcctcactgtgcagggcytcccaacctggaccccagcacagtcatcctgcccccgcctgagcacttcagtcagtggtggcactgcttttatctggagaggaaatcccagagacgacccaaaggctctctaccatctcagctgcggggatattgcccttgctgccctcgggctggggaaagaacaaagatcctgactgttttgctggtacctccagcatgctgcagctgtcctacagagaggaacccagtctcttttccctgtgaacccctgaccccctgctctacaccaggcagggcccctggattgggtctgccatgcagccacccc

SEQ ID NO: 327276 - DNA, 628 bp, Homo sapiens
ccttaccttcgccacaccttgccagccaaagcccacgggcccaggtccccagcgcagccaacacacccctgcctgaacacttaggctagtagtgactctgcacttccctgggccagagctcccagagttaactgacagttccgcctttttgctgctgctgcagcccccacccctactgccctgaggctgcagagggagtaagtgatgagcctaaggactatcatgtgtctccaacgcagtgcagctgccatgcaggaaagcagccagactatttcccctgtggattcctgcccctgctactcctcactgtgcagggcctcccaacctggaccccagcacagtcatcctgcccccgcctgagcacttcagtcagtggtggcactgcttttatctggagagraaatcccagagacgacccaaaggctctctaccatctcagctgcggggatattgcccttgctgccctcgggctggggaaagaacaaagatcctgactgttttgctggtacctccagcatgctgcagctgtcctacagagaggaacccagtctcttttccctgtgaacccctgaccccctgctctacaccaggcagggcccctggattgggtctgccatgcagccacccc

SEQ ID NO: 327277 - DNA, 628 bp, Homo sapiens
ccttaccttcgccacaccttgccagccaaagcccacgggcccaggtccccagcgcagccaacacacccctgcctgaacacttaggctagtagtgactctgcacttccctgggccagagctcccagagttaactgacagttccgcctttttgctgctgctgcagcccccacccctactgccctgaggctgcagagggagtaagtgatgagcctaaggactatcatgtgtctccaacgcagtgcagctgccatgcaggaaagcagccagactatttcccctgtggattcctgcccctgctactcctcactgtgcagggcctcccaacctggaccccagcacagtcatcctgcccccgcctgagcacttcagtcagtggtggcactgcttttatctggagaggaaatcccagagaygacccaaaggctctctaccatctcagctgcggggatattgcccttgctgccctcgggctggggaaagaacaaagatcctgactgttttgctggtacctccagcatgctgcagctgtcctacagagaggaacccagtctcttttccctgtgaacccctgaccccctgctctacaccaggcagggcccctggattgggtctgccatgcagccacccc

SEQ ID NO: 327278 - DNA, 612 bp, Homo sapiens
cactccaccccgggctgatcattttggttagcagaggctctgcatttctctgggttggagctccaagagataagtgtaasgccctctaacattgtcactgccaaggtccctgcccctgctgcctgcaagctggggagtgaacaaagagcctgagctgagccctcactcattctatgaggccagcattattctgataccaaaacctgccagagaaacaatggaaaaagaaaacttcaggccaatatccctgataaacatagatgcaaaaatcctcaacaaaaatccagcagcacatcgaaaagctaatctactaaatcaagtaggcgttattcctaggatataaggttggttcaacatacataaatccataaatgtgattcattgcataagcagaactaaaaacaaaaaccacatgatcatcatagaaaagtctttcaataacattcaacatcttttcgtgtttaaaaaccctcaacaaactaggtattgaaggtacataactcaaaataataagagccatccgtgacaactcacagccagcatcatactgaatgggcaaaatccagaaacattccccttgagaactggaacaaaacaaggatacccactctc

SEQ ID NO: 327279 - DNA, 568 bp, Homo sapiens
taagtgtaaggccctctaacattgtcactgccaaggtccctgcccctgctgcctgcaagctggggagtgaacaaagagcctgagctgagccctcactcattctatgaggccagcattattctgataccaaaacctgccagagaaacaatggaaaaagaaaacttcaggccaatatccctgataaacatagatgcaaaaatcctcaacaaaaatccagcagcacatcgaaaagctaatctacyaaatcaagtaggcgttattcctaggatataaggttggttcaacatacataaatccataaatgtgattcattgcataagcagaactaaaaacaaaaaccacatgatcatcatagaaaagtctttcaataacattcaacatcttttcgtgtttaaaaaccctcaacaaactaggtattgaaggtacataactcaaaataataagagccatccgtgacaactcacagccagcatcatactgaatgggcaaaatccagaaacattccccttgagaactggaacaaaacaaggatacccactctcatcactcctagccattgtagtactgg

SEQ ID NO: 327280 - DNA, 612 bp, Homo sapiens
cactccaccccgggctgatcattttggttagcagaggctctgcatttctctgggttggagctccaagagataagtgtaaggccctctaacattgtcactgccaaggtccctgcccctgctgcctgcaagctggggagtgaacaaagagcctgagctgagccctcactcattctatgaggccagcattattctgataccaaaacctgccagagaaacaatggaaaaagaaaacttcaggccaatatccctgataaacatagatgcaaaaatcctcaacaaaaatccagcagcacatcgaaaagctaatctactaaatcaagtaggcgttattcctaggatataaggttggttcaacatacataaatccataaatgtgattcattgcataagcagaactaaaaacaaaaaccacatgatcatcatagaaaagtctttcaataacattcaacatcttttygtgtttaaaaaccctcaacaaactaggtattgaaggtacataactcaaaataataagagccatccgtgacaactcacagccagcatcatactgaatgggcaaaatccagaaacattccccttgagaactggaacaaaacaaggatacccactctc

SEQ ID NO: 327281 - DNA, 568 bp, Homo sapiens
taagtgtaaggccctctaacattgtcactgccaaggtccctgcccctgctgcctgcaagctggggagtgaacaaagagcctgagctgagccctcactcattctatgaggccagcattattctgataccaaaacctgccagagaaacaatggaaaaagaaaacttcaggccaatatccctgataaacatagatgcaaaaatcctcaacaaaaatccagcagcacatcgaaaagctaatctactaaatcaagtaggcgttattcctaggatataaggttggttcaacatacataaatccataaatgtgattcattgcataagcagaactaaaaacaaaaaccacatgatcatcatagaaaagtctttcaataacattcaacatcttttcgtgtttaaaaaccctcaacaaactargtattgaaggtacataactcaaaataataagagccatccgtgacaactcacagccagcatcatactgaatgggcaaaatccagaaacattccccttgagaactggaacaaaacaaggatacccactctcatcactcctagccattgtagtactgg

SEQ ID NO: 327282 - DNA, 583 bp, Homo sapiens
tacccactctcatcactcctagccattgtagtactggaagtcctagcaagagcaatcaggtaagagaaggaaataaaaggtgtccaaayaggaaaagaggaagtcaaactatctctgtttgcagataatatgattctatacctagaaaatcccagtctctgacaaaagggtcccagctctgataaacaacttcaacaaagttccaggatagaaaatcaatgtccaaaattcagtagcatttctataaaccaataacatccaatctgctggaatttgctggaggtccactccagaccctgtttgcccaggtatcaccagcggaggctgccggacagcaaagattgctgcctgttccttcctctggaagctttgtcccagaggggcacccaccagatgccaaccagagctctcctgtgtgaggtgtctgtcgacccctgctgggaggtgtctcccagtcaggatgtgcaggggtcagggactcacttgagaaggcagtgtgtcccttagcagggcttgagcgctgtgctgggagatccattgctctcttcagagctggcagagaggaacgtttaagtctgctgaa

SEQ ID NO: 327283 - DNA, 583 bp, Homo sapiens
tacccactctcatcactcctagccattgtagtactggaagtcctagcaagagcaatcaggtaagagaaggaaataaaaggtgtccaaataggaaaagaggaagtcaaactatctctgtttgcagataatatgattctatacctagaaaatcccagtctctgacaaaagggtcccagctctgataaacaacttcaacaaagttccaggatagaawatcaatgtccaaaattcagtagcatttctataaaccaataacatccaatctgctggaatttgctggaggtccactccagaccctgtttgcccaggtatcaccagcggaggctgccggacagcaaagattgctgcctgttccttcctctggaagctttgtcccagaggggcacccaccagatgccaaccagagctctcctgtgtgaggtgtctgtcgacccctgctgggaggtgtctcccagtcaggatgtgcaggggtcagggactcacttgagaaggcagtgtgtcccttagcagggcttgagcgctgtgctgggagatccattgctctcttcagagctggcagagaggaacgtttaagtctgctgaa

SEQ ID NO: 327284 - DNA, 604 bp, Homo sapiens
ttctataaaccaataacatccaatctgctggaatttgctggaggtccactccagaccctgtttgcccaggtatcaccagcggaggctgccggacagcaaagattgctgcctgttccttcctctggaagctttgtcccagaggggcacccaccagatgccaaccagagctctcctgtgtgaggtgtctgtcgacccctgctgggaggtgtctcccagtcaggatgtgcaggggtcagggactcacttgagaaggcagtgtgtcccttagcagggcttgagcgctgtgctgggagatccattgctctcttcagagcyggcagagaggaacgtttaagtctgctgaagctgtgcctgcagctgccccttcccccaggtgctctgtcccagggagatgggagttttatctataagcccctgactagggctgctgcctttctttcagagatgcccttcccagagaagaggaatctagagaggcagtctagctacagtggctttgctgagctgcagtgggctccacccagttcaaacttcctggcagctttgtttacactgtgaggggaaaactgcctactcaaacctcagtgatggcttgagtagcctt

SEQ ID NO: 327285 - DNA, 604 bp, Homo sapiens
ttctataaaccaataacatccaatctgctggaatttgctggaggtccactccagaccctgtttgcccaggtatcaccagcggaggctgccggacagcaaagattgctgcctgttccttcctctggaagctttgtcccagaggggcacccaccagatgccaaccagagctctcctgtgtgaggtgtctgtcgacccctgctgggaggtgtctcccagtcaggatgtgcaggggtcagggactcacttgagaaggcagtgtgtcccttagcagggcttgagcgctgtgctgggagatccattgctctcttcagagctrgcagagaggaacgtttaagtctgctgaagctgtgcctgcagctgccccttcccccaggtgctctgtcccagggagatgggagttttatctataagcccctgactagggctgctgcctttctttcagagatgcccttcccagagaagaggaatctagagaggcagtctagctacagtggctttgctgagctgcagtgggctccacccagttcaaacttcctggcagctttgtttacactgtgaggggaaaactgcctactcaaacctcagtgatggcttgagtagcctt

SEQ ID NO: 327286 - DNA, 604 bp, Homo sapiens
ttctataaaccaataacatccaatctgctggaatttgctggaggtccactccagaccctgtttgcccaggtatcaccagcggaggctgccggacagcaaagattgctgcctgttccttcctctggaagctttgtcccagaggggcacccaccagatgccaaccagagctctcctgtgtgaggtgtctgtcgacccctgctgggaggtgtctcccagtcaggatgtgcaggggtcagggactcacttgagaaggcagtgtgtcccttagcagggcttgagcgctgtgctgggagatccattgctctcttcagagctggcagakaggaacgtttaagtctgctgaagctgtgcctgcagctgccccttcccccaggtgctctgtcccagggagatgggagttttatctataagcccctgactagggctgctgcctttctttcagagatgcccttcccagagaagaggaatctagagaggcagtctagctacagtggctttgctgagctgcagtgggctccacccagttcaaacttcctggcagctttgtttacactgtgaggggaaaactgcctactcaaacctcagtgatggcttgagtagcctt

SEQ ID NO: 327287 - DNA, 604 bp, Homo sapiens
ttctataaaccaataacatccaatctgctggaatttgctggaggtccactccagaccctgtttgcccaggtatcaccagcggaggctgccggacagcaaagattgctgcctgttccttcctctggaagctttgtcccagaggggcacccaccagatgccaaccagagctctcctgtgtgaggtgtctgtcgacccctgctgggaggtgtctcccagtcaggatgtgcaggggtcagggactcacttgagaaggcagtgtgtcccttagcagggcttgagcgctgtgctgggagatccattgctctcttcagagctggcagagaggaacgtttaagtctgctgaagctgtgcctgcagctgccccttcccccaggtgctctgtcccagggagatgggagttttatctataagcccctgactagggctgctgcctttctttcagagatgcccttcccagagaagaggaatctagagaggcagtctagctacagtggctttgctgagctgcagtgggctccacccagttcaaacttcctggcagctttgtttacactgtgaggggaaaacygcctactcaaacctcagtgatggcttgagtagcctt

SEQ ID NO: 327288 - DNA, 566 bp, Homo sapiens
ggacatgtgaaattgaaagtacctgagaaacagtcaactggagctaacatgaaagaaatgttcatatacagcttttcagcttagcaggaaartctagtctacataggtttgtaattcaagcatccaagtatatgtgatagttgaaatcatgcaagtgagttacgtccagaaatgttcagtgacttcctcatgtctcaaaccattataagaatgaaactcaggtcttctctctttaccacaattctcaataagacaaaatattagggcaaaataaacctgtgtatgaagtgtctggatctcttcaaatttggaatctgatatcagaaattgctacagcccttaattgctaacacagatagtccctcttttatgtttcataaatgttctgcattttaccctatttctattagatttgaatttcacctttttagtaacttcacttttgaaatgtaaccctaatgattttagatttcataactaattggttaacatatagttggtatgatctttatattatttgttcaggaaagtttctaaagcatttttctttaccaagttttggagaa

SEQ ID NO: 327289 - DNA, 566 bp, Homo sapiens
ggacatgtgaaattgaaagtacctgagaaacagtcaactggagctaacatgaaagaaatgttcatatacagcttttcagcttagcaggaaagtctagtctacataggtttgtaattcaagcatccaagtatatgtgatagttgaaatcatgcaagtgagttacgtccagaaatgttcagtgacttcctcatgtctcaaaccattataagaatgaaactcaggtcttctctctttaccacaattctcaataagacaaaatattagggcaaaataaacctgtgtatgaagtgtctggatctcttcaaatttggaatctgatatcagaaattgctacagcccttaattgctaacacagatagtcccwcttttatgtttcataaatgttctgcattttaccctatttctattagatttgaatttcacctttttagtaacttcacttttgaaatgtaaccctaatgattttagatttcataactaattggttaacatatagttggtatgatctttatattatttgttcaggaaagtttctaaagcatttttctttaccaagttttggagaa

SEQ ID NO: 327290 - DNA, 457 bp, Homo sapiens
gcttttcagcttagcaggaaagtctagtctacataggtttgtaattcaagcatccaagtatatgtgatagttgaaatcatgcaagtgagttacgtccagaaatgttcagtgacttcctcatgtctcaaaccattataagaatgaaactcaggtcttctctctttaccacaattctcaataagacaaaatattagggcaaaataaacctgtgtatgaagtgtctggatctcttcaaatttggaatctgatatcagaaattgctacagcccttaattgctaacacagatagtccctcttttatgtttcataaatgttctgcattttaccctatttctattagatttgaatttcacctttttagtaacttcacttttgaaatgtaaccytaatgattttagatttcataactaattggttaacatatagttggtatgatctttatattatttgttcagga

SEQ ID NO: 327291 - DNA, 575 bp, Homo sapiens
acactaggccatgactgaaagggcttcagaagacatcatgatgaactacatacagagtaatggcaagtttactataaaattaacattctcagttgtcacaagaaatctgacaatcactaaaatggcaagcactgtgttctatttgtgtccttttcagacatgattgataagaatttgttaccttattagcatgtcataagtagacagcaaagtatgttttaaattcgaaaattattattttctgctcacgttctactttcagcaatgtacacagtgatagtaatgaaagcagccatcagaatagtctattttcttcatagttagctgccaaatacttctttttttctatccagatcatacttgtattgcttttgtgcctttgagcatagtcataaattagtacacagaggaagcagggcagtgacagctatacatttttctatagaagatcagctattaaatcaagarccaagagaaccacctcagcctggacactgagaaccgaagccacaccttcccactgatattaacatgactttgttattctattgttccattagtattacttttcaagg

SEQ ID NO: 327292 - DNA, 575 bp, Homo sapiens
acactaggccatgactgaaagggcttcagaagacatcatgatgaactacatacagagtaatggcaagtttactataaaattaacattctcagttgtcacaagaaatctgacaatcactaaaatggcaagcactgtgttctatttgtgtccttttcagacatgattgataagaatttgttaccttattagcatgtcataagtagacagcaaagtatgttttaaattcgaaaattattattttctgctcacgttctactttcagcaatgtacacagtgatagtaatgaaagcagccatcagaatagtctattttcttcatagttagctgccaaatacttctttttttctatccagatcatacttgtattgcttttgtgcctttgagcatagtcataaattagtacacagaggaagcagggcagtgacagctatacatttttctatagaagatcagctattaaatcaagagccaagagaaccayctcagcctggacactgagaaccgaagccacaccttcccactgatattaacatgactttgttattctattgttccattagtattacttttcaagg

SEQ ID NO: 327293 - DNA, 517 bp, Homo sapiens
gcctttgagcatagtcataaattagtacacagaggaagcagggcagtgacagctatacatttttctatagaagatcagctattaaatcaagagccaagagaaccacctcagcctggacactgagaaccgaagccacaccttcccactgatattaacatgactttgttattctattgttccattagtattacttttcraggactgtcctacctaaagaatggtttgatttttcattataggaacttcccaaatgctttatcaaccttcaggggaagtcatagaccgagtttacagcttgagtctttgaatccttccccacaaatcctcacctcactattttctctaagcccagactgttgtatcatgattctcacacaattctaatcaaatcctctccttcagagacccatcttaaaccaaacttgcaattctcaataaattctgatctccccttctctcctctgagatgctgatagaaatttacaaaggctgtactctctcccttgccagtgtatta

SEQ ID NO: 327294 - DNA, 520 bp, Homo sapiens
aataaaactcccacagaatgtcaattctcattattcgtggattttgtattttcaaatccaccttcttgctaaaatgtatttgtatttgcaaattcacccacctgctaaaatttattactarccccaaaattcacactcacagcacctttgttgtcatacacagactggccaaaaatttcattctcccagcttgcacattcccagctgatgttgaacaaaaccgtgttctgccttcttgtttcaactctcatactaaaatcaagtgtccttttcacaatctgtttagtgtcacggttttcatatttttatgcttttttggtgattttgatgtttacaatggcccccaaacatagtgctaaagtgctctcaaagcacaaaaagaccgtgatgtgcattatggaggcacatgtgacataaactttgttcagatatgacctatagtgccattggctataatctcaatgctgatgaataaattttatatgttaaataaggtgtctttaaacagaaacacatataa

SEQ ID NO: 327295 - DNA, 520 bp, Homo sapiens
aataaaactcccacagaatgtcaattctcattattcgtggattttgtattttcaaatccaccttcttgctaaaatgtatttgtatttgcaaattcacccacctgctaaaatttattactagccccaaaattcacactcacagcacctttkttgtcatacacagactggccaaaaatttcattctcccagcttgcacattcccagctgatgttgaacaaaaccgtgttctgccttcttgtttcaactctcatactaaaatcaagtgtccttttcacaatctgtttagtgtcacggttttcatatttttatgcttttttggtgattttgatgtttacaatggcccccaaacatagtgctaaagtgctctcaaagcacaaaaagaccgtgatgtgcattatggaggcacatgtgacataaactttgttcagatatgacctatagtgccattggctataatctcaatgctgatgaataaattttatatgttaaataaggtgtctttaaacagaaacacatataa

SEQ ID NO: 327296 - DNA, 520 bp, Homo sapiens
aataaaactcccacagaatgtcaattctcattattcgtggattttgtattttcaaatccaccttcttgctaaaatgtatttgtatttgcaaattcacccacctgctaaaatttattactagccccaaaattcacactcacagcacctttgttgtcatacacagactggccaaaaatttcattctcccagcttgcacattcccagctgatgttgaacaaaaccgtgttctgccttcttgtttcaactctcatactaaaatcaagtgtccttttcacaatctgtttagtgtcacggttttcatatttttrtgcttttttggtgattttgatgtttacaatggcccccaaacatagtgctaaagtgctctcaaagcacaaaaagaccgtgatgtgcattatggaggcacatgtgacataaactttgttcagatatgacctatagtgccattggctataatctcaatgctgatgaataaattttatatgttaaataaggtgtctttaaacagaaacacatataa

SEQ ID NO: 327297 - DNA, 520 bp, Homo sapiens
aataaaactcccacagaatgtcaattctcattattcgtggattttgtattttcaaatccaccttcttgctaaaatgtatttgtatttgcaaattcacccacctgctaaaatttattactagccccaaaattcacactcacagcacctttgttgtcatacacagactggccaaaaatttcattctcccagcttgcacattcccagctgatgttgaacaaaaccgtgttctgccttcttgtttcaactctcatactaaaatcaagtgtccttttcacaatctgtttagtgtcacggttttcatatttttatgcttttttggtgattttgatgtttacaatggcccccaaacatagtgctaaagtgctctcaaagcacaaaaagaccgtgatgtgcattatggaggcacatgtgacataaactttgttcagatatgacctayagtgccattggctataatctcaatgctgatgaataaattttatatgttaaataaggtgtctttaaacagaaacacatataa

SEQ ID NO: 327298 - DNA, 568 bp, Homo sapiens
aaattttatatgttaaataaggtgtctttaaacagaaacacatataaaacaagattatgtcttgatcatttgatgaaaatgttgcagccagaggctcacagaaacttccccttacattttcccaagaagcaacaatttaatacttgctaatgttggagctctgaaaaccacatcctyaaaaatggcactttgacatgttgagtgctttgaattaaataaaattgaaaggcctcagaaataagcctcaggaccaacactctgtctaacaccatcagcccccccaaccccaccctactgtattagtctgttctcatgctgctgataaagacatacccaagactgagtaattgataaagaaaaagaggtttaatggactcacagttccacatggccggcgaggcctcacaatcacagtggaaggcaaaaggcacaccttacatggcagcaaacaagaaagaatgagaaccaagtgaaagaggtttccccttataaaaacatcagctctcatgagacttattctgttccaggagaacaatatgggggtatggggggaacagcctccatgact

SEQ ID NO: 327299 - DNA, 568 bp, Homo sapiens
aaattttatatgttaaataaggtgtctttaaacagaaacacatataaaacaagattatgtcttgatcatttgatgaaaatgttgcagccagaggctcacagaaacttccccttacattttcccaagaagcaacaatttaatacttgctaatgttggagctctgaaaaccacatcctcaaaaatggcactttgacatgttgagtgctttgaattaaataaaattgaaaggcctcakaaataagcctcaggaccaacactctgtctaacaccatcagcccccccaaccccaccctactgtattagtctgttctcatgctgctgataaagacatacccaagactgagtaattgataaagaaaaagaggtttaatggactcacagttccacatggccggcgaggcctcacaatcacagtggaaggcaaaaggcacaccttacatggcagcaaacaagaaagaatgagaaccaagtgaaagaggtttccccttataaaaacatcagctctcatgagacttattctgttccaggagaacaatatgggggtatggggggaacagcctccatgact

SEQ ID NO: 327300 - DNA, 548 bp, Homo sapiens
agtcccccttttccctgtcccctgtgaataggatatttaagaattaaccaactagagggcatttaaggcttaaccaaagctcttctttgagtctcatatttttaggactcccatctccatgtgcatattaataaattgygtgcatttttcccttgttaatctgtctattgtcagctcatttcagcagtgaactatcagagggcagaggggaagatttctctctgcccctacagtaatttgatatttacagaaactttatagaacataactactgtgaataatgagaatcaactgtatatgtcacctttgaatacctctcttctctcttcactgcattcctttggcacagagatggagccaaactctagtggctagggaagtaaataaaagactgggtctgagtcacctgtttccctaaaggtagcatcaccctctgaaggtgccccttacaggcctctctgggaagggtttcacaatctcctcccacactttacagttggcaaattatggagccaagggccaaatccagtgcccatttgggcaacaag

SEQ ID NO: 327301 - DNA, 548 bp, Homo sapiens
agtcccccttttccctgtcccctgtgaataggatatttaagaattaaccaactagagggcatttaaggcttaaccaaagctcttctttgagtctcatatttttaggactcccatctccatgtgcatattaataaattgtrtgcatttttcccttgttaatctgtctattgtcagctcatttcagcagtgaactatcagagggcagaggggaagatttctctctgcccctacagtaatttgatatttacagaaactttatagaacataactactgtgaataatgagaatcaactgtatatgtcacctttgaatacctctcttctctcttcactgcattcctttggcacagagatggagccaaactctagtggctagggaagtaaataaaagactgggtctgagtcacctgtttccctaaaggtagcatcaccctctgaaggtgccccttacaggcctctctgggaagggtttcacaatctcctcccacactttacagttggcaaattatggagccaagggccaaatccagtgcccatttgggcaacaag

SEQ ID NO: 327302 - DNA, 567 bp, Homo sapiens
ggtagaatgaaaaatttcggattggcaattgcttgaaagagttattatcatagaaaacaatgtctgggttatgataagaggttgcagagaccaaagttttatcatgaagatgaagcctccatttcgcaggcttcagagaaaatagattgtacaggtttcttctcagacctaaggcttgtgttgatrttaaatggtgattggtttttcctgaattccaagaggaaagagggcataatgaggcatatctgaccctccctccccattgttgtgggacttttccttagttcagctaaagatgcagtctttgtcccatggccacgaaaatttaggcttgcagacgagttgaagggtgagtaaagcagggttttattgggtgaaaaggaaaaaaaaagggggaacagggaccctctgcaaagtcagagtctctgctggtgtgcttcctgccttgcagattgaatcccagtttccacacaggaagaggtgggaccaggctcctccctctgcaaacagtgcaaacttctgtggctccaccccaaggtgcattccttccagtgtgggctggttgca

SEQ ID NO: 327303 - DNA, 567 bp, Homo sapiens
ggtagaatgaaaaatttcggattggcaattgcttgaaagagttattatcatagaaaacaatgtctgggttatgataagaggttgcagagaccaaagttttatcatgaagatgaagcctccatttcgcaggcttcagagaaaatagattgtacaggtttcttctcagacctaaggcttgtgttgatattaaatggtgattggyttttcctgaattccaagaggaaagagggcataatgaggcatatctgaccctccctccccattgttgtgggacttttccttagttcagctaaagatgcagtctttgtcccatggccacgaaaatttaggcttgcagacgagttgaagggtgagtaaagcagggttttattgggtgaaaaggaaaaaaaaagggggaacagggaccctctgcaaagtcagagtctctgctggtgtgcttcctgccttgcagattgaatcccagtttccacacaggaagaggtgggaccaggctcctccctctgcaaacagtgcaaacttctgtggctccaccccaaggtgcattccttccagtgtgggctggttgca

SEQ ID NO: 327304 - DNA, 582 bp, Homo sapiens
taactttctatttatgtgtgaggtttgtgggagaccatagagaagttttgtttaaaacatctgtgtatttctttacataattcatttattatatcccttgttgaatgttctggctgagaaagatttaatttaagctttccatcaatgagaacaaagatgaggcttgctgaaatatgttgatgttcactggacagcaaatatcctgctctgttctatatacaaagttgaaaagtgatggaaacctcatcctcatcctcagggctcagaaaagtcacaaggtctttgactttgaagagtggaacaagagggcaacatgttttctagtaagtaaagtaagtgaggctatggagtaggtttcagagtggcactttcaatcttactcggacatgtcaaagtytttacaaaggcttcttctagacctgtaagcctagaattaatataaacgctcacctaggtcaaattcaatgatatttatcttaaaggactttcaaatctaagtgggtctcaataaggcaaacccttctgagtcttttatttccctaagcataaaattctatcttctctaccttctgtacttctcag

SEQ ID NO: 327305 - DNA, 520 bp, Homo sapiens
tatctgagtgaaaagagttttccttttattaatcccaggttgatatgagctccactttgttctctgtggagtaaaatcctatctctctgaggtttttgtttttaacaattctcattgatttttattgtacatataaaaatgaaatcatttaagaagattcataatgamaagatatctgtagggtaaacccagaaagggttcaagctttatgacagcaaaggaaacaattaacagattgaaaaggcaacctataaaataggagaaaatatttgcaaactatttatctaataaggtgttaatatccaacatatataaggaaaccctacaactgaatagccagaaacaaatacccagatttttaaaaggtgtacagtacttggattgacatttctctaaaagaatatccgagtagccaacacacatatgaaaaatgctcaatgtcactaatcagagaaatgccaatcaaaaccataatgagatatcactccccactggttgtcaaaacaacaacaaaaaggta

SEQ ID NO: 327306 - DNA, 520 bp, Homo sapiens
tatctgagtgaaaagagttttccttttattaatcccaggttgatatgagctccactttgttctctgtggagtaaaatcctatctctctgaggtttttgtttttaacaattctcattgatttttattgtacatataaaaatgaaatcatttaagaagattcataatgaaaagatatctgtagggtaaacccagaaagggttcaagctttatgacagcaaaggaaacarttaacagattgaaaaggcaacctataaaataggagaaaatatttgcaaactatttatctaataaggtgttaatatccaacatatataaggaaaccctacaactgaatagccagaaacaaatacccagatttttaaaaggtgtacagtacttggattgacatttctctaaaagaatatccgagtagccaacacacatatgaaaaatgctcaatgtcactaatcagagaaatgccaatcaaaaccataatgagatatcactccccactggttgtcaaaacaacaacaaaaaggta

SEQ ID NO: 327307 - DNA, 520 bp, Homo sapiens
tatctgagtgaaaagagttttccttttattaatcccaggttgatatgagctccactttgttctctgtggagtaaaatcctatctctctgaggtttttgtttttaacaattctcattgatttttattgtacatataaaaatgaaatcatttaagaagattcataatgaaaagatatctgtagggtaaacccagaaagggttcaagctttatgacagcaaaggaaacaattaacagattgaaaaggcaacctataaaataggagaaaatayttgcaaactatttatctaataaggtgttaatatccaacatatataaggaaaccctacaactgaatagccagaaacaaatacccagatttttaaaaggtgtacagtacttggattgacatttctctaaaagaatatccgagtagccaacacacatatgaaaaatgctcaatgtcactaatcagagaaatgccaatcaaaaccataatgagatatcactccccactggttgtcaaaacaacaacaaaaaggta

SEQ ID NO: 327308 - DNA, 520 bp, Homo sapiens
tatctgagtgaaaagagttttccttttattaatcccaggttgatatgagctccactttgttctctgtggagtaaaatcctatctctctgaggtttttgtttttaacaattctcattgatttttattgtacatataaaaatgaaatcatttaagaagattcataatgaaaagatatctgtagggtaaacccagaaagggttcaagctttatgacagcaaaggaaacaattaacagattgaaaaggcaacctataaaataggagaaaatatttgcaaactatttatctaataaggtgttaatatccaacatatataaggaaaccctacaactgaatmgccagaaacaaatacccagatttttaaaaggtgtacagtacttggattgacatttctctaaaagaatatccgagtagccaacacacatatgaaaaatgctcaatgtcactaatcagagaaatgccaatcaaaaccataatgagatatcactccccactggttgtcaaaacaacaacaaaaaggta

SEQ ID NO: 327309 - DNA, 621 bp, Homo sapiens
agatttttaaaaggtgtacagtacttggattgacatttctctaaaagaatatccgagtagccaacacacatatgaaaaatgctcaatgtcactaatcagagaaatgccaatcaaaaccataatgagatatcactccccactggttgtcaaaacaacaacaaaaagrtaacaagtgttagcaaagatgtggagaaattggaatccttgtactctattgggagtgtaaaatggtgcagccactgtagaaaacagtatggaggctcctcaaaaacattaaaaatagaactatcgtatgatccagcaatcccacacttggtatttattcaaaaaattaagatcttgaagacatattcgaactctcatgttcattgcagcagtactcacgatagccaggatgtagaagccgcataaagacccaccgacatatgaatagataaggaaaatgtggcatctacttacaacaaaatattattgtctgaaatgaaatccttccatatgtggcaacatggatgaaccttgatgacgttatgctaagcgaaataagccaaaaggaaaatacagtgtgagtccgttattatatgtccaatataaaataaccccattcacagaagcacaaagtgc

SEQ ID NO: 327310 - DNA, 621 bp, Homo sapiens
agatttttaaaaggtgtacagtacttggattgacatttctctaaaagaatatccgagtagccaacacacatatgaaaaatgctcaatgtcactaatcagagaaatgccaatcaaaaccataatgagatatcactccccactggttgtcaaaacaacaacaaaaaggtaacaagtgttagcaaagatgtggagaarttggaatccttgtactctattgggagtgtaaaatggtgcagccactgtagaaaacagtatggaggctcctcaaaaacattaaaaatagaactatcgtatgatccagcaatcccacacttggtatttattcaaaaaattaagatcttgaagacatattcgaactctcatgttcattgcagcagtactcacgatagccaggatgtagaagccgcataaagacccaccgacatatgaatagataaggaaaatgtggcatctacttacaacaaaatattattgtctgaaatgaaatccttccatatgtggcaacatggatgaaccttgatgacgttatgctaagcgaaataagccaaaaggaaaatacagtgtgagtccgttattatatgtccaatataaaataaccccattcacagaagcacaaagtgc

SEQ ID NO: 327311 - DNA, 621 bp, Homo sapiens
agatttttaaaaggtgtacagtacttggattgacatttctctaaaagaatatccgagtagccaacacacatatgaaaaatgctcaatgtcactaatcagagaaatgccaatcaaaaccataatgagatatcactccccactggttgtcaaaacaacaacaaaaaggtaacaagtgttagcaaagatgtggagaaattggaatccttgtactctattgggagtgtaaaatggtgcagccactrtagaaaacagtatggaggctcctcaaaaacattaaaaatagaactatcgtatgatccagcaatcccacacttggtatttattcaaaaaattaagatcttgaagacatattcgaactctcatgttcattgcagcagtactcacgatagccaggatgtagaagccgcataaagacccaccgacatatgaatagataaggaaaatgtggcatctacttacaacaaaatattattgtctgaaatgaaatccttccatatgtggcaacatggatgaaccttgatgacgttatgctaagcgaaataagccaaaaggaaaatacagtgtgagtccgttattatatgtccaatataaaataaccccattcacagaagcacaaagtgc

SEQ ID NO: 327312 - DNA, 621 bp, Homo sapiens
agatttttaaaaggtgtacagtacttggattgacatttctctaaaagaatatccgagtagccaacacacatatgaaaaatgctcaatgtcactaatcagagaaatgccaatcaaaaccataatgagatatcactccccactggttgtcaaaacaacaacaaaaaggtaacaagtgttagcaaagatgtggagaaattggaatccttgtactctattgggagtgtaaaatggtgcagccactgtagaaaacagtatggaggctcctcaaaaacattaaaaatagaactatcgtatgatccagcaatcccacacttggtatttattcaaaaaattaagatcttgaagacatattcgaactctcatgttcattgcagcagtactcacgatagccaggatgtagaagccgcataaagacccaccgacatatgaatagataaggaaaatgtggcatctacttacaacaaaatattattgtctgaaatgaaatccttccatatgtggcaacatggatgaaccttgatgacgttatgctaagcgaaataagccaaaaggaaaatacagtgtgagtccgytattatatgtccaatataaaataaccccattcacagaagcacaaagtgc

SEQ ID NO: 327313 - DNA, 515 bp, Homo sapiens
aacattgtgcctgtagttaagaacactgtgttgtattcctaaaaatttaagagggtagctctcatgctgtttttatcccagtttttaaaaattagattgcatggaaaagaagatccttgcacatggacttttcctctttccataatttcaaattgcaagcaaattaatctgggatgatgacttatatttctcctcaactataattttacttctgcctcaggaggatctcctatgaatttctgataacctagttttcctgtgcttctccactcacaggtcgtcctaaaatcctagttaatttacatgcttgaaattgcttgcatggtttttaaatttcaaataaataatacctttgattggactcatgggcttctgatcaaacccatagactttctttcatcaaaactaaacacttcagtagatcctagaaaaacagtgaaaactmtccaagtataaatatgatgctgaataaggtgtttaaaatatatgaagctttatacatacacatacatttt

SEQ ID NO: 327314 - DNA, 473 bp, Homo sapiens
acagactgggaaaatctcaattgctattgacacaatcattaaccagaaatgtttcaatgatggatctgatgaaaagaagaagctgtactgtgtctatgttgttattggtcaaaagagatccactgttgcccagttggtgaagagacttacgatgcagatgccatgaattacaccatcgtggtgtcagctacggcctcagatgctgccccacttcagtaactggctccttacactggctgttccatgggagagtattttagagacaatggcmaacatgctttgaccatctatgacaacttatccaaacaggctgttgcttaccatcagatgtttctgttgctctgccaaccccctggttgtgaggcctatcctggtgttgtgttctacctatgctcccagttgctggagagagcagcccagatgaacaatgcttttggtggtggctccttgactgctttgccagtcatagaaac

SEQ ID NO: 327315 - DNA, 402 bp, Homo sapiens
caccaactagaagtttgtcttataccctactctttactgctcctatcttacacgtatcattatgaaaacaaataaatgtccattttgtttccttttttaaaaacatatgataatcaaaacatttggtcaacgtctactccatctttttgtttatttaaagacaacttttatgaaatgatcatattggaagttatgatatccttcagctagttgcaaagactaaagaaaatatgctactcaaggtaaatgatttrtaacccctgagcagagtcacagtctctctctctctctctgtctctctctctctctctcacacacacacacacacacacacacacacacattttagaatcttcaaaaaccacttccaatacaaactaggtatctgaagtaaagagatac

SEQ ID NO: 327316 - DNA, 517 bp, Homo sapiens
cactgttgcccagttggtgaagagacttacgatgcagatgccatgaattacaccatcgtggtgtcagctacggcctcagatgctgccccacttcagtaactggctccttacactggctgttccatgggagagtattttagagacaatggccaacatgctttgaccatctatgacaacttatccaaacaggctgttgcttaccatcagatgtttctgttgctctgccaaccccctggttgtgaggcctatcctggtgttgtgttctacctatgctcccagttgctrgagagagcagcccagatgaacaatgcttttggtggtggctccttgactgctttgccagtcatagaaacagactggtgatgtgtctgcttacattccaatgaatgtcatttctatcacgaacggacagatcttcttggaaacagaattgttctacaaaggtatccaccctgccattaatgtcggtctgtctgtgtctcgtgtcagatctgctgcccaaaccagggctatgaag

SEQ ID NO: 327317 - DNA, 517 bp, Homo sapiens
cactgttgcccagttggtgaagagacttacgatgcagatgccatgaattacaccatcgtggtgtcagctacggcctcagatgctgccccacttcagtaactggctccttacactggctgttccatgggagagtattttagagacaatggccaacatgctttgaccatctatgacaacttatccaaacaggctgttgcttaccatcagatgtttctgttgctctgccaaccccctggttgtgaggcctatcctggtgttgtgttctacctatgctcccagttgctggagagagcagcccagatgaacaatgcttttggtggtggctccttgactgctttgccagtcatagaaacagactggtgatgtgtctgcttacattccaatgaatgtcatttctatcacgaacggacagatcttcttggaaacagaattgttctacaaaggtatccaccctrccattaatgtcggtctgtctgtgtctcgtgtcagatctgctgcccaaaccagggctatgaag

SEQ ID NO: 327318 - DNA, 633 bp, Homo sapiens
tgggcaatttacaaaagaaaggtttattgggcttaacagtttcatgtggctggggaarccttgcaaccctggcagaaggcaaggaggagcaagtcacgtcttacatggatggcagcaggcaaaaagagagagagcttgtgctttatttttatttttgttgtgcatatatgtgtatgtatttatttatttatttatttttattttaagttctgggatacatgtgcagaacatgcagtttcgttacataggtatacatgtctcatgatgttttgcttcacctatcaacctgtcatctaggtttttaagccctgcatgcattaggtatttattctaatgctctccctcccctttcccccaaccatgacaggccctgggtgtgtgatgttcccctccgtgtgtccatgaggaactcctctttttaaaaccatcagatcgtgtaagacttattcactatcacgataacagcatgggaaagatttgcccccatgattcaattacctcccaccaggtctctcccacaaaatatgggaattcaagatgagatttcggtggggacacagccaaaccatatcaagtccctagagtgagtaggtgggtggagcttataattactggattggaagctcatcaata

SEQ ID NO: 327319 - DNA, 633 bp, Homo sapiens
tgggcaatttacaaaagaaaggtttattgggcttaacagtttcatgtggctggggaaaccttgcaaccctggcagaaggcaaggaggagcaagtcacgtcttacrtggatggcagcaggcaaaaagagagagagcttgtgctttatttttatttttgttgtgcatatatgtgtatgtatttatttatttatttatttttattttaagttctgggatacatgtgcagaacatgcagtttcgttacataggtatacatgtctcatgatgttttgcttcacctatcaacctgtcatctaggtttttaagccctgcatgcattaggtatttattctaatgctctccctcccctttcccccaaccatgacaggccctgggtgtgtgatgttcccctccgtgtgtccatgaggaactcctctttttaaaaccatcagatcgtgtaagacttattcactatcacgataacagcatgggaaagatttgcccccatgattcaattacctcccaccaggtctctcccacaaaatatgggaattcaagatgagatttcggtggggacacagccaaaccatatcaagtccctagagtgagtaggtgggtggagcttataattactggattggaagctcatcaata

SEQ ID NO: 327320 - DNA, 633 bp, Homo sapiens
tgggcaatttacaaaagaaaggtttattgggcttaacagtttcatgtggctggggaaaccttgcaaccctggcagaaggcaaggaggagcaagtcacgtcttacatggatggcagcaggcaaaaagagagagagcttgtgctttattttwatttttgttgtgcatatatgtgtatgtatttatttatttatttatttttattttaagttctgggatacatgtgcagaacatgcagtttcgttacataggtatacatgtctcatgatgttttgcttcacctatcaacctgtcatctaggtttttaagccctgcatgcattaggtatttattctaatgctctccctcccctttcccccaaccatgacaggccctgggtgtgtgatgttcccctccgtgtgtccatgaggaactcctctttttaaaaccatcagatcgtgtaagacttattcactatcacgataacagcatgggaaagatttgcccccatgattcaattacctcccaccaggtctctcccacaaaatatgggaattcaagatgagatttcggtggggacacagccaaaccatatcaagtccctagagtgagtaggtgggtggagcttataattactggattggaagctcatcaata

SEQ ID NO: 327321 - DNA, 567 bp, Homo sapiens
tggagaataccaacctagcagaaatggttccttttggaaaggacattggatgacatcaaatgctcagcataaagtatatgctttgggtacctgtcactcttctaggttaccctcatgaaaattgtatgaggaagttattgtggagaagcgatgaggyggggtcatagagagaacagggactaagagggtgcaagaagttggggaagttgcagagctaggtgacagaggagcatagcagaagaaaaagcctcggtgttgggagaaaacatgaagaaaaaataagttctgtgcttggtcttatgatatgaactgcctgatgctggtggcatgagggaaggttgctttagctataaacgtacaacatccatcaatattccacagtactccacattgtctttctccaagcactctccagagaaacagacaccactcatcagtgggagaaaactgaagcattttgtagaagaatctccaattataaagagtcaatgaatggatcctttttatacgtgagactcctgaccacattgcatctcgaaggcaccttgttatcattgtcatgtgaca

SEQ ID NO: 327322 - DNA, 492 bp, Homo sapiens
  misc_feature (1)...(492): n = A,T,C or G
aggaatagtagaaattattaaaatattgaattgtacccatgagaccatgtggccaggcaagaagaatgagataggccctttcttcaaagtatatgattttttttattattgaagaaattattcataaacacttgaaaacaaagcatattcaaagttttaaactgtacytaaaagatagtgccataagagttgtgagcttttgctaaaaactttgaccttaaaatgggcaactcatgaactatgaattattttaagggtctaatttattgcattttttgattcatatgaatttcccttgacaatgttaattcagttatcagggcaaatgaaaaaataagctctgtaaattaaaatacagaaatatttacatattgtggcttgtctctggaacttttataatgggatattatattttaacataatgttggcataaaatattataatcaagatatcagcaatatagttacaagttgttctttnnnnnnnnnnnnn

SEQ ID NO: 327323 - DNA, 632 bp, Homo sapiens
tcttatcaactttccataaaattctcatttccttgagcctgtgtaaacagctgactaaacacatggctattcactgtcaggacttgctcctcagcatctgccacggaaaagattcgattgcacacatacgaacccaatgccagcaccccaagggacagggcaatagaaatgggagggaaatgatcaagtcaatgaatgatacactccattaatcttaatgttaggacattaatattgcttggcaactgcctaaaatcaacaataagcgatcaaccaatttgttgcctaaaagttrttgatttaaccatcaataacttaacagcataaccataacaataactttaatttactaactttaaataactaaagttctttaacaataacgataacagcatatatgtacatcagttacgcattaaaagatggatattttttgtgtacatctgaatggagaatattagataatgtagaaagacatgagatgaagttgataatacaaccccttagagctttaataaatgagctctctcagtcaagccacagtaacgaccttttctctgtgatatgagccaggactctgcaggtgtacagaggagataaactgcaattataaagtacaattaacaggtagt

SEQ ID NO: 327324 - DNA, 583 bp, Homo sapiens
atggctattcactgtcaggacttgctcctcagcatctgccacggaaaagattcgattgcacacatacgaacccaatgccagcaccccaagggacagggcaatagaaatgggagggaaatgatcaagtcaatgaatgatacactccattaatcttaatgttaggacattaatattgcttggcaactgcctaaaatcaacaataagcgatcaaccaatttgttgcctaaaagttgttgatttaaccatcaataacttaacagcataaccrtaacaataactttaatttactaactttaaataactaaagttctttaacaataacgataacagcatatatgtacatcagttacgcattaaaagatggatattttttgtgtacatctgaatggagaatattagataatgtagaaagacatgagatgaagttgataatacaaccccttagagctttaataaatgagctctctcagtcaagccacagtaacgaccttttctctgtgatatgagccaggactctgcaggtgtacagaggagataaactgcaattataaagtacaattaacaggtagtagcggtctcattt

SEQ ID NO: 327325 - DNA, 606 bp, Homo sapiens
cgaccttttctctgtgatatgagccaggactctgcaggtgtacagaggagataaactgcaattataaagtacaattaacaggtagtagcggtctcatttattatacacacctacgcatgtttccaagcctgatgatcactaagtattcacagcaagtaatcacccactggacaaaacagcattacttcaccttctgaaaaagtagtttctactactttgaaaagcttgttggtgatgagacgaaaactgaaataggttacaattctaatasacacacagtacaggtaacacaaagagtctttcattatttaacattcttaagcatcacccaaaatgccaaaaagaaatacggtaagtttcaaggttttgcataaagtactacactgagcttttaaagtgaagggcttagtcacccaaataccgtcttaggccttatagtatctctcctgagttcccagtatataatttattataccaaacagatcattctccagagttcttttgatatttctagatctctctcaacttataacctaatcagctccctcaatcccacataggcctcaagctaatctcaatcacttttcttccattcatttttcattc

SEQ ID NO: 327326 - DNA, 606 bp, Homo sapiens
cgaccttttctctgtgatatgagccaggactctgcaggtgtacagaggagataaactgcaattataaagtacaattaacaggtagtagcggtctcatttattatacacacctacgcatgtttccaagcctgatgatcactaagtattcacagcaagtaatcacccactggacaaaacagcattacttcaccttctgaaaaagtagtttctactactttgaaaagcttgttggtgatgagacgaaaactgaaataggttacaattctaatacacacacagtacaggtaacacaaagagtctttcmttatttaacattcttaagcatcacccaaaatgccaaaaagaaatacggtaagtttcaaggttttgcataaagtactacactgagcttttaaagtgaagggcttagtcacccaaataccgtcttaggccttatagtatctctcctgagttcccagtatataatttattataccaaacagatcattctccagagttcttttgatatttctagatctctctcaacttataacctaatcagctccctcaatcccacataggcctcaagctaatctcaatcacttttcttccattcatttttcattc

SEQ ID NO: 327327 - DNA, 606 bp, Homo sapiens
cgaccttttctctgtgatatgagccaggactctgcaggtgtacagaggagataaactgcaattataaagtacaattaacaggtagtagcggtctcatttattatacacacctacgcatgtttccaagcctgatgatcactaagtattcacagcaagtaatcacccactggacaaaacagcattacttcaccttctgaaaaagtagtttctactactttgaaaagcttgttggtgatgagacgaaaactgaaataggttacaattctaatacacacacagtacaggtaacacaaagagtctttcattatttaacattcttaagcatcacccaaaatgccaaaaagaaatacggtaagtttcaaggttttgcataaagtactacactgagcttttaaagtgaagggcttagtcacccaaatacygtcttaggccttatagtatctctcctgagttcccagtatataatttattataccaaacagatcattctccagagttcttttgatatttctagatctctctcaacttataacctaatcagctccctcaatcccacataggcctcaagctaatctcaatcacttttcttccattcatttttcattc

SEQ ID NO: 327328 - DNA, 606 bp, Homo sapiens
cgaccttttctctgtgatatgagccaggactctgcaggtgtacagaggagataaactgcaattataaagtacaattaacaggtagtagcggtctcatttattatacacacctacgcatgtttccaagcctgatgatcactaagtattcacagcaagtaatcacccactggacaaaacagcattacttcaccttctgaaaaagtagtttctactactttgaaaagcttgttggtgatgagacgaaaactgaaataggttacaattctaatacacacacagtacaggtaacacaaagagtctttcattatttaacattcttaagcatcacccaaaatgccaaaaagaaatacggtaagtttcaaggttttgcataaagtactacactgagcttttaaagtgaagggcttagtcacccaaataccgtcttaggccttatagtatctctcctgagttcccagtatataatttattataccaaacagatcattctccagagttcttttgatatttctagatctctctcaacttataacctaatcagctccctcaatcccacataggcctcaagctaatctcaatcactyttcttccattcatttttcattc

SEQ ID NO: 327329 - DNA, 673 bp, Homo sapiens
tccatcctgccactatggatactttgttcctragtctactgggagatgacagaagtggctggcgaaagaggctgataggtatccacagaatgggtcatcctatccacttgatttttaaaattcttctctgctgaggtcatcctttggtgagcatccacatgggacacaaatatcaccatggttttgtcactcattcagagaggtccacccacacatacctctttcccaggtttccttgtcaccaatcttctaattatgtttacacattatgccatttgttctttccaagcaaagtgaacaacctggtgcactatttgaagttgagtccactgggacaacttctcttcaccactgtccagggatgtcccagagaggggctacagtgctgcagctatccactttcagatgattcctgaatattatgcaaaaccctctgtaatccaggcccaagtcttctcttctttagtcaactgataatggggagctccccatgggaccataagtgcaggctgcgagagaaaggtcagtgtagcagatgtggggaccatgggcttttgggtcactttttcatgtaacttacttgtgcctcagagcctgctcagacctaatcatgtgtataccacttccattaaatgctggagtgctcctctgcatgcctagcttcatagcttgg

SEQ ID NO: 327330 - DNA, 673 bp, Homo sapiens
tccatcctgccactatggatactttgttcctgagtctactgggagatgacagaagtggctggcgaaagaggctgataggtatccacagaatgggtcatcctatccacttgatttttaaaattcttctctgctgaggtcatcctttggtgagcayccacatgggacacaaatatcaccatggttttgtcactcattcagagaggtccacccacacatacctctttcccaggtttccttgtcaccaatcttctaattatgtttacacattatgccatttgttctttccaagcaaagtgaacaacctggtgcactatttgaagttgagtccactgggacaacttctcttcaccactgtccagggatgtcccagagaggggctacagtgctgcagctatccactttcagatgattcctgaatattatgcaaaaccctctgtaatccaggcccaagtcttctcttctttagtcaactgataatggggagctccccatgggaccataagtgcaggctgcgagagaaaggtcagtgtagcagatgtggggaccatgggcttttgggtcactttttcatgtaacttacttgtgcctcagagcctgctcagacctaatcatgtgtataccacttccattaaatgctggagtgctcctctgcatgcctagcttcatagcttgg

SEQ ID NO: 327331 - DNA, 673 bp, Homo sapiens
tccatcctgccactatggatactttgttcctgagtctactgggagatgacagaagtggctggcgaaagaggctgataggtatccacagaatgggtcatcctatccacttgatttttaaaattcttctctgctgaggtcatcctttggtgagcatccacatgggacacaaatatcaccatggttttgtcactcattcagagaggtccacccacacatacctctttcccaggtttccttgtcaccaatcttctaattatgtttacacattatgccatttgttctttccaagcaaagtgaacaacctggtgcactatttgaagttgagtccactgggacaacttctcttcaccactgtccagggatgtcccagagaggggctacagtgctgcagctatccactttcagatgattcctgaatattatgcaaaaccctctgtaatccaggcccaagtcttctcttctttagtcaactgataatggggagctccccatgggaccataagtgcaggctgcgagagaaaggtcagtgtagcagatgtggggaccatgggcttttgggtcactttttcaygtaacttacttgtgcctcagagcctgctcagacctaatcatgtgtataccacttccattaaatgctggagtgctcctctgcatgcctagcttcatagcttgg

SEQ ID NO: 327332 - DNA, 525 bp, Homo sapiens
gctggttgctgcagtggttgtgggtcagagttccattgtcgtacgtggtttggccactgtctgttttaatattcagtctctattactaaaaggtatacaaatggctaggcttctcacttcagttcttcatgtacaagctccttttagaggtttctgcactaaactattgtaaaaaaaaaaaaagaaaaaaaaggccaactccatttatccaatgtcaaccttgacgttaagaatgatgaatgtggcagctgtttccttctgttattgatctttttactgacccttcccattgtgctttgtcaatgactgagtatcttccctggaccgctctctatctgaagtcatcctcatctctcagggattttcagcaccrtctgtcagccaggcactgtgactctgtcgtcagtgaccatttttattgactttagtctctttctggcctttccatggtgccttggccttaaatgtcctactaattagctcagtggtgattacagtgctggttttgagagcaccctgttgttt

SEQ ID NO: 327333 - DNA, 468 bp, Homo sapiens
cagttcttcatgtacaagctccttttagaggtttctgcactaaactattgtaaaaaaaaaaaaagaaaaaaaaggccaactccatttatccaatgtcaaccttgacgttaagaatgatgaatgtggcagctgtttccttctgttattgatctttttactgacccttcccattgtgctttgtcaatgactgagtatcttccctggaccgctctctatctgaagtcatcctcatctctcagggattttcagcaccgtctgtcagccaggcrctgtgactctgtcgtcagtgaccatttttattgactttagtctctttctggcctttccatggtgccttggccttaaatgtcctactaattagctcagtggtgattacagtgctggttttgagagcaccctgttgtttttttcttatctaggagaattttttttctctctttatctggaaatattactttgctggctatg

SEQ ID NO: 327334 - DNA, 686 bp, Homo sapiens
gtaagatgggacaagactaagggggcccactcctgagctgctcagccacttgcccacctcaggtaaacactgagcccggtggtctttcagtcattccaggtctgatgttctacagttttgtcaggttatctgggagaaattttgatgctgaagactcctgaaagtaggagaagcatttcaaactgaggcctaagatgttttcaagttgtggcagagttgccttgaagaaggtaactcgggctttgccctttgcccttttgccctttgccctttgccctcacctgcagccwgcacatccatacctcacctctaatacagcaacccctgtttgacatgttgtatatattaagcttttacttaagatgtcatttaatgaaaaagattttgctgcttaaaaagcagtggagaataatagctagcctcttgagtacacagtcctgtaagatttgagcacatgatttttagaaaaagaatagaaaataagagaaaattataacctcactttacctgtcgggatattgacatccctgtcagatttcacaaagccacatgtgcatctggtgaaatcccagatccaccctttctaactgtatgctcttaggtagccaattaatctttctaggactcagttttccattcattaaatgggaaacttaacacatagggcttttgagagggttacatga

SEQ ID NO: 327335 - DNA, 686 bp, Homo sapiens
gtaagatgggacaagactaagggggcccactcctgagctgctcagccacttgcccacctcaggtaaacactgagcccggtggtctttcagtcattccaggtctgatgttctacagttttgtcaggttatctgggagaaattttgatgctgaagactcctgaaagtaggagaagcatttcaaactgaggcctaagatgttttcaagttgtggcagagttgccttgaagaaggtaactcgggctttgccctttgcccttttgccctttgccctttgccctcacctgcagccagcacatccatacctcacctctaatacarcaacccctgtttgacatgttgtatatattaagcttttacttaagatgtcatttaatgaaaaagattttgctgcttaaaaagcagtggagaataatagctagcctcttgagtacacagtcctgtaagatttgagcacatgatttttagaaaaagaatagaaaataagagaaaattataacctcactttacctgtcgggatattgacatccctgtcagatttcacaaagccacatgtgcatctggtgaaatcccagatccaccctttctaactgtatgctcttaggtagccaattaatctttctaggactcagttttccattcattaaatgggaaacttaacacatagggcttttgagagggttacatga

SEQ ID NO: 327336 - DNA, 686 bp, Homo sapiens
gtaagatgggacaagactaagggggcccactcctgagctgctcagccacttgcccacctcaggtaaacactgagcccggtggtctttcagtcattccaggtctgatgttctacagttttgtcaggttatctgggagaaattttgatgctgaagactcctgaaagtaggagaagcatttcaaactgaggcctaagatgttttcaagttgtggcagagttgccttgaagaaggtaactcgggctttgccctttgcccttttgccctttgccctttgccctcacctgcagccagcacatccatacctcacctctaatacagcaacccctgtttgacatgttgtatatattaagcttttacttaagatgtcatttaatgaaaaagattttgctgcttaaaaagcagtggagaataatagctagcctcttgagtacacagtccygtaagatttgagcacatgatttttagaaaaagaatagaaaataagagaaaattataacctcactttacctgtcgggatattgacatccctgtcagatttcacaaagccacatgtgcatctggtgaaatcccagatccaccctttctaactgtatgctcttaggtagccaattaatctttctaggactcagttttccattcattaaatgggaaacttaacacatagggcttttgagagggttacatga

SEQ ID NO: 327337 - DNA, 550 bp, Homo sapiens
catttaatgaaaaagattttgctgcttaaaaagcagtggagaataatagctagcctcttgagtacacagtcctgtaagatttgagcacatgatttttagaaaaagaatagaaaataagagaaaattataacctcactttacctgtcgggatattgacatcmctgtcagatttcacaaagccacatgtgcatctggtgaaatcccagatccaccctttctaactgtatgctcttaggtagccaattaatctttctaggactcagttttccattcattaaatgggaaacttaacacatagggcttttgagagggttacatgagtcaatacaagcagagaacttagtacttcctctgtcacgtagtaagcactccttgttatccttggattttgtggtactttggaggagaatggcactcggatctctgttggtataatttttaccaaagtaaaatctggttgaaatagcattcagatttaggcttaaggagaggatatttcttagaaaggaaggctaagcttaatgggggaaaagagttatcagtgaggcct

SEQ ID NO: 327338 - DNA, 550 bp, Homo sapiens
catttaatgaaaaagattttgctgcttaaaaagcagtggagaataatagctagcctcttgagtacacagtcctgtaagatttgagcacatgatttttagaaaaagaatagaaaataagagaaaattataacctcactttacctgtcgggatattgacatccctgtcagatttcacaaagccacatgtgcatctggtgaaatcccagatccaccctttctaactgtatgctcttaggtagccaattaatctttctaggactcagttttycattcattaaatgggaaacttaacacatagggcttttgagagggttacatgagtcaatacaagcagagaacttagtacttcctctgtcacgtagtaagcactccttgttatccttggattttgtggtactttggaggagaatggcactcggatctctgttggtataatttttaccaaagtaaaatctggttgaaatagcattcagatttaggcttaaggagaggatatttcttagaaaggaaggctaagcttaatgggggaaaagagttatcagtgaggcct

SEQ ID NO: 327339 - DNA, 550 bp, Homo sapiens
catttaatgaaaaagattttgctgcttaaaaagcagtggagaataatagctagcctcttgagtacacagtcctgtaagatttgagcacatgatttttagaaaaagaatagaaaataagagaaaattataacctcactttacctgtcgggatattgacatccctgtcagatttcacaaagccacatgtgcatctggtgaaatcccagatccaccctttctaactgtatgctcttaggtagccaattaatctttctaggactcagttttccattcattaaatrggaaacttaacacatagggcttttgagagggttacatgagtcaatacaagcagagaacttagtacttcctctgtcacgtagtaagcactccttgttatccttggattttgtggtactttggaggagaatggcactcggatctctgttggtataatttttaccaaagtaaaatctggttgaaatagcattcagatttaggcttaaggagaggatatttcttagaaaggaaggctaagcttaatgggggaaaagagttatcagtgaggcct

SEQ ID NO: 327340 - DNA, 469 bp, Homo sapiens
ggaacatctgggcttcatagaaactttggagctatatgatagttagagagaatgtagacagggttcctcattgtatagataatgaaacaggaccagagaggctgagtgacttgtagaaggtcccccagtgagtagcagatcctggatgcatgcagcattgctaactctgagagctaagtcstcatcatgtccccaccttcaccacaccacacagttcaggagaaggggcacatctctagaatatggctggaaaatacactagggaaaactttagatccactagcagagtccagtgctcctcttggagaaagtgaccagaaagaataaggcacagttagctgttgaagaaaagctgatttctcagccagattatatacattagcatccatgttagttacctttgctgaataattctctcctcaactcagctctctgaagaaacctccaggaattagcagggctttgagta

SEQ ID NO: 327341 - DNA, 469 bp, Homo sapiens
ggaacatctgggcttcatagaaactttggagctatatgatagttagagagaatgtagacagggttcctcattgtatagataatgaaacaggaccagagaggctgagtgacttgtagaaggtcccccagtgagtagcagatcctggatgcatgcagcattgctaactctgagagctaagtcctcatcatgtccccaccttcaccacaccacacagttcaggagaaggggcacatctctagaatatggctggaaaatacactagggaaaactttagatccactagcagagtccagtgctcctcttggagaaagtgaccagaaagaataaggcacagttagctgttgaagaaaagctgatttctcagccagattatatacattagcatccatgttagttacctttgctgaataattctctcctcaactsagctctctgaagaaacctccaggaattagcagggctttgagta

SEQ ID NO: 327342 - DNA, 590 bp, Homo sapiens
aaacctccaggaattagcagggmtttgagtagagatggcatatgtttgggccctgatgaaaatgataaaattgtggcctggttgcagcttgtgtgctgaaggaagagcatgatgcagttcattggtatgaaaaatgaatgcaactaaaacctaaacattaaaacttggcctttattaccaaagtgaaagtgcttctaattgaggctccctgggttttaattgttcttcaggaaaattagatgttgtcaaagtagaaggttaatgtctgttcacagtctggagtttttggaataacttccttcacagcgtgtgtgttttaaacataaaaagggctttttggtttgtatatagttagtgggattacgactgcctcactagatgcttacaacaaatatttaagaaatccataagtctactatttataacagaataaacatttaaatgtaagatattttgaccattttggtaaaacatttaaaaaataaactatcatgaactgacaaaaccaacatcatttaaaaaaattcaacatggcaaaaactttatgagacttataccatagaccaaatttgtaactttagccttgatac

SEQ ID NO: 327343 - DNA, 590 bp, Homo sapiens
aaacctccaggaattagcagggctttgagtagagatggcatatgtttgggccctgatgaaaatgataaaattgtggcctggytgcagcttgtgtgctgaaggaagagcatgatgcagttcattggtatgaaaaatgaatgcaactaaaacctaaacattaaaacttggcctttattaccaaagtgaaagtgcttctaattgaggctccctgggttttaattgttcttcaggaaaattagatgttgtcaaagtagaaggttaatgtctgttcacagtctggagtttttggaataacttccttcacagcgtgtgtgttttaaacataaaaagggctttttggtttgtatatagttagtgggattacgactgcctcactagatgcttacaacaaatatttaagaaatccataagtctactatttataacagaataaacatttaaatgtaagatattttgaccattttggtaaaacatttaaaaaataaactatcatgaactgacaaaaccaacatcatttaaaaaaattcaacatggcaaaaactttatgagacttataccatagaccaaatttgtaactttagccttgatac

SEQ ID NO: 327344 - DNA, 590 bp, Homo sapiens
aaacctccaggaattagcagggctttgagtagagatggcatatgtttgggccctgatgaaaatgataaaattgtggcctggttgcagcttgtgtgctgaaggaagagcatgatgcagttcattggtatgaaaaatgaatgcaactaaaacctaaacattaaaacttggcctttattaccaaagtgaaagtgcttctaattgaggctccctgggttttaattgttcttcaggaaaattagatgttgtcaaagtagaagkttaatgtctgttcacagtctggagtttttggaataacttccttcacagcgtgtgtgttttaaacataaaaagggctttttggtttgtatatagttagtgggattacgactgcctcactagatgcttacaacaaatatttaagaaatccataagtctactatttataacagaataaacatttaaatgtaagatattttgaccattttggtaaaacatttaaaaaataaactatcatgaactgacaaaaccaacatcatttaaaaaaattcaacatggcaaaaactttatgagacttataccatagaccaaatttgtaactttagccttgatac

SEQ ID NO: 327345 - DNA, 590 bp, Homo sapiens
aaacctccaggaattagcagggctttgagtagagatggcatatgtttgggccctgatgaaaatgataaaattgtggcctggttgcagcttgtgtgctgaaggaagagcatgatgcagttcattggtatgaaaaatgaatgcaactaaaacctaaacattaaaacttggcctttattaccaaagtgaaagtgcttctaattgaggctccctgggttttaattgttcttcaggaaaattagatgttgtcaaagtagaaggttaatgtctgttcacagtctggagtttttggaataacttccttcacagcgtgtgtgttttaaacataaaaagggctttttggtttgtatatagttagtgggattacgactgcctcactagatgcttacaacaaatatttaagaaatccataagtctactatttataacagaataaacatttaaatktaagatattttgaccattttggtaaaacatttaaaaaataaactatcatgaactgacaaaaccaacatcatttaaaaaaattcaacatggcaaaaactttatgagacttataccatagaccaaatttgtaactttagccttgatac

SEQ ID NO: 327346 - DNA, 645 bp, Homo sapiens
agttggttagttactgaattcaacaaatgagtgtgagcaggggcctggagtacttaaaaagaataaacaaaatgcctttaaatcagaaagacaaaattgctagtaatttcagttaattgcactttactccatgtagctacaattgtagatatctagaaaaaatatctatgctaaaagtctgccatctggaaaagtcaaaagaatgatgagctggtattaaatcwaagtaaccctggcatatggagtatctctgccatgttaagagcagaccttggtatgagactgactctgggctttacatatgaatttggaattgccaatatctccacttgaactatgtgagacaataaaagtgctcccttatacactttagataatgggccctttgggggatccgatgttcattctgcctttcccagaaaaatacaactataataaaatgttgtaatcagtttcagtttatttattgctgatcttttatttttgttttaatttaacatggcaatccactttctatagtcaaaagtgcaatttaaagaactctaacaactcacaatatagaagaatgtctttggaaattttaggattcaaatctaaaacaaatcttaagatttctttttcctagattgtactgatgttacaagt

SEQ ID NO: 327347 - DNA, 645 bp, Homo sapiens
agttggttagttactgaattcaacaaatgagtgtgagcaggggcctggagtacttaaaaagaataaacaaaatgcctttaaatcagaaagacaaaattgctagtaatttcagttaattgcactttactccatgtagctacaattgtagatatctagaaaaaatatctatgctaaaagtctgccatctggaaaagtcaaaagaatgatgagctggtattaaatcamagtaaccctggcatatggagtatctctgccatgttaagagcagaccttggtatgagactgactctgggctttacatatgaatttggaattgccaatatctccacttgaactatgtgagacaataaaagtgctcccttatacactttagataatgggccctttgggggatccgatgttcattctgcctttcccagaaaaatacaactataataaaatgttgtaatcagtttcagtttatttattgctgatcttttatttttgttttaatttaacatggcaatccactttctatagtcaaaagtgcaatttaaagaactctaacaactcacaatatagaagaatgtctttggaaattttaggattcaaatctaaaacaaatcttaagatttctttttcctagattgtactgatgttacaagt

SEQ ID NO: 327348 - DNA, 612 bp, Homo sapiens
tataataaaatgttgtaatcagtttcagtttatttattgctgatcttttatttttgttttaatttaacatggcaatccactttctatagtcaaaagtgcaatttaaagaactctaacaactcacaatatagaagaatgtctttggaaattttaggattcaaatctaaaacaaatcttaagatttctttttcctagattgtactgatgttacaagtgccttatgtaatacccagttcttccccatggagatttctcagtgaaagagccacatcacatgttcacaagagcatcaagaataagagggccacgtacctaggaagaaagattggcaagcattctctctcccccatcaaatataaatggatttagcacagggatttggtttaattcactgctgccagcacctagaacaatgcttgaaatttttaatatgacaatgcacaattcaagaggaaataataatattktattagtctgttctcacactgctataaacacatgcctacgacttggtaatatatgaagaaaagaggtttcattgactcacagttccacaggctgtacaggaggcattgctggggaggcctcaggaaacttaaaatcatggcaaaa

SEQ ID NO: 327349 - DNA, 612 bp, Homo sapiens
tataataaaatgttgtaatcagtttcagtttatttattgctgatcttttatttttgttttaatttaacatggcaatccactttctatagtcaaaagtgcaatttaaagaactctaacaactcacaatatagaagaatgtctttggaaattttaggattcaaatctaaaacaaatcttaagatttctttttcctagattgtactgatgttacaagtgccttatgtaatacccagttcttccccatggagatttctcagtgaaagagccacatcacatgttcacaagagcatcaagaataagagggccacgtacctaggaagaaagattggcaagcattctctctcccccatcaaatataaatggatttagcacagggatttggtttaattcactgctgccagcacctagaacaatgcttgaaatttttaatatgacaatgcacaattcaagaggaaataataatattgtattagtctgttctcacactgctataaacacatgcctacgacttrgtaatatatgaagaaaagaggtttcattgactcacagttccacaggctgtacaggaggcattgctggggaggcctcaggaaacttaaaatcatggcaaaa

SEQ ID NO: 327350 - DNA, 568 bp, Homo sapiens
ctaggaagaaagattggcaagcattctctctcccccatcaaatataaatggatttagcacagggatttggtttaattcactgctgccagcacctagaacaatgcttgaaatttttaatatgacaatgcacaattcaagaggaaataataatattgtattagtctgttctcacactgctataaacacatgcctacgacttggtaatatatgaagaaaagaggtttcattgactcacagttccacaggctgtacaggaggcattgctggggaggcctcaggaaacttaaaatcatggcraaatgcaaaggggaaacaggcacatcttcacatgactggtaggaaagagagagctgggaggtgctatacacttttacaaccatcaggtctcttgagaactcactataatgagaatagcaatagcaagagggaagtctgctcccatgattcaatcacctcctccaacattgtggattacaattcgatatgagacttgggtggagacacagagccaaaccatatcaaacattagtacgtgaaagtagttattatgataaaacatattttaacc

SEQ ID NO: 327351 - DNA, 568 bp, Homo sapiens
ctaggaagaaagattggcaagcattctctctcccccatcaaatataaatggatttagcacagggatttggtttaattcactgctgccagcacctagaacaatgcttgaaatttttaatatgacaatgcacaattcaagaggaaataataatattgtattagtctgttctcacactgctataaacacatgcctacgacttggtaatatatgaagaaaagaggtttcattgactcacagttccacaggctgtacaggaggcattgctggggaggcctcaggaaacttaaaatcatggcaaaatgcaaaggggaaacaggcacatcttcacatgactggtaggaaagagagagctgrgaggtgctatacacttttacaaccatcaggtctcttgagaactcactataatgagaatagcaatagcaagagggaagtctgctcccatgattcaatcacctcctccaacattgtggattacaattcgatatgagacttgggtggagacacagagccaaaccatatcaaacattagtacgtgaaagtagttattatgataaaacatattttaacc

SEQ ID NO: 327352 - DNA, 489 bp, Homo sapiens
agctctgtgtcaagaaccagggtcaaagaccaaatataagaacaaaagatactcctagcatccctatctgcaagggttttagaagctctgtctcaggaatcagggacagagaccaaatacataatttttattatatcacaatatcacatggcataattcacttttatattttgtatatagttcaataagttttaccaaatgcatgaagtaatgtagcyaccactacaatcagtaacacagaatagtctcatcaccacaaaacaactctctctggaatcccctttgtaagcactctctactgatatgtaacctctagaaaccactgatctgttttctgctcctataatctggtgtacttcagagtctcagaaaaatgtgataataggaaatgaatgataaaaagctataaaacctacagaaaacaaatagcagagtgccaatagtaagttcttccctttaaatgtaaatagattaaactctgcagccaaa

SEQ ID NO: 327353 - DNA, 489 bp, Homo sapiens
agctctgtgtcaagaaccagggtcaaagaccaaatataagaacaaaagatactcctagcatccctatctgcaagggttttagaagctctgtctcaggaatcagggacagagaccaaatacataatttttattatatcacaatatcacatggcataattcacttttatattttgtatatagttcaataagttttaccaaatgcatgaagtaatgtagctaccactacaatcagtaacacagaatagtctcatcaccacaaaacaactctcyctggaatcccctttgtaagcactctctactgatatgtaacctctagaaaccactgatctgttttctgctcctataatctggtgtacttcagagtctcagaaaaatgtgataataggaaatgaatgataaaaagctataaaacctacagaaaacaaatagcagagtgccaatagtaagttcttccctttaaatgtaaatagattaaactctgcagccaaa

SEQ ID NO: 327354 - DNA, 489 bp, Homo sapiens
agctctgtgtcaagaaccagggtcaaagaccaaatataagaacaaaagatactcctagcatccctatctgcaagggttttagaagctctgtctcaggaatcagggacagagaccaaatacataatttttattatatcacaatatcacatggcataattcacttttatattttgtatatagttcaataagttttaccaaatgcatgaagtaatgtagctaccactacaatcagtaacacagaatagtctcatcaccacaaaacaactctctctggaatcccctttgtaagcactctctactgatatgtaacctctagaaaccactgatctgttttctgctcctataatctggtgtacttcagagtctcagaaaaatgtgatmataggaaatgaatgataaaaagctataaaacctacagaaaacaaatagcagagtgccaatagtaagttcttccctttaaatgtaaatagattaaactctgcagccaaa

SEQ ID NO: 327355 - DNA, 582 bp, Homo sapiens
taatgtagctaccactacaatcagtaacacagaatagtctcatcaccacaaaacaactctctctggaatcccctttgtaagcactctctactgatatgtaacctctagaaaccactgatctgttttctgctcctataatctggtgtacttcagagtctcagaaaaatgtgataataggaaatgaatgataaaaagctataaaacctacagaaaacaaatagcagagtgccaatagtaagttcttccctttaaatgtaaatagattaaactctgcagccaaaagatatagattggcagaatggatttttttaaaaaaaatccacacaggatccaactctattctgtctataataaactcactttarccctaagtacaagcacaggttgatagtggaaatacggcaaaatatattctatgcaaatagtaataaaaagaaagaagggtgcctatactatcagccaaaatagactttaagtgaaaaactcttataagagacaaggaagggcattatataatgataatagaatcagttcaccaagaagacataacagttttaaacatatatggaccaaacaccagag

SEQ ID NO: 327356 - DNA, 582 bp, Homo sapiens
taatgtagctaccactacaatcagtaacacagaatagtctcatcaccacaaaacaactctctctggaatcccctttgtaagcactctctactgatatgtaacctctagaaaccactgatctgttttctgctcctataatctggtgtacttcagagtctcagaaaaatgtgataataggaaatgaatgataaaaagctataaaacctacagaaaacaaatagcagagtgccaatagtaagttcttccctttaaatgtaaatagattaaactctgcagccaaaagatatagattggcagaatggatttttttaaaaaaaatccacacaggatccaactctattctgtctataataaactcactttaaccctaagtacaagcacaggttgatagtggaaatacggcaaaatatattctatgcaaatagtaataaaaagaaagaagggtgcctatactatcagccaaaatagactttaagtgaaaaactcttataagagacaaggaagggcattatatartgataatagaatcagttcaccaagaagacataacagttttaaacatatatggaccaaacaccagag

SEQ ID NO: 327357 - DNA, 555 bp, Homo sapiens
aaccctaagtacaagcacaggttgatagtggaaatacggcaaaatatattctatgcaaatagtaataaaaagaaagaagggtgcctatactatcagccaaaatagactttaagtgaaaaactcttataagagacaaggaagggcattatataatgataatagaatcagttcaccaagaagacataacagttttaaacatatatggaccaaacaccagagcttcaaaatatatgaaatattttcctaaatcagagtcatggktattttctcctagattatcttgtaaagttttataattttacatttatgtctataatccatttttaattttttataaagagggagttataagtagaggtttatttttcacataagatgccaaattattccagcaccatttattaaaaagaaaattctatctgttctttgatctttatcaaagatcaattgaccatatatgtgggcatcagtttatggattctctattctgttacattgacctgcatgactatcttgattactgtaacttaagtcttaacatcagatagtgtgatt

SEQ ID NO: 327358 - DNA, 621 bp, Homo sapiens
tcaccaagaagacataacagttttaaacatatatggaccaaacaccagagcttcaaaatatatgaaatattttcctaaatcagagtcatggttattttctcctagattatcttgtaaagttttataattttacatttatgtctataatccatttttaattttttataaagagggagttataagtagaggtttatttttcacataagatgccaaattattccagcaccatttattaaaaagaaaattctatctgttctttgatctttatcaaagatcaattgaccatatatgtgggcatcagtttatggattctctattctgttacattgacctgcatgactatcttgattactgtaacttaagtcttaacatcagatagtgtgattcctctaactttgtcattttcaaaattattttagaatttttgcccctttaccatgccctatacaatttaagaatcagtttgtgctttatcaggataagaaaattgcctttatttgtactttgctgagagttttcataatawgtggatattcaattttgtcaaacatttttatgtacctagttgtgtgactgttagattttatcaaagcattgcaagaaaattgctatgagtaatgc

SEQ ID NO: 327359 - DNA, 621 bp, Homo sapiens
tcaccaagaagacataacagttttaaacatatatggaccaaacaccagagcttcaaaatatatgaaatattttcctaaatcagagtcatggttattttctcctagattatcttgtaaagttttataattttacatttatgtctataatccatttttaattttttataaagagggagttataagtagaggtttatttttcacataagatgccaaattattccagcaccatttattaaaaagaaaattctatctgttctttgatctttatcaaagatcaattgaccatatatgtgggcatcagtttatggattctctattctgttacattgacctgcatgactatcttgattactgtaacttaagtcttaacatcagatagtgtgattcctctaactttgtcattttcaaaattattttagaatttttgcccctttaccatgccctatacaatttaagaatcagtttgtgctttatcaggataagaaaattgcctttatttgtactttgctgagagttttcataataagtggatattcaattttgtcaaayatttttatgtacctagttgtgtgactgttagattttatcaaagcattgcaagaaaattgctatgagtaatgc

SEQ ID NO: 327360 - DNA, 621 bp, Homo sapiens
tcaccaagaagacataacagttttaaacatatatggaccaaacaccagagcttcaaaatatatgaaatattttcctaaatcagagtcatggttattttctcctagattatcttgtaaagttttataattttacatttatgtctataatccatttttaattttttataaagagggagttataagtagaggtttatttttcacataagatgccaaattattccagcaccatttattaaaaagaaaattctatctgttctttgatctttatcaaagatcaattgaccatatatgtgggcatcagtttatggattctctattctgttacattgacctgcatgactatcttgattactgtaacttaagtcttaacatcagatagtgtgattcctctaactttgtcattttcaaaattattttagaatttttgcccctttaccatgccctatacaatttaagaatcagtttgtgctttatcaggataagaaaattgcctttatttgtactttgctgagagttttcataataagtggatattcaattttgtcaaacatttttatgtacctagttgtgtgactgttagattttatcaaagcattgyaagaaaattgctatgagtaatgc

SEQ ID NO: 327361 - DNA, 557 bp, Homo sapiens
attttcccattttaccttaagcaatatcataactagcaacgtgtgacacccaggaggtttgttttctagataacactctctttacaatataagggctctttgagagagttaatataataaatcctcagagtaaagtctaggatactctttagaaattaaatattacttgaaacatatgaaagccattcagcaggtgacagagctatttacaaatagattaaacatctttcaagtaaattattataacattcattaatgttgttagtgtttatgcactaaaacatagcccaaaataacatattttatcctcatattgtaacataatttatgttacacttgaacaaaaatccctcartgtgcagctgattttaaatccatcatcagttctactagtcaaaagtggagaatctttttgcatttgtacctctggtagccaaagtaatgtatcttctctccatgtttctttatccatccattcattaatgtgctgttttcacattgcttcgttttgaaattgtccatggcccagctgaaccaagcagaaagatttcccaggc

SEQ ID NO: 327362 - DNA, 565 bp, Homo sapiens
gtgttgagtatttatgctatgccaagcactttgcatatattttctcatttaatcctctaaatagtgaggttgattgccttatctccatcctatagatgagaaagctgagactgwgagaaattaagaaacccacatgaggtcatgttgtatgtaagttagtttttgctgcatcataaaccacccgtttatgatttcaaacaggtaatacttgtttctcaataactggatgggggctggatggctaaggggcctcatattttagggacaggaggagctcatcgtcagctgggtgatgggaatgcgaccacaagtctcattatccaggagagcttgaacataggggttgagtttcaaaagcagcataagggcagcaacacaagaacttcccatgtctcacttatgtcatatttgctattctcccattggccaaagcaggtcacaagggcatggccagccggtatggaaggggacaaccaaaggggtagacacagggagtgagaattgctgccattttccccaacaaagaatctaccatccatagcttctaagtgtacaactggaaatc

SEQ ID NO: 327363 - DNA, 617 bp, Homo sapiens
gtgttgagtatttatgctatgccaagcactttgcatatattttctcatttaatcctctaaatagtgaggttgattgccttatctccatcctatagatgagaaagctgagactgagagaaattaagaaacccacatgaggtcatgttgtatgtaagttagtttttgctgcatcataaaccacccgtttatgatttcaaacaggtaatacttgtttctcaataactggatgggggctggatggctaaggggcctcatattttagggacaggaggagctcatcgtcagctgggtgatgggaatgcgaccacaagtctcattatccaggagagcttgaacataggggttgagtttcaaaagcagcataagggcagcaacacaagaacttcccatgtctcacttmtgtcatatttgctattctcccattggccaaagcaggtcacaagggcatggccagccggtatggaaggggacaaccaaaggggtagacacagggagtgagaattgctgccattttccccaacaaagaatctaccatccatagcttctaagtgtacaactggaaatcaaaactaagtttgtcttacttgaaagttcaaaactgtcttggagctactgtc

SEQ ID NO: 327364 - DNA, 583 bp, Homo sapiens
tttctctacctgtccgtgaatgaatggtctccctttattttccatttgtctttcacatattccarcttaacatttatttccacaactgacatttatttgataaaggtcctttgaatacattttagctctaatatgcctactctgtctttaatgtgtgacaatttcactaatggaaatacaatcatatgtgccctgtaaatctcccaagttgtctcaattctccaaagaattacatcatgtctgtccacacccaccaaacagaaaactgaaaagtgaccagttcagcttcaggctagtgttttttcattccaccaaagccacattatatttaattaacgaaactaatgcctataaagttaacaataaaggaatataacacatatacctgaatatacctctattcaaaattattttccaagaatgaataaatgttcacattttattagagaaaatgaaacaatcataatatctgagatttatttcaaaactcttttttttactgacacatgttcttgtccacaggccaatggaaacagacatgtgtagcattatttagatgatcaactgcattaattcttcatat

SEQ ID NO: 327365 - DNA, 583 bp, Homo sapiens
tttctctacctgtccgtgaatgaatggtctccctttattttccatttgtctttcacatattccaacttaacatttatttccacaactgacatttatttgataaaggtcctttgaatacattttagctctaatatgcctactctgtctttaatgtgtgacaatttcactaatggaaatacaatcayatgtgccctgtaaatctcccaagttgtctcaattctccaaagaattacatcatgtctgtccacacccaccaaacagaaaactgaaaagtgaccagttcagcttcaggctagtgttttttcattccaccaaagccacattatatttaattaacgaaactaatgcctataaagttaacaataaaggaatataacacatatacctgaatatacctctattcaaaattattttccaagaatgaataaatgttcacattttattagagaaaatgaaacaatcataatatctgagatttatttcaaaactcttttttttactgacacatgttcttgtccacaggccaatggaaacagacatgtgtagcattatttagatgatcaactgcattaattcttcatat

SEQ ID NO: 327366 - DNA, 583 bp, Homo sapiens
tttctctacctgtccgtgaatgaatggtctccctttattttccatttgtctttcacatattccaacttaacatttatttccacaactgacatttatttgataaaggtcctttgaatacattttagctctaatatgcctactctgtctttaatgtgtgacaatttcactaatggaaatacaatcatatgtgccctgtaaatctcccaagttgtctcaattctccaaagaattacatcatgtctgtccacacccaccaaacasaaaactgaaaagtgaccagttcagcttcaggctagtgttttttcattccaccaaagccacattatatttaattaacgaaactaatgcctataaagttaacaataaaggaatataacacatatacctgaatatacctctattcaaaattattttccaagaatgaataaatgttcacattttattagagaaaatgaaacaatcataatatctgagatttatttcaaaactcttttttttactgacacatgttcttgtccacaggccaatggaaacagacatgtgtagcattatttagatgatcaactgcattaattcttcatat

SEQ ID NO: 327367 - DNA, 583 bp, Homo sapiens
tttctctacctgtccgtgaatgaatggtctccctttattttccatttgtctttcacatattccaacttaacatttatttccacaactgacatttatttgataaaggtcctttgaatacattttagctctaatatgcctactctgtctttaatgtgtgacaatttcactaatggaaatacaatcatatgtgccctgtaaatctcccaagttgtctcaattctccaaagaattacatcatgtctgtccacacccaccaaacagaaaactgaaaagtgaccagttcagcttcaggctagtgttttttcattccaccaaagccacattatatttaattaaygaaactaatgcctataaagttaacaataaaggaatataacacatatacctgaatatacctctattcaaaattattttccaagaatgaataaatgttcacattttattagagaaaatgaaacaatcataatatctgagatttatttcaaaactcttttttttactgacacatgttcttgtccacaggccaatggaaacagacatgtgtagcattatttagatgatcaactgcattaattcttcatat

SEQ ID NO: 327368 - DNA, 284 bp, Homo sapiens
tgtaaacactgagcttattcgaaaagcatttttttaaaatttccaagcttatcagattatgtctatataaaactaacatttttgtgaatttccaagtatgtatttggctcattcattgtttctttttgtccacagatgtacayatttttataatgattacaacaaaataatttaaaccatccagtaggtgaagcattccccttttcccaagacagttggataaaattgaatcaaaatttaattccatgtctgaaggaagtttaacaccctcctcggaagtcttg

SEQ ID NO: 327369 - DNA, 533 bp, Homo sapiens
ctttgaacaggatatcagtgtccttctgcctttggactcagactgggactggaacttacaccatcagctttcctggtattcaggcctttggaattggggtggacctacattaccaacttccctgggtctctagcttgccaactgcaaattttggactcctcagtctctgtaatcacataaagcaatttcttacaataaatgtacctatgtgtccacatatccatctaagcatctagtgggttctgggtttttttcttttggaaggtacgtgactaatacagattagtactgagattagygtgatttagtactaacagtggttctagagaaacaaaattttaagaataaatttcttgaatttgttctgaagtttccagaattggctttctaatctgattagaattaaagatgctagtggttctgtttccagtggtaaagaaagcactcacagtacctggcgtgatttggcaacagaaatatgcaaaatatcacccttggatagtcctaatcaactacttacaaaaagcatggat

SEQ ID NO: 327370 - DNA, 533 bp, Homo sapiens
ctttgaacaggatatcagtgtccttctgcctttggactcagactgggactggaacttacaccatcagctttcctggtattcaggcctttggaattggggtggacctacattaccaacttccctgggtctctagcttgccaactgcaaattttggactcctcagtctctgtaatcacataaagcaatttcttacaataaatgtacctatgtgtccacatatccatctaagcatctagtgggttctgggtttttttcttttggaaggtacgtgactaatacagattagtactgagattagcgtgatttagtactaacagtggttctagagaaacaaaattttaagaataaatttcttgaatttgttctgaagtttccagaattggctttctaatctgattagaattaaagatgctagtggttctgtttccagtggtaaagaaagcactcacagtacctggcgtgatttggcaayagaaatatgcaaaatatcacccttggatagtcctaatcaactacttacaaaaagcatggat

SEQ ID NO: 327371 - DNA, 596 bp, Homo sapiens
aatcaagatgccagaatttgatatctggtgaggcccttcttgctgcctgtgcacatgacagaaggcagaagggcaagagagccaaatgctgcatttagcctcttttttaagggctttgctgcagtttgaatgtgtcctcccaaaaatyatgtgttagaaacttaattatcattaaaatagtattaagaggtgattacactatgagggctctgccttcataaatggattaatgctgctattgtgggaatgggctccctataaaaggacctatttggcctgcttttttctctctcaccccttttttatgcccttcacgatgaaaggacacacatgaaggccctaggcaggagtcagccccttgatcttggactttccagctccagaatagtgagccaataaatttctgtttattataaattacccagtctgtggtattctgtgtaacagcataaaatggactaagacagtccttaatcctattcatggaggaggaatcctcatggcctaattcctcttaaaggcctcacctctcaatatgatcacattcttcattaagtttcaacatattaattttggcagaaatacattcaaatcat

SEQ ID NO: 327372 - DNA, 596 bp, Homo sapiens
aatcaagatgccagaatttgatatctggtgaggcccttcttgctgcctgtgcacatgacagaaggcagaagggcaagagagccaaatgctgcatttagcctcttttttaagggctttgctgcagtttgaatgtgtcctcccaaaaattatgtgttagaaacttaattatcattaaaatagtattaagaggtgattacactatgagggctctgccttcataaatggattaatgctgctattgtgggaatgggctccctataaaaggacctatttggcctgcttttttctctctcaccccttttttatgcccttcaygatgaaaggacacacatgaaggccctaggcaggagtcagccccttgatcttggactttccagctccagaatagtgagccaataaatttctgtttattataaattacccagtctgtggtattctgtgtaacagcataaaatggactaagacagtccttaatcctattcatggaggaggaatcctcatggcctaattcctcttaaaggcctcacctctcaatatgatcacattcttcattaagtttcaacatattaattttggcagaaatacattcaaatcat

SEQ ID NO: 327373 - DNA, 596 bp, Homo sapiens
aatcaagatgccagaatttgatatctggtgaggcccttcttgctgcctgtgcacatgacagaaggcagaagggcaagagagccaaatgctgcatttagcctcttttttaagggctttgctgcagtttgaatgtgtcctcccaaaaattatgtgttagaaacttaattatcattaaaatagtattaagaggtgattacactatgagggctctgccttcataaatggattaatgctgctattgtgggaatgggctccctataaaaggacctatttggcctgcttttttctctctcaccccttttttatgcccttcacgatgaaaggacacacatgaaggccctaggcaggagtcagccccttgatcttggactttccagctccagaatagtgarccaataaatttctgtttattataaattacccagtctgtggtattctgtgtaacagcataaaatggactaagacagtccttaatcctattcatggaggaggaatcctcatggcctaattcctcttaaaggcctcacctctcaatatgatcacattcttcattaagtttcaacatattaattttggcagaaatacattcaaatcat

SEQ ID NO: 327374 - DNA, 583 bp, Homo sapiens
tgtttagctgcctctctcttgactctctgacctgggacattgtggggatttgcctcattgcaatagttgcaattcctggtcccagttctcttgactctatccttgaagtcagaagtattagacagaaaaaaaatggagacttgaatttttttagagaaaacatgtgtgggtagatatttaactgattaatgtcctcttaattacttgaacattactagccaatacatgtgagcttttgcagacaaagggttgcagccatatcgtccaattcttgttggttacatgtyaacaacctgtgatccactgcacctgtaaaatactgttagccctattttcactctcattatttaatacaaatgatcactgttcttttttattattttctcttcctttaattttcttactcccagtttttctccaccactccatcttcttcttgcataaacctctgctggtatctaacattctttattctcaagggtggcatcttaaagggcgtttcagatctttgggtcttacattaatttagttgtgggtccacagctgggaagctcagtatcaagactgcccaatcactgataag

SEQ ID NO: 327375 - DNA, 576 bp, Homo sapiens
tcccagggaggaagaaacttcaagcttaccatgaggaaaatattttcttttttatacctctttcacagagaaatctttacctttctatactgtttttatgtagttttaagttatgtcacgaatattgtagtgtccccattaacctctaaacttcttgaaggaaggaattgtgtctaaccctttttctgccttaatggtagtaaaattttactgattgawgaatgaatgtggaaggatgttttcgggaaatagccttttgtttaatactcagtaggttggtttctatcttatctcttcataaaacttcacaaagtgacagaattccttcctttaattgagatcattctcagctctagtctacctccagatggtctgttttaaattaacggctcaaaattttactactcttgagaacttgggcaaactaatcaaccattcttagtctcagtgtgctctttataaaatgaagaaaacgttaatccttccactgctttgtgaggcttgaatgagatgcgagtccctcagttcatctcagggccctgtgctcagtaatcatccactcttaggactgagctg

SEQ ID NO: 327376 - DNA, 576 bp, Homo sapiens
tcccagggaggaagaaacttcaagcttaccatgaggaaaatattttcttttttatacctctttcacagagaaatctttacctttctatactgtttttatgtagttttaagttatgtcacgaatattgtagtgtccccattaacctctaaacttcttgaaggaaggaattgtgtctaaccctttttctgccttaatggtagtaaaattttactgattgaagaatgaatgtggaaggatgttttcgggaaatagccttttgtttaatactcagtaggttggtttctatcttatctcttcataaaactycacaaagtgacagaattccttcctttaattgagatcattctcagctctagtctacctccagatggtctgttttaaattaacggctcaaaattttactactcttgagaacttgggcaaactaatcaaccattcttagtctcagtgtgctctttataaaatgaagaaaacgttaatccttccactgctttgtgaggcttgaatgagatgcgagtccctcagttcatctcagggccctgtgctcagtaatcatccactcttaggactgagctg

SEQ ID NO: 327377 - DNA, 636 bp, Homo sapiens
gtgactgacccgtacactcatgaaactgaagcctgtgctagcagccgggaaagctaagaggcaatgattgatattgcagaatcctgaacaggtttaggaatttgggaataaaggtgaggctaaaayaggaggactgttggaacataagtttaagaagcagttggctataaccaaaaagatagacaacaagtgttggcaaagatagggagaaatcagaaccctcatatgctgttggtgggaatgtaaaatggtgcagccaccatggaaaacagtctggctgtttctcaaaaagttaaacataaagttaccatacaatccagcaattctgctcctaggtttatacctacgagaaataaaaacatatgtccatacaaaaatctgcacctgaatgtttgtagcagcattattcataacagcaaaaaaagggggggagacaagccaaaggttcactgactgataaatggataaactgtggtatgtctatacagtggaatattattcagcaataaaaaatgaagcactgatgcatactacaatacagataaatctcaaaaacattatgctaagtaaaagaggccagtcacaaaaaaaacacacacacattgtgtgattcaatttatatgaaatgtttacatt

SEQ ID NO: 327378 - DNA, 636 bp, Homo sapiens
gtgactgacccgtacactcatgaaactgaagcctgtgctagcagccgggaaagctaagaggcaatgattgatattgcagaatcctgaacaggtttaggaatttgggaataaaggtgaggctaaaataggaggactgttggaacataagtttaagaagcagttggctataaccaaaaagatagacaacaagtgttggcaaagatagggagaaatcagaaccctcatatgctgttggtgggaatgtaaaatggtgcagccaccatggaaaacagtctggctgtttctcaaaaagttaaacataaagttaccatacaatccagcaattctgctcctaggtttatacctacgagaaataaaaacatatgtccatacaaaaatctgcacctgaatgtttgtagcagcattattcataacagcaaaaaaagggggggagacaagccaaaggttcactgactgataaatggataaactgtggtatgtctatacagtggaatattattcagcaataaaaaatgaagcactgatgcatactacaatacagataaatctcaaaaacattatgctaagtaaaagaggccagtcacaaaaaaaacacacacacaytgtgtgattcaatttatatgaaatgtttacatt

SEQ ID NO: 327379 - DNA, 646 bp, Homo sapiens
tgagtcgcactgacattgtcacaataatatcaacactgaatgtggatctgagattacgctgtaactgtattagaaaggtggacaggaacaggagatacctgcaagggttgttaggggaaggtaaaaggtgaaagagaacaaaaccctcttctgctataaaaggaagtctgtatataatacttaagatgaaaaaaaagtgaagcaagagcactgtaagcatgtcacggagagatacgggggccatggcagatcatcgtcataaaggaccaccagcaattccttccagccctccatgcgcaagtccacttccttcccctggaatctgggcaggccccatgacctgctctgtcccatggaatgtggcrgaagtgggagtgggtggctccaggggccctggccttagaggcctttcagcttctgactacactcttggtagccagtggctctgtgaaaagttcacctcccctgctgaactagaggccacctggagagagagaatcactggaggatgagagcagggaaaacgtgagaccagccagggagccctcagccattccggccacccccagtaattctccaggctcctgagggcagccacgtgtccagtccaggctgaattgcagaattgtgagcaaaaaaccagctg

SEQ ID NO: 327380 - DNA, 528 bp, Homo sapiens
cactgtaagcatgtcacggagagatacgggggccatggcagatcatcgtcataaaggaccaccagcaattccttccagccctccatgcgcaagtccacttccttcccctggaatctgggcaggccccatgacctgctctgtcccatggaatgtggcggaagtgggagtgggtggctccaggggccctggccttagaggcctttcagcttctgactacactcttggtagccagtggctctgtgaaaagttcacctcccctgctgaactagaggccacctggagagagagaatcactggaggatgagagcagggaaaacgtgagaccagccagggagccctcagccattccggccacccccagtrattctccaggctcctgagggcagccacgtgtccagtccaggctgaattgcagaattgtgagcaaaaaaccagctgctgttctaagctacagggtttcgggatggttttttaggcattagcaggtaactgaaagaggtgtaaatgccacaagaaaatggtaaaaaa

SEQ ID NO: 327381 - DNA, 528 bp, Homo sapiens
cactgtaagcatgtcacggagagatacgggggccatggcagatcatcgtcataaaggaccaccagcaattccttccagccctccatgcgcaagtccacttccttcccctggaatctgggcaggccccatgacctgctctgtcccatggaatgtggcggaagtgggagtgggtggctccaggggccctggccttagaggcctttcagcttctgactacactcttggtagccagtggctctgtgaaaagttcacctcccctgctgaactagaggccacctggagagagagaatcactggaggatgagagcagggaaaacgtgagaccagccagggagccctcagccattccggccacccccagtaattctccaggctcctgagggcagccacgtgtccagtccaggctgaattgcagaattgtgagcaaaaaaccagctgctgttctaagctacagggtttcgggatggttttttaggcattagcaggtaactgaaagaggtgtaaawgccacaagaaaatggtaaaaaa

SEQ ID NO: 327382 - DNA, 599 bp, Homo sapiens
ctatttgggcttcagcaaattggcactgaagtacctggttgatattgatgaaaatttatcttaacgtattttgggctgtaaaaactgaagaaaggtgtccttttatcttgatatgtccctaagcacagtatcggtaatatttgccctggttttatagctttacaaatgtaaacctggctccccgcatggtttcctttttccagtcttggcatttctggaacacagttattatgtattctcctggtgaatgaactcaatgcagcgtaacaaagtatctgaggttcaggatattttgtaggggggtaattagatcggccttccattcaactgtttcactccaaatggatgaaggaatctgtagcagtttaaatacttgtagattattttaaagtatcacaggagattcattttgattactcagctgcttactgaatttgttttgcaacaatgggatcacttttgattcaattgcayagttttttcaagtcaaaagtcaaaattatagacataaaatgactccaatttctggcacaacttgcaattctgatgcttgtaaaaatggcagatacttgcttttagaataaagaggcatgggtacc

SEQ ID NO: 327383 - DNA, 500 bp, Homo sapiens
ttacattggtaggaaactccctgcataacattcctgatgtgaaagtcacagagattacccacttgggagaagagtcttatgaataaaatttgttgccagttatttagttttaaaattttctatggcttctgtgagtcatggaggttaatggaatacatttggtttcagggagatacatctggggactataagaaagctctkctgctgctctgtggagaagatgactaacgtgtcacggggaagagctccctgctgtgtgcctgcaccaccccactgccttccttcagcacctttagctgcatttgtatgccagtgcttaacacattgccttattcatactagcatgctcatgaccaacacatacacgtcatagaagaaaatagtggtgcttctttctgatctctagtggagatctctttgactgctgtagtactaaagtgtacttaatgttactaagtttaatgcctggccattttccatttatatatattttttaagag

SEQ ID NO: 327384 - DNA, 635 bp, Homo sapiens
taaagatattgaaattatgtgtgaagagcttaaataaatggtttcatgcaatttaagggcagaaaagtaggcaacgtttgaaaattatgatgttatttttcatttatgtgattttatataagatgtamtttaaaatatgtatataaagtgaacaaattccatgcttatgaagttgtttaactatttcatctatgtccctagaaaactaactaatcaaggtagccaaaaatcttttcttttggaggctattctcatagggaaaatggagatcattttatatttggcatcatcttctactcaagcatatttgcttcttttgtgcgttttgtgttttccagagcccagtcagggaagagaattctaccagtgacagtgtttataattgctgccctcctcaagccttgtgcaggcaaagaagggcatgcattgtctttgaactgaaaaacaataataaagccagccaaaatgtggtcctgctttcatgattaccatatgctgacaactctaatgatatcagttgtaaatatttctccattggggctgacctcttttgctgactctccctaccccaccttatgccactgatccctttttagtttttgaagaaacagcataatacctttctgagaagaaaa

SEQ ID NO: 327385 - DNA, 261 bp, Homo sapiens
gacaccattgaagtaggtacatttggatgaatgtttgtataagttttaaaaaatatccctttccacattttaccattttgcagttccctcaaaattcagcctctttcgtcacaataacaacccataattcatgacaaatattattaggagagatgggaggagcaagcctgccaatctttgcrtacatttttttaaattagattatatttatttagatcattcagcatatgttggatacagagcctcctcatgaaccactaa

SEQ ID NO: 327386 - DNA, 521 bp, Homo sapiens
cttgtttgctagctatagactgtgtgatgttaggaggctgtaaaggatgttaggttctccaccagaaaataaccgggcaagacacattagatatggcaggtttgattccaaatctggtctctttggcaagattcctgtacagctcacctatttgggctgcagtcatattcacacaccatactacataccaaccatttggatatccaactagtacctctccttcaagactcaaatcagagaytagatgttctaggaaaactcccatgactgttctcctcaacactgcttccctacattcactatcaccatcaccacactaagcaataagcttcccctatgtgctctgatagccataatgacacacctccatcattaccatcttcatcttacatcaaagttgtatgtttatgttttggcctacccggacagactataatatccttggaaagcaggcaggcaccatatcatctccatatttacatctctagtgcctattacagtaccaggtttatagtttgtac

SEQ ID NO: 327387 - DNA, 524 bp, Homo sapiens
gagttggctccttgtcacttaccttgaaagaatcctgaataaaacaagaagtgattggcaaggctgaatctgtgcatgtttaggtctcctgctgtaatatcacttttctgaaatcattgaaacctcactcctactttacaagcctataagccattttctttatgtaaatacagacattaacttaaaaaatatcttttgaacaggagggytgcagtgcatgggaaggggcctggagaagtggatagtatctttccccctggtgagctctaagaataagacacagacaatcttgggtggtttaaatgctaccctgtctagaagcaggagggagaagggagcaatcatcacagcccggcagtgtcagaagtttcccactgtgttgtcagacatgagtagagccagtttagcccacgttgagggaaacttgctactgaccacctcctacgtgcccatctttttttgtttgtttgtttgcttcctggctctttgatcaggaattcaggcattctcctgaagcagcttat

SEQ ID NO: 327388 - DNA, 578 bp, Homo sapiens
cccatcattagtctcatccctggaacctactctgaccacctctctccctgagtcttcactgcccttgggactctcattttcccatttgtctgcagcatrgtgtctgccctaaatcacatctcccagctcaccagagaaaacctgaaatcccttaaattagttggagtagtgccacattctgcccacgggacaacctttcacactattaatgttttagtctgaagtatctgcatttggactacttcaaggatttttttttttattttcacatgtcctttctcaaagtactgttggaataagttagataaagtgaaatgggagcgtatttctctcttcactaccaatcctaagtgcccttgccaatgttctccttgcaactaagtttggtactcaaaacacttagaaaaaacttaaacacattactgtataagcatgcctcatggaaattgggcattgtgagtttttaaatagaaaagacaggacatgttttaaaaattaaatcactgttttgatttgctgagaaacaaagccttttatacatcaaccctatttaatattgccatataatagaaaagctt

SEQ ID NO: 327389 - DNA, 578 bp, Homo sapiens
cccatcattagtctcatccctggaacctactctgaccacctctctccctgagtcttcactgcccttgggactctcattttcccatttgtctgcagcatggtgtctgccctaaatcacatctcccagctcaccagagaaaacctgaaatcccttaaattagttggagtagtgccacattctgcccacgggacaacctttcacactattaatgttttagtctgaagtatctgcatttggactacttcaaggatttttttttttattttcacatgtcctttctcaaagtactgttggaataagttagataaagtgaaatgggagcgtatttctctcttcactaycaatcctaagtgcccttgccaatgttctccttgcaactaagtttggtactcaaaacacttagaaaaaacttaaacacattactgtataagcatgcctcatggaaattgggcattgtgagtttttaaatagaaaagacaggacatgttttaaaaattaaatcactgttttgatttgctgagaaacaaagccttttatacatcaaccctatttaatattgccatataatagaaaagctt

SEQ ID NO: 327390 - DNA, 480 bp, Homo sapiens
caccatcttagttcaaccatcatcatctcttgcctcattgtgcaacagcctcacaacttgtatattaacttcctccttccctattcagtgtatcctcaacataatgccatcaagattctgttaaagcacaagtcctatcatatcacttctctcctcaaaacttcccaatggattctcaattcagagtaaaagcaaacattttacagtgacctctaagaccctacttgatatggttgtctgtcaccaacctgatctcatcttctacgagtactctgcccttccctcactccatccttggcgtactgaacacttcgctattcatcaaacatgccaggaaccgcagggtctttgcagtttctgttcacsttgcctggaatgatcttaccccagatttctctctctttgttaggtctttattctaatgtcaccttctgaatgaggccagccctggccaccctatctaaaattttagtcattctc

SEQ ID NO: 327391 - DNA, 501 bp, Homo sapiens
ttatttgtaaacttaaaacttgtggccaagatggccgaataggaacagctctggtctgcagctcccagcatgactgatgcagaagatgggtgatttctgcatttcaactgaggaaactggctcatctcactgggactggttgaacagtgggtgcagcccacagagggcgagccaaagcagggcaggtygtcgcctcacccaggaagtgcaaggggtcaggggaattccctttcctagtcaagggaagccatgacagactgcacctgtaaaaacaggacactcctgcccaaatactgcaattttcccaaggtcttaacaaccagcagacgaggagattctctcccgtgcctggctcggcaggtcccatgctcacagagccttgctcactgctagcccagcagtctgagattaaactgtgaggtggcagcctggttgggggaggggcgtccaccattgctgaggcttgagtaggtaaacaaagtggcctggaagctcgcactg

SEQ ID NO: 327392 - DNA, 501 bp, Homo sapiens
ttatttgtaaacttaaaacttgtggccaagatggccgaataggaacagctctggtctgcagctcccagcatgactgatgcagaagatgggtgatttctgcatttcaactgaggaaactggctcatctcactgggactggttgaacagtgggtgcagcccacagagggcgagccaaagcagggcaggttgtcgcytcacccaggaagtgcaaggggtcaggggaattccctttcctagtcaagggaagccatgacagactgcacctgtaaaaacaggacactcctgcccaaatactgcaattttcccaaggtcttaacaaccagcagacgaggagattctctcccgtgcctggctcggcaggtcccatgctcacagagccttgctcactgctagcccagcagtctgagattaaactgtgaggtggcagcctggttgggggaggggcgtccaccattgctgaggcttgagtaggtaaacaaagtggcctggaagctcgcactg

SEQ ID NO: 327393 - DNA, 622 bp, Homo sapiens
ttgtactaaaaacacctgcagggctgggtatcagaaactcggagtgaatgggggttactggaagaagggaagagctgaaggaaagagatgaaagaaggaagaacttacgcattttaaaaacagaaaaaacaggtgagtgggagtctgcttcccctgctatgaaaagtcaccacaatccagtgaaccactctcctgtagggtgtctttgactgagttatgtccctgtccctgaaagatgagttatgctggttcatatgtgggtcattcctacctatgggttggccctaagcttgttctctggaatgtcccagaacatgtctgttaactcttcccatatgaccatcctccaaatacttggagtcaggcctcttctaagacttctctttccttgattaaacttcagcccttctcttcctacccatcctayaccctctcacctcaggactctactttgtgccaggtgagaccagctaatctgaaaaacaaattcatattatatcagctggtggtaatgttaccctcatgtctgcaatcacaaaacaggaagaagccttagaagtcagctcaatccaattccatatttgttcacaaaaaaagtggagactcattgttacatatttgt

SEQ ID NO: 327394 - DNA, 622 bp, Homo sapiens
ttgtactaaaaacacctgcagggctgggtatcagaaactcggagtgaatgggggttactggaagaagggaagagctgaaggaaagagatgaaagaaggaagaacttacgcattttaaaaacagaaaaaacaggtgagtgggagtctgcttcccctgctatgaaaagtcaccacaatccagtgaaccactctcctgtagggtgtctttgactgagttatgtccctgtccctgaaagatgagttatgctggttcatatgtgggtcattcctacctatgggttggccctaagcttgttctctggaatgtcccagaacatgtctgttaactcttcccatatgaccatcctccaaatacttggagtcaggcctcttctaagacttctctttccttgattaaacttcagcccttctcttcctacccatcctacaccctctcacctcargactctactttgtgccaggtgagaccagctaatctgaaaaacaaattcatattatatcagctggtggtaatgttaccctcatgtctgcaatcacaaaacaggaagaagccttagaagtcagctcaatccaattccatatttgttcacaaaaaaagtggagactcattgttacatatttgt

SEQ ID NO: 327395 - DNA, 597 bp, Homo sapiens
gataattcctgctgctctaacaaaataccttagactggataatttatagacaacagacatttatttctcacagttctggaggctgaaaagaccaagatcagggtgctggcaggttcagtgtctagtagaggccttctctctgcttccaagatggggcctcattgctctgtcttccagaggggacaartgctgtgtcctcgcatggtagaagagcaaaaaaggccttgctgtctccctacagcccttttataaggttgctaatcccatttatgagggtctgccctcatgatttaatcacttcctaaaggccccacctcttaatactgttgcattgaggattaaatttcaacatgaattctagagtgaacacaaacattcaaaccatagcaataagattatttaataaacagagatatgaagagattacaaatcatttaataaatggagagagagacaatcttaactataaacctgatattctgattccacaagatatgtgtgctaaacaatttgatcacaagatgtttctaagtcttttgcacatcattcaaagcagcaaaaagtgatgttcgaaaacaaaaactaactctgtgagtt

SEQ ID NO: 327396 - DNA, 597 bp, Homo sapiens
gataattcctgctgctctaacaaaataccttagactggataatttatagacaacagacatttatttctcacagttctggaggctgaaaagaccaagatcagggtgctggcaggttcagtgtctagtagaggccttctctctgcttccaagatggggcctcattgctctgtcttccagaggggacaaatgctgtgtcctcgcatggtagaagagcaraaaaggccttgctgtctccctacagcccttttataaggttgctaatcccatttatgagggtctgccctcatgatttaatcacttcctaaaggccccacctcttaatactgttgcattgaggattaaatttcaacatgaattctagagtgaacacaaacattcaaaccatagcaataagattatttaataaacagagatatgaagagattacaaatcatttaataaatggagagagagacaatcttaactataaacctgatattctgattccacaagatatgtgtgctaaacaatttgatcacaagatgtttctaagtcttttgcacatcattcaaagcagcaaaaagtgatgttcgaaaacaaaaactaactctgtgagtt

SEQ ID NO: 327397 - DNA, 503 bp, Homo sapiens
tcatactgtacattactgtttttgagagtctcttttccatctcagattcatccctgttcctagagagtagctctcctagagttccccctgagaacctggggtgttcactgaggccctttcctcttggcgagccttttaagattgcaaaacctctgctstattcagacacttttgcttagttgcttaatgtcctgctccatgcagcctcagaatttggcaaatattttgataggaaaacagtgtcaagtgtccattaacctttctcattgggtttccagcctcatgagatttggatttttccagtccccaaaactggaaccaaaaattcggctgtctttactgcctcttagaggccttctgcccaagtctgttgcctggattctttccctcttgccaagtactctgaactagcaaatgccccaaaggaaaaatcagttataaaatgtcgacattcctctctaagttttctcattctccaggacttgttgcccaagtctgagttt

SEQ ID NO: 327398 - DNA, 503 bp, Homo sapiens
tcatactgtacattactgtttttgagagtctcttttccatctcagattcatccctgttcctagagagtagctctcctagagttccccctgagaacctggggtgttcactgaggccctttcctcttggcgagccttttaagattgcaaaacctctgctgtattcagacacttttgcttagttgcttaatgtcctgctccatgcagcctcagaatttggcaaatrttttgataggaaaacagtgtcaagtgtccattaacctttctcattgggtttccagcctcatgagatttggatttttccagtccccaaaactggaaccaaaaattcggctgtctttactgcctcttagaggccttctgcccaagtctgttgcctggattctttccctcttgccaagtactctgaactagcaaatgccccaaaggaaaaatcagttataaaatgtcgacattcctctctaagttttctcattctccaggacttgttgcccaagtctgagttt

SEQ ID NO: 327399 - DNA, 465 bp, Homo sapiens
tagggtcctttctcctttcaaaaagatgttggttctaaggccttggatattttaactcaatattctttctctctcccaagcttgctttgccagtacttcagacctaagtaagtgaaattgaaataccagaatagtacattacagagtgttccaatacttttgtttgtttgtttttgtttttgtttttgagacggagtctcactctgtcacccaggctgsagtgtagtgggatcaggttggctcactgcagcctccatctcctgggttcaagcaattctgcctcagcttcctgagtagctgggattacaggcgcccactaccacgcccagctaatttttttatgtttttagtagagacggggtttcaccatgttcgccaggctggtcttgaactcttgacctcaggtgatccacctgcctcggcctcctaaagcgctggaattagaggcgtgagccaccgtgcccg

SEQ ID NO: 327400 - DNA, 486 bp, Homo sapiens
tatatgtattttatatcttgattcttttttcactcaacaatgtatatgcaagatttattcacattatttggtggagctggagtttatttcattgctgaatattccattaaatgatatgtaataatttaatttatccattctactctagatatagacatgggttatatccaatatttttcttgaatattttctgtccatggtagaattacactgtctttaaaactgtatattctattttcatcacttaacattttagcataagcgtttttgtgttgttaaattctattcctaaagattatctctaacagctgtataacrcttcattatgtgtacatactataatttatttaaccatttccctagggttttcatttagattgtcttcaattatttgttactatgaataatgttatagtgaacattttttacacagatttatatctgcatttcaaagcatttccttaggtcatttccaaaaactagaat

SEQ ID NO: 327401 - DNA, 529 bp, Homo sapiens
atattagcataatgattgccagaacaccccatccacatccccctactgaaccctggggtttcccattccagcatccctttccctaagacccacctaactcagatgcatcccgccatccaggatcctccaaccaaaaccctgatctgcacttccccagggtagatatagacctttaacaccctaaacactaaaaagattttggtgggcattcccagccaatatgtactgaaaaacacaatttaatattttgaaatgatacaagcttaactacacagtaagaaaaaccatttcattcaggccagccgtggtggctcatgcctgtgatcctagcactttgggaggtcaagactgggggatcacttgagcctaggaattcgaggccagcctgggcaacctcgtctctacaaaaaatacaaaaattagctgagcgtgatkgtacacacctgtagtccaagctactcgggaggctgaggcaagaggatcacttgagcctgggaggtcaaggctgtggtgagccgtgattggaccc

SEQ ID NO: 327402 - DNA, 584 bp, Homo sapiens
caagcctagagagaaatcaatgcaatcaaaggatggaggctccaggaaaaaattttcaggaagaaaaaaatgtataaggtgccatcaacattccataatgcttgaatattacaaacacttaagaaacaataaaggcaggtgtcatgagggtgggagggacaagtatacaagaaggggaatgaaatcagagagcacagctgggttagatattagccaatttacctaaacgtttttcttcccagttacagaatcaatatactgacagagcacacaagacttaattgggatcagagaatataaatagaatcaaccctaacaatttcaaagcaaaattacaggtgacgtgttggaagatgaaaaggraagagaagagatgaaggacatctctagtgctctaacctttcaaaatggggagatcctttctatagttgttggaacaagaaattaaaatgcaaatatattatttaaagttgcataggtattgaaaagaggaactgagaacagtcagtagaagagaaaatgaacggtgaatggggtagatgagcttaaccaccatctatcatggcaggaatccaatagaaaaa

SEQ ID NO: 327403 - DNA, 527 bp, Homo sapiens
ctttgtgctactggattacaaatggtgtgctcaaagggggtaataactgtgtggtctgtcctactcagccrtgtaattgagcactggctatgtgtctggcagtgtgttaacaggctgtcatgagtgacaaaaggtgtgcataacacagctcctgtcctcaagcagtttgtgtgcagtctcctcagtgggtgacatgacagaatgactgcaatatttaaaggataatgaaattcaaactaaagtaaaataccaatgatgttaaatgcaataatgcattcagaagagagaggtcatcatagctttggatgttagggaggcttcatggtacaaatcacacatgcagcagagtttcaagactaggtgggtttacaaagtgtccattgacagatgaatagataaagaatacgtacacacacacacacaaacacagacacacacacacaggagtactgttcagtcttaaagaggggaaatcctgtcatttcaacatcatggataaacgtggaggacataatgcaaagtgaaat

SEQ ID NO: 327404 - DNA, 570 bp, Homo sapiens
attgacctctcaatagcatttaacatagttgatgggggaagattacatttttcaaaaatggctacaatggtatgacccctaccacatgctctcctacaattttgccacttccctgtgagtggtagaatctagatcttttcttcttgaatctgagtacacttagaacttgcctataacagaayatattagaagtgatgctgcctgacttttcatgctaggtcacaaaaggcaatacagcttctgtcttgttagttgagacatttggtgtagagtcctaatattccattaagaaaacaaactaactgagggctgtaggctgtgaggaagctgagccccatggaggggacacatacagatgttttgtcatcaagtcttgtctttgagtcctctcagcccaggcatgggacatgttagaggatgaacttcagatgattccaactagccagcgcttagacatctcgttaccctagtcttgaagtctttccagcagaggcccagatagtgtgcagataagccagtttagctgggctctttctgaattcctgacctacagactccatgcttataata

SEQ ID NO: 327405 - DNA, 593 bp, Homo sapiens
cctataacagaatatattagaagtgatgctgcctgacttttcatgctaggtcacaaaaggcaatacagcttctgtcttgttagttgagacatttggtgtagagtcctaatattccattaagaaaacaaactaactgagggctrtaggctgtgaggaagctgagccccatggaggggacacatacagatgttttgtcatcaagtcttgtctttgagtcctctcagcccaggcatgggacatgttagaggatgaacttcagatgattccaactagccagcgcttagacatctcgttaccctagtcttgaagtctttccagcagaggcccagatagtgtgcagataagccagtttagctgggctctttctgaattcctgacctacagactccatgcttataataaaatagctattgtttaaggccactaagtttatggtggtgtgtgacatgtaatagctgactattcttgactttactcctatcttgttagtacctggtttttggtctcctttgctgaatccttttctaagcctctaattgaggagtaccccagacctcaacctttggtgctcttctctatctcacttactcctt

SEQ ID NO: 327406 - DNA, 459 bp, Homo sapiens
ttcctaaacttgattcataagctattcaacatttttccaacaaatatcttttctcccaagctatccagatgtggtttctgttgcatgcaactaggaaccctgatcccctcctactacctttttatttatttctgtccagttggaacctggagaaaactaacactacctctctataaacctactttactgaaggaagaaaattccattcattcccatctctccacatcaccttccgcttctctgggatttccatcactcccgagagcattccacataaactggacctgtttagttgatcctttccccttggaagcctttactctcwttacaaaaaaaaaaaaaaaaaatctgtttaaagagaaaaagtcagcctacttttttccaaactcctttgggactttgtaaaaggtgaaatgggtaagcatgttggtatctggaaagaatttttaaagatccttc

SEQ ID NO: 327407 - DNA, 438 bp, Homo sapiens
catttttttttttttttttgagatggagtctcctcagccgcccaggttggagtgcagtggcgtgatctcagctcactgcaaccactgtctcccgggttcaatagattctcccawctcagcctcccgagtagctgggattacaggcacctgccatcatgcctggctaattagagaataactttttacaggacttagcatcatatttttatttgtataaaataaacataaaactagagcttatttcctgttaaccattttgtgagtctttttgtacacttccaaaacaccaatagccactttattatttttcttttgcttttgttagcatctttgggccacacaaatatttagaagatttatgtggtatcaaactcataattttgtgtaaacaaagctcacccatttctatatagttcatatttctaagccaaggcaaag

SEQ ID NO: 327408 - DNA, 589 bp, Homo sapiens
gtaggaaacatgtcattatgcatttgtcaaaacccatagaatgtacaacaccaagaaagaacactaatgtaaactatgaattttgggtgacaatgatgtatcagtgcaggttcattggttttgataggttaactactctgatgtgtggggcaggaggtatatgggaacgctgcattttctgctcaagtttgctgctaatctaaaaatgctctaaaaattaaagtctataatgggacacatggaagtaaagtgtgtggagtgatagacaatggagacttggaagggtgggaagtaggagggggagaatgatgagaaactacttaaggggtacaatgtacattattcagatgatgaatcctctaaaagccctgacttcaccactacacaatatatccatgtaacaaaatcacacttgtatacaataaatttatacaaaattttaaaaagtaaartttgtttaagaaaaaataaatagaacatgaatgagtgtaattgaataaaaatatcattgtggtccagaactaaaggaaggagtttctgaatgcttgcctagaaatgcaaagttaaagaacacagtgctttcataaca

SEQ ID NO: 327409 - DNA, 616 bp, Homo sapiens
tcagttcaatggcccaataaaatatgacagctgtcaatactcaccagcatttcaaatttccttccactctgtacttggctgacaaaattaagcactccttataccaacactcttagaagaaaccatttatcagagcaacattcaaaatggcaatacactttagccattcttttcccttccacccaatayttgggcccctgggattgggacttaagagagatgtggctacctactcttgagagtcacttgacataaaaacagtgaagataggctgggcacagtgggtcatgcctgtaaccccagcactttgggaggccggggcagatggatcatttgaggtcaggagtttgagaccagcctggtgaacatagtgaaaccctgtctctactaaaaatacaaaaattagctgggcatggtggtacgcacctgtgatcgcagctactcgggaggctgaggcaagagaattgcttgagcctgggaggtggaggttgcagtgagccaagattgtagcactgcactccagcctgggtgacagagtgagactgtctcaaaaaaaagaaaaaaaaaacagtgaagatgatcaaatgaatcttctcaagctaatattgaattcgtt

SEQ ID NO: 327410 - DNA, 616 bp, Homo sapiens
tcagttcaatggcccaataaaatatgacagctgtcaatactcaccagcatttcaaatttccttccactctgtacttggctgacaaaattaagcactccttataccaacactcttagaagaaaccatttatcagagcaacattcaaaatggcaatacactttagccattcttttcccttccacccaatacttgggcccctgggattgggacttaagagagatgtggctacctactcttgagagtcacttgacataaaaacagtgaagataggctgggcacagtgggtcatgcctgtaaccccagcactttgggaggccgrggcagatggatcatttgaggtcaggagtttgagaccagcctggtgaacatagtgaaaccctgtctctactaaaaatacaaaaattagctgggcatggtggtacgcacctgtgatcgcagctactcgggaggctgaggcaagagaattgcttgagcctgggaggtggaggttgcagtgagccaagattgtagcactgcactccagcctgggtgacagagtgagactgtctcaaaaaaaagaaaaaaaaaacagtgaagatgatcaaatgaatcttctcaagctaatattgaattcgtt

SEQ ID NO: 327411 - DNA, 506 bp, Homo sapiens
agagaattctgaagcaagctgtcataaaaatcaaataatagtttctttcttctttcacctaaatttctacgctttctgacttcattttccatactgcaactttcatatagatccaaacattcatagcaattgagtagaatttggattgaaggcaaaatgaagtaaaataaatcagaagtcagactaatccacagtgtaggccacatggcacaaagtcaataagcagccttatctctgtttcaggtaacaatcaccacagaaaaattgcaatccagtgaagtctttctattaataacgagaccttaacttatctctttctgagaacaaggctgagtttaaataaaagaataaagctaaccaaagaagttgagttgataaatggttcatctttaaaaaacaaaacaraacagaacaaaaaacacccactgttttgaattacactcatctcttttattctacttcaaagttttttgtttgtttgtttgtttgtttatttgttttttcag

SEQ ID NO: 327412 - DNA, 506 bp, Homo sapiens
agagaattctgaagcaagctgtcataaaaatcaaataatagtttctttcttctttcacctaaatttctacgctttctgacttcattttccatactgcaactttcatatagatccaaacattcatagcaattgagtagaatttggattgaaggcaaaatgaagtaaaataaatcagaagtcagactaatccacagtgtaggccacatggcacaaagtcaataagcagccttatctctgtttcaggtaacaatcaccacagaaaaattgcaatccagtgaagtctttctattaataacgagaccttaacttatctctttctgagaacaaggctgagtttaaataaaagaataaagctaaccaaagaagttgagttgataaatggttcatctttaaaaaacaaaacaaaacagaacaaaaaacacccactgttttgaattacactcatctcytttattctacttcaaagttttttgtttgtttgtttgtttgtttatttgttttttcag

SEQ ID NO: 327413 - DNA, 525 bp, Homo sapiens
atctttcagttttattcccagtagtcactttctaagaattaatttctcttttattatgtggtaatattaaagagacagtgtgtacagtgtgtgtacatatgactcacagcaaattaagagtattgtgccttactctatccagagaatctccctgccaatggttgctgctcccacctttttctctgagccacatccttggcatctsacagctagattactgcaatagttccccaacagtcagcctgcctctcacattctgatatgtcctggacttctttgatcaatcctgttaaacccctatgccagagggaacccctgcattagtttttctcatgcattgattttgctttcattagtatgcttacctaagatatggtctttacaaaatatttgaagatgatgatggtgcaaggagatgatgagaattacctttgattttgggtggactgctgctgcttccatcctaaaatgtgcctacattgttctttatcttaccataggatctctaatcattctccctgtaac

SEQ ID NO: 327414 - DNA, 535 bp, Homo sapiens
gggtctattttggagtggcgtctaatggtgtcccgtgctatcaagggttttgactcacttaagaaatactttctgcactcattccaagcactctgctaggggccaacgatgcaaaaaaaaatgagtaaacatacttcttcctctcaagaaattcctctgctgagtagtcttttatgtgcaggccagagaagcggatggaatatgtttagaattccttttttactttttctatgttgtattttgattctgtktgttttgcatgttttcagtcttttgactcttgaaagcaaagatgctgattgtgaattcactctgtagtatttgtacagtggccagatgcagaaacaaaataattaaagtttttcaaagtccttgatgaatttcatcttaaaaatacacataaatacatgcatgcatacatacatacaatacacacaccaagcacaaaatattttattttataattttttatttttttattttttgaaatgaaatcttgctttgtcacccaggctggagtgcagtggcataatct

SEQ ID NO: 327415 - DNA, 642 bp, Homo sapiens
tggatatttgtcctttgtcagatgtatagattgtgaagattttctttcactctgtgggttgtctgtttactctgctggctgttccttcattcagcgatatttaaaatcatgttttcatgtttccctcccaaaaaaattccactagaattttgcttggaatggcattccacctatcaattaatttggaagaaatgagcatatttactgtcttttatttttaacagttcttttgaaagttattcctaagtatttatatttatattacttgttgaagaggatgaattttttcattttgctttctatttggttttagcagatttaaatgaatacaattgatttttatattttcattttatatgtaagtggcttatggatgcctctattagtcctgtgagatttttcagtggagtctcttgggttttctacatagattattttactctctatggataatgaaaatccccttgtcttaataactgtacctcttactacagccctaactcattgaaattctccctctttacgttttagtgagtctatgctttctatctagtctgtttctctctctcttttgttactccttratcaggtgaattttaggcatattctagacttactgttgtgagtccctccattaccctg

SEQ ID NO: 327416 - DNA, 579 bp, Homo sapiens
agtttaatatttttccacagtactaccacaccaccatttcatccactttagtaacttgggcaactgattctaatacatttattgatttactatagaaattcttcataaggaagttatagaaatagcaagagaagttaattataaccagtttttatctatgtagaatccccaggacatatggattctcttcctttcctaccagaaggaaagaaccagctccagtgtgtgtgtactcagcactgctgtcactcataaagatgcctgttggtaactggccaatgatgtgtcagcgaggctctgctttcaaattttgaaaattattttttccattctgagaacatgtgtatgttagatttaagaaaaatagaggcatattgctcagaaaacaggtcatatrcaaaacagcaaaaaaaataataatagcccaaacatttcttaccagaggaggcttatgaattagttttccacatagagaaatgttttaatataacagttgatacaaagaaagaagaaaaagcagtatacacttaagaaggagggtgaggaagcatgaggcataaagcatctgttagtctatca

SEQ ID NO: 327417 - DNA, 614 bp, Homo sapiens
cttagtattatatattcctcaattggcttgaaataaatacacctgctaagtacagaacataagtagaatcactgaatcaaagaatttcagacttagaagggactgggaacaattcagagcagaggtcaacaagtcaaagagaaaaaaaggagatagaactaaggcaagagacactgcagcactaaacaacagaaacaatggaaaaatactttgagatatatagggtatgtgtcagtgtgtgtatagtgtgtgtggaagtgtgtgaaatgtgaaaatggctttctgaaaccaaaagccagaagctttatcgtgacatctgtggaaaccaaacaactcttccctactacctgatactattgggtagtatactatcaggtcttgtgcagtatttacatatcctattttctatattttccccctgtaaagtagaaacaggaaaaaatgccttcagtttatctccctctaaccatcgttcattaaactttccccactgttatttttaacactgctttatcaatgtgatgytccatctcacagtagcttcttaaaatttttgtggatgtgcaaataaaagttgaatgtttataatagcatcttctaaaaggctgttgtaa

SEQ ID NO: 327418 - DNA, 617 bp, Homo sapiens
ataagcctccatttttagaagytgtgtatctagaaatctagcccttcataaaaaataaactttaaaaggatcacttactttaacaaaagagcctccatgtcatttctctaacaattacatttttcttattgatttataatgccttaaacaaaaaaaacctcaaaataaatttccttctgaattacaattagtattaatattaatacaaaaattatttttaaatatctataggggagattttattagagagtacactgtattatctccacatctctacttcaccagaccaggacagcttagggaaaaaaattatgattccacaaacacagtaataaatgtttttctaatgatcctctcgacccactgatgcaaatccttggaagtctcctccatggttttactcatctgcaagagagatctcaggggtactaactaagaactcttctcaacctcagcacactcctcaggcaccattgtcaggaagctaccccatgatgactcatccccgggaccagcttctatgatggatctgtttccatcgcctagccttgtaagaatgtgagttatccaaaggggaaagaaaagattcaaataatattccatgtcatataattaat

SEQ ID NO: 327419 - DNA, 563 bp, Homo sapiens
taattcacaggcaatatcaacacaatttgaatttgcttcttatatagtgttaatgttgggtgctattgttttgtgttgaacaaagaaatagtctggaaagaaattgagttagataacttagacaatttggttattgtagtagtgtttaaaaggtttttattatatctaaatcctgaaaatataaaattattgatttgattgtgttcttagaccagtactgtttttcagattgctttctttatttaaacagataagcctccatttttagaagttgtgtatctagaaatctagcccttcataaaaaataaactttaaaaggatcacttactttaacaaaagagcctccatgtcatttctctaacaattacatttttcttattgatttataatgccttaaacaaaaaaaacctcaaaataaatttccttctgaattacaattagtattaatattaatacaaaaattatttttawatatctataggggagattttattagagagtacactgtattatctccacatctctacttcaccagaccaggacagcttagggaaaaaaattat

SEQ ID NO: 327420 - DNA, 614 bp, Homo sapiens
cttagtattatatattcctcaattggcttgaaataaatacacctgctaagtacagaacataagtagaatcactgaatcaaagaatttcagacttagaagggactgggaacaattcagagcagaggtcaacaagtcaaagagaaaaaaaggagatagaactaaggcaagagacactgcagcactaaacaacagaaacaatggaaaaatactttgagatatatagggtatgtgtcagtgtgtgtatagtgtgtgtggaagtgtgtgaaatgtgaaaatggctttctgaaaccaaaagccagaagctttatcgtgacatctgtggaaaccaaacaactcttccctactacctgatactattgggtagtatactatcaggtcttgtgcagtatttacatatcctattttctatattttccccctgtaaagtagaaacaggaaaaaatgccttcagtttatctccctctaaccatcgttcattaaactttccccactgttatttttaacactgctttatcaatgtgatgctccatctcacagtagcttcttaaaatttttgtggatgtgcaaataaaagttraatgtttataatagcatcttctaaaaggctgttgtaa

SEQ ID NO: 327421 - DNA, 621 bp, Homo sapiens
tgatgcaaatccttggaagtctcctccatggttttactcatctgcaagagagatctcaggggtactaactaagaactcttctcaacctcagcacactcctcaggcaccattgtcaggaagctaccccatgatgactcatccccgggaccagcttctatgatggatctgtttccatcgcctagccttgtaagaatgtgagttatccaawggggaaagaaaagattcaaataatattccatgtcatataattaatttaatgttctgtcccttgtattttaaaatataagcatttctcttaaagcccaagggttcagaaggcagattagatatgatataattcaagatacagattaattaagaaacataatttgcattttgccattgattctcaaggtgttttctacagacctcctacatcagagccaccagacactgtggatggtacttattacaatgcatgttccatggctccatcacagatttagcgtatcagcgagtttgcagtagggtccgaaacctgggttcttaagaatcctaccatgtgattcttttcggcgtgcagaagtagaaatgtctgcatgatgcaggcctctcttaactggatagtgacacaggatatgg

SEQ ID NO: 327422 - DNA, 621 bp, Homo sapiens
tgatgcaaatccttggaagtctcctccatggttttactcatctgcaagagagatctcaggggtactaactaagaactcttctcaacctcagcacactcctcaggcaccattgtcaggaagctaccccatgatgactcatccccgggaccagcttctatgatggatctgtttccatcgcctagccttgtaagaatgtgagttatccaaaggggaaagaaaagattcaaataatattccatgtcatataattaatttaatgttctgtcccttgtattttaaaatataagcatttctcttaaagcccaagggttcagaaggcagattagatatgatataattcargatacagattaattaagaaacataatttgcattttgccattgattctcaaggtgttttctacagacctcctacatcagagccaccagacactgtggatggtacttattacaatgcatgttccatggctccatcacagatttagcgtatcagcgagtttgcagtagggtccgaaacctgggttcttaagaatcctaccatgtgattcttttcggcgtgcagaagtagaaatgtctgcatgatgcaggcctctcttaactggatagtgacacaggatatgg

SEQ ID NO: 327423 - DNA, 522 bp, Homo sapiens
gctcctgattaggcttaaagagtccaacttccatctcaaacaaatgcctcagaatttaagcatacttagaaagttaatcctgtaaagagtcaatgaacggatttaaaatttcagcatttatgccttggacctgagttttctcaaatttctgcagtgcaggcagaatgggaatggtatccgtctaaatagataaacaaagcctgaattagttttaccctccctcgggataaccaatttaacaggagcaaacccattttcaaaacagaataaaatatttacttccctaagtaattacagggcttggttggactactaccactacataaaaatatgcaattaactatactcagtggaaacttcaagtwcttgtcaaaacatattttgacccttatttatttttatctgatgtccatcctagaactaattcaaaacccattcacccaatttaaatctgaagttaaaatgcaatctagttacttaatttaacatcattatacttagtaacaaggctgacactgctaa

SEQ ID NO: 327424 - DNA, 662 bp, Homo sapiens
ttccttcatataattttctcttttagttatgcaggaacactgcaaacaacaagccatacttagaaatttctcatattaagtcctaccacttaaattggtgagatcttcacttattggatttaatggtgccaattattcctaggcagggagagaggaagggagagaaatcttcttttaccaaaatctttggttaaatacacagagtatttatttcaaattttgagaaaatataatgtgatattgaaattcaaaattgatcttcatcccatgaaggttgagattcaaaattttgcttgactggtgtaacggttggaaaatgagctcatcatctaatattcttgggtgaaatcttggcttttgataatatatttccctccagttttgcacatattacaaaagaacttaccacgacatgcataagtgtctgaagtgaaactgtgaagtttcactagttctttacttttttctccatttatgtactgttgtgtgcccctggggtgctttcatcctccasatagcaccatttttccatctcaaagaaagacatctgacaggtagattcacacagaagctcttgtgacttaatatattcttctttccagaagaactaatatatttgaaagagggttagagggttaactccagtggctgaattgcaatta

SEQ ID NO: 327425 - DNA, 391 bp, Homo sapiens
taataatatgctacccaaataaataaagatatgtctgatcaaaagaatcttctggatacccttcttattctgtaacacaggcaggtggctattattctttcttctcacaaggctctgagaaggtgctgagacaatgtaagctcataagsgttggtagttttattcactttatttactgcttttactcaacacccagaacagttcctgacacagagtaagaactcaataaatataaattaaacataaaaatgtttgctgccaaaattcatacatgtcaacccatgggtggtagggactgcagatacttggttgtggaacacattatcttgggaactccaggtataagtggaaatgggctgcagaagtgtaatgagaaaaggtgatggagact

SEQ ID NO: 327426 - DNA, 537 bp, Homo sapiens
ttataaatctggaaaactgcttagaaatatcttttcttgtgtgattaaaaaacaaaacttgtccagtatatctcatccctgtaaagatgagaaaagtaattgtacttcccctgtacgtacaaatggacgtatttagctttaaaatattctaattaaagtacttgataaatagcaaaatatatgaacttcctacttgcaatgtggtattaaaagaggatttacttatttaataaaactgatccatttattattatcctaawctctctctattccattaagtgatttatgaagagtttttagaattttaattgattcctagtttgaatcaatattttttaatagtatatactaaatacaggcttcttgatgccatgtaaaaataaataaagaaacaaacaattaaggatccaaagcaacttcattgcaaattctccacattagctgatttgaacggaagcctgtaaaagttggaatgggaggcaacgttatttttttctctaaggctctttgtgccacaaaggcagtgctatgctatta

SEQ ID NO: 327427 - DNA, 564 bp, Homo sapiens
acactaaatttcccagcctctcctgcagttagatgtggccatgtgagtgggttttagcttcttgacattgggctgaagtgatttggacagcagccagttttagttcttcgaaacctcctgtaggatcctttaaactttctcttactccttgcccagataaaagaagagccatcagaacactccaagccctatgagaagacagaaggaggccggatactgaatgaagataaagaaggcccctgttgaacaagagtgtgttggaattttktgtgggtgaggagtatccgttatcacctttaattgtaaaagggagcagaaaggaccattcagaggagcagtggtgaagcaagacagagcaacgggcaccaggacaaagggtctagaaatgtggttggaaacattggtagactggggcataaaagaagtaggcaaatagattatgtagagtcagagtttgatgttaggagatgaggagaattggtcatcagatcagcaaatgaatgactataactgccgtgctgttgtaaccataaaagattgttaatgaatgaaagctaaagaacc

SEQ ID NO: 327428 - DNA, 537 bp, Homo sapiens
ttataaatctggaaaactgcttagaaatatcttttcttgtgtgattaaaaaacaaaacttgtccagtatatctcatccctgtaaagatgagaaaagtaattgtacttcccctgtacgtacaaatggacgtatttagctttaaaatattctaattaaagtacttgataaatagcaaaatatatgaacttcctacttgcaatgtggtattaaaagaggatttacttatttaataaaactgatccatttattattatcctaaactctctctattccattaagtgatttatgaagagtttttagaattttaattgattcctagtttgaatcaatattttttaatagtatatactaaatacaggyttcttgatgccatgtaaaaataaataaagaaacaaacaattaaggatccaaagcaacttcattgcaaattctccacattagctgatttgaacggaagcctgtaaaagttggaatgggaggcaacgttatttttttctctaaggctctttgtgccacaaaggcagtgctatgctatta

SEQ ID NO: 327429 - DNA, 516 bp, Homo sapiens
tcagctttgttataggcatttccttttttctgaaaaaaataggcattttaggattttattaagwtgagttttcagggacagagtaaaatagaagaggacatttttccaatgaactctgaggcaaatgtttactgaagaacagccattaattaatctggggacaataaaacccttttcctgtcctatctccagttaataatgcatgactaaaagttatgttctaactgtaaatcaggacaaacaacacataccacaaacttatttctctctcaagtccaatagtttgatatgtgtgatgttataaaattcccacttcgggctgcacatctaatgctatctttgaaaatgtgctaacaaacttgaaagtactggggctttttaatacatttttattacaatgagaattttgaaaaatgaaatctgacgcttcttactcagaacataatgtgaatgcagaataggaaataagagtatggaaacagaatttatgccacacggtaggactgtcttaattca

SEQ ID NO: 327430 - DNA, 596 bp, Homo sapiens
acggtaggactgtcttaattcattatctagaatagaatactttttctttcacttattacataatcatttttatgttgcttgcacatttttacatgagaatgtgtttttctcgagaagattttatatagtcaaactgactctggggaagaggggctgggatagcccattaataatgtgtgaggaactctgatgctgccttcmaaaatgtacagaccattagaaactgtattgaagcgaaactctaaaattttaaggaagatatttttgaactctgggaagaactggtgagtagaaaattaactcatcatttggatttataataagctggttcaaacaaattgggctcgtttaaaaatatcaccaatgctgaaaattatgagttataaattcatgaacttatcataaccagaaacttaaagacacactgaatactaacctcaagacagtccagctaagctactaagtgcctttgtaaattggataagttactgaatcccattgatacctatttctacacagtaaaaaggaaaagttaaattaggcttgtgtttttcaaaatttgatgcattagagttttataaactggagactttgtg

SEQ ID NO: 327431 - DNA, 608 bp, Homo sapiens
aaagtaacaatggaagcagggattcaatcagccagaagtaaacagagatgcaaattccagttgtgcttatttaaacaggcatttccaatcacaatggtaatggtatcatcatctatggcaatcagttgagactgagagaggaacagaaagttaactttagggcctgcagtgagatggagtcacgkttctcagatgacattagtggcaacagcagaaagactggcaattgcactggtgctctggtaagcagtgccagtttgttgatactggcagatttggtagaggttgtaagttacaggatgcctggtatgcctcaattataaatggtgcaggatgcctggtttgctccaattataagtggtgcagaccttattagcagtttcaagaatgaagatggtgtggtgggactgttgggaagcagcattcaagtattagtgttggtgtggatcatttggagactcctggagcattggtgaggggagttctggtgatatcatggagaaaacggttctgttggtggagtcagacatgctgttaggagaatgaaagagcatttgttgttgctataaaattgataaacctaaattgaaatctgcatggtcagagtc

SEQ ID NO: 327432 - DNA, 596 bp, Homo sapiens
actgtcaattttggaaaatgtatacagagatatgattgcagatctacagaatgatagagaaactttaacagaaaacggaaactttaagcctcagattgagataggtttatgagaggaaacatgcatcagtgaagaaaacacttctggctgcattaaggagttcacttaaggatgttgtgagagaaaagcatgaagcgtgaaagcctttgaattccatgcttaggggtttgaactttatctctgtagcaaagagtctctgatgatttttgagcagaggaatgacatggtatgttagctsttttagtttcactttcctattctagtatacaggattgattgtagaggtacaaccaaagcaagcacatatgttatgactataacaatattttgtatggtgaaaaggacgtggactaaaaatagctagagagggaaagaaagagcaatagtgcctgggaatcttctgatttccaagagtgcattgtccttatcctcaataagagtttccagattcagaaaacaaaaacataggcaacccagttgagtttgaattccagataaataacaaaaagctcctttatgtaagtgtgaacatccca

SEQ ID NO: 327433 - DNA, 596 bp, Homo sapiens
actgtcaattttggaaaatgtatacagagatatgattgcagatctacagaatgatagagaaactttaacagaaaacggaaactttaagcctcagattgagataggtttatgagaggaaacatgcatcagtgaagaaaacacttctggctgcattaaggagttcacttaaggatgttgtgagagaaaagcatgaagcgtgaaagcctttgaattccatgcttaggggtttgaactttatctctgtagcaaagagtctctgatgatttttgagcagaggaatgacatggtatgttagctcttttagtttcactttcctattctagtatacaggattgattgyagaggtacaaccaaagcaagcacatatgttatgactataacaatattttgtatggtgaaaaggacgtggactaaaaatagctagagagggaaagaaagagcaatagtgcctgggaatcttctgatttccaagagtgcattgtccttatcctcaataagagtttccagattcagaaaacaaaaacataggcaacccagttgagtttgaattccagataaataacaaaaagctcctttatgtaagtgtgaacatccca

SEQ ID NO: 327434 - DNA, 596 bp, Homo sapiens
actgtcaattttggaaaatgtatacagagatatgattgcagatctacagaatgatagagaaactttaacagaaaacggaaactttaagcctcagattgagataggtttatgagaggaaacatgcatcagtgaagaaaacacttctggctgcattaaggagttcacttaaggatgttgtgagagaaaagcatgaagcgtgaaagcctttgaattccatgcttaggggtttgaactttatctctgtagcaaagagtctctgatgatttttgagcagaggaatgacatggtatgttagctcttttagtttcactttcctattctagtatacaggattgattgtagaggtacaaccaaagcaagcacatatgttaygactataacaatattttgtatggtgaaaaggacgtggactaaaaatagctagagagggaaagaaagagcaatagtgcctgggaatcttctgatttccaagagtgcattgtccttatcctcaataagagtttccagattcagaaaacaaaaacataggcaacccagttgagtttgaattccagataaataacaaaaagctcctttatgtaagtgtgaacatccca

SEQ ID NO: 327435 - DNA, 596 bp, Homo sapiens
actgtcaattttggaaaatgtatacagagatatgattgcagatctacagaatgatagagaaactttaacagaaaacggaaactttaagcctcagattgagataggtttatgagaggaaacatgcatcagtgaagaaaacacttctggctgcattaaggagttcacttaaggatgttgtgagagaaaagcatgaagcgtgaaagcctttgaattccatgcttaggggtttgaactttatctctgtagcaaagagtctctgatgatttttgagcagaggaatgacatggtatgttagctcttttagtttcactttcctattctagtatacaggattgattgtagaggtacaaccaaagcaagcacatatgttatgactataacaatattttgtatggtgaaaaggacgtggactaaaaatagctagagagggaaagaaagagcaatagtgcctgggaatcttctgatttccaagagtgcatygtccttatcctcaataagagtttccagattcagaaaacaaaaacataggcaacccagttgagtttgaattccagataaataacaaaaagctcctttatgtaagtgtgaacatccca

SEQ ID NO: 327436 - DNA, 270 bp, Homo sapiens
agtgtctcacctacaatgaccaaaagtttgattacagtgatttaagcaaataaaaacttatgttccttagacagatgaaactctgaatgttagtggtatcgtgatggtgcaggaactttaaaacattagcatctcaggctcctactgtctttctgctccaccattcctagcctgtgattttatcctcattgttycttcatactttcaggtttccacataaatttcaggctggaagaagaaggaaagtataagaaggaaaggtagcacctg

SEQ ID NO: 327437 - DNA, 635 bp, Homo sapiens
tgcttttttttgccagcctgggactagggtttccactcatcccagtcccatgctccagaccccagttctgagactgagtacctgcactgcgaaggccagaaccactactgcagttttaagttgagtaagttctgggtatctaatgtacagcatggtgactgtaattttatatacktcaaatttgctaaaagagtaaatcttagcattcttaccacaaaaaggtaattatgtgaagtgatggatatattaattagcttgattgtggtaatcatttcacaatgtatgtgtgtagcaaaacatcatgttttacaactttcacatattaagtttttatttgttaattataccttaatcaagctaggaggaaacaaaatatgttctctgtggtaggagaagagcacaaagccccagagaacagaatcaaacatacttggttaaattgtagagatcaagaatacacagtggaaaaaaaaaatgaagtgagatattggaaaaggaaaaactagatcccaaaaggtcagaatcagtggctataatatcagaccaatgaaaggggcagtagagcagaccaacaaccccgtcctgtatattgtagccatgagtttccctaactcattaaataaatcttgtatgta

SEQ ID NO: 327438 - DNA, 571 bp, Homo sapiens
cagtgtttgcccttttgtctttggtcaaatacttttacagttcaacccccacatttagtctgtgggattctgttgacataaatgaacaaaacgttgcaattattaaggtttgagaattatctttccccagaccacacattatactagtcccctttaggtatgctaggaccttttgttacagatttggaagccaagaggattactgtgtgccttgaggagtatttacatccttttataaattacttactgtcttagtttgttttgtgatggtataaaaaaaaaacagaggctagacactttataaagaaaaaagggttatttggctcacagttttcaggctgtayaagaagcaggttgccacatctgcttggcctctagtgaaggtttttgtgttgcatccaacatagtggagaaggtgaaagtggaaataggcatatgtgaagagggactgaacacaagggtgtcctggccttatgacacccatattctcaggaattaattcacttcctgaaaactaatccattcttatgagagccaggactcacttactaccaccaaaatggcaccaagc

SEQ ID NO: 327439 - DNA, 581 bp, Homo sapiens
ttattattgttattgttatattattatattagctctttgtctctctatawcaaggaatttctaactttcctttctcaattccgtttctttttacctgcctataatttgccaaaattctgcatcttggtgttttgaaagcctaattatttcaagagtatccaaaagtttgagaagttaatttgttgttatcagtatgttttattatagctatgtaagattttcaccagaattaatcatttctgattcatatatattctttttatttcaaggttacttccaattcacatgatttacaatcagattcccccattaagactgatgatacatgcttgtcattcatgcttataaatgtaaagtctctaacttatctggaatggggcttcaaaacccagttctcttctcctccacactatagtaatttactcctatgaatttctcctcctcatattaacttctgtattgtttactttttgtaatttgagcatgtacataaattctcatcttctattccttacagccagaataacacaaatgcgtatttcaatacatagtttcattcttcagagttatccacacaaaac

SEQ ID NO: 327440 - DNA, 564 bp, Homo sapiens
aaacttgaaacctgtgtgtgtctgtgtgtgtgtttaatagccatggctccaaataagacctctttatagctaagtttttaatcattgagagaaaaagagagaaagagtcatctaaggaaattgattttatgaagcatattattaaaatttaccattccacaaagggataatgcaaaaaactaaagaggatactgagggttaaatcaccttcccccacccttaaacttggattggaactattctggaatttaatgacagctttcacgagaagaaataataaatttcatcgtaccaaaataaaggttcctacctcagacatttgacatttgagagataaatcttgacattcaagasatgataaatcttgattcctttgcaaatgaggaaatgtgactacaatctcccagctttttctcaaaccctattttcaagcaaaagtatgtttccaacatatatattcctacttaactaccttttcaacctgtacaaagtttgtttctttatctattttttcatgaagtgtaaactgtttgggaccttaagtcactcatttcaggggtgaca

SEQ ID NO: 327441 - DNA, 623 bp, Homo sapiens
taaacaatagtgttttgcataaacttttatgatcaccagaaaattgctgaaatctcaaatattaaatccacaaatgttaaaggactatttgaaataatgattcagtttctctaatgtatgttctttgtgctgtcattatgtggcatatcaaattgttgggacaatgtttaggaactaagaactaaactgctttccaattaaagtggtaaatattttccaaaagtagaaattttccttttccctaacattttcaaaaaataggaaaaattggaaaatattagggaaaaggaaaatttttactttattttctcctggttcccaaaactaccataaagcatttcttaggattgtacagtacacaatttgaaaaactttaggaatcaaacctgcaaactcatcttccccaatttccaaattagatcagtcattcattttagatttttaggaaagaaaattgagacatggagatactcagaagttatctattttggcactcagattttgtgattcttattcaatagagaagaatcctctgtcctcgagtcaaatataatatttaatctayatgttgtttcatgcagattggctatgactgtgatgtctgtttgacatgataaatacca

SEQ ID NO: 327442 - DNA, 525 bp, Homo sapiens
atttttaggaaagaaaattgagacatggagatactcagaagttatctattttggcactcagattttgtgattcttattcaatagagaagaatcctctgtcctcgagtcaaatataatatttaatctacatgttgtttcatgcagattggctatgactgtgatgtctgtttgacatgataaataccagtctaaactgctttttctgttattattaacgtttctgtcagacaccttgacgattgctgtacaaaagtatttattgagatcctagcttacacaaatacagttsggacctggaaaatgatttcacagttaaatatagcattgtgaagggaagaataaaagcattcaaacaaaataaaagctttcttccaccccacctccatctctgcgtgcatcaattctgtgaaatttggctaaggtagtcttggtattcttgcataatagctctaagcaaagttctcctacactttcttccaaaagttggcctattaaatgaagcattatataatacaagagtaatgg

SEQ ID NO: 327443 - DNA, 563 bp, Homo sapiens
atccaataagtaaactatggtctctaaagtgggagatgtaaagcataggttcagtgtgtgtgagaacacatgctgtgaacaataagaatcccaattaaaatggaaaatattacccaagctagtgccttttggagtactaattcttgttttaatcaaatgcatccatcttatatagcttagtagaaaagagtattatgtgttatgtatgtgtatgtgtttttttagcatttcatggagtcttaatggcctctaaaacaggcattttgttgttatctcttgcataaattttcagaacatttgaagagaaaggaggggctttctttacaaaccctgactgttctgtctgaattttacttgagacacaccgagcataaggcttgctgggatgtttctttgccttctagggcatgtgcaaaataaacacagtgacgtgtgttttttctcatggatgtrtcaagaaacatatacagagcacatacctatagtttgtgctgggaatagggtggtaaacaagtcagagacaccccttcctaaaagagtttaccaccgtatgagggagagag

SEQ ID NO: 327444 - DNA, 561 bp, Homo sapiens
tttaaatactggaaaggaacaagttgcctgtgaatattagaaagtaaagttgaatttaattgcaataggtagcaggacccgcagtaggacagcaagtgaaattaatttgagtaaatgactcaaagggtgttgggaaaaatcatcttaattgttyttatgcacaggttatcactgggataaatatcaaaattagattttaaagtgattgaattattttatgagctttaaaagccctttcaggtaaccagctcaggcaataatttttaaatcaaacttcatgatctaggaagtaaactgatcatacagaggtcagaatgacatttatgggcttgagagatttctatctgtctccaaaactggctgagtgggcaccatcagaggtagaaagatttatcaagcaacatgcaaaagagttcttatatcaccaatgaatcattaggggcaaatagaagattctgtttgaaaagagttcaagtatcttaacttaatagttttcaggaaaatcagatgtacattaatggatagagtataattgagcaccccaaaattgtaaaataaata

SEQ ID NO: 327445 - DNA, 581 bp, Homo sapiens
atgcacaggttatcactgggataaatatcaaaattagattttaaagtgattgaattattttatgagctttaaaagccctttcaggtaaccagctcaggcaataatttttaaatcaaacttcatgatctaggaagtaaactgatcatacagaggtcagaatgacatttatgggcttgagagatttctatctgtctccaaaactggctgagtgggcaccatcagaggtagaaagatttatcaagcaacatgcaaaagagttcttatatcaccaatgaatcattaggggcaaatagaagattctgtttgaaaagagttcaagtatcttaacttaatagttttcaggaaaatcagaygtacattaatggatagagtataattgagcaccccaaaattgtaaaataaataaataaattggttctgatctactcttctactccaatttactcttttactacccacacatttattcaaacacatgtattgggcacctgctctgagttatacattgtattaggcactgagatctgttatgggttgaattgagttttaccaaaatttacattgatatcctaaacccagta

SEQ ID NO: 327446 - DNA, 581 bp, Homo sapiens
atgcacaggttatcactgggataaatatcaaaattagattttaaagtgattgaattattttatgagctttaaaagccctttcaggtaaccagctcaggcaataatttttaaatcaaacttcatgatctaggaagtaaactgatcatacagaggtcagaatgacatttatgggcttgagagatttctatctgtctccaaaactggctgagtgggcaccatcagaggtagaaagatttatcaagcaacatgcaaaagagttcttatatcaccaatgaatcattaggggcaaatagaagattctgtttgaaaagagttcaagtatcttaacttaatagttttcaggaaaatcagatgtacattaatggayagagtataattgagcaccccaaaattgtaaaataaataaataaattggttctgatctactcttctactccaatttactcttttactacccacacatttattcaaacacatgtattgggcacctgctctgagttatacattgtattaggcactgagatctgttatgggttgaattgagttttaccaaaatttacattgatatcctaaacccagta

SEQ ID NO: 327447 - DNA, 561 bp, Homo sapiens
ccttcactaaagctgatcttgtcacagatattgctgagtatccaacatgctaaaagcagaagtagaagtaaacactaagcctctaatatgaacatttcctgggaagccagatattcaccaggtgaaagttgattactttaggctccttttatcaaaaatgttgtacacataggaatagattcatattccaaacacagatttgcctttgtgtctgcaaactctcttattgttgctactcagggaccaacaaaattccttactcatcatctctgtatcctgaaaacacacacacacacacacacacacacacacacacacacacgcaaaaatgaaaaggaagaaagaaatcaaattttccraaacatttctgaaaaatgtttccttcacatattacaatgaaggaaatgtaccaatggcttccctcaaggtgttctctggtcttatattcctcagagagcagctgctttgccaaagtggtaaactggctgccaaaggctaaataatgatattaggtaggtggtgatactgtttgtgatgctgttatacatgatgtagaatatg

SEQ ID NO: 327448 - DNA, 481 bp, Homo sapiens
attatgtaatgtccctcttttttctaatagtcttcttctcctgaggttcactttgtcttatgctaacatagtcacttggactttcttctgcttactattttcaaattgtatcttatttgactttttcattgtaaagtgtgatttatatttaaaatgaaactctttttctattgtataatttattgttcacaacatgatgtttagatagacrtatacttagtgaaataatttttagaggtaggcaaaaaatgtatttttcatcttaaatagttacctttgagtgtgtggtaggagcacctaaaatctactctctcagcacattttcaatgtacaatactatattattaactatagtcttgatgctgtacattcgacctctagacttattcaccctactttactgcaagtttataccatttagccaacatatccccatttccaccacatcccagttcctggcaactatgcttttacctggctt

SEQ ID NO: 327449 - DNA, 481 bp, Homo sapiens
attatgtaatgtccctcttttttctaatagtcttcttctcctgaggttcactttgtcttatgctaacatagtcacttggactttcttctgcttactattttcaaattgtatcttatttgactttttcattgtaaagtgtgatttatatttaaaatgaaactctttttctattgtataatttattgttcacaacatgatgtttagatagacgtatacttagtgaaataatttttagaggtaggcaaaaaatgtatttttcatcttaaatagttacctttgagtgtgtggtaggagcacctaaaatctactctctcagcacattttcaatgtacaatamtatattattaactatagtcttgatgctgtacattcgacctctagacttattcaccctactttactgcaagtttataccatttagccaacatatccccatttccaccacatcccagttcctggcaactatgcttttacctggctt

SEQ ID NO: 327450 - DNA, 631 bp, Homo sapiens
ttaggtcagtctacatcccaagtgctcccaagactgatacttccaaatggaaagaaagatacatattaagcatatccacttctgtgcaaaatatagggaaacaacttttaccaattacatttcctatacatactaaaggaaacaaacttagaaatatttgtaatatgtaaaattattaaaacactattttatcaaaagtttttctaaagagatattttgattctcatctttctgtgtttaataaccatgccaaattttgctatttatagtctttgtggtgttctttattgttagatttttttttattgtttggggaaaacattatatatttctatgcctcatctttaactgacttttttttgcttccaagcaatkgtaacttttaatattaatatttaaaactaagttgcttgccagttttcagatttccagcaatgttgatataatttgttccttttgcacaaaaatatagtagtaggtgatttttaaagcacatgttgtaatatcataattataaaccactgaatcagcctctttatttggaaatgtaaaagttccagtactgggtaatagatttgagcttaaaagcaagtcagtagtgtgtgaatcattactttttaaccaccaaaaa

SEQ ID NO: 327451 - DNA, 631 bp, Homo sapiens
ttaggtcagtctacatcccaagtgctcccaagactgatacttccaaatggaaagaaagatacatattaagcatatccacttctgtgcaaaatatagggaaacaacttttaccaattacatttcctatacatactaaaggaaacaaacttagaaatatttgtaatatgtaaaattattaaaacactattttatcaaaagtttttctaaagagatattttgattctcatctttctgtgtttaataaccatgccaaattttgctatttatagtctttgtggtgttctttattgttagatttttttttattgtttggggaaaacattatatatttctatgcctcatctttaactgacttttttttgcttccaagcaatggtaacttttaatattaatatttaaaactaagttgcttgccagttttcagatttccagcaatgttgatataatttgttccttttgcacaaaaatatagtagtaggtgatttttaaagcacatgttgtaatatcataattataaacyactgaatcagcctctttatttggaaatgtaaaagttccagtactgggtaatagatttgagcttaaaagcaagtcagtagtgtgtgaatcattactttttaaccaccaaaaa

SEQ ID NO: 327452 - DNA, 577 bp, Homo sapiens
atatttacttgcttttcagagatgtcactgagcttcaaataatcctataacatctgattaagatgcaagagatgtcatttaatctcatagggatataatgtcatgtattgttacaaaayttttatgaagtatttcataggatgctagttagtccaattaaagatggatatttttatggtaattattttctaattttcctcgaacttatttttaagaaaaatggaaaatacatctcatttatattttagtcagtttggtttactttaacacacaaataaaatcaaacttaaatcttgaggaaattataatcttttgcaaagtggagattttttttattagttatccattatgtaacaaattaccccaaacttagaggtttaacacaacaaacatttgttagttgctgtacactaagaatcttagtatagctcagctggctacatcaagctcaagttcttctagaaggctggaatccaagtgttggttggggttgtagtctcatctgaaggactgactgagggaggacctatttatattattcatgtggttgttgtcaggatttgatttctcatgagac

SEQ ID NO: 327453 - DNA, 577 bp, Homo sapiens
atatttacttgcttttcagagatgtcactgagcttcaaataatcctataacatctgattaagatgcaagagatgtcatttaatctcatagggatataatgtcatgtattgttacaaaatttttatgaagtatttcataggatgctagttagtccaattaaagatggatrtttttatggtaattattttctaattttcctcgaacttatttttaagaaaaatggaaaatacatctcatttatattttagtcagtttggtttactttaacacacaaataaaatcaaacttaaatcttgaggaaattataatcttttgcaaagtggagattttttttattagttatccattatgtaacaaattaccccaaacttagaggtttaacacaacaaacatttgttagttgctgtacactaagaatcttagtatagctcagctggctacatcaagctcaagttcttctagaaggctggaatccaagtgttggttggggttgtagtctcatctgaaggactgactgagggaggacctatttatattattcatgtggttgttgtcaggatttgatttctcatgagac

SEQ ID NO: 327454 - DNA, 577 bp, Homo sapiens
atatttacttgcttttcagagatgtcactgagcttcaaataatcctataacatctgattaagatgcaagagatgtcatttaatctcatagggatataatgtcatgtattgttacaaaatttttatgaagtatttcataggatgctagttagtccaattaaagatggatatttttatggtaattattttctaattttcctcgaacttatttttaagaaaaatggaaaatacatctcatttatattttagtcagtttggtttactttaacacacaaataaaatcaaacttaaatcttgaggaaattataatcttttgcaaagtrgagattttttttattagttatccattatgtaacaaattaccccaaacttagaggtttaacacaacaaacatttgttagttgctgtacactaagaatcttagtatagctcagctggctacatcaagctcaagttcttctagaaggctggaatccaagtgttggttggggttgtagtctcatctgaaggactgactgagggaggacctatttatattattcatgtggttgttgtcaggatttgatttctcatgagac

SEQ ID NO: 327455 - DNA, 339 bp, Homo sapiens
aacttacagttatggtggtaggcaaaggagaagcaagcaccatcttcttaaggcagcaggagacagagagagcacacaggcgaamccgccaattttaaaaccatcagatcttgatgagaactctctcactatcgcagagaatagcatgggggaaaccactcccatgatccaatcactttccaccaggttcctcccttgacacgtggggaattacaatttgagatgagatctgggtggggatacagagccaaaccatatctgtccgcaaagaagtgattagagagtgagatactgattacttggaactgagatttcagaaattgtacagttaccagtgat

SEQ ID NO: 327456 - DNA, 574 bp, Homo sapiens
tagcaggagagttggttagaaaaagacataggaaagcaaaaccttcaaacaacttttatgtggaggaatgagagagataaaagaaaaattgtggaggggaggaaataagagaaaagtgacatttgaaagacaatttgatgaaatcaattaagccgtgttttgcaccactttttcccactctgtatgagttaatggtatggaccgagctgtgctccttcaaaatacatatgttgaagctctaacccacaatgtgatggtatttggacatggtgcgtttgggaaacaactgaattttaatgagatcatgatggtatatccctcaggatggaattagtgcccttataggaagagtcactggagaatattttgtttctcaccccacccatgcgacaacacaggcagaaggaggtcatctgccaaccaggaaaagrgccttctctagaaaccaaccatactagcactctgatcacagacttacagcctccagaactgcgagaaaataaatttctgttgtttaaaccacttagtctatggtattttgttatggcagtaccagttaagacagttcctagta

SEQ ID NO: 327457 - DNA, 573 bp, Homo sapiens
tctccaactttattcctccattactttctttttatatctacttgcagatagtgggataaggataaccattccattctgagacctatagtcatcttaggaaattcattgtactaggcagttggggaaaggcggtatgagacagagatgtggggagatctctattagcattttatgtgttgtacctggtcaaagaaaaccacatctgtggccagacacggtggctcgcgcctgtaatcccagcacyttgaaagaccgagggaggcagatcacttgaggttaggagttcaagaccagcctggccaacatggtgaaaccccgtctctactaaaaatacaaaaattagccaggtgcagttgccagcctctgtaatcccagctacttgggaggctgaggcatgagaatcgcttgaacccaggaggcagaggtgagccgagattgcaccactgcaatccagcctggtcaacagagcaagaattcatctaaaaaaaaaagccacatctgattatgtggtgtatttagataatttgattgctggggctgagagtttcccttgtcagaccagcagagcttcat

SEQ ID NO: 327458 - DNA, 562 bp, Homo sapiens
tgaacaccttaattaaaatcatttttatgtcatgaggaaataagcagtgatttttttcccattaacttagttttaaaatatctagatttcctatgtttttaataggtcaaatagtttcataccaatgaaatttaacactcaataggaaaaaaaattaaaaatgattcaaaagataaatgagagaaaaataaataagcatggagcaaaaaaaaaatccaataaaatatataacaaaatgtataataagcaaagtaataataaaaatgtgcagtccaacagaactgtgtttaacattgaattaaaaggtacacattaamaaatgggttaaaaaacaaaattcaaatgcattgtactggcataagagatatctttacagtaaggatatataaagataatataatagtcatgaatccatatgtgacggaagtgagtgtaaaactgtatgaaccaaaaaataccaaaaaaagaagatatgcataaatatatataagtttaaaaatcacatgaaggaatatgaccttaataagaggttaccatctgtctctggtaaagtacatctgat

SEQ ID NO: 327459 - DNA, 507 bp, Homo sapiens
ttataatactcacaccatatcaacatagctataacagaaaaatctagcctttttgatgtctttctccttactccagaatatgaaatgtttttatttctaaaatgatccrtcaattcacctctgctcttactagtagcctctcacatctcttatgcttttattctatcagtaataagctttttttcttgcatctccaatttttttctttcttgcaattttatctatagtgtatcagatttgctctgttctttagaaaatatttaactctgtcacctactttctgttctttcaagagaagggtatactcaatgtctctattacttactccccaccctgccttgccttggagcactttgtaattttgaaccataggtacataagaggatagatagacatagatagatagataggtagatagatagacaatctatctctctatatatgcatatgtctcagagactgtctagctcaactatgttagtattttagttttactcattgtaaata

SEQ ID NO: 327460 - DNA, 563 bp, Homo sapiens
catcttggaaaagagagaagtgaacttccttgaaatcygatgtaggaatgaagaaatgagccagactggataccttctttttcagtctttttgccgcctcaccttttatccacatttcaaatggatgattaaatcttaacctaatccatctctttcttattgtttattcccatcttcattctttcggtgtcttttttgcgatatagctcttgtatttctgatcccaaacactaactttgttttttaactgcttcatagaagaaaaatcttcatgcttttgtcacaaaagaatttgttagagttacaaataatctttattactggtttataaagagaatacaaaatcttaaggctttttgactaacaagcggtgaaattgcagactaaatttaaataaggaacatatactgggttaattagcatagtactggtgtgtacatagcaaattaggtaagtaaatttatttcctattacaaacgtttttaataaagttttctattaaaatgtagtaaataaatgtaattttccattgaaaacttgttttaaaaagcacctatgtagaa

SEQ ID NO: 327461 - DNA, 568 bp, Homo sapiens
aatcttaacctaatccatctctttcttattgtttattcccatcttcattctttcggtgtcttttttgcgatatagctcttgtatttctgatcccaaacactaactttgttttttaactgcttcatagaagaaaaatcttcatgcttttgtcacaaaagaatttgttagagttacaaataatctttattactggtttataaagagaatacaaaatcttaaggctttttgactaacaagcggtgaaattgcagactaaatttaaataaggaacatatactgggttaattagcatagtactggtgtgtacatagcaaattaggtaagtaaatttatttcctattacaaacgtttttaataaagttttctattaaaatgtagtaaataaatgtaattttccattgaaaacttgttttaaaaagcacctatgtagaaaaagaaaacaaattgatagaaaatttaagacaaaacataggttaatarggtagactatcacaagtaagcttttttttagcaaacaaaataaccacaaattcaattttattatgacaagacagagtatgtgctagaa

SEQ ID NO: 327462 - DNA, 576 bp, Homo sapiens
gaaacatcatattttgggagactataggtagatagcttagatagatagatagatagatagatagatagatagatagatagatgagatggcagatataaacaccacacatatgtatattttattttcacactttgataccatcttgaaaacctaataccattatttctcattctgcccactctttctcaactctatttctaaagtcatgttgcatatttcttttccaatatcctaaacaatgaactctttgaatttcttgaaaattgtatactttctcaacattgttgaacatataagcaaattcttacttgtcagcattattatgaaaccttacacaatttcaattttcaagtttcctatttcattaccatttccaaaagatagttmccaatttttgtcctgatctgatctgttagtctacttttaaacatgagttctgacttatcagaaatgtgtgaatattgttctttaccaatggcatatatcctcattttttgctgattgagataaaattgagagtcatattgatatggtttggctatgatcccatgcaaatctcatcttgaattgtaactc

SEQ ID NO: 327463 - DNA, 498 bp, Homo sapiens
ccagatgtgtgcgtaagtgtccgacattttgaaggaaaggagtcaaagcccctgatttccttcttactgaagcgagttagagccagtcaaggcggcygggtgttgaccccgccccggcagttgggtgtcttttcttgggtggggtccggcagctgcatcttggcgccacagagcccccatgtacgccctcctcggtgcacagcttggccctgaaccgcctcttcccctgcgctgctctgtgggggtgccacagagcccccatgtacgccctcctcggtgcacagcttggcccagcctccttacgccccggggctgttgatttcttccctcccgtgttttcatggtgtcttattctcaatgtgagaggcgcctcccatttaagggtgtctggaagcgtgtggggatgtgcgtctgtcccgggtgggagcaataacaccttctaatggtcaggggcctgccctgtggggtggactcagacccacaccccaggactgcccg

SEQ ID NO: 327464 - DNA, 498 bp, Homo sapiens
ccagatgtgtgcgtaagtgtccgacattttgaaggaaaggagtcaaagcccctgatttccttcttactgaagcgagttagagccagtcaaggcggccgggtgttgaccccgccccggcagttgggtgtcttttcttgggtggggtccggcagctgcatcttggygccacagagcccccatgtacgccctcctcggtgcacagcttggccctgaaccgcctcttcccctgcgctgctctgtgggggtgccacagagcccccatgtacgccctcctcggtgcacagcttggcccagcctccttacgccccggggctgttgatttcttccctcccgtgttttcatggtgtcttattctcaatgtgagaggcgcctcccatttaagggtgtctggaagcgtgtggggatgtgcgtctgtcccgggtgggagcaataacaccttctaatggtcaggggcctgccctgtggggtggactcagacccacaccccaggactgcccg

SEQ ID NO: 327465 - DNA, 597 bp, Homo sapiens
gcctgctggcctgtggggaattattctgtttcctctgttgtcatcctatcattgacctgactgagataccagagatcgctaaactcacagggctgcggttatggcggcacttctctcatttggggctagtgtctgatttagcagtaacattrtatctctccacatcagatcaaaggattgtcctaacccttgtaaaacatcaatatagccatgagtgttatctgagaatttacctaggtctattttaattagcttcaagtctgagagggaaaaaggtacacacactctgggccgaagtctccccctcccatcacttggagggggcataatcagggaatattggcattcttgggttcattgtttacccctttgtctatctctttttggatcatttgggttgaaggggggtccttattagttggggaaggagccaggggaatgttggggcagggaggtagactctgagggcttcctgtagggcataaattacacttttttacataattgagttgtctcttaatgaaaagaaagttggtacatatggcacttcactacatttgccctcctttctagaaaagaggtctagctgtaagatgg

SEQ ID NO: 327466 - DNA, 597 bp, Homo sapiens
gcctgctggcctgtggggaattattctgtttcctctgttgtcatcctatcattgacctgactgagataccagagatcgctaaactcacagggctgcggttatggcggcacttctctcatttggggctagtgtctgatttagcagtaacattgtatctctccacatcagatcaaaggattgtcctaacccttgtaaaacatcaatatagccatgagtgttatctgagaatttacctaggtctattttaattagcttcaagtctgagagggaaaaaggtacacacactctgggccgaagtctccccctcccatcacttggagggggcataatcagggaatattggcattcttgggttcattgtttacccctttgtctatctctttttggatcatttgggttgaaggggggtccttattagttggggaaggagccaggggaatgttggggcagggaggtagactctgagggcttcctgtagggcataaattacacttttttacataattgagttgtmtcttaatgaaaagaaagttggtacatatggcacttcactacatttgccctcctttctagaaaagaggtctagctgtaagatgg

SEQ ID NO: 327467 - DNA, 566 bp, Homo sapiens
caagatactcagcatttgacataaaactcttccattgggactattgccaatagcggtgaggaggagggaaagtggtgtgaaggcatatttgccagaacgggctgtatgaaaatataacctgacttttcttgcacagttggatttctgagcacagaagtgttgcaagttatcctactggaatggaatgtaaactacagtctaaggtgttactttgtgaaaggcactttgaaaacaaacmccctctcatatctcttataaaccacagctgttaaaatccagaggtacccagttaggtagtacagatttctttccaacacaactaataaatgagagactgctctgaaaacctcggcatgcatcacttaagcctgggagctgcacagtgacactcagctggtgcctggcaccagcagagattatcattgaagcattgaaggttacgccaggaatcacaacattgccacctgcattctggctgggaatcacaagcctgccaggaaaagtcgatgcaagccctccatgtccttcctcagtgccaggggctggaggacactgttagggatcag

SEQ ID NO: 327468 - DNA, 578 bp, Homo sapiens
atcccattgccatccacatggccagcaggactcctagcagccgtttttgtagtgtgatccctcccccaaactatgtttgattagatcaagagtgcacatgtgtcccaagctgagctaaaacaccccttctcagaagaaactggaaatgcagtttatctrtatctatatctatatctatatctatatctatatctatatctatatctatatctaaatctatctcacttcaatgtggctctctcctgaatgcaggaaacaaaaccccaggactatggccatgttttcccatacagagaatgagaagcaacggaaatctgtgtgagagagaggaaagagcaagaccagcaggggccaacacagagcgatcagccgtggatttccactccctgcttccagcttgagcatggcttgcatttctgcacttggatttccagagacactcccttacctttaaaacaaacttccccctttttgcttaagccagctcagatcagtttctgttttttgcaactagtggactcccgcctcataaagagatccatcccaggatttgcgatgttccttttcttcttatagat

SEQ ID NO: 327469 - DNA, 453 bp, Homo sapiens
tggcttcagctttaaaaagtcttatgtgagattccttttatggaacaaagttccatcaaagccaatttaaaacctatgtaaaaaaaamcaccaaattattctggctgcactgtatacaaattattaggccaagtataataacgcaaaactgtcctgccatgatctgtctttagtaaaaatgggaaaccagagagagaaaaattgtgtttcaaaactatagtacacctattgttagattctagtcttgcctaatgttttttccatttttattattttctacattttgaaccaaattctaatttttcttggctacgagtcttcaaaataatgttttcaatttttttccttttttcccatttttcctaatttgaagtcaaacattaagccctgggaactgaagtcagacaacctgaactttaaaagaaaataacagcaacttatttacatagataa

SEQ ID NO: 327470 - DNA, 453 bp, Homo sapiens
tggcttcagctttaaaaagtcttatgtgagattccttttatggaacaaagttccatcaaagccaatttaaaacctatgtaaaaaaaaacaccaaattattctkgctgcactgtatacaaattattaggccaagtataataacgcaaaactgtcctgccatgatctgtctttagtaaaaatgggaaaccagagagagaaaaattgtgtttcaaaactatagtacacctattgttagattctagtcttgcctaatgttttttccatttttattattttctacattttgaaccaaattctaatttttcttggctacgagtcttcaaaataatgttttcaatttttttccttttttcccatttttcctaatttgaagtcaaacattaagccctgggaactgaagtcagacaacctgaactttaaaagaaaataacagcaacttatttacatagataa

SEQ ID NO: 327471 - DNA, 494 bp, Homo sapiens
taggattgcccttttgtttgttattgtttttctctcttcctccccctattttctcttcataggacmtgagacttaacaacctgctaaaaatgagctttgggggcctacacgtctaggaaaaaaccctcctagtcatgagagatcagatgaaacctgaaaagagactcattttcttgtaaaatgctttctccaagattttaaaaaagaaaaggggagaaacgtgaaagtaaaatatcttgggccctttcaagctgggaactgctcagggcaaatctgcctcccattctattcaaagtcatccctctgctcactaggatagatgcaaactctgattgcttcctttggaaagacttatcagaaactcagaagaatgcaaccatttgtctctcacctacctgtgacctggaagcctctgggggcggggggcgagggggtgggggacttgttttgagttatctctgcctttctggatggaattaatgtccttcttacat

SEQ ID NO: 327472 - DNA, 494 bp, Homo sapiens
taggattgcccttttgtttgttattgtttttctctcttcctccccctattttctcttcataggacctgagacttaacaacctgctaaaaatgagctttggggrcctacacgtctaggaaaaaaccctcctagtcatgagagatcagatgaaacctgaaaagagactcattttcttgtaaaatgctttctccaagattttaaaaaagaaaaggggagaaacgtgaaagtaaaatatcttgggccctttcaagctgggaactgctcagggcaaatctgcctcccattctattcaaagtcatccctctgctcactaggatagatgcaaactctgattgcttcctttggaaagacttatcagaaactcagaagaatgcaaccatttgtctctcacctacctgtgacctggaagcctctgggggcggggggcgagggggtgggggacttgttttgagttatctctgcctttctggatggaattaatgtccttcttacat

SEQ ID NO: 327473 - DNA, 585 bp, Homo sapiens
cactgtgcccagccctgaaagctttctaaatgattctcggtagacccagaattttcattttagagagtcaaaggtatggagtttcccaaacatttgttatcagttatttttttaaatagtaagatctagttatgtgaattagtcgataagcatttgctgagtgcctactatgggcctgactcttactaggtcttrgggatttgaagatgaataaagtgtagttgctgtctttgtggagtgtatactcaagtgccagagaaagacatataagcaatgattacgaagcaaatgtttcaagaataccaaatgccttgtaaagtgtgggaatcagggaaggcttcataagaagaaataatttgagcagtgttttataggcaatgagggatgaaggtaggctgaggaggggaagaatgggaagaggagtgaaaggcgttctacatttgggctgagggaacaacattgtaattcacataattaaaaatgcacagtatatctggagaccaccaaattcctggcactggttgttataagaggtaggttcaatcaattgagatcctgggtggagggcatggaagttttgagagc

SEQ ID NO: 327474 - DNA, 585 bp, Homo sapiens
cactgtgcccagccctgaaagctttctaaatgattctcggtagacccagaattttcattttagagagtcaaaggtatggagtttcccaaacatttgttatcagttatttttttaaatagtaagatctagttatgtgaattagtcgataagcatttgctgagtgcctactatgggcctgactcttactaggtcttagggatttgaagatgaataaagtgtagttgctgtctttgtggagtgtatactcaagtgccagagaaagacatataagcaatgattacgaagcaaatgtttcaagaataccaaatgccttgtaaagtgtgggaatcagggaaggcttcataagaagaaataatttgagcagtgttttrtaggcaatgagggatgaaggtaggctgaggaggggaagaatgggaagaggagtgaaaggcgttctacatttgggctgagggaacaacattgtaattcacataattaaaaatgcacagtatatctggagaccaccaaattcctggcactggttgttataagaggtaggttcaatcaattgagatcctgggtggagggcatggaagttttgagagc

SEQ ID NO: 327475 - DNA, 574 bp, Homo sapiens
tgatctcagaaaatctgaatgaggtccacaagacgccctttcataatctgtgttaaatttgcaggatcatgttgaaaatttggaatagcatttaacttgtcataagactgttcacaatacctttttggcccagtcagtttcattgtgagagatttcttttctggtcataaaatgagttaattttttttctgacagaaatcacatactacrgttattgaatttcattcacttgcaatgactttaagaattggtatagattaatttctgatctcaggtgatccaccagccttggcctcccaaagtgctgggattacaggtgtgagccactgcgcctggctgagatcatgccattgcactccagcctgggtgacagagcaagactacatctcaattaaaaaaaaaagtatagattaaaatactctgtatttctgggcaagacacagctctatagatgttagtaaaacataagactgttggaaaaacagacagtgaagctactatagtcattactggaagtatttggatttttcattgggttataaacatctagggtaaccccaccaattacaagaga

SEQ ID NO: 327476 - DNA, 549 bp, Homo sapiens
tctttgctggcagggcaccctccaatactttcaccctgataaagtcctattctttacttttatactcactcttattcttggttccgttcttatgccaccctctacctctccccagctatctccaccacactatcaatctcactctctcctaccgtttctaatccttctttaacaaacaatttctsggtttacatttctctttcctccaaaatcatggaggccttgacttactcactgctaaaaaaaggggactctgcatattttaaataagaagggttgtttttacctaaatcaatatggcctggtatatgacaacacaaaaaactcaaggatagagcctaaaaacttgccaaccaagcaagtaattatgctgaacccccttgggcactctctaattggatgtcctgggtcctccccattcttagtcctttaatagctgtttttctccttctgttattcggaccttgtgtcttccatttcttaattcatccaaaaccatatccaggccatcaccaatcattctgtatgacaaatgctccttctaacaac

SEQ ID NO: 327477 - DNA, 594 bp, Homo sapiens
gcctaaaaacttgccaaccaagcaagtaattatgctgaacccccttgggcactctctaattggatgtcctgggtcctccccattcttagtcctttaatagctgtttttctccttctgttattcggaccttgtgtcttccatttcttaattcatccaaaaccatatccaggccatcaccaatcattctgtatgacaaatgctccttctaacaaccccataatatcacccattaccacaaaatcttccttcaacttaatctgtcctactctaggttcccatgccgcccctaatcctgctcaaagcagcyctgagaaacatcgcccattatctctccataccacctccccaaaattttcactgccccaacacttcaacactattttatgttatttgtcatattaatataagaagacaggtatgtcaggcctctgagcccaagctaagccatcatatcccttgtaaactgcatgaatgcatccagatggcctgaagcaagtgaagaatcacaaaagaagtaaaaatggctggttcctgccttaactgatgacattccaccattgtgatttgttcctgccccaccttaactgagcaatt

SEQ ID NO: 327478 - DNA, 625 bp, Homo sapiens
ctcattctttcatttcttctccctacttcctctcagggacaaatcctcaaaactcctctcattttccaagtgctsaggggctcaccttttaccagtgatctcttggaaagacagccccttgattgtgatggtgggaaatccacgctgttgaggaggattatgagtaatgagctttcttgctctccccatatcattccatagatattctcaagtgtggggatacctataatattagttatccatgtaacagattacttttgttactgctactgctctgctatgtattactactgctattgttaactcctcctcctgttactactactacttactgaacacttgctggacaaagcacttaaagtctatcatttcatctaatccttacaaaaatgccattaagtaggtattatctccgtgttactgtaaagaaaatgaggcttaaggactttaagtaacttaaagtcactcagctagaaaatggtggtcaatcctaaagccatatatttaatcatcataatagaatgttgttgttacaaagcaacatattttggcttttgaatatagtgataaataatgccacatccacatattttggcttttcaatatagtgataaataatcccaca

SEQ ID NO: 327479 - DNA, 625 bp, Homo sapiens
ctcattctttcatttcttctccctacttcctctcagggacaaatcctcaaaactcctctcattttccaagtgctgaggggctcaccttttaccagtgatctcttggaaagacagccccttgattgtgatggtgggaaatccacgctgttgaggaggattatgagtaatgagctttcttgctctccccatatcattccatagatattctcaagtgtggggatacctataatattagttatccatgtaacagattacttttgttactgctactgctctgctatgtattactactgctattgttaactcctcctcctgttactactactacttactgaacacttgctggacaaagcacttaaagtctatcatttcatctaatccttacaaaaatgccattaagtaggtattatctccgtgttactgtaaagaaaatgaggcttaaggactttaagtaacttaaagtcactcagctagaaaatggtggtcaatcctaaagccatatatttaatcatcataatagaatgttgytgttacaaagcaacatattttggcttttgaatatagtgataaataatgccacatccacatattttggcttttcaatatagtgataaataatcccaca

SEQ ID NO: 327480 - DNA, 542 bp, Homo sapiens
gaggctgacagtaggacctgaaggatgaggagaaaggttgctatcatcccaaggattttttttttttttaatgcagagggagagaaatatctcacaacttcacttccccaacacattggttacctttagggtgctcccttcacagagccytccagcacaagttgaccccagggagggaaatggacagaaaatggagaagaaagggatacctggttgaagccagagacagatttcttcactttcatctgagaagtagagagtaaagactcctcctgggagggctcattccaggtgcagcctctgggtttagcagcaccaatctgagggtcaatcccaggaacaactccctaaatgctccctgcagctttcctccatgaagagctaattgaattaactgttcccagcagtaagtgcattggcaaaggttccgactccatgtctaagaaagattcttggctgggcacagtggctcatgactgaaatcccagcactttgggaggctgaggcaggtggtcaattgaaattctcttcctttggttgac

SEQ ID NO: 327481 - DNA, 603 bp, Homo sapiens
tatttctggtagtgttgtgtattggtgcagccccactgagaaactatttggaaatatgtcttgttagtgaaaaaaacattcatacctactgacccagtgatactgcttctgggaaaccattctgccaaaataattgagaatatggggggaaaaaaggccctcaataccaagatgttaattccagcattgtctacaaatatggaacactggaaacaacccagtgggccctaggagaatgayagagagaaacttcctctcaaagcctccaactagcagaagaaaactgccagtcatgagagccgcctagtaattgtcctttggtgaaaaatcgcctccctccaagtcttgcattttctaatatttcccccttattcttaaaaaaatatatatatatgcttgtaaatttggaaaatacaatttagaaaaaaatatttttttcatatgattgttggctgcatgtatgtcttcttttgaaaagtgtctgttcatgtcctttgcccactttttaatggtttttttattgttgttgttgtaaatttaagttccttatagatgctggatattagacctttgccagatgcacagtttgcaaaaatgttctcc

SEQ ID NO: 327482 - DNA, 592 bp, Homo sapiens
ctcagtgtggggtaggtctcaagagttaaaaactccagagggatccaatcataggggggcctgcccactgtcttcagttttacttccaggagttttaccaggttttcacagtgagcatcagagaaaaatcccctcgtgcttgaggcagggggaggggaatgcagccattttaaaatacaccagagcacctgttccttcctaacaaggcctgccctcaggagaaactaatttaccagggcccaatcagctggggtactatcagcacccaactaagctagaggaagggaaatacccaactccagcccccttcaaccatcctgtcctacytaagcggagagaaaataattgagaagcattggtaaacttcacagtccaggtgcacaaactcacctaaagactgagacatagtcacagggctatggaatgcttcccctcccccggaccttatcaccacattactaaaggcctatttatgcagttcccttcacccaggacagcatgtctacctttcaccaaaaaattacaaagcacaccaaaagtaaaaaaataaaataaaaaatagtttgaagagactgaacaagtatgagaacct

SEQ ID NO: 327483 - DNA, 597 bp, Homo sapiens
ttgatgtggggaggatgtcaaggtggcagaaaagtcaccaaagccacattctgagaccaattcaggggaacgtctgtgagctgaggatagctgtgagatgctttgctcctgaaggcgttttccaggtcagctgtggggtggtgggcatgatgatgtctagtccagctccagaacttaattgctggacacacatagaagaatcactcagcctctgtgatcttgcaatttrcatctacaaactgggaattatcatccctgccctccttaactgacatatatttaaaaccaagctaagaaggctgaacaggtgggggtgctaataataagatacgaatggttctctttccagaatatcagtgctgatggggccttatcaaaccttggtcttttcccaagttactggaggcagacctgggattccaacaaggttttctttcatgtggctaaagcttatcttactgcagttacaaatgtattctgagcaaagctgtgatcacagccattttgtttttcattgttttaattcccagctcgaatctttcagagcacaccagcctcagtgccctgcacatagtagggccttgagaaaactttttg

SEQ ID NO: 327484 - DNA, 562 bp, Homo sapiens
aaccctcatgcttcctaaaagccaggcttttagggccagggccaggctcaagagtagcctgatctttggtgtctctggaaatcaggttgtcagagagataggatcctttgtggaataagagccaggggtcaggaacactcaggtatctggcaaaagaatgagtcagttatcagtcagtgaacagtcactgaacacctacttagcacaggtgatgaggaagacatgattcctgaccccagtggggacagagacaatgaaaccagcagttacagtatcatgtgctgtttatggtaataggggtgcataaaaatgctgtgggagtctgaaagaaagagtagttctgtcttctctggactgatgggacttcaggagtwtgtgacagaggtcatgtcatggacgtagatcacagatagggcaaggagctgggcatgaacagcacagagtccttgaatgtgccaccatagctgcttttccttgaagcctatgggtgctggagctgtgcagaaatgaagcttcatctttcaacattgtgatagcagcagcacagtttgtggatttgttc

SEQ ID NO: 327485 - DNA, 524 bp, Homo sapiens
tagcacttgttacatgttcatttcttttctgtgttttttgcatgtacatatttaatttctgacaataactccgtggcggggtgttcttaccccattttacagatcgatcgggagactgaggtatgaaattctcacataattttcccaaaaccatatggatacttagtattacaggcaggatttgaacccargcaatcagaacacagagcttttgctcctaagcactgtgtgctaccaaatgaggcaatattggtgacaatgcctagcacaggggcagacccttgatatttgacatattttagggacccttcactctttttctttgttgtcccatttcagattcacctgcttttatcttgagggcctgagtcaggagttaacttcaatccctgaaaacctgggtccaatgactgcaagagaaaacatggtctaaaaatccttatgccaactctgctagagtccaatcccagctgtctacttcggtctaggaagcatgacaggccataacttttcctacaagaaaa

SEQ ID NO: 327486 - DNA, 609 bp, Homo sapiens
ggagctgatggataggttttgtaccttgattgtggtgatatcacaggtgtatacatatgtccaaactcattaaaatatatacattaaatatgtacaattatatatatcatttgtatcttaataaagcaaatatatgtaatatataataacgtaaatatatatatgtgtgtatgatatgagccaaaaaaagacataagaaagaaaacctcagactctaagtagactcaatgaaaacacgatttccttagcactcaccacaccccatccagaggaaactgtggttagaatgtgagtgtgtaggccaggcgcggtggctcacacctgtaatcccagcattttggggggccaaggtgggcggatcacgtgaagtcagaagttcgagaccagcctggcaaacacggtgaaaccccgtctstactaaaaatacaaaaaattagcctggcgtggtggtgcatggctgtagtcccagctactcggaaggctgagacacgagaatcgctcgaacccaggaggtggaggttgaacccgggaggcagaggttgcagtgagccgaaattgcgctactgctctccagcctgggcgacagagtgagactctgtctcaaaaaca

SEQ ID NO: 327487 - DNA, 592 bp, Homo sapiens
aaaaacctggcaaaaatatggctttaatatattgtaaaagaataaaaacctcataaaaagttatcaccagacatgaggagttcgtaatgtcgcccattgtggattctggggcggaactttctgggagatgagagtcattaagtaaaagtgagcctsgagctggcggtgagatgcagggtggaggtgggacagagccacattgaagggggccagcctagaggcaatgggccagcaggcacctcctgggccatccctcccctgatgggagaaagcctaggcacaagacacggtgcttcccacccctccctccactgtcccacagagctccgaggtgataccaggggctgaagaggacagatcttcccccggcttttaccagccagccgtgagactccgatgacgtccttagtctctccgtttcttattttctgttaaccagggacaacacccactggttagttcctcccaaagtgattgcaagaacaagctagaacagtcaaggcaagggaaagagcttttttaaatttaaatctgagatttttgagccattcttgccatatccttttcttcctccccaaatccaagccaggac

SEQ ID NO: 327488 - DNA, 579 bp, Homo sapiens
  misc_feature (1)...(579): n = A,T,C or G
ggggctgctgtttggttaaattggcagtagcccactctcatccaccgtgatctatctggcttttggatgctagcattcccrttgcgatcagggagtccaatattgtaacagcatcgcctactgccagctctagctgaaagaagacagacaccactgagcacatgagtgatgctggtgttcctctcaccaacacattccttatcactttgggaaataaaatgtcctcttagtcttcatagaacatagtcagaaagtgggttttttgcctgtatccactctgtcccacccatttttctgagctctttgagcccttcttccatcatttgccaggnaagtgctggtacatccatttagtttgggccattactggttctaaacttacaagattcaacctggcagtttagtagcatcttcttccaggatccttgccagggtgttcaattccatatcatggggaaattttaatacattttcatattaatataaccccctttatccaactgtgttccatccccttgactcattgccctcagaatccagcctaatgcacacactcccatctcttcttggtacatatca

SEQ ID NO: 327489 - DNA, 570 bp, Homo sapiens
cccgtgtgacgtgcctgactccctatttgcctcccaccatgagtaaaagctccctgaggcctccccagaagctgagcagatgccagtgccatgcctgcagaaccgtgagccaattaaatgccttttcttcataaattactcagtctcaggtatttctctgtagcaacgcaagaacagcctaacacaaaaacaagctctctcctgtctcttcttacaagggtactgattccattacgagggttccacccttatgacctaatcactttccaaaggccccacctcctaacaccatcacaccgggggttctgagttcagcttatgaatttggggaaacaaaatcatgcagtccataactcccaattttccttcargatccatttttcctgtaatttttcaggaagcatgtcaatgacagttcaattaagtactttacatgccagttctagtgctaggaacactaaatacatttaagcttcaaattagacatgattatcctcattttacagaaaaagaaaggaagaccagagggattgcagtatttccctcaatcactcagttttggggcaacaa

SEQ ID NO: 327490 - DNA, 546 bp, Homo sapiens
ttgttaaaggccaaccatctaaccccaagtcagtggttctctctgaacatttaatccctaaaaacaacaacatcacattcaactcacaaaaggcccaactgcattatggtaaccagggttgaaattcacctcagcagacttccaaaactcacatggctgggatctaagtaggcaaatgcctgtattatatgtctctgtgatggtaaatggggctaagtcaccagagtccaggagcctcacacttctgccaggagccatggagcgacatggctgctctcctctcacccttcccttcaggggccccaacaggcttcccaggcctcagsggatagacgtgaactttccagcccctgggctgaggtgtctcaagggacttcttgaattacagacccagacaccaagaagcctccccttctccatttgggtgtgctgtggcaaaaagagaacaattccctcctttccacctccaagcttgtttttagctctctctctctcctagcacctaactcatcagcatacagagtagttttgatagaacccctataa

SEQ ID NO: 327491 - DNA, 546 bp, Homo sapiens
ttgttaaaggccaaccatctaaccccaagtcagtggttctctctgaacatttaatccctaaaaacaacaacatcacattcaactcacaaaaggcccaactgcattatggtaaccagggttgaaattcacctcagcagacttccaaaactcacatggctgggatctaagtaggcaaatgcctgtattatatgtctctgtgatggtaaatggggctaagtcaccagagtccaggagcctcacacttctgccaggagccatggagcgacatggctgctctcctctcacccttcccttcaggggccccaacaggcttcccaggcctcagcggatagaygtgaactttccagcccctgggctgaggtgtctcaagggacttcttgaattacagacccagacaccaagaagcctccccttctccatttgggtgtgctgtggcaaaaagagaacaattccctcctttccacctccaagcttgtttttagctctctctctctcctagcacctaactcatcagcatacagagtagttttgatagaacccctataa

SEQ ID NO: 327492 - DNA, 498 bp, Homo sapiens
tggcttttcacacgtccaccagcaatgaatgtgagttccagttgttccatatcctcaccaacccttgttgttggcagtcttttaaatttaaaccgtactagtgggtgtakagtaatatattattgtagtcttagtttgcattaatctaatgaccgtgaatgttgaacaccatttcacatgcttttgatcatttatacaacttcttttgttaagtgttcaaatcttttgcttgttaaaataatttttttgtcctattgagttgaaataatgttaaaaatattttcttgatgtaagtcctttgtcagatctatgcagtccatgaattattttctcctagcctgtggcttgccttttctctttcctaatagtacctttcaaagagtatatggtcttagttttgatgaagtaaaatgtattttattttttgcatagttaatgctttttgtgttctaaagaatctttgcttagatgttaaagattctcaagttctaaagactt

SEQ ID NO: 327493 - DNA, 502 bp, Homo sapiens
aagaactggactgtgaggctctgactataaacactgcatgaaggaagaaaaaagagggactggtataagctgttggggaaaaattgccaatatatcagacttcttttccactgaagagagatgacggatttgcaactctgggggaactcagggaattaacattctaaacatgcttgcacacactgttgttttgtcttaggatgatgctttacgtgtacctagttcaaatagtatctagccagacctatacccttaaccttggccatccccgactctgtcaaggtacacagaaaccacaaaggaggcatgctgtggcccagtgctgttggcaaagcacaagcttatgaagactttggtcctccatactgcccttgmcttcattgaacttttaggaggctgaatctaacaagccctgaagcctctcctcaggcctcctctttgatctctcatatctgcttctgagtgacagcttctggagattgtgtcacctttgtccagaaca

SEQ ID NO: 327494 - DNA, 513 bp, Homo sapiens
tggggttgtgtttctcaaaagagtacatttttctatccttcaaagaaattaacaccatatggattgaaactgcaggrccaattaaaaagactaaaacaaaccaaagaggtttttgttgttgttgtgtgtgtgcatgtgtgttttgttgttgtttgtttgttttttttggaaacaaggtcttgctctgtcacccaggctagaatgcactggcatgatcacagttcactgcaaccttgaatgcttgggctcaagagattctcttgcctcaacctcccgagtagctaggactacaggtggggctaggtgtgtgccaccatgcctggctagtttttaaaatattttatagagatggggtctcgctatgttacctcggctggtctcaaactcgtagtctcaagccatcctaccaccttggcctctcaaaagtgttgacattacaggcatgagccacgatgcccagccaaacagaatttcaaatagaccctgactccttgctttaatataatgcctgtg

SEQ ID NO: 327495 - DNA, 585 bp, Homo sapiens
ccatcatctggcagaggaggcaggtatgacagctgacacggctcagcacggtgattgcttagatggaacatacacagaaaaggtagtctggatttcaaaaaatcgtgctgtaaaaactcaagaaaggtttctgactctttgatcyagtgattacaggttgagaaatttacctaagaaaatgagaataaatgttttttgcaatattaacaacaaaaatttggaatgaacctgagttgctaaaattaggggctgggagaggtgggtcatgcctgtaaccccagcactttgggagatggaggcaggtggatcacatgaggtcaggagtttgagaccagcctgaccaacatggtgaaatcccatctctactaaaaatacaaaaaaaattagctgggcatggtggtgcacgcctgtaatcccagctacttgggaggctgaggcaggagaattgcttgaacctgggaggaggaggttgcagtgagccaagatcatgccattgcactccagcctgggcaacaagagggaaactccatctcaaaacaacaacaacaacaacaacaacaacaacaacaacaacaacaacaacaa

SEQ ID NO: 327496 - DNA, 610 bp, Homo sapiens
agaagcacataaggatagtatcatattcactggtaaaacactggtgaatactttctcctaagaacaaagcaagtttctcattgctcttatttaacatcatcctggaggtcctggctgatgtgatacagcaagaaaaataagagatatatagagtagaaaggaagaaataaaactctattctcagatgacatgattgtctaaatagaaaatcccaaggaatctgcaaaaaagcttccagaactaataagtaaatttagcaagggtacaggatataatgttaatatataaaaatcagttgaatttctatatcctagaaacaaaaataaaatttaaaaattgcaatcatttatatatttatataaacaaagtggaacattttaattgaactttyttaaaaccaatggatcaagtagcaaagcattagttaggctacagaagttcaaacaatataattaaggagcttgagctactagataaacgtaagttttactccctcacccacagaatacccattgttttcaagttcatgtagaacaattttttgaaatgctgcatacttgacaataaagggagtctaaaattttttcaaggaatcaacatcattcagttg

SEQ ID NO: 327497 - DNA, 497 bp, Homo sapiens
agaacatgcttttttggatattaagaacacgatgatgggagaggtactttaggaatggcagagtaaagacctctgaaaatctgcttgtccatgaaagcaatggggtggctaatactggttaaccaaaggcttgtgacaatccaagaaatgtttactcaagaaaaatggatgagtcccatgtacgctctgtaagaaacaaagagctctcgctctcgctctcgctctcgctctcgctctccctctccctctccctctccccacggtctccctctccctctctttccatggtctccctctgatgccgagccgaagctggactgtactgctgccatctcggctcactgcaacctccctgcctgattctcctgcctcagcctgccgagtgcctgygattgcaggcgcgcgccgccacgcctgactggttttcgtatttttttggtggagacggggtttcgctgggttggccgggctggtctccagctcctaaccgcaagtga

SEQ ID NO: 327498 - DNA, 554 bp, Homo sapiens
aactaaagaaactgcaaagcacagtggctcatgtctgtaatcctagcactttgagaggctgagatgggaggattgcttgagcccaggaacttgatactagcctgagcaacatagcgagaccccatctctacaacaataaatttaaaaaaaaaaagaaaaaaaaaaagaaaaactagctggtgtggtggtgtgcacatgtagtcccaatgacttgggaggctgaggtgggagaatcgcttgagcctgggaagactgtggtggcagtgagctatgattgtgccacagcaccccagcctgtgtgacrgggcaagaccctgtctcaaaaaaaaaaaaaaaaaaaaaagaagaagaaatcaagacattctcagataaaaacagagagaattttctatttgtagacctgccctataataaaaacacacacacacacacacacacacacgcgcacacacacacacacagacacacacacactgagggaattaaaatggcatactaaatacatttaacacaaaagaaggcagtaatggaggaacaaaggaacaaagttggca

SEQ ID NO: 327499 - DNA, 554 bp, Homo sapiens
aactaaagaaactgcaaagcacagtggctcatgtctgtaatcctagcactttgagaggctgagatgggaggattgcttgagcccaggaacttgatactagcctgagcaacatagcgagaccccatctctacaacaataaatttaaaaaaaaaaagaaaaaaaaaaagaaaaactagctggtgtggtggtgtgcacatgtagtcccaatgacttgggaggctgaggtgggagaatcgcttgagcctgggaagactgtggtggcagtgagctatgattgtgccacagcaccccagcctgtgtgacggggcaagaccctgtctcaaaaaaaaaaaaaaaaaaaaaagaagaagaaatcaagacattctcagataaaaacagagagaattttctatttgtagacctgccctataataaaaacacacacacacacacacacacacacrcgcacacacacacacacagacacacacacactgagggaattaaaatggcatactaaatacatttaacacaaaagaaggcagtaatggaggaacaaaggaacaaagttggca

SEQ ID NO: 327500 - DNA, 546 bp, Homo sapiens
aaaattctaggacaagatggtttcactaataaaatctatgaaatgtttaaagaattaataccaatatttgtcttcttcattatatctactctttttttgtttttgagatggggtctcactctgttgcccaggctggactgcagtggcacaatcatagttcactgtagcatcgactcctgaactcaagggatcctcctgcctcagtctcttgartaaagaaagtctcaacaaatttagctgggactaaactgggactacaggcatgcaccactacactcaactaattaaaaaaaaattattattattattattatttttgtaaagacagggtcttgctctattgcccaggcttgtctccaactcctgacttaatgcctcctgacttgacctcccaaagtgctaggattacaggtatgagctaccatgcctggcctgttatgtctactctcagtgtgaagtgctatcttgtagatttaatttacatttccttaatgagtaataatgtggagtatcttttcttgtgcatattggctatgtgtctgtctt

SEQ ID NO: 327501 - DNA, 555 bp, Homo sapiens
acagaagtagctcatctttctaagcacgctgttttctcctcagggtcttccccttgggtgccctcaatttttgccagccgggactgctgcctagatatgcctgggtccacttctagctcctcagctctcttgctcgtgttacagggtccatttgaaggactccagcctcagtgcatctttctctggccacctcacaaaaacaatggagcatgtctcctcactaagggccacttcctaatttaggaagagtctattatcctattatagacttctcacattcatctcaaattctgtagcatgattttaattatctcacaaagagattcctgttgcccctygtctaagatgtttatactactactggtcctggtgtctatctttcacccatccatcgatttatcattcactaaacatttaccatgtgccagtcactgtttgagaacctgaatatatagaggtgaacgagagataatatctctgctctcattgagcttcagtttcattgtccctctacccatccatccattttaactatactctgccccattccacatg

SEQ ID NO: 327502 - DNA, 555 bp, Homo sapiens
acagaagtagctcatctttctaagcacgctgttttctcctcagggtcttccccttgggtgccctcaatttttgccagccgggactgctgcctagatatgcctgggtccacttctagctcctcagctctcttgctcgtgttacagggtccatttgaaggactccagcctcagtgcatctttctctggccacctcacaaaaacaatggagcatgtctcctcactaagggccacttcctaatttaggaagagtctattatcctattatagacttctcacattcatctcaaattctgtagcatgattttaattatctcacaaagagattcctgttgcccctcgtctaagatgtttatactactactggtcctggtgtctatctttcacccatccatcratttatcattcactaaacatttaccatgtgccagtcactgtttgagaacctgaatatatagaggtgaacgagagataatatctctgctctcattgagcttcagtttcattgtccctctacccatccatccattttaactatactctgccccattccacatg

SEQ ID NO: 327503 - DNA, 563 bp, Homo sapiens
cataatcatggctccctgcagcttcaactttctaggattgctagagcaatcctccttcctcagcctcccatgcatatgggaccacaggtgtatggcaccacactcggataattttttaattttttgtagagatgaggtctcactatgctgcccagctagtcttgaactcctgggctcaagcgatcctccctccttgtcctccccaaatgctaagattacaggtgtgagccaccacacctggtcccaaatgaaatctctttaatgattagactccaaattagaagcacagtttacagtgaaaattccatttaaatggtatayttagtatgaactacgctgactgaactcacaggcttgaaatggattatagattgtccctctttatgccctggctagataggtagtctgacacttccacccctgtgagtgtttaccttgccacagccaacaggcctgctccctttcccccacaggcttgttagattgctgctcagtgtgtatacagcaatgaacacaattgaagcatgacctttgtcttgtcacaagactttgataattagcca

SEQ ID NO: 327504 - DNA, 565 bp, Homo sapiens
aaaaccaacaggccgtacttctctgtattatcatccaaaatcacaaagagtgtatctaagatgtcctgcagaaactraaacaacataaaaagcagagggctcaggtctcaggaccttacacgcacaaacttccataaatcaatgaatttaacttccaataaaaaagtgaaagatctcttaggatctcaaaataccacttaaaaatcatcgtactagtaccctgaccctccacccagctaagtgataactaggtgcacttgaggtgttggcttatagcccaaagggccccaagaaagacttagagaggctcttcctgttgggtgagtgatacatttctaaggaaagggcaatgccctaaaaaccataggacacctatgcagaatagcaattttgatataaaaacaatctaagtgatactgatgccaaatttattttgagaaaaagagcttactggtatccccaaaagttcagtagtctcttgctctctactgtggcctaacaatatagagtatatttgataagggtgtggcaagttaggctttacctacagacactattttttggt

SEQ ID NO: 327505 - DNA, 565 bp, Homo sapiens
aaaaccaacaggccgtacttctctgtattatcatccaaaatcacaaagagtgtatctaagatgtcctgcagaaactaaaacaacataaaaagcagagggctcaggtctcaggaccttacacgcacaaacttccataaaycaatgaatttaacttccaataaaaaagtgaaagatctcttaggatctcaaaataccacttaaaaatcatcgtactagtaccctgaccctccacccagctaagtgataactaggtgcacttgaggtgttggcttatagcccaaagggccccaagaaagacttagagaggctcttcctgttgggtgagtgatacatttctaaggaaagggcaatgccctaaaaaccataggacacctatgcagaatagcaattttgatataaaaacaatctaagtgatactgatgccaaatttattttgagaaaaagagcttactggtatccccaaaagttcagtagtctcttgctctctactgtggcctaacaatatagagtatatttgataagggtgtggcaagttaggctttacctacagacactattttttggt

SEQ ID NO: 327506 - DNA, 610 bp, Homo sapiens
tactcgtggacataaaaatggtaacagtagacactggggactactagagtggggagggacagggacaagggttgaaaaactgctgggtactatgcttactacctcagtgatcagatcatttgtatctcaaacctcagcatcatgtaatgcatctacgtaacaaacctgcacatgtacccactaaatctaaaataaaagctgaaattataaaataaaaaaagaaaacatggcatataaacacaatggaatgctattcagccttaaaatgggagagatcytgtcatttgagacaacatggatacaactggaggacattaagctaagtgaaataagtcaggcacagaaagaccacacgatcacacttatatgcggaatacaaaaaactgaacacatagaagtagaacgtgcaatgaggaataccagaggctgagggaaggttgtggtcattctgcaatcattctactttgtgaacatatattctgcactgttaaaacatcatattgtatcccatacagataaataattattatttgtcagttaaaaataaaataaaaaataaaagcataccaaaagaggaaaaggaagctaacaacaacaacaacaacaacaa

SEQ ID NO: 327507 - DNA, 610 bp, Homo sapiens
tactcgtggacataaaaatggtaacagtagacactggggactactagagtggggagggacagggacaagggttgaaaaactgctgggtactatgcttactacctcagtgatcagatcatttgtatctcaaacctcagcatcatgtaatgcatctacgtaacaaacctgcacatgtacccactaaatctaaaataaaagctgaaattataaaataaaaaaagaaaacatggcatataaacacaatggaatgctattcagccttaaaatgggagagatcttgtcatttgagacaacatggatacaactggaggacattaagctaagtgaaataagtcaggcacagaaagaccacacgatcacacttatatgcggaatacaaaaaactgaacacatagaagtagaacgtgcaaygaggaataccagaggctgagggaaggttgtggtcattctgcaatcattctactttgtgaacatatattctgcactgttaaaacatcatattgtatcccatacagataaataattattatttgtcagttaaaaataaaataaaaaataaaagcataccaaaagaggaaaaggaagctaacaacaacaacaacaacaacaa

SEQ ID NO: 327508 - DNA, 546 bp, Homo sapiens
ttcttacttggttatattgtttgttcacaatgtgagaggcatgtagggggtgtcattgtgggttttagggtggctcttcacaaggcattccaaaacaayagcacacttcactgctgagctgtatcagttccttagcaggtagccacaaggaggaaagagagggcacggtggatcttcttggtgatacaaacatggtaataacttttaggatctctttttcttacaggtttattaacttaaacaaaaatggacagggcagctgcttcagccacagttaagtgctccattgtctctacacagtattaggagcacctttaaaccttgaacaaattccacaggctccacctctcaccttctattccactcctctgccccgctctccttccccagttgaatctgtcagaggtggccagcatcacctggtcctgaccaagatggtgctgatccaaaacttcaagaggaatggggaagagggaagtcaggtactcagagatgactggaagtgggtttatgttccatgtcctcatccaggttttcatggagact

SEQ ID NO: 327509 - DNA, 493 bp, Homo sapiens
ccaggctattttctgggtttttttttttatagtggccaccctaatgggtgtaaagtgatatttctttatgttttttatttgtgtttccctaattatcttcctttgagaaatgtstattcaagtccttcacccattttttaaaaagaggttatttgttttattgttgagttataggagttctttatatattctggatattaaccccttatcagttatatgatttataaatatttttcccagtcacttggttgccttttcactctgttgattgtgtcctttgagacacagaagtttttaaagttttgatgtagtccaccttattttttgttgttgcctgtgcttttggtgtcattttcaagaaatcattgcctaatatgaagctttcacctatcttttcttttaagtgttttataattctagcccttagatttaggtctttgatccactttgagttaatttttgtatattgtataagataagtgtctgacttcat

SEQ ID NO: 327510 - DNA, 554 bp, Homo sapiens
catctgcagaacatccacataatctggaatgggcgtcactgcatagatctgcaagtctgggcaggaagtgaaggagaaacacagacttgccagagctgggcctgagaggctgacccctgtcatctcctcaaaggggagaagtgcaccatagtccctgctccttactgacagcccagtaggggaggcagtggcatctctaggrgcagatcagacccaagctcagttaggtaaatctctatctgctctctccctctccctgctctagtagttgagtttcatgagcactcagccaaggtgagatgtcaacagccaagtgttctctggtgcccctttaagaaacaaagggaaagaggggaatgcaggcatccaccccatgggagtgaaagaaggctgcaagggtctgggcttcccctctataggtaaagcatatttactgaagaacaacttttaaataaaatactgtttgaaatttttgtggaaaaaaagcagataagagtccacttgccctcccttctctgaaacaagcttgccatagtcatggcaactgtcatgtg

SEQ ID NO: 327511 - DNA, 584 bp, Homo sapiens
cgaggtcagggtatcgagaccatcctggctaacacggtgaaaccccgtctctactaaaagtacaaaaattagccaggcatggtgtcgggtgcctgtagtcccagctactcgggagcctgaggcaggagaattgcttgaacccgggaggtagaggttgcagtgagccgagatggagccactgcactccagcctgcrtgacatagtgagactctgtctcaaaaaaaaataataaaaaaaataaaactaactgataactggagaaaagaaagaataatcggtgagagtaaataaatgaataaatgggttatgcaatgaaaacccaatattacattggtaccttgtgtattaattgtagtttcttatttctatattcttggtgctctggcatttggccctcactgactgtagagggtaaagctcactcctagaaatagcaaacatggcccagaagcacgcctttcatatgcaaaccagacgacccacagcccagagccctcaactctttcttttatcacgcgcagacatccaatcaatattcctctgccccaagtcatctgagagacaggaaccagacaactctggac

SEQ ID NO: 327512 - DNA, 531 bp, Homo sapiens
ctcccttggggcaaagggcaaggcagctgctgctgtcaaggggcagaaaaatcccaggccgatccagacttaagatgtggtttgtatactctccttgctgtgggagattggattatggtctatcaaagattcactctattctctttaacctccatgacagaagcatacttctctccccattgatgttggccaatgagcattaacagacttcacccaagcaggggcttgaaatgctcatgaaatgcctgtcccttgtgcttctgccattgccccaaggagagcacatgctaagcagcacggcacgggaacagctacatgaagctgacttgaaacccacctgcagcctggagccaagccmagccctgacttaatcagcttaactccaagcaacctgctgatgtgcgagcaagaaatcaatggttgttggcataagccattgagtttgggggtggtttgttatgcagcatatttgtgagaatagctaactaatagaatagctaatagagctctgttcccgagataaaatggata

SEQ ID NO: 327513 - DNA, 610 bp, Homo sapiens
tatcctgtttttcctctactgtttcatttcagatggttgggtagctaaatttgatatgttggcaggatcccatgaagctattcatccagaactgacccagaaaacaaaccttggccacagttctgagctcagagttagacccaaagctgccttgctttgacattcatccttcctcatcctcagcctgcctgttccctggagggtgctcctgcgtgccctccttacgtggtgcttgtgtgcccacctgcaccccagaaggagctcccagctggcctgttccagccccatgtcacctcctaccagcttctgccyggggcaacccagagaacctcctctcaagctggtgagctgcaaccacacctccaatgagtcagaggcccagtcttggggagtggggccccttttcaagtttgtttcttccttggggactctcccagagcccaaatattttcttcaggtacccctttattgttacccccatataacatttaatattatttatattgattttcctttccaaattactatggtggtttctgtttcctcattggatgttgattgattcaattgcagaaactgatacaagtttttcctaaataaacattaattt

SEQ ID NO: 327514 - DNA, 602 bp, Homo sapiens
gtctggaatccaagcagcagaggaacaggtggataatacgcattgttaatttcagtatctgaaactcaatgaataacgaaagcaataaaaacaaaaatggctgccacttattgaggatttacatatgccagatctctgtcatattatttaaccttcaatgaaaacttattggaatatagcctgtcattattcccagcctgcagatgagaaaattgcgggacatgacctacctggagactcagattaagtggcaaagtcatgactgaatcaaaattcaaacttttggccgggtatggtggctcatgcctgtaatccgagcactttggaaggccgaagtgggtggatcacctgaagtcaggagttcgagaccatcctggccaacatagtgaaacctcgtctccactaaaaatacaaaattagccaggcgtggtggcacatgcctgttatcccagctactcgggaggctgaggcrggagaattgcttgaacccaggaggtggaggttgcagtgagccaagatcatgctccatccagcctgggcaacaagagcaaaactccatcaaaaaaaaaaataaatccaaactcttagctactgcccttata

SEQ ID NO: 327515 - DNA, 580 bp, Homo sapiens
acagagatgcaatctacaaacttcctagtgacaggtatcatgtagtgagtaaacccccaaaaggatcttatgcctatgaggcagaaaattacagatttatcaaactttcccaattatccatatctgtccctgtccctttcctcccctyggcagaggatgtctcatgcttgtcttctcaaaaaatgacagttttggaaaggcccaatggcttcatccgtgagtcgctaaggtgccagaaaccttgcaggatttcccgtggtcttctgctttttcagtctctttgagttcatatttaggggcagaaaagcaggagagcctgaacttgaggccctggagctgctgtcagtaaacctggagagaagggctgtgtgtctacactccgaggtgctagatcattatccccttcagtctgggtgtctgagaagcttggtctatcagtctagcagaacagactgaagattccataggaactcaaggggaactgactcccgccctccctccagcctccaagcatgagagggcatcactaagtcctcctggggctctggctagagttcatctgggaggtcttagaaggctt

SEQ ID NO: 327516 - DNA, 580 bp, Homo sapiens
acagagatgcaatctacaaacttcctagtgacaggtatcatgtagtgagtaaacccccaaaaggatcttatgcctatgaggcagaaaattacagatttatcaaactttcccaattatccatatctgtccctgtccctttcctccccttggcagaggatgtctcatgcttgtcttctcaaaaaatgayagttttggaaaggcccaatggcttcatccgtgagtcgctaaggtgccagaaaccttgcaggatttcccgtggtcttctgctttttcagtctctttgagttcatatttaggggcagaaaagcaggagagcctgaacttgaggccctggagctgctgtcagtaaacctggagagaagggctgtgtgtctacactccgaggtgctagatcattatccccttcagtctgggtgtctgagaagcttggtctatcagtctagcagaacagactgaagattccataggaactcaaggggaactgactcccgccctccctccagcctccaagcatgagagggcatcactaagtcctcctggggctctggctagagttcatctgggaggtcttagaaggctt

SEQ ID NO: 327517 - DNA, 580 bp, Homo sapiens
acagagatgcaatctacaaacttcctagtgacaggtatcatgtagtgagtaaacccccaaaaggatcttatgcctatgaggcagaaaattacagatttatcaaactttcccaattatccatatctgtccctgtccctttcctccccttggcagaggatgtctcatgcttgtcttctcaaaaaatgacagttttggaaaggcccaatggcttcatccgtgagtygctaaggtgccagaaaccttgcaggatttcccgtggtcttctgctttttcagtctctttgagttcatatttaggggcagaaaagcaggagagcctgaacttgaggccctggagctgctgtcagtaaacctggagagaagggctgtgtgtctacactccgaggtgctagatcattatccccttcagtctgggtgtctgagaagcttggtctatcagtctagcagaacagactgaagattccataggaactcaaggggaactgactcccgccctccctccagcctccaagcatgagagggcatcactaagtcctcctggggctctggctagagttcatctgggaggtcttagaaggctt

SEQ ID NO: 327518 - DNA, 580 bp, Homo sapiens
acagagatgcaatctacaaacttcctagtgacaggtatcatgtagtgagtaaacccccaaaaggatcttatgcctatgaggcagaaaattacagatttatcaaactttcccaattatccatatctgtccctgtccctttcctccccttggcagaggatgtctcatgcttgtcttctcaaaaaatgacagttttggaaaggcccaatggcttcatccgtgagtcgctaaggtgccagaaaccttgcaggatttcccgtggtcttctgctttttcagtctctttgagttcatatttaggggcagaaaagcaggagagcctgaacttgaggccctggagctgctgtcagtaaacctggagagaagggctgtgtgtctacactccgaggtgctagatcattatccccttcagtctgggtgtctgagaagcttggtctatcagtctagcagaacagactgaagattccataggaactcaaggggaactgactcccgccctccctccagcctccaagcrtgagagggcatcactaagtcctcctggggctctggctagagttcatctgggaggtcttagaaggctt

SEQ ID NO: 327519 - DNA, 633 bp, Homo sapiens
aaactctttgtctttacacagctcatattttagtagggagttgaagaaagaaaataaacaaatacatgtgtcatatggtgataggtgttaaaaagaaacatgggaccaggggctatagtgaaagtagtgcagggagaatcattctagaagaggtggtcggggaagccacactgatgtggtggtgactgggagcagagatgtgaatgcagtaagctggccatctgggctatgtggggaacacattcctacagggcagaagacataataggtgcaaaggccctgaggtgtgagggcacccccaccctgggtgtttcacatacaatcttcatgaaaagcagtggggctcatgggaccttcaagccaagggagagagtcaggatcctgggttgccacrtccgggacaaaggacctccccatgtcatttcttcttgccttgctgacgttctcagctaggtcaaggctgggtgttgctcctgatttatttcactctggcccaaaaactcagcagccttcctggctggtgcagccctacccaggtgcaccctggccctacatctcatatctggctgcacctccagtttgggtctggcccagctgggccactcttcagcctcttcgtctctgccaggttta

SEQ ID NO: 327520 - DNA, 633 bp, Homo sapiens
aaactctttgtctttacacagctcatattttagtagggagttgaagaaagaaaataaacaaatacatgtgtcatatggtgataggtgttaaaaagaaacatgggaccaggggctatagtgaaagtagtgcagggagaatcattctagaagaggtggtcggggaagccacactgatgtggtggtgactgggagcagagatgtgaatgcagtaagctggccatctgggctatgtggggaacacattcctacagggcagaagacataataggtgcaaaggccctgaggtgtgagggcacccccaccctgggtgtttcacatacaatcttcatgaaaagcagtggggctcatgggaccttcaagccaagggagagagtcaggatcctgggttgccacatccgggacaaaggacctccccmtgtcatttcttcttgccttgctgacgttctcagctaggtcaaggctgggtgttgctcctgatttatttcactctggcccaaaaactcagcagccttcctggctggtgcagccctacccaggtgcaccctggccctacatctcatatctggctgcacctccagtttgggtctggcccagctgggccactcttcagcctcttcgtctctgccaggttta

SEQ ID NO: 327521 - DNA, 622 bp, Homo sapiens
cccaataaataaataaataaaaattttaaaataaacttataaaatttcttattctaataatttaactcagcacagttacaattaaatagtgtaaagatcttttgsatttggttttggcttttttctcaaatcactctgggtggctccctgttgatgttcaaccatgtctggtttggtggaatatgtaagttgaatagaatggtattggtagtgattttctgtcaattggtaagttaagaaatgatttaattatgcaaaaagcagactgtgctatgttatgaaaagacctccttgagggcttggggtcttttctttctcagcactgctgaaacagtggatacctagcaagcttgggtacagtgtccagctgaggcttccacagcttacagagcaaacctcactgctatgccagaggcttgtcaggagaagagcttggatctgggatacacaattaagaactcatttaaaagaaagatcctggaacgttaaacatcaaaatatctgtgcatttatatatacagtacatacttagtatgacactggttaccaacttggctgagtctgctgagatggaacacaaacacacaaaagtcacgtacgtggatttgttacttacagatag

SEQ ID NO: 327522 - DNA, 601 bp, Homo sapiens
tggttctttctcatctttgtggactgatgttccttcagtctttgaggttgctgaccttggatgggttttctttcttttatcctatttgatgaccttggtgtttgattgtggtttaaggtgagttcagtcaactggcttcatttctggaatattttagagggccaaggctcagctcaggactcctggactgcatattctaactctgggggctgggattaggcctggctttgctctttggctcctcaaggggaaactgctgtttttgagggtctgaggtgctcccagaccacaggtcacaacactccaataagtgataccagccaaagcacttcatagggtggtgacagtgggatccakcctcatttgcatgtgccagcagcagtggcagtggcagtgtggtggagtttgtgttcatcagctgtggcagagtgctagcagttgctgggatgttggcctccatgtggagcagtggtggcaccatggcttggggatagaaggcccctgccaataattgtgtgtgtatccacactggtggtggtgttagcatggcagtagggcactggtggacacaggactgtattgccctctgtgcacattcaca

SEQ ID NO: 327523 - DNA, 338 bp, Homo sapiens
cacctgtgtcttccctccatccactctcagtaccttctctctgaagatctgctagaagcgtgccagtcttcccaatgtcccagaccctcagtgggagatgttcctcctggctgcgtctagtcagccatcttggagcagctctacattcaccatttctgttcatatcccattgccagaatctagtcacaagsctgcacttaatgataaaggatgtgggaaatgcaatctttaactgggtggctctatgcctacttaaaacttagaggttccatgaccaaaggaaacagaagagggtgaacactggtctataacaagcaatcggtcacatctacttttca

SEQ ID NO: 327524 - DNA, 338 bp, Homo sapiens
cacctgtgtcttccctccatccactctcagtaccttctctctgaagatctgctagaagcgtgccagtcttcccaatgtcccagaccctcagtgggagatgttcctcctggctgcgtctagtcagccatcttggagcagctctacattcaccatttctgttcatatcccattgccagaatctagtcacaagcctgcamttaatgataaaggatgtgggaaatgcaatctttaactgggtggctctatgcctacttaaaacttagaggttccatgaccaaaggaaacagaagagggtgaacactggtctataacaagcaatcggtcacatctacttttca

SEQ ID NO: 327525 - DNA, 618 bp, Homo sapiens
tcccatttataagaaagaagattgactaatgaagctgtctgccagtggctgcattgtctgaattactattagtttagagggaattaygttaaaaattttaataacatgcagtataataataacaaaggttattcatcaccaaacaagcattttcagtgccaatgaaaggcccctccacagcggctgcactggtgaatccaaacagcctttttctgtgtgattgctctgcacggggtctttggcaacaatgaagaaactggttagagagaactaagtttgtagactcacatttttcaaatatagtaatgtaaatatattttccaatcacattccataagagatgattcatgaaatcagacaaaagtaaattatcacaggcaagagtagagcttccttcctcagattggtgttaccataaaacatctttggagccttctctaaacgataccagcttttagctcataatttatgctcttctctggagtttttctctagagtggaagccacaaatttctttacttgtgatttaagatatagtttctcaattaaatggcaagcttctactgccaccaaaagaaatggtaattcaatctaccttaaacactctcatttctaaaa

SEQ ID NO: 327526 - DNA, 463 bp, Homo sapiens
agatgattcatgaaatcagacaaaagtaaattatcacaggcaagagtagagcttccttcctcagattggtgttaccataaaacatctttggagccttctctaaacgataccagcttttagctcataatttatgctcttctctggagtttttctctagagtggaagccacaaatttctttacttgtgatttaagatatagtttytcaattaaatggcaagcttctactgccaccaaaagaaatggtaattcaatctaccttaaacactctcatttctaaaaatgctctaaaagctttgggtaagattagcacagttcctgaggcaaaagcttaactttgtttcatacctgtttaaaaactggtaaaaagtcgtatagatatactctacaagaaaagtattatgaagagacccagtgaggaatgctcaacaatggagttaaaggggaagatgtgtagttgtttaa

SEQ ID NO: 327527 - DNA, 523 bp, Homo sapiens
attaccataaaatcatatccaagttcaatgccataaagtttttcccctgtgttttctcttagaaggtttgtattttcgggtcttacatttaggtctttacaggacttcccacactatgttgaatagaagtggcaagaatgggcatcatatgacaaatatctgcccaatccctgcagcccccatccctggcaaccaccattctattctctatctctatgagtttgacatttttaagttccagatataagtgagatcatgtggtgtttgtctttctgtgtctggcttatttcacttagtataatgtactccagattatcccagatgacaggatttcctgactggacagaatttgcttcttttttcaagactaaattactattcccattgtgtatatatgttacatttgctttattctgtcatttgwtgatggacacttaggttgattccagaccgtggctattgtgaataacatgctgcactgaacatgggtgtgcacatacctttttgagatcctgatttcagt

SEQ ID NO: 327528 - DNA, 443 bp, Homo sapiens
tcttgtggcaacactctatagcccagggacaggaacgggaaaagtcatggttgttttgatccagtttgaaagttggagtgttatgggttgaagcatgtggagagtgctgatgaacacgatcagaaccaaagagaacarattgaagctttgagggggaaacttgaaagggagtggagggactggcaggataagtgagatgaaagtggacacagtttagagtttagaatttagaagggaattagttctcagtactggtaccacctagtgtggagtgggtaaagagaccagtgagggaaactgaatataatagggtttcaagttacaatcctgtcagaatcagtttagaagtcgtcttccagactccagtagccaagagacttcacatccgaggcaggaaaatctctgaaagtatgagttccagttttcttgtttcttatcacctg

SEQ ID NO: 327529 - DNA, 461 bp, Homo sapiens
gcaggataagtgagatgaaagtggacacagtttagagtttagaatttagaagggaattagttctcagtactggtaccacctagtgtggrgtgggtaaagagaccagtgagggaaactgaatataatagggtttcaagttacaatcctgtcagaatcagtttagaagtcgtcttccagactccagtagccaagagacttcacatccgaggcaggaaaatctctgaaagtatgagttccagttttcttgtttcttatcacctgcctttgagtgagtcatgtcactcaaaggcaggtgatgaggacttggagacacttggagttcaatgggcctgacccactgagttgcagataaaaattcacttctttatttaattcttaaccaattaaatatgcagtgagtatgtagggtactcaaaaatgtatttcaacagtcatcagagctgctataaagaccactgaaa

SEQ ID NO: 327530 - DNA, 461 bp, Homo sapiens
gcaggataagtgagatgaaagtggacacagtttagagtttagaatttagaagggaattagttctcagtactggtaccacctagtgtggagtgggtaaagagaccagtgagggaaactgaatataatagggtttcaagttacaatcctgtcagaatcagtttagaagtcrtcttccagactccagtagccaagagacttcacatccgaggcaggaaaatctctgaaagtatgagttccagttttcttgtttcttatcacctgcctttgagtgagtcatgtcactcaaaggcaggtgatgaggacttggagacacttggagttcaatgggcctgacccactgagttgcagataaaaattcacttctttatttaattcttaaccaattaaatatgcagtgagtatgtagggtactcaaaaatgtatttcaacagtcatcagagctgctataaagaccactgaaa

SEQ ID NO: 327531 - DNA, 539 bp, Homo sapiens
gcataactataactatcttgaaagcatatattgttatgggcattgggacatctggactgcctgttattgtaggagtttgtccttgcaggcattaccacrctctttccttggatgtgaacatgttaggaccatgagtcatgactggcaaggaatgtaccctgctaacttgaagacggagctgatgttaaaatggtgtcactcgggctctcctaggcttctgcttccctaacgcccttgaggtgactattttattcttgagtataaactgtcaaatgcaaaaagaaatgaaagcatgttctgaaaataggatccactctgtggaatatacccaagtcattttccttcctcattcccatgacccggattctacagttcccacagcagagctgcctggacactggcccttctaagcccactttcattgatcttttttattttttattttttattacaaccattgaatagcctcacacctcacattttcaggcagtgagctctgcttttttgcatctagtgtgggttgatttcccatctcaaca

SEQ ID NO: 327532 - DNA, 539 bp, Homo sapiens
gcataactataactatcttgaaagcatatattgttatgggcattgggacatctggactgcctgttattgtaggagtttgtccttgcaggcattaccacgctctttccttggatgtgaacatgttaggaccatgagtcatgactggcaaggaatgyaccctgctaacttgaagacggagctgatgttaaaatggtgtcactcgggctctcctaggcttctgcttccctaacgcccttgaggtgactattttattcttgagtataaactgtcaaatgcaaaaagaaatgaaagcatgttctgaaaataggatccactctgtggaatatacccaagtcattttccttcctcattcccatgacccggattctacagttcccacagcagagctgcctggacactggcccttctaagcccactttcattgatcttttttattttttattttttattacaaccattgaatagcctcacacctcacattttcaggcagtgagctctgcttttttgcatctagtgtgggttgatttcccatctcaaca

SEQ ID NO: 327533 - DNA, 641 bp, Homo sapiens
ccataaatatttaaaactatctcatcttactgaaaatttatataacacatgacctttgcaaaattgcaacctttattcttcaagcaaaacttggtttctgctggtcaccacaatgtgcttcttttggacaccatgtataactgagattgaattgtaactgttagcagtggagaaagcctgcggcaaatcaactcaattgaattttgtgttcacagatgctttgagttttacrgagtcttatattccattttcaagtgcatcattcaggacacaggcccattttccatatcccagatcacccaaccagtccagggctatttcagaaactttcctgagcatataatatagaccaacgctaggttgtaaactaagtataaaattctaagccccccaaccaactgaacagaaacttcttggccaagaggaccccagagaaaactgaaaagctgtttctggccctgaaagaaagggaggtcagacacacctcatcatacctcctctgttttggagtttggactcaacaagtaaccagcagcggtgttaaaatagagatcctaagactgacagaacagaccccgtgtggccataagataacaaattatgaacaaaccctaaggccatgcaaggcaggtgtaagtcag

SEQ ID NO: 327534 - DNA, 641 bp, Homo sapiens
ccataaatatttaaaactatctcatcttactgaaaatttatataacacatgacctttgcaaaattgcaacctttattcttcaagcaaaacttggtttctgctggtcaccacaatgtgcttcttttggacaccatgtataactgagattgaattgtaactgttagcagtggagaaagcctgcggcaaatcaactcaattgaattttgtgttcacagatgctttgagttttacggagtcttatattccattttcaagtgcatcattcaggacacaggcccattttccatatcccagatcacccaaccagtccagggctatttcagaaactttcctgagcatataatatagaccaacgctaggttgtaaactamgtataaaattctaagccccccaaccaactgaacagaaacttcttggccaagaggaccccagagaaaactgaaaagctgtttctggccctgaaagaaagggaggtcagacacacctcatcatacctcctctgttttggagtttggactcaacaagtaaccagcagcggtgttaaaatagagatcctaagactgacagaacagaccccgtgtggccataagataacaaattatgaacaaaccctaaggccatgcaaggcaggtgtaagtcag

SEQ ID NO: 327535 - DNA, 574 bp, Homo sapiens
gcatcattccctcctgacacttccttcttaccacccccccacctatgccctcctgccacaattaagttctgtgaacccattttcttaaaaactctttaattcttgaattcatatcatcatgacttctcaccttcgctattgtaacaaaatttaatgatctccctgcttctatttttttgattccctctcacatttccttcatagcaatcttttaaaatttaaatctaaccctgtcacctttactttaaaatccctacaaggcttcttactgctttcagagaaaagtttaggcttcttagttcagcatagaagacayctgttggttaaatgttgagtaaattaaactttgaggttttattaggtaaattaaaatcctttaacctctaagaactctagcatcctagatgcaataccaaatcctctatctagtacttccaccagggcacctccctctgcccatatactgaccccatcccaactacttaacaacccataggttgtcataaagaaaacagagactgacaaggcttagagacccttagaatacttttataacctcttcattttcatagta

SEQ ID NO: 327536 - DNA, 608 bp, Homo sapiens
gatttttttcattaaagttaatttaaccaaatttcatagcttaaaggcacacaattcaactatctagatgtaacagtgaaatacagtttctgaactgctttgactagtagacaagatatatttcttaattccacttttattttacttatttaatcttcaggctatacaacagtaaggaacaaacaatgacattctcatctcaaggcacaagcatttatattatcattcccagtggggatgttgcagaagcaagttttaggtyaacaagatttaatttgtttttacttcttttgaaatcaaatcatagggttttttaaaaataaaatgagaagtatacggaaataaatcatatataaagttataggttagacattgagctcaaatgttaaataagacagaatgagaaaatcaattctcccccaagattaagaaaggtgagaaaaatgtaccagcactaggaggatggtagggacaggcttcctcctgcttggttttatgtatttaacaaacctgtcttggctactatgtgctagacattgatctatgcactttagaatattaattcacctttatagaaaccaatgaagaggtttagatattactatttt

SEQ ID NO: 327537 - DNA, 599 bp, Homo sapiens
cccaagtgactggagagatgattgcaaatgcaacagaaattctagggttcatcggatgctgtggctatgcttaagaaaccagccactcagctaagaaaacaacagtgagaaataacaccgttacagtggatttatttctctgcttaaatgactgccttgcagaagagctgtgatcttttgatattttttggcaaacagcatcaaaaacaagatatatggaatcaaccaacagatcatgtatcactgtgcttgtactggtaaaactccgtgtacttactccacgtctaccgtagtagattgagagatggtcatccaaagatctcagattctaatccctgggactgggaagtgttcccttgtttggcaaaagagtctttgtagacgtgattaagttagggatcttggcatgaggggaygaaccttctttattcaggtggccttgaattatgatcacaagtgtccttataaaagagaggcaaagggagaaagcacagaaaggagaggaggaacttaagtgcccatggaggcagagaccgcagtaatgcagccacaagttagggacgccaacagaagatgggaggggcaaagaaccagtccac

SEQ ID NO: 327538 - DNA, 612 bp, Homo sapiens
atctcagctcacttcaacctctgcctcccaagttcccaccattctcccacctcagcctcccaagtagctgggactacaggcaccyaccaccatgcctggctaattttgtttctgtatttttagtagagacggggtttcactgtgttagccaggatggtctcgatctcctgaccttatgatccgcctgcctcggcctctcaaagtgctaggattacagacgtgagccaccgtgcccagcctaaaatggctaagtctttaggagaggaagagtgaatagtcattcctcctttcatctcatattttaaacaatactttccttccttaagttaaaaacaaatcttttcccccttaagttaaagatttagcagctgtcgtggttaggacacagggtgattgatgtgtgagaggagatgagtgggaagactcagggtggggccgactcttttccagactgcgtgcaggtagaaatgccatcagtcatcgcttcctctggacagactaatttttgtctgtctcttcatagatgcccatgaggttactcaaagccccatatcggatttccctgcccaggacctctgtttccaggactcttcagcccacatctctgaccca

SEQ ID NO: 327539 - DNA, 612 bp, Homo sapiens
atctcagctcacttcaacctctgcctcccaagttcccaccattctcccacctcagcctcccaagtagctgggactacaggcacccaccaccatgcctggctaattttgtttytgtatttttagtagagacggggtttcactgtgttagccaggatggtctcgatctcctgaccttatgatccgcctgcctcggcctctcaaagtgctaggattacagacgtgagccaccgtgcccagcctaaaatggctaagtctttaggagaggaagagtgaatagtcattcctcctttcatctcatattttaaacaatactttccttccttaagttaaaaacaaatcttttcccccttaagttaaagatttagcagctgtcgtggttaggacacagggtgattgatgtgtgagaggagatgagtgggaagactcagggtggggccgactcttttccagactgcgtgcaggtagaaatgccatcagtcatcgcttcctctggacagactaatttttgtctgtctcttcatagatgcccatgaggttactcaaagccccatatcggatttccctgcccaggacctctgtttccaggactcttcagcccacatctctgaccca

SEQ ID NO: 327540 - DNA, 612 bp, Homo sapiens
atctcagctcacttcaacctctgcctcccaagttcccaccattctcccacctcagcctcccaagtagctgggactacaggcacccaccaccatgcctggctaattttgtttctgtatttttagtagagacggggtttcactgtgttagccaggatggtctcgatctcctgaccttatgatccgcctgcctcggcctctcaaagtgctaggattacagrcgtgagccaccgtgcccagcctaaaatggctaagtctttaggagaggaagagtgaatagtcattcctcctttcatctcatattttaaacaatactttccttccttaagttaaaaacaaatcttttcccccttaagttaaagatttagcagctgtcgtggttaggacacagggtgattgatgtgtgagaggagatgagtgggaagactcagggtggggccgactcttttccagactgcgtgcaggtagaaatgccatcagtcatcgcttcctctggacagactaatttttgtctgtctcttcatagatgcccatgaggttactcaaagccccatatcggatttccctgcccaggacctctgtttccaggactcttcagcccacatctctgaccca

SEQ ID NO: 327541 - DNA, 612 bp, Homo sapiens
atctcagctcacttcaacctctgcctcccaagttcccaccattctcccacctcagcctcccaagtagctgggactacaggcacccaccaccatgcctggctaattttgtttctgtatttttagtagagacggggtttcactgtgttagccaggatggtctcgatctcctgaccttatgatccgcctgcctcggcctctcaaagtgctaggattacagacgtgagccaccgtgcccagcctaaaatggctaagtctttaggagaggaagagtgaatagtcattcctcctttcatctcatattttaaacaatactttccttccttaagttaaaaacaaatcttttcccccttaagttaaagatttagcagctgtcgtggttaggacacagggtgattgatgtgtgagaggagatgagtgggaagactcagggtggggccgactcttttccagactgygtgcaggtagaaatgccatcagtcatcgcttcctctggacagactaatttttgtctgtctcttcatagatgcccatgaggttactcaaagccccatatcggatttccctgcccaggacctctgtttccaggactcttcagcccacatctctgaccca

SEQ ID NO: 327542 - DNA, 394 bp, Homo sapiens
acctaaagggatctttcctcacatttatgtagatggaatgctgcaaatcccgggttaaatgctacttctccaggaagctggcttttatgcccccatagtgatttctccatagagaaatgtttacttctccttaccatttgtgccagaaaatgtgagactcactagaacaaccctgaaacaatgggtttggaaagaggaagaattaaattaaaaggccaacaatgaggaaactttgatttctgggggrccacagggtcaccccgatataaaattgcatctgcgttgtgatcagtttctaaaggtaaaagccacccatggaattcggaaatagtgatagacccagccaatggaattgagaaacagtgatagacccagccaatggaattcagaaata

SEQ ID NO: 327543 - DNA, 488 bp, Homo sapiens
tcttgtttttttctgagagtatggccataataataaatctcttctaggcacttcctaaagttgctccatgtcagttcgcaggttcttggggcagayggttttaactgaagtctccattttataaacacaaaattgctcaaccagttaatcacgcctcatagcataagaccacattcgtgacttcagtgtcttttcaaaactacacacacctacatcctgccaagattatattacttgcccaatctgtccaatccccaccccacccctgccatctaccccttacctcacctccgcccacacacacaccctcctaccctgtcaggattcactgctctagaccctgacctttggattatagtttctgtagtcagttcaccatccttccaacctacagtcaaattatttgaactactagggatagtctatctgatttgccacaactatttttccttttttaattttattttttgccaccacaactattgaag

SEQ ID NO: 327544 - DNA, 214 bp, Homo sapiens
cttggtgggcacagagccagccagccccactccctccatcatcccaccctgtgctaacactgwgcagagaacagctgatcctccgccaccctgagtgaccactcctgcacagaaaaggcacgcagacctgcacctgccaatgccttgcccctaagccaacaccacttcctgtgtgaccacacacacagttgccagcaggggacccccttccttt

SEQ ID NO: 327545 - DNA, 214 bp, Homo sapiens
cttggtgggcacagagccagccagccccactccctccatcatcccaccctgtgctaacactgagcagagaacagctgatcctccsccaccctgagtgaccactcctgcacagaaaaggcacgcagacctgcacctgccaatgccttgcccctaagccaacaccacttcctgtgtgaccacacacacagttgccagcaggggacccccttccttt

SEQ ID NO: 327546 - DNA, 621 bp, Homo sapiens
attaaaaccacaataagatattactatatacctatcatgatagctaaaaataaaaagtaggcacaataccaaatcctggtgaggatgcagagaaaatagatcactcacatttggctgctgggaatgtaatatagtacagccacactggaaaatagtttggcattttctttaaaagcaaaacatgcaaccaccatacaacccagcaattgcactcctgagcatttatcccagagaaatgaagacttatgttcagagaaaaatctgcacatgtatgctcatagcagctttattcagacaaaaactggaaacaaactgtggtatatccatactaggaaatactacttagcaataaaaacgaacaaactggatacaggcaccacgacctggatgaatcaccagggaattatgctgagtgaaaaaaaaaattgcaaaatgttgtctactaaatgattccacttayataacactcctggaatgccaaaactatagagatggaaattaataattgctgtgttaatgaagaagtggaaatgggagggaagtggctgtggctacaaaagggcaaaatgagggatattatagtgatgaaagtgttctttattttaattatatcaatgtcaa

SEQ ID NO: 327547 - DNA, 621 bp, Homo sapiens
gctgctttcccttctctcctggccccttggcaggtctagatttgagggatcagcatttcttgagggtggtaacccagccactcttwtttcccttactcttccttccatgtgttcaaaatatgatgcaatctgagatgtggttgtgggtgtttgagaagcaaagaagcatgactggagcaggagttaaagtctgcttttgtttgagaactgaagagctcagtcttttacacgctttcacagataagagattggtactataaaattacatgcttaaaacaaacttcgctgctgtcattctaatgcaagccactatcctttttcacattgagcattctgccaccatctgcagcattcttgatatttcagtaagaattaaattttattttgcaatcagtattttaaatttatcaggatacctgtatatagtttgaggattaaacaataaagatgtattttaatgaaaacaagagcccttcatgccattcctttcctccactagcattatccccagctcaatgacttttaatggtaatatgtgtatctttgtgtatgtggggtattaatttagacatcagttatctaattatctgaaagcagataatttagaccaccaacaatttt

SEQ ID NO: 327548 - DNA, 621 bp, Homo sapiens
gctgctttcccttctctcctggccccttggcaggtctagatttgagggatcagcatttcttgagggtggtaacccagccactcttatttcccttactcttccttccatgtgttcaaaatatgatgcaatctgagatgtggttrtgggtgtttgagaagcaaagaagcatgactggagcaggagttaaagtctgcttttgtttgagaactgaagagctcagtcttttacacgctttcacagataagagattggtactataaaattacatgcttaaaacaaacttcgctgctgtcattctaatgcaagccactatcctttttcacattgagcattctgccaccatctgcagcattcttgatatttcagtaagaattaaattttattttgcaatcagtattttaaatttatcaggatacctgtatatagtttgaggattaaacaataaagatgtattttaatgaaaacaagagcccttcatgccattcctttcctccactagcattatccccagctcaatgacttttaatggtaatatgtgtatctttgtgtatgtggggtattaatttagacatcagttatctaattatctgaaagcagataatttagaccaccaacaatttt

SEQ ID NO: 327549 - DNA, 621 bp, Homo sapiens
gctgctttcccttctctcctggccccttggcaggtctagatttgagggatcagcatttcttgagggtggtaacccagccactcttatttcccttactcttccttccatgtgttcaaaatatgatgcaatctgagatgtggttgtgggtgtttgagaagcaaagaagcatgactggagcaggagttaaagtctgcttttgtttgagaactgaagagctcagtcttttacacgctttcacagataagagattggtactataaaattacatgcttaaaacaaacttcgctgctgtcattctaatgcaagccactatcctttttcacattgagcatyctgccaccatctgcagcattcttgatatttcagtaagaattaaattttattttgcaatcagtattttaaatttatcaggatacctgtatatagtttgaggattaaacaataaagatgtattttaatgaaaacaagagcccttcatgccattcctttcctccactagcattatccccagctcaatgacttttaatggtaatatgtgtatctttgtgtatgtggggtattaatttagacatcagttatctaattatctgaaagcagataatttagaccaccaacaatttt

SEQ ID NO: 327550 - DNA, 621 bp, Homo sapiens
gctgctttcccttctctcctggccccttggcaggtctagatttgagggatcagcatttcttgagggtggtaacccagccactcttatttcccttactcttccttccatgtgttcaaaatatgatgcaatctgagatgtggttgtgggtgtttgagaagcaaagaagcatgactggagcaggagttaaagtctgcttttgtttgagaactgaagagctcagtcttttacacgctttcacagataagagattggtactataaaattacatgcttaaaacaaacttcgctgctgtcattctaatgcaagccactatcctttttcacattgagcattctgccaccatctgcagcattcttgatatttcagtaagaattaaattttattttgcaatcagtattttaaatttatcaggatacctgtatatagtttgaggattaaacaataaagatgtattttaatgaaaacaagagcccttcatgccattcctttcctccactagcattatccccagstcaatgacttttaatggtaatatgtgtatctttgtgtatgtggggtattaatttagacatcagttatctaattatctgaaagcagataatttagaccaccaacaatttt

SEQ ID NO: 327551 - DNA, 608 bp, Homo sapiens
aagtgacacaaattgccctgtccaagaaagtggtatcattgtttactaaacttctttctgtccttaagtaaatttctattcttttctgtgrattgcacacatgactgctttgatattttgtatatttattgctcttttcaataattttttttctggaatggattcattgacctaatctgccagagagaattaatgaggccccacatcttctcattagttggagaggaaagtatttaatggtttaacttgaacgtgacttttgtgaatcttttttttttttttttaaagcagaatcctgtatttggttacattgtggtctagtgaccacttccttcaggtaaagcaagcttccctgtctggaacagccaggcatgtgataaaaaatttcctttgtggtcacttagttattattcctcttgtcttgagtgtctgggctgctattttcatgtatttacatccaaatgaagtctttctttccaactttttatagtatgttttgattcacaaaatattttagccttatctacaatataataatttcccacaaatgcaaagaatataggtttgtacagctttgaagtaatattggcaaaagagtatgaagcaga

SEQ ID NO: 327552 - DNA, 608 bp, Homo sapiens
aagtgacacaaattgccctgtccaagaaagtggtatcattgtttactaaacttctttctgtccttaagtaaatttctattcttttctgtggattgcacacatgactgctttgatattttgtatatttatkgctcttttcaataattttttttctggaatggattcattgacctaatctgccagagagaattaatgaggccccacatcttctcattagttggagaggaaagtatttaatggtttaacttgaacgtgacttttgtgaatcttttttttttttttttaaagcagaatcctgtatttggttacattgtggtctagtgaccacttccttcaggtaaagcaagcttccctgtctggaacagccaggcatgtgataaaaaatttcctttgtggtcacttagttattattcctcttgtcttgagtgtctgggctgctattttcatgtatttacatccaaatgaagtctttctttccaactttttatagtatgttttgattcacaaaatattttagccttatctacaatataataatttcccacaaatgcaaagaatataggtttgtacagctttgaagtaatattggcaaaagagtatgaagcaga

SEQ ID NO: 327553 - DNA, 608 bp, Homo sapiens
aagtgacacaaattgccctgtccaagaaagtggtatcattgtttactaaacttctttctgtccttaagtaaatttctattcttttctgtggattgcacacatgactgctttgatattttgtatatttattgctcttttcaataattttttttctggaatggattcattgacctaatctgccagagagaattaatgaggccccacatcttctcattagttggagaggaaagtatttaatggtttaacttgaacgtgacttttgtgaatcttttttttttttttttaaagcaraatcctgtatttggttacattgtggtctagtgaccacttccttcaggtaaagcaagcttccctgtctggaacagccaggcatgtgataaaaaatttcctttgtggtcacttagttattattcctcttgtcttgagtgtctgggctgctattttcatgtatttacatccaaatgaagtctttctttccaactttttatagtatgttttgattcacaaaatattttagccttatctacaatataataatttcccacaaatgcaaagaatataggtttgtacagctttgaagtaatattggcaaaagagtatgaagcaga

SEQ ID NO: 327554 - DNA, 593 bp, Homo sapiens
tcaggaaacattggacacacttataraaatgcaaaatgctctggaaagtctcagcaatagaattgaacaattagaagaaagaaattgagaacttgaagacaaggtctttgaattaacccaatcccacaaagacaaagaaaaaagaacaagaaaatatgaacaaagcctccaagaagtctgggattatgttacacaaacaagcctatgaataatcagtgttcctgaagaagagagaaatctaaaagttcggaaaacatatttgggggagtaattgaggaaaacttccctggccttgctagagacccagacatccaaatacaagaagcacaaagaacacccaggaaattcattgcaaaaagatcatctcctaggcacattgtcatgaggttatccaaagttaagatgaaggaaagaatcttaggagctgtgagacagatgcaccaggtaacctataaaggaaaacctatcagattaacagcagatttctcaacaaaaatccctacaagctagaagggactggggacctatcttcagcctcctcaaacaaaacaattatcagccaagaatgttgtatccactgaagctaagcatca

SEQ ID NO: 327555 - DNA, 593 bp, Homo sapiens
tcaggaaacattggacacacttataaaaatgcaaaatgctctggaaagtctcagcaatagaattgaacaattagaagaaagaaattgagaacttgaagacaaggtctttgaattaacccaatcccacaaagacaaagaraaaagaacaagaaaatatgaacaaagcctccaagaagtctgggattatgttacacaaacaagcctatgaataatcagtgttcctgaagaagagagaaatctaaaagttcggaaaacatatttgggggagtaattgaggaaaacttccctggccttgctagagacccagacatccaaatacaagaagcacaaagaacacccaggaaattcattgcaaaaagatcatctcctaggcacattgtcatgaggttatccaaagttaagatgaaggaaagaatcttaggagctgtgagacagatgcaccaggtaacctataaaggaaaacctatcagattaacagcagatttctcaacaaaaatccctacaagctagaagggactggggacctatcttcagcctcctcaaacaaaacaattatcagccaagaatgttgtatccactgaagctaagcatca

SEQ ID NO: 327556 - DNA, 549 bp, Homo sapiens
atacaagaagtgaagaacgaaatattcaaggaaatagatagcttaaagaaaaaacaactcaaaattcaggaaacattggacacacttataaaaatgcaaaatgctctggaaagtctcagcaatagaattgaacaattagaagaaagaaattgagaacttgaagacaaggtctttgaattaacccaatcccacaaagacaaagaaaaaagaacaagaaaatatgaacaaagcctccaagaagtctgggattatgttacacaaacaagcctatgaataatcagtgttcctgaagaagagagaaatctaaaagttcggaaaacatatttgggggagtaattgaggaaaacttccctggccttgctagagacccagacatccaaatacaagaagcacaaagaacacccaggaaattcattgcaaaaagatcatctcctaggcacattgycatgaggttatccaaagttaagatgaaggaaagaatcttaggagctgtgagacagatgcaccaggtaacctataaaggaaaacctatcagattaacagcagatt

SEQ ID NO: 327557 - DNA, 388 bp, Homo sapiens
acctgacattcattctacagaagcttattgagttcctatcacacactgacggatttacaaacactatcctgtttcaccctcagaaaactctgagacataagtattattatttacctgtcaaagaagagaaaattgatactcagattaagaaaaaaatctccccaaagcttaactgttaagcctagggttcaaaccctaaattgtgagacygtgggggtgtctgtcttataatcccccccacacgatatcttttagagtgtgtgctattgaacagcaatgattactaccaatactagtaatgcaactaaaacaaaagggaactgataatgataaggttatttattacccatccattgtttatgagtcataatgttacatgtactataaa

SEQ ID NO: 327558 - DNA, 560 bp, Homo sapiens
tcagtacacacaaactctcaaaccttaatttctcatttcatggaagtcactatctaaggactataagaaaaaacaaaacagaacaaaaatactgtgagagcaaaaattcatagcacttcctgagtacttcacatacttcttaggtattcgcccattatctgttagcatattcaattttcaaaataaaagaaataacatgtaccacaaaaatttcattgatacagagacttttattaaccctgttacatatcttgcttatctgaggccagtgaagttatctagccaaggttgcatagccaggaaatggtagaggtggatgttgagacarggagtccagccagaggccaaagtttatggaaacacaaataatagtgaatgtgaacagtcaagatagggagatctagctgtttggggtgcacaaaagtttatggaggtgaaagcattggatatgttaggttaaggattagtagaaatgagctgtgttataaagaagacagaacaatttttcctcattcacttattagtaaaaaataaatacataaataattctaaaaaaactc

SEQ ID NO: 327559 - DNA, 534 bp, Homo sapiens
tcttttgacacacagatatattccaaagtatatgtaagcatctgtataattgctataacaatttcacagttatttattatgaagttaatgttaattaatttattctgctgtacatatctacatgatgcatccacgaagggaagaaaaacaattatcacaccaaccttgaccacttattattttaattttgtmattgattttactttttaaagcagttgtagacgcacagcaaaattaggaggaagatgcagagttctcacgtctccagccccacatgtgcacagcctttcccatcatcaacttctcccacaaaggggtcacatttgtcccagtcaatgtaacacatcattattacccagaggctgtagtttacatttgaattcactcttggtgttgtacatcctatgggtttggagaaatgtacaatgcataatgacagtgtataaaatcatatgttgactttttcttaggaaaaaaaatccgtaaaatgaatgtagaaactaaaaggaaatgcttttgacctagtattattat

SEQ ID NO: 327560 - DNA, 534 bp, Homo sapiens
tcttttgacacacagatatattccaaagtatatgtaagcatctgtataattgctataacaatttcacagttatttattatgaagttaatgttaattaatttattctgctgtacatatctacatgatgcatccacgaagggaagaaaaacaattatcacaccaaccttgaccacttattattttaattttgtaattgattttactttttaragcagttgtagacgcacagcaaaattaggaggaagatgcagagttctcacgtctccagccccacatgtgcacagcctttcccatcatcaacttctcccacaaaggggtcacatttgtcccagtcaatgtaacacatcattattacccagaggctgtagtttacatttgaattcactcttggtgttgtacatcctatgggtttggagaaatgtacaatgcataatgacagtgtataaaatcatatgttgactttttcttaggaaaaaaaatccgtaaaatgaatgtagaaactaaaaggaaatgcttttgacctagtattattat

SEQ ID NO: 327561 - DNA, 507 bp, Homo sapiens
tcccataaatatatacacctactatgtactcacaaaaattaaaatctaaatactttttttaaaagtatgagaaatgctttaggggaccctgaaaaacatagttaggcatcataacatatttaattttgtttttttacctcatactatgatgtctccactgtggggtgcacagcatgtcaaagaggtagtaaatgagagaggggaagaaaaatgtgaggsaaggataagaaagaaagggtgaggaaaagaagaaggaaaagtaaaacaagcaggaagaaaatgaaatataaaagggaagaagaagagaggaatgatggttgggatttatgcacataattggctctaggttatatcaattcttttgtacttcaaaccttttacttttcattgtggaatataaaatacatcccagaaaaacgccaaaaaaaaagcattctgcaaatttgcagattaaaaagcttcaagtccctcacagcctttttaaacgtatctgcatttgttacaacg

SEQ ID NO: 327562 - DNA, 507 bp, Homo sapiens
tcccataaatatatacacctactatgtactcacaaaaattaaaatctaaatactttttttaaaagtatgagaaatgctttaggggaccctgaaaaacatagttaggcatcataacatatttaattttgtttttttacctcatactatgatgtctccactgtggggtgcacagcatgtcaaagaggtagtaaatgagagaggggaagaaaaatgtgaggcaaggataagaaagaaagggtgaggaaaagaagaaggaaaagtaaaacaagcaggaagaaaatgaaatataaaagggaagaagaagagaggaatgatggttgggatttatgcacataattggctctaggttatatcaattcttttgtacttcaaaccttttacttttcattgtggaatataaaatacatcccagaaaaacgccaaaaaaaaagcattctgcaaatttgcagattaaaaagcttcaagtccctcrcagcctttttaaacgtatctgcatttgttacaacg

SEQ ID NO: 327563 - DNA, 617 bp, Homo sapiens
cccttccttctcagaataaactctaaactccttaccacagacacaaggcctctggggacctgctgccacctgttcacctccccacactcacactccctactctgcacctcagttgctccaaccacatcaaggctctcccattcttgttcttcttcttttgttttttgtttgtttgtttgtttttctttttctttttttttctgagacagagttttgttttgttgcccaggctggggtgcagtggcatgwtctccgctcactgcaacctctgcctcccaggttcaagcaattctcgtgcctcagcctcctgagtagctgggattacaggtactggccaccatgcctggctcattttttgtatttaaatacagacagggttttaccatgttgcacaggctgttctcaaactcctgagctcaggcaatctgctcctctcagcctcccaaagtgctgagattacaggcgtgagccaccgcgcctggcagcctctcatcttcttaacatgaaggtctctcctactcattatgtttttaaattttcttaacagttcattaaaatatgactcacatactagaaagttaacaagtcaattgattttggtatattcatgaactatg

SEQ ID NO: 327564 - DNA, 617 bp, Homo sapiens
cccttccttctcagaataaactctaaactccttaccacagacacaaggcctctggggacctgctgccacctgttcacctccccacactcacactccctactctgcacctcagttgctccaaccacatcaaggctctcccattcttgttcttcttcttttgttttttgtttgtttgtttgtttttctttttctttttttttctgagacagagttttgttttgttgcccaggctggggtgcagtggcatgttctccgctcactgcaacctctgcctcccaggttcaagcaattctcgtgcctcagcctcctgagtagctgggattacaggtactggccaccatgcctggctcattttttgtatttwaatacagacagggttttaccatgttgcacaggctgttctcaaactcctgagctcaggcaatctgctcctctcagcctcccaaagtgctgagattacaggcgtgagccaccgcgcctggcagcctctcatcttcttaacatgaaggtctctcctactcattatgtttttaaattttcttaacagttcattaaaatatgactcacatactagaaagttaacaagtcaattgattttggtatattcatgaactatg

SEQ ID NO: 327565 - DNA, 627 bp, Homo sapiens
atgcctttgcgatgtgcagcgtaagtagagcggatgcctatgacggcccttcccatggcctgggcatcagaactgcttcagagtccaaggaggggtcctaggtcacccgttattgtgtgtggaggattgtcctcaaaaacacttttttctcccttttaaataaaattgatatcttagaattgttactatatagggagacacaactataccaaatagttgtcatctgctttttgactatgtgagcattgaataagtataaaaacayttcagaataaaagcaaatgtaaaacagcctggggaataccttaaatttggaatgaaaacccggcagctatttgcaggcgtatcaatatggaagataacttgaaattaaattgttctcaacaaataacacagagctttaggtgcaattgactcttaaacgtatttgaatgaacttggagatcatatgctatatcaaggggcaactctaagataatcaatagaagttttaaaagatggagatttttgttcaacaaaagaagaaaattctaatgatgaaagttttcattgtaatagacccctcgggagctgggcactgttctaatggtcttgcagcattaatttgatctcaatccccatgggcaa

SEQ ID NO: 327566 - DNA, 627 bp, Homo sapiens
atgcctttgcgatgtgcagcgtaagtagagcggatgcctatgacggcccttcccatggcctgggcatcagaactgcttcagagtccaaggaggggtcctaggtcacccgttattgtgtgtggaggattgtcctcaaaaacacttttttctcccttttaaataaaattgatatcttagaattgttactatatagggagacacaactataccaaatagttgtcatctgctttttgactatgtgagcattgaataagtataaaaacatttcagaataaaagcaaatgtaaaacagcctggggaataccttaaatttggaatgaaaacccggcagctatttgcaggcgtatcaatatggaagataacttgaaattaaattgttctcaacaaataacacagagctttaggtgcaattgactcttaaacgtatttgaatgaacttggagatcatatgctatatcaaggggcaactctaagataatcaatagaagttttaaaagatggagatttttgttcaacaaaagaagaaaattctaatgatgaaagttttcattgtaatagacccctygggagctgggcactgttctaatggtcttgcagcattaatttgatctcaatccccatgggcaa

SEQ ID NO: 327567 - DNA, 560 bp, Homo sapiens
gatctttccacctacaatcaaggtgtgcttccaatagaaccaacagaaaatgaaatagcctgacaactactggccatctaagagggaaggtatctattgcttaatctgcctctctgctccaccaaaaagagcggtgaaaggaaatggaatttcctcctcatagtgggagaatgcatcactacctttttcactttcaactcaccccaatacatactctgaatttagasccactgggataaaactgaggatggcactggggtttggtggaaaggagaaagacttagactccatatggaataattgtgttgaaatgaataggactgaatgtaaatcaaatgaaaatgccttttaacattttattgtgaaaatttcaagttgtacacaaatgatttgagaacagtataattaaaccacgtccttaaaactcatcctctataatgatgaacatatgtgttcaaatacatatggataattgtgtttcctctataaactgatggagctcaggacatgctaccccaaaatatggcaccgtggcatttaggaagcagcagacctggagg

SEQ ID NO: 327568 - DNA, 560 bp, Homo sapiens
gatctttccacctacaatcaaggtgtgcttccaatagaaccaacagaaaatgaaatagcctgacaactactggccatctaagagggaaggtatctattgcttaatctgcctctctgctccaccaaaaagagcggtgaaaggaaatggaatttcctcctcatagtgggagaatgcatcactacctttttcactttcaactcaccccaatacatactctgaatttagagccactkggataaaactgaggatggcactggggtttggtggaaaggagaaagacttagactccatatggaataattgtgttgaaatgaataggactgaatgtaaatcaaatgaaaatgccttttaacattttattgtgaaaatttcaagttgtacacaaatgatttgagaacagtataattaaaccacgtccttaaaactcatcctctataatgatgaacatatgtgttcaaatacatatggataattgtgtttcctctataaactgatggagctcaggacatgctaccccaaaatatggcaccgtggcatttaggaagcagcagacctggagg

SEQ ID NO: 327569 - DNA, 560 bp, Homo sapiens
gattctagacagctctatcacttactaattgagtggatataacataaattactttgtctycgtaaatcttagttaattgttctataaaattagaataatgacacttacttgcttgggttgttgtgaggattaaataggataataaatgtattatgttaatacctgtaactacattagctattacttttatcactgttttaaaattaaaatgatcataagaaaagtaaaactgaagtaatcatcttcagaaaatgtcatgggcattcatcagtataaaaacagtcagagtataaattctaaaatataattatagaatgtaacagtacataattgtttctaaaataaattaagactgaatttttatgttaacaaatgaagttaaagtcagtagagagatacagtcttacataggctgtgatactaaaaaaaactttaccttatttaaaggggaactaaaatttatctaataactatttttctgttgtacactgcaattgattagatacatgctatgtcattccattctcattggaatcaaatttaaaagtcttattactctt

SEQ ID NO: 327570 - DNA, 560 bp, Homo sapiens
gattctagacagctctatcacttactaattgagtggatataacataaattactttgtctcygtaaatcttagttaattgttctataaaattagaataatgacacttacttgcttgggttgttgtgaggattaaataggataataaatgtattatgttaatacctgtaactacattagctattacttttatcactgttttaaaattaaaatgatcataagaaaagtaaaactgaagtaatcatcttcagaaaatgtcatgggcattcatcagtataaaaacagtcagagtataaattctaaaatataattatagaatgtaacagtacataattgtttctaaaataaattaagactgaatttttatgttaacaaatgaagttaaagtcagtagagagatacagtcttacataggctgtgatactaaaaaaaactttaccttatttaaaggggaactaaaatttatctaataactatttttctgttgtacactgcaattgattagatacatgctatgtcattccattctcattggaatcaaatttaaaagtcttattactctt

SEQ ID NO: 327571 - DNA, 605 bp, Homo sapiens
gatatagtctaactcaaatcattagtctaatttctttttgtatatagtgtgatctcaagagctctttaaaagttcacaccaaatgccacattctttacataaagatatttaaccaaatactatacacacacacacacacacacacacacacactcattcactttcaaaccgtactatgtccgcaattagtgggttcttggtctcactgacttcaagaatgaagccacggaccttcgtggtgagtgttacagttcttaaagatagtgtgcccagagtttgttccttctgatgttaggacgtgtccggagtttcttccttctggtgggtttgtggtctcgctcacttcaggagtgaagccrcagacctccgcagtcagtgtaacagctcttaaaggcggcgcatccggaggtgttttttcctcctggtgggttcgtggtctcgctggcttcaggactgcagctgcagacctttgtggtgagtgttgaacagttcataaaggtggcgcctcacgagttgttcattcctgccagtggattcctagtctcgctggcttcaggagtgaaactgcagaccttcacagtgagtgttacagctcataaaagcag

SEQ ID NO: 327572 - DNA, 453 bp, Homo sapiens
cacattgttagggagccagatgcagtggcttgcacctgtaattcaagctcctcaggaggttgaggtgggaggatcttttgagcccaggaggtcaaggctgctgtgagctatgatccagcccagtaaatatktgaggtaatgcatatgttaattacttctattcagtcattccataaggtacatatatgttgcaaaacatcatgtagtataacataaatacatacaattattatttgtcaactgaagagaagaaaaaaacactaatttggcataattttaagtctcataaagattgctattattgccttataagtaaatatttagttaatttttatttaaatttactcacacatttacccattatattcctcatccttaacttctgaaatttcttcttttaacctgagttatattccatatgcataaaatattctccttgatagttctttaagg

SEQ ID NO: 327573 - DNA, 453 bp, Homo sapiens
cacattgttagggagccagatgcagtggcttgcacctgtaattcaagctcctcaggaggttgaggtgggaggatcttttgagcccaggaggtcaaggctgctgtgagctatgatccagcccagtaaatatttgaggtaatgcatatgttaattacttctattcagtcattccataaggtacatatatgttgcaaaacatcatgtagtataacataaatacatacaattattatttgtcaactgaagagaagaaaaaaacactaatttggcataattttaagtctyataaagattgctattattgccttataagtaaatatttagttaatttttatttaaatttactcacacatttacccattatattcctcatccttaacttctgaaatttcttcttttaacctgagttatattccatatgcataaaatattctccttgatagttctttaagg

SEQ ID NO: 327574 - DNA, 608 bp, Homo sapiens
tgcagtaataatgatacctacatgtaagtggtatcttcagtaagtcacgtactgcagagagcaccctgcgtatgctatataaaacaatctttaaaggtcactcttgttatcctattttacagacagagaaacaaacctcataagtaacttatgcaaggttttgaagattgtaaattgcaaagccaaaggtttatctcagcctccccttcaatagacatccccatttcacaccttaacatttggcaatatttttacattctttgtcttttttcttttccataaagtgttttgagagataggaagtgcattgactaataaagaaactgaggttctgtgaagttcagtgattttctcaagtgaaaaatgctagagaggtagttaaaaacctgtgtgctagtaaccattgacctttctccttaaagacagaagtgagaagtttgaattayaattgtccttacgtgccatgccttgcattctctcttttttttttattattgttatactttaagttttagggtacatgtgcacaacactcagattcgttacatatgtatgcatgtgccatgttggtgggctgcacccattaactcgtcatttagcattaggta

SEQ ID NO: 327575 - DNA, 608 bp, Homo sapiens
tgcagtaataatgatacctacatgtaagtggtatcttcagtaagtcacgtactgcagagagcaccctgcgtatgctatataaaacaatctttaaaggtcactcttgttatcctattttacagacagagaaacaaacctcataagtaacttatgcaaggttttgaagattgtaaattgcaaagccaaaggtttatctcagcctccccttcaatagacatccccatttcacaccttaacatttggcaatatttttacattctttgtcttttttcttttccataaagtgttttgagagataggaagtgcattgactaataaagaaactgaggttctgtgaagttcagtgattttctcaagtgaaaaatgctagagaggtagttaaaaacctgtgtgctagtaaccattgacctttctccttaaagacagaagtgagaagtttgaattacaattgtccttacgtgccatgccttgcattctctctyttttttttattattgttatactttaagttttagggtacatgtgcacaacactcagattcgttacatatgtatgcatgtgccatgttggtgggctgcacccattaactcgtcatttagcattaggta

SEQ ID NO: 327576 - DNA, 526 bp, Homo sapiens
cataattcaatttatggcgaaacttgtttcttctaaacttcaactcactttccaatcccccaaatatctcagatatttaatgactgtttcatccaaaaaaatatatctaggaatactttaggaaaaggcaaatttaaaatatagtcacatatcattatcacacctaaatttagcattaactctgatattatcaactagttttaraattaacttgactgtattataaaccattattttacagttcacttgattggataacaattagaataaaaactatgtattccagttggtggttgatatcccttatgtgtttttaataatttttttaaaatatatttttagtagagatggggtttcaccatgttggccaggctggtcttgaactcctgacctcaggtgatccacccacctcagcctcccaaagtgctgggattacaggcttgagccatgggtgaggtggcagtcacctgtaatcccagctacttgggaggctgaggcaggagaattgtttgaacgtttgaacctg

SEQ ID NO: 327577 - DNA, 520 bp, Homo sapiens
acctagttgaacaaaattcataaattgcctattcctggctaaatgttgttaagtaaggtgtagctctaataaaattgagacctggtgtcttacctcaggatgttggactgtgtcacaacggggattatttagcaattttctttgttatagtcagggattgaattgccaaacccagccatgtgaattcaatcarctagaatgccttgaacatctactgtgttctggctttcagttgcaaggtatgtgtggcaagggaaaatgactcaaagaaaatccttttccatcacataacaaatgaagtcaaagcccatgcctagcacatgatgtgtcaatagcctcatcttagtattcccatgactggacttaccagtagtttgtcaataattgttgcaaagaaaatcatcctttaggacataacataaaacatttgtgaatgcaaattttttcctttaaggaaaactatagcttttactgaaataaattttcgtcttaggaatttaattagcatacacaatacaaa

SEQ ID NO: 327578 - DNA, 599 bp, Homo sapiens
agtatgtattctgaatatgatatgatggcaatagcactttacctctgagatctttctccagataacccataacctcagccttatcatgagaaaaacatgagaaaaattccagtgtggagtattgtacaaaatacttgctactactcctcaaaatactcaaagcccttaatgtggtttggctctgtgtcctcaaccaaatctcatgtcaaattgtaattcccatgtgtcagaggaggggcctggtgggaggtgattgaatcacggggcggacatccccccttgctgttctcttgatagtgagygagttctcatgagaactggttgtttgaaaagtgtgtagcatatcccccttcactctctctctctcctgctgtcaggagaaggttcttgcttccccttcgcccttctaccacgatagtaagtttcctgaggcctccccagccatacctcctgtacagcctacagaactgtgagtcaaacctcttttctttataaactactcaatctcaggtagttctttataacaatgtgagaacagactaatatagtcctcaaaaacacaaccaaaaaaagtatatgaaattgccatagccaagaag

SEQ ID NO: 327579 - DNA, 599 bp, Homo sapiens
agtatgtattctgaatatgatatgatggcaatagcactttacctctgagatctttctccagataacccataacctcagccttatcatgagaaaaacatgagaaaaattccagtgtggagtattgtacaaaatacttgctactactcctcaaaatactcaaagcccttaatgtggtttggctctgtgtcctcaaccaaatctcatgtcaaattgtaattcccatgtgtcagaggaggggcctggtgggaggtgattgaatcacggggcggacatccccccttgctgttctcttgatagtgagtgagttctcatgagaactggttgtttgaaaagtgtgtagcatatcccccttcactctctctctctcctgctgtcaggagaaggttcttgcttccccttcrcccttctaccacgatagtaagtttcctgaggcctccccagccatacctcctgtacagcctacagaactgtgagtcaaacctcttttctttataaactactcaatctcaggtagttctttataacaatgtgagaacagactaatatagtcctcaaaaacacaaccaaaaaaagtatatgaaattgccatagccaagaag

SEQ ID NO: 327580 - DNA, 538 bp, Homo sapiens
tgttgttatttgcatcacttcaaggactttgcttgctttctagcttttagcatgtctttatgcagagaatgccatctagttttcagtcatggggtaggtatggaagacatggtggtctcctaaaccacttagccatcttgaaaaaccaggctcagaaaaactgtgtttactgaatgcctgatgcaaaatagacacaaaataagcattccagaaatggtgttgacagaagaatataagccagttatctggccctcttgttcacttctgactgaatgccatctgttccttagttataacactmactaatgaggggagtgactggatacccccacaatccagaaagtacaaaaatattgttattttactaacaaattaagaatatcgcagggtaaaatcatgggcaagagtgtcagacagcttaatgccaacgtgtttttctaccacccactaattggcagatcatcaactgatttcacttccctttgcctccattttatctttaggaaacatggggaaattaatagtatgtccctaagag

SEQ ID NO: 327581 - DNA, 577 bp, Homo sapiens
atgtacatccttccaaaagtattagtttgttcttttttcttttcttacactcactgatgcatagttttagctttccttttaaggaaatgaagtcctattttgtccactgttcttactatggcaaacaaaatgagaataaatcctagagtagttagtgctccatttttcaagggactcattaaaaatgaacgctagagaagaagcaattactgttaacaaacataggcataaaacacaaataaaggaccattaacacggaaaaataattactcaatctttcatccagacgcttttgtcagttacatgcgctgacactgactaacaatttcgtgagaggctgctgccggctgcagttcatccgttcaacatttcccctcttaygtctcacaggaagagaaaaatgatcagtactgttagtgaattctactaaactctgtttaatacatggcactggctcctctgcttttctttctttttgtttttcagattttatgcttcttatgaatacaaagtggtgatttaaaaattatcattatgagagctgttattaatgaatgtatgcaaaggtaaaataaat

SEQ ID NO: 327582 - DNA, 473 bp, Homo sapiens
ttcagtgactgagttttctcccccaaataagaaaattgattaaagggatcttcaatttttttctaagtactgtattctgtgatactaacttacagctatgtatacctccaacccaatcctctgcccatctttctggttcctgttaacagctaatgagcaacttaccaggagattgctgaggcctcatgatctctgcttcagggctgccactgcttagagtagcggctgaatgagtaaatctacacattcaatcaaaacttaaaygtttatagaaaatgaaaatgcaggttactttatatgccagttagacttaaacctacaataaagggtaattgaagctttttaaaagaaaaatatactttgcacatgctgctatgaaagaggtctatgttcagtcaaataaacatcagccctactccaacgaagcacttcggccaacttaccatggcatggttttgtcagttattctacag

SEQ ID NO: 327583 - DNA, 365 bp, Homo sapiens
tagcaaccagcgagtttctcaatcagtaccagagtcaacgtcttaatattctctggaacaaggatgttcagkgactgactcatatggctctgcccactttataatgaagaaataaaagtgtaacaataaattgaccagatctggccaacagacacaggagaaagacagataaagaatcttgcatgggagaacttaaaggactagttttgaaagtgtcagacgtcactttcgaccacattctactgctcgcactttctaaggccacacctatttgctagggagactggaataggtaggatggctgtttgttaggagatgggaaaaccgattcggtgagcttccattcagtctctgccagcatggtg

SEQ ID NO: 327584 - DNA, 559 bp, Homo sapiens
ttcctctaactcacttcctttggaggagtttactttcctgcttcatcggtcttgagcttggtcgtgtgacttgctttgggcaaagtgggtagtgtatgcttgccagtcctcttgcatttggaatcactcttgtctgacttggctagtggaaatcaaatggaaatggcagcaagataattccatcatgtgttcccatytgctgcttgtgctactaccattgccatgagaagaagatgtgctggctggtttgtgggtccaaggagaaggaaagatttatgaaacagacctcactgtttgaaacctaactgtttcaagttgccaagctcagtcaagctcagtctaaatttgccaacctaacagatgtatgaaatccatacagctgagattagcaccatggccccaagtggtctaaagaaacctgagaaataacagcatattttaatataacactgaaattttgtcctggttgttaggcagcaatagcttactgatagaatgctgcaatgctctatttgtggggtagagagtttttttacatacagcgtgtcttgttttattg

SEQ ID NO: 327585 - DNA, 599 bp, Homo sapiens
agttttaagatttatatggtaaaatctattattggctcatgatctctcatctccgttacatttggaagcacgattatcctctctgttgggcaatgacttcttccccattctttccttctatatcaagtcattctctgtctcctgatattacttacagataagttttccatcatctctattgctttcaccatcctatttctttccctccttagaccctactggtcttaccagtacatttactttccttgttccttgccttgtcttcttcacagagttaccagagtgataaggagaacacagacatttactttccttattccttgccttgtcttcttcagagttaccagagtgataaggagaacacctgaaaaggtctctaaagcatatcaatgccttcccgcttccaaaatgctaartttcttcagatggcaacagacttttaataatctagcccttgcctacctttgtaactttattttcatagttctctgaatttcaccttttatagtagaacatcattgaactgagtgtaattccatgtctggtttagttactcattcttaaatggccatctctccacttgcttttattatttttat

SEQ ID NO: 327586 - DNA, 599 bp, Homo sapiens
agttttaagatttatatggtaaaatctattattggctcatgatctctcatctccgttacatttggaagcacgattatcctctctgttgggcaatgacttcttccccattctttccttctatatcaagtcattctctgtctcctgatattacttacagataagttttccatcatctctattgctttcaccatcctatttctttccctccttagaccctactggtcttaccagtacatttactttccttgttccttgccttgtcttcttcacagagttaccagagtgataaggagaacacagacatttactttccttattccttgccttgtcttcttcagagttaccagagtgataaggagaacacctgaaaaggtctctaaagcatatcaatgccttcccgcttccaaaatgctaagtttcttcagatggcaacagacttttaataatctagcccttgcctacctttgtaactttattttcatagttctctgaatttcaccttttatagtagaacrtcattgaactgagtgtaattccatgtctggtttagttactcattcttaaatggccatctctccacttgcttttattatttttat

SEQ ID NO: 327587 - DNA, 575 bp, Homo sapiens
attattaatttgcctatccagtctcactccctacccttctccatcctgtactgtgttcctggaagtagtattttttttttcatttattcgctcatttaatcattatggatgttgtcacctggatttcctgtcttctagtttgcagttgggaatggtcaatggaaagccctggtagtaaactgaaaagtgggagggagtgaagtaataaagttggggatattgtcccatgtccacaacttgctgtgtcataggttggcatggactgtgtttccagtcaatgaagactgttacctatcctatagtgccatcattctgtcggggtttcaatgatcactcctcttttctcattcggacttggatttggtaacagttcccagctcttgttaattctggaatgctgcacaactatttttaagaaattattttattatacatattttcctctataataccaaatgagcataccatctcattcctcttgaaactctaacctatcagatgatacatcaagcattatgggagrtgaagaatatggaaaagaataggaattaagagacttccctaagtaacttgca

SEQ ID NO: 327588 - DNA, 564 bp, Homo sapiens
atagtcagttaaatgtatgtttcatgcttaatttgaaaagygttcccaagaaagatactgtagtcacagcaatcttattccacacaattaatttaatttcaactaatgtttattagaaaaaagatgcagatcccaggttccaagatggccaaataggaacagctcgtctacagctcccagagtgagtgatggagaagatgggtgatttctgcatttccaactgaggtacggggttcatctcactgaggcttgttggacagtggctgcagcccacgcagtgtgagccgaagcagggcggggcatcacctcacctgggaagcacaaggagtcggggaattccctttcccagctaagggacgccatgacagatggtacctggaaaattgggaccctcccaccctaacactgcacttttccaatggtcttagcaaacagcacaccaggagatgatatcccacacctggctgggaggatcccacgcccatggagcctcgctcactgctagcacagcagtctgagattgaactgcaaggcggcagtgaggctgggggtggggtgtcaacc

SEQ ID NO: 327589 - DNA, 564 bp, Homo sapiens
atagtcagttaaatgtatgtttcatgcttaatttgaaaagtgttcccaagaaagatactgtagtcacagcaatcttattccacacaattaatttaatttcaactaatgtttattagaaaaaagatgcagatcccaggttccaagatggccaaataggaacagctcgtctacagctcccagagtgagtgatggagaagatgggtgatttctgcatttccaactgaggtacggggttcatctcactgaggcttgttggacagtggctgcagcccacgcagtgtgagccgaagcagggcggggcatcacctcacctgggaagcacaaggagtcggggaattccctttcccagctaagggacgccatgacagatggtacctggaaaattgggaccctcccaccctaacactgcacttttccaatggtcttagcaaacagcacaccaggagatgatatcccacacctggctgggaggatcccacgcccatggagcctcgctcactgctagcacagcagtctsagattgaactgcaaggcggcagtgaggctgggggtggggtgtcaacc

SEQ ID NO: 327590 - DNA, 599 bp, Homo sapiens
agacaagagagttatttccagagagcaggatcaggatctaatcaggaccttcctccaccattagggcacaggcacctcatgatgccagcctggaacaggttcatcttgctgtgggctaatgaccactatgtgtctcccataattctgtttttcagatgcgcgtatcaatcatagttaccctgtcttttttctaccatttgccatcatagagtgggaaggtacagatcatttgccttcttgtatactgtgtcaggaggagtcacatytgagcttgatgaagcagtgtgtggttactcagaggttgtggactttgagtagaaggtagtgactggataggaatttgatttatctcatttgggaaaaaggtgtgcattctatgcatgtgagaagggtaaagatatatggtgcctaaaagggcagactatgccagtgattgggttgatatttaccaaatccatttcctcattcacctgggaactcaggcatactacattttcaagacatgcctctcagacaggattctgcatcatttaatttcattttctgaacatcactttaacccctaactaaaacctgctacaagaataatacaagattaa

SEQ ID NO: 327591 - DNA, 614 bp, Homo sapiens
ccctttttttattcacttctctgggaatttgtggttacaagttgacagtaggctcactctggggcccagacatctgaatcctgacccaccccttcaattctcctccccatctctatttcaattaattccctctataccttcattaacaaaaagtttaatgttctctttttctcatacaaaaatacttataaagaggttcagaatctcccagaaagaaattctagtatttgtaacatgaacacttactcacactgcctctgggaaataatattttactcttaagagtaccaagaaagtactgtctttggaaactgttttagtcagggctctctagagtgacagagctaataagatatayacacacacacacacacacacacacacacacatataatagcagttatatatgtataaatatatatacatataaagtagtttattaagcagtttattaagtagtattaactcacacaatcacaaggtgccacaacaggccatctgcaagctgaggagcaaggaagccagtccaagtctcaaagctgaagaacttggagtctgatgtttgagggcaggaagcaaccagcatgggagaaagatgtaggctgggaggctaa

SEQ ID NO: 327592 - DNA, 613 bp, Homo sapiens
atgaatcacttcatttgtacaaacatagaacttgcgatcacaaatgtgggaaaaaaatcattccctaccaactcacacccaagaaattcatgggaatgtccctgatccagctggagacaaatgcctatccataaaaaaaaaaaattcaggaaaatgggggrccataattagccccacctaagtcctgaaatgcttatgtctagtaatgatgcattttctgtctcctaaagaaagacagagaaagaagtattgggttgagacaatttctatttttcttttacctcagttttctcatctgcaaattgcagataatggtacttattctataattttcatgagatgtcaagggcacaaggtatgtagtcattagaacaattgttgaccaagataatagagttaataaactgtagctgtcattaaggtacttatgttaaaagagtcatataaaatcattgttagaacaccagctcttctattacatgggatggtacctaaatatttagtttttgcctacattgcatcatttgaattccatcataaaagacacatttctcagtcttaaatatttttattgactaagcatgttctcatgctgtcatgtcattgctgaagt

SEQ ID NO: 327593 - DNA, 576 bp, Homo sapiens
agtgagaggggaaatgaatgaaagtagaaatggatactttgcaaacagcaattttggaaaaacagacagccagcttgccagaggcagacatggtggaggaggtgaagtgtaataggcattgcttaaatcctttgtgattggacaaatctgactccttaatattccagaaaaaagaagacmcctaacaatggtagatttagggataactcagctagatgtatgtgaaaggataagcggagcttttctgtttaaattttaaaatgggatataaaagtagaggtgctccatgacttacaacagaatgacatcttgataaacccattgtaagttgaaaatattgtaagttgaaaatgcatttgatagacctcacttaccaaacatcatagcttagctaataaacctcacctaccagtcatcataccttagctttgctgactttaaacatggtcagaacacttacattaacccgtagttgggcaaaatcatctaacacaaattctattttataaaaaaagtgtttaatattttatgtaatgtattgaatacagaaagtacaaaaaaaagaaggttgtatgg

SEQ ID NO: 327594 - DNA, 576 bp, Homo sapiens
agtgagaggggaaatgaatgaaagtagaaatggatactttgcaaacagcaattttggaaaaacagacagccagcttgccagaggcagacatggtggaggaggtgaagtgtaataggcattgcttaaatcctttgtgattggacaaatctgactccttaatattccagaaaaaagaagacccctaacaatggtagatttagggataactcagctagatgtatgtgaaaggataagyggagcttttctgtttaaattttaaaatgggatataaaagtagaggtgctccatgacttacaacagaatgacatcttgataaacccattgtaagttgaaaatattgtaagttgaaaatgcatttgatagacctcacttaccaaacatcatagcttagctaataaacctcacctaccagtcatcataccttagctttgctgactttaaacatggtcagaacacttacattaacccgtagttgggcaaaatcatctaacacaaattctattttataaaaaaagtgtttaatattttatgtaatgtattgaatacagaaagtacaaaaaaaagaaggttgtatgg

SEQ ID NO: 327595 - DNA, 597 bp, Homo sapiens
tcatagcttagctaataaacctcacctaccagtcatcataccttagctttgctgactttaaacatggtcagaacacttacattaacccgtagttgggcaaaatyatctaacacaaattctattttataaaaaaagtgtttaatattttatgtaatgtattgaatacagaaagtacaaaaaaaagaaggttgtatgggtattggaaatatagtttctactgaatgtgtatttctttcacacaattttaatgtcaatttgtaactgcagcctgggcaatggagtgaaaacttgtctttaaaaaaaattgtaagttgaactatcataatttggggacccgctgtaattggcccaatgctataaaactcaaaaagaccagaataacaccatgggttatcaaatatttgcttttacagagttttaccattttcaatgagctaatgtgtattttatctcagttgacgttcaagtaacacagtgagataagctggacaaacatatatatcctgtaatatgggacaaggaaagtgcaggtcaagaacttcggaaatgacagatttgtgttacgttgtagcaacaaggaaagtatgagtggtgctc

SEQ ID NO: 327596 - DNA, 597 bp, Homo sapiens
tcatagcttagctaataaacctcacctaccagtcatcataccttagctttgctgactttaaacatggtcagaacacttacattaacccgtagttgggcaaaatcatctaacacaaattctattttataaaaaaagtgtttaatattttatgtaatgtattgaatacagaaagtacaaaaaaaagaaggttgtatgggtattggaaatatagtttctactgaatgtgtatttctttcacacaattttartgtcaatttgtaactgcagcctgggcaatggagtgaaaacttgtctttaaaaaaaattgtaagttgaactatcataatttggggacccgctgtaattggcccaatgctataaaactcaaaaagaccagaataacaccatgggttatcaaatatttgcttttacagagttttaccattttcaatgagctaatgtgtattttatctcagttgacgttcaagtaacacagtgagataagctggacaaacatatatatcctgtaatatgggacaaggaaagtgcaggtcaagaacttcggaaatgacagatttgtgttacgttgtagcaacaaggaaagtatgagtggtgctc

SEQ ID NO: 327597 - DNA, 597 bp, Homo sapiens
tcatagcttagctaataaacctcacctaccagtcatcataccttagctttgctgactttaaacatggtcagaacacttacattaacccgtagttgggcaaaatcatctaacacaaattctattttataaaaaaagtgtttaatattttatgtaatgtattgaatacagaaagtacaaaaaaaagaaggttgtatgggtattggaaatatagtttctactgaatgtgtatttctttcacacaattttaatgtcaatttgtaactgcrgcctgggcaatggagtgaaaacttgtctttaaaaaaaattgtaagttgaactatcataatttggggacccgctgtaattggcccaatgctataaaactcaaaaagaccagaataacaccatgggttatcaaatatttgcttttacagagttttaccattttcaatgagctaatgtgtattttatctcagttgacgttcaagtaacacagtgagataagctggacaaacatatatatcctgtaatatgggacaaggaaagtgcaggtcaagaacttcggaaatgacagatttgtgttacgttgtagcaacaaggaaagtatgagtggtgctc

SEQ ID NO: 327598 - DNA, 597 bp, Homo sapiens
tcatagcttagctaataaacctcacctaccagtcatcataccttagctttgctgactttaaacatggtcagaacacttacattaacccgtagttgggcaaaatcatctaacacaaattctattttataaaaaaagtgtttaatattttatgtaatgtattgaatacagaaagtacaaaaaaaagaaggttgtatgggtattggaaatatagtttctactgaatgtgtatttctttcacacaattttaatgtcaatttgtaactgcagcctgggcaatggagtgaaaacttgtctttaaaaaaaattgtaagttgaactatcayaatttggggacccgctgtaattggcccaatgctataaaactcaaaaagaccagaataacaccatgggttatcaaatatttgcttttacagagttttaccattttcaatgagctaatgtgtattttatctcagttgacgttcaagtaacacagtgagataagctggacaaacatatatatcctgtaatatgggacaaggaaagtgcaggtcaagaacttcggaaatgacagatttgtgttacgttgtagcaacaaggaaagtatgagtggtgctc

SEQ ID NO: 327599 - DNA, 569 bp, Homo sapiens
agtatgtctgcaaaattcactctcttatggacccagaaatactgtctctgctgcattcagctcacttcagctaccctagtattcttgctcttattcagacatattgggctcctctcatctcagctctcatttattatgcctggaaagtccttccttttacatatcttactggattttcccctctcttccttcatgccttgtctctatgatacattcctttattattttatttgaaattgaaakctcctcctcctcttccttctaattgtagtccctaaccctttgagatgctttatttttatccatagcacttaccacatcggacattataattacttttaaattaatttgttgtttacttgtctcccatcaaatagaatgtagttttctgtgacaggtagcagttgtggttgtatcactagtcctataacaatggatggtacatggtagacactgagatgtttgctgaatgacttaacgaacttactgaaaattcttcaataagagtctctctcatagaattccgattcactatgtcagagtccacatatatctgagttaaaaaataa

SEQ ID NO: 327600 - DNA, 356 bp, Homo sapiens
tagttgttatgggaagatatttccttttccaacgtaggcctgaaagcgctccaaatgtccacttccatatactaaaaaaagagtgtttcaaacctgctctaccaaagggaatgttctactctgtgacttgaatkcaaacatcccaaagaagtttctgagaatgcttctgtctagatttgatctgaagacaatcccgtttccaacgaaatcctcaaggctaggcaaatatcctcttgcagattccagaaaaagagtgtttcaaaactgctccttcaaaacggtggttcaattctcttagttgagtacacacatctcaaataagtttctgagaatgcttctgcctagttgttacggga

SEQ ID NO: 327601 - DNA, 356 bp, Homo sapiens
tagttgttatgggaagatatttccttttccaacgtaggcctgaaagcgctccaaatgtccacttccatatactaaaaaaagagtgtttcaaacctgctctaccaaagggaatgttctactctgtgacttgaattcaaacatcccaaagaagtttctgagaatgcttctgtctagatttgatctgaasacaatcccgtttccaacgaaatcctcaaggctaggcaaatatcctcttgcagattccagaaaaagagtgtttcaaaactgctccttcaaaacggtggttcaattctcttagttgagtacacacatctcaaataagtttctgagaatgcttctgcctagttgttacggga

SEQ ID NO: 327602 - DNA, 356 bp, Homo sapiens
tagttgttatgggaagatatttccttttccaacgtaggcctgaaagcgctccaaatgtccacttccatatactaaaaaaagagtgtttcaaacctgctctaccaaagggaatgttctactctgtgacttgaattcaaacatcccaaagaagtttctgagaatgcttctgtctagatttgatctgaagacaatcccgtttccaacgaaatcctcaargctaggcaaatatcctcttgcagattccagaaaaagagtgtttcaaaactgctccttcaaaacggtggttcaattctcttagttgagtacacacatctcaaataagtttctgagaatgcttctgcctagttgttacggga

SEQ ID NO: 327603 - DNA, 454 bp, Homo sapiens
tctatgaaagggagtgttcaacttttgacttgaatgcaaacatcagaaagcagtttctcagaacgctgctgtgtgctttttatatgtattcccgcttccagcgaaatccccaaagctagccaaatatccacttgcagattccagaaaaagagtgtttcaaaactgctccttcaaaacggtggttcaattctcttagttgagtacacacatctcaaataagtttctgagaatgcttctgtctagttgttatgggaagatatttccttttccaacataggcctgaaagcgctccaaatgtccacttccagatactacaaaaggagtgattcmaacctgctctatgatagggaatgttcaactctgtgtcctgaatacaaacatcacaaagatgtttctcagaacgctgcagtctgcaatttgtatgaattcccgcttccaacgaaatcctcaaaac

SEQ ID NO: 327604 - DNA, 308 bp, Homo sapiens
gcttctgtccagtttttatgggaagatatttcctttttcaccttagccctgaaakcgctccaaaagtccagttccagatactacaaaaggagtgtttcaggactgctctatgaaagggagtgttcaacttttgagttgaatgcaaacatcagaaagcagtttctcagaacgctgctgtgtgctttttatatgtattcccgcttccagcgaaatccccaaagctagccaaatatccacttgcagattccagaaaaagagtgtttcaaaactgctccttcaaaacggtggttcaattctcttagttgagt

SEQ ID NO: 327605 - DNA, 308 bp, Homo sapiens
gcttctgtccagtttttatgggaagatatttcctttttcaccttagccctgaaagcgctccaaaagtccagttccagatactacaaaaggrgtgtttcaggactgctctatgaaagggagtgttcaacttttgagttgaatgcaaacatcagaaagcagtttctcagaacgctgctgtgtgctttttatatgtattcccgcttccagcgaaatccccaaagctagccaaatatccacttgcagattccagaaaaagagtgtttcaaaactgctccttcaaaacggtggttcaattctcttagttgagt

SEQ ID NO: 327606 - DNA, 308 bp, Homo sapiens
gcttctgtccagtttttatgggaagatatttcctttttcaccttagccctgaaagcgctccaaaagtccagttccagatactacaaaaggagtgtttcargactgctctatgaaagggagtgttcaacttttgagttgaatgcaaacatcagaaagcagtttctcagaacgctgctgtgtgctttttatatgtattcccgcttccagcgaaatccccaaagctagccaaatatccacttgcagattccagaaaaagagtgtttcaaaactgctccttcaaaacggtggttcaattctcttagttgagt

SEQ ID NO: 327607 - DNA, 550 bp, Homo sapiens
gtagttattaactatgtggtggtgcctaacatgaaagaacattttaaaaaacaaggactacagtttaatcaccatctctgcctcctttcaaaatctgtggttacctgctttcgraaccatagctttcttctttctttcttcatgggtctttctacatcctgttattgtcatggcaacggcgctatgattcttttccatcagaagaggaaaggactaaactgtttcattctccaacactgtattactttagaaacataataataaatattattcatcaaaaaccctgttcatgatgtaggagtctggccaaaaagtttttttttgaggctccttctagctccacaacccaactgcctgtgaatgactttacactcaagatgttacacctagtaaattaacgggagaaaggtaagatgaaatccattcatatattggactgccttttaatcattcacaatgaaagaaatctcaggcattgccaatgtcatttaaattgcattcatatttaaacatgacttaaccatattaccaggcgtttccaactctgagt

SEQ ID NO: 327608 - DNA, 567 bp, Homo sapiens
ttttcacactaagtaaaatcatcaagccttatattatgctcttcttgaactcctgttgtactaaatggagctttcttatttacaataggcaaatctagtctggtgagcgtatcagtctctgtgtagactgcagggagtgagatgctagtttggttttgttgatgctggcaaagcatgagactgcataaatgaccatttcattctaaaagaacctagctgtaatgagatgggtagtttctyctatttcaacttaaagcttcactcctctaacttaactttttgcttgacatagttgaggaatatggtagaaatccataaataggtaaaggtagttatgaaatctccccatgaatgataatctaccatttgtcttcactccattactaattacacagacattaacagtatttttttaatgaggcatttggggatgttttttcctcgtagttagaacatagttttaatatattcaaaatgcacataaatatggaggagaaattatccaaaaaaaagtaaaatttatataaatgctaattaaggtcgtgcatcttgaaaggtaaagcaaat

SEQ ID NO: 327609 - DNA, 336 bp, Homo sapiens
tggattctacgtttaagagtttatgctttcaatactcactcttggagcactagggctgtgctagacaggagaattaacagtctttgtaaaaatgaacagtctctaccctcttcagctgcggtctattggagaactagaccttaatcaaacacacacacaaataaacataaacttacaaatgtgataaatgccaggaagagtactattgatttgatgaggaccaacstaggtacttctagctaacaggagaacagggctgagactggaagtgagtatgggtgttgcctcagaggacagaagagcttttgggcagtggaagagccagggcaaggcttc

SEQ ID NO: 327610 - DNA, 577 bp, Homo sapiens
tctgtcactcatcggtttgtcccgctcttcacagtgtaagacagtggaggtatcagccctgtcccaggtgtatccagaagtggctgaaatctgcaggcaggtcccagacaggctgaaggtgaaataaaccaaaatttaaagttacaatgaaaaactctgaataactctcagcctaaagcatctcagcaaattagcccacttgacttgagtctttcatttctctgtccaagtagagcagctgctcctgaagggcaaggccattacccagagcccaggccccactgcctttgtggcacacaagctaggatggctccacagctgctctctgaggggagacacatccccscttgctcctggggagcccaatatgggtggctctgttaggaatgatgtgagtcttctctctttgaaaaaacaaaaaggtaaaatagctacaactgtcacttctagcccatgtttcagtctgttgccaacataatgatgatactatttcaggtaagagaagcagcagaaataagaagtctggtctttttaaaatctgttttttctattaaaaaaaaaactagggaaaaaaatc

SEQ ID NO: 327611 - DNA, 575 bp, Homo sapiens
gggagctgggcaggatggagttcacgggttgtgcaatggcccacttttgccaaggaaagagacctgtgagccgaaagtgcctatctcctctgcattcctcccattttcttccacctctcttcttctttccatcttattctctcattctctgctccaactttccctccctgctctttgttttcctttccttaactctgttcctttattcaccttcttcgtttctatgtgtgttataggaaatgtgactaaaaccaacaaggtagacagaaascctcatgatatttttttcctggtcaagaaagaccaggaaattatggtgggaaaagaaataccaatagagttcctaacaatcatgatatccatgatgtgtgaatccaacagtggcatggtgctttatatcactgtatactcagaacacagagctgcttttgcataggcatgaagattcttgaatgaatcagtgaggatggagagggttgccatttatttggggtgatttttagtgaaactagaaagttctctttaacatgaaacctctcatttactatgtgtcattgagatgtaccttgaaattt

SEQ ID NO: 327612 - DNA, 600 bp, Homo sapiens
atatctgataaatgccagcataaaacagaaactcaaatttgagtactttggatctcagtacttcttgaagatatctagagggctcacacaggactcactgtagcaactaggctccaggaatattctgctccaaaggattggtgatgaaatccttggacataaagttaccattgacataagcttttgaatctcgagtttcctgaagagaattagctaggctacactctgaaaccatttaagtgtcaatatatttagttagctctgattgcttaattaatatgaacaaatttaatagaggtaaatatagcaaagattattttgaagttattaaaatatcagcccacatatgtggctatcatgatagaagaatcattgtaaccccaataccacatatcaaggactgcctgaatgggaggataccctgcttattctagttcaaatattacgaaacataaaagtagctagctagccaaagggtatgaaaataaagtgcctgctcctgggaactttatgatcccccaaagccagtacctcagtgaattacattaacctrattaaaatatcacatccttttattatgttatgttattcttactataa

SEQ ID NO: 327613 - DNA, 589 bp, Homo sapiens
ggtagcaaacctgcacatataccctctgaatctaaaataaaagttgtaaaaacagttcaagtgaattatgcagcttttctctgcaaaacttgtcaaaagtgatttgcaacatgatctcggaaactttctctaggcatgcattctgcactaatccttcattaatgtgcagctccagactgttagctatgkatgcacaaaactccagaggtgtgcaaaaaggcatgactaagcagactggcattcctcaccgtcacgcgctgtcctctatcagacatcctaaaccctgaacacagcacagggagagatttgtcacatcgggacggcagatagaagaagaggataaagagaccgaggtgcagagggaacagggtgaagagaaaggagtagaaggagggtggcctccagcccagcttcaaagctggactcagcctggtttgcttggtaatctagatttttagtaaatcatgttttaaatggcaaaaagccaatatgggcatctttgttttaaacaaagtaaacatactatgttgctttgtttctgaggctcctggaatattcttgctagctgggcctgtactgtgtgtacctt

SEQ ID NO: 327614 - DNA, 589 bp, Homo sapiens
ggtagcaaacctgcacatataccctctgaatctaaaataaaagttgtaaaaacagttcaagtgaattatgcagcttttctctgcaaaacttgtcaaaagtgatttgcaacatgatctcggaaactttctctaggcatgcattctgcactaatccttcattaatgtgcagctccagactgttagctatgtatgcacaaaactccagaggtgtgcaaaaaggcatgactaagyagactggcattcctcaccgtcacgcgctgtcctctatcagacatcctaaaccctgaacacagcacagggagagatttgtcacatcgggacggcagatagaagaagaggataaagagaccgaggtgcagagggaacagggtgaagagaaaggagtagaaggagggtggcctccagcccagcttcaaagctggactcagcctggtttgcttggtaatctagatttttagtaaatcatgttttaaatggcaaaaagccaatatgggcatctttgttttaaacaaagtaaacatactatgttgctttgtttctgaggctcctggaatattcttgctagctgggcctgtactgtgtgtacctt

SEQ ID NO: 327615 - DNA, 589 bp, Homo sapiens
ggtagcaaacctgcacatataccctctgaatctaaaataaaagttgtaaaaacagttcaagtgaattatgcagcttttctctgcaaaacttgtcaaaagtgatttgcaacatgatctcggaaactttctctaggcatgcattctgcactaatccttcattaatgtgcagctccagactgttagctatgtatgcacaaaactccagaggtgtgcaaaaaggcatgactaagcmgactggcattcctcaccgtcacgcgctgtcctctatcagacatcctaaaccctgaacacagcacagggagagatttgtcacatcgggacggcagatagaagaagaggataaagagaccgaggtgcagagggaacagggtgaagagaaaggagtagaaggagggtggcctccagcccagcttcaaagctggactcagcctggtttgcttggtaatctagatttttagtaaatcatgttttaaatggcaaaaagccaatatgggcatctttgttttaaacaaagtaaacatactatgttgctttgtttctgaggctcctggaatattcttgctagctgggcctgtactgtgtgtacctt

SEQ ID NO: 327616 - DNA, 589 bp, Homo sapiens
ggtagcaaacctgcacatataccctctgaatctaaaataaaagttgtaaaaacagttcaagtgaattatgcagcttttctctgcaaaacttgtcaaaagtgatttgcaacatgatctcggaaactttctctaggcatgcattctgcactaatccttcattaatgtgcagctccagactgttagctatgtatgcacaaaactccagaggtgtgcaaaaaggcatgactaagcagactggcattcctcaccgtcacgcgctgtcctctatcagacatcctaaaccctgaacacagcacagggagagatttgtcacatcgggacggcagatagaagaagaggataaagagaccraggtgcagagggaacagggtgaagagaaaggagtagaaggagggtggcctccagcccagcttcaaagctggactcagcctggtttgcttggtaatctagatttttagtaaatcatgttttaaatggcaaaaagccaatatgggcatctttgttttaaacaaagtaaacatactatgttgctttgtttctgaggctcctggaatattcttgctagctgggcctgtactgtgtgtacctt

SEQ ID NO: 327617 - DNA, 569 bp, Homo sapiens
gaagaaataattactatttcgcttaggtgaggcttcacaatcaytttacaaagtaattttgtacacatatatcatttcacaatttaaactatatgttgtttgtggatttgaacttagataacagccttcataggtacagcttgcctcaatttccttaatacatattagctagttcttcctttgatgattaagatagccttttatgtataaaatataccgttctgtttcagttaagccccaaattattaattttggataactgaatattttcaaagaatccaaatatccttagaatactaatactttcactatacatctgtttaaaaatgaatacaaatgaactttcactactccctggttttgaaggaagcccattcttcccaagccataccaagtgagaaatgttgcctgcactatgtgcctttctcacaaaactgatgccctgtggcaaagcaggaagatcaaattatatgaagaatgagaacaaagttatcccccaggttttgtcatttctagaacaagacagactatttttaggttttcaaaattcattactgaattttgcatca

SEQ ID NO: 327618 - DNA, 504 bp, Homo sapiens
gaaaatgatgaactgggggattctgtctcccagcttcagaagcagacactgagcctcaaatctgctaagattgccctgaatgagagtcttatctcctgtagagaaagagctgaaattgtggaaaaacagacaagctcttatcatgcaagtggctgacctgcaatgaaagatgcatgcacagcctcgccaggwgactactgttaaagtgagggcattgattggaaaagaatgggaccctgcaacttggaatggggatgtgtgggaagattctgatgaaactgaggacactgagtttgtaaactctgatgaaccttttttttgccagaagaaagagctttcccatccccagtagagtcaacatcccctccctgacccatactgccatcagcctttcgacctttgtctgaagagataaaccctgcactgcctgaggcaacagtgactctcctgaggcagttgtcaagcaagataatgttgattctcctgaggagccaccctcaatac

SEQ ID NO: 327619 - DNA, 538 bp, Homo sapiens
agtggctgacctgcaatgaaagatgcatgcacagcctcgccaggtgactactgttaaagtgagggcattgattggaaaagaatgggaccctgcaacttggaatggggatgtgtgggaagattctgatgaaactgaggacactgagtttgtaaactctgatgaaccttttttttgccagaagaaagagctttcccatccccagtagagtcaacatcccctccctgacccatactgccatcagcctttygacctttgtctgaagagataaaccctgcactgcctgaggcaacagtgactctcctgaggcagttgtcaagcaagataatgttgattctcctgaggagccaccctcaatacctctgtttgcttctagacctataactagactaaaatcccagcagcccctagaggtgaggttgagagtgtgacccatgaggaggtgctctacacttgaaaagaactgcttgagttcttcaatttatataaacaaaaatctggagaacaggcatgggaatggattttaaaggtgtgggataat

SEQ ID NO: 327620 - DNA, 600 bp, Homo sapiens
tctctcaaagaaaaaaaaaggayattttaaatggtttccatcatgcagatgttccataatttatttaacttgttcttcattgttgggcatttagtttgttttacagtgaaaatttgttttcacaatactgtgaatcaatatccttgattcacaaggatattataatactgggatcagtatccttgtttataaattctgggccaaaaatatttccattttagacattcctaaaagtaaaattactagtcaatggtcataagtattttaaggaaattaaaaatattatcaagccaagacaatgggaaaaaggccttaaaagcatttcagaaggcttcaggacagtcctcccatcaccagcccaggatcacagtaggaaagaatgggttttggggccaggcccaggaccctgctgccctgtgaagcctcagaaaactgctcccagcatcccagctgctagggctccagcctttgcttaaagggcttcaggtacagctcaggctgccgcttctgagagtgcaaactgcaagccttgggggcttctacgttgtgttgagcctgcaggcacacagaatgcacaagtgaaggaggcttggcagcttc

SEQ ID NO: 327621 - DNA, 600 bp, Homo sapiens
tctctcaaagaaaaaaaaaggacattttaaatggtttccatcatgcagatgttccataatttatttaacttgttcttcattgttgggcatttagtttgttttacagtgaaaatttgttttcacaatactgtgaatcaatatccttgattcacaaggatattataatactgggatcagtatccttgtttataaattctgggccaaaaatatttccattttagacattcctaaaagtaaaattactagtcaatggtcataagtattttaaggaaattaaaaatattatcaagccaagacaatgggaaaaaggccttaaaagcatttcagaaggcttcaggacagtcctcccatcaccagcccaggatcacagtaggaaagaatgggttttggggccaggcccaggaccctgctgccctgtgmagcctcagaaaactgctcccagcatcccagctgctagggctccagcctttgcttaaagggcttcaggtacagctcaggctgccgcttctgagagtgcaaactgcaagccttgggggcttctacgttgtgttgagcctgcaggcacacagaatgcacaagtgaaggaggcttggcagcttc

SEQ ID NO: 327622 - DNA, 457 bp, Homo sapiens
aaaacccaaagctacttggcaagctaatggaaagctaaagctattgataggtgtacttgtccttgtgtctctgtgatagagcaagtttgtaccccagacaccttccacctgtctgtttaggccccttcctcaaaccctattctcactccacaaccacaccaccagtttggaaggctggtgtagcagaaacaagacatatggacattgtataacccagcattcaggtggtggagttccttttattccacttgcatactattctaagtgcattaacctaccccacctttcctcccttgattctcaytatacgtttaaaattgacttaataaagcacgtgattggagcatcttaaaagaattggtctataaattcatttatgtgacaatgataaacccattacatgtgacataaataaaataatatatttttaataaaatagaaatattttccaaaacaa

SEQ ID NO: 327623 - DNA, 588 bp, Homo sapiens
ctaagttttatgggcaaagttgagtatagtgtgaatgatcaacgtatccactagctagagcagtgtctagtaagtactgctaatttgatccctgttttaagtatttaatagtaccttagctcttattaattaatggagagcatctcatattctttgtttagaagctccacttggggaaaatgttttcagggtggagaatggaatacattttgcaaataaacagaatttcaaataggttagtaatacagagctaataaatgatactgagaaagataaaaaatagatatcataayagttgttgacaaaagagtcaaactctgaaaaatatttgaaaagataaattttgagccaaatatgagtgggcaatggtcagtgacacagccctgtctcctgagaacatgtgcccaaagtagtcaggcttcagcttagttttatacattttagggagacaaaagacatcaatcaatacatgtaagatgtacactggttgggtcaggaaaggtggcacaactcaaagcgggggtggggagcttcaaggtcataggtagattcaaacaatttctaattggcaattggttggaagactta

SEQ ID NO: 327624 - DNA, 589 bp, Homo sapiens
gctccgtgacctggaagttcagaagggaaggggttaatggtgactggcagctcatttcaagtctttttagcaccctgttcccctaaagaggagaaggaaaacgacacaattgtcagacatttaccgtaagaagaacccttctattcttctaatkcctagcaagacgtgcagaaaataaaatccaaactgtatagccagtcttcactgacttaaccaagacgaatcactttcatgagtggcttacttcacctcttctaggattgacatctgtgcttatggtttagcaacactaaaattggaaataaaattcataactgatacatgtctaattcaagagataaaagcaacttataactataactttataaaagggttctataaactgctaacatttgataatcatataaaccatcctgtaatgcaaaccacagaattactatcaagaacataaaatatattcacataatttgattcattcatctgcagcaagagaagcagttgacaataaaatatcactcagtgtgcacacgtgtgtgtaaacatgtgtttatgtgtgtaaagcctcccttttgtgctcatttaaaagggt

SEQ ID NO: 327625 - DNA, 478 bp, Homo sapiens
ggtgtggcaaagaccactgactgttctcctcttcctggcacgcagctctactacatttcccagactcctttgcagtgaagtcatgtggttaagttgtagccaatgggctgtgaacaaaggtgatacgaggtacttctaggcgcctgctcctgtaaagctgccctttttctatgccatttttccccctactggtggctagaatctgaggaattctgtggtccaagaggttggctgagctttgagatgaaatgggcctgrttctgtgaatcatcacatagaggaaagccacctgctgatcaggaccacccatcctggactggtaggtggagacatttcaggatttgtcatatcacctaatttattatacatgtggcttttctaataatgtaaaaatgtaaggatcttagccaaagtggctacccgtgtgttattctcattttgaatcctgagagtgcttcctaaagaggaaccattggac

SEQ ID NO: 327626 - DNA, 478 bp, Homo sapiens
ggtgtggcaaagaccactgactgttctcctcttcctggcacgcagctctactacatttcccagactcctttgcagtgaagtcatgtggttaagttgtagccaatgggctgtgaacaaaggtgatacgaggtacttctaggcgcctgctcctgtaaagctgccctttttctatgccatttttccccctactggtggctagaatctgaggaattctgtggtccaagaggttggctgagctttgagatgaaatgggcctgattctgtgaatcatcacatagaggaaagccacctgctgatcaggaccacccatcctggactggtaggtggagacatttcaggatttgtcatatcacctaatttattatacatgtggcttttctaataatgtaaaaatktaaggatcttagccaaagtggctacccgtgtgttattctcattttgaatcctgagagtgcttcctaaagaggaaccattggac

SEQ ID NO: 327627 - DNA, 608 bp, Homo sapiens
caatcataaaaatctcatcagttatgctttcacatatatctcaaatctatccacatctttctgtgctgactacaaatgcctagtccaaaacatctttacctgaattacaatctaaaatggctcctaaaacttcctatcccctgagcaatcccatgcataatccccaggactgggaatttcgtggaattcactcctgtgattagattatgttacattgcacagttgcaacaaaccttaaaataggggaatcacctgggtgggcctgaactaatcacctgagccctttaaaagcagagagttagccaggtgcagtggcttatgcttgtaatcccagcactttgggaggccgaggcgggcggatcacaaggtcaggagatcgagacratcctggtgaacactgggaaaccccgtctctactaaaaatacaaaaaattaaccaggcttggtggtgggcgccagtagtcccagctactcaggaggctgaggcaggagaatggcgtgaacctgggatgcggagcttgcagtgagccaagattgcaccacggcactcctgggcgacagagcgagactccatctcaaaaaaaaataaaaataaataaataaataaa

SEQ ID NO: 327628 - DNA, 553 bp, Homo sapiens
tgctgtgcaatagatcactaaaacttatcccattggccttaaaagttttttttaacaaaagatacactcctcatgttctttatactatattgatttatggatgacctcactcaagatacctataaatgacctgtactgctgattaaccacctagagatctcttcatcccaaattctagtcctatttcccaagcaattttctatgcactagggagctgggccacagctattttctgaatgaatgaatgaataaataaataaataaagtrgattttctgttatttatttgtatttattctcattgcacagagaattgtatagatatatagtacagaatgaatgaagtaaaagtaatgcagttgctacttactcacttttttcaatggccaggtatacttcatctatttgagtttatgttggccagatgggcacataattcagggtcagtgagttcaaatttctaaaggacaagtaggagacagttcctcatggctgccagccctatcggtgctctttcagaatgtggcctctggcttctaggattctggccacag

SEQ ID NO: 327629 - DNA, 635 bp, Homo sapiens
cactttataatctgaaaagaacagcactgaggcttaaaaaattttttgagcaaaagaagaacatattttttagttcatttcaaccagtctttttccttcagcctaatatggatataaaatgtaactggcattagcgtttcctagtattgctgcagcctgccagaatgttgagacctttgcacaatgaatccattattacaataaatatgaaaagacgacataatattctaaacagctcatcacattctttctaatgttccctgtactgaagaaaatattttaatgtatactaagtatttgaatttattttcaaaatagtgaattcatgctttcaattgttgccctttaggagtccttagtgcacatttgtaaggtaacgacaaactgaatctttaataatgatcgtaatgatcactttaacactggaagaaaactcaatgttttcctaagtttctcaaggtcattttttcactccatagcttttcaacataatgtagttgttgtcatyttaggaataaggattttcacaaagtcaggctccagcctgtctgttctgattctggaaaacctttggcaattttcatgctaggtggaggactttgttaaataaatagtgtgattttaaaggtgctcat

SEQ ID NO: 327630 - DNA, 635 bp, Homo sapiens
cactttataatctgaaaagaacagcactgaggcttaaaaaattttttgagcaaaagaagaacatattttttagttcatttcaaccagtctttttccttcagcctaatatggatataaaatgtaactggcattagcgtttcctagtattgctgcagcctgccagaatgttgagacctttgcacaatgaatccattattacaataaatatgaaaagacgacataatattctaaacagctcatcacattctttctaatgttccctgtactgaagaaaatattttaatgtatactaagtatttgaatttattttcaaaatagtgaattcatgctttcaattgttgccctttaggagtccttagtgcacatttgtaaggtaacgacaaactgaatctttaataatgatcgtaatgatcactttaacactggaagaaaactcaatgttttcctaagtttctcaaggtcattttttcactccatagcttttcaacataatgtagttgttgtcattttaggaataaggattttcacaaagtcaggctccagcctgtctrttctgattctggaaaacctttggcaattttcatgctaggtggaggactttgttaaataaatagtgtgattttaaaggtgctcat

SEQ ID NO: 327631 - DNA, 509 bp, Homo sapiens
aaagtcaaagtcaagcaggtggacccaggcagaacccaaccagactctagaacaaagttaggttcaaagtttggttcttatctcctttccctataatgtgggctggtaggggtgggttgattgtcatcctctgtacaaaaagaattgtatggaaaattagctggctctgaaatctaactgaaataagaaagtcaataaaagcataattaaagatacttaaacattgtagatacaggcratgaaagaacaatgcctctgttgtactggatttccagcagggaatgatgctgtttgggttaagacacaggtaaggcagaggagctttgagaataccatggctcaggaaggaagaaatgtgagaaagctagagaggtacaggagactacagaggagaagggaaaggcaaaatctggattctgagtaatcagaagttgtcgtctgctttggtggctcctatagttccctttgtcttcatcagtgacctgagaattcacagggttttcaccagt

SEQ ID NO: 327632 - DNA, 489 bp, Homo sapiens
atttttactgaagttaaatatccaataattgggtacattaagaaaatgctggtctaccaatgagaagaatgtaattcttggccaggcacagtggctcatgccacctggcctggccaacctggtgaaaccctctctctactaaaaacacaaaattagccgggcgtggtggtgcacgcctgtaatcccagctacttgggaggctgaggcagaagaatcacttgaatccaggaggcagaggttgcagtgagccaagatcacaycattgcactccagcctgggcaaaaagagcaaaactccactcaaaaaaaaaaaaaaaagaatatatttcttcttgggagtatgcatttttaaaaattggggttacaagttagtgttccctgttatcaaatcgattacaaatattcatctataaaatccattagttcattctctataaaaaagtaggttctgggcctcatttagttcatgggtgacagtggcctcttgttc

SEQ ID NO: 327633 - DNA, 489 bp, Homo sapiens
atttttactgaagttaaatatccaataattgggtacattaagaaaatgctggtctaccaatgagaagaatgtaattcttggccaggcacagtggctcatgccacctggcctggccaacctggtgaaaccctctctctactaaaaacacaaaattagccgggcgtggtggtgcacgcctgtaatcccagctacttgggaggctgaggcagaagaatcacttgaatccaggaggcagaggttgcagtgagccaagatcacatcattgcactccagcctgggcamaaagagcaaaactccactcaaaaaaaaaaaaaaaagaatatatttcttcttgggagtatgcatttttaaaaattggggttacaagttagtgttccctgttatcaaatcgattacaaatattcatctataaaatccattagttcattctctataaaaaagtaggttctgggcctcatttagttcatgggtgacagtggcctcttgttc

SEQ ID NO: 327634 - DNA, 610 bp, Homo sapiens
tttgagctttgatttacctccctgtaacttcaacctatttgatctagtttcccctggagtcacatactcytttccccctgccatttgagaattcatttctgaaatattgcaaagcagctacattatcattattagcatcctcattaccatctgaaaattatgtgcaacagtccttgtcatcatggactttaaaatttagctggggaggtagcttctccttgactttttttagggtaaaagatgttcaactccacagccatttcaggtatactgtttatctgtctggtacccagtagggcttcaattcatggcagttgttattattattttcattatgatcaagcatggtttgaaacccttaaacattctagtcaccctgttctgtgactggctaatatctctttaaaattaggtgtccaaaattaatccaaatagctattgctttacctgtatagaatatacagaaagcaattattactacctttgataaggactcctaactaatgtgatctttttttaaaaatagacggctcattatgccagcttttattaagtttgaagttaattaaaaaactgctttgaaaaatcatatgcacttctatataagtca

SEQ ID NO: 327635 - DNA, 487 bp, Homo sapiens
tacataatagcaagcaaatgatttactgaccaccacaatagatagttatttccaatcttcacaatcactcttgaaatacagctattatccctgtgttacacataagataactgaggatctggaaactgaactgacaaatgcaaaagtagaagaggagtcaatggcaagactagcattcagatccaagtctatcggtttaaaagttatttccccattgcacaccctgccccctcaaaaagaaaaggccaacatttaaattctagtgtttgaaaggatgtccaaattatatttgagtatttaaaatgttttcatttatttatgtgttttttagtagtatgctgttggaaacaasaaaaaaaaagaaagttaaggtaggcaggaagacaaggtaaaaaggaaaagttatgtatacactgcagcagcagcagaactaagtcacacatcactgaactaggctggtcaagaacaagaagtttcttggctacat

SEQ ID NO: 327636 - DNA, 491 bp, Homo sapiens
aagaaaatgctgggttcagcaatccccaactgctgcactccctgaagttaataaccacaatgaaggccatttcaagctcctttcctcctttaattgatttattggtggcatataaatgcctgtttccatttctgttaatgaggaaggcctttgatattactttcttagatttacattctagtcctaatctttggcaatataataaaaaagtattcagagctctttcctgaggcaaattataattgcatttgctttcacttcctagtcctttatctagatgagcccatgacagtacaaaaatgctgttactaaaatacaaggttataatgagtttctgactttgtattttactttgaatatcatcttctactcctggaactggtatcttatttrttattattattattattattattattattattattttttggagagaggtgcatgagctcactactttagtgtagcgaccagctagatgggttatccgg

SEQ ID NO: 327637 - DNA, 598 bp, Homo sapiens
tgtttaaaaactgcaaaataaatagttaatatgtactcagacagaggcttccttatttaaattccaaacatatttgagtatataaaccagttccaataactgcttataatttcaggaccaatttcaaaatactgctctcattgtctgttttcttactttcaaattaatacatagctacatattgaatgcttacaagtagtgtgtggtgctaagcgaatacagtttttsaggcatcgagaaaaagtcaactaaatggcatacatttatatgtcaaattgggtagtatgatactttatcaaattgcaaaatgcatttctgctcaaatactcagtttactgaaacatttaaagaaatttgagaaagttagtgatctgttactagactctcttccatttggaagtaatcagtagaggttttatattttctcagcaatggtaaaggcacgtatgaactgttgcatacagaaacaatgttaaaatgcataatgaagattggattttcatatacacagagttcaattttacacatattttatgtttcccttttcatattgtgagcatagcttaggcaacagaaattcagtgactgcagctcaata

SEQ ID NO: 327638 - DNA, 558 bp, Homo sapiens
attactgcctctcaaataaatgtccaataaattttatggacatattgagaagcaaaaaacatatttaatcagataagctattctttagatatatgccataagtcagcctcattctaggtatgtaagataaagttgtaactaatgtattagtaatgtagtcaagagttgatggcatttatattctaaagtcaaatgagacaacggtaaaaaaatctattacataatgggatattgtaatcgagactgatgggggattgttttagctgacatggttattagtcaagaaaagcattactgatttgaatgacatcatgtaatcaatcataggaagaacttgggkacgaagctacaactcattccagcagtaacccaaaaagtccgattccaaggtctaatctgtgacaaccaagtcccttccacctatgagcctgcaaaaccaaaatcaggttacttacttcctagatattatacaatggggatataggcattgggcaaatacgcctgctccaagtgggagaaattggccaaaacaaagggattacaggccccatggaaatc

SEQ ID NO: 327639 - DNA, 558 bp, Homo sapiens
attactgcctctcaaataaatgtccaataaattttatggacatattgagaagcaaaaaacatatttaatcagataagctattctttagatatatgccataagtcagcctcattctaggtatgtaagataaagttgtaactaatgtattagtaatgtagtcaagagttgatggcatttatattctaaagtcaaatgagacaacggtaaaaaaatctattacataatgggatattgtaatcgagactgatgggggattgttttagctgacatggttattagtcaagaaaagcattactgatttgaatgacatcatgtaatcaatcataggaagaacttggggacgaagctacaactcattccagcagtaacccaaaaagtccrattccaaggtctaatctgtgacaaccaagtcccttccacctatgagcctgcaaaaccaaaatcaggttacttacttcctagatattatacaatggggatataggcattgggcaaatacgcctgctccaagtgggagaaattggccaaaacaaagggattacaggccccatggaaatc

SEQ ID NO: 327640 - DNA, 558 bp, Homo sapiens
attactgcctctcaaataaatgtccaataaattttatggacatattgagaagcaaaaaacatatttaatcagataagctattctttagatatatgccataagtcagcctcattctaggtatgtaagataaagttgtaactaatgtattagtaatgtagtcaagagttgatggcatttatattctaaagtcaaatgagacaacggtaaaaaaatctattacataatgggatattgtaatcgagactgatgggggattgttttagctgacatggttattagtcaagaaaagcattactgatttgaatgacatcatgtaatcaatcataggaagaacttggggacgaagctacaactcattccagcagtaacccaaaaagtccgattccaaggtctaatctgtgacaaccaagtcccttccacctatgagcctgcaaaaccaaaatcaggttacttacttcstagatattatacaatggggatataggcattgggcaaatacgcctgctccaagtgggagaaattggccaaaacaaagggattacaggccccatggaaatc

SEQ ID NO: 327641 - DNA, 531 bp, Homo sapiens
gccctcttctcacagctccactaggcagtgccacagtgagtactctgtgtggtgactcaaacccaacatttcccttccacaatgccctagcagagattctttatgagggctccacttccacagcaaatttctgcctggacatccaggtgttgccatataccctctgaaatctaggctgaggttcccaaacctcaattcttgacttctgtgtaccctcaggctcaataccacatggaagctgccaagggttggtgctcacacctgctgaagccatggcccaagctgtaccttggcccattttagccatggctgggacacagggcaccaagtcttgagcttgcacaaagtagcaaggcccggggcccagcccacaaaaccatttttttcctattagccctccaggcttgttatgggaagggctgttgtgaagacatctgacatgccrtggagacatttttgccattttttggtgatcaacatttggcttcttgttaattgtgcagatttctgcagctggcttgaatctctttt

SEQ ID NO: 327642 - DNA, 537 bp, Homo sapiens
ctccagcttagaaattatgcttatggaaaggaaatggcttacagaagtgaatggattttcacatagaaacagaattgaatcacataactatgtaatttgactcatayaaaatcacatggtggcaatgtgatccagtgcttattaaaacaagtttaaatcatgctattcctgcaactctcttctatactacagattccactctattattttgtatttaaacatttaattctatgagatctgtgtgataattaacttttaaatttttctactcaaggaggtaatgcaattagtttaattcttttttgcttggggacaacacagtgtgctaaattcttggtatacaaagatgaattagagtccctcttctcaagatgctcaaaatctggtgaggaagtaaatgtatatagaaataaatttcattcagttttatgtactgaaagaaaagaccatgaggacgttatagatgcaataggtgattcaaaacactcataaaatgtttgctcaaactgaagtccccaggtaaattccaaactatac

SEQ ID NO: 327643 - DNA, 609 bp, Homo sapiens
aaacttcatggtcataaaataaagtaaataaagctataaagagtgtcacaaaggtagtaaacacatggctctagccttctttgctctgtggtctagcaaatattctaactaactatagcaagtaagattatatgatacataattccattgactaagcctctgattggagtatgcaaaaaatttacattctaatttyctagttatctaggtttctgcaaatgacatactatttaaaaacctggtagaaaggtctgtcttaaggttatacatcccatagctcttgataatattcagtttccaaattgaaataacttaattacattctccaaggatccattttcagagtaggtgcagctgttgcattttcttttttagaaagacaattataattacaggcaacttgcttaagaagatggaattaataatgcattacaattttagagaaacagtgagaatgaagtttggttcatgtaggaaagagatatgtgatgacagatcaacagaaagcaaggtggcgtgtgtgtgtgtgtgtgtgtgtgtctctgtgtgtgctttaagtcttattttggagactgcacatttaagataatattctacaaataatttctt

SEQ ID NO: 327644 - DNA, 557 bp, Homo sapiens
cataacattctggatcacactcagattaaagaaaaaaatcccacagtttagagattatagttcaagtgttctcatctcaaaaataaaaagtatatgaagtaaggcatacgttaattagctcaatgyagccattccacaatgaacacatatttcaaaacgtcatttgtacatgataaatatacattacttttgtctgtttaaaaataaatgatttaacttaaaaaatcacaatccatcaattaatatatccagtcctgggtaaccaaaaagaaattaacttcattttgattaagcttctttgctccctataccttggacttgtggcagatggagcagaggtggggcagaggtgagatggagaagtcggtctccttccttgtttccctgctagtatttctgttcatcctcccctttctcactgagatctctatgagcctcctggggttacaagtaggaaggatcagaggatctgaatcctcttattttcctaacactaatttggcactggtttctaagggctttgacagacaattaaagaaagatgattctttcactca

SEQ ID NO: 327645 - DNA, 557 bp, Homo sapiens
cataacattctggatcacactcagattaaagaaaaaaatcccacagtttagagattatagttcaagtgttctcatctcaaaaataaaaagtatatgaagtaaggcatacgttaattagctcaatgtagccattccacaatgaacacatatttcaaaacrtcatttgtacatgataaatatacattacttttgtctgtttaaaaataaatgatttaacttaaaaaatcacaatccatcaattaatatatccagtcctgggtaaccaaaaagaaattaacttcattttgattaagcttctttgctccctataccttggacttgtggcagatggagcagaggtggggcagaggtgagatggagaagtcggtctccttccttgtttccctgctagtatttctgttcatcctcccctttctcactgagatctctatgagcctcctggggttacaagtaggaaggatcagaggatctgaatcctcttattttcctaacactaatttggcactggtttctaagggctttgacagacaattaaagaaagatgattctttcactca

SEQ ID NO: 327646 - DNA, 577 bp, Homo sapiens
atcacttggctttctctaaggagatacattccggaccatagaataaggagagggattacaagtagagcatagtgtttctttcagctcagtacatagaattcaggaagcatgagcaatggaatgttagtcatagggcaaagttctagagaggaggaagctctgcagaagaaaaggactcaaaagatttacattagattctcttcattagtgtttgctaaatactaataaatgcatgcaattggatgaaatttcatgaagtcacataaagaggaatgtgtaagatgaatggttccaacaaagcacacagggctgagatttgttcaggtaccactagctagaatatagagtccactttgaatggagtattcagtagaaatctcaaaaggggtgcacttcagtagagagggtaaactatgcctagagttaaggccacttaaaaatgcaatacttaaagcytaaaaacaaatctcaaaagacacaaactgaaccaaaagtaattttaatacatacatactagaagaaagctcaagattccttaaagataactaaatccagacactaaatatcttaaaattca

SEQ ID NO: 327647 - DNA, 536 bp, Homo sapiens
ttaactcatgattctggtagctggaaagtccaagagtaaggtggtggcatctgttcagcttccactgaaggccccgtgctgcattaagatatggcagagaagcaaaaaggtgagcaaatgtgagcaaatgaggatcaaacatgaggaggaatctcaccttgtaacaactcactccctaagaagctaatcaattacaatgagatctaatccagtctcaygagaaaaatattaagccatcttaatgatttaatcacctcttaaaggcacaacctcccaacattgctgtactaggaatgaaagtgctaacttgagtttaggtaagaacattgaaaccagagcagactgttttgaaaagcaagtgttggcattgtatacctgacacatattaggctgtagattataatttccacactaacttgttatatgtacacacaaatgaaatataaatatcatttataaattgctgataaattaggaataataaaataaataaaaattatttcagtttagatgcacacaataaaaataaatacaga

SEQ ID NO: 327648 - DNA, 576 bp, Homo sapiens
gaagtagaagtacagttggaaaaacaaatctatatactgtgaatatatatttgaaattaatttcaacgaggtaatcytgagaacattataattttagatatcaaacagcttggttatgttggaaaaatgcataactaagatcatgttggttctgaaaataagttcgttcctaatatgtatggtagaaagtttaatacagatatattcagtatgtaactgatgaatactgagtgactaatagcaagatttaggcttctcagtcctccagctggcagagatatgcaggcaatataaaaactgttggaaggtggatacaggaagcctttcagctgctgtggttttctataatgattctgaaagtttctttgtttttttaattcctggaatcaagagttagagaatcaggattgtgggtggtcactcatttgctcaatttttttttcttttgttttccatcattaagtactttacagctgggagcaagacaaaaagcaacattttaagctgtgctgcctaaatatggcttagaatagaaaggtaagcaaaaatttctaggaaaggcacattactttatta

SEQ ID NO: 327649 - DNA, 576 bp, Homo sapiens
gaagtagaagtacagttggaaaaacaaatctatatactgtgaatatatatttgaaattaatttcaacgaggtaatcctgagaacattataattttagatatcaaacagcttggttatgttggaaaaatgcataactaagatcatgttggttctgaaaataagttcgttcytaatatgtatggtagaaagtttaatacagatatattcagtatgtaactgatgaatactgagtgactaatagcaagatttaggcttctcagtcctccagctggcagagatatgcaggcaatataaaaactgttggaaggtggatacaggaagcctttcagctgctgtggttttctataatgattctgaaagtttctttgtttttttaattcctggaatcaagagttagagaatcaggattgtgggtggtcactcatttgctcaatttttttttcttttgttttccatcattaagtactttacagctgggagcaagacaaaaagcaacattttaagctgtgctgcctaaatatggcttagaatagaaaggtaagcaaaaatttctaggaaaggcacattactttatta

SEQ ID NO: 327650 - DNA, 576 bp, Homo sapiens
gaagtagaagtacagttggaaaaacaaatctatatactgtgaatatatatttgaaattaatttcaacgaggtaatcctgagaacattataattttagatatcaaacagcttggttatgttggaaaaatgcataactaagatcatgttggttctgaaaataagttcgttcctaatatgtatggtagaaagtttaatacagatatattcagtatgtaactgatgaatactgagtgactaatagcaagatttaggcttctcagtcctccagctggcagagatatgcaggcaatataaaaactgttggaaggtggatacaggaagcctttcagctgctgtggttttctayaatgattctgaaagtttctttgtttttttaattcctggaatcaagagttagagaatcaggattgtgggtggtcactcatttgctcaatttttttttcttttgttttccatcattaagtactttacagctgggagcaagacaaaaagcaacattttaagctgtgctgcctaaatatggcttagaatagaaaggtaagcaaaaatttctaggaaaggcacattactttatta

SEQ ID NO: 327651 - DNA, 576 bp, Homo sapiens
gaagtagaagtacagttggaaaaacaaatctatatactgtgaatatatatttgaaattaatttcaacgaggtaatcctgagaacattataattttagatatcaaacagcttggttatgttggaaaaatgcataactaagatcatgttggttctgaaaataagttcgttcctaatatgtatggtagaaagtttaatacagatatattcagtatgtaactgatgaatactgagtgactaatagcaagatttaggcttctcagtcctccagctggcagagatatgcaggcaatataaaaactgttggaaggtggatacaggaagcctttcagctgctgtggttttctataatgattctgaaagtttctttgtttttttaattcctggaatcaagagttagagaatcaggattgtgggtggtcactcatttgctcaatttttttttcttttgttttccatcattaagtactttacagctgggagcaagacaaaaagcaacattttaagctgtgctgcytaaatatggcttagaatagaaaggtaagcaaaaatttctaggaaaggcacattactttatta

SEQ ID NO: 327652 - DNA, 623 bp, Homo sapiens
gtgcatctggtagaagagtcacctttccgattttatgtggtagttttggtaaagtgaaacattttcatgtatatgcgtcttagggtgtggtttagtagggtgttttggctttgattctgggtagaagcaggagtgtggtttatgtgcagtttcttcagctgtaattcgcatcagcaatgtctgagtgtgtcagtgctctggactgcaaaaacttacggtaataatggccaccatgatagtttcagactasgcatacttgggtgtgatagtttggctggcactagggtgggcttgctggagtccaggacctccactaggccagctatattggtccaggagcataccgatgcagtgaattatctagggtggaaataccttgcagtgggaccaccacaaggctaactggtggttcgggcaaatgctcacatacatgagttgactggttctggagtgggttggcaggggagtggagccaccactgggttgaatgttgagctgtcaggcacacatgggtgtgataggtaagccatctctgtggtgattttctggggagtcaggacaagcccagggtcagctttcccactctgtataactgcctgttccattggagcagggcatagcat

SEQ ID NO: 327653 - DNA, 562 bp, Homo sapiens
gtgaacttaatcagtaaatgttgtgtttgttctgacttctctactaatcaaccattcccttgtctttcatttcatccttgaacatctctatccctgagacacaatattgaaagtgtgaaaattaataaatatacaatggcctctaagtgttcaagtgaaaggaagagtcacatgtctctcactttcaatcaaaagctagaaattattaacctgagtgagaaaagcatgttgagagccaagatagatctcttatgccaaattagccaagttgtgaatgcaaaggaaaaattattgaacgaaatcacaaatgctactccagtgaacacacaaattataagaaagcaaaacaatcttttttgctgatacggagaaagttttagtggtttggatataagatcaaaccaaccaccatattcccttcagccaaagcctaattcagagtaaggccctaactttattcaattccatgaatactaagataratgaggaagctgtagaacaaaaaatctgaagctatcagaggttggttcatgaagcttaagaaaagaagacatcttcataa

SEQ ID NO: 327654 - DNA, 599 bp, Homo sapiens
tctttcttgacttatttttaactagtttgctattagtgaatagaaatactgctgatttttgtaggttggtttttgtatcctgaaactttactaatttttttatcagttttaaaagcatttggtagagtctacatttctctagatataagatcatgacatctgcaaacaaggataatttggctttctcttttgtaatttgsatgccttttatttcctttccttggcgaattccttcattttaaatctttgtgtgactttataagagaaaagagttttctaggctacatatacttgtgtcttgttttttattcgttagccagtctatatcattttatttttaaaattttcctttattattatttttttcaaggaaagatcttgctctgttgtccagactggagggcaaaggcacaaacatagctcactgccacctcaacttcttgcctcaagtgattctcctgtatcagccttctgagtaactggggctacaggcacattccaccatgccacccagctaatttttaaatgttttatagagacagagtctgaccacattgcacaggctgaccttgaactcctgggctcaagtgatcctccct

SEQ ID NO: 327655 - DNA, 624 bp, Homo sapiens
cttcaaaataacaggaataatggcatacatgaaaatagctgatatcgagaatgtaaaaatatcgtgagtttttattgtgttgaatcttacttaagtagaactgaaggaaatacattcatatggtctgcattatttatttcagtcaaatttggtttctctggttagaaactacacctagggaaataagccttctgtaaacttcatgaacaaacgtaatttttcactgactctgtgctttttgtaatgaaaatattcatagtagtagaaaatcttattgtgcctgaaaaatgaatgacttccttatttgggtttccattatattttgcacacacctctattattgtactcatcatattgcattagggagatatttttgtctatctcytctgttagatagataactcctcaaaggcaaataaaattattcattatatgtcaattttctgtgcctagcatagtgcttcgtctgtggtaggctcataatgaatatttatgaattgaaataattattgaattcatagcttcagtagttacatccacaaggtgtagtttatattaatgccactttcaagtagtgaaaagcataaaaattgtttttatggacattactcaattaagaaagag

SEQ ID NO: 327656 - DNA, 650 bp, Homo sapiens
acttgtttttaattttctcccatacttttagaattatccctgtagggaggaaaggttgagcattactctagaagggcaaaataatcaagatttattgtactccttgtcatccaagaaactcttatggccgtggttcccaattgcacactattactgcttgtataaggattattgtacttggcttcaatccagaattcaattattcccccaaggggattgagtttccaaagagatttgaaataatttgagatttctcatattttcctatctccccaatttttctttgaattaaaacaattctttaaccaaataaatatctggagcttagtatatctgagttgaagagtgaccattttaaagatgcgcattaaaagtataatatctgacttgattatggtcacaagtcaattgaatagacagagcatttacaaattaaagaaacatgtrgaattcaaagaaacaataaaaggcaaaataatatgtttaaagacttttgagcaagtggtcaataaatataatagaaaataaaaactattgcttcctgtgtgaaggtaatcaccgtggactgaagagtttggaaaggctttatggagaaggtgggaattggtttagatcttgaagaatggaaatatctggataggcaaagaaaa

SEQ ID NO: 327657 - DNA, 568 bp, Homo sapiens
tttttaattttctcccatacttttagaattatccctgtagggaggaaaggttgagcattactctagaagggcaaaataatcaagatttattgtactccttgtcatccaagaaactcttatggccgtggttcccaattgcacactattactgcttgtataaggattattgtacttggcttcaatccagaattcaattattcccccaaggggattgagtttccaaagagatttgaaataatttgagatttctcatattttcctatctccccaatttttctttgaattaaaacaattctttaaccaaataaatatctggagcttagtatatctgagttgaagagtgaccattttaaagatgcgcattaaaagtataatatctgacttgattatggtcacaagtcaattgaatagacagagcatttacaaattaaagaaacatgtagaattcaaagaaacaataaaaggcaaaataatatgtttaaagacttttgagcaagtggtcaataaatataatagaaaataaaaactattgcttyctgtgtgaaggtaatcaccgtggactgaagag

SEQ ID NO: 327658 - DNA, 591 bp, Homo sapiens
aggacttgggactagaaatttttcacctgaggggcatttcctgccttgctgtggaacgttaaataaagctatccatgtgaccacakggtgtaaaatgatcttgacacctgaaatactgtgctaagtaatgtcagggaacactctaattgtgtagcagtgccccgaagagttccataataaaatggaaatggtttatacagggtcgttctacctggagaaggcaaggaggggacaatcactagcagggagcctcttttccacaagagctgatcctggaactgtgtgaggagctgctgggttctattgacaatgggaaagcgtcctataaacggctctcaattgaccaacaaagggttgcttggtttatagacggtggttcaaaggtaaatgtacaacatcctgtttgaaaggctgctactttgactaaacaaggtaaaagtaaatcagcttggtgggctgaattacatgttgtttttccatcagtgatggaaaaattgaatggtggtagaaccttctctgtgagtttttactgacttgtgggtagtggccaatgacctggccatatggtcagggaggagggcaatagaaacc

SEQ ID NO: 327659 - DNA, 591 bp, Homo sapiens
aggacttgggactagaaatttttcacctgaggggcatttcctgccttgctgtggaacgttaaataaagctatccatgtgaccacagggtgtaaaatgatcttgacacctgaaatactgtgctaagtaatgtcagggaacactctaattgtgtagcagtgccccgaagagttccataataaaatggaaatggtttatacagggtcgttctacctggagaaggcaaggaggggacaatcactagcagggagcctcttttccacragagctgatcctggaactgtgtgaggagctgctgggttctattgacaatgggaaagcgtcctataaacggctctcaattgaccaacaaagggttgcttggtttatagacggtggttcaaaggtaaatgtacaacatcctgtttgaaaggctgctactttgactaaacaaggtaaaagtaaatcagcttggtgggctgaattacatgttgtttttccatcagtgatggaaaaattgaatggtggtagaaccttctctgtgagtttttactgacttgtgggtagtggccaatgacctggccatatggtcagggaggagggcaatagaaacc

SEQ ID NO: 327660 - DNA, 591 bp, Homo sapiens
aggacttgggactagaaatttttcacctgaggggcatttcctgccttgctgtggaacgttaaataaagctatccatgtgaccacagggtgtaaaatgatcttgacacctgaaatactgtgctaagtaatgtcagggaacactctaattgtgtagcagtgccccgaagagttccataataaaatggaaatggtttatacagggtcgttctacctggagaaggcaaggaggggacaatcactagcagggagcctcttttccacaagagctgatcctggaactgtgtgaggagctgctgggttctattgacaatgggaaagcgtcctataaacggctctcaattgaccaacaaagggttgcttggtttatagacggtggttcaaaggtaaatgtacaacatcctgtttgaaaggctkctactttgactaaacaaggtaaaagtaaatcagcttggtgggctgaattacatgttgtttttccatcagtgatggaaaaattgaatggtggtagaaccttctctgtgagtttttactgacttgtgggtagtggccaatgacctggccatatggtcagggaggagggcaatagaaacc

SEQ ID NO: 327661 - DNA, 558 bp, Homo sapiens
agtataatgattatacgattatgcttctttccttttctttcttcccacatcacctcaacttttttttctcctttccttacttggtaagtggtcctaggaccaggactgcaactacaagtgatcgaaacaagaatgatttctaaaagaaaaaacaaacacacaaaaaagaaccttctgccrtaattcttaagtgcctgatgggggtgggttgtgcctttacaatctggcaaaatttgagttaacagtgaatgcagcctatattgcctggtgttaaaaatggccctatagttctgacctatgtaaccataccctaagtaagtgttggaatgaactgctggggaagcacgtgctacccactagtgttgctgcctgcaatctagaccagcacagtgatgattctaacgtcccttccaaaggtgaaaaaagtttggacattgatggaaaaaaggagaaagagtaactggaaggttatggaataaatgaatgggttgtaaattgagaaaaacctaatattagttaacaccttgaaggagattcagagctagagaagacattgtt

SEQ ID NO: 327662 - DNA, 558 bp, Homo sapiens
agtataatgattatacgattatgcttctttccttttctttcttcccacatcacctcaacttttttttctcctttccttacttggtaagtggtcctaggaccaggactgcaactacaagtgatcgaaacaagaatgatttctaaaagaaaaaacaaacacacaaaaaagaaccttctgccataattcttaagtgcctgatgggggtgggttgtgcctttacaatctggcaaaatttgagttaacagtgaatgcagcctatattgcctggtgttaaaaatggccctatagttctgacctatgtaaccataccctaagtaagtgttggaatgaactgctggggaagcacktgctacccactagtgttgctgcctgcaatctagaccagcacagtgatgattctaacgtcccttccaaaggtgaaaaaagtttggacattgatggaaaaaaggagaaagagtaactggaaggttatggaataaatgaatgggttgtaaattgagaaaaacctaatattagttaacaccttgaaggagattcagagctagagaagacattgtt

SEQ ID NO: 327663 - DNA, 595 bp, Homo sapiens
gctgaattatgccagatgtctgacagggtgaagctataggtttgtggagaccacatctgctttcggaagctgataagattgaacgaaagcctgcacctgagtggcctcagtctagcagacattcatacaatatgatagactaagctatttattaatgatgaactggagttctagtgatttggccatacgttttgagttgtatgtctttttgatgtaagggatctgagttcaaagactggggtggactccaatattgtgaaatatatattttatctttggcctcattattttggcatacaactgctaaaatccttagaaactccaaagtgatgctaataaattgattgatggttggcaggttctagwaagcttcaaggttgaggctggccacccaaaagaccaagacaggagtagaggattgagattttcggccttcaaggaggggagagggtctaaaggttaagttgattaccaatgactattggtttcatcagtcatgcctctttaataaagcctccataaacacctcaaaagaatggggcatgaagtgcttccagatagctaaacatctggagcttcctgaagggtggcactt

SEQ ID NO: 327664 - DNA, 484 bp, Homo sapiens
ttggataaaaataacagttcaaatgtgataccaagtgcataatatactaatagagattaaataaaatgagaattttatgaaaaaatgtatmagcacatatacaagtataaagtatatcttaacaattttataacaattagttgaaatagcaataaaagtaagcaaaaaatctacactctaaaattagacattaggaaaatagaatcaagattttattttcatgtttaagtgacaaagtgagttaaacaaaggaaacatgtatcttaaagtctgtgatgggaaatctttgatcactttgtttattgacggaagagctttttggtttttcaatgcaagtatgtacaacacaaagacataatttaagagacaatataatatagttcatgtcaatggtatgtttcagaagttattgaaaaacgtttgtagaaatacaactcaaataaaaatatatcacatatccaggatattttgtttacagagaaat

SEQ ID NO: 327665 - DNA, 495 bp, Homo sapiens
cttccaagtagctgggattataggtatgcaccaccacatcaagctaattgttgtatttttagtagagatgkggtttcactatattggtcagcctggccttgaactcctgacctcaagtgatccatttgcctcgacctcccaaagtgctgggattacaggtgtgagccaccgcacccagccataaactcatatattttaaaaactcactacacacaagtcacatttctaagtataatgattaatgaaacagctacaggcctcatgaaactcaatctattgagttttgtatttgaatatgggagttttgtatttgaaaggtgatctgggttattgtctaactgtgtatagtctaatttcatgcaaaaagatccactggtgttcttatataaacaatatgtgttggccttatgtatgtttcttatgatcaaggaagaaaatcaaagcttcctgttcttatcctgccatcacccttgaccccaccatggcaacagtcag

SEQ ID NO: 327666 - DNA, 429 bp, Homo sapiens
gccaggcaataccaagtgttcctaaagaggactttcaatcccaatttcttcacgacttctcttaaagccagggctcatcacacctgcagctctgaacaatcatacggatgctgatggggcaggtgctgcgcccctggtggcactggggctttgccatgcctggcacccaatccttactgaagtgcatggtgtggtggcattgactccactgtatagatgaggaatctcaggcctagaaagatgataagacctgtccaaggtcatatggtgacagcctatttccagggctaagcccatacacatggtrgcatcctcgtcttataaatgtcatggccatagttaaatctcacgagccccagaagtggcatgagttgcatggccacagcagccctggctgtccgcacagttccacgagccacagaggccgcc

SEQ ID NO: 327667 - DNA, 616 bp, Homo sapiens
tgcacacctctgagtttttttagattattaaaataataatctaaatattataaataataatgatagtaaataatatactatataagataaataatgtaagaaactggagcccgcccggagttaaagccccaggaatcccgccagtggcgaggactgataccgcatgtcacgagtgtaaactttatcatgttgcggcggtcccagcaatcctgggcagttgtccccattcttgacctgaggacacacaggcgtggggaggttaagcagcctgcccatccacccagcacatatgtgatgaccccagatggtgctctaggtctgtctgacatctgagaaacctaagttctggtgcttgttaagacagaaagaaaatgcaaagtcgaaaaacagcgcagtgtcaccgaacaccagtgcaaaggaggtgctggygctgctgccgggtcgccgacctctgtggaatgcaccacagagcccatcagctgtgcctttccgactgtgtggacacgtgcacggccggctgctgaccttgaaaacgggcttttgaaggagaaagcagggcaagaaggagggggtccacttgtggtttccttgcaacccctgaggatcaaagacccca

SEQ ID NO: 327668 - DNA, 616 bp, Homo sapiens
tgcacacctctgagtttttttagattattaaaataataatctaaatattataaataataatgatagtaaataatatactatataagataaataatgtaagaaactggagcccgcccggagttaaagccccaggaatcccgccagtggcgaggactgataccgcatgtcacgagtgtaaactttatcatgttgcggcggtcccagcaatcctgggcagttgtccccattcttgacctgaggacacacaggcgtggggaggttaagcagcctgcccatccacccagcacatatgtgatgaccccagatggtgctctaggtctgtctgacatctgagaaacctaagttctggtgcttgttaagacagaaagaaaatgcaaagtcgaaaaacagcgcagtgtcaccgaacaccagtgcaaaggaggtgctggtgctgcygccgggtcgccgacctctgtggaatgcaccacagagcccatcagctgtgcctttccgactgtgtggacacgtgcacggccggctgctgaccttgaaaacgggcttttgaaggagaaagcagggcaagaaggagggggtccacttgtggtttccttgcaacccctgaggatcaaagacccca

SEQ ID NO: 327669 - DNA, 597 bp, Homo sapiens
agtggacggcagggagaaggaactgtattgaaaacatttttgcttcacataatccagaacctgatctcatgagtgacaaggcaagttaacttttcaatgtggtctttgttaactattattcaaaggctctgaagaaataggaaaatataacaactttccctcacctatttgtcaagccataaataagaggctaggttatagcatgtggcaccaaccattctgaaatcatcttactttcttctttcatggggctgtaaaattatatggtgcattctcaatttacttaggaaatggctggaggaaaaaagcttaggaaatattcatttcctatggaacacaggaaatctgcataaccttctytctatctctttcccttaacttttgggtttaggccaatattttttaactcattagcctttaactgagcagttgtttaacacatctgagggttgtttaggttgtcatttttcacataatcagtgtgtgcaaactaaagtggaactgtacacagtgacagtggctttctttcattcattcaacatgtttactgagcacctactatgttccaggcactatgccatgtattggaactaccaa

SEQ ID NO: 327670 - DNA, 639 bp, Homo sapiens
tttagggtggagtccttggagagacaggaccaggaaagcatgcagtttctacagcccaatataataaacagacacagctggaaggcaaatcagatctccagaaagtaagggtcccattcccatttttataacagatcctggatccccaaaagaggggatcagctcatctcccatgggattcttatctctcagttgggggtggggacatttccataatttctaggtggccaagagcatgcttctcttatccaaacatgcagagctaagtatctccccataatcgccattagctaaccccaaaagtatatttccaacctagttactacataccaaacctctcttataatgcaaagtaatttctgataccccccaaagtcaaaaaygtcagataatgccacgcaaaagagaacagagccttagatttttgagagggaactgtcaggtggctagaatacagtaagccaggagtaaactgtcagagatgaagaaagagaggtagccaggagactagtcagagacagccttgtgaccactgcaaagaccatggattttattctaaatgtgacataaaggtattgaaaagatttgagcacaggatcaacatgatactacttatattttaagaggatgactgtcact

SEQ ID NO: 327671 - DNA, 639 bp, Homo sapiens
tttagggtggagtccttggagagacaggaccaggaaagcatgcagtttctacagcccaatataataaacagacacagctggaaggcaaatcagatctccagaaagtaagggtcccattcccatttttataacagatcctggatccccaaaagaggggatcagctcatctcccatgggattcttatctctcagttgggggtggggacatttccataatttctaggtggccaagagcatgcttctcttatccaaacatgcagagctaagtatctccccataatcgccattagctaaccccaaaagtatatttccaacctagttactacataccaaacctctcttataatgcaaagtaatttctgataccccccaaagtcaaaaatgtcagataatgccaygcaaaagagaacagagccttagatttttgagagggaactgtcaggtggctagaatacagtaagccaggagtaaactgtcagagatgaagaaagagaggtagccaggagactagtcagagacagccttgtgaccactgcaaagaccatggattttattctaaatgtgacataaaggtattgaaaagatttgagcacaggatcaacatgatactacttatattttaagaggatgactgtcact

SEQ ID NO: 327672 - DNA, 604 bp, Homo sapiens
actgtcatgtccaacctgcagcccatgggccacaagtagcccaggatggttttgaatgcagcccaacacaaattcataaactttcctgaaatattatgaaattttttgtgttttttttttaccttwtcagctattgttagtgtttcacgtattttatatgtgacccaagataattcttcttctaatgtggcccagggaagccaaaagattggacaccccagtacaggttgcaccattgccaacactggagattaacactgctttgagtaagaagatgatttgagcagtagaaacacttgggtgagacagaaaaccaaatgagcatgtcacaccttttttctacataaatgacatcatttcccagtagtactgagcatcaagtttcttgcttctcatgatattccaatttgtgaccttggagatgcttaccaatgagctattcaagataatgatataactattcgacttaataattcaatgagataacaattcaaaaagcatatggcttctgaagaaaacaatttgtaacttaaaaaaatcacattacttttaaatttatatatgtaggtctcagtctaactaatgtgtgaaatgtaatattgat

SEQ ID NO: 327673 - DNA, 588 bp, Homo sapiens
atggcctcctttgcaaaacttcctgtggcactgatccaatgaggttcccctctcctttaccttagcattttaaagactacatccatggctgcacrtatgacctagtatacattacctgtttacgtggctgctcctcttccagtgtgtatgttctttgagaatggaaacgtgtgattcacttctgttatcaggggcagggcctgtacagttcttcctccaccatggggtgattgtgatgtctccttcaaaagcaccctctgagtttccagaccttgcctccaaacctgttgtctcccaaacctgttgcccatgctttgcttctaacttttggttttattctctgttaaatgctttggacttaatattttcaacccttccacatttccaccctcaggctttgcactggacacccaaaacataccacctggggcctgcttggatcaatcctggtacctggaccacttccagagccgaggtcctatttgcagtccagtagttgggcattgcacactgctgtatacaacagctgcttcacacaggactgcagaactgaactgccctcatgttgcttcaccttctgtcttcttc

SEQ ID NO: 327674 - DNA, 584 bp, Homo sapiens
gtaattcttcacctcacttcactccactggtaacaactaaggttaccgaattacacctattggaaagacattctgtagatttccctrataccttctgcctcatctaataatatcctgctaaagaaaaggtccagttctgcagaatggaataacatctattcagaatagcaacgtaaactttgcagactccctcatacatctgtaccggtattggtatttcaaagtaatcatatgctacaggggccaaagactcaaatgccatctggggggccatgggtaaatgagtcaagaagcccagtgtcatggttagtgaggaaaattataaaaattaaactgtctctataaaatgcgcagccactactactgtcagttgatattgccagagaaaatgctagtgtggtcagatctgactttttaagagaagctgaaatctgaatttttacataaaattaagtgattttccaaataaaacctctcaatagtacttattcagcccaggagacataaatttacaagcccaacagaggtttagaggactacgtttttaaaaatcagtagtgtaaacagtgtttaatcctttttca

SEQ ID NO: 327675 - DNA, 515 bp, Homo sapiens
aaaacagtaaggcctggaccctcccagtaacaaaggggcagatgttaaaaatataaaggattctagctttcatataggaaatgcatgtgcaaaatattactcatttattaaggtgcatgaaaatttactgttaacaacacagaagactaatatgtatcattgatgttattcaggtcttataaaactctagtggccagtcrtgtttttaatgccaagaaccccgaggagcaactggtttctaagaatcaacacttagttctgagccgagagatgccccaaggaagataagagacttacagtttgtttggcgtccaaaaagctttccagacagcagtttgtttcctttccctttttatgaatggtggtagtattatgcttcagtctgcgttttctaccaaagccattcataaaaataaaaacaaaacaaaataacaacaacaaaaactttctcggcacagtctggagccattgggtgccagaggctgggaaaacatcctggcagccataaccccaac

SEQ ID NO: 327676 - DNA, 531 bp, Homo sapiens
agaaaacaaaactgaagtataaattaaccaggattgctaataatgtgagccagtattaaagtataagaacgtcctgctgttctcttcccttctgtatgtaaatagtcattggagatccaggtggtatcatgctgaacctgctaaaataagtagtaagcagtgtcatgagctatcaaattaagtagaactctttcatgtaattttaagtatccatgaaatttttttccctagaagtctttacaaatctaccttgcrtcctgttttcttaggtcaatgttgccttgcctgggaaggaccacccgggcaatcttatatatctactgttctctaaaaatgccacttagaagagaattgaaacttccaaacacatgaaaggatccaaggaaagtgtcttcaaacaattacatatgagctttaagtggaataaaaacagagttaccatgaaaaaaatcattttcattgctgctcccatacctaaaagctaagagtgggagaggggtgctaaaaaaaacccagtgtttgtgcgtcttt

SEQ ID NO: 327677 - DNA, 611 bp, Homo sapiens
atatacctaaggtgaaactgtttgattatctaatggtaccaatttagaggtctcaggatggtggrgattaattttttaaaccaaaatgttaagccctcaataacaacccctggaaccaagaagagtaagcatggaatgttatcaggtggattttcctgacctgatgaagaaggcacgagtaattgataatagcaactaccagacttgcatgccaggctctgtgccgaattgttggcccatatcatatcatttaattcttacaacccctcctgatctttgttttacagatgaggaaattgagactcagagaggttgagtaactttcccaaggtcacagagttagtagtgtacctaggattttaacccaagtctggctgagtccaaagcgtaagttcttaactgtcatgcccaatatccctctagcttcagagtcaggcagggctagaggacagagcccagagccaaacctaaaaggaaggttgacttttaaggggtgaaaatgcagtcacgtcaagaagaaagttatccaacatctgttcacagggccaaggcctcctcctggcagagtagatctggttggcagggaaggaaaattggagttgcatgaggag

SEQ ID NO: 327678 - DNA, 611 bp, Homo sapiens
atatacctaaggtgaaactgtttgattatctaatggtaccaatttagaggtctcaggatggtggagattaattttttaaaccaaaatgttaagccctcaataacaacccctggaaccaagaagagtaagcatggaatgttatcaggtggattttcctgacytgatgaagaaggcacgagtaattgataatagcaactaccagacttgcatgccaggctctgtgccgaattgttggcccatatcatatcatttaattcttacaacccctcctgatctttgttttacagatgaggaaattgagactcagagaggttgagtaactttcccaaggtcacagagttagtagtgtacctaggattttaacccaagtctggctgagtccaaagcgtaagttcttaactgtcatgcccaatatccctctagcttcagagtcaggcagggctagaggacagagcccagagccaaacctaaaaggaaggttgacttttaaggggtgaaaatgcagtcacgtcaagaagaaagttatccaacatctgttcacagggccaaggcctcctcctggcagagtagatctggttggcagggaaggaaaattggagttgcatgaggag

SEQ ID NO: 327679 - DNA, 611 bp, Homo sapiens
atatacctaaggtgaaactgtttgattatctaatggtaccaatttagaggtctcaggatggtggagattaattttttaaaccaaaatgttaagccctcaataacaacccctggaaccaagaagagtaagcatggaatgttatcaggtggattttcctgacctgatgaagaaggcacgagtaattgataatagcaactaccagacttgcatgccaggctctgtgccgaattgttggcccatatcatatcatttaattcttacaacccctcctgatctttgttttacagatgaggaaattgagactcagagaggttgagtaactttcccaaggtcacagagttagtagtgtacctaggattttaacccaagtctggctgagtccaaagcgtaarttcttaactgtcatgcccaatatccctctagcttcagagtcaggcagggctagaggacagagcccagagccaaacctaaaaggaaggttgacttttaaggggtgaaaatgcagtcacgtcaagaagaaagttatccaacatctgttcacagggccaaggcctcctcctggcagagtagatctggttggcagggaaggaaaattggagttgcatgaggag

SEQ ID NO: 327680 - DNA, 568 bp, Homo sapiens
acattgtactacacagaagggatttctttccccttacacggtttctaagtcttggttagctacatgactgggtttctgcattttttcttttattctttcattcattctacaaatatttattgaatttttactatgcacaaggcactgttctagacgctgggaacacagtggtgaacaagacagagatcttgctttcctctaatgctgattctgggaggggcaggcagacaatgaacaacaaacaagaaaatatcagaataaaagtgttagacagaaaacagagcagagtgatgggatggaaagtaacagcaggaaataacttagattgagtggtcaagaatggcctcttaggggaggagattttgagctgagacctgaatgcccccaaaaagccagccacatgaagatgggagaaaagcagatttttcagtcaaaatacacacgtatagatttcccagttaygcactctgtaacctgttttttcagctactcaagataacttattagattgccagtgaatgaaagtgtcatcctatgaggaataaagcaacacattttattctaaatt

SEQ ID NO: 327681 - DNA, 568 bp, Homo sapiens
attcttacgaattctttatcatgattacactcctatctagtataatttgaagrtaaagtagggcctttggaggtagactagcataggtttgaaatgtttccttcattcattatcagctgccaagagtaacctggggacgattccgtgcttcgtaaacatggtctcttcatatacatgctgatatacaggaaagacctttgcagaactccatgaaagtttgttttttattattgtactaaaaattacatatacctgaccagacacaaaactaagctgtaagttttctttaaacctccttaatattttgtcctttaagcataagcgatgttgcaaagcacccctttaatttatcctgtgtaaacaatcactatagtctgcaaaatagattgcatttcttatgaaatccactttgtaataacattttgtatacagaatgatgcattcagtgaatgaggtaattaatgctaaaggataaaaagattatttaaaaaatttaccaaactataccttgcttcctcagtagctatgcataggtaagtctgttattctgaaattatggttgactgaa

SEQ ID NO: 327682 - DNA, 568 bp, Homo sapiens
tgcttccaacctgccaaccatgcttagactctgagggctccaggattcctaattcataaaaaaaacaccccagagaggtgggtaagtgcttttcagaaaaagcaaacttaagcaagtgattttaagagatttgaagagtgctacatggcagccaagatgataattttttggcccaaatataaatttaattgagtagtgttataaagacaaaattacatagccagaaacagaattatgagcattaggaaaataatagtgttgtcttscatctccttgaaatcccctgttatgttactcactccactgttgactattttgtagatagcacacattcaccttgcatttggcagagaacaccagctttgctatgaatgctcacaatttttgtaatacagggaaatatttaacatactaggaaaaaaaggtttaaattcattaacattactattgtaatgttcatatactcctcttttcttaggacacactacaaatgattttatagtgtttccatttaacacacatagtagcttttcttctggattgtatgtgcagtgccattgaacagaag

SEQ ID NO: 327683 - DNA, 564 bp, Homo sapiens
tgcacacttgacccttgaacaatacaggtttgagctggacgggtccacttatatgcagatttctttcagtgaaagttacactgagtgcttctgcctctcctgcctcctcttccacctcttctccctcttctgcctctgttacccctgaaacagcaagaccaacccctcctcatcctcagcctcctcaacatgaagacagtaaagatgaaaacctttatgatgatccatttctacttaatgagtagtgaacaaattttctctcttgcttgtcttatttttttgtagtttacatgtagtttgtaaggatgcagtatataataatatcacatacaaaatatktgttaatcgactgtgttatcagtaaggcttgcagtcaacagtaggctattagcagttaagttttgtggagtcaaaagttttgcgtggatttttgttggatttctgacttcacagggagtcagtgccccaacccctgcattgttgaagggtcaattgtatttttgtctgatttcatgagggtgaactttttatactatacttttacagatagaaatgaaagtactt

SEQ ID NO: 327684 - DNA, 564 bp, Homo sapiens
tgcacacttgacccttgaacaatacaggtttgagctggacgggtccacttatatgcagatttctttcagtgaaagttacactgagtgcttctgcctctcctgcctcctcttccacctcttctccctcttctgcctctgttacccctgaaacagcaagaccaacccctcctcatcctcagcctcctcaacatgaagacagtaaagatgaaaacctttatgatgatccatttctacttaatgagtagtgaacaaattttctctcttgcttgtcttatttttttgtagtttacatgtagtttgtaaggatgcagtatataataatatcacatacaaaatatgtgttaatcgactgtgttatcagtaaggcttgcagtcaacagtaggctattagcagttaagttttgtggagtcaaaagttttgcgtggatttttgttggatttctgacttcacagggagtcagtgccccaacccctgcattgttsaagggtcaattgtatttttgtctgatttcatgagggtgaactttttatactatacttttacagatagaaatgaaagtactt

SEQ ID NO: 327685 - DNA, 568 bp, Homo sapiens
attccactctctacctcgatgagaacaactcttttagctcccacgtatgaataagaacatgtaaactttgtctttctatgcctcgcttatttcacctaacataatgccctccagctccactcatgttgctgcaaatgacatgatttcatttttttatgacctagaattccattgtgtatatatatcacatttcctttatcagtttattcattgatagacattaggctgatcctgtatctttgctattttgaatagtactggaaaagacatgggaataaaggcatgtttttgatgctgattttatytcctttcaataaatacacactagtgagattgctgggtcgtacagtcgttccatttgtagctttagctttttgagaaaactacatgctattctccataatgcttatattaatgtacatttccaccaacagtgtataggagttcccttttctccacatcctcaccagcacctgttatttttttgtagctttaataacagccatagtaacaggagtaagatgataactcattgtggttttaatttgcatttccatgatgactagtg

SEQ ID NO: 327686 - DNA, 568 bp, Homo sapiens
attccactctctacctcgatgagaacaactcttttagctcccacgtatgaataagaacatgtaaactttgtctttctatgcctcgcttatttcacctaacataatgccctccagctccactcatgttgctgcaaatgacatgatttcatttttttatgacctagaattccattgtgtatatatatcacatttcctttatcagtttattcattgatagacattaggctgatcctgtatctttgctattttgaatagtactggaaaagacatgggaataaaggcatgtttttgatgctgattttatttcctttcaataaatacacactagtgagattgctgggtcgtacagtcgttccatttgtagctttagctttttgagaaaactacatgctattctccataatgyttatattaatgtacatttccaccaacagtgtataggagttcccttttctccacatcctcaccagcacctgttatttttttgtagctttaataacagccatagtaacaggagtaagatgataactcattgtggttttaatttgcatttccatgatgactagtg

SEQ ID NO: 327687 - DNA, 576 bp, Homo sapiens
ttggggcgagttgatggcttaagctctggagttcaagataagcctaggcaacatagctggacctcatcactaccagaattaaaaaataaaaattaaaaaatcagctgagcatggtggcatatgcctgtagtcctagctatatgtgggaggctgagatgagaggatcacttgagcccagaattcaaggtaacagtgagagccatgatcatcctgctgccctccagcttgggtgacacagtgagaccatgtctctttaaaaaaaatgttgcacttatatcttttattattcttagagtaaggtaaagaactataaaactcagtcacaaatgtgggcatattttcagaagtgaacactttaactgcactttaactaaacttcatgagtactcaataayttatgtctgtgtcacctagtcctcattacccaataataggtcttgtccaaattacactcattctataagtccagaacagttagtccccaagctattttgaatcttgaatcctgaagactacaaaaattgatacttaggaaccttttgcaattttgtgaaaaagtgtccaagattttcctta

SEQ ID NO: 327688 - DNA, 576 bp, Homo sapiens
ttggggcgagttgatggcttaagctctggagttcaagataagcctaggcaacatagctggacctcatcactaccagaattaaaaaataaaaattaaaaaatcagctgagcatggtggcatatgcctgtagtcctagctatatgtgggaggctgagatgagaggatcacttgagcccagaattcaaggtaacagtgagagccatgatcatcctgctgccctccagcttgggtgacacagtgagaccatgtctctttaaaaaaaatgttgcacttatatcttttattattcttagagtaaggtaaagaactataaaactcagtcacaaatgtgggcatattttcagaagtgaacactttaactgcactttaactaaacttcatgagtactcaataacttatgtctgtgtcacctagtcctcattacccaataataggtcttgtccaaattacactcattctataagtccagaacagttagtccccaagctattttgaatcttgaatcctgaasactacaaaaattgatacttaggaaccttttgcaattttgtgaaaaagtgtccaagattttcctta

SEQ ID NO: 327689 - DNA, 554 bp, Homo sapiens
gattatcacaatatacttagaaataagtttgtacaaagtttatgataatggctttaagcaaacgaaatacatggggcatctcccgtcttgawaatgaacatccatgaaaaatccacaatttacatcgtactttaagatgaaaagactgacttatttctttctaagtttgagaataaggcaacaatgcccaatctttccacttatcttttttaaaattttttattttatttaccctgatatagagtcttgctctgtcgctcaggctggagtgcggtggcacaatcttggctcactgcaacctccgcttcctgggttcaagcaattctcctgcctcagcctcctgagtagctgggattacaggagccggccactatgactggctaatatttgtatttttggtagagatggggtttcactatgttgaccaggctgctcaaactcatgacctcatgatctgcccacctcggcttcccaaagtgctgtgattacaggtgtgagccatcatacccagccaaaacttttaatattgtacaaattgctaatataaagctaaa

SEQ ID NO: 327690 - DNA, 554 bp, Homo sapiens
gattatcacaatatacttagaaataagtttgtacaaagtttatgataatggctttaagcaaacgaaatacatggggcatctcccgtcttgataatgaacatccatgaaaaatccacaatttacatcgtactttaagatgaaaagactgacttatttctttctaagtttgagaataaggcaacaatgcccaatctttccacttatcttttttaaaattttttattttatttaccctgatatagagtcttgctctgtcgctcargctggagtgcggtggcacaatcttggctcactgcaacctccgcttcctgggttcaagcaattctcctgcctcagcctcctgagtagctgggattacaggagccggccactatgactggctaatatttgtatttttggtagagatggggtttcactatgttgaccaggctgctcaaactcatgacctcatgatctgcccacctcggcttcccaaagtgctgtgattacaggtgtgagccatcatacccagccaaaacttttaatattgtacaaattgctaatataaagctaaa

SEQ ID NO: 327691 - DNA, 604 bp, Homo sapiens
cagtctccttcatagcacaaagcttaattcaacagttttcaaaaagcagagcaaatgattataggaaagaaggttacagaagatgctgacaaggaaacttcccagaagaatttagaagaatatggaagataataagaaataattttagaagtcaccaagttctagtttcatgaaattggcttgaatatatactttgtctcttttgtgtagacaaaaactattttgtatgttttattattgttgcctacctcatttgtgaagaaaattgtttaggttttcaagaatagtagtgaaacaaactagagttaaatgacactatttgtatcaataccagtatttagctttyagaaatgttcatatattataaagcttaagtaaatcaatggaaataaataagcactggaacaaaattatgtgtgtcagaaatttttatggaactataaaggattgaattagatattcatcatgtatgttgaagagtataaattataaactacacaatattaaacaagtggcttaataatctacacaagtaaaatggacataattcaacataaaataaatgttatttataattctaactataaccttaaatatgaagaac

SEQ ID NO: 327692 - DNA, 543 bp, Homo sapiens
gagggatgaagataaggaaaggggaaaagccagaggcaacctaattatcatgttcctacatttttccaaaaaagggatagacattgcttgtgtttgatattcaaatgtgtttaataacccatcattttgtatgctttgcaattatcctacagctgccccttctcaatgtttggaacctccatagtatccatatagcttttgtctttaattcatgtatctgtgttgcaattcaagttacacatttaccatatcttgattatccaattgccaagaaagctttgctgaaatcagattcagctttgatgaagcttatttagaataaatattgcttgctggagcacctaattgtccaaggcctgtgagatttgacagtatcctgttcactgaaaaattgcactgcagcaggaaagagggtacaataagtattgatttattttgtgcatagaacttgttttgccacagcttgtgaattgcctcatgagctgacaatctattaagtattgctttgtgtrtctcttccttcattattgcttcttttattgc

SEQ ID NO: 327693 - DNA, 604 bp, Homo sapiens
attatttatattttagtaatcattttacgtggatgttaatttggagtacttccagttatacaatcagcccttgacatgggtagaattagctacatttgattttttttgtgacttttttttgcttgagaattaattcatgtggtagaagatgtctttcgagacgcagatgatgtctccaacccttgtggcactgcatactccttcattaaaataacagattgtaaataggcaattgtagtacagtgattttacagatgggaaaaacaaacaaaatgaattatttaactctgtcattcgatatgcaaatcaatctgaattttgtggcgtttactcttattgaagcattttctcatgggtttccaccccyggtaagttagattaatgtaattaaactttggaatgctgaggtgggtggattgcttgagcccaggagttcaagaccagcctgggaaacatgacaaaaccagatctctacaaaaaaatacaaaaattaacccagcatggtggtgtacccctgtagtcccagctactctggaggctgaggtgggagaatcacctgagtttacaaagtcaaggctgcagtgagctgtgattgtgcctccgc

SEQ ID NO: 327694 - DNA, 633 bp, Homo sapiens
cttttatatttcctacctatgcaacatattcttaatgttggaggtcaaatgaatgataagcccaaatgcaagtgttttgacttgcttccatggtaatactttcmcaccatttattgttcttatttatttccctgcatcactgccccaaagattgatttttcagaattttgggctatatcatttttttcttcttgagcttcaatagcaagaacagttcctaaagcagagttgctaaatggaaaagtgtatatgaatacaggcaaggtagagggtgagggaagtgagacaaaaaaattgtacaatgctgatttaagagtgccataaggaggtctatccaagaatatgagaatatggaaaagtattttaataataatattcagtaaaatattctataatttttctccttaacatagcaaaaaattcaatttatgttggttgtaataatgtcagctttcttatcatatgttctatttaatgctttaataatatctaattggggcctcattattgtcccttgctctagatagcatcctctattgtttcttttgtggtatatgtctgttttatgttttatttggtaaccttttattgactaccagtaatgtctcttaccttgatctcctcttccatatt

SEQ ID NO: 327695 - DNA, 610 bp, Homo sapiens
atgaacagaaattgaaagttttatattaattatattaggttacatttgatccctaattgcacccaccatgtacatgcttaattataaactcaaggaataaaaatagtcatgtattctccaaataagagtcacaaattagtcttattgtagttacatgctgatttgaaaggcttaagcaataagaatattggctattgttaataattcctgccatatgttctgtgattaacaaataaaaagatgatttcatgactttttttgcagtgtggggggaacagcgtctcactccatcacccaggctggagtgcagtggcacggtcgtggctcactgcaacctctgcatcctgggttcaagcgattgttgtgcctcagcctccttagtagctgggactacaggtgctcaccacaaagcctggctcattttttttattagtagagacagggttttgccatgttggccaggctcatctcraactcctgacaagaagtgatcctccagcctcggcctcccaaagtgctgggatgacaggtgtgagccaccatgctgggcctcatgactattctttatagaactaatgcaaaatacagatatacaatagcttacctccat

SEQ ID NO: 327696 - DNA, 602 bp, Homo sapiens
ttatagtgttttgttatagcaaaccaaacaaagtaagacataatgtttccaaaaacaataatatggtttcctctgaaaagtattaacaactcaagtaagtgttagtttacaagtgtgtatacaagagaattaaataactccaaaayaaaacttcattcccaacattttctgttcaccaaacaactatccgtataaatatgcagtttattttttacaattaactcccaattattattttaagtagattttccctctgtgacctcaagtcctaatcatgtgggatgaaaaaaagtatttcagacaatagggccagaaagacctgattacagtaatgtgtctattttattgttttttcaccataggcaagttgttcacatatctattcagtggttaaaagtgccttttaaaaacactgttgctctaaggattgagttattatactttatattacttaccattgtgcctgctgcataaaaacatgcttagtgtattatacctatttttacatgtatagcacaaaatagataatatgcacaatgcccagtatttactcaagaataacagatattggcattgtaatattgttgaatataaaaccatta

SEQ ID NO: 327697 - DNA, 602 bp, Homo sapiens
ttatagtgttttgttatagcaaaccaaacaaagtaagacataatgtttccaaaaacaataatatggtttcctctgaaaagtattaacaactcaagtaagtgttagtttacaagtgtgtatacaagagaattaaataactccaaaataaaacttcattcccaacattttctgttcaccaaacaactatccgtataaatatgcagtttattttttacaattaactcccaattattattttaagtagattttccctctgtgacctcaagtcctaatcatgtgggatgaaaaaaagtatttcagacaatagggccagaaagacctgattacagtaatgtgtctattttattgttttttcaccataggcaagttgttcacatatctattcagtggktaaaagtgccttttaaaaacactgttgctctaaggattgagttattatactttatattacttaccattgtgcctgctgcataaaaacatgcttagtgtattatacctatttttacatgtatagcacaaaatagataatatgcacaatgcccagtatttactcaagaataacagatattggcattgtaatattgttgaatataaaaccatta

SEQ ID NO: 327698 - DNA, 602 bp, Homo sapiens
ttatagtgttttgttatagcaaaccaaacaaagtaagacataatgtttccaaaaacaataatatggtttcctctgaaaagtattaacaactcaagtaagtgttagtttacaagtgtgtatacaagagaattaaataactccaaaataaaacttcattcccaacattttctgttcaccaaacaactatccgtataaatatgcagtttattttttacaattaactcccaattattattttaagtagattttccctctgtgacctcaagtcctaatcatgtgggatgaaaaaaagtatttcagacaatagggccagaaagacctgattacagtaatgtgtctattttattgttttttcaccataggcaagttgttcacatatctattcagtggtwaaaagtgccttttaaaaacactgttgctctaaggattgagttattatactttatattacttaccattgtgcctgctgcataaaaacatgcttagtgtattatacctatttttacatgtatagcacaaaatagataatatgcacaatgcccagtatttactcaagaataacagatattggcattgtaatattgttgaatataaaaccatta

SEQ ID NO: 327699 - DNA, 549 bp, Homo sapiens
gctcccccgcctccgcatgctcgccgcgctctcccctcagtctctcgctcctgtttctcctcagattcgcgtcgggacgacgagccccgcgggaggattccagcctaggagggggccgggccggcgaaacggaaccgagcgggagtcagtgcccgcgcggtggccgggcggagcggggctgcgggagccgcccgcgcggcagcagaagcggcggcggcggcagcatcccccgcgctcggcgcctgcactcggagttgctgctgctggcaggcatgagtgttattatagtgagcggcgttgccggtccattgcactgagccaatggcwgggagccactgggctgatactgagagctgtcagaggagtacatctgtcacccgctgcctcccccgcccaccccgccgccgggacccgcggccgcgccagcccgagcgcgagtgggagcgccccgcgcggcgccgctgccgcagagggccggggacgcgacggccaccgccaagtgggagactcctggaaggtgggggcggagaggaagcgaagaggccgcga

SEQ ID NO: 327700 - DNA, 548 bp, Homo sapiens
ggagtaggtaaatctttcctgagtttacctactgatgtttaacactatatgttactacctccacatgcctttccactggactcgctacttcrtgtcataaaaatctttggatgcttttactatgtctgaataacttcccatcactcaactgaaaaaatccacaaattagattgacttctgggttccagcaattcaggcttacctgggcttttgtgaaccaagtttttaatcttatgtcatcctgaaataacatacaaagcaaatatgtattccaccacttttcatatgtgtctgggacgtattcatagtcatcactgagtatattttgggattcaaaattttccttttcattactgtaataatcttaagcatatttttatcatctgtataaccatacagctggataatttggaacttagtgttgccactatttatcactttggtttacattcatgtttattatcacattggtgcccaacactactgcttttattatttgtgaataataaaaatttaacactcgattgttcactctaagttaatgccaa

SEQ ID NO: 327701 - DNA, 494 bp, Homo sapiens
tggtatcagagatgaggactttggaaggtaattaggtcatgagaactccaccctcataacagattagtgcccttatagaagagggctagagagttcttttgcccacttcccccatatgggaagaagtctgactatgaggaagcaagctctcaccagacaccaaattggcaccttaatcttggaattcccagcctctagaactgtgagaagtacatttctgttgtatgtaagccactcaatcagtggtattttgttataacagctcaaacaggctaagacactgagaaaaaaaggaaatgttgacatggttcaatactaatagtgtccaaattatgtaaatccatacatagctaattttattatcatatcttttatctaaagataacataactracagggagagaggtgaactttacccaggtcataacacaagtgactggctgtagtagactttcttgctaaattgggtgcaagaacactattctggagtgaaa

SEQ ID NO: 327702 - DNA, 510 bp, Homo sapiens
ttaccattatctagctcattaccttccttatcacatgtgttcaatattttcaccgtagcactgagtccctgaagacaaataatcaacaatttyacttgtcagtgttgctattgccatgccttcagaacagaactcaaagagcgaaataaattgaactacatctatctaccacacctactttctttcctttatgtttttccctaaaatatcccaagcatgtggcccttaggaaaactgactcaacacccttgtccctcgggccctggccctctggcccggtgttcccgtctcacacaccgagtgttctccctcgccgtggtgtgcggtgagcagccggcattgtgatgacacaccactgactgcttccaacgtgcctcctgacagctatcttcacaaataaaatgtaaattgaaactgttccaaaaaacatccatgacctcaagaagatttatcagctctcctggtgtatgcagtaaatgaaacgttattattctctcttcacacaaattc

SEQ ID NO: 327703 - DNA, 510 bp, Homo sapiens
ttaccattatctagctcattaccttccttatcacatgtgttcaatattttcaccgtagcactgagtccctgaagacaaataatcaacaattttacttgtcagtgttgctattgccatgccttcagaacagaactcaaagagcgaaataaattgaactacatctatctaccacacctacttkctttcctttatgtttttccctaaaatatcccaagcatgtggcccttaggaaaactgactcaacacccttgtccctcgggccctggccctctggcccggtgttcccgtctcacacaccgagtgttctccctcgccgtggtgtgcggtgagcagccggcattgtgatgacacaccactgactgcttccaacgtgcctcctgacagctatcttcacaaataaaatgtaaattgaaactgttccaaaaaacatccatgacctcaagaagatttatcagctctcctggtgtatgcagtaaatgaaacgttattattctctcttcacacaaattc

SEQ ID NO: 327704 - DNA, 656 bp, Homo sapiens
gcatgaccaactttagacaagtccaaaatttactagtctaccttgactactcctcctttcgtacctccccaaatccagtcaatttattcaatgaattttttaacaaagcctcaaaaatctctatcatatttacttcattctccattactatggccaatacactctccaagacttcagtctttatttgccacacaccattactctacaatactctttttgaaatacaaacatgacaatagcttaagcttatgtcaagcctctgtgtgaaacaccagtacgtggtaagaattcaagtagtttatttgaattgcatttatttgcactaagtttttcttacctcatgtttaaatcttcaaatatattggtggaaataaaatagccaagcatacaaagtaattgaattgttagtaaattgccattacttataaaattacatttttgagcttgaatggacttataatacaatgacatatgttcccagaagctaaaactaaatcatctcatttattaaacacaataaaatcattgtacacatagktctaatgttatattctagatggtaaatttgataatttataataaaaaaaggaaattttagttatctaatttggcaattttcttattgtcaatacttatttaaaatattgggatttgta

SEQ ID NO: 327705 - DNA, 593 bp, Homo sapiens
ctgtagtattcctgtctcgtcccttaccaccccccaaagktttccatttcttattcttaagggttggttgatgagggaggaggtcagtcttctgtatctattttctgctgattaggagtgatggccctgcctagcaagagcatagaaatctctggctgcctgttctaagggtcaaaagggtgggtcattggaagaatctgaacccaaggcaaggattggttggaatccttgcattgccatcattttgacatggaaccattgaaacctcaaagataaaaactttacgtggaggttaaacaagcaaggactaaagattaggagtaataaggtagccattaaatgtcccaggaaaggtagatcaaaccatctgggattctttcaaagggtatctactaagtatgacatgggaagtatcctttgatagaatcccagatggtttgaacagtggtgttattgaaattatgtagccaggtagcctgctgataaatcctgtgaacttgcagttcaactaatcctgaattgttaatataagaacagctgttgtttattactgtgcaaacccctccatgttcagctagacaataaagactcat

SEQ ID NO: 327706 - DNA, 518 bp, Homo sapiens
aagttctcaaaaggtctaaaatgggatggattctaatctttcttggataatttaagaggcatcttgtgtgatgataaggaaatgaagtagatgacccctcgatgtcctttctagactagaaattatatgacaatgtattctaataaattttcatagttaatgaaataagagagggcttctttttaaactctacatttttaaaattattttttctctgtaaagttaaggctagtttaaagttaaattgggtgtgaaattgtttctaaggtattttaagcaagaggttgcgtataatttttttcacaataatagcattttagaaaatttgaaaaatacaaaaatgttgaaggatcaaaaagaatcactcataacatactcatatatgtttatgtttaataacttggcacstatttatatattatgttcagtagacgaaatcaccacgagcgatattttattcttagcccttcctaagttcaactcaccctctaaactccctacctgaattcccacgcttt

SEQ ID NO: 327707 - DNA, 507 bp, Homo sapiens
tctcttgtgggaaaaatccacagtctacaaagaatcacctaccccctttgttctttgttttcctcccttccttcccagatccaggagatcatcaactaagagccaggcaccctcttaagtatgataaaaaaaaacaatttacaacctgctctctctgaagtctgctatctaagagcttcctctgcacaataaaacttggtctccacaatcctttatctttaacctgaaccttcctttctatcgatcccaggtctttagacaaactcaaccaatagctgaccagaaaatgtttaaatttacctatagcctggaagcccccacttcgagttgtcccacctttctgaaccaaaccaatgtatttcttargtgtatttgatcaatgtctcatgccttcctaaaatatatataaccgagctgtgccccaaccaccttgggcacatgttctcaggacctccggaggactgtgtcatgggccatggtcactcgtacttggcccagaataaatgt

SEQ ID NO: 327708 - DNA, 601 bp, Homo sapiens
caatccaccattgatggatacctagattgattccaggtttttctacttgtgaataatgctgcaataaagatacaggtgcatgtgtctttttggttgagtgatttattttcttttggatatatacccagtaataggatagctggatcaaacggtagttctaagtttcctgagaaatctccaaactgctttccagagtgtatgaactaatttactaattcttgacaaaagcgtaaagtgaacttgtttcaccatataaaaattagggtgaaaaaataataaaaatactttcgtaacttatgaatactataaaatactttcctaactcatgaatactataaaactataatgttatataaactatatatatgactacatacctaaaactataaatgttaaaaagtttgataaaaatgatgtttayaaaaacaacttgtacacacaattatatgcttaagctattttatagttttgggtttaacagattaaactgtcacatgggtagttatatcagacacaatgtaccccgcaagatggacaacatttacactgatttgtttcatattcactgagacaagtttcctgattacacactttgaaggtt

SEQ ID NO: 327709 - DNA, 536 bp, Homo sapiens
gatttctgtccttgagtttatgcttttatcattcatcatactttgtttaggtaatcacttccactctcataattttgacttgctcttgaatgctgatgactcagtaatttgyatctcctatctgtcctctctccatcaaactttagttatgttatatcattgcctgatggccaattacctctgaatgctctacaaatgtttcccattatccagatttaaactggaattgattttattttcctacttgctcctacttcatgtattatatcagtcaatgattctacatcttagaatcatccttgacattattcttaatgtctacaattaattaagcaatgatctgtatcagttagaattcaatcaggataaataaattacacattaattttaaatggtaaaattaaacataaagaattatcaattatatcagaagaataaaaggtaaggataattctttaaaaaataccgtaggtctgaaagagagtatccaaagaagagacaaacttggaagtggaattttcttcccaatattgtgt

SEQ ID NO: 327710 - DNA, 595 bp, Homo sapiens
ttagttcctattctagaaaaagaactaaaaatgttttaatagaattgaattgccaaattcaatggatgtttcttcatgcttcatattaaaacagtgttctctaatatttagcatcactgatcactccatacttgaggaaatatctaatttcctctcatggctatttctacagttttcttataaattattaaatattagagttccctagatttctgtccttgagtttatgcttttatcattcatcatactttgtttaggtaatcacttccactctcataattttgacttgctcttgaatgctgatgactcagtaatttgcatctcctatctgtcctctctccatcaaactttagttatgttatatcattgcctgatggccaattacctctgaatgctctacaaatgtttcccattatccagatttaaactggaattgattytattttcctacttgctcctacttcatgtattatatcagtcaatgattctacatcttagaatcatccttgacattattcttaatgtctacaattaattaagcaatgatctgtatcagttagaattcaatcaggataaataaattacacattaattt

SEQ ID NO: 327711 - DNA, 569 bp, Homo sapiens
acgtccctcctaagagaactgtgatgaggtggtaaccaggccagaaatgaggctgccaacttaccgaggaacagcataatatggattgtatctgtatwgcaggaggaagaaaaggtcccaagaagcacacacaaaccagtaggggaaatattttcctttctataacagaagatatcttccagctgtaaagaagaactgttttacagtgtccatttttattatcacagagcaggtaatagacaataaatttggagctgagaggtaatacctctgtacttgcaaattgctgtcaaatacatattatgttaagcataatttatattgaatttgtatatacaaattcatgatacaaatacataatttgtattgaatttgtatataaattccctttcctctattactgtcatctttaaacttctgccaccatcccaatttagaatgtatgttctgtagattcagtgaaatgacctatctaaatgggaactctgagtcttcctaaaagtctttcaaaatgacttattattcataaactccaaaattatttatctatcaaatgagttaggctttgt

SEQ ID NO: 327712 - DNA, 619 bp, Homo sapiens
aaacaatctttactctcaagaagcttaaaatctggtaggtgaagcctgcaataataagcacaatgacatcgattaactactgcagccttaatcgtacttaagtgtaccttcaccagcttctgcttccagttgagcatagaagaaaaaggtaaatcctacaatatgaaaggatcaaaatgacaatcaaaaatctgtcattgtaattcaccgcctgaataaaaatgcaggacaaagatgtagacaaaggaacagaagacagctttcttaatctgacacaggatatccagcaaagactttaattaacattatacttgatagtgaggtattgaagagtacctgcccccaggcgtctttttcactataccactttcaaagaattttctgtctcaggttcagcttctacaaaattcaacctctaacagatataaataaatcaatttagaatttttcttaaaatattgaaaaacaatcataatgatataagaamtaaaaatagatatcaaaattaaataaaaaggaataaatacgtgaatatacataaatccaaactaggctttaggaaagataaaggaatagtcttcatgaacccagttaatttaaacagattaaaaaaaaaaac

SEQ ID NO: 327713 - DNA, 619 bp, Homo sapiens
aaacaatctttactctcaagaagcttaaaatctggtaggtgaagcctgcaataataagcacaatgacatcgattaactactgcagccttaatcgtacttaagtgtaccttcaccagcttctgcttccagttgagcatagaagaaaaaggtaaatcctacaatatgaaaggatcaaaatgacaatcaaaaatctgtcattgtaattcaccgcctgaataaaaatgcaggacaaagatgtagacaaaggaacagaagacagctttcttaatctgacacaggatatccagcaaagactttaattaacattatacttgatagtgaggtattgaagagtacctgcccccaggcgtctttttcactataccactttcaaagaattttctgtctcaggttcagcttctacaaaattcaacctctaacagatataaataaatcaatttagaatttttcttaaaatattgaaaaacaatcataatgatataagaaataaaaatagatatcaaaattaaataaaaaggaataaataygtgaatatacataaatccaaactaggctttaggaaagataaaggaatagtcttcatgaacccagttaatttaaacagattaaaaaaaaaaac

SEQ ID NO: 327714 - DNA, 506 bp, Homo sapiens
gcaggcttcacttcaggctttacctaccaggaaagattgacagcgtcatgggaaaggatgggtccgccttgaatataaatgttggtagcatttatatctctgctacattaaatgtagcaggaagaacaaagataatggtatcacctagatccagaggtgagcctggttcccagtcccactggcctgatgagkttacttatataaaactaagttttctgatgtatagtataagcataatactttataggacttttgttcatgtccaaaaattaatataaagaaagcaaatttgctaaaaaaagataaaacaccaatacattaattaaatatagttaacaagagcacacacagattagtgacgtgataaaatgtaaggtattttgtgtagttaattgtataaaaattagaatcttttcttagcaagaattataaaagataatactcataaaccttaccattctgagcaaaacattgtggataatgtggtggtaatatcttctgagaat

SEQ ID NO: 327715 - DNA, 599 bp, Homo sapiens
gtaggtaaagaaaaactaaatgagtaaataccttattgtaggcattaggcagaacaaagataagagactatccctattctgacatttgcacagttgggcaacccaaaccaccaaaatttggccataacatctaaattaacatgatcttgataaactcatgtaytttggaaggtccagaacttgaaacaacaggggaaatcctaacatgagacagtgtgatcatgaatttaaataccatgaaacctgaatatacggaatatataatacaatttttttatgtgaagtattagctaaagggttaaagagattaatatttaatgatatctccattaatcttatgttggctgttttttaaatgtttaataaataggcatagttctctcactagctcccaagaagaaacagtaagataccaggatacactgtacctagtttacagtttagtagaggtgataaaacacatcttgaagaaagattttgaataaatttccacctttatgtggaggacagaaagcagtattttattcccagcccggaccattcagcactagcttggtaaatcatgggacaaaaaaaaaaaaaaaaatatatatatatat

SEQ ID NO: 327716 - DNA, 591 bp, Homo sapiens
tgggatcctagtgcaggatctcagtccaaaacaatggcctctcagtttttttaagcataatcacaatcaaagacttgaacaatgagaaataaaatggaaaggttgaggttacagggggaaaactcttgtaacctagtcaatagataagtatctataagaatttgagcttgatggtcatttgaatactacaatgaaaaaaaaccacaactgtggaatttatgggaatctcatatatacttgcataaatggagatcccaaaagaagaaacaaactttaaatgaggaaaggtacaakaaagtaggatatttgctcccaagtaatttctattcatctaccctcaaagatatattaccttgggttgtttctaaaatataattgagaatgaacttttgtttcagcagatttaaataaaacattataagaatgacttttaaaacatgtggataaggaagattcatttgcccagatcagtggtcctcaaacttaagtatgtttcagaatcacctgaaggttgttgaaagagatcactgggtcctgtcacagtgtttctgattcagtaggttggctgtggtgcataaaaattgaccacat

SEQ ID NO: 327717 - DNA, 600 bp, Homo sapiens
agctttgttaaaattaaagacagctgggtcttcccctaagattcctatgtactaggtttaagtagagtcctgatgcctatcactttaactaatctcagatgcaaatgctaagcagccagttttagggattagtggctttgtggaggagatgagcacgaagaaagaagacagtataaggtaagggaaccaagaaaaatcgactgaacrattataatctcagcccaattactctttgttgactgtggaatcctgacgaaatgtgtgttagccagatgttagtgatcatgcaaaacactgaaagtggtcagtgtacagtacaaattggggacctggttttgggccatgactcggccactagcttttcctagaatcctggataaattgtctcacctcttgagacgcactccctctatctgtgagatgtgggtgtagggattggtgtcatctaagatgcctttcaattcttacagctggtagctttagaagacagggctaagcctgtagatgtgtcagatgggttctaatgaccagctttgataaaaatgtccaaagtgggcttgtttctgacaattttcttatttctccagtaagtggattcag

SEQ ID NO: 327718 - DNA, 569 bp, Homo sapiens
aaatatgtgatcctgttaaatctgtaaacgttttaatgcaaagtggtataatttaattatactcttgtctttaaaatcaagcctatatgtctagcttgtaaaacataaaaaaagtaatgatttcaaatgagattggggggctggtattggttataaaaaaaaaaaagaaggaaaaccctttacttttgtatatggttagagttcccgatggaatttcagtttgatatgttaagggggacgtggttgaattagtaaatkgttgaaagacagtcattattaataatatcataattgtaactaatagcttacaagtgtctattactttgaagaccagttatctttttatgatatttaatgtagccatcctaacattgaagggaaatagaaattattgcacttatttttaaaatgaagaaaatgaacctcagagcatttaaattcttcattcgaggtcatgaaggttatgcatgtgggatacaaatttaattctcctattggcaaacccctttagcctatcttgggctttgctcattttctgggcagtccccagcctagcaacagttctggaa

SEQ ID NO: 327719 - DNA, 375 bp, Homo sapiens
tctggacagatgcaaatatatgtatgcacagcttggtgagcatatggcccctttgtgctaatgaggaaaagacgccccttgaagtggtcttctcggtgacaccctcatgcaggattcaaccttgaatatctttgcttgaggcaattcactgtctatctcttatccgacagcagaaagagaaggaaaataacacagggaagaaacatatttgaaatasagaaatataatatttgttatgatacacacctaagtgggacacagaactgatattgactttgagccgagggtatgggttaacagaaatgaagtcactgatttcctcagagttgatggtacagagattataagggagtaggaaaaaagtcacattttaaa

SEQ ID NO: 327720 - DNA, 375 bp, Homo sapiens
tctggacagatgcaaatatatgtatgcacagcttggtgagcatatggcccctttgtgctaatgaggaaaagacgccccttgaagtggtcttctcggtgacaccctcatgcaggattcaaccttgaatatctttgcttgaggcaattcactgtctatctcttatccgacagcagaaagagaaggaaaataacacagggaagaaacatatttgaaatacagaaatataatrtttgttatgatacacacctaagtgggacacagaactgatattgactttgagccgagggtatgggttaacagaaatgaagtcactgatttcctcagagttgatggtacagagattataagggagtaggaaaaaagtcacattttaaa

SEQ ID NO: 327721 - DNA, 591 bp, Homo sapiens
ttctagaaatggtagtagaattcaccccaggttctagaattcaccccaggtaacaaggcgaactccaacagtgccttctgccataccggccctaagtttccatttgggatgggcatttgacctgaaatctgagaatatttgatgggaaaattgagaaaatcataatttgccactctgttgctttgggcactataaggcctagtacttctgccttgcactgttcagcactgggcccrgaaaaaagcaacactcaggagatgagtgtcgacagaatagcagagaaatggagctgaattcttgatatgtctgaagcttgcctacctattaatccctttcaattctttaagacaaaaaaagttatatttatagcttaatttatagcttaattcattttgaatacagttttttgtttcttaaaagcaaaatcaccccacttaatattagtaagattgggagtgatgtgttgttaatagactgtcctcaattatgttatgcaggagaagagtgtagaattttctacctcaagtgagaaattgaagatttttctacattggtgatacaattgttagtgagtggtctctggaaagtttg

SEQ ID NO: 327722 - DNA, 591 bp, Homo sapiens
ttctagaaatggtagtagaattcaccccaggttctagaattcaccccaggtaacaaggcgaactccaacagtgccttctgccataccggccctaagtttccatttgggatgggcatttgacctgaaatctgagaatatttgatgggaaaattgagaaaatcataatttgccactctgttgctttgggcactataaggcctagtacttctgccttgcactgttcagcactgggcccagaaaaaagcaacactcaggagatgagtgtcgacagaatagcagagaaatggagctgaattcttgatatgtctgaagcttgcctacctattaatccctttcaattctttaagacaaaaaaagttatatttatagcttaatttatagcttaattcattttgaatacagttttttgtttcttaaaagcaaaatcaccccacttaatattagtaagattgggagtgatgtgttgttaatagactgtcctcaattatgttatgcaggagaagagtgtagaattttctacctcaagtgagaaattgawgatttttctacattggtgatacaattgttagtgagtggtctctggaaagtttg

SEQ ID NO: 327723 - DNA, 545 bp, Homo sapiens
ttcacaatagagtgcgctgctatgagaactaatgccactgctgatctgacaggaggcagagctcaggcggtcatgctcacccacccacctgctgctcccctcctgctgtgcggcccagttactaacagtccatggacaggtactggtccgtggcccagggactgggggccccttctgtcacccaaccaaactgggtccacttgccctcaaggaacggaagccaaacaccgaagcaccaagtttttgcaataggaaggctttattgccagttgagtgacatggagaccggaggaaatgttcctatctgtcttcccactggccttgccaccatagatgtaagagasagattttgagggtggggtttcggggcgggacgaagattggctggaaggaaggggctttgttgagtccctcggtcactcactgtcgccctacctgctgcttcatgggttgcatgtttaaaaacaatgttggcattagcatgacctggaagtggggttttgggccctctgacatcaaaaggtggctcgtgggtgagtcagtgc

SEQ ID NO: 327724 - DNA, 576 bp, Homo sapiens
cctccctctctgggttggtcatggccctgtcctgtgagaggtggtgtgtggatacctcctgctcctgagtgagcccggcgctccgtaaggagtcagggaatggatccgccatgccagcccagccctgtgctgccaggagcctgtctttctagaaggtgggagtgcgggcacaggctgcctgcccagctgcagagttccctcctcaagtgcaccctggagtggggacggaggagcctagggcactcmtgggctccaggttccctggctccctgccaccctcatggtgatctgtccttgcatctactggggtactcaagtaccccgggaggccttggagtatttccacctatttttccttcatggcctcccagtgtatgcttggggaaactgaggctggtaaggctgtagaacacatcacccacagcaagggccagaggggtacatgaccaggggaagaccaggcccttcagggctcatggccccagcccatggccacagagacagagagttttcacttgggtggacactgatgggtcctgctcccactgtgagaccgcgtccccctgccagctccac

SEQ ID NO: 327725 - DNA, 565 bp, Homo sapiens
aggctaacctgattaagcccgccaaacttaacctgtctttttcatcgcttacttctagttgatctattttaaactccccactagcaagtcacatagcaaatctcccacgaacttccttacagataacttccgaatgtgggtcactacagtaacggttgcttaaagttatttccaggaaccagttggcagctcttgtccacttcaagctgattaagaccaccgamccttcaactgggcctgcatgaatgcccaaagagaggtgactgtttgatgtcagagggccaaaacctccttcctcagatcatggtgatactgccatttttcaaacatgcattctatgaagagctgtgtaacttgactacatgtatgcagatcctaactaactcacttttccttacccccaatctttctcccccacaccttggagaaccttggtactctattccaaaaacatccttaaaatcccatctttggagaggtgggtttgagatttgttctcccatctcctcatttggcagtcttgtgagtaaaatcttttctctttgccaaaacaagtcatcgcagt

SEQ ID NO: 327726 - DNA, 503 bp, Homo sapiens
tgtagaaatgaagaggaagaattcgagaccaaatctgaaattttaaaaggtcattttagataggaatataagaccaaaaaacatcttaagagaaaaagtaaaaaagaaatcaacctaacatcctaacattaaatcaacaatacatacgacattaacaacattacatacattaacaacctaacatcacaacaaaaagaactataggaacaagagcaaaccaactccagagctagcagaagacaaaaaataacaaaaagagctgaactgaaggagcyaggcacgaaacaccattcaaaagaccaacgaattcaggaattgtatttttgaaaaaaaatcagtaagataaactattagctagacaaagaagagagaagatccaaataaacacaattaggacaaaggggataccactgaccccacaggaatacaagtaaccatcagagaatactatgaacacagccatgcacacaaactagaaaatctagaagaaactgataaattcc

SEQ ID NO: 327727 - DNA, 506 bp, Homo sapiens
  misc_feature (1)...(506): n = A,T,C or G
ttatttggggaaaatcttcacatcggattttttaaaagcaggcacaataagactgcagcaaaaccaaaacttttggatgtatrtactatttcttctcccagaatctccattttcctgtagtaacccatggcagagtagctttgtgagcctcagttatgcagctgtattttatttcattttcttttttctttcttttttttttttttttttttttgcgacagggtttcactcccatcacccaggctggaatgcggttgcacgatattggctcaccacaacctccacctcctgggcctcaagcaaatcctctggcttcagccttccnncagtagcagggattttaggcacccaccaccactcccagttaatttttgtatttttagtagagatggggtttccccatgttgcccaggctagtctcgaactcctggcctcaagtgatctgcctgcctcggcctcccaaagtgttgggattacaggcgtaatacaccatgcctggcgcattt

SEQ ID NO: 327728 - DNA, 506 bp, Homo sapiens
  misc_feature (1)...(506): n = A,T,C or G
ttatttggggaaaatcttcacatcggattttttaaaagcaggcacaataagactgcagcaaaaccaaaacttttggatgtatatactatttcttctcccagaatctccattttcctgtagtaacccatggcagagtagctttgtgagcctcagttatgcagctgyattttatttcattttcttttttctttcttttttttttttttttttttttgcgacagggtttcactcccatcacccaggctggaatgcggttgcacgatattggctcaccacaacctccacctcctgggcctcaagcaaatcctctggcttcagccttccnncagtagcagggattttaggcacccaccaccactcccagttaatttttgtatttttagtagagatggggtttccccatgttgcccaggctagtctcgaactcctggcctcaagtgatctgcctgcctcggcctcccaaagtgttgggattacaggcgtaatacaccatgcctggcgcattt

SEQ ID NO: 327729 - DNA, 567 bp, Homo sapiens
taaccagtttagatgaaaaaaggtaactttttacaagttgctgagaaaaaaaatcaaaagaaaatgggactaaaaagacaatctgcactgtagcaaccctgtaagagcatctgtgtaatgcaggctcagtgtttgccaagttaatatttacttctattagaagcttctaaatgccaaaatgaacttattaaaatgtcaccagtgactgtgtgcaggattacaggcaggttttcttctttccaccttttggaaattttccagattaaaaaagaaaaaaaaaaaccctagaaacaaaaaaacctgacacgcaccacttacttttatgatacaaaacaaaagtgaactattaagaaacattttttagccaggcgcagtgactcatgtctgtaatcccagcactctgggaggccaaagtaggtggactgcttgaacccaggartttgagaccagtctgggccacgtggtgaaaccctgcctctacaaaaaatacaaaaatttgccacgtgtggtggctaatgcctgtggtcccagctactcaggaggctgaggggaagaatgtttgagcct

SEQ ID NO: 327730 - DNA, 337 bp, Homo sapiens
aagaggacataaaaacaaatttgtttttccatagcacaaggcttttgtgccaaggtggccatgtgtgtcaaagtcaaggaatccctcctcctgggagccaagaggaagtctctcaaaactggaagggaaaggtgttttctccacatcaatccagttttggagacattctattagtgacatatgccccttcccccaaaaacaacaatgaagtgttctgtgtgcgaacaacatagcttaaaaaaaaaaaaaaaaargtaaaacaaaattctgcatttttataaaacttgataaaagtatttcaaactgtacagtcaccagaaatacacagttatcaaaa

SEQ ID NO: 327731 - DNA, 587 bp, Homo sapiens
gacatatcataatttcttctgaaattaaaaagtaacctgtatgtttgtataatgaaagaattcccatagtggatatttacctaaaaacaagttggacaaaacttcaaacctaatagagtgtaaactccacaaatctaaatatttatttaaagattatgaaaattaaatcactggaggatttttaagaaactcagaattgtaaatgcatttctctgaattacaaaaaacccagaggcataaaatataagattaatacatttgactatattttttaaattgggtttacactctgatatctcacctataaaccataacattgtaggagccttagctatacatatgttagggcagaagcaatttctcaaaattctttaagttactttttctcaagaatgttttatcaatattctacttttctaatatgttatagtcagttatgagaattacacttattcataactgttaaatctaaacattgtacccttctacattgtacacatctgcatctaarcattgcacctctatgtacgacactgaactcatttaagatcacaattcttaaaagaagttaaaaaaatatatatgca

SEQ ID NO: 327732 - DNA, 523 bp, Homo sapiens
aatacatttgttttaacatcgacttgtgtaagggtcagtttgccatatttggaagctcaagcataacctgaatgaaaatattttgaaatgacttaattatctaagatttaattttaaatattgttacttttaaagaggcatcagcaggtacagctttttttatgcacttgtggtaaaatttttttgaaaacactgaatttgtaaaaggtaatacttattttttttcaatttttcccttccaggttttcttttccctaatcaatgtaaaatgacaaaatttrccctggaagcaagtttttcattaaaactccaagaaaactaaaacatgtttcagtgaatagaaatcttgctgctttggcaagttcctaaaaaaaaaaaagtaatagatatgaagcgatgtatcttttagtggcaaggcttaagatatttctgattccttataaggcagaaatagaaaatgaaaaggagagcaatcagaaatatcgaggccaatttggaaattaggtaatggaggaaaaagacc

SEQ ID NO: 327733 - DNA, 610 bp, Homo sapiens
tcccttccttttaaccttgatggtactttataaagatgaacccttgagcacccaagatgcttatgtcttttagtacatgtaaatgtttaattctgcatggacgggcaagatattaaattggcaaagtatattgaattagcttttaaaatcacttgaagttcctaagggagaaattatctctatattattttagaactgccctcatacttgctgtacgttgtggatcagcaagtatagttagtcttctacttcagcaaaatattgatgtattttctcaagatgtatttggacaaactgctgaagattatgcagtttctagtcatcatagtatgtaagtgtttacattaaaagtctagttaaaactacattgaggtttaaaataattatartgattgcatcttatatatcaggtgagatgtgatagattgattcaggtagttttagagtggctatgatttagtccactgcatcagctagaaatgaaacaaaaaactagactagttagaagtaccaatgggtgcaggattctttatctcgggacttttaagacctttatccttagagattccaacattgttcatttcattccatgtataacacctatgcatgg

SEQ ID NO: 327734 - DNA, 551 bp, Homo sapiens
aagacagtcctttttttcaagtcataaggaggagaaaaaaaggacattttaatcattcttttgtttctgttgattctgttgctgcatcgttgccactgaaactggtcctgctgcctggtaatggttggcctttgacatcaagatgcgcttactgattcaaatccctcaagtcttcatggtgatccatacatggacttcaaagttataaaattttttacattcacatacctatgcctatgtgttcagccattgttcccaaagcaccagcaccctgctctggcagcttagcatcctggctttatccacacacaaagtgagcaaattgacccttccacccacattcaaaacytgatgtggaacccacatgttatcctacacttaactgagactgtcatggtaagagatcctttgagtcccatgttggtcttttctctagcagatattagctgggcttgttctaaactgtcagagaggttcaaataatgtggcagaaagaggtcagtgtttgtttattcttctttgctaccatatctgtaccctgaggcacattt

SEQ ID NO: 327735 - DNA, 507 bp, Homo sapiens
tggcacacaaaaagaggccagagaaaggaaacattgttacctaataactgcatgcctagcaaagttattgttccattgataagattataggagcaaggaattaaataaacttatctcccatagttttcctttaaaaaaatgtacctttgagaattacataaaaaactatgatgaattkcaaagaagcaggaataaaacaagtagtagaaaggtttgtgacaagcattggaaccatataaacatgtaattatatgtagatcaatggttatagtcataaacgctttccaaaacaaagctaattaaacatgatttaagaagacatgtatattgatattcataattataaaatttaaaaatgggtctgctagttcaagataatttcaattaaataagggaggaaagtgagaaaagatcatgggagaaatattattcacctggcaaattctccataggaataatcaacaattacttcttgaggttgataaaatatattttggcaataaaatt

SEQ ID NO: 327736 - DNA, 607 bp, Homo sapiens
gtagcaggtgcctgtagccccaccacttgggagactgaggcaggagaatcgcttgaacctgggaggcagaggttgcagtgagctgagatcatgtcactgcattccagcctgagtgacagagtgagactccttcacggaaaaaaaaaaaaaaaaaagaagtaaatattctgtggtaacataatagttttttaagcaggacacacattgaccaaatatcttaaattttctttctaagttgttatgaactcccccacatgaaatagtagtcagttatataataaaagttttactgttcttattgaagttggataattaacagcagagtaagctcaactaatttacatgggaaaagacaacaatagtataaataaatttccttcatttgacaccatcaaacaaagttgtttaaactttctcgttcgttttcacatcgttatcycttcaatttatccaaagcatttaaaatatgttcttgttattcttcataataggtaccctgtgagatactgatttttcttttttaattattaacaggcaagaaaacgagagctcaaacaggatgaatttcaagatggcaatggcagaactcaaaattgcatttgtcagt

SEQ ID NO: 327737 - DNA, 607 bp, Homo sapiens
gtagcaggtgcctgtagccccaccacttgggagactgaggcaggagaatcgcttgaacctgggaggcagaggttgcagtgagctgagatcatgtcactgcattccagcctgagtgacagagtgagactccttcacggaaaaaaaaaaaaaaaaaagaagtaaatattctgtggtaacataatagttttttaagcaggacacacattgaccaaatatcttaaattttctttctaagttgttatgaactcccccacatgaaatagtagtcagttatataataaaagttttactgttcttattgaagttggataattaacagcagagtaagctcaactaatttacatgggaaaagacaacaatagtataaataaatttccttcatttgacaccatcaaacaaagttgtttaaactttctcgttcgttttcacatcgttatctcttcaatttatccaaagcatttaaaatatgttcttgttattcttcataataggtaccctgtgagatactgatttttcttttttaattattaacaggcaagaaaacgagagctcaarcaggatgaatttcaagatggcaatggcagaactcaaaattgcatttgtcagt

SEQ ID NO: 327738 - DNA, 626 bp, Homo sapiens
tcagttagtcctttatcataatgtgagaatggaataatacacgtggtgaggaagaggagaaaaaatcagattttaggttttacattttacatatgtatcaaatatattttcttcagttgatagctttataatattacattctgtttcttggccatgcatggtgttcacatctgtaataccagtgctttgggaagccaaggtacgagaattgcttgaggctaggagtttatgaccaacctagatgacacagccagatccaatatttacaaaaaaaaaaartttaaatgagccagttggggtagcatgcacctgtagtcccagctactcaagaggctgaggcaagaggatcacttgagctccatagttccagggtacagtaacccatgattgtcccactgcactccaacacctggttgacagagtgagaccacaatctctaaaaacaaaaaaagtaaaaattaaaaataggtactatttttttgaaagcattaataaactttagatcctgaatatttattagtgaatatccaagtaccatagttacttttatcctaaatacaattttagaatattttcatattttgaattttcttttatagttgttgatattatttagaaaaaggtta

SEQ ID NO: 327739 - DNA, 204 bp, Homo sapiens
gctcttctaaagcttaaagatgactggcaagtgtgtttcagggwcctacatatgacagtcccactgttaataactataaaagcataaaacatgaattagaagttattctccaccctgtagtgacagaacatcaaaagcatatctagaagaagacttacagcaagatatccaaaggtttaagaatgaggtgggcatgttacaagt

SEQ ID NO: 327740 - DNA, 474 bp, Homo sapiens
agaggttcacttgctgttctctttttataagttatctgattcattctgattttctactcaagaaaatctcatgtgtatggttacactgtggttatctaaatgtgtaattatgtgtcaaagtaaattagtgctgctatctaaatgacacttctggaaatattcttgtaatctttgttgattactcaacccaagtctcactattagtctttcaagtggcttatgggctgggaaactaatttagccatataccatgtgatcttctgaaccagataagcataaagaaaattgctaaagaaataagctctagattcttttttctgtattcatttaaagrcgaattacatttatttaaatgataaaatggtaatacagtgggagggaagcaatgactgagaagagacataaaaatatatcttgccttgagagttgcaacaaatattcccatccaaagaagtctgtttaatgtgctttcat

SEQ ID NO: 327741 - DNA, 631 bp, Homo sapiens
atattaaaaaaaatcaccactctccaatgtttctgttgaatcagaatttacgttatgttgtttattaaaatatgttaagttttgacatgtatgattttgtcatataagtagcataacccctcagccaaaaatttagcatttgattctttagttgaaagctgagttctgtacattktgttctaaagatagacaaaaatctagagattttcttttttcaaagtaaaagcagatgaggcctcccactaccctcggaggcatgatctaggagacagcagaaagcagtttcaattctagtcatatttctagctctagctctacatgcaagtacctctgagaagtattttcattggcctatacacaatgaggatactgatacatgtatattataaaataaaaatgtgaaatacagatgtagctaacattttacaactgaagcattcttctagtcactggtaaatgaaaacaccttaactaaatcatatggcaactacatgtgtgaagcttactaaataaattgtttcataaggcattttttatagagaagtatttattctccccagtcattccctgcttactccactttctattgggctttttgcatgtcaaatttgaaaacatgaacaaacaaaat

SEQ ID NO: 327742 - DNA, 595 bp, Homo sapiens
ggaagaagggaaggaagaaaaaatatggaagaaaggaagaatttcttttagagtagtggaaagctgtcaaaatctgcttaagaaaaccgtttgtataaaatgttttgtcttgccctccaaagctcaaagtctctggtcctgctgatggctttcctatctagaatatacagatcttccacaaattgaaaaactaaaatatagaaatatattttgtacaggtggyggatttgaaatgttttatcaaggctaaaacaggatgtatatcattataatacttttccttcacattctgctctgaatttgctcagtcagcaccattccacttaataaggcttagatcaaatcaaatcaaactttgatttgaatattacagaagagaacacatggtaggagcttgtatattctctgtctctcttactctctctcatgtctgagagagaataccttggggttgaccagctagacagtttatgagaaggtagtatctccctgttttcattctccaggaatactgaacagtgtattattgaattatatttgattaaaatatactgatggaaaagagcacttcagagtgtccaaaatggaagtaaat

SEQ ID NO: 327743 - DNA, 595 bp, Homo sapiens
ggaagaagggaaggaagaaaaaatatggaagaaaggaagaatttcttttagagtagtggaaagctgtcaaaatctgcttaagaaaaccgtttgtataaaatgttttgtcttgccctccaaagctcaaagtctctggtcctgctgatggctttcctatctagaatatacagatcttccacaaattgaaaaactaaaatatagaaatatattttgtacaggtggcggatttgaaatgttttatcaaggctaaaacaggatgtatatcattataatacttttccttcacattctgctctgaatttgctcagtcagcaccattccacttaataaggcttagatcaaatcaaatcaaactttgatttgaatattacagaagagaacacatggtaggagcttgtatattctctgtctctcttactcyctctcatgtctgagagagaataccttggggttgaccagctagacagtttatgagaaggtagtatctccctgttttcattctccaggaatactgaacagtgtattattgaattatatttgattaaaatatactgatggaaaagagcacttcagagtgtccaaaatggaagtaaat

SEQ ID NO: 327744 - DNA, 595 bp, Homo sapiens
ggaagaagggaaggaagaaaaaatatggaagaaaggaagaatttcttttagagtagtggaaagctgtcaaaatctgcttaagaaaaccgtttgtataaaatgttttgtcttgccctccaaagctcaaagtctctggtcctgctgatggctttcctatctagaatatacagatcttccacaaattgaaaaactaaaatatagaaatatattttgtacaggtggcggatttgaaatgttttatcaaggctaaaacaggatgtatatcattataatacttttccttcacattctgctctgaatttgctcagtcagcaccattccacttaataaggcttagatcaaatcaaatcaaactttgatttgaatattacagaagagaacacatggtaggagcttgtatattctctgtctctcttactctytctcatgtctgagagagaataccttggggttgaccagctagacagtttatgagaaggtagtatctccctgttttcattctccaggaatactgaacagtgtattattgaattatatttgattaaaatatactgatggaaaagagcacttcagagtgtccaaaatggaagtaaat

SEQ ID NO: 327745 - DNA, 559 bp, Homo sapiens
tccgtgggcttgcctgcaagcatgctgaataacattctttccattgcaaacattggtrtcattattttttgatagttgcatattggtattaattcgcatattgaaatagaattccttgcttgcacaataaaattaaattgtgtaagcactcaatttctaagaaatcatttgtaaatatacataatgtatctcaaggcaaccaatatattggcagccaaaatctgtagagacaaaattcaaccatagcaagacaaaaaattacctgaaaaataatgttttacacttacataaaaatgataccattaaaatacacgtattatcccattttgtcctcataataactcttttttggatgattccatttgacaaatgaaggcattgaaataggagatacactgtcgtttggtcaagatgattcagaaagttagtaagaacttgggtcagaatgtaggtctcttgcctcccaaaagctatttccaatataacagaaattatttaaattggatgtggatgatctttaagctcctttcttgttcaaaccttctctgattcaatacca

SEQ ID NO: 327746 - DNA, 559 bp, Homo sapiens
tccgtgggcttgcctgcaagcatgctgaataacattctttccattgcaaacattggtatcattattttttgatagttgcatattggtattaattcgcatattgaaatagaattccttgcttgcacaataaaattaaattgtgtaagcactcaatttctaagaaatcatttgtaaatatacataatgtatctcaaggyaaccaatatattggcagccaaaatctgtagagacaaaattcaaccatagcaagacaaaaaattacctgaaaaataatgttttacacttacataaaaatgataccattaaaatacacgtattatcccattttgtcctcataataactcttttttggatgattccatttgacaaatgaaggcattgaaataggagatacactgtcgtttggtcaagatgattcagaaagttagtaagaacttgggtcagaatgtaggtctcttgcctcccaaaagctatttccaatataacagaaattatttaaattggatgtggatgatctttaagctcctttcttgttcaaaccttctctgattcaatacca

SEQ ID NO: 327747 - DNA, 593 bp, Homo sapiens
ggagcaggatcagttctaaatgattggaatttgcaattgatgatctagcccagtgctgtccagcagaaacacaatgcaagccacatatgtaatttaaaattttttaatagccacatttataaaaattttgaaagagtaaaattaattctaatatttatttaacacaatatatccaacatattaagattttgacataaatgaatcattaaaaatagagatgttttatgttgtttgttcatactacgtcttagaagtacaaaaggtaatttatttacaagacatctcaattcagactagctacatttcaaatgctaaatggccatgtgtggccagtggctgccacggtggacaagacagttctcacctctgcccgtcctccagcctcatcttctcatcccctgcccctgttgatagtctaactatattgactctttattgaaggattcctatgtgacmatcactgtactcatattttctcattgtattcacccttccctgtacctcaccactatatgcttgcaggaaaaactttctgggtttggttgtctttcatttgcatttcacagacttggaaactgagacaaagagagatt

SEQ ID NO: 327748 - DNA, 566 bp, Homo sapiens
acaaaatttccaaagaacttagtaagtatttkccccaaattctcacaggcaggaacaacgacattctcctataattcaaaactattactacacacaataaatcctacacggatataaaatatcattgacatagagtttatattcagatttcctctattgttctcaaaatctgagaattctagaatcaatcatattttcacatgttacatttggttgtcatggctctttagtaacctactctgaatttgtctgatggtttcctcatgatcagattcttcggagaagaactctacaaaggtaatattgtgcatttcccattgtatcttatgagaagatgcataatatgactttcattattactgatggtcagtttgatcacttggtaaaggtgatatctactagatctattttcattgcactgttcatcgtttgtaattaataagtaatctgtggggtgacacttgagactatataaatatcctgttcccccaaaattttttagccattcattaacatatctcatctgaatcaattatttacattggtattgtaaactgatggtttta

SEQ ID NO: 327749 - DNA, 566 bp, Homo sapiens
acaaaatttccaaagaacttagtaagtattttccccaaattctcacaggcaggaacaacgacattctcctataattcaaaactattactacacacaataaatcctacacggatataaaatatcattgacatagagtttatattcagatttcctctattgttctcaaaatctgagaattctagaatcaatcatattttcacatgttacatttggttgtcatggctctttagtaacctactctgaatttgtctgatggtttcctcatgatcagattcttcggagaagaactctacaaaggtaatattgtgcatttcccattgtatcttatgagaagatgcataatatgactttcattattactgatggtcagtttgatcacttggtaaaggtgatatctactagatctattttcattgcactgttcatcgtttgtaattaataagtaatctgtggggtgacacttgagactatataaatatcctgttcccccaaaaytttttagccattcattaacatatctcatctgaatcaattatttacattggtattgtaaactgatggtttta

SEQ ID NO: 327750 - DNA, 543 bp, Homo sapiens
caagtggaaagtctaaggtcacttggctggtaagtggaggagctggggtctatatagctctacctgtgagcactagagccactgcggtcacccattccactgtactgcatacatcatgggggaagaactgttggaagaaagaatactctartaattgcacaagaccatatctgatttatcctggtgggtgctgatccaatggagtgttggcttctgagaactccattttataggaatacttgttcagtattaaaaatggctgtcattaattgcttctgtggatcataaactctactagggactttgaaaattcttcccccgcccccataataaccccctaagatagattatgttggtggtaatatatacaatgatgcccattttataggtgattattgcaggtgttattgagtctgaacgaactcattctgagtctgaataaagtatataccttgtaccaaatcagttatttgtctaattttgaagtcactgtaatatttaattttctttaatgagcactgtgtatatctcaattctgtgctg

SEQ ID NO: 327751 - DNA, 416 bp, Homo sapiens
ataggttctttatctgtttggggtttattcttttctgtcaggtgagttatatatctgatgttatctttttttcaaatggctaccagttgccccagaaccatttattaaaattcattctttgcctttttgatgtaagatgctccctttatcatatactaaagtttcaaatatgcttggatttctttctggacttttgttctattcaacctatctgtcaacatctactagtaatatgcttttttcattatagaggctttataatatgttttctttcttgkttttttttttagaatagaatgaggcaagtatgttttaatatctagtagagctagtattccctcaaagcttttttaaaagtgtttttctggatattcttgcatgtttatttttccatatgaagtttgcaaaatttttta

SEQ ID NO: 327752 - DNA, 543 bp, Homo sapiens
atatctgatgttatctttttttcaaatggctaccagttgccccagaaccatttattaaaattcattctttgcctttttgatgtaagatgctccctttatcatatactaaagtttcaaatatgcttggatttctttctggacttttgttctattcaacctatctgtcaacatctactagtaatatgcttttttcattatagaggctttataatatgttttctttcttgtttttttttttagaatagaatgaggcaagtatgttttaatatctagtagagctagtattccctcaaagcttttttaaaagtgtttttctggatattcttgcatgtttatttttccatatgaagtttgcaaaattttttagtgatattgcattaaatttataaatttgcttaaaggaatgacatcctcatttttrtgatgttgagtcttccaatccaaaaataaggatgtttttctgtttgttcaagtctatttttatatctttcaagagtgtttaaagttttgcactatagattttgtacactaattgttaaattt

SEQ ID NO: 327753 - DNA, 547 bp, Homo sapiens
atttcttttaagggctatatagtacttcacctattgattcrtttttaaaatctacctcatatcaatggacatttatgttgctctaatgtatctctattagaaacaatgctgtaatgtacatttttgtactagtgtccttgtgcatgtgtttctctggggtattgacctataagttgacttgctggttatgggataccacagaggcgcagttactagatactgctttccaaagacaggctaatttagcagtgtttgaacattctcttttcttcacgttcttgacatttagtagtttcatctgcattttcaacttgaaattccttaatctcaagctacctttgacaagtccccaaaatatctgcaagataatttgatgtgcccctagatgcctcagcagtgtttggctaatttctactaaaactctttgctacaagacaccttcatgacacacagtcaattttaatgaactaaagattctaattccatattcaactgctaaacttcctctcagaatcccatcaccaaattttggcaaatactttcagtc

SEQ ID NO: 327754 - DNA, 547 bp, Homo sapiens
atttcttttaagggctatatagtacttcacctattgattcgtttttaaaatctacctcatatcaatggacatttatgttgctctaatgtatctctattagaaacaatgctgtaatgtacatttttgtactagtgtccttgtgcatgtgtttctctggggtattgacctataagttgacttgctggttatgggataycacagaggcgcagttactagatactgctttccaaagacaggctaatttagcagtgtttgaacattctcttttcttcacgttcttgacatttagtagtttcatctgcattttcaacttgaaattccttaatctcaagctacctttgacaagtccccaaaatatctgcaagataatttgatgtgcccctagatgcctcagcagtgtttggctaatttctactaaaactctttgctacaagacaccttcatgacacacagtcaattttaatgaactaaagattctaattccatattcaactgctaaacttcctctcagaatcccatcaccaaattttggcaaatactttcagtc

SEQ ID NO: 327755 - DNA, 474 bp, Homo sapiens
gtgttctcagtttctgtaagctctgctcttaaccctgtatattctttattttagagtgtgtacccgctatagaggcagtatccatcacatcagtgcagtagcagcttcmggattctatgtagaagtgtctctgtgtggccatctatgctgaaggaaaggctagttagaggacacaccttagtgactccgaaaatgctcctaaattatccaattctataagcttcggtttttacatttgctaaattggaaaacaatacttatctcacaggactgtaataaaggttagtgagataaatgcaatgtccctggcttatattatgcatatcaatgaatggtaagtactattaatattgtgtaggccattaaaattgagaggcagttccagaatatgtttgggtatgcatgctgttgtcagaacagattgaagatattatataagattattgccaaatcaatgagtgatttaaaaaaaga

SEQ ID NO: 327756 - DNA, 593 bp, Homo sapiens
aaaacaataattccaaaactaaaagtaattttaggtaaacaaaaacagagaaggtgtattatgaaggagaacactactttctcacttgcaatatatcattcatggtaggttcctctaaaggaagctaaattagtataattctaggctttcctttgtctcttaaattaagaagattggccgggcgtggtagctcaaccctgtaatcccagcactttgggaggcagaggcaggtggatcacctgaggttgagagttcaagactagcctgaccaacatggagaaatcccatctctactaaaaatacaaaattagcsaggcatggtggcaggcgcctgtaatcccaggtactcaggagactgaggcaggagaatctcttaaacccaggaggtggaggttgtggtgagccaagattgcgccattgcactccagcctgggcaacaagagtgaaattccgtctaaaaaaataaataaataaataagaaaatttaggcaagtccaaggaaaacaactttacaaggagagttcttctttatacttgggagagagctgctcacagaaagcatatttttttttcagctcatccaaggacagcac

SEQ ID NO: 327757 - DNA, 593 bp, Homo sapiens
aaaacaataattccaaaactaaaagtaattttaggtaaacaaaaacagagaaggtgtattatgaaggagaacactactttctcacttgcaatatatcattcatggtaggttcctctaaaggaagctaaattagtataattctaggctttcctttgtctcttaaattaagaagattggccgggcgtggtagctcaaccctgtaatcccagcactttgggaggcagaggcaggtggatcacctgaggttgagagttcaagactagcctgaccaacatggagaaatcccatctctactaaaaatacaaaattagccaggcatggtggcaggcgcctgtaatcccaggtactcaggagactgaggcaggagaatctcttaaacccaggaggtggaggttgtggtgagccaagattgcgccattgcactccagcctgggcaacaagagtgaaattccrtctaaaaaaataaataaataaataagaaaatttaggcaagtccaaggaaaacaactttacaaggagagttcttctttatacttgggagagagctgctcacagaaagcatatttttttttcagctcatccaaggacagcac

SEQ ID NO: 327758 - DNA, 574 bp, Homo sapiens
gcacctgccaccatgcccggctaattttttgtattttttactagagacagggtttcaccgtgttagccaggatggtctcaatctcctgaccttgtgatccgcccacctcagcctcccaaagtgctgggattaaaggcgtgagccaccgcgcctggccgatgtacttttttctttaaagcctttaatatattcattttagcttattttaattcctggtttgataatcctaacatttttgccatatctaacgctggttgtgatgcttgttgagtgttcaaactgatctacttattttagtatgccttataattttgtgttgaaaggcagacttgacatactgggtaagaagaattgtgctaaatgggcctttagcgacagggtgggaaggtgtgggtaagggagggttctatagtcctgtgattaggtctcgtctttggtgagcctgagcctctggactgtraacttcatcagtgctgctcaggtttctttcttctctcttaagtgggacagggtggctggagggggttagagtcatgtctgcctttatctaggtcggtcaggctctgatataact

SEQ ID NO: 327759 - DNA, 567 bp, Homo sapiens
aaagagattgcattctttaaactgtgctaaaggggcatctaaaccatctgtcttctgcttcttggtggcctgtcacaaagagtctgactctaaacaggaaacatttccaggttataaatagaaagggcatgacaaatatattttgcytgaagaaaaatattaatgaaataaataaacccaaattttggtaaggtgtcagccaaaatatgttcatcactgtcagtttgagtcagccacacagcatttcccaagttaagaacagctcgaggctgttgctaaattgggattataaaagatgtcttcatacacagagtctgtatttccaaggaagaagcaggatgaatttccccctactctctatataaaagaaaaactgaaaactacctggaggaaagcctccctgcttatgttttatttttgttgctttcatcctttccccatcctcaccaccactgcgtccagtagaaggaattacttgactccatccatccaatgtgcaatcgctatacagttctggaatgtaattgcctgggttttaaatcttggctccccaacgtggctctatga

SEQ ID NO: 327760 - DNA, 486 bp, Homo sapiens
ttttgagaattatgtaggacaaagaaaaacatgtgagtagcaatcaagtcttcttgctgtcagcaatgcgtttctgaagtggaatatagtgacagtggctaagccaacacccttaattttccctccctkttctcccttgggatatagaacagaaagagttgtttagccttggcaattttctgagtctagtcatatctaccatgtgatattcactcaaagtttacagggcttacgaaattttgcattttaacacctctgtacattttttaaagaaaagtcatgagacagaaaattatttcattatccaattaccattttgatgtgaaagtcatcatttatatttttcttaaacttttattttattttatttagatgaagtcttgctccctcacccagactagagtgcagtgggatgaccataggtccctgcagctatgatcatagctcaaactcctgggctcaagcaatcctctcacctcagcctcc

SEQ ID NO: 327761 - DNA, 550 bp, Homo sapiens
cactgaagtcctaaggtgctgaaatgttcttgatcaaaggaaagtaaaatgtttttatcataaatatattgacccttatgtttcaagaacagcagactgtgtcacataaagacactgcaaaagatgaagccatgtagagctagctatacasctcaatctttgtaaaactggcccaaagtgagtctccaaggaccaacatgtccagctgctagtgctgtttttagcaattctaattgtccattttaagcttctaaacaaacttcttttattctatatttgtctaagtttaaaagtctagaacgaacagaatcatatcagtgcatctgtgaggtttgaaacctgtccccaaacttttaaaacatttttcccattgagagatggtgccaaagtctctcctagaatctgagttctcattacctgaccaacacaataccagtggaggtggtgctgtgccagtttctaggcccaggcattacgagcctggaagcttccacttactgtttcttggtacactttttcttagagctcagccacaatgctgtgaagaagc

SEQ ID NO: 327762 - DNA, 628 bp, Homo sapiens
agacagaagcatttgcatgtagttatgtttttgtcaactctttaatgaaaagagattggtcagcaccattgtctcttggggagaatatatttttaaaataacatgaagtgtcaattagcttaattgtaaccatttcatgatgtatgtgtatatcaaatcattatattgtacatcttaaatacaaatatatatttatgtgtaataaaacaggcacctctttttaaaaatgatttttttaaacatttcatggtcccacttacaatcagaatggaaaatgctgaaagcatagtggaaaatatttgagggatactttatagtcggaactgtgaagaaaaccccaggatttcattgtgggaaaccagctctgctttgcagatttaagcagctaaaataattgtgacaactctgtagtaagcatccctgtgtttcagagyttgttggaaatgagcctcctcctcccagcttgggtctgctggaggaactccttcctctggtttgcagagccatagcccatggggctggataccattagctgtacccagggtaagaagttggaatacttgagggaacctcatcagatttctttcagtgtacactcagtctcacacaagcctttttagataactgc

SEQ ID NO: 327763 - DNA, 488 bp, Homo sapiens
cacgttgcccaggctggtcttgaattcctgagttcaagcaatctgcctgcctcagcctcccaaagtgctgggatcagaggcatcagctaaatgcccagcctactagcaacattaaaaaatatttgctaactttagaaatactcctggcaatcgcttcataactctcaatgctgtagactagggggtcagcgaacttttttttaaaggatcagataataaatgttagttctgagggccataagaactgttgcaatgccaggtgcggtggctcacgccataatcccagcactttgggaggmtgaggtgggcggatcacctcaggtcgggagttcgagaccagcctgacgaacatggagaaaccccgtctctactaataatacaaaaattagccaggtgtggtggcgggcacctgtaatcccagctactcgggaggctgaggcacgagaatcacttgaacccgggaacccgggaggcagaggttgtgggga

SEQ ID NO: 327764 - DNA, 488 bp, Homo sapiens
cacgttgcccaggctggtcttgaattcctgagttcaagcaatctgcctgcctcagcctcccaaagtgctgggatcagaggcatcagctaaatgcccagcctactagcaacattaaaaaatatttgctaactttagaaatactcctggcaatcgcttcataactctcaatgctgtagactagggggtcagcgaacttttttttaaaggatcagataataaatgttagttctgagggccataagaactgttgcaatgccaggtgcggtggctcacgccataatcccagcactttgggaggctgaggtgggcggatcacctcaggtcgggagttcgagaccagcctgacgaacatggagaaaccccgtctctactaataatacaaaaattagccaggtgtggtggcgggcacctgtaatcccagctactcgggaggmtgaggcacgagaatcacttgaacccgggaacccgggaggcagaggttgtgggga

SEQ ID NO: 327765 - DNA, 594 bp, Homo sapiens
ctttattacatcaccatatgaaagtgtaattcatttattctgcacttacttactagacatctgttatgtgccaggcaaagggtgctgggtattatggtagaaaaaagtataacatttgagtttgttccctctcacttctgccttcgttcctaaaagcattcacctatctctgtgccmaccttgcctaggggaagatatatctccctccatgcccaaccattctacctgtactctgttagctcagccattacctcagttagcttatccctctctcctctacctgaaaattctccatcctaccggctcacttccccagcaacacttacacttatttatttctgtcctatctttaaccaatcaatatgaccactctcaaccatcatgtttgcttctaagtatttccctatatcttctacattcttcagacccgcggtacagttgtccatgctcccctcctcattcatttcattctctctccagcctcctgcagtttggcatcttctccactattctactgcagcggtcccttccagggtcaacaaagcctctttattagaaaatgcacagggcacttactttcttcagtctttgaac

SEQ ID NO: 327766 - DNA, 594 bp, Homo sapiens
ctttattacatcaccatatgaaagtgtaattcatttattctgcacttacttactagacatctgttatgtgccaggcaaagggtgctgggtattatggtagaaaaaagtataacatttgagtttgttccctctcacttctgccttcgttcctaaaagcattcacctatctctgtgccaaccttgcctaggggaagatatatctccctccatgcccaaccattctacctgtactctgttagctcagccattacctcagttagcttatccctctctcctctacctgaaaattctscatcctaccggctcacttccccagcaacacttacacttatttatttctgtcctatctttaaccaatcaatatgaccactctcaaccatcatgtttgcttctaagtatttccctatatcttctacattcttcagacccgcggtacagttgtccatgctcccctcctcattcatttcattctctctccagcctcctgcagtttggcatcttctccactattctactgcagcggtcccttccagggtcaacaaagcctctttattagaaaatgcacagggcacttactttcttcagtctttgaac

SEQ ID NO: 327767 - DNA, 593 bp, Homo sapiens
taactttctatttatgtgtgaggtttgtgggagaccatagagaagttttgtttaaaacatctrtgtatttctttacataattcatttattatatcccttgttgaatgttctggctgagaaagatttaatttaagctttccatcaatgagaacaaagatgaggcttgctgaaatatgttgatgttcactggacagcaaatatcctgctctgttctatattcaaagttgaaaagtgatggaaacctcatcctcatcctcagggctcagaaaagtcacaaggtctttgactttgaagagtggaacaagagggcaacatgttttctagtaagtaaagtaagtgaggctatggagtaggtttcagagtggcactttcaatcttactcggacatgtcaaagtctttacaaaggcttcttctagacctgtaagcctagaattaatataaacgctcacctaggtcaaattcaatgatatttatcttaaaggactttcaaatctaagtgggtctcaataaggcaaacccttctgagtcttttatttccctaagcataaaattctatcttctctaccttctgtacttctcagcattagcaaag

SEQ ID NO: 327768 - DNA, 593 bp, Homo sapiens
taactttctatttatgtgtgaggtttgtgggagaccatagagaagttttgtttaaaacatctatgtatttctttacataattcatttattatatcccttgttgaatgttctggctgagaaagatttaatttaagctttccatcaatgagaacaaagatgaggcttgctgaaatatgttgatgttcactggacagcaaatatcctgctctgttctatatwcaaagttgaaaagtgatggaaacctcatcctcatcctcagggctcagaaaagtcacaaggtctttgactttgaagagtggaacaagagggcaacatgttttctagtaagtaaagtaagtgaggctatggagtaggtttcagagtggcactttcaatcttactcggacatgtcaaagtctttacaaaggcttcttctagacctgtaagcctagaattaatataaacgctcacctaggtcaaattcaatgatatttatcttaaaggactttcaaatctaagtgggtctcaataaggcaaacccttctgagtcttttatttccctaagcataaaattctatcttctctaccttctgtacttctcagcattagcaaag

SEQ ID NO: 327769 - DNA, 467 bp, Homo sapiens
agttcttcatgtacaagctccttttagaggtttctgcactaaactattgtaaaaaaaaaaaagaaaaaaaaaggccaactccatttatccaatgtcaaccttgacgttaagaatgatgaatgtggcagctgtttccttctgttattgatctttttactgacccttcccattgtgctttgtcaatgactgagtatcttccctggaccgctcttatctgaagtcgtcctcatctctcagrgattttcagcaccatctgtcagccaggcactgtgactctgtcgtcagtgaccatttttattgacttttgtctctttctggcctttccatggtgccttggccttaaatgtcctactaattagctcagtggtgattacagtgctggttttgagagcaccctgttgtttttttcttatctaggagaattttttttctctctttatctggaaatattactttgctggctatgc

SEQ ID NO: 327770 - DNA, 438 bp, Homo sapiens
caggtacacttcatgaattttcatgtttaaacaatgctgtcagcctggtacatcctgacccactgcctgggccatagagaatacaatcttaatcactgaccaaacgaacattcctgacrttagttctgtggctccaagctttcccagagattaaaaagagctgagtaaaacaaacctattgtagtaactttttattcacagagcacaatatgcacactattctgtatcttgcctttttaaaaggcaatatatattaacgttatcagtaaatatgaccttattttttcatggctgcttgttattctggggcatggaggcactattatttgcttagtcagccacctattgctggagaactggacctgtactatttcactgttataaaaattgatacaattaacatctccatttagtgggggatatgagtatttctcataa

SEQ ID NO: 327771 - DNA, 438 bp, Homo sapiens
caggtacacttcatgaattttcatgtttaaacaatgctgtcagcctggtacatcctgacccactgcctgggccatagagaatacaatcttaatcactgaccaaacgaacattcctgacgttagttctgtggctccaagctttcccagagattaaaaagagctgagtaaaacaaacctattgtagtaactttttattcacagagcacaatatgcacactattctgtatcttgcctttttaaaaggcaatatatattaacgttatcagtaaatatgaccttattttttcatggctgcwtgttattctggggcatggaggcactattatttgcttagtcagccacctattgctggagaactggacctgtactatttcactgttataaaaattgatacaattaacatctccatttagtgggggatatgagtatttctcataa

SEQ ID NO: 327772 - DNA, 465 bp, Homo sapiens
tgaaagtggacttatagtaacccaccagcctccttgtggattgccttcttccactcagaaaagttgtcatttatttatttgtatgacattgccaattatccctcttgtgttatttttaaaattttcccaccagccgtctaaatgactgtcacctcctccccacrccctaaggcagcaatttctgatttggaaccatgggaatttcactttcacaatttcatctgccaacatgcaataacatctgtctctatgctgatgtggttgtgcatctgggcttgggtttaaatctctgtaccaccttaactagcaaagtgacattatgcaactgacaatctcttgtgatttttctgtgaattaattgaatatttatgtgtaacacaccaagtgttctgcaaatgctagctttactggattatttagtattctaatttaaattgataaaattctttttatgattgtcttctg

SEQ ID NO: 327773 - DNA, 465 bp, Homo sapiens
tgaaagtggacttatagtaacccaccagcctccttgtggattgccttcttccactcagaaaagttgtcatttatttatttgtatgacattgccaattatccctcttgtgttatttttaaaattttcccaccagccgtctaaatgactgtcacctcctccccacgccctaaggcagcaatttctgatttggaaccatgggaatttcactttcacaatttcatctgccaacatgcaataacatctgtctctatgctgatgtggttgtgcatctgggcttgggtttaaatctctgtaccaccttaactagcaaagtgacattatgcaactgacaatctcttgtgatttttctgtgaattaattgaatatttaygtgtaacacaccaagtgttctgcaaatgctagctttactggattatttagtattctaatttaaattgataaaattctttttatgattgtcttctg

SEQ ID NO: 327774 - DNA, 564 bp, Homo sapiens
acattcccatcaacagcatataaacattcctttttctccatatcctcaccaacatagcagatgagacattttatctttttaataatagccattttaatgaagatgatatcttattatggttttaatttacatttctctgatgattagtgttgagcatttttttttatatgcccatgctggccatttgtgtgtcttcttttgaaaaatgtctatttatatcctttgaccacttttaaagaacattatttgttctttgtctttttttttttaattttttttttagacagagttkccctctgtcgcgaaggctggagtgcaatgtggagtgcaatggtgcaactttggctcactgcaacctccacctcccagattcaagggattcttgcctctcagcctcccgaatagctgggattacatgttcccaccaccatgcccggctaatttttgtagttttagtagagacgggctatcgctatgttggccaggcgggtctcaaactccttaagtggtccagtcctcctggcctctgaaagtgctgggattataaacgtgagccaccatgcc

SEQ ID NO: 327775 - DNA, 564 bp, Homo sapiens
acattcccatcaacagcatataaacattcctttttctccatatcctcaccaacatagcagatgagacattttatctttttaataatagccattttaatgaagatgatatcttattatggttttaatttacatttctctgatgattagtgttgagcatttttttttatatgcccatgctggccatttgtgtgtcttcttttgaaaaatgtctatttatatcctttgaccacttttaaagaacattatttgttctttgtctttttttttttaattttttttttagacagagttgccctctgtcgygaaggctggagtgcaatgtggagtgcaatggtgcaactttggctcactgcaacctccacctcccagattcaagggattcttgcctctcagcctcccgaatagctgggattacatgttcccaccaccatgcccggctaatttttgtagttttagtagagacgggctatcgctatgttggccaggcgggtctcaaactccttaagtggtccagtcctcctggcctctgaaagtgctgggattataaacgtgagccaccatgcc

SEQ ID NO: 327776 - DNA, 564 bp, Homo sapiens
acattcccatcaacagcatataaacattcctttttctccatatcctcaccaacatagcagatgagacattttatctttttaataatagccattttaatgaagatgatatcttattatggttttaatttacatttctctgatgattagtgttgagcatttttttttatatgcccatgctggccatttgtgtgtcttcttttgaaaaatgtctatttatatcctttgaccacttttaaagaacattatttgttctttgtctttttttttttaattttttttttagacagagttgccctctgtcgcgaaggctggagtgcaatgtggagtgcaatggtgcaactttggctcactgcaacctccacctcccagattcaagggattcttgcctctcagcctcccgaatagctgggattacatgttcccaccaccatgcccggctaatttttgtagttttagtagagacgggctatcgctatgttggccaggcgggtctcaaactccttaagtggtccagtcstcctggcctctgaaagtgctgggattataaacgtgagccaccatgcc

SEQ ID NO: 327777 - DNA, 599 bp, Homo sapiens
tatgttggccaggcgggtctcaaactccttaagtggtccagtcctcctggcctctgaaagtgctgggattataaacgtgagccaccatgcctggccttgtttgcgctttttgttgttgttgtttgttgagggagtcgtttgagcttcttctatattctggatattagtcccctatgggataaatagttttcaaatattttctcctattctcttattgcctgtttacacacctggttatttcttttgctgtgcagaagctttttagtttaattgtcccatttgtctaattttggttttattccctgtccttttaggtcttaagtcataaattctttgcctagaccaatgtccagaagaattttctcaaggtttttagtattttgatagctttgggtcttacatttaagtctttaatacatcttaagttgatttttgcatatggtgagagataarggtctgtgtccagatttggttcctgccagtgggttggtggtctcactgacttcaagaatgaagtcacagactttcacggtgagtgttacagcttttaaaggtggcacggacccaaagagtgagcagcagcaagattcactgtgaaa

SEQ ID NO: 327778 - DNA, 599 bp, Homo sapiens
tatgttggccaggcgggtctcaaactccttaagtggtccagtcctcctggcctctgaaagtgctgggattataaacgtgagccaccatgcctggccttgtttgcgctttttgttgttgttgtttgttgagggagtcgtttgagcttcttctatattctggatattagtcccctatgggataaatagttttcaaatattttctcctattctcttattgcctgtttacacacctggttatttcttttgctgtgcagaagctttttagtttaattgtcccatttgtctaattttggttttattccctgtccttttaggtcttaagtcataaattctttgcctagaccaatgtccagaagaattttctcaaggtttttagtattttgatagctttgggtcttacatttaagtctttaatacatcttaagttgatttttgcatatggtgagagataaaggtctgtgtccagatttgrttcctgccagtgggttggtggtctcactgacttcaagaatgaagtcacagactttcacggtgagtgttacagcttttaaaggtggcacggacccaaagagtgagcagcagcaagattcactgtgaaa

SEQ ID NO: 327779 - DNA, 599 bp, Homo sapiens
tatgttggccaggcgggtctcaaactccttaagtggtccagtcctcctggcctctgaaagtgctgggattataaacgtgagccaccatgcctggccttgtttgcgctttttgttgttgttgtttgttgagggagtcgtttgagcttcttctatattctggatattagtcccctatgggataaatagttttcaaatattttctcctattctcttattgcctgtttacacacctggttatttcttttgctgtgcagaagctttttagtttaattgtcccatttgtctaattttggttttattccctgtccttttaggtcttaagtcataaattctttgcctagaccaatgtccagaagaattttctcaaggtttttagtattttgatagctttgggtcttacatttaagtctttaatacatcttaagttgatttttgcatatggtgagagataaaggtctgtgtccagatttggttcctgccagtgggttggtggtctcactgacttcaagaatgaagtcacagactttcacrgtgagtgttacagcttttaaaggtggcacggacccaaagagtgagcagcagcaagattcactgtgaaa

SEQ ID NO: 327780 - DNA, 534 bp, Homo sapiens
tttcccactcacaaactttgaattaatcacctgttctcatgtgggtagtctacctttatttctacagtaaggtgcatgcaagccttttctagtcacatttaaaatggtgaaaagcagcatcataccagaaatatttgattttctactttttgattaggtaagcagagagggatgatttctgagtcttacaaagagtacatatcacttcagaaacatatgagttgtggaaagtgatgtctgcttttctctatattatacataaaacatagcaaatatcttactttaatgagctggtgtgtggggatatggagatgaccaagctgaaaggattgacaataagataacaactagaaactgaatccctgaagtgacatctctgtgcttgcagccttttctctgaatataaaatgcacatttttacacaacccctgtgaaatcttagcactttatatcacaagggtaagtaaaatgcacacrtttttaaaaatcaagtattttaaggtctccaaaatgacagatcttttccctctgtga

SEQ ID NO: 327781 - DNA, 623 bp, Homo sapiens
ccgctcctgtgccagcacttggagttgctggcaagatgaggcactcacttgatcacacaccccctcctactggggctgagcatgcagtctcggtggctgcaggatccccaccagagtgcaagcccaagtgggcagggcacctcctgcctggggcagagctaggcatgggcaggggcatcgccagccagaagtctgcagttggaaaagtgtccgagaaaaatcctgcgtcactttggaagcagtcttcctatcctagaatgccagagggcaagcatctgaaagatctggaaggatgaggcagcaaaggccamgatgtgaatgtacactgcccctgtcagaggtgatcgaaccagagcgattccatcttgaataggggctgggtaaaataaggctgagacctgtgaggctgcattcccactagcttaggcattctaagtcaggatgagatagaaagtccgcataagatacaggtcacaaagaccttgctgataaaacaggatgcagtaaaggagccagccaaaaccaagatggtgacgaaagtgacctctggtcatcctcactgctcattatatgctaattataatgcatttccatgctaaatgacactcctgccagtgccagga

SEQ ID NO: 327782 - DNA, 623 bp, Homo sapiens
ccgctcctgtgccagcacttggagttgctggcaagatgaggcactcacttgatcacacaccccctcctactggggctgagcatgcagtctcggtggctgcaggatccccaccagagtgcaagcccaagtgggcagggcacctcctgcctggggcagagctaggcatgggcaggggcatcgccagccagaagtctgcagttggaaaagtgtccgagaaaaatcctgcgtcactttggaagcagtcttcctatcctagaatgccagagggcaagcatctgaaagatctggaaggatgaggcagcaaaggccacgatgtgaatgtacactgcccctgtcagaggtgatcgaaccagagcgattccatcttgaataggggctgggtaaaataaggctgagacctgtgaggctgcattcccactagcttaggcattctaagtcaggatgagatagaaagtccgcayaagatacaggtcacaaagaccttgctgataaaacaggatgcagtaaaggagccagccaaaaccaagatggtgacgaaagtgacctctggtcatcctcactgctcattatatgctaattataatgcatttccatgctaaatgacactcctgccagtgccagga

SEQ ID NO: 327783 - DNA, 528 bp, Homo sapiens
tcttggggtctggatagggacccttttccagtaacatccccatcacagccctaatcactaggggaccctctaggctcttcctgccctccccagactgtctcccttaaacatgctggatgcaggggtgcatcagtgactccgctggtgcctccaggaaaataaagtgtggacctctgtggacaagaaacaacccaaagtaaagacgactcctcacaggcaggatggatatccagttgtatgtatgtcggtgtgctggggccgggaggctcctaataacaatgttaccgctgcttcacgtggaagaaagctgaggctcagagagattaaggracttgtccagggccataccggagtccatgcctgtgtgctgtcatggtctgaggtttgaactccaaccgtctaaggagctgggatagaactggggagggagtgtggtgggtgggaacaaccggcagatagatgctggctggtctccgaggagcctaggttctgtcagagggacatcaggtgaggaaaacaggcctcggg

SEQ ID NO: 327784 - DNA, 632 bp, Homo sapiens
gataaaatatgttattttgggctatgttttagtgcataaacactaacaacattaatgaaataataatttacttgaaagatgtttaatctatttgtaaatagctctgtcacctgctgaatggctttcatatgtttcaagtaatatttaatttctaaagagtatcctagactttactctgaggatttattatattaactctctcaaagagcccttatatcgtaaagagagtgttatctagaaaacaaacctcctgggtgtcacacgttgctagttatgatattgcttaaggtaaaatgggaaaattacagcccaaggctatttcccagttacctctgcttagggacaataactgaacgaccccacagaaaacacgttagggtagaaggggcctgttttccaggaattcctgcttcttcatgttaagtaccctcccaaccaagtgaaagcraagacttcttagtagaaaggcaaattcagcaaactactttccttttttatctgagataaaaattaagtgagtctttgtgtttttgtgtatttatgttctcaagttttgcccttgtttattttctgttctttattaatgaatcagtagttccattcttgagttgttttgaattatttcacctgga

SEQ ID NO: 327785 - DNA, 632 bp, Homo sapiens
gataaaatatgttattttgggctatgttttagtgcataaacactaacaacattaatgaaataataatttacttgaaagatgtttaatctatttgtaaatagctctgtcacctgctgaatggctttcatatgtttcaagtaatatttaatttctaaagagtatcctagactttactctgaggatttattatattaactctctcaaagagcccttatatcgtaaagagagtgttatctagaaaacaaacctcctgggtgtcacacgttgctagttatgatattgcttaaggtaaaatgggaaaattacagcccaaggctatttcccagttacctctgcttagggacaataactgaacgaccccacagaaaacacgttagggtagaaggggcctgttttccaggaattcctgcttcttcatgttaagtaccctcccaaccaagtgaaagcgaagacttcttagtagaaaggcaaattcagcaaactactttccttttttatctgagataaaaattaagtgagtctttgtgtttttgtgtattkatgttctcaagttttgcccttgtttattttctgttctttattaatgaatcagtagttccattcttgagttgttttgaattatttcacctgga

SEQ ID NO: 327786 - DNA, 528 bp, Homo sapiens
ccaggctttgtggccttataaatctgaatctactagctgtgtattcttgggaaagttacttaacatcttggagcctcaatattctcattaaaaaatgagaatttaaaagtarcattgtcataggtactgatggctatgtggtgtcatgtgattcttggcgcaggtccttcatgacattgtaactattgttttaattgcaccatgcactacaaataaaatgttgtatgaattaaatggagctaccttaactaaaataggtggtaattaatgaaaaatgctaatcataaccagaaaaaaaatttatttttttctttttaaatcaggatccctgataaaaatctacccagaatacaaatctacccaaaatgagattatcatccacaatctcatgtaaaaatatctaggctggcacggtggttcacacctgtaatcccagcactttgggaggccaactggggcggatcacctgaggtcaggagtttgagaccggcctggccaacatggtgaaacccttcccctactaaaaat

SEQ ID NO: 327787 - DNA, 528 bp, Homo sapiens
ccaggctttgtggccttataaatctgaatctactagctgtgtattcttgggaaagttacttaacatcttggagcctcaatattctcattaaaaaatgagaatttaaaagtagcattgtcataggtactgatggctatgtggtgtcatgtgattcttggcgcaggtccttcatgacattgtaactattgttttaattgcaccatgcactacaaataaaatgttgtatgaattaaatggagctaccttaactaaaataggtggtaattaatgaaaaatgctaatcataaccagaaaaaaaatttatttttttctttttaaatcaggatccctgataaaaatctacccagaatacaartctacccaaaatgagattatcatccacaatctcatgtaaaaatatctaggctggcacggtggttcacacctgtaatcccagcactttgggaggccaactggggcggatcacctgaggtcaggagtttgagaccggcctggccaacatggtgaaacccttcccctactaaaaat

SEQ ID NO: 327788 - DNA, 528 bp, Homo sapiens
ccaggctttgtggccttataaatctgaatctactagctgtgtattcttgggaaagttacttaacatcttggagcctcaatattctcattaaaaaatgagaatttaaaagtagcattgtcataggtactgatggctatgtggtgtcatgtgattcttggcgcaggtccttcatgacattgtaactattgttttaattgcaccatgcactacaaataaaatgttgtatgaattaaatggagctaccttaactaaaataggtggtaattaatgaaaaatgctaatcataaccagaaaaaaaatttatttttttctttttaaatcaggatccctgataaaaatctacccagaatacaaatctacccaaaatgagattatcatccacaatctcatgtaaaaatatctaggctggcayggtggttcacacctgtaatcccagcactttgggaggccaactggggcggatcacctgaggtcaggagtttgagaccggcctggccaacatggtgaaacccttcccctactaaaaat

SEQ ID NO: 327789 - DNA, 528 bp, Homo sapiens
ccaggctttgtggccttataaatctgaatctactagctgtgtattcttgggaaagttacttaacatcttggagcctcaatattctcattaaaaaatgagaatttaaaagtagcattgtcataggtactgatggctatgtggtgtcatgtgattcttggcgcaggtccttcatgacattgtaactattgttttaattgcaccatgcactacaaataaaatgttgtatgaattaaatggagctaccttaactaaaataggtggtaattaatgaaaaatgctaatcataaccagaaaaaaaatttatttttttctttttaaatcaggatccctgataaaaatctacccagaatacaaatctacccaaaatgagattatcatccacaatctcatgtaaaaatatctaggctggcacggtggttcacrcctgtaatcccagcactttgggaggccaactggggcggatcacctgaggtcaggagtttgagaccggcctggccaacatggtgaaacccttcccctactaaaaat

SEQ ID NO: 327790 - DNA, 558 bp, Homo sapiens
cctaggggaaaaaatgctatgttctgagcccaatgtkcctctttggtccataagtatcatttacaagaataatcatgattctctgattccaaactgttgcccccattatgagccgattgctcatacctgtggcaccagtcactccatcaaacctttattctgggctgcacactcctggaaggaaccataaaggaggtctgagggcaaatatcctttgtgttaggatctggctcatgtccacatcccccttgctggtgccatattcaatccatgaggacctactggattctagaccttagtagtagacataaaattccagaacagtttatggaattttactatgtggtccttctgtttcttagcatttttgtcttaatcagtttaggctgatataataaattatcataaactgcgtggcttaaacaagaaatatttatttctcatagttctggtggctggcaagtccaagatcaaggcatcagcatggttgagttccagtaactgctgattgcagactgctgatttcttattttattcctacatggtggaaaaagagca

SEQ ID NO: 327791 - DNA, 558 bp, Homo sapiens
cctaggggaaaaaatgctatgttctgagcccaatgtgcctctttggtccataagtatcatttacaagaataatcatgattctctgattccaaactgttgcccccattatgagccgattgctcatacctgtggcaccagtcactccatcaaacctttattctgggctgcacactcctggaaggaaccataaaggaggtctgagggcaaatatcctttgtgttaggatctggctcatgtccacatcccccttgctggtgccatattcaatccatgaggacctactggattctagaccttagtagtagacataaaattccagaacagtttatggaattttactatgtggtccttctgtttcttagcatttttgtcttaatcagtttaggctgatataataaattatcataaactgcgtggcttaaacaagaaatatttatttctyatagttctggtggctggcaagtccaagatcaaggcatcagcatggttgagttccagtaactgctgattgcagactgctgatttcttattttattcctacatggtggaaaaagagca

SEQ ID NO: 327792 - DNA, 558 bp, Homo sapiens
cctaggggaaaaaatgctatgttctgagcccaatgtgcctctttggtccataagtatcatttacaagaataatcatgattctctgattccaaactgttgcccccattatgagccgattgctcatacctgtggcaccagtcactccatcaaacctttattctgggctgcacactcctggaaggaaccataaaggaggtctgagggcaaatatcctttgtgttaggatctggctcatgtccacatcccccttgctggtgccatattcaatccatgaggacctactggattctagaccttagtagtagacataaaattccagaacagtttatggaattttactatgtggtccttctgtttcttagcatttttgtcttaatcagtttaggctgatataataaattatcataaactgcgtggcttaaacaagaaatatttatttctcatagttctggtggctggcaartccaagatcaaggcatcagcatggttgagttccagtaactgctgattgcagactgctgatttcttattttattcctacatggtggaaaaagagca

SEQ ID NO: 327793 - DNA, 542 bp, Homo sapiens
ttgtagaacaattctgtttccaagaagatctgtccgttcgtgatagaaatgacattcattggaatgtaagcagacacatcaccagtctgtttctatgactggcaaagcagtcaaggagccaccaccaaaagcattgttcatctgggctgctctctcyagcaactgggagcataggtagaacacaacaccaggataggcctcacaaccagggggttggcagagcaacagaaacatctgatggtaagcaacagcctgtttggataagttgtcatagatggtcaaagcatgtttgccattgtctctaaaatactctcccatggaacagccagtgtaaggagccagttactgaagtggggcagcatctgaggccgtagctgacaccacgatggtgtaattcatggcatctgcatcgtaagtctcttcaccaactgggcaacagtggatctcttttgaccaataacaacatagacacagtacagcttcttcttttcatcagatccatcattgaaacatttctggttaatgattgtgtcaatagcaat

SEQ ID NO: 327794 - DNA, 542 bp, Homo sapiens
ttgtagaacaattctgtttccaagaagatctgtccgttcgtgatagaaatgacattcattggaatgtaagcagacacatcaccagtctgtttctatgactggcaaagcagtcaaggagccaccaccaaaagcattgttcatctgggctgctctctctagcaactgggagcataggtagaacacaacaccaggataggcctcacaaccagggggttggcagagcaacagaaacatctgatggtaagcaacagcctgtttggataagttgtcatagatggtcaaagcatgttkgccattgtctctaaaatactctcccatggaacagccagtgtaaggagccagttactgaagtggggcagcatctgaggccgtagctgacaccacgatggtgtaattcatggcatctgcatcgtaagtctcttcaccaactgggcaacagtggatctcttttgaccaataacaacatagacacagtacagcttcttcttttcatcagatccatcattgaaacatttctggttaatgattgtgtcaatagcaat

SEQ ID NO: 327795 - DNA, 463 bp, Homo sapiens
aatttcagttaattgcactttactccatgtagctacaattgtagatatctagaaaaaatatctatgmtaaaagtctgccatctggaaaagtcaaaagaatgatgagctggtattaaatctcagtaaccctggcatatggagtatctctgccatgttaagagcagaccttggtatgagactgactctgggctttacatatgaatttggaattgccaatatctccacttgaactatgtgagacaataaaagtgctcccttatacactttagataatgggccctttgggggatctgatgttcattctgcctttcccagaaaaatacaactataataaaatgttgtaatcagtttcagtttatttattgctgatcttttatttttgttttaatttaacatggcaatccactttctatagtcaaaagtgcaatttaaagaactctaacaactcacaatatagaagaat

SEQ ID NO: 327796 - DNA, 463 bp, Homo sapiens
aatttcagttaattgcactttactccatgtagctacaattgtagatatctagaaaaaatatctatgctaaaagyctgccatctggaaaagtcaaaagaatgatgagctggtattaaatctcagtaaccctggcatatggagtatctctgccatgttaagagcagaccttggtatgagactgactctgggctttacatatgaatttggaattgccaatatctccacttgaactatgtgagacaataaaagtgctcccttatacactttagataatgggccctttgggggatctgatgttcattctgcctttcccagaaaaatacaactataataaaatgttgtaatcagtttcagtttatttattgctgatcttttatttttgttttaatttaacatggcaatccactttctatagtcaaaagtgcaatttaaagaactctaacaactcacaatatagaagaat

SEQ ID NO: 327797 - DNA, 463 bp, Homo sapiens
aatttcagttaattgcactttactccatgtagctacaattgtagatatctagaaaaaatatctatgctaaaagtctgccatctggaaaagtcaaaagaatgatgagctggtattaaatctcagtaaccctggcatatggagtatctctgccatgttaagagcagaccttggtatgagactgactctgggctttacatatgaatttggaattgccaatatctcyacttgaactatgtgagacaataaaagtgctcccttatacactttagataatgggccctttgggggatctgatgttcattctgcctttcccagaaaaatacaactataataaaatgttgtaatcagtttcagtttatttattgctgatcttttatttttgttttaatttaacatggcaatccactttctatagtcaaaagtgcaatttaaagaactctaacaactcacaatatagaagaat

SEQ ID NO: 327798 - DNA, 463 bp, Homo sapiens
aatttcagttaattgcactttactccatgtagctacaattgtagatatctagaaaaaatatctatgctaaaagtctgccatctggaaaagtcaaaagaatgatgagctggtattaaatctcagtaaccctggcatatggagtatctctgccatgttaagagcagaccttggtatgagactgactctgggctttacatatgaatttggaattgccaatatctccacttgaactatgtgagacaataaaagtgctcccttatacactttagataatgggccctttgggggatctgatgttcattctgcctttcccagaaaaatacaactataataaaatgttgyaatcagtttcagtttatttattgctgatcttttatttttgttttaatttaacatggcaatccactttctatagtcaaaagtgcaatttaaagaactctaacaactcacaatatagaagaat

SEQ ID NO: 327799 - DNA, 488 bp, Homo sapiens
cataattcacttttatattttgtatatagttcaataagttttaccaaatgcatgaagtaatgtagctaccactacaatcagtaacacagaatagtctcatcaccacaaaacaactctccctggaatcccctttgtaagcactctctactgatatgtaacctctagaaaccactgatctgttttctgctcctataatctggtgtacttcagagtctcagaaaaatgtgatmataggaaatgaatgataaaaagctataaaacctacagaaaacaaatagcagagtgccaatagtaagttcttccctttaaatgtaaatagattaaactctgcagccaaaagatatagattggcagaatggatttttttaaaaaaatccacacaggatccaactctattctgtctataataaactcactttaaccctaagtacaagcacaggttgatagtggaaatacggcaaaatatattctatgcaaatagtaataaa

SEQ ID NO: 327800 - DNA, 579 bp, Homo sapiens
gggatataattcaatactactttgtttattttattgcacaaattgttctagttttggccactgggagttctttctgttggctcctgtattcctttgatatacccccatcattgagggtttttwaaatgtggtttattattaatgaaattaaaatgatctattcatagcacctgagatgatttcagatatcatattatgcaagcattaagataatattaagaattagactggtaaatgaaaatcatagaatcagagtacttactcaatgtcaagttttgctaataattgcaatgacacaagcagttatatgacacaagtgaagcagaaagtgttctgggaccccaatgtgacttattgggtcatttcttctcacatgagatgtgttctggtacagatcttgcacagaagaagccacttaggtcatgaattactgagttacatagtttatgtgacattttccttggagccatcccctgtaaacctaaagattccaggtctatttacacaggtgattctagataggcagctatattttactatatgtatttcatagttctctcttgctagccaaggtcacat

SEQ ID NO: 327801 - DNA, 579 bp, Homo sapiens
gggatataattcaatactactttgtttattttattgcacaaattgttctagttttggccactgggagttctttctgttggctcctgtattcctttgatatacccccatcattgagggttttttaaatgtggtttattattaatgaaattaaaatgatctattcatagcacctgagatgatttmagatatcatattatgcaagcattaagataatattaagaattagactggtaaatgaaaatcatagaatcagagtacttactcaatgtcaagttttgctaataattgcaatgacacaagcagttatatgacacaagtgaagcagaaagtgttctgggaccccaatgtgacttattgggtcatttcttctcacatgagatgtgttctggtacagatcttgcacagaagaagccacttaggtcatgaattactgagttacatagtttatgtgacattttccttggagccatcccctgtaaacctaaagattccaggtctatttacacaggtgattctagataggcagctatattttactatatgtatttcatagttctctcttgctagccaaggtcacat

SEQ ID NO: 327802 - DNA, 578 bp, Homo sapiens
cacttaggtcatgaattactgagttacatagtttatgtgacattttccttggagccatcccctgtaaacctaaagattccaggtctatttacacaggtgattctagataggcagctatattttactatatgtatttcatagttctctcttgctagccaaggtcacatactttgtttgccaggagagctgccattataatgtttacaaggcaattagacaagataatatgctttctttcttcctttgatgcatcacgcaaactctgccatgagagagaagggcatgcaggtctacttcataagtcctttctttctagatattctggtacagtattttaatgtattttatgatacagatactctagcayttaatatattttaatgtatcatgtttaatataagctcgataaagaatcatcacttcacatactttggataataattgtacacagtgcaaattcatggagaaaataatcagaaccattaatgctgataattttggggcatttaaacctttttcaggtcaatggattaatagatttattagctcttgcagagtgcaagcatattacagattta

SEQ ID NO: 327803 - DNA, 561 bp, Homo sapiens
tatatgttaaccaattagttatgaaatctaaaatcattarggttacatttcaaaagtgaagttactaaaaaggtgaaattcaaatctaatagaaatagggtaaaatgcagaacatttatgaaacataaaagagggactatctgtgttagcaattaagggctgtagcaatttctgatatcagattccaaatttgaagagatccagacacttcatacacaggtttattttgccctaatattttgtcttattgagaattgtggtaaagagagaagacctgagtttcattcttataatggtttgagacatgaggaagtcactgaacatttctggacgtaactcacttgcatgatttcaactatcacatatacttggatgcttgaattacaaacctatgtagactagactttcctgctaagctgaaaagctgtatatgaacatttctttcatgttagctccagttgactgtttctcaggtactttcaatttcacatgtcccaaatttttctgattttcctctggcctctgaatgccctttctctgtgagcagcatcgtcacacacc

SEQ ID NO: 327804 - DNA, 561 bp, Homo sapiens
tatatgttaaccaattagttatgaaatctaaaatcattagggttacatttcaaaagtgaagttactaaaaaggtgaaattcaaatctaatagaaatagggtaaaatgcagaacatttatgaaacataaaagagggactatctgtgttagcaattaagggctgtagcaatttctgatatcagattccaaatttgaagagatccagacacttcatayacaggtttattttgccctaatattttgtcttattgagaattgtggtaaagagagaagacctgagtttcattcttataatggtttgagacatgaggaagtcactgaacatttctggacgtaactcacttgcatgatttcaactatcacatatacttggatgcttgaattacaaacctatgtagactagactttcctgctaagctgaaaagctgtatatgaacatttctttcatgttagctccagttgactgtttctcaggtactttcaatttcacatgtcccaaatttttctgattttcctctggcctctgaatgccctttctctgtgagcagcatcgtcacacacc

SEQ ID NO: 327805 - DNA, 546 bp, Homo sapiens
taacatacaaatattttaattagattcttttaaattcttaagattatgtgatataacccaaaagtggggctgaaatgtcaggtgacaataacacccaaatggaggttccactcagcacttccagggacaccccccccaacatatatacactctttacagaaacatatttggaaatgaattcattattcataagtagttgtgaatagttagaaaatagattttacatttcacattcaataaaactcccacagaatgtcaattctcattattcrtggattttgtattttcaaatccaccttcttgctaaaatgtatttgtatttgcaaattcacccacctgctaaaatttattactagccccaaaattcacactcacagcacctttgttgtcatgcacagactggccaaaaatttcattctcccagcttgcacattcccagctgatgttgaacaaaaccgtgttctgccttcttgtttcaactctcatactaaaatcaagtgtccttttcacaatctgtttagtgtcacggttttcatatttttatgc

SEQ ID NO: 327806 - DNA, 546 bp, Homo sapiens
taacatacaaatattttaattagattcttttaaattcttaagattatgtgatataacccaaaagtggggctgaaatgtcaggtgacaataacacccaaatggaggttccactcagcacttccagggacaccccccccaacatatatacactctttacagaaacatatttggaaatgaattcattattcataagtagttgtgaatagttagaaaatagattttacatttcacattcaataaaactcccacagaatgtcaattctcattattcatggattttgtattttcaaatccaccttcttgctaaaatgtatttgtatttgcaaattcacccacctgctaaaatttattactagccccaaaattcacactcacagcacctttgttgtcatrcacagactggccaaaaatttcattctcccagcttgcacattcccagctgatgttgaacaaaaccgtgttctgccttcttgtttcaactctcatactaaaatcaagtgtccttttcacaatctgtttagtgtcacggttttcatatttttatgc

SEQ ID NO: 327807 - DNA, 372 bp, Homo sapiens
agaggcctccctgaccactcaattagccactgccccatgactagttttttttttttaactttcttaaagtgctttaacttcctcaagcccttattattattctttgagtgcattttgattatttgtttcttgtttatcatctagaagtagatgacaacttcatgacaacaggaacataatcctcatgagggcaggcattttactagtattgttcacgattactctcccactcccatgtcaaattctgtgctgtaataggcattcaataaataatggaatgaatgaaygacagacaaatgtcacacatcatgccacctgatgttataacatccaatgttgataaccgaacagaagcaaaattaaaggccatga

SEQ ID NO: 327808 - DNA, 588 bp, Homo sapiens
tgtttagctgcctctctcttgactctctgacctgggacattgtggggatttgcctcattgcaatagttgcaattcctggtcccagttctcttgactctatccttgaagtcagaagtattagacagaaaaaaaatggagacttgaatttttttagagaaaacatgtgtgggtagatatttaactgattaatgtcctcttaattacttgaacattactagccaatacatgtgagcttttgcagacaaagggttgcagccatatcgtccaattcttgttggttacatgtcaacaacctgtgatccactgcacctgtaaaatactgttagccctawtttcactctcattatttaatacaaatgatcactgttcttttttattattttctcttcctttaattttcttactcccagtttttctccaccactccatcttcttcttgcataaacctctgctggtatctaacattctttattctcaagggtggcatcttaaagggcgtttcagatctttgggtcttacattaatttagttgtgggtccacagctgggaagctcagtatcaagactgcccaatcactgataagaagag

SEQ ID NO: 327809 - DNA, 512 bp, Homo sapiens
tttgtattataaaagataaatgcacaaagcagctacatgtaaaatgycactttaggacacgctgttctaacacaaatactgtcaacatatcatttgtgagtgaactgacaagatgtccaaggaatgagttacagtggagaaaattcaacgtgcatcacagaatagttaccagctcctggccctccacagatgtggacctaaaaccacctggagggcagagtcggctccctcctgctgtgagtgcttcctagtgagccagcagctgaaggcctccctagcttcacttctccagagcgggcatggagataactagtgaaagtggtcacaaagtcggggccaagaagtctctaacccctaaatcaagattgagagatactggaccgggcacagtgtctcacacctgtaatcccagcactttgggaggcctaggcaggcggatcacctgaggtcaggaattcaagaccagcctggccaacatggtgaaacccagtctctactagaaaatacaaaca

SEQ ID NO: 327810 - DNA, 512 bp, Homo sapiens
tttgtattataaaagataaatgcacaaagcagctacatgtaaaatgtcactttaggacacgctgttctaacacaaatactgtcaacatatcatttgtgagtgaactgacaagatgtccaaggaatgagttacagtggagaaaattcaacgtgcatcacagaatagttaccagctcctggccctccacagatgtggacctaaaaccacctggagggcagagtcggctccctccygctgtgagtgcttcctagtgagccagcagctgaaggcctccctagcttcacttctccagagcgggcatggagataactagtgaaagtggtcacaaagtcggggccaagaagtctctaacccctaaatcaagattgagagatactggaccgggcacagtgtctcacacctgtaatcccagcactttgggaggcctaggcaggcggatcacctgaggtcaggaattcaagaccagcctggccaacatggtgaaacccagtctctactagaaaatacaaaca

SEQ ID NO: 327811 - DNA, 512 bp, Homo sapiens
tttgtattataaaagataaatgcacaaagcagctacatgtaaaatgtcactttaggacacgctgttctaacacaaatactgtcaacatatcatttgtgagtgaactgacaagatgtccaaggaatgagttacagtggagaaaattcaacgtgcatcacagaatagttaccagctcctggccctccacagatgtggacctaaaaccacctggagggcagagtcggctccctcctgctgtgagtgcttcctagtgagccagcagctgaaggcctccctagcttcacttctccasagcgggcatggagataactagtgaaagtggtcacaaagtcggggccaagaagtctctaacccctaaatcaagattgagagatactggaccgggcacagtgtctcacacctgtaatcccagcactttgggaggcctaggcaggcggatcacctgaggtcaggaattcaagaccagcctggccaacatggtgaaacccagtctctactagaaaatacaaaca

SEQ ID NO: 327812 - DNA, 578 bp, Homo sapiens
gtgggattgctggactatatggtagtcctgttttaaattttttgaagaacctctgttttccatagtggctacaccattttacgttgmcaccaacagtgcacaagggtttcaagttctctatatccttgccagtatttcttattttctgtttctgttttgtttttttggatagtggtctagctaagagatgtgaggtgacatctcattgtggttttgatttgcatttctctgattagtgatattgaacatatttttcaatgttggccatattgatgtcatccttaaagaaatgtctattcaaatactttgttaatagggttttttgtttgtttgtttgtctagttttgatgttgagttgtaggaattctctatatgtttggatattaaccctcatcagatgcatggtttgcaaatattctcttccattctgtaggttgccttttcactctcttcattatttcctttctatgcagaagatctgaagtttgatttagttgcatttgtatatttttgcttttatttcctctgcctttggtgtcatgtccaagaaatcattgccaaatccaaaaacatgaagc

SEQ ID NO: 327813 - DNA, 578 bp, Homo sapiens
gtgggattgctggactatatggtagtcctgttttaaattttttgaagaacctctgttttccatagtggctacaccattttacgttgacaccaacagtgcacaagggtttcaagttctctatatccttgccagtatttcttattttctgtttctgttttgtttttttggatagtggtctagctaagagatgtgaggtgacatctcattgtggttttgatttgcatttctctgattagtgatattgaacatatttttmaatgttggccatattgatgtcatccttaaagaaatgtctattcaaatactttgttaatagggttttttgtttgtttgtttgtctagttttgatgttgagttgtaggaattctctatatgtttggatattaaccctcatcagatgcatggtttgcaaatattctcttccattctgtaggttgccttttcactctcttcattatttcctttctatgcagaagatctgaagtttgatttagttgcatttgtatatttttgcttttatttcctctgcctttggtgtcatgtccaagaaatcattgccaaatccaaaaacatgaagc

SEQ ID NO: 327814 - DNA, 578 bp, Homo sapiens
gtgggattgctggactatatggtagtcctgttttaaattttttgaagaacctctgttttccatagtggctacaccattttacgttgacaccaacagtgcacaagggtttcaagttctctatatccttgccagtatttcttattttctgtttctgttttgtttttttggatagtggtctagctaagagatgtgaggtgacatctcattgtggttttgatttgcatttctctgattagtgatattgaacatatttttcaatgttggccatattgatgtcatccttaaagaaatgtctattcaaatactttgttaatagggttttttgtttgtttgtttgtctagttttgatgttgagttgtaggaattctctatatgtttggatattaaccctcatcagatrcatggtttgcaaatattctcttccattctgtaggttgccttttcactctcttcattatttcctttctatgcagaagatctgaagtttgatttagttgcatttgtatatttttgcttttatttcctctgcctttggtgtcatgtccaagaaatcattgccaaatccaaaaacatgaagc

SEQ ID NO: 327815 - DNA, 602 bp, Homo sapiens
cctatcccttaaagccagaatggatacagaaaagtggaattttttgtttaattggtttctttttacctactcctttgctatttcataattccactttattttttattgacatcttagctcctctttccatgtgccctgcagctagcaatttttagaaacatttccgacaactctgggtctatttcttttctttttgcctttaaataactgttaggtcttattctctttccacttttaccctctgcaggtgactcttgactttaatttcttcttcygatcaaaacttctttgtctggatgcctccgcattagtcatgtttaaccttgatgttccctgagtggaatttccacaaacttttcagcatgcagtactttgtatggtttaaaaaattaaaatgtgaggccagttttgacaggaatactggacatgaagattcttttctgggtaatgctaggcgatctataaatgtgactgatgactcatgatgagaattatagaagtcaatagtacataataaaacctcatgataaagtaccttgttattccatggatttgataatattgcgggtcaaatcatttctctcaagagtggagtaaaatat

SEQ ID NO: 327816 - DNA, 602 bp, Homo sapiens
cctatcccttaaagccagaatggatacagaaaagtggaattttttgtttaattggtttctttttacctactcctttgctatttcataattccactttattttttattgacatcttagctcctctttccatgtgccctgcagctagcaatttttagaaacatttccgacaactctgggtctatttcttttctttttgcctttaaataactgttaggtcttattctctttccacttttaccctctgcaggtgactcttgactttaatttcttcttctgatcaaaacttctttgtctggatgcctccgcattagtcaygtttaaccttgatgttccctgagtggaatttccacaaacttttcagcatgcagtactttgtatggtttaaaaaattaaaatgtgaggccagttttgacaggaatactggacatgaagattcttttctgggtaatgctaggcgatctataaatgtgactgatgactcatgatgagaattatagaagtcaatagtacataataaaacctcatgataaagtaccttgttattccatggatttgataatattgcgggtcaaatcatttctctcaagagtggagtaaaatat

SEQ ID NO: 327817 - DNA, 571 bp, Homo sapiens
tgagaattatagaagtcaatagtacataataaaacctcatgataaagtaccttgttattccatggatttgataatattgcgggtcaaatcatttctctcaagagtggagtaaaatatcacaaatgtatgtccttaatgcagctcatacacttacgtgtcaatatttttcaacaaatatttgagtgcttactctatgtattgcatacgaatrttatgagtagttttttttttgttttgaatttatgaaacatgtttttcttcccccaaaaataagagattagcttttggcacatcttcatagcagtttaatatggtaagatcttcaataacaaaggaaaatttaagaactcattgctcacttaagaaacatttacgaagtacctactctgtgtctaatctaacatcagatactgtagggaggtgggacatcctaacttcagcagtctgtcttagagagggaactgggggagagagaggaaataaactatcatttattgatcagtgttcaagatcactcacaaatgttttcacttaaacttaacaataacctcatgatatacttactattttc

SEQ ID NO: 327818 - DNA, 571 bp, Homo sapiens
tgagaattatagaagtcaatagtacataataaaacctcatgataaagtaccttgttattccatggatttgataatattgcgggtcaaatcatttctctcaagagtggagtaaaatatcacaaatgtatgtccttaatgcagctcatacacttacgtgtcaatatttttcaacaaatatttgagtgcttactctatgtattgcatacgaatattatgagtagttttttttttgttttgaatttatgaaacatgtttttcttcccccaaaaataagagattagcttttggcacatcttcatagcagtttaatatggtaagatcttcaataacaaaggaaaatttaagaactcattgctcacttaagaaacatttacgaagtacctactctgtgtctaatctaacatcagatactgtagggaggtgggacatcctaacttcagcagtctgtcttagagagggaactgggggagagagaggaaataaactatcatttattgatcagtgttcaagatcactcacaaatgttttcacttaawcttaacaataacctcatgatatacttactattttc

SEQ ID NO: 327819 - DNA, 594 bp, Homo sapiens
tttcacaaaccctgcattctgatgtaccagctgacatggcccagaccagtaatctggctcaaccagttctgcaatcccacacaggaacagatgtcagcaagaagaactcatctcagccccttatgatttcatctccagcccaatctatcagtactcctcacttcccaatcatctacccaccaaattatccttaaaaactccaatcccaagttttcatttttggggagaccgattcgagtaataataaaattctggtctccccacacagcttggtctgagtgaattactccatctccattgcaattctcctgtctcaataaattggctctgtctaggcagcaggmaaggtgaacccatggggcagttacaattgcatggactgagctaatagaagactgaaataatttttttatgacttcttgtgtttgaaacattgctaattctttttgttttacagaatcaagaaaatcttttttgagttacttacagcttttaacaattgattagagcaaaatttgaaacacatttctttctttctacttgatttttccagaatttgaaagctatttgtgagtattcttaacttatggtaat

SEQ ID NO: 327820 - DNA, 594 bp, Homo sapiens
tttcacaaaccctgcattctgatgtaccagctgacatggcccagaccagtaatctggctcaaccagttctgcaatcccacacaggaacagatgtcagcaagaagaactcatctcagccccttatgatttcatctccagcccaatctatcagtactcctcacttcccaatcatctacccaccaaattatccttaaaaactccaatcccaagttttcatttttggggagaccgattcgagtaataataaaattctggtctccccacacagcttggtctgagtgaattactccatctccattgcaattctcctgtctcaataaattggctctgtctaggcagcaggaaaggtgaacccatggggcagttacaattgcatggactgagctaatagaagactgaaataatttttttatgacttcttgtgtttgaaacattgctaattctttttgttttacagaatcaagaaaatcttttttgagttacttacagcttttaacaattgattagagcaaaatttgaaacacwtttctttctttctacttgatttttccagaatttgaaagctatttgtgagtattcttaacttatggtaat

SEQ ID NO: 327821 - DNA, 605 bp, Homo sapiens
ggaagaaacttctaaccagaaaaacattcaagatgtgacttgggtgctgttaaaggcattccrttttataagagaagcagagcaaaaaagttcagaaatttgcagcctgacaatgtgattgaaaagaaaatcccattttatgaggagaaattcaagctagctgcagaaatttgcataagtaatgaggagctgaatgttaattaccaaaagaatgggggaaatgtctccagggcatatcagagaccttcatggtaacccatcctatcacaggcccagagacctagaaggaaaatgtggttttgtgggttgggcccaagccccccatgctgtgtgcagcctagggacctggtgccctgtggcctagccactccagccatggctgaaaggggccaatgtagagtttgggccatggcttcagagggtgaaagcctcaagccttggcagcttccatgtggtgttgagcctgccagtgcacagaagtcaagaattggagtttgggaacctttgcttagatttcagaggatgtctggaaacacctcgatgtccaggcagaagtttgctacaggggcaagactctcatggagagcctctgctagggctgtgtg

SEQ ID NO: 327822 - DNA, 219 bp, Homo sapiens
cggtgagtgttatagctcttaaagtctgcacgtctggagttgttcattccttccagtgggttcgkggactcagtggcctcaggagtgaagctgcagaccttcgcagtgagtgttacagttcataaaggtggcatgtccggagttgttcgttcctcccaaccagagttgttcatccctcccagtgggttcgtggtctcactggcttcaggaatgaagctg

SEQ ID NO: 327823 - DNA, 219 bp, Homo sapiens
cggtgagtgttatagctcttaaagtctgcacgtctggagttgttcattccttccagtgggttcgtggactcastggcctcaggagtgaagctgcagaccttcgcagtgagtgttacagttcataaaggtggcatgtccggagttgttcgttcctcccaaccagagttgttcatccctcccagtgggttcgtggtctcactggcttcaggaatgaagctg

SEQ ID NO: 327824 - DNA, 526 bp, Homo sapiens
agtatatgctcgaatgtgcatgatatagaaaggaaaatagtgatcacgcactgccttttgtaaagaagaaaacagctgatagagttgttcatccacaagatatttaatgagtgcagtttctatgtattgagtggcttgaacaacataagctgaatcagagacaatatttacaggttgcttaaagtcttctaacacagctataactgcctgtaattcagccctctgtgccgattgaaagtcagtttgaataattctgtttttaggtcccacataagctgcttttccatggctagagccatctgtaaacacagtcactgctccttccaatggagcacgatgggtaatttttggaaggacccatgttgttagctttaaaaactgaaaaaaattttttttggatagtgattgtcaagaactccaatgaagccagctaaatttatttgccaattgaccaaattaacaaaggcttgcmgatctgatttgtattcattggaactataatgttatctggatctgaaccgcaaag

SEQ ID NO: 327825 - DNA, 520 bp, Homo sapiens
aagaagccaacatattctccaagaatgtggcccaccaggtgaatcctttgtccccaggcttgacagggasgctgcgccactcacctccaaatgctgcttagaagaggagggctctcaagctcaggggaggctctggcagcatcattgtgatctcagtaggaataactgtgactttgctattgcatgatgagaaatccaaatgaagctcatgaagtcgactgtaattttctaggctggtgactttcatggctctccttttttgagtagttgtttactagaattaagagagaagaaacagaattctgtattttatctttttatttatttatttatttatttttttgagacagggtctcgctctgttgcccatgctggagtgcagtggtgcaaccatggctcactgcagcctcaaactcctggactcaggcaatcctcccacctgaacaacctgagtagctggaactacaggtgcacactgtcatgcccggctaattttccaattttttgtagagatgggtgt

SEQ ID NO: 327826 - DNA, 520 bp, Homo sapiens
aagaagccaacatattctccaagaatgtggcccaccaggtgaatcctttgtccccaggcttgacagggacgctgcgccactcacctccaaatgctgcttagaagaggagggctctcaagctcaggggaggctctggcagcatcattgtgatctcagtaggaataactgtgactttgctattgcatgatgagaaatccaaatgaagctcatgaagtcgactgtaattttctaggctggtgactttcatggctctccttttttgagtagttgtttactagaattaagagagaagaaacagaattctgtattttatctttttatttatttatttatttatttttttgagacagggtctcgctctgttgcccatgctggagtgcagtggtgcaaccatggctcactgcagcctcaaactcctggactcaggcaatcctcccacctgaacaacctgagtagctggaactacaggtgcacactgtcatgccyggctaattttccaattttttgtagagatgggtgt

SEQ ID NO: 327827 - DNA, 589 bp, Homo sapiens
tgggcatatggggagcaacagtggcttcagaaccaggggatgggctagctgcttgtggtggtgtagccattgtgtggagcattgacttgtgcagaggtcacagttccaagcctcatggtgtgggctrgctcacagtggtggtgtctctagtatctgatgtgtagaggggcaaagtgcagccatggagttggggtctggagtgtgagcatgtgaagagtgacagcagagctggggactggggagtagactatttctctgtggcaatggcttagatgtccaaggcgtgagtgcttgtggagtggctattataattttttttgaccaattcagaggtctgagaaaccaaaattataagctgaggaatcaacaaaggtaaacatagtttacatacatatctaatgattctaagtgatttttaggtgtaatataaacatattacagtgagctgaggctctgtaatatagggagaagttacttcaatttggttgagatagagtatgaacacttatcaagaaaggggttttgaagtccatactcttcctcaaactacttttttgtgataagactgaaaaaatttggctgagctcac

SEQ ID NO: 327828 - DNA, 558 bp, Homo sapiens
tttcattcttctacatgtggcttgccaattatcccatcaccatttgttgcatagggtatcctttccccactttatgcttttgtttgctttgtcraagatcaattggctgtaagtatttggctttatttctgggttctctattctgttccatttatctatgtacctgtttctataccagtatcatgatgctttggtaacgatagccttgtggtataatataaagccgggtaatttgatgcctccagatttgttccttttgcttggtcttgctctggctatgcagattctttttggttccatatgaatttttggattattttttctagttctgtgaagaatgatgatgggaattgcattaaatttgtagattgcttttggcagtatggtcattttcacaatattgattctacccatccatgagcataggatgtgttttcatttgtttgtgtcatcaatgatttctttcagcagtgttttataggtttccttgtagagatccttcacctcctcggttaagtatatttttaagtatttttgcagctgttgtaaaagtggttg

SEQ ID NO: 327829 - DNA, 614 bp, Homo sapiens
agatttcatagagaaggagtgaacctctgggttggccactcccagattccttagctcagaactctgaacacacattctttgtatggtcattgtcagggtgtgcttaagttattgctgtcaggtgcatctgccatacacacactaactataatatttatttttagcctggttgtgccgctaatattgctatgtttctttaggtgatgtaaattaacttaattcctctttggaaaaattagggagctttacttgagacgaaatattaaatattttttggaaatgagtttaaaaataaatgctcaaaaatcataaaagctattaaaatgatgtttgatatacactgatttagagggtaagaaatcaagtggaattaattagttgctcaactctaaaagactcactaataaagaggtaatgaaatgttcatggtgaaatgtttcttttacaccaattttttatgctgagataggttcagctgggatgcatgcacagctgagaggcagtgaggcatatgggaagcatgtgagttttggaagacagtcctggatttaaatctgcaatttagasatgtgtctgggtaaatcactcacagcctccaaatttcggtttcctca

SEQ ID NO: 327830 - DNA, 593 bp, Homo sapiens
cattcaacattttaatcaagatagaaaacaaattcttatagcctggactctggagactgttttgcttctgcaatcaatgtactgagcacatccatttcattgttttcttyttctagggttattgatttctatagtaaccagaaggatgcaatactggcagctgcagacaagtggttaactggtgagtggaacgtatattcgtcctcatgataaacagtagcatctgtaaaagtaggggataaacactgaatattactaacaatcctggtggaaaagaaacagtccaggagtattcttgccaaggaaacattacaccataaatcatctcagaagcaacatttgataaacctgggcacagaccttcctatccactttacctgtctgctgcaaagaatttgtgattaaaaaaaaaaagatctaaaaatcaatcactaacttacttaaagcttaataatatctattttcaaaaattttagttatttcagaattttaccccaaagggtaaaattgtcaaaccatgcttctctaactaagctgtacaaaggcagatgtcttactgacaaattatttgccttctaatcattaacctcatt

SEQ ID NO: 327831 - DNA, 461 bp, Homo sapiens
tttgtaattaggaagtgtgatgcctccagctttgttcttgcccaaaattgttttggctatttggggtctttgtgattccacatgaattttagaatttctttttctacttctgtaaacatgccattggaattttgatagggattatattgaatctgtagatcactttaagcactgtggtcattttaacaatattaattcttttaatctatgaacatggaatgtcttttcatctatttgtatctgttccaatttctttcatcagtgttttggatgcrtaagtgtttcacgttcttggttaagtttattttttgatgctattataaatgggatttttaaatttaatttccctttaaggataattcattgttactgtatagaaatacaacagatttttgtgtgttgattttgtatcctgcaactatgtaatttattagttctacttttttttttttgtggagact

SEQ ID NO: 327832 - DNA, 509 bp, Homo sapiens
tttgggatgtatattaatcaaggacattgacctatagttttctgttttgtctttatctgattttggtgttagtgtgatgctggcctcataaaatgaatttaaaagtgctattctttttaatatattttttaaaaatctaaaaagcattggtattagttctttaaatgtgtggtcagattcacctgtgaagtaatccggccccgggcttttcttttttgggagaattttacttgtttactctccytatttgttactgatcttttcagtctttctatttcttcttgatttattattgataggtcatatgtttctaggaatttacacattgtttccaggttgtacaatttgttggtgtataatagtcccttatgatcctttttatttctgtggcataaattgtaatgtcttctttgttatttctgattttatttatttgagtcttctcctttctttctttgtctagctagatgtttgttgatttttaaaaatctttttaaaaaacctgttag

SEQ ID NO: 327833 - DNA, 546 bp, Homo sapiens
attgcttgctttggcatgcagaaacattctagtttaatgtaatctcaattgtttagttttgtttttgttctttgtgcttctgaggtcatacctaaaaaattattagccagacgaatctcagctttcctycttctagtagtttcatagtttgggggtcttacattgaagtcttaatccattttaagttgatttttgtttagggcatgcgataaggatctaatttcattcttctacacgtgcctatccatttttccaaacaccatttatttaaaaggctgcccttcctccattgagtgttctttgtatctttgttaaaaattagttgattgcaaatgcatgtattaatttctgggctccttattttgctccactaatctatctgactatttttatgccagtgctatgcagttttggttatgatagttttgtaggatatttaaaatcaggtaatgtgatacctctagctttgttctttttgctcaagattgctgtgttaatcagagtcttttgtggttccatatgaattttaggattgttttttctatt

SEQ ID NO: 327834 - DNA, 546 bp, Homo sapiens
attgcttgctttggcatgcagaaacattctagtttaatgtaatctcaattgtttagttttgtttttgttctttgtgcttctgaggtcatacctaaaaaattattagccagacgaatctcagctttccttcttctagtagtttcatagtttgggggtcttacattgaagtcttaatccattttaagttgatttttgtttagggcrtgcgataaggatctaatttcattcttctacacgtgcctatccatttttccaaacaccatttatttaaaaggctgcccttcctccattgagtgttctttgtatctttgttaaaaattagttgattgcaaatgcatgtattaatttctgggctccttattttgctccactaatctatctgactatttttatgccagtgctatgcagttttggttatgatagttttgtaggatatttaaaatcaggtaatgtgatacctctagctttgttctttttgctcaagattgctgtgttaatcagagtcttttgtggttccatatgaattttaggattgttttttctatt

SEQ ID NO: 327835 - DNA, 546 bp, Homo sapiens
attgcttgctttggcatgcagaaacattctagtttaatgtaatctcaattgtttagttttgtttttgttctttgtgcttctgaggtcatacctaaaaaattattagccagacgaatctcagctttccttcttctagtagtttcatagtttgggggtcttacattgaagtcttaatccattttaagttgatttttgtttagggcatgcgataaggatctaatttcattcttcyacacgtgcctatccatttttccaaacaccatttatttaaaaggctgcccttcctccattgagtgttctttgtatctttgttaaaaattagttgattgcaaatgcatgtattaatttctgggctccttattttgctccactaatctatctgactatttttatgccagtgctatgcagttttggttatgatagttttgtaggatatttaaaatcaggtaatgtgatacctctagctttgttctttttgctcaagattgctgtgttaatcagagtcttttgtggttccatatgaattttaggattgttttttctatt

SEQ ID NO: 327836 - DNA, 516 bp, Homo sapiens
tgaactttgattggggtaaacaggagacagattggagccaagaagtaaattctttctcaagtcttttttcagatgacctgttctaaggcagtttcccactayaacgtgcctgaagaaaacagtggttagtacagcaacataccactttgcacttgcttctcatcctttgactcactccttttgcctcacgcttgcttcctgggaattttaccttccaataaggattggcacaatctcggtttactgcaacctccaccccctggactcaaatgatcctcccaccttcagcatcccatgaagcagggactacaggtttttgtattttttgtagagatgggatttcaccatgttgcccaggctggtttcgaattcatggacttaagtgatctacttgcctcggcctcccaaagtgatggtattacaagcatgggccaccgtgcccagccaggatctcttttctatggactacaggctaggcacttgcataatattgtatcattaagatattatagctca

SEQ ID NO: 327837 - DNA, 556 bp, Homo sapiens
gcatttttctactgtgttgcagattaaattttctggaagcacagtgcttggggtgcaagatgtttatttgggatcattatctgtgaaagaaaggggaagaagacaggtgtgggaagaagaaggagatgaacggtgatgcagaccaattatatctcagccaccccggcagggatcccttggcaagctctgatggttagagctgtcccrtatcaagctgaatggtgggcctttatacccattctcacgagatacaggctgctccaggaaaggcgtgaccttgagtcagggggctacaactgaggcaaaccttgaagaaggtgacagctggaacctgcttgctgactacactcttcacagctggtcagtaattcctttcttgaaaggtgacctggatggtatagcttatgtttaccacatgctgttaaaccaaaaattgatgatccagtatcaaatttttactttagttaaaacaaaattttattttttattttgcattcgatttagcttaatgagttaatgcctcctagatttattttatgtttgcatacatgtacat

SEQ ID NO: 327838 - DNA, 556 bp, Homo sapiens
gcatttttctactgtgttgcagattaaattttctggaagcacagtgcttggggtgcaagatgtttatttgggatcattatctgtgaaagaaaggggaagaagacaggtgtgggaagaagaaggagatgaacggtgatgcagaccaattatatctcagccaccccggcagggatcccttggcaagctctgatggttagagctgtcccatatcaagctgaatggtgggcctttatacccattctcacgagatacaggctgctccaggaaaggcgtgaccttgagtcagggggctacaactgaggcaaaccttgaagaaggtgacagctggaacctgcttgctgactacactcttcacagctggtcagtaattcctttcttgaaaggtgacctggatggtrtagcttatgtttaccacatgctgttaaaccaaaaattgatgatccagtatcaaatttttactttagttaaaacaaaattttattttttattttgcattcgatttagcttaatgagttaatgcctcctagatttattttatgtttgcatacatgtacat

SEQ ID NO: 327839 - DNA, 548 bp, Homo sapiens
gactgggtagtttataaagaaaagaggtttaattggctcatggctctgcaggatatacaggaagcatgatggcttctargaaggcctcaggaaactttcaatcatggtggaaggtgaagtggaagcagggacatcttacatggctggagcaggagaaagagaagggaggagggaggtgctatacacttttcaacagccagatctcatgagaggaaatcgacccccatgatcgagtcaccttctaccaggccccacttccaacattgaggattacaatttggcatgagatttgagcaagggcacgggtccaaaccatatcagttatgcatctccatgcaaaaaaaaagcagtataataagtatacgtttactctaattctcccagaccaccagacttattaggaacattaagatatcttaatacattggattaccaaaagtcagaaatgcaattaaggaaatatgatataaggtttattgagatacaattgtgtgtgtgtgtgcacgtgcgcattgctggggggcctcaggaaatttacaatcatggca

SEQ ID NO: 327840 - DNA, 548 bp, Homo sapiens
gactgggtagtttataaagaaaagaggtttaattggctcatggctctgcaggatatacaggaagcatgatggcttctaggaaggcctcaggaaactttcaatcatggtggaaggtgaagtggaagcagggacatcttacatggctggagcaggagaaagagaagggaggagggaggtgctatacacttttcaacagccagatctcatgagaggaaatcgacccccatgatcgagtcaccttctaccaggccccacttccaacattgaggattacaatttggcatgagatttgagcaagggcacgggtccaaaccatatcagttatgcatctccatgcaaaaaaaaagcagtataataartatacgtttactctaattctcccagaccaccagacttattaggaacattaagatatcttaatacattggattaccaaaagtcagaaatgcaattaaggaaatatgatataaggtttattgagatacaattgtgtgtgtgtgtgcacgtgcgcattgctggggggcctcaggaaatttacaatcatggca

SEQ ID NO: 327841 - DNA, 616 bp, Homo sapiens
ggatttgtacatttctatactatatttctctctggtttatttctcttgtgacctttcttggaattayggaaattttgaaattttgttccttatagttgattgattcatagatgataactaaaacacatcatttctttgcctctgagagttgtttctgatagaatacgcaaatcccaagatagatcataatgatgaaataatatcaaataacacagctgagggagtttctgcaaaataaataagatggtcaccagccattgttgttcacatcctttaaatccttctcctcagccccatttatagcagatgacttaggctgcgtcatccacatgctgttgtctgtgggacaaatgaaataacctcttcgtgtttcagtgtcttcatctaggaaatgtggctgtcagtacttttcttttagaggggaattttgaagaacaaatgagataattcatgttgagttatggatgcacatgtaatatttacctagtaagtgatagttattattaataataattcactttatggttgattgatatatagttgcaagtgattagctttggttaaaaatgcaatgtgaaatctcacagcagattggagctatagagtggagttagag

SEQ ID NO: 327842 - DNA, 525 bp, Homo sapiens
tatggatgcacatgtaatatttacctagtaagtgatagttattattaataataattcactttatggttgattgatatatagttgcaagtgattagctttggttaaaaatgcaatgtgaaatctcacagcagattggagctatagagtggagttagagattgagttattactcatcagtgaaactagtaaagaaaactgcaaaaaaatcatcttggaaggaaagactagattgtttcagtatttctaattcatatgaactgtttcattgtaaacatattataaatctctgcttatataaacaacaatttttatyttcctacaagcataattttaattcttagagctttatttgatagtaatgactaaatcggtaacaattctcaccctaatatttttagtctggagctgcccttttcccaagatgatttcaaatatttagcttgaaaaggaaactaggatataaattgccacatttacgatgtcactgtgtattggttcatagcatccattcttataataataatt

SEQ ID NO: 327843 - DNA, 508 bp, Homo sapiens
taattttaattcttagagctttatttgatagtaatgactaaatcggtaacaattctcaccctaatatttttagtctggagctgcccttttcccaagatgatttcaaatatttagcttgaaaaggaaactaggatataaattgccacatttacgatgtcactgtgtattggttcatagcatccattcttataataataattacattattgaatrcctattttattctaggaagcagattaggtcctagaaaaatgaaaatcctatctctgccctgaaggaatttagccctgtggatgaatggaagtacaaataaagattatcatgtaacagaagatatattaagatcaagtcttgtacaagatcttaacaggaagaagaataagacttttgacttagttataggaatataatttataggattttgacacagaaaggattttttagaaaatattgaatccaagtagaacaggtatcttttaaaaccatggttaaatcttcagaatcagcc

SEQ ID NO: 327844 - DNA, 384 bp, Homo sapiens
ttgtacaagatcttaacaggaagaagaataagacttttgacttagttataggaatataatttataggattttgacacagaaaggattttttagaaaatattgaatccaagtagaacaggtatcttttaaaaccatggttaaatcttcagaatcagccgggtggtggctcacgcctgtaatcccagcactttgggaggctgaggtgggcggatcatgaggtcaagtgattgagaccatcctggccaacatggtgaaaccctgtctctactaaaaatacaaaagttagctgggcgtggtggcacatcctgcaatcctagctactcgggaggctgaggtaggagaatcactttaacctgagaggcrgaggttgagactgtgccactg

SEQ ID NO: 327845 - DNA, 533 bp, Homo sapiens
cctaggtcagtgggagacatagcctatcaatgaagtattaaaataaccactgaagttacgttgtctcttactatataccagtcactgggctaaatttattacttgcattttctcrcttaatcctcctggccaccctctagggtggatgccattattattcctgttttagagatgttgtagctatcattaaggggacattaataccctgcttgaggtcatacatgtggacttaatatgacacatctgggacacgcagccagctcttacccactatagagtctgtcctcttaaaccattctatactgtctttctgcctgttacattttttaattcatctgtaagggaacaacgtactttatgcacattcctgatctcttctggttcccaaatggtcccatttgagatcattccagaaagatgtggagaccttgccaacagcagggctatttcacaataagagtatattaaacctgctttgctttgttgtcaatgttgctttgagtctcgaatttaggctgttcaagttaaaactc

SEQ ID NO: 327846 - DNA, 533 bp, Homo sapiens
cctaggtcagtgggagacatagcctatcaatgaagtattaaaataaccactgaagttacgttgtctcttactatataccagtcactgggctaaatttattacttgcattttctcacttaatcctcctggccaccctctagggtggatgccattattattcctgttttagagatgttgtagctatcattaaggggacattaataccctgcttgaggtcatacatgtggacttaatatgacacatctgggacacgcagccagctcttacccactatagagtctgtcctcttaaaccattctatactgtctttctgcctgttacattttttaattcatcygtaagggaacaacgtactttatgcacattcctgatctcttctggttcccaaatggtcccatttgagatcattccagaaagatgtggagaccttgccaacagcagggctatttcacaataagagtatattaaacctgctttgctttgttgtcaatgttgctttgagtctcgaatttaggctgttcaagttaaaactc

SEQ ID NO: 327847 - DNA, 513 bp, Homo sapiens
gttttctttcaaagtttttagtataaatgtcagccagtcttgtgtgcttctgttatactccaacacctttccctgtacattttctttggggcaatattgaatattttttctacatttgtgtgcagaacctcttacatccttaaggtggcagcaacaatcaaaacggtatttaaagaaaattatctgaacgggaagggaagtggggaaaagaaaaaaaaawtttttctgaaatgttctataatcctccattttctgctcagcagaattatatctgtggctagattattcattatgaagagcttatttcagcccagagtctgtgcatcagtagattaggatgtggaggaagattagcttctcatagcgggtggctagaaatagtttcttatctgatcattaaaattggttgttcatggtttcttgattataattattaattctgtcaaggacttttgcatgtcaattaaattttggttcttgatatgtaatattaggattcagctctatggtacc

SEQ ID NO: 327848 - DNA, 598 bp, Homo sapiens
tggcagcaacaatcaaaacggtatttaaagaaaattatctgaacgggaagggaagtggggaaaagaaaaaaaaattttttctgaaatgttctataatcctccattttctgctcagcagaattatatctgtggctagattattcattatkaagagcttatttcagcccagagtctgtgcatcagtagattaggatgtggaggaagattagcttctcatagcgggtggctagaaatagtttcttatctgatcattaaaattggttgttcatggtttcttgattataattattaattctgtcaaggacttttgcatgtcaattaaattttggttcttgatatgtaatattaggattcagctctatggtaccagtgttacattagcaaggcagaaatgactgtgtgtgtgtgtgtgtgtgtgtgtgtgtgtgtgtatgtgtgtgtcttcaatagttctcaagtgcctccagtcctcaaaacatatttttgaaagtatttaataattttgagacttcagtaatgacagtactattaataaataaaacactagcagcgactttttattgtttactatgcatcctgtacctctgttgtctatttt

SEQ ID NO: 327849 - DNA, 525 bp, Homo sapiens
ctaacacattaactgtgaccaaagatttatgctatttgtagaagacccagtctatttttctccccagatctgctcagccctgtgygtgactgttagacagagatcccttgccattactcctgttctttcctcatctcctagcaccacaggctatcttatctactcccacagagagaaccaggttccagcacagcctcttccatgcaactaccatgtaggctttggtgcctcagttgaactaatcaggcccataggagatatggtgcctttcactacttctgggctcatgtaaagagaaacaaactttgaggcaagagaaatggctttccttgagacttcctgtagtagtcagtttacacaatctgagaacacggggcaaactgaccaatgagagaaaggagacagacaccacttagcagacgaatttcacgtcctcccttcagtttgcacacagtggctccgtagagcctctctagagatatcttacctgactaagaaaatagctttgatttttttcgtgaaggc

SEQ ID NO: 327850 - DNA, 587 bp, Homo sapiens
ctcagatcttcacaagagtcttgtattactccgttttcacattgctgatgaagacatatccaagattgagtaatttagatagaaaaagaggtttaatgaactcacagttccatgtggctgcggaggcctcacaatcacggcagaaggcraaaggcacatcttacatgatgacaggcaagagagaatgagggccaagggaaaggagaaacccctcataaaaccatcagatctcatgagacttcatcactactaggagaacagtatgagagaaaccgcccccatgattcaattatctcccactgggtccctcccacaacacgtgggaattatgagagctacaattcaagatgagatttgggtggggacacagccaaaacatatcaagcctagtagggttccttgatgtaaattctaggacagtgtgccccctgccaataccatgacccccaagagtattatactcgcatgctagtccacacacagcccccagcaattcatcaatattatcatttaagtgtttctatcagcttctgctccaggaaaacagatctcacctgtgactatggatgcatctgtttctttagatt

SEQ ID NO: 327851 - DNA, 559 bp, Homo sapiens
tggctaatgggactatctgtatgatatcgcagttcattatttcaccataacttcttagagggcacagaattattacaaggttccaagaatttacacttgctctcagcactgtccatgataaactgcataaatgaaacacatttgctacttggatccattctcttatgtatttttttcagattatacttaataaaagtatcactatgacaggaaggtatatgaagtttgggaagtttacatgagcatccccatattggcaaacataagaaactactgttctaatcccagccctgtgtcctgtgtttgtaagatttcaaattctacctatacccaacatcctgaatgctgtggcaatgagagagaatgtttttaatttcagatatttgctttctccttgaatccaaaactgaaggatacacataagcaaagcattgtggtagtgcatatctactgaataatcttgtaatctatccagatatcctgtgtccmaaatgcactaccatttagtagatgaagttgggctccacagtaaaaatctttgtgttcaaatcctggctcc

SEQ ID NO: 327852 - DNA, 615 bp, Homo sapiens
tatcactgaaaaccactgttttagaacatacaaagttgggaagatgggtgatttttgctagtttttttttcttcaaatctaagaactgttttgatacctacttataagattcctataaggaatacaagacatgaaagtacagctaataaatggtgttgaaaaactgtgaaccattgtacaaatgctaagcttaatgctgcaacatgacagcaaaattagaaaggaaaaaaaaagaacaagagcattccttcctcccattgggtacctttggggggcatgagtagaagtaataccagcaactagacctcattttttttcagagcatatagcatagttttttgattgtcttacagacagcctcaataataaagtgaatcattagaatttacagtcttaccacgagaaattatactagacytatctgtcaaatcaagagagaaagatcaagggaaaaagtacccataatataacctcattggaactatactagtcttcttcttgttcttcctattctcacttgccctcctccccaatccattctccatattaaactgggagtaatctttataaaacacaagtcccttatgccactatgttgctgaaagcctgttagtg

SEQ ID NO: 327853 - DNA, 608 bp, Homo sapiens
tcttcctctccagttttgtcttaggccattcttccttgccagcatgaagctccactcagtttgcatgaaactcattcctgaattcaggcatttttatttgttgttccctctaccagaattgtcatctgttacctgtaccttccttgcctggctaactccttatccttcacatttctgcttaagtacaatgtcacccaggaggtctgtaatgaccaccctcccaaccccctatactaagcgatagcatccactactgtgtgctttgtgagctacgatttcacagatgagtctctccaattcccctgcctcaatttcctaatctctgaaacagaggcctcagaaggttagccaaaaaataacctatattgactacttgggatgtgtcagccatttaattgaatcctcaccacagcctatcaaatagyccatgaatgactgctttgcaatctgcaaccagcttcttctttcttatgatgtgaagtgcacccgtgcctcacccaactcacatcacgttggacatctgcacctgaaactcataagtgattcttcacattcatgacctttcagaacttaactggagagtcctcatggaaatgtggattcgttct

SEQ ID NO: 327854 - DNA, 608 bp, Homo sapiens
tcttcctctccagttttgtcttaggccattcttccttgccagcatgaagctccactcagtttgcatgaaactcattcctgaattcaggcatttttatttgttgttccctctaccagaattgtcatctgttacctgtaccttccttgcctggctaactccttatccttcacatttctgcttaagtacaatgtcacccaggaggtctgtaatgaccaccctcccaaccccctatactaagcgatagcatccactactgtgtgctttgtgagctacgatttcacagatgagtctctccaattcccctgcctcaatttcctaatctctgaaacagaggcctcagaaggttagccaaaaaataacctatattgactacttgggatgtgtcagccatttaattgaatcctcaccacagcctatcaaatagtccatgaatgactgctttgcaatctgcaaccagcttcttctttcttatgatgtgaagtgcacccrtgcctcacccaactcacatcacgttggacatctgcacctgaaactcataagtgattcttcacattcatgacctttcagaacttaactggagagtcctcatggaaatgtggattcgttct

SEQ ID NO: 327855 - DNA, 607 bp, Homo sapiens
agttgtttcccagatagtttaatcattgtaattgagtaatattagctaagattatgtgtccgtcctatactaggcactttgagaagagataagccttaatttatatcgaatatagattttttataaagatatattacccctagccttcttatagctaataatacaaaaaattatkaacagtgccttcctttaagaacttaagagtttagtagggaagaaatgtgctacttgaacactacaatagttacattttttatcctgcactattgaaagtaaaattttgttgaagtataatatacataaagggaagtgtacaagccataggtgtatttgaactatactgtttatcattatcttcttttctttctactgtgtgtagatctgaagtaatgactccctttttattcctgatattggtaatttgtgctttttcttttactttattagtctcattaacagttaatcaattttattagtttttaactagaaccactgttggctctgttgattttttctattctatgttttattttttaattacattatattcttatttttattatgtcattgctttgtactttggcataatgtgctcttattttagcaa

SEQ ID NO: 327856 - DNA, 620 bp, Homo sapiens
tgtgtggtgcctataaattttaattatgtcaggtttgctaacaatattgtagagactttgtttgctttttcttgaagtttttgaaagaggtatattaaagttttccagtatgtttacaaatttatctaaattctccttttgtttccctcaatatttatttatatgttttgaatctgttattctgttttgtgttgattcagtttttaatgtcatatcttcaaagtgaattgatcctatttccatcataaatattctttcccaccttccaccaccactgcctttatctctggaaactgttcttgtcttaaattactttgtttgctrttagtcttgtgatatgagctaccttttagctagaaatgtctagtacatctttttctaccctaattcttacttttctgtgtctttatctattaggtgtgattttgcaaaccattttttttcttttccaggctgccaatctttaagattcttatatgtaatgcagtaattgacatattttgttttctatgttaatatttaatatttgttttcaatttgtctcacaggctttatggttttttttacatacttatcttcttgtggattaatcagatatttttaatttcatattttctttt

SEQ ID NO: 327857 - DNA, 632 bp, Homo sapiens
cctgccacataccacatatcacataaataccacacaaatgtacacatgcacacaccacacactcaaccaaacactcatccatacattccctatccatcctcaaattgagccaattactaagtagtaaacacaaaaggtgaactacttatgaaaaaatttcaagatatgctaagtccattccttctgtaaggtggaggtgggagactasatccttcacaggtgtattagcccattttcatactgctatgaagaaatacccaagagtgggtaatttataaagaaagagaggtttcatggactcacagttccacatggctgggtgggcctcataatcatggcagaaggcaaaggaaaaacaaaggcacttcttacatggtggcaggcaagagagcatgtgcaggggaactgccctttataaaataatcagatctcataagacttattcactatcacaagaacagaatgggaaaactcgcccccatgattcaattacctcccaccaggttcctcccatgacatgtggtaattatgggagctacaattccagatgagatttgggtggggacacagccaaaccataccaacagggttgacttgagaattatatgtgatatacgggcaaaggtttggtg

SEQ ID NO: 327858 - DNA, 632 bp, Homo sapiens
cctgccacataccacatatcacataaataccacacaaatgtacacatgcacacaccacacactcaaccaaacactcatccatacattccctatccatcctcaaattgagccaattactaagtagtaaacacaaaaggtgaactacttatgaaaaaatttcaagatatgctaagtccattccttctgtaaggtggaggtgggagactacatccttcacaggtgtattagyccattttcatactgctatgaagaaatacccaagagtgggtaatttataaagaaagagaggtttcatggactcacagttccacatggctgggtgggcctcataatcatggcagaaggcaaaggaaaaacaaaggcacttcttacatggtggcaggcaagagagcatgtgcaggggaactgccctttataaaataatcagatctcataagacttattcactatcacaagaacagaatgggaaaactcgcccccatgattcaattacctcccaccaggttcctcccatgacatgtggtaattatgggagctacaattccagatgagatttgggtggggacacagccaaaccataccaacagggttgacttgagaattatatgtgatatacgggcaaaggtttggtg

SEQ ID NO: 327859 - DNA, 549 bp, Homo sapiens
aattcttctgcaatatggtggccactagccatatgtgactactgagcacttgcaacatggctagtgcagctaaggaactgagtttataatttcattttgtttttatcaatctacatttaactttaaatagccacacatgactatgggatactttattgmaaaacacagttctagtgtattatttatgaatatttataaggataatagctaatacatatcaataacgtacaatgtaccaactattaacaggaaaccctttccttctgtcgtttttatccttcctacagccacttgatataggcactgtcattatcttgattttatccattaggaaaccaaggcacacagagagtaagggacagattcagaatctagaagattgaactctgaattctagaatctttgcttttaaacattgctctctcttttgtagacacatccctttgattcccacccccttcctcattcctcttgttaatgagaaacagtagcagacaccgtctccaaagactcacttgtaacttttgtaatgtattttctttcagttac

SEQ ID NO: 327860 - DNA, 556 bp, Homo sapiens
tgaaaattccaaaaactacaatacctcttctcctccaaatgattacaactcctctcyagcaagggcacaaaactggatggagaatgagtttgatgaattgatagaagtaggcttcagaaggtgggtaataacaaactcctctgagctaaaggagcatgttctaacccaaggcgaggaagctaagaaccatgataaaacgttccaggaactgctaactagaataaacagtttaaagaagaacacaaatgactgtatggagctgaaaaacataaaaagagaacatcacgaagcatacacaagtatcaataggcaaatcgatcaagtggaagaaaggatattagagattgaagatcaactttctgaaataaggtatgaagacaagattagagaaagaatgaaaaggaatgaacaaagcctccaagaaacatgggactatgtgaaaaagccaaacctacaattgattggtaaacctgaaagtgacagggagaatggaaccaagttggaaaacacacttcaggatgttatccaggagaacttccccaacctagaaagatgg

SEQ ID NO: 327861 - DNA, 504 bp, Homo sapiens
catatgcagcttgtattattttgaagtaaattccttctatacctagttggttgagaatttcytttttaatcatgaaaggctgttgaattttgttaatttcattttcaaactattgagagtaatatgtgatttttaccctaatttcttttaatgtggtgtatcacatttattgatttgcatatattgaatcatccttgacatatcaaagataaatcccacttgttcatggtgtatgatccttttaacatcccattgaattcagtttgctagtattttactgaggatttttgaatctatgtgcatcaagagtattggactgtgggttttttttattgtaatgtctttggctttggtatcagggtaatgctgacttcataaatgagttgaaagtattcccttctcttcagtttttggtaagagtttgagaaggattggcattcattctttatatatttggcagaattcaccagtgaagccatttggttctggaattttctttgttgg

SEQ ID NO: 327862 - DNA, 504 bp, Homo sapiens
catatgcagcttgtattattttgaagtaaattccttctatacctagttggttgagaatttcttttttaatcatgaaaggctgttgaattttgttaatttcattttcaaactattgagagtaatatgtgatttttaccctaatttcttttaatgtggtgtatcacatttattgatttgcatatattgaatcatccttgacatatcaaagataaatcccacttgttcatggtgtatgatccttttaacatcccattgaattcagtttgctagtattttactgaggatttttgaatctatgtgcatcaagagtattggactgtgggttttttttattgtaatgtctttggctttggtatcagggtaatgctgacttcataaatgagttgaaagtattcccttctcttcagtttttggtragagtttgagaaggattggcattcattctttatatatttggcagaattcaccagtgaagccatttggttctggaattttctttgttgg

SEQ ID NO: 327863 - DNA, 567 bp, Homo sapiens
gcctactctttctctggagctcctgaacattgccacgtgtatcctcttgagatgtaaatgaaacaagctcaacatcaagctcattatctcctatttttgtcttcttttgcattttctatctcaattagtggcatcaccatttgttcaacaactctcccctcccaaatctgctagataattcatatttatccttgaactctcacttctacatccagttgaccactggattattttgttggtccttctaaatttatttaacagcttctctcaatcttcagtgctcatcctttagttttttagactttcacctcccctaacctgtcttactacaaaagtcttctaactgtaggcaaagtacctacattgttctctttcaacagtagggttttgtcactgctgctggatgtgttcattaaatgccyctttatttaaaattatgatagctccccatgcttacaagcaaatctttccttctttcattcattcaattaaaataatgaatacctaccaaaaggctgagactgggtaaatattggtgaacaaagactaatactctatattgttttc

SEQ ID NO: 327864 - DNA, 572 bp, Homo sapiens
ctatgtattctttgccagatggaaatatcatctctggatctgtcatcagagaaaatcaaatccataagacttcccctttatggatttgtgcttttacatcttacttaagatccttccctggatgctgtgaaattagccttttatatattattttttagttttgattttaatattgaatataatactgcaattcataccaygcaatgcaaaaataaaaaagtatgaggattagaaaagaagttgatagaagtatttgtatagaacattcataagaatcagcaggaaattattagaactagtaaaaattagcaagatatctgggtaacatcaactaattgcaaaattaaatttaactttagaaaatcaatctcaccattttaacagaatgaagggaaacaattattcaatcaccttgacagatgtagaaaaagcatctaataaatttaacaactaataataaaaatatttataataaatctcacatgattcacttaaaataggggtacattataccctaaaaagtaacaatttctctgtcttttaaaccagttattattaaacagaaaatataa

SEQ ID NO: 327865 - DNA, 549 bp, Homo sapiens
gtgttcatttttaattttagtttttcaatttcctttgctcaacaccttacagaataaatgaatttttcgttatcaaaaattaaccattacattacaaggaaaragtaaagaagtgatgaaccatgctggatctccatcagaatagaacctaacatctagaagcactgtatacttccagataagtaagacttatttgacagataggtaagactgtttaaaaagggaatttttgccacatattgagctgaacacccatggaagttcttgaggtcatgttagctaaatatccgaatgttttctgaatatcagttatggcaggaaacaaaatagcatgtcatctctaatgacagagtctaaaaataaacgtgtgtacctagaaattcaaaaattcatctctgcctctcaaccagttggaataaaaatactcatgtggattcaagatgccaagatagggatggataaggtttcagtgaataaaaatatctaaaaagtttcatttttctacagtatattgaattataaatgaaaatatttctctgacacagctaa

SEQ ID NO: 327866 - DNA, 508 bp, Homo sapiens
gtgtgtctatgtattagtccattttcatgctgtctatgtattagtccattttcatgctactgataaagacatacctgagactgggcaatttataaaagaaaaaggtttattggacttacagtttctcatggctggggaggcctcacaatcataacaaaaggcaaggaggaacaagttaaatctactgtagatgacagcaggcaaagagagcttgtgcagggaaactcccatttttaaaaccatcagctctcactatcagagactctttcactatcacaagaacagtgcaggagatacccgcccccataattcagtcacctcccactgggttcctcycatgacatatgtgaattgtggaagttacaattcaagatgagatttgggtgaggacacagtcaaaccatatcattctgcccctggcccctcccaaatctcatgtcctcacatttcaaaaccaatcatgccttcccaacagtctccgaaagtcttaactcatttcaacattaat

SEQ ID NO: 327867 - DNA, 557 bp, Homo sapiens
ggtcaatatctcagaatgcttttaataatggaatggtggcctcaaagggtaaaatgggacagaggtaaaagtgaaaacagggtgtggggaagtagagaaagtggtcagtcaactctgaaaagcagggcagaaatgagagagttcaagaagagacagttcatgaagtgtttgtcttaggcaatcattgtgcacttcaggatgaaagatacaagaccagggatgcatttatcatctcttaagaagttgttgaggaagaagtyctgagttaataactgcaggaaggaggagaactacccaggaacaaagtttttgttgggaccctggtattgccacccatccctgaggagcttcggtttcatggctgactccaggctgctgacagtgtcttttcattcttggctatgatggtagagaatgagctgatgaagtgattcagatacatccttacacttgaaaaatccaaagaaaattcttagtggcccctcctagaaaatctcaggggatggttcatctactgcaggcctttcccctccttcttgcctctgctcaccaccaca

SEQ ID NO: 327868 - DNA, 586 bp, Homo sapiens
tataatatacttcaaattgaatgacaatgaaaacactacctaccaaatgttgcatcacagcttatgttaaaagagtatttagagttttaaatctacttaaaaataagaaagctataaaataactgagtcaaagacagagccagaaaacaattacataaagcttattttaaatagttaacaaaactaagtggtaattctttgaatagactaataaaacagaaaaggccctagtaatactacttttaaaaacatggaaaaaattactagcaataagttatagatgtaatagagatttttaagataataaaatattattaaaactatatgtcaagacatttgaaaacctagcataaatggatatatttctggggaaaatataatatgycaaaataaacccaagaagaaatataatacttgactagatgaatcaccattaaagaactgcatatgtgaatcaggaacacctcctccaaaaaatgaccaaaccttggtccaacatggttttgctgttgagtgctaccaaactataaagaagagataatcccttttcacatacaagttgttccagaataatagaagaaaaggg

SEQ ID NO: 327869 - DNA, 627 bp, Homo sapiens
aaataactataagatgagggtaaatgaataaaaagtggacaaggtattggtgatatggaattgttcaagcacttttaactatcaaaaaagaagaactgaataaacataccacatttaaatttaatacaataccaaggtttttttaaaagtccgtagaaatttttaggggaactttgaaaacatttttaagtttatatggaggaataaaatatccaaatagctgtgactcaatatcaagtattgagacaaattagaaagacagaacaatagaagagtagaactggtttgaaacagacaaaaagaaaaacwaatggggcaaaataaatagtccagaaataagactatgtattgattatctttatatagaatataaagcagaaattcaactttttcctcactatatagagtgttataatatatttctccaaaacatctacaaaacaacttggacttttctcacaaattcacattatgagaatttactggaatccctgatggagacgtattggaaaaataaaagattttcatgcctacacccaactcaatatactggtttcactggttacaatgaagtctaggaatatcttaaatccagtggttttgctaacagcacagtgaagctaagga

SEQ ID NO: 327870 - DNA, 627 bp, Homo sapiens
aaataactataagatgagggtaaatgaataaaaagtggacaaggtattggtgatatggaattgttcaagcacttttaactatcaaaaaagaagaactgaataaacataccacatttaaatttaatacaataccaaggtttttttaaaagtccgtagaaatttttaggggaactttgaaaacatttttaagtttatatggaggaataaaatatccaaatagctgtgactcaatatcaagtattgagacaaattagaaagacagaacaatagaagagtagaactggtttgaaacagacaaaaagaaaaactaatggggcaaaataaatagtccagaaataagactatgtattgattatctttatatagaatataaagcagaaattcaactttttcctcactatatagagtgttataatatatttctccaaaacatctacaaaacaacttggacttttctcacaaattcacattatgagaatttactggaatccctgatggagacgtattggaaaaataaaagattttcatgcctacacccaactcwatatactggtttcactggttacaatgaagtctaggaatatcttaaatccagtggttttgctaacagcacagtgaagctaagga

SEQ ID NO: 327871 - DNA, 610 bp, Homo sapiens
gtatgtagaggaaatatttaaaatattataaatggagaagagtaaagaaacataaagggaaggaaggtttctatacttcactctaactgatctaataattacactagtaactgttaacttaggtaaatataatgtaatacctagagcaaccactaagaaaaaaayacaaagatactcaaaaacaatagtgatacatctaaatggaattctaaaaattgcttgagtaactcacaggaaggcaggaaaaaggaaacagagagatgaaaaacagagaaagtaaagataaaacaaaagagtgttgttttcatacccattggtgtgatatatgagatgagatatattcaatgtcttatacaaatcctggacctacctgacctcttaggtcagtttcaagttctgtgacattgtgcttccaatgactatgaaatgtaataatgtctggctgctacttaaaggcaagaattttggccagctcactaagactagtttcactcatccccatctgccttccccacagttagtacagggaagagaaaattcggctagatcaagctttctctgcctttataatacaattcaatgtcccttggacacatcctgaatggtgcac

SEQ ID NO: 327872 - DNA, 575 bp, Homo sapiens
gcccttatgacaggcagggattcacacaacatctctgcagccaaaaatgtacatacgtgcaaaaacaaccttgtctgctggaggactcagggaagagaaggaccctgaagtagcttcaaagaacatcagcatccttcacwctaattaaaacctacttttatttcatttatataagggtgtcaggttcgattagaagccacgtacaatttggctctgagaagaacggtagctttctctcatgaagaaaaacgaagagaagtaattcctaaatgttaccctcagagattcccagggcaccatgcgcactcacaatgtcttaatgtccctggggaggtggctacaggctctgttgtcagctgtatggagagctttcaggctcccctgaaatagaaatacagtattcttagttaactggatacacaaattcattaagcaagcaaagcatggcaaagtctatcctccatttgcagttctgtgccccaatgggagaagagtataactgcattctctgtggtttatctgtgtatactcatctgggcgtatatcgtgtacatgccttcttattgcatgcggtt

SEQ ID NO: 327873 - DNA, 575 bp, Homo sapiens
gcccttatgacaggcagggattcacacaacatctctgcagccaaaaatgtacatacgtgcaaaaacaaccttgtctgctggaggactcagggaagagaaggaccctgaagtagcttcaaagaacatcagcatccttcactctaattaaaacctacttttatttcatttatataagggtgtcaggttcgattagaagccacgtacaatttggctctgagaagaacggtagctttctctcatgaagaaaaacgaagagaagtaattcctaaatgttaccctcagagattcccagggcaccatgcgcactcacaakgtcttaatgtccctggggaggtggctacaggctctgttgtcagctgtatggagagctttcaggctcccctgaaatagaaatacagtattcttagttaactggatacacaaattcattaagcaagcaaagcatggcaaagtctatcctccatttgcagttctgtgccccaatgggagaagagtataactgcattctctgtggtttatctgtgtatactcatctgggcgtatatcgtgtacatgccttcttattgcatgcggtt

SEQ ID NO: 327874 - DNA, 602 bp, Homo sapiens
taaaactgatcttgagctaagctgttgtacttgactgtgtccctttaacctagggaactcactgccaaaaaatatgattgaggccaacagcttaataagttttatcgaagattaaayatttatatgaataaaaatagcacctgcagcgacaccaggaaggataaaattacaagggctatgaaatcttcatgcttcagggcataaattgcttaccagctggataaggtggtttccctcgcagaccaacactgcactgctaaatatgttttcctgagaagtatctcaatgctgaccacttccaggaccaaagactacagcagaaagatctttacattgttggtttgcatccagcccaagtttttacagaatttagaaagtgtatgataccacgccaatctaaaatctgaaaataatgatgcaagagagaggccaacacctccattcacaaggaataggagtaaaatgggataaaattataaaagacgaaatggctcaggagggaagcagttcctaactttgttggccaatatggattatttgcagtaaaacactcagagctccaaatctgaaatccagttaagacaaaattagaagaaaagtca

SEQ ID NO: 327875 - DNA, 602 bp, Homo sapiens
taaaactgatcttgagctaagctgttgtacttgactgtgtccctttaacctagggaactcactgccaaaaaatatgattgaggccaacagcttaataagttttatcgaagattaaacatttatatgaataaaaatagcacctgcagcgacaccaggaaggataaaattacaagggctatgaaatcttcatgcttcagggcataaattgcttaccagctggataaggtggtttccctcgcagaccaacactgcactgctaaatatgttttcctgagaagtatctcaatgctgaccacttccaggaccaaagactacagcagaaagatctttacattgttggtttgcatccagcccaagtttttacagaatttagaaagtgtatgataccacgccaatctaaaatctgaaaataatgatgcaagagagaggccaacacctccattcacaaggaataggagtaaaatgggataaaattataaaagacgaamtggctcaggagggaagcagttcctaactttgttggccaatatggattatttgcagtaaaacactcagagctccaaatctgaaatccagttaagacaaaattagaagaaaagtca

SEQ ID NO: 327876 - DNA, 561 bp, Homo sapiens
acactaaggttttgtggacattaaaaggatcagaagaaagagcatatgctttttataccttatacttttatacatttataattttacacttttatgaatatgaggaatctgtatatccaaaagaaattcttacacatgaaaactgggagaactatacccaaatattcaaagcgacattatttttattagatagattgttttaaatttaattgatagattacaaaaacatgatacatttactcaaaggcctattayacagcagtggaaatgaatgaaatacaattacttgcaacaacataaatggatcttggaaacatcatattgagtgaaaatttgtcactcccatcagtctacatttggtgtgacacagtttttataatactcaaaaattagaaagatctaaacaacatattgtttagttcaaattaatatattaaataaaactgtttttcaaaaggcaagggaacagtgaacacacagtattcaaaatagtggtcccctctaagtggggaggaggatatcaagataagaatagggaaggggcacacgggtagaggccac

SEQ ID NO: 327877 - DNA, 552 bp, Homo sapiens
agacatgcggccccctgaagtgcacgcttacatattgtcccayagatctgacccgatggaaggttctactgggaaggtcttggagcatatgggtaaaatctctgagaaaattaggcaggcgaaaagatgtgtcagaaaagcaatataacttttatggaatacattattatattcagcataaacagcaaaaagatatacactgatgtagggaagatgggaggggggacagagttgattcttacctactaaaatagaagcccttagatgtataaaatggacacaataagtaaaagcagcattatttagaaatacataaatagcagaagacatgggtaagtgaatggaaaacagcctcctttggggaataggattggggtgggagatggattatgggaactgctattggtaatcataagccttttagtattacttggctttttaaaagtatatgcctgcattactttacaaaaatagaaattagtaaacaagcaaacgtcagtctctgcaaattggtctctctgtgaaattctcagatgcaaacgagataggtga

SEQ ID NO: 327878 - DNA, 552 bp, Homo sapiens
agacatgcggccccctgaagtgcacgcttacatattgtcccacagatctgacccgatggaaggttctactgggaaggtcttggagcatatgggtaaaatctctgagaaaattaggcaggcgaaaagatgtgtcagaaaagcaatataacttttatggaatacattattatattcagcataaacagcaaaaagatatacactgatgtagggaagatgggaggggggacagagttgattcttacctactaaaatagaagcccttagatgtataaaatggacacaatragtaaaagcagcattatttagaaatacataaatagcagaagacatgggtaagtgaatggaaaacagcctcctttggggaataggattggggtgggagatggattatgggaactgctattggtaatcataagccttttagtattacttggctttttaaaagtatatgcctgcattactttacaaaaatagaaattagtaaacaagcaaacgtcagtctctgcaaattggtctctctgtgaaattctcagatgcaaacgagataggtga

SEQ ID NO: 327879 - DNA, 615 bp, Homo sapiens
cagtgacctccatggggaaggtatataatcatgggaggatgcatgagtccacaatcaatggatacattcctcaatacataaagcaatttgatcacgcatatattcaaagataaacagctctgtttacagccacttgaaatatttacatataccaaaatataaaacggcatataaaaatgcaacacacacaccactggtgtgttcctttatgtgttaatacattatataaataccacatacctcctgcccccacaacctatattaagcgtagtacatatgtgcacccttccacataggtaccctagaacagtacagcctgaacagacgctgtttttccttcctgacaaacgggcatgaaataacaggctgacatctgcctctaaaggttattcaagtcagcctgctacatgtcaaaattcaaactgctmcatccatcaacggcagacccaaaatgaacgtagcttggaaactcagcggcaagacagtaacagcccaattcgaagtctgaccttcgaggaatggtggggtacgatggaaaattatttcatgccctgcaccaaagccaacaatagaatttgaagagattttcagttaaattaattttaaagaaaaatc

SEQ ID NO: 327880 - DNA, 560 bp, Homo sapiens
gagataagaagattacagaatgtcatgtgcctccggcgactcaacttcacagctaaacttctccagcccaggcagttcatctgattcgcatgggtcacaggctgtttcarttaatgcctctctaatgattcaagtgtgtgccctaatgtggaaggggaatagagagaagtcaagccagggaccttagcatgtctgtcctctccaccctctatctcagaatgctctttcccaagctgacttataagaaaggagaaaatgggatgggaaggaatatagaattcctttcagacagaaaccttttatgtcaccttcctgtcgttaccaatgcaattctgtgagtcttccgtgggctgtggatcctagagtagtgaataacagccctgatacgaaaacagaatgcagaaaacaaatgagcattttgaaaataaaaagcctggcttttaatcctattaagatcatggctgcttttttttttttttaatttctctcccctgccctaaaaactccgaaagagataccgatgttcccattaacataaatgctgaaatcagcatttcctt

SEQ ID NO: 327881 - DNA, 586 bp, Homo sapiens
gccatctatgacaaacccacagccaacatcacactgaatgggaaaaaactggaagaaccccttgagaactagaacaacacaaggatcaccactactactaaacatagttctgaaagccctagtcagagcaatcaggcaaaagtaagaaagaaaaggcacgcaaataggaagagaggaagtcaaactatctctctgtgcagatgatattattctacacctagaaaactccagagtctctgctcaagagctcctaggtctgataagcaacttcagagtttcgggaygcaaaatcaacatacaaaaatcaccagcattcctatacaccaataacatccaggctgaaagccaaatcaagaatgcaatcccgtttatgacagccacaaaaagaataaaatacctaggaatacaggtaactagggaggtgaaagatccttacaataagaattataaaacactgctgaaagaattcagaggtgacacaaacaaatggaaaaacattccatgctcatgcataggaagcatcaatactgttaaaatggccatactgcccacagcaatttacagactcaatgctattcctatcaaa

SEQ ID NO: 327882 - DNA, 566 bp, Homo sapiens
caactgactgctgggtaggaggacctggaggacacttgtttactacaagaggcactggcatcattgaggagttcagtggttgctgctttatgttgaccagggccagccaatcgtagaagatgatgttacagaactggggtccttgatattaacagggaagayaggatcaggaagtaataaagacaaataagttacattccgcattcagaaacaaggtggcatacttcttgtaatgagagagctatggagatgaatatggcacccccagtggtaagatagcagttgataagaatactgctcaaatctataccttcattatcaaatacagtagccactagccacatgtggatattcacatttaaattttaattagttaaacttgaatagaatttaaaaactagtttcactaaccacacttcaagtgctcaataatcacgtgtggttagtggcccatactggacagtacagatacagaacatttatatctctacaagaagttctaaaaaacaaatttggatgatcaggaggttaagtcagctgttctaatttttaaaattacaattcct

SEQ ID NO: 327883 - DNA, 459 bp, Homo sapiens
gacaatgacaaagcaagccaaagactggaagactatcattggaacacaggtatctaccaaagggcttatatccaaaatatataaatctagactacataaagaactcttaacaagtcaataataaacagaaaaacatattattaataaaacaggaaaaagtcttaaaggtacattttccaaaagaaaatatacaaatggcatctgaaaaggtgctcagtatcttttatatcacagaaatataaattaaaaccacaatgagctattactttgctctaaaattaaaaagactagcaaacatgtggagcartaggaactcatacaccactgatgagaatgtaaaatggtacaaccatattgaaaaaccggcagtttatctgaataaaccttcatatactaggaattccactcctaagtatttacttataagaaatgaaaacatatgcatccacaaaaaagctt

SEQ ID NO: 327884 - DNA, 407 bp, Homo sapiens
tttcaacacctgaattttgaaagggacacattcgaaccatagcaattatatatttyaaaattgctaagatagtaaatttttaaagttctcaccaccaaaaaaaaaaatgttaagtgatatgttaattagcttgatttaatcattccacacatatatcaaaatatatattccataaatatatgtaattattttttaaaaataagtgaagataagtataatgacaatgttgcatcaaataaagcatatctgtaacaagacagaaattctggagtaaatctgaagatacattgattgagattatgtaattcaaagaacaaggagaaaaaagaatgaagataaatgaagagtctcagaggaatatgggccactattaaacgcaccaacttacatataatgtgagtaccaga

SEQ ID NO: 327885 - DNA, 407 bp, Homo sapiens
tttcaacacctgaattttgaaagggacacattcgaaccatagcaattatatatttcaaaattgctaagatagtaaatttttaaagttctcaccaccaaaaaaaaaaatgttaagtgatatgttaattagcttgatttaatcattccacacatatatcaaaatatatattccataaatatatgtaattattttttaaaaataagtgaagataagtataatgacaatgttgcatcaaataaagcatatctgtaacaagacagaaattctggagtaaatctgaagatacattgattgagattatgtaattcaaagaacaaggagaaaaaagaatgaagataaatgaagagtctcagaggaatatgggccactattaaaygcaccaacttacatataatgtgagtaccaga

SEQ ID NO: 327886 - DNA, 571 bp, Homo sapiens
ttagcatttgttagtaataaagtattttaaaattaagttatgtacatttttttagacataatgctattacacacttaatagactataatataaacataactttttgtttgtttgtttatttgagatggagttttgctcttgttgcctaggctggagtgcaatggcaygatctcagctcactgcaacatctgcctcctgggttcaagtgattctcatgcctcagcctcccgagtagctgggattacaggcatgcaccaccacacccaactaattttgtatttgtagtagaggcggggtttctccgtattggtcaggctggtctcaaactcccgacctcaggtgatctgcccaccttggcctcccaaagtgttgggattacaggcatgagccaccacacccagccaaacataaattttatatgcactgggaaacaaaaaaaaatgtgttacttgcattattgcaatacttgatttcttgtggtgggctggaacagaaaatgcaatatttcagaggtatgcctgaagtgagaagataattaaattaaaatgctactttagaacatatccactta

SEQ ID NO: 327887 - DNA, 559 bp, Homo sapiens
acattcttctcaagtgcatatgggasaattttcaggatagatcatatggcagactgtaaaataaaccttaataaattaaaaaagattaaaataatataaagtatgttcatgaatcccaaaatgaaaaaaattaggaatgtataacaaagaaatttggaaaatgcacaaataacatgaaaattaaacaagatggtttgaaataacagcgagtcacaggagataccaaaagagaaattagaagatattttgcagtacagctgggagtggtggctcacacctgtaatcccagcactttgggaggctgagccagagggattgtttgagcccaggagtttgagaccagcctaggcaacatggtgaaaccctatctgtattagtccattttcatgctgctgatacgagactgggaagaaaaatagatttaatggacttatggttccatgtggctgggaaggcctcacaatcatggcagaaggcaaaaggcacttcttacatggcggtggcaagagagaatgtgagagaagcaaaagcagaaaccccttattaaaccatcagattt

SEQ ID NO: 327888 - DNA, 418 bp, Homo sapiens
caacatttttgtcactttccttgattttgtttcttttcytctatccagctgggggaattcttcccccagctctgtgcctgtaataatagcagtaacaataatagtgcttcccatgagccaggagtattacatcctttaattttcacaaaattatatgagatgggtactgttataatgaaaatgaggcacaagagtttacatatgttgctcacagacacccagtaagtgccaaagctgtgatataaacccaggatattgcacacttaactactatgcagttcctctcattagcactcatatatacccatcatataatatgttagtgtttgatagtctctgtaagagttgtacctcattgggtggccagggcataacacagccacagaaaaattgttgtttgggccaaagtatagatttg

SEQ ID NO: 327889 - DNA, 596 bp, Homo sapiens
tgcatgtagaactccaggaacaatttggcttcctgcccatgaaattacttctcatcattcaggtttcaatttaatgccagtgygtgtactataagatgtatgtttaatcctacaaatgagttgcatatgcatttcaatttccgaaaacctgggctgaattttaaaagaaagcatttgggatctattgtattaaaggtgcttctgagctaagtgcattctaaatacactgtacaatcaaaaataatgctggactttgggcactatgctaaattttttaaaaaaggaaaaaaatacacaaatgatacctttttgaacttgcttttcctgagaactgaaaagatatatcatggacttttttttttcagttaccctttgttttttccccttccaatttgccttctgtcatcttctgcccactagcctagtaagtcaaaacaactctaaaaggaaagtgtcttgaataggaagcttattcagaaagcatttgtagtagaggcagaatctactccaagaagaaaccagtaaggtacttttaaaacttcatttcttggtgtaaagattctgttgctggatgaagatctatataaaatatatta

SEQ ID NO: 327890 - DNA, 596 bp, Homo sapiens
tgcatgtagaactccaggaacaatttggcttcctgcccatgaaattacttctcatcattcaggtttcaatttaatgccagtgtgtgtactataagatgtatktttaatcctacaaatgagttgcatatgcatttcaatttccgaaaacctgggctgaattttaaaagaaagcatttgggatctattgtattaaaggtgcttctgagctaagtgcattctaaatacactgtacaatcaaaaataatgctggactttgggcactatgctaaattttttaaaaaaggaaaaaaatacacaaatgatacctttttgaacttgcttttcctgagaactgaaaagatatatcatggacttttttttttcagttaccctttgttttttccccttccaatttgccttctgtcatcttctgcccactagcctagtaagtcaaaacaactctaaaaggaaagtgtcttgaataggaagcttattcagaaagcatttgtagtagaggcagaatctactccaagaagaaaccagtaaggtacttttaaaacttcatttcttggtgtaaagattctgttgctggatgaagatctatataaaatatatta

SEQ ID NO: 327891 - DNA, 596 bp, Homo sapiens
tgcatgtagaactccaggaacaatttggcttcctgcccatgaaattacttctcatcattcaggtttcaatttaatgccagtgtgtgtactataagatgtatgtttaatcctacaaatgagttgcatatgcatttcaatttccgaaaacctgggctgaattttaaaagaaagcatttgggatctattgtattaaaggtgcttctgagctaagtgcattctaaatacactgtacaatcaaaaataatgctggactttggrcactatgctaaattttttaaaaaaggaaaaaaatacacaaatgatacctttttgaacttgcttttcctgagaactgaaaagatatatcatggacttttttttttcagttaccctttgttttttccccttccaatttgccttctgtcatcttctgcccactagcctagtaagtcaaaacaactctaaaaggaaagtgtcttgaataggaagcttattcagaaagcatttgtagtagaggcagaatctactccaagaagaaaccagtaaggtacttttaaaacttcatttcttggtgtaaagattctgttgctggatgaagatctatataaaatatatta

SEQ ID NO: 327892 - DNA, 445 bp, Homo sapiens
ctttctgtaaaaaaatagaatacttgagaatggataagcctcttttttttgtcaaaatgtcaggataactgagaacttcatttttcttttttaataaagtaaaaatatcctttcctcccacccatactcttttatggaactatgatttgcatattaggcatataagtcaatgatgtttgaaataattacaccagtgtaatctacaacccataaagttctgttygacactactttctggtttactccctttttccaaggaacaaactacagttctgatcgtaaatttgttttgtctatttagaattttatataaattggattatacagtactttttatgtctggcttttgttcaacataatgtttttgagattcacccatgctattactggttttagaaacttattattttgtatttctaagtggtattccattgagtgaatatac

SEQ ID NO: 327893 - DNA, 594 bp, Homo sapiens
ttgagattcacccatgctattactggttttagaaacttattattttgtatttctaagtggtattccattgagtgaatataccacaatttgcttattcagtctcattttgatggtcatttgggttgcttgcagtttgtggcaattatttttaagaatctactacaaatatttttgtacaggactttttgcaaacacatttctatttctcttggggctatgattatccttaaaataaactgccaaactgcttcccaccaataatggcgagggtttcattctacttgcttgtcaacatctgctattaccagactttctaatttttgctattctagtgtatgtaaactgatatcaccctaagtccataattcacattagcattcacattcactcttactgccatatattctacaggtattgamaactgtattatgacatgcattcaccattataatgtcatacagcatagtttcattgccccaaaaatcttctgtgctctgtctattcatccctcccttcccccaacctctagcaaccactgatgtctttactttctccatagttttgccttttccagaatgtcttatagttgagatc

SEQ ID NO: 327894 - DNA, 564 bp, Homo sapiens
ttccagtagtgctgaggtagagaaactctgggtgggagggaagggggggatgcagcatatctatctgtctatcactgtctcatatctgcgtggagatctgagctacatggagtgggggtgccacttcaagtcttcactttaaaaaaactgtgcccacatctggcagctgtcatgagtcatagtaattggcatgtttaccagcaactattagaatagccgaaatatttcctaagtcactcagcctgagtaatttgctaatttttagttgttttctgcatagttcaggcttgagatgcatctctaaaatattgtaggaggtatctgctttgcgactacttttctgcttctcttctctgtggataattagaaggatttattycctggagatgtcaagtaggcacctttctcattacctaaattcacttagagaaaaataaatcagtatacagatgaaagtacaggaagtgaccatgggagttgttttaatccagagaaaataagttctcctatgtataatcagagaactgctgaagaattcttcacctctctttttttttttgaata

SEQ ID NO: 327895 - DNA, 609 bp, Homo sapiens
ctttcgacaccctgcacatgtgatctcggtggtgctaggatgttcctgagtcattgtccacagtagcactggaactctgctcccctgatgtcaccattatgcaacccagtacaattgtccctccattattcagaaataatgtctgttatttgtataaataatgtcttccattatttargatagtgaggtctgctatctcatgtatccttgtgttccaaatgtttatttgtaagtagtttgttgctttctgtgggaaaatgcattcccttactttctcctatctcaaagtcattaaatatgcctactcaagaatgcctttgtctccttttcaccaaaccatgcctctgtcttatttaatactctgtgtatgacttgttgataacataaagcctcactaggttaattcttcctcactcctcacttcaatgcttccttgctcttcccctcattccttttctgcctccctaaatgtcatgtgtccttctcttaatgcaatttaaaactgttttttcatatgtttatcagctaggtttcttttcactgcaattaattaaatgtcagggaggcaagggttgaaaaattatccttcaggtacaacgttcactattt

SEQ ID NO: 327896 - DNA, 462 bp, Homo sapiens
tgctttgcgactacttttctgcttctcttctctgtggataattagaaggatttatttcctggagatgtcaagtaggcacctttctcattacctaaattcacttagagaaaaataaatcagtatacagatgaaagtacaggaagtgaccatgggagttgttttaatccagagaaaataagttctcctatgtataatcagagaactgctgaagaattcttcacctctcttttttttttkgaataaccttcctacatccccaaaactgtgttgaggcagaatttataacttgcttaatttatagtacaaagaagagcctctcctctctaggtttttttgtttgtttgcttttttaatcagtacagcctaagttccagggtcgtgtgaggtgaaaggggatcatacgtttcccaggatagagtgaaaatatcagtttgagtagaaatagtgttattatccatcttt

SEQ ID NO: 327897 - DNA, 645 bp, Homo sapiens
ctgttttatggtttctgtggtggcagaaaccaatccgattactgtcagtctgggctggcatggtaattgaaaacacctagctgaagtggaagatgtgtgggcagaagcaaccagcaggcagatcatgtcagaattgagaataacacattccaacctattaagataagctattgtgaaggactctgcaacaactgggtcccacagaaatagtaggcaacaaatttgttttctgtgaaaatcaggagtattggggaaagggggctgggactttaatgagtagcttatattcattcatcacacattaaattactacctgttatcacccagccattctagcctcaggagctcaggaaattgatkattaaagacaatccttgtcctcaagctcatactctggttgagaaggcagacatacaaataattacaattttgtgtgatgattgttctaacagttatacataaaattgtatgaaaactacagcagacagcagttaattctgcctgagagtgtcaaggaaggcaccactgagagggtgacttttaagcagggaaagagaaggagtgccaaagaccagaacataccagaaacatgaattcagtggcatgaaataatgcagcactttttggtgaaaacaagaaagttca

SEQ ID NO: 327898 - DNA, 555 bp, Homo sapiens
aatctgtgaggatgcaggtgagcataactaaacacaccaacagtgggtatagatatggggaaaagtgacatcaaatgagaaactcacaactgcaggttttaataagttcaaagagtaggtttgggatagtcaagtggggaaaamgtggttatgtagtttgttcgaaggatggaattctaaagtttaagatttcacatgtggaacagtcccaaggaacaaaagctagtatatgtccttgaagacaaaagtaactggactataaggcaaagaggagctgtctgtatggactttgaagttattctcttaagttgtgttccacttgatgtagatcctgaaacaaggattagagcacaagtttatttggcagataaattccacggttttggctcatatgcttttataatagtgtgtcattaagtcactaagtgctcggctcaccattgctgtacagtcaacagacattagttgatgttaacaactcagtagagttgcccttctcagagctatcaagaacaagatggctttaggagcaccagcttccctgttaaggctcat

SEQ ID NO: 327899 - DNA, 586 bp, Homo sapiens
catacgtttcccaggatagagtgaaaatatcagtttgagtagaaatagtgttattatccatcttttagaaagatccaatgaaagaaaatcagatatgtgccaaggaacagcacaatctggaagttgctgcataaggagaaggaaaatattgccagaaggctgggtataagcctagaatggtgtttctccaattcaaagtcatggctcttgagttgaaacaggacaagtcacagaaagccacttcatccttccctatcttaagcatggctagggaggagagatggcaggaagctctcagatgaaatgacattcagggctctggcttcaaatgttgggccctgagtcagggaagaagcaggagaaagatgcttttacagtttgctaacacaaggcaaaattataaaactgcacttttctatctcyattcccacgagacaatttgggacttctttttcctcttctaagatggtggcaaaacatcggaggtagtgaatatagggtgaggagtctcaggactaaaagtctcttggaaccaccctgagtcctgcattcaccccagaggatcatgggagcattgtgcaccaca

SEQ ID NO: 327900 - DNA, 565 bp, Homo sapiens
cttgacagcagagctgtcaaatatcaaaacacttgccaggatttttaattggacaagctgaggaatgtatagtgttgctataactgaaatcaatctataatttgaataaaaattaactctttaatactgccttccttcttacctgcacaacgtcaaaataaaaaccaaaccaaaacaaaacaaaaaaaacccaacatgaacaagcaagcaaacaaacaaatgaaaatcctccatagaaatgtttgcatgcagacatgcattcatgattgatgactgataaataaaggagcagtgtttataaggctctttgaagtttgcaaagagcttacatgtacattattttgtttaattgtcataataacaccatgagatggattgtgcaggcatttcagttcagttttcaatgaagcctatactgkaccaggttttgtgctagacacataaattagaggacatccctgtggccaataaatttgacaaaagaggaaactgagtctcagagagagagcgagagagagagagagatggtccagtaagattttttgctgtagagaccaaaagtctg

SEQ ID NO: 327901 - DNA, 586 bp, Homo sapiens
catacgtttcccaggatagagtgaaaatatcagtttgagtagaaatagtgttattatccatcttttagaaagatccaatgaaagaaaatcagatatgtgccaaggaacagcacaatctggaagttgctgcataaggagaaggaaaatattgccagaaggctgggtataagcctagaatggtgtttctccaattcaaagtcatggctcttgagttgaaacaggacaagtcacagaaagccacttcatccttccctatcttaagcatggctagggaggagagatggcaggaagctctcagatgaaatgacattcagggctctggcttcaaatgttgggccctgagtcagggaagaagcaggagaaagatgcttttacagtttgctaacacaaggcaaaattataaaactgcacttttctatctccattcccacgagacaatttgggacttctttttcctcttctaagatggtggcaaaacatcggaggtagtgaatatagggtgaggagtctcaggactaaaagtctcttggaaccaccctgagtcctgcattcmccccagaggatcatgggagcattgtgcaccaca

SEQ ID NO: 327902 - DNA, 526 bp, Homo sapiens
tttgcaaagagcttacatgtacattattttgtttaattgtcataataacaccatgagatggattgtgcaggcatttcagttcagttttcaatgaagcctatactggaccaggttttgtgctagacacataaattagaggacatccctgtggccaataaatttgacaaaagaggaaactgagtctcagagagagagcgagagagagagagagatggtccagtaagattttttgctgtagakaccaaaagtctgtatctttggatgcaagttccaatgcttttatccttttacgatggtacctctgaatggaataaagccaaattagccaagagagaaatacatttttgttgaaagctggtttccaaggcactctaaatttcatacagtgaaaccagcgtagcagataactcaattcaaagatcacctgcctattaaagcaaggtttttaggccactgattttacttccttatgagtgatgctgcataagcttgcattaaaacagtgaatttttcagctttgacatgt

SEQ ID NO: 327903 - DNA, 618 bp, Homo sapiens
ctctcagtcttacaaagaaaaagctagatgaattaaaaattaattgtctttcttgaacctatcagagaacttaagttgcaggtcaaacagtcaccccaaaatgtgaagaaacaggggcatccagagagatatagctgtcatctgtttactgggagcagatgctcctggagccataaactggtaagaatatttaatgaggactttgttggattgctggaggcttagtgtggaccagcaaagacttagaaactcctgggggctcmgcctttgggggcctatgaatttgtggattttacctccagaaaccctagcagggttctcactgtgaaaattagagataaatccccttgtaattttcacagggggagggtacatgaaaccatattgaaatacaccttgggaaaagtaactaggtaagtcaagctgatagtatgtatccttcatatgacatgatgagaatggcattatccctctgtgctcttgctccccaaaactcataaccccagtttaatcatgagaaaaacactggacagttcccatttgagaaatgtctacaaaatagctgaccagtacccctcaaagctctcatcaagtacaatgggactttgagaaactgtc

SEQ ID NO: 327904 - DNA, 618 bp, Homo sapiens
ctctcagtcttacaaagaaaaagctagatgaattaaaaattaattgtctttcttgaacctatcagagaacttaagttgcaggtcaaacagtcaccccaaaatgtgaagaaacaggggcatccagagagatatagctgtcatctgtttactgggagcagatgctcctggagccataaactggtaagaatatttaatgaggactttgttggattgctggaggcttagtgtggaccagcaaagacttagaaactcctgggggctcagcctttgggggcctatgaatttgtggattttacctccagaaaccctagcagggttctcactgtgaaaattagagataaatccccttgtaattttcacagggggagggtacatgaaaccatattgaaatacaccttgggaaaagtaactaggtaagtcaagctgatagtrtgtatccttcatatgacatgatgagaatggcattatccctctgtgctcttgctccccaaaactcataaccccagtttaatcatgagaaaaacactggacagttcccatttgagaaatgtctacaaaatagctgaccagtacccctcaaagctctcatcaagtacaatgggactttgagaaactgtc

SEQ ID NO: 327905 - DNA, 620 bp, Homo sapiens
cccactctgtctctggtttggtcaataaaaaccttttttaatttaaaatagttcaagttaggtttcaatttgagatggaaagatgcagccaagagtcttgccttgagagacagtaatgatcccaaagggagtgaaaaagtcaatggtgggtttttagatgttgtaacacttggacagaggacatttagagcagctttcctttgtgacctactgtcatagttgccgaagggaaagggaacactgggtagttttttaagaaaatatagatccattgagggaaaattgatgcaaaacaaatgcatatattgacatgtacaatttgatgagttttgatatattaatgcaccaatgaaatcatcaccaaactcaggagaatgaacacacccatcacttgcaaaagtttccttgtgaccttttgtaatatcttcctccacatattaacttcccaccccaatccccaggcaaacaatggtccgtataaatggaatcacagtgtatgtactcttatttaggacattatttatttagaatatggattctttcacrtaggataattattttttgattcatccatgtttttgtatccatagtgctctctctccccccacttttttttttat

SEQ ID NO: 327906 - DNA, 545 bp, Homo sapiens
ttacgtttacctttttaagaaattacagaactcttttcctaagtgattataagcattgtttaaaagttctagttgctaccaatccccatcagcatttggtattgcctgtctcttagttgagccattctaatgggtttgtatggttttaatttgcattttttaaacttctgacaatgttgagcatttttcatgagcttatatgccatccttatgtattatttgattaattgttcaaatcttttactcatttaaaaaattctaaaaagttttaaaatagctttacttargcataattcacgtacaataaaattcaccccctttaagtatacagatcaatgatttctagtaaattcatatagttgtgcaacaaatagcacaatctacttttacaaaatgttcatcccatcaaaacgttatctcctacacatttgcagtgaatcttcactcccactcccagccctagacaaccctagatctgctttctgtctctacatatttgcgttttctagaaatttcatataaatggaataagaaaagatgtagtc

SEQ ID NO: 327907 - DNA, 600 bp, Homo sapiens
taggcataattcacgtacaataaaattcaccccctttaagtatacagatcaatgatttctagtaaattcatatagttgtgcaacaaatagcacaatctacttttacaaaatgttcatcccatcaaaacgttatctcctacacatttgcagtgaatcttcactcccactcccagccctagacaaccctagatctgctttctgtctctacatatttgcgttttctagaaatttcatataaatggaataagaaaagatgtagtcttttgtatctggcttttttcacttatcataatatctttgaggtttatctgtgctgtagtatgtatcagtcatttgttcctttttattcctgagtagtattcaattgtatgtattcaattatatgcatatataacaytttatctatttgccaattgatggacataaatagtttctagttttcaaatactgtgaataatgttactacaaacactcatgtgcatatctttgtgggacatatattttcatttctcttaggtaggtacctaggaatagaattattggggtgcataagtatatgcttaactttttaagaaatgaccgaactcttttttcaaagtg

SEQ ID NO: 327908 - DNA, 557 bp, Homo sapiens
aagaacaacactgacagtccctaaagccagtaataaattaaattgtaaaattatgtttgtttgtagaaagcttatagattcttacaaagccctcaccttgtacgtcaagccacctccgtcccattttgccctctatttcttttccttcacccctgcatagagctcttggctcagttttgatctgtaactgccttacattggaatagcctttcaacacacattggctgtgctgtccaaataatgggctttccaactttttrggttttttttttaacaaaatgtccagaaactctgttttgccttttgggcaggatgtcagggaaggcaggtggttgaaaggaagcctggagatgaaagagataataaaaaatgtgctcacattctggtacatactcctaccttcccaggacaaagacaagtttgggagttttctttaaagaagactggtaatacgctaatggtgcagcaagtctgtccccaaagagtggaagtgaatgagacctgggtattttccatggaatgattcaccagtggttcacaccgaaggaaaagggttg

SEQ ID NO: 327909 - DNA, 592 bp, Homo sapiens
ggtacagggtacaggtatcactatacattcatggtctccagactaaactgggctcccaacactacctggttacactattctaccattctctttatttttattttatttacttttttgagatgaagtttttgctcttgttgcccaggctggagtccaatggtgcaatcttggctcactgcaacctctgcctcccgggttcaagtgattctccygcctcagcctcctgagtagctgggattacaggtgtatgccaccatgcctggctaatttctgtatttttagtagagacggggtttcaccatgttggccaggctggtctcaaactcctgacctcaggtgatccacccgcctaagcctcccaaagtgctgggtttacaggcgtgagccactaggcccggcctctaccattctttttaacaatcacctcaaagcttttctactctcctcaaatctttgatcaatctctgacaatatgcgcctccctattctcagcatatgactctctcttctacatcatggaaaacatggaagcctttagacactgagctccttcatttactacttagcagacctacagctctgctcattaagg

SEQ ID NO: 327910 - DNA, 592 bp, Homo sapiens
ggtacagggtacaggtatcactatacattcatggtctccagactaaactgggctcccaacactacctggttacactattctaccattctctttatttttattttatttacttttttgagatgaagtttttgctcttgttgcccaggctggagtccaatggtgcaatcttggctcactgcaacctctgcctcccgggttcaagtgattctcccgcctcagcctcctgagtagctgggattacaggtgtrtgccaccatgcctggctaatttctgtatttttagtagagacggggtttcaccatgttggccaggctggtctcaaactcctgacctcaggtgatccacccgcctaagcctcccaaagtgctgggtttacaggcgtgagccactaggcccggcctctaccattctttttaacaatcacctcaaagcttttctactctcctcaaatctttgatcaatctctgacaatatgcgcctccctattctcagcatatgactctctcttctacatcatggaaaacatggaagcctttagacactgagctccttcatttactacttagcagacctacagctctgctcattaagg

SEQ ID NO: 327911 - DNA, 592 bp, Homo sapiens
ggtacagggtacaggtatcactatacattcatggtctccagactaaactgggctcccaacactacctggttacactattctaccattctctttatttttattttatttacttttttgagatgaagtttttgctcttgttgcccaggctggagtccaatggtgcaatcttggctcactgcaacctctgcctcccgggttcaagtgattctcccgcctcagcctcctgagtagctgggattacaggtgtatgccaccatgcctggctaatttctgtatttttagtagagacggggtttcaccatgttggccaggctggtctcaaactcctgacctcaggtgatccacccgcctaagcctcccaaagtgctgggtttacaggcrtgagccactaggcccggcctctaccattctttttaacaatcacctcaaagcttttctactctcctcaaatctttgatcaatctctgacaatatgcgcctccctattctcagcatatgactctctcttctacatcatggaaaacatggaagcctttagacactgagctccttcatttactacttagcagacctacagctctgctcattaagg

SEQ ID NO: 327912 - DNA, 574 bp, Homo sapiens
tggctgtgccacacccagcattataaaggacagggcatctctgaccatcagcaaatagaatccactcccactgagctccttactgggcaatgctgattttattgaagattccatcagggaggcagagaaaaagttcatattgcatctaccatagccctcaacatytcgtataccttgtttaacataattcttctccttagtccttgtacctcccctaggcttctctttccatcattctggtacacagctctgtgccactcatctcctctctccatggcttttctggagcaaatgtgtatatatcgtacagatgccaccagggctctgttcctacatcctcagaccttaccattatgtgcatgtagacccagctcctgatcccagctctcatctctttgcctaagatagataggtaggtaggtagatagatagacagacagacagacagacagacagttattcccatggaagagcagctccatctgttttttgtagtcctcggtgtaatcaacctactagcctgaaaggcaggattcttacacacttctctccatacctattttaacctaggttc

SEQ ID NO: 327913 - DNA, 552 bp, Homo sapiens
aagtatgcaatatcaagttgcccctttaggtgactggagtggaatcttgctaggctttctggtagtcggtgtagaacacacgttagaattattttaccaatggttgagcacttggttgaggcacttactggttgagggctgctccttggtggtgggtgtcaatctcctggtatttctggcctgccatgtgcacaggcagagtgggatctggcagagcaggcactggctgtcaaagaaagcccttagactttctcttctttcagagaaagaagagagaggaagcctgtgccaggctgacagccagggaaggctcacagtctccwgagggcagggtaccttgcggggacagtatactgtttggcctagcagtgaggtgggtgtggcctgagtcctccctaagatgggatcagtataaatttgccaaggagcccttgtgacagaggaagggctgttctctatcattatcatccccccttcagtcttgaccaccaggattgtagaattgacacatcttcacttcttgacttcctgctatcacctgggagtggatac

SEQ ID NO: 327914 - DNA, 558 bp, Homo sapiens
tgagcacttggttgaggcacttactggttgagggctgctccttggtggtgggtgtcaatctcctggtatttctggcctgccatgtgcacaggcagagtgggatctggcagagcaggcactggctgtcaaagaaagcccttagactttctcttctttcagagaaagaagagagaggaagcctgtgccaggctgacagccagggaaggctcacagtctccagagggcagggtaccttgcggggacagtatactgtttggcctagcagtgaggtgggtgtggcctgagtcctccctaagatgggatcagtataaatttgccaaggagcccttgtgacagaggaagggctgttctctatcattatcatccccccttcagtcttgaccaccaggattgtagaattgacacatcttcacttcttgacttcctgctatcacctgggagtggatacattgytttctttggcattattaatagagataatagtagccaagaacagttattgagcatttattataggccagacactgtgctagatgcttttcatgcattcgcttattt

SEQ ID NO: 327915 - DNA, 548 bp, Homo sapiens
caaattcaacacaattcccatcaaaataccatcatcattcttcacagaattagaaaaaacaatcctaaaattcttatggaacaaaaaagagcccacatagccaaagcaagactgagaaaaaagaacaaatttgaaggcatcatattaccaaacttcaaaatatactacaaggctacagttaccaaaacatcatggtactggtataaaaataggcatgtagaccaatggaacagaatagagaacccagaaataaagccaaatatttacagccaactgatctttgacaaagcaaacaaaaacatagagtggaaaaggacaacctcttcaacaaatggcgctgggataattggcaagccacatgtagaagaatgaaactggattctcatgtctcaccttctacaaaaatcaagaaggatcaaagacttcartctaagacctgaaaccataaaaaatctagaagataacactggaaaaactcttctagacattggcttaggcaaagactttatgaccaagaacccaaaagcaaatgcaacaaaaacaaggat

SEQ ID NO: 327916 - DNA, 615 bp, Homo sapiens
gcatataacttgtagtcaagaacgaaagcatactttaggatgttaaagaacacccccaaaatggctttataattaaaaaatatatactataactatacaaatccttggaatgatgccatgctaacttaaagagttgtttcagcaatatgacaaagataactcagagctttgtcatttatttatgaagatatataaatgctagatatattcaataaaacaatgtttaatggcatacctgaattcaaaaacaagaaaatgacagataaataggaggtactttaaattcaggacctaggacttcagcaacaagaggcaaaytgcccaacatttaagtcttcaggtatacctaaaggtgtttttaatgcccaggtaggtacagaagacatggctttgggctcaggaaaggtgggggagctaaagcatcatgcccaccataaagctgggataagagaagagctgctgcctcagtgaaaaggggataagaacaattctacccactgatacagaaagcaaaaaggaaacttgtctttgttgggattctgaggagaggaaaaaaaagtcacctgtgaaaactaaaaactccaagcctgaccaaatttatgtcatctacgggca

SEQ ID NO: 327917 - DNA, 474 bp, Homo sapiens
tcaaaatccagttctttaaatcaactcaatcacacaaaactaaagaaaaaagaactcaaaataataaccaaatcctamaagaaagatgggattatttcttgtaaagaggccaaacctgtgactcattagcatccctaaaagggagggagagagagcaagcaacttgtaaaacatatttgagaatattgtccatgaaaatttccaaaccttgctagagaggtcaacatacaaatccaggaaattcagagaacccctgtaaaatacaagacaacaattcacaagacacacagtcatctgattccccaaggttaacatgaaagtaaaaatgttaaagacaactagagagaagaagcatgtcacctacaaagggatccccatcaggctaacagtggactttcagctgaaaccttacaagctggaaaagattgatggtgcgggggctatatttagcatcttcaaagaaaataaattcca

SEQ ID NO: 327918 - DNA, 523 bp, Homo sapiens
ctggcaaggttaaaaatgtaagttgacatatgattaaaagaaagctatctctcatttagtcttgcaaaattgttacaggaaacacttggtatctcattccttcctattacttaaagtgaattgcaytggagaattttccaggaagaggcttcactgctctctttagggttttattgtcttggtcatctactgagaaatacaccccaactaaaaaacattaaaacaaaattctcaactatatactgaagacttctgattaggtaagtaattcctactagctgattttaaaatcactatttaccaactttcttcagattggatctgatgaaagtttgcctggtatagaattcagaacttcacatcatacagtattttatttagtaattccttttctgcaaacaaactagcagaaccaaatactactttggttgttgcaccattaccattactggaggtgtatcgcattatttcattaatatggcagaacaggggactgcttctccattttcagagtcatagaggc

SEQ ID NO: 327919 - DNA, 551 bp, Homo sapiens
aaaaatgtaagttgacatatgattaaaagaaagctatctctcatttagtcttgcaaaattgttacaggaaacacttggtatctcattccttcctattacttaaagtgaattgcattggagaattttccaggaagaggcttcactgctmtctttagggttttattgtcttggtcatctactgagaaatacaccccaactaaaaaacattaaaacaaaattctcaactatatactgaagacttctgattaggtaagtaattcctactagctgattttaaaatcactatttaccaactttcttcagattggatctgatgaaagtttgcctggtatagaattcagaacttcacatcatacagtattttatttagtaattccttttctgcaaacaaactagcagaaccaaatactactttggttgttgcaccattaccattactggaggtgtatcgcattatttcattaatatggcagaacaggggactgcttctccattttcagagtcatagaggccaagatttccaaattagtagctctttgctaacacttctg

SEQ ID NO: 327920 - DNA, 523 bp, Homo sapiens
ctggcaaggttaaaaatgtaagttgacatatgattaaaagaaagctatctctcatttagtcttgcaaaattgttacaggaaacacttggtatctcattccttcctattacttaaagtgaattgcattggagaattttccaggaagaggcttcactgctctctttagggttttattgtcttggtcatctactgagaaatacaccccaactaaaaaacattaaaacaaaattctcaactatatactgaagacttctgattaggtaagtaattcctastagctgattttaaaatcactatttaccaactttcttcagattggatctgatgaaagtttgcctggtatagaattcagaacttcacatcatacagtattttatttagtaattccttttctgcaaacaaactagcagaaccaaatactactttggttgttgcaccattaccattactggaggtgtatcgcattatttcattaatatggcagaacaggggactgcttctccattttcagagtcatagaggc

SEQ ID NO: 327921 - DNA, 523 bp, Homo sapiens
ctggcaaggttaaaaatgtaagttgacatatgattaaaagaaagctatctctcatttagtcttgcaaaattgttacaggaaacacttggtatctcattccttcctattacttaaagtgaattgcattggagaattttccaggaagaggcttcactgctctctttagggttttattgtcttggtcatctactgagaaatacaccccaactaaaaaacattaaaacaaaattctcaactatatactgaagacttctgattaggtaagtaattcctactagctgattttaaaatcactatttaccaactttcttcagattggatctgatgaaagtttgcctggtatagaattcagaacttcacatcatacagtattttatttagtaattccttttctgcaaacaaactagcagaaccaaatactactttggttgttgcaccattaccattactggaggtgtatcgcattrtttcattaatatggcagaacaggggactgcttctccattttcagagtcatagaggc

SEQ ID NO: 327922 - DNA, 551 bp, Homo sapiens
aaaaatgtaagttgacatatgattaaaagaaagctatctctcatttagtcttgcaaaattgttacaggaaacacttggtatctcattccttcctattacttaaagtgaattgcattggagaattttccaggaagaggcttcactgctctctttagggttttattgtcttggtcatctactgagaaatacaccccaactaaaaaacattaaaacaaaattctcaactatatactgaagacttctgattaggtaagtaattcctactagctgattttaaaatcactatttaccaactttcttcagattggatctgatgaaagtttgcctggtatagaattcagaacttcacatcatacagtattttatttagtaattccttttctgcaaacaaactagcagaaccaaatactactttggttgttgcaccattaccattactggaggtgtatcgcattatttcattaatatggcagaacaggggactgcttctccattttcagagtcatagaggccaagatttccaamttagtagctctttgctaacacttctg

SEQ ID NO: 327923 - DNA, 583 bp, Homo sapiens
taattgctgataccggttaaagaagggggctactgtcttggctgatgtcatgttagccaactggccataggatgctcatctctgtgggtattctacctatttactcttttttttttttttttttttgagacagagtcttgctctgtcacctaagctggagtgcagtggcacaatcttggctcactgcaacctctttctcctgggtttaagcgattctccctgcctcagcctcctgagtagcttcgattacaggcacctgccaccacgccttgctaatttttgtatttttagtagagacagggtttcagcatgttgaccagactggtcccaaactcctgacctcaggtgattcgctcacctcagcctccccaagtgctaggawtacaggcgtgagccaccattcccaaccctgttctgcctatttacttcttcaagctccatgacagccattctgagttgtcatgttgtatccattttttttttcactgtagaagaccagcatatgccaccccaaagtaagccattttggcataaggattattttgagctgaagatatttgcgatttaccagatggcagaaaga

SEQ ID NO: 327924 - DNA, 583 bp, Homo sapiens
taattgctgataccggttaaagaagggggctactgtcttggctgatgtcatgttagccaactggccataggatgctcatctctgtgggtattctacctatttactcttttttttttttttttttttgagacagagtcttgctctgtcacctaagctggagtgcagtggcacaatcttggctcactgcaacctctttctcctgggtttaagcgattctccctgcctcagcctcctgagtagcttcgattacaggcacctgccaccacgccttgctaatttttgtatttttagtagagacagggtttcagcatgttgaccagactggtcccaaactcctgacctcaggtgattcgctcacctcagcctccccaagtgctaggattacaggcgtgagccaccattcccaaccctgttctgcctatttacttcttcaagctccatgacagccattctgagttgtcatgttgtrtccattttttttttcactgtagaagaccagcatatgccaccccaaagtaagccattttggcataaggattattttgagctgaagatatttgcgatttaccagatggcagaaaga

SEQ ID NO: 327925 - DNA, 514 bp, Homo sapiens
ctcatctcaaagccaaagtaaaaatgcaataggaatgatatgaatccttcatttaagtataatactgtttactgactttgttgaatagtacaggtttattgttctactgaaaccccaagctattatatttgactttcattttatcaaagagcaaatgatcactgaatttactgttttgatttataaaaagtacagctatctttttcrattcttcagtattttaagagttttgtgaaagtgcaaaaaaaaaaaaaaaaagcatacaatccatggcaaagtaattagcacctcaaagaagattaataaagattgtgaataaataagtcgtcaagtaaacaccctactatttaccacattggagtaacttttttaaattgtcgttacttgctatttaaaatataatccgatgtaaaattctcaaagagcagatgcttttaaatatatatctttccctgtagttggaaatgttggcttttacctatttccttttaagagaatatgtgctaaatgtgaa

SEQ ID NO: 327926 - DNA, 589 bp, Homo sapiens
ataaattacgacatgaaaaatgcaggactcaggaagtggagttaaaaagtagagcttactctcacttaaaaaaagttgcaatcagagttgtcattcgtttgaaataaccttttataactaaactttttgcaatcctcattgtaaccacaaaaccaaaacatgaaataaatgcactgaaaataaaaagcaaggaatcaaaacatactactagagaaaatcacttaaccataatggaagacagtaaggaagaaacaaagagagaatcatatgcaagacaattagaaaaccaataacaaaattagagtagcaagtccttacctatcaataatttgaatgtaagtagattaaatttttcaactaagacatayggtggctgaatggatttaaaaaataaataagccagttatatatactgcctaaaagagagtcactttacctgtaaagaacacatgtaaactgaaagtaaagggatgtaaaaatacattattttcaaatggaaactaaatgagcacaggagtaactatagttatatcagataaaataactttgccaaaaactgtattaagacttcaaaagtcattatatgata

SEQ ID NO: 327927 - DNA, 542 bp, Homo sapiens
aatagaaataactatcctaaaatctgttcaaaattaccagaccctaaatattcaaagcaattttgaatataaagaacaaagctgaaggcatcacactgtctgactttaaagtacagtaggtccttgaataacatcatttcatttaatgttattgcattataatgttaatgaggaaaaaatctatatttccagctgatgccagaactctacackgtttatgtaaactttacatgttctctttatgtctgcatgagttttctcaaggtacactagtctcctcccatatccccaaaatgtgcatgttaggttaattggcatatctaaattgtgccattatgagtaattatgggcttgtgaatacacgctgtgatggaatggtgtccggttcagggatggtttctgccttggccctgagcttccaagacagggtttggccacctgtgaccctgaatgggaataagcaggttagaaaatgaataagtgaataaataaaaattattgtaaaataaaatccgtaaagcatacagtcatcatccaactgc

SEQ ID NO: 327928 - DNA, 578 bp, Homo sapiens
gatagaaatgtgggtacacacaaagccacaaagagtatcagaatagaaaccacattggtaaatatataatatttttacaaaaattacttgtcttcttaaaagacaactgcttaaacaaaaataatagcactgtattgtgtgaatttaaaaatgtataattacaatatgtgaggacaatatttaaaagacagcaagtggaaaaacagaagtataatatttaaagatttctatgcaatatacgaagtaatataatgtcacktaaaggtaaaaagtgatgttcaagatgtacaatatatgccttaaagcaacagctaaaataacaaaacgaatagttatgtttatttacctgtaaaataatagttatctataaaaagaggaaaattggcctataaaaaatactcagtttataaaaaggcaagaaaacaaaaaaagaacaaaaaatagaggtacaaataaaaaaacaaatagcaatattgtagattcaaggctacacagattaataatcacaacaaaataaatggccaaaccactcccaattaaaaggcagagttagggggagtggctaacatggccaacta

SEQ ID NO: 327929 - DNA, 637 bp, Homo sapiens
tttcaccttgggagtcatgcttgcctcaaattagtttgggacatgcctgaaagtattcatcacaagcagacctaaactacaagaaagttaaaggaagctcctcaggcagaaagaaaataagagcagatagaaatgtgggtacacacaaagccacaaagagtatcagaatagaaaccacattggtaaatatataatatttttacaaaaattacttgtcttcttaaaagacaactgcttaaacaaaaataatagcactgtattgtgtgaatttaaaaatgtataattacaatatgtgaggacaatatttaaaagacagcaagtggaaaaacagaagtataatatttaaagatttctatgcaatatacgaagtaatataatgtcacgtaaaggtaaaaagtgatgttcaagatgtacaatatatgccttaaagcaacagctaaaataacaaaacgaatagttatgtttatttacctgtaaaataatagttatctataaaaagaggaaaattggcctataaaaaatactcagtttayaaaaaggcaagaaaacaaaaaaagaacaaaaaatagaggtacaaataaaaaaacaaatagcaatattgtagattcaaggctacacagattaataatcacaacaa

SEQ ID NO: 327930 - DNA, 578 bp, Homo sapiens
gatagaaatgtgggtacacacaaagccacaaagagtatcagaatagaaaccacattggtaaatatataatatttttacaaaaattacttgtcttcttaaaagacaactgcttaaacaaaaataatagcactgtattgtgtgaatttaaaaatgtataattacaatatgtgaggacaatatttaaaagacagcaagtggaaaaacagaagtataatatttaaagatttctatgcaatatacgaagtaatataatgtcacgtaaaggtaaaaagtgatgttcaagatgtacaatatatgccttaaagcaacagctaaaataacaaaacgaatagttatgtttatttacctgtaaaataatagttatctataaaaagaggaaaattggcctataaaaaatactcagtttataaaaaggcaagaaaacaaaaaaagaacaaaaaatagaggtacaaataaaaaaacaaatagcaatattgtagattcaaggctacacagattaataatcacaasaaaataaatggccaaaccactcccaattaaaaggcagagttagggggagtggctaacatggccaacta

SEQ ID NO: 327931 - DNA, 635 bp, Homo sapiens
tgcccaattccgttcctcttcactggatggggctttccaacyggcacctccagccatacatgctcaagtgctctagccaacagagttctgaattctccctggaatggcactcccagggggaggggcaggacaccatctttgttgtttgggtgacttagccattctagcttttgggctttgaagtgtctgaggcagctggggggtgaagtgagtcgccagcacagcacagctgctctaccacaatgtagccagactgctttttttaagcaggtgtcaatcctattcttccttatcaggcaggacatcccaactagggtctccagccacttcctttggccagcaacaggtccataccttcccaggacaaagctcccaggaaggacaggctgcaatctgtgctgttttgcagccttcactgaagactccttcaggttctggaaaatccaaggtgcctagggactggagtgggccccaaccataccgtagcagccctatggaaaagtggccagactgttatgtgggtgcctattcccatatctgctcaccaggcatgttcttcaggcctgggtctccaaccacctcctgccagaactatcaaaccagtaccaactcagcaactccctgggcagagcctc

SEQ ID NO: 327932 - DNA, 635 bp, Homo sapiens
tgcccaattccgttcctcttcactggatggggctttccaaccggcacctccagccatacatgctcaagtgctctagccaacagagttctgaattctccctggaatggcactcccagggggaggggcaggacaccatctttgttgtttgggwgacttagccattctagcttttgggctttgaagtgtctgaggcagctggggggtgaagtgagtcgccagcacagcacagctgctctaccacaatgtagccagactgctttttttaagcaggtgtcaatcctattcttccttatcaggcaggacatcccaactagggtctccagccacttcctttggccagcaacaggtccataccttcccaggacaaagctcccaggaaggacaggctgcaatctgtgctgttttgcagccttcactgaagactccttcaggttctggaaaatccaaggtgcctagggactggagtgggccccaaccataccgtagcagccctatggaaaagtggccagactgttatgtgggtgcctattcccatatctgctcaccaggcatgttcttcaggcctgggtctccaaccacctcctgccagaactatcaaaccagtaccaactcagcaactccctgggcagagcctc

SEQ ID NO: 327933 - DNA, 633 bp, Homo sapiens
ggtctccagccacttcctttggccagcaacaggtccataccttcccaggacaaagctcccaggaaggacaggctgcaatctgtgctgttttgcagccttcactgaagactccttcaggttctggaaaatccaaggtgcctagggactggagtgggccccaaccataccgtagcagccctatggaaaagtggccagactgttatgtgggtgcctattcccatatctgctcaccaggcakgttcttcaggcctgggtctccaaccacctcctgccagaactatcaaaccagtaccaactcagcaactccctgggcagagcctccagcggcaatggaaagcctctctaccactgcctctgcagtggaactgtacttgccaccctcagactaaaaaagaagcaaagaccctaagtaccttattcacacctccatcaagctgcagttgatccaaggagaggaagcctgtccatctcccatgggtcccacacacccccaatagctcatcaccagatgaggaagctctggcttggccccacagcacaaactctccatcttgggcttgcactgacctgcatctctcagcagtagagcctcaggagtcaagaaatgagccatgaccacaaccactactgaga

SEQ ID NO: 327934 - DNA, 611 bp, Homo sapiens
atacaattacatagaaattaaacaacattctcctgaatgaattttgggtaaataatgaaattaaggcagaaatcaaggagttctttgaaaataatgagaacaaagttacaacacaccagaatctctgggacacagataaggaactgttaatagggaaattcatagcrctaaatgtccacgtcaaaaagttagaaatatctcaaattaacaacctaccttcacaactgaaacaattagagaagcaagaacaaagcaactccaaagttagcaggagacaagaaataacaaaaaccggagctgaaataaagacacaagaaaaacattccaaagatcaacaaatccaggagttggtttttgaaaaaaattataaaatagagaggccactagctagactaattaagaagaaaagagagaagatccaaataaacacaattacaattgacaaagggaatgttactactgaccccacaggaataaaaacaactatcagaaactatgattaacacctctatacacataaactagaaaacctagaagggatggataaattcatgagcatgtacaccctcccaagactgagccaggaagaaattgattctctaaacagacca

SEQ ID NO: 327935 - DNA, 545 bp, Homo sapiens
agactaattaagaagaaaagagagaagatccaaataaacacaattacaattgacaaagggaatgttactactgaccccacaggaataaaaacaactatcagaaactatgattaacacctctatacacataaactagaaaacctagaagggatggataaattcatgagcatgtacaccctcccaagactgagccaggaagaaattgattctctaaacagaccaataatgagttccaaaattgaatcagtaataagtagcctacgaacaacaacaacaaaaaagcccagaacctgatgaattcacagctgaattctaccagayggacaaagaagggctggtaccattcctacagaactatttcaaaaaattaaggggtaggaacttctccccaactcattctgtgaggccagcattatcttcataccaaaaccttgcagagacacacacaaaatagaaaacttcagatcaatatccttgatgaacattgatgcaaacatcctcaacaaaatacttgtaaacaatccagcagcacatgaaaaagctaa

SEQ ID NO: 327936 - DNA, 545 bp, Homo sapiens
agactaattaagaagaaaagagagaagatccaaataaacacaattacaattgacaaagggaatgttactactgaccccacaggaataaaaacaactatcagaaactatgattaacacctctatacacataaactagaaaacctagaagggatggataaattcatgagcatgtacaccctcccaagactgagccaggaagaaattgattctctaaacagaccaataatgagttccaaaattgaatcagtaataagtagcctacgaacaacaacaacaaaaaagcccagaacctgatgaattcacagctgaattctaccagatggacaaagaagggctggtaccattcctacagaactattkcaaaaaattaaggggtaggaacttctccccaactcattctgtgaggccagcattatcttcataccaaaaccttgcagagacacacacaaaatagaaaacttcagatcaatatccttgatgaacattgatgcaaacatcctcaacaaaatacttgtaaacaatccagcagcacatgaaaaagctaa

SEQ ID NO: 327937 - DNA, 545 bp, Homo sapiens
agactaattaagaagaaaagagagaagatccaaataaacacaattacaattgacaaagggaatgttactactgaccccacaggaataaaaacaactatcagaaactatgattaacacctctatacacataaactagaaaacctagaagggatggataaattcatgagcatgtacaccctcccaagactgagccaggaagaaattgattctctaaacagaccaataatgagttccaaaattgaatcagtaataagtagcctacgaacaacaacaacaaaaaagcccagaacctgatgaattcacagctgaattctaccagatggacaaagaagggctggtaccattcctacagaactatttcaaaaaattaaggggtaggaacttctccccaactcattctgtgaggccagcattatcttcataccaaaaccttgcagagacacacacaaaatagaaaacttcagatcaatatccttgatgaacattgatgcaaamatcctcaacaaaatacttgtaaacaatccagcagcacatgaaaaagctaa

SEQ ID NO: 327938 - DNA, 533 bp, Homo sapiens
aaattgattattgtataaacagtggttagacaagttgctatccatatgtttaaaaaatagtagaatacttcctaagaamatatataaaaactaatcacaggtggataaaatagcaaatgtaaaagcaacaataggaaaacttaaagtaactatattgataaatatctttatgattcagaaagcctcactctgtaaataatgaaacattttatatccttgtggtttgggtgtgatatcagcaatctcaacctctgaaccaaattttcggttagggttgaccctgtttctgctgtatgatcacaacaaaatagctttaaaagtttcataaagcacaaataacaaagaaaactttgcactaaaattagaactctattaattaaaagatgtagaatgggaaaagacaagttgtatcctaggaaaatatatttacagttttgacacacttgaaaaaggaaaactgtttgtaagtataaataaatttaacatacagttttttaaaagcccacgtgctgcaaataataaatgaacaatga

SEQ ID NO: 327939 - DNA, 610 bp, Homo sapiens
aatattttaacttaattttgaccaaattaaatgccagaaataacatattatatttcatatgctactaccyactaaaatcataatgctgatttattgctgtgctctcctatttaaagcatgaacaagaactattaaactctcattccagaaagcaaatttttattattaacagatgcagtctaactggggagtctcacactgccatgaaatatgagtcttacttcaagatgcatttattcattatgtgtgtgtagggaccaaaaggtggggcagctccaggcccaggctgtagtcttggctcctgttgtcatcagctccctaagtgattctacttcctttatccccagtggcctgcccattgttatatttcttcctgagtaaacattgttctacaggagcagatgagcactctctcctcctccctactttgctctaataaaatctccatttttcacaaacaggaggacattcatttttcccgcctcatttttcaaataccaaatcatggcatttcaaattttaagtaaacaaaaagtccaatttttcatagtgacagcaactgcattgatgtatgaacctgaaacactaaatgacttattcttgatgatat

SEQ ID NO: 327940 - DNA, 610 bp, Homo sapiens
acctatttaaaaaactagaggctgggcatggtggctcacgcctataatcccagaactttgggaggccgaggcaggaggatcacttgaggtcaggagttcaagatcagcctggccaacatggccaaaccctgtctttactaaaaatacaaaacatagccaggcatggtggtgcatgcctgtaatcccagctacttgggaggctaaggcaggagaatgacttgaatccaggaggcagagtttgcagtaagccgagattgcaccactgccctccagcctggcggacagagtgacactccatctcaaaagaaaaaaaaaattagatgtacaagcctaggtttagaagaaggaatgtatkaatgttcaaaattgttgatggagagagttgaagaggtggcaataggacactcaaatcaaaacacacaatctgaagtgttagaggatgtggccccgtgttccccaccctagtaatagcaagtatctcccaaaatggaaaagccgatccttcagaaatgaaaaagctggttctcacattcatatgaaactgcaaaggacaccagattgccaaaagaatgttaaaaagaaaaataaagttataggattcccacattgt

SEQ ID NO: 327941 - DNA, 628 bp, Homo sapiens
atatctgatgttacaatggaatgagacactcaaagatgttgggtggcagtgagtatagtttgcacgtggaagwtgtgtgaatcattggaagtcagagggtggagtggaatagacttattacattttggcttccaacaagatgtgcctcgcccacccttttaaaatccccttttatattgtcttaaagtttagcctgccttcttactttggccagtgggatattatcatgaggaaacttgacaaacacttgcacgttggagcttaacttcttgcagtgttctctcttgtacataagctgccatgctgtaaagaagctggatgtaaaataatgaaaatgataagagaccatgcagggagagattcgagaggacaattagccatctaggatgtcctatcaggtcaggcttccaacttaatcaacgtgcatatgagagtttagctactctacttagaacagaatttcccagttgaagccagttaacccacagaatacaaaaagtagtatatctttatttttctaaatgacagttttagaatagtttgtatgtatcagtggattattacattatcactttctttatctttacgtatctttttgcagtgtgttttgaaaacaaattatcttcat

SEQ ID NO: 327942 - DNA, 628 bp, Homo sapiens
atatctgatgttacaatggaatgagacactcaaagatgttgggtggcagtgagtatagtttgcacgtggaagatgtgtgaatcattggaagtcagagggtggagtggaatagacttattacattttggcttccaacaagatgtgcctcgcccacccttttaaaatccccttttatattgtcttaaagtttagcctgccttcttactttggccagtgggatattatcatgmggaaacttgacaaacacttgcacgttggagcttaacttcttgcagtgttctctcttgtacataagctgccatgctgtaaagaagctggatgtaaaataatgaaaatgataagagaccatgcagggagagattcgagaggacaattagccatctaggatgtcctatcaggtcaggcttccaacttaatcaacgtgcatatgagagtttagctactctacttagaacagaatttcccagttgaagccagttaacccacagaatacaaaaagtagtatatctttatttttctaaatgacagttttagaatagtttgtatgtatcagtggattattacattatcactttctttatctttacgtatctttttgcagtgtgttttgaaaacaaattatcttcat

SEQ ID NO: 327943 - DNA, 418 bp, Homo sapiens
aggaaaatacttccaatagggcagaagaaggcaagaccaatattcccctaggtgaaggggtataacccaaatccgagaggaaatgtcaacaccaaatactccagagcatctgggggactgccaaaataccaatgctgaaaattcagagtggctgagtttcatccaaagaagwtctccttgtcaatgctgaaaaccctggaggacgcagggagtggccaacagtgaaccaaagaccaagtagaggtcacagaacgacattactctggcattccagagtcaacacaatgtggtacctctcacaaccaatggtcttgcctcaaaaaattgctcacacacaacaaaacgttaaaagcaaatataagaatgcacacattttaggactgaagataatatgacatcagaaggtgaaggagtgaca

SEQ ID NO: 327944 - DNA, 418 bp, Homo sapiens
aggaaaatacttccaatagggcagaagaaggcaagaccaatattcccctaggtgaaggggtataacccaaatccgagaggaaatgtcaacaccaaatactccagagcatctgggggactgccaaaataccaatgctgaaaattcagagtggctgagtttcatccaaagaagttctcctygtcaatgctgaaaaccctggaggacgcagggagtggccaacagtgaaccaaagaccaagtagaggtcacagaacgacattactctggcattccagagtcaacacaatgtggtacctctcacaaccaatggtcttgcctcaaaaaattgctcacacacaacaaaacgttaaaagcaaatataagaatgcacacattttaggactgaagataatatgacatcagaaggtgaaggagtgaca

SEQ ID NO: 327945 - DNA, 502 bp, Homo sapiens
cagagagcaagtgaagggagaggagctacacagttcaaacaaccagatgttgtgagaactccctcactatcatgagaccagcaaggaggaaatccacccctatgatcaaatcacctcccaccaggcccttcccacaacaytggagattacaattcaacataagaattgggtggggacacagagccaaaccatatcaggtgccaagctgatgcaaggcaggggaatcccaaggtggggcttagcccctgaaagttcttggctttacccaggaaaaaatccaaggacaagctagtggtattaacagaaaaaatcaacttttttaaagccgcagtgttacagctctggtggtgttacaggtctgtgagtgctcctgcagagcagggttaccctgtaggcagatagtagcaactcagggcaattttgcagtcacacttatactcgcttttaataatacacagattaaggggtggtttatgcagaaatttccacggaaggggcagta

SEQ ID NO: 327946 - DNA, 537 bp, Homo sapiens
gactacattgtagtgtaaacataattttatatgcactgggtaaccaaaaaatttgtgagacttgctttattgagacatttgctttattgcagtggtctagaaagcaacctgccacatcttggagatatgctggtaattagcaaaactaaaraattaactttcatagattccattatctaaactaaaggccttttttgttattccaggatcatgcattccatgagctcacattatatcttttagttgcatttcttatcctcctccaatctgtgacagtttctcagtccttcctgctttttttggagacagagtcttgctccctcatccaggctggaatgcagtggtgtgatcgatcacagctcactccagcctccaccacctgggctcaagccatcctgcctcagccttccaggtgccaacacacctgtctaattttttaattttttgtagagacaggatcttaccatgtgcccaggctggtctcagactcctggcctcccaaagtgctgagattagcggcatgagctactatgccca

SEQ ID NO: 327947 - DNA, 537 bp, Homo sapiens
gactacattgtagtgtaaacataattttatatgcactgggtaaccaaaaaatttgtgagacttgctttattgagacatttgctttattgcagtggtctagaaagcaacctgccacatcttggagatatgctggtaattagcaaaactaaaaaattaactttcatagattccattatctaaactaaaggccttttttgttattccaggatcatgcattccatgagctcacattatatcttttagttgcatttcttatcctcctccaatctgtgacagtttctcagtccttcctgctttttttggagacagagtcttgctccctcatccaggctggaatgcagtggtgtgatcgatcacagctcactccagcctccaccacctgggctcaagccatcctgcctcagccttccaggtgccamcacacctgtctaattttttaattttttgtagagacaggatcttaccatgtgcccaggctggtctcagactcctggcctcccaaagtgctgagattagcggcatgagctactatgccca

SEQ ID NO: 327948 - DNA, 537 bp, Homo sapiens
gactacattgtagtgtaaacataattttatatgcactgggtaaccaaaaaatttgtgagacttgctttattgagacatttgctttattgcagtggtctagaaagcaacctgccacatcttggagatatgctggtaattagcaaaactaaaaaattaactttcatagattccattatctaaactaaaggccttttttgttattccaggatcatgcattccatgagctcacattatatcttttagttgcatttcttatcctcctccaatctgtgacagtttctcagtccttcctgctttttttggagacagagtcttgctccctcatccaggctggaatgcagtggtgtgatcgatcacagctcactccagcctccaccacctgggctcaagccatcctgcctcagccttccaggtgccaacacacctgtctaattttttaattttttgtagagacaggatctyaccatgtgcccaggctggtctcagactcctggcctcccaaagtgctgagattagcggcatgagctactatgccca

SEQ ID NO: 327949 - DNA, 620 bp, Homo sapiens
aaagaccaagaaaatactttcttcttagttcattcatttttatttgcagccaatctcatgcctaactctttgtcaatatattttactaatgatccaggcaattccatacaaagaattatgacataattttatataaaaactaactcttaaaataaaatttcttctctttgcctattgcagatgaaatattaccaacaatctttcctaccttattgattcttccttgcttaggtacagcaaagacatgggtaaaaaagaccttctaacagggctgagacatttgatccacttcagctgtgctctgcctcgcctcatgatttaaaaaatcaatggtatatcagcttagtagccactgatccgtgaggtaattgcaccttctaatgtcttcagcacaaagcttctgaaatggacaaagccaatgactagagggtaaaaaacatgttttgtttgtctttttttcaattttgtgaccaaattaagaaatartcatctctgtttgcatttctgaaggaaaaataatatttgccttggaggtgtaaagccactattaaaaatttttattatactgagattattattctttttaaaaaactggctttattgttctacatattatagtt

SEQ ID NO: 327950 - DNA, 583 bp, Homo sapiens
tttcttctgttcaattataattctttcactctcttacaggtgttctcccagatctaattcctggggaacatgatctgtgagatagattttatatttctctctctatatatatgtgtgcatgtgtgtgtatacatgatcctcagtgtatatttttgtaccgtgtggacctcaaagatgcatgctgcttatggcagaatgagcataggccaatcattctggcctcacaggcttgcttagtcaaatggaagmacacacacacacacacacacacacacacacacacacacacacttgcatttgaacattatctgctgttttttccttaagcagttcaactgtacctagaacttgatatatctgtaccttacattttatagtctaaaaagaaaataaggcacccaagatagtcagaaaccagatcgttagctccatgttcaccatttttagataaaaagccagtccttagcttctggagaaggtgttccagaaaagggcccagggcttggtgagggagtcgtgatagtcctgatcaccaggtcctgtgtgaaatgcctccatttgttatccaacctactgaaggcaa

SEQ ID NO: 327951 - DNA, 592 bp, Homo sapiens
tacaatttaaattcataatttaattgttaaaaagcatggtagatatatcatccagttgaaatgcatgaaccttgtttggatctttattcagcaaataagctgttaaaaattatgaattagaaaaacgtgggcatttgttggtatttactaataatcattgttctactcttaagtattacaatgttagtttaaagaattcttatctcttgaaacacttttggattaaatggcacagatgctagaatttattttaaattaatattataggggctatctattaggcaaaataataattccaagaagattggctatgatttgatacttgttgaaactgaaggacagatatgagaatttgttgtaattttttttccatttagaatatgcyggaggttgttcatactacaaagccttttttttttttaactttttcagattagtccttatgtttgtcattttttcatttgttcacacattggaaatttctttagtcagagtatattgacagtaaattttctgtttttgtctaaaatttttttccaccttaatctaaagatagtttagctatctttggtaatacatggaaaagaggaag

SEQ ID NO: 327952 - DNA, 576 bp, Homo sapiens
attctcaaatctgtttccctggtcattcagaggctgtggttttcatggataatttggcaggcagggtgtaagagttaaagaaagaggaaagaaacatgaaaagttgctcaacagtcaaagacaggtttattttggagaataaacctgagaggggcttctggccaatttcagtcaggagcactctctcttacagactaagggcatttactggttttaggatgagagagcttatcacaagcttggaatgtttctgtgtgggggagaagtttacggtggggttggaatgcctctggtcctggggaggttatgttggggttgacatatttctggctggaagggaggttatcccaggtctagcatgtctctggttggggaaggrtttatcttatggttggaatgtttctggtcagaggtgtcatttgtggtttatggtcatgttgaccttagccattaggctgataccctttgactttaggcagtttttgatcaaggtgaactttgaaatggtggtacttgtccaagatggtgatgttcctgctctgtgatgggacacctgggaatgggtgctgctgattg

SEQ ID NO: 327953 - DNA, 465 bp, Homo sapiens
aaaagatagatcagaagtgtactgtgtagctgaggcatatcatctgggaacttcaaattaattatgggtaataacagtaaaaaaaaaatcagtcattgactggagatcatttatttctccytttcctttcttgtaaccacagagaaatacatattgaaaattacattttctattcaattatacctaaaagtgttatgcctagttgagtgcttagtctatactcagagagaacaattagaaacttgtgtctacaattacttaatttaatatttcattgcatgccagtgctttaaaaagggagttccatctcaggcattgttaaaatgaagcttagcataattaaaagacaggatgcccctgaaaagttacactgatgtttaaaaaaattgttaatatcaactaatgatgacattaatttagtaaaaatatgcacaagaaaaatcttttactacaaactaacaatta

SEQ ID NO: 327954 - DNA, 498 bp, Homo sapiens
tattgaccctattttaactgataaaagagctaatttttcagattttaagtaayttgacctagattacaaatccgtgaaatgtccaagatgtcatgctcctcttctgttgtgatatagatcacttttctatatttctcctgaaaataaaagccatatgttcatagtgatgacactgtgcttcattatataaattaacgaagaaaagacatcctctctagaacatgaaagtcaccaacactttccctctattatccaaaaagacagaacttttgcctggggagccattcattgtcatacaagtgcttcttccctttcattcaaggtgcaggaagaaaatggttggaattagtaagtactgaaaagtaggatgttggtaaaaccaaaaaaaaaaaaagactgataaaagcgcatttcattattctctagagagagttgacgcatctttggaagggacgaatggcagagattgtcagaaatgaggagaggagagttgctcaa

SEQ ID NO: 327955 - DNA, 619 bp, Homo sapiens
gaatggagtgtaatagaaagctatcaaatagaatggaatggaagggaatggactcgaatggaatggactggagtggaatgaactcgaatggaatggtgtcaaatggaatttaattgactgcagttgaattgaatggaatggaactgaatggaatctaaagatagagaatggaaaggagtgtaatggaaaaacatcgaatggaattgcttggaatggactcgaaaggaatggactggaatggaatggacttgaagggaatggactggagtggattggaatcgaatgcaatggaagcaattggaatggaatggaatggaatggaatggaatggaatggaatggaaaggaatagaatgaaatggaatcggttggaacggaatggaatggaatggagcagaatggaatagaatcgattgcaaggtcatcgaatggactggaatggaatgaactcgaattgaatggactggaaaaaaatggaatcaaatggattggaatcaaagagaaaggaatrgaatggaatggacacaaatgtaatggactcgaatggaatggacccaaatagaatggacacgaaaggaatggtctcgaatggaatttatttgaacagaatggaatcgaat

SEQ ID NO: 327956 - DNA, 619 bp, Homo sapiens
gaatggagtgtaatagaaagctatcaaatagaatggaatggaagggaatggactcgaatggaatggactggagtggaatgaactcgaatggaatggtgtcaaatggaatttaattgactgcagttgaattgaatggaatggaactgaatggaatctaaagatagagaatggaaaggagtgtaatggaaaaacatcgaatggaattgcttggaatggactcgaaaggaatggactggaatggaatggacttgaagggaatggactggagtggattggaatcgaatgcaatggaagcaattggaatggaatggaatggaatggaatggaatggaatggaatggaaaggaatagaatgaaatggaatcggttggaacggaatggaatggaatggagcagaatggaatagaatcgattgcaaggtcatcgaatggactggaatggaatgaactcgaattgaatggactggaaaaaaatggaatcaaatggattggaatcaaagagaaaggaatagaatggaatggacacaaatgtaatggactcgaatggaatggacccaaatagaatggacaygaaaggaatggtctcgaatggaatttatttgaacagaatggaatcgaat

SEQ ID NO: 327957 - DNA, 619 bp, Homo sapiens
gaatggagtgtaatagaaagctatcaaatagaatggaatggaagggaatggactcgaatggaatggactggagtggaatgaactcgaatggaatggtgtcaaatggaatttaattgactgcagttgaattgaatggaatggaactgaatggaatctaaagatagagaatggaaaggagtgtaatggaaaaacatcgaatggaattgcttggaatggactcgaaaggaatggactggaatggaatggacttgaagggaatggactggagtggattggaatcgaatgcaatggaagcaattggaatggaatggaatggaatggaatggaatggaatggaatggaaaggaatagaatgaaatggaatcggttggaacggaatggaatggaatggagcagaatggaatagaatcgattgcaaggtcatcgaatggactggaatggaatgaactcgaattgaatggactggaaaaaaatggaatcaaatggattggaatcaaagagaaaggaatagaatggaatggacacaaatgtaatggactcgaatggaatggacccaaatagaatggacacgaaaggaatggtytcgaatggaatttatttgaacagaatggaatcgaat

SEQ ID NO: 327958 - DNA, 581 bp, Homo sapiens
agttttctccctggataatctcttgacattgtgaaaagtgaagtattgaagatccctattattactctattgcagtctatctcttccttcagatcctttaatatttgttctatatatttagatgatccaatgtttggtacatatataattgttatatccttttgataaattgacccttttatcattatatgatgtccttctttgtctctttgtacagtttttgacttaaaatctattttttctgacataaatatagctaatgctgctgtcttttggtttctatttggatgaaatctcattctccatcccttcactttctatataaatgcatcaccaaaagcgaggtaagcctctctctctctctctctccctctctttggtagagacagggtcttgctttgttgcctaggctaggctggtctcaaactcctgactttgagggatcctttcacctcagcccaccaaagtgctaggattayaggcatgagccaccatgcctggccaaaaatgaggtgagcatcttacagacaaaatattgttgggtcttttaaaacaacccattcaatcattctgtgtctttt

SEQ ID NO: 327959 - DNA, 553 bp, Homo sapiens
gcttcctggaactgtctcagaatgctagggaagctggatgactgcctctcattctcttccccccatgtagaaacttggccccaggggaatcatctccatttgacatccatctcctctctgtgctgatttcaggtggagggtggcacgatcagagtaagacsgttctttctacccttttaattcagatttcattcagttctgtggaccattaagtgtctcaggcttgtctctaagttctgaggtttgtaaaaggatgttcccatttgtaggtagtagctggttgacctttctgtgggagacagtggagcatgagactttctattctatagaaagtatctgtcgagcttgctctagctcgacacacacctgctaaagagctgtttctgaggcacccgttcttgcatgcttttggtcctttacctgccatagatggaaatgtcctctctctccccagggtcatctttatggcctcagggcctggtggtgatgccaggcaggcatgtaggtcccctgtgaacgtcaggaaatgaagccattacagagcaggccaccc

SEQ ID NO: 327960 - DNA, 553 bp, Homo sapiens
gcttcctggaactgtctcagaatgctagggaagctggatgactgcctctcattctcttccccccatgtagaaacttggccccaggggaatcatctccatttgacatccatctcctctctgtgctgatttcaggtggagggtggcacgatcagagtaagacggttctttctacccttttaattcagatttcattcagttctgtggaccattaagtgtctcaggcttgtctctaagttctgaggtttgtaaaargatgttcccatttgtaggtagtagctggttgacctttctgtgggagacagtggagcatgagactttctattctatagaaagtatctgtcgagcttgctctagctcgacacacacctgctaaagagctgtttctgaggcacccgttcttgcatgcttttggtcctttacctgccatagatggaaatgtcctctctctccccagggtcatctttatggcctcagggcctggtggtgatgccaggcaggcatgtaggtcccctgtgaacgtcaggaaatgaagccattacagagcaggccaccc

SEQ ID NO: 327961 - DNA, 553 bp, Homo sapiens
gcttcctggaactgtctcagaatgctagggaagctggatgactgcctctcattctcttccccccatgtagaaacttggccccaggggaatcatctccatttgacatccatctcctctctgtgctgatttcaggtggagggtggcacgatcagagtaagacggttctttctacccttttaattcagatttcattcagttctgtggaccattaagtgtctcaggcttgtctctaagttctgaggtttgtaaaaggatgttcccatttgtaggtagtagctggttgacctttctgtgggagacagtggagcatgagactttctattctatagaaagtatctgtcgagcttgctctagctcgacacacacctgstaaagagctgtttctgaggcacccgttcttgcatgcttttggtcctttacctgccatagatggaaatgtcctctctctccccagggtcatctttatggcctcagggcctggtggtgatgccaggcaggcatgtaggtcccctgtgaacgtcaggaaatgaagccattacagagcaggccaccc

SEQ ID NO: 327962 - DNA, 553 bp, Homo sapiens
gcttcctggaactgtctcagaatgctagggaagctggatgactgcctctcattctcttccccccatgtagaaacttggccccaggggaatcatctccatttgacatccatctcctctctgtgctgatttcaggtggagggtggcacgatcagagtaagacggttctttctacccttttaattcagatttcattcagttctgtggaccattaagtgtctcaggcttgtctctaagttctgaggtttgtaaaaggatgttcccatttgtaggtagtagctggttgacctttctgtgggagacagtggagcatgagactttctattctatagaaagtatctgtcgagcttgctctagctcgacacacacctgctaaagagctgtttctgaggcacccgttcttgcatgcttttggtcctttacctgccatagatggaaatgtcctstctctccccagggtcatctttatggcctcagggcctggtggtgatgccaggcaggcatgtaggtcccctgtgaacgtcaggaaatgaagccattacagagcaggccaccc

SEQ ID NO: 327963 - DNA, 620 bp, Homo sapiens
ttaacaactccataaaataggtaaatgatccaacttaataatacaattttgctaaaaatattaagaaaatgatagatgatataaaataatagtataagtcaagattaaggaaaacttagatattagatawttcaaaaaaagattttaaaagacagctaccagaagtcaggaaataattagaaataaaacaaatgttttgtttcagaattaaatactaattttatttcagaaacaaatacaaaactagaagaaacacaaggataaggaactatcataggttatgccttaggagaagaagatgggaagaaatgaatgtataaaaattatgtgagagaaagtgacagatacagaagataagcaacaaaaatgtgatctatgctgataggagtctccaaagaagaaaaccaaagcagtaaaattaaaaaatggaaaaatacccctgagtatcagtattgtattagtcaaggagaaaaggggtaagaaactggccagataataaaagtcataaacacatatacaatcaacagtatgggacatgaaataaataatatgacatatatcttacacaaatgtagaatgacataagttacagatttttaggttggctaacaaaactaaat

SEQ ID NO: 327964 - DNA, 620 bp, Homo sapiens
ttaacaactccataaaataggtaaatgatccaacttaataatacaattttgctaaaaatattaagaaaatgatagatgatataaaataatagtataagtcaagattaaggaaaacttagatattagataattcaaaaaaagattttaaaagacagctaccagaagtcaggaaataattagaaataaaacaaatgttttgtttcagaattaaatactaattttatttcagaaacaaatacaaaactagaagaaacacaaggataaggaactatcataggttatgccttaggagaagaagatgggaagaaatgaatgtataaaaattatgtgagagaaagtgacwgatacagaagataagcaacaaaaatgtgatctatgctgataggagtctccaaagaagaaaaccaaagcagtaaaattaaaaaatggaaaaatacccctgagtatcagtattgtattagtcaaggagaaaaggggtaagaaactggccagataataaaagtcataaacacatatacaatcaacagtatgggacatgaaataaataatatgacatatatcttacacaaatgtagaatgacataagttacagatttttaggttggctaacaaaactaaat

SEQ ID NO: 327965 - DNA, 494 bp, Homo sapiens
tgctcccactgtcttctttgggctgttaccatcaatatattataggaagaactatataaatttatacatattatttgatgcaattacttttaaaatcagtttttaaaaaggaaatatatccttatattgtctttatatttacctttatcagcattcattttttaaamtgtgaaatttatttactgtctggtgtcacttatattcagtctgaagaattacgcttaagaaaagcctgctagcaatgaattatctcacttttggtttattgtagaatgtctatttggacatcatttttgaaagatagcttttggttttgctgggtataagacagagggaatttttgttgtttatgttgtttttcctttagacactttgaatatatcaccccactgttttctgctctttgttatttctgataagaagtcagctgttaatcttactggggtacctttgtgcatgatgagtcatttttctcttgatgcctttgaggtttt

SEQ ID NO: 327966 - DNA, 494 bp, Homo sapiens
tgctcccactgtcttctttgggctgttaccatcaatatattataggaagaactatataaatttatacatattatttgatgcaattacttttaaaatcagtttttaaaaaggaaatatatccttatattgtctttatatttacctttatcagcattcattttttaaaatgtgaaatttatttactgtctggtgtcacttatattcagtctgaagaattmcgcttaagaaaagcctgctagcaatgaattatctcacttttggtttattgtagaatgtctatttggacatcatttttgaaagatagcttttggttttgctgggtataagacagagggaatttttgttgtttatgttgtttttcctttagacactttgaatatatcaccccactgttttctgctctttgttatttctgataagaagtcagctgttaatcttactggggtacctttgtgcatgatgagtcatttttctcttgatgcctttgaggtttt

SEQ ID NO: 327967 - DNA, 494 bp, Homo sapiens
tgctcccactgtcttctttgggctgttaccatcaatatattataggaagaactatataaatttatacatattatttgatgcaattacttttaaaatcagtttttaaaaaggaaatatatccttatattgtctttatatttacctttatcagcattcattttttaaaatgtgaaatttatttactgtctggtgtcacttatattcagtctgaagaattacgcttaagaaaagcctgctagcaatgaattatctcacttttggtttattgtagaatgtctatttkgacatcatttttgaaagatagcttttggttttgctgggtataagacagagggaatttttgttgtttatgttgtttttcctttagacactttgaatatatcaccccactgttttctgctctttgttatttctgataagaagtcagctgttaatcttactggggtacctttgtgcatgatgagtcatttttctcttgatgcctttgaggtttt

SEQ ID NO: 327968 - DNA, 549 bp, Homo sapiens
tcccccaccaatttccctgagctcagttctgagttaaaccatttaacgccccgttctgaaaatgcagacttcccaggaaactgcaactttagacaaaatcttgactgttttctgtggataatacatttagtaatcctccagatgctgtcaaatattttttgttgtcagcaaagctgccagattttggttcctgtgcctctgagaagagtagcgagtccagatgagaataacccaagttaactgtcacaggcttcactgtctacctaggttcagctgtgacttcactgtcttaccaagacatagtagtctctattggaaatacaactttgagcctcatcaatgattttggttaactccctgagtctgaaatggttgattttagttgtgttgacttaattcttattattttagagggaagatgagttcacctagattctcactccactgttcgggaagtcaagacctcaacctacttttttaaagagagatayttttgatctacaatatgaatttgatttttaatcacatagatcgcatagttttccgaaa

SEQ ID NO: 327969 - DNA, 569 bp, Homo sapiens
catcacattaacagaatgaaagaaaaaaagaatatgatcacctcattagggatataaaatacatttcacaaattcaacattctttcatgataaaagctcttcacagattaagaatagaagggatgtacttcaacataaaaaaaggcaatatatgagaagctcacagctaacatctacttaatggtgaaaaatgaatgaaattagattcttatctcataccatatataaaaatcaattcaaattgattaaggacttaaacgtaagaccagaaacagtaaaaatactaaaggaaagcataggaaaaaacctacatgacaattggtgtgagcamtgagtttttggttttgactccaaaagcacaggcaacaaaatcaaaaatagaaaatgggaatatgtcaaactaaacagctttgcatagcaaaaaaaaaaaattaacaacatacaaagacaatctatggattggaagaaaatatttgcaagccatacatctgataaggggttaatatccaaaatatgtaagaaattcaaacaactcaatagtaagaaaacaaagagggtacccaatttaa

SEQ ID NO: 327970 - DNA, 591 bp, Homo sapiens
agactgacaacaaaaaatagagaggaggcacaaataasagtgctgaacttacataaattaaaaggaatatataagaatactatgaatatttgtacacaaaaattaggtaatctaaataaattctcagaagcataaaattaattgaactccagaaaaaaagaggcatctgaagacatatataacacaattagatacattgaattagttaccaaaaaccttcaaaaaggtcaggcgcggtggctcacgcctgtaatcccagcactttgggaggctgaggtgggcagatcacttgaggttaggagtttgagaccagcctagccaacatggcggaactccatctctactaaaaatacaaaaattagccagtgtggtggcgaatgcctgtaatcccagctactcaggaggctgaggcataagaatcacttgaacctgggaggcagaggctgcagtgagccgagactgtgccactgcactccagcctggacgacagtgcaagactgggtctcaaaaaaaaaatttttttttcaaaaaaagaagtccaagaccagatggctcaattagtgaattctacaactatttaaaaaagaatta

SEQ ID NO: 327971 - DNA, 591 bp, Homo sapiens
agactgacaacaaaaaatagagaggaggcacaaataacagtgctgaacttacataaattaaaaggaatatataagaatactatgaatatttgtacacaaaaattaggtaayctaaataaattctcagaagcataaaattaattgaactccagaaaaaaagaggcatctgaagacatatataacacaattagatacattgaattagttaccaaaaaccttcaaaaaggtcaggcgcggtggctcacgcctgtaatcccagcactttgggaggctgaggtgggcagatcacttgaggttaggagtttgagaccagcctagccaacatggcggaactccatctctactaaaaatacaaaaattagccagtgtggtggcgaatgcctgtaatcccagctactcaggaggctgaggcataagaatcacttgaacctgggaggcagaggctgcagtgagccgagactgtgccactgcactccagcctggacgacagtgcaagactgggtctcaaaaaaaaaatttttttttcaaaaaaagaagtccaagaccagatggctcaattagtgaattctacaactatttaaaaaagaatta

SEQ ID NO: 327972 - DNA, 591 bp, Homo sapiens
agactgacaacaaaaaatagagaggaggcacaaataacagtgctgaacttacataaattaaaaggaatatataagaatactatgaatatttgtacacaaaaattaggtaatctaaataaattctcagaagcataaaattaattgaactccagaaaaaaagaggcatctgaagacatatataacacaattagatacattgaattagttaccaaaaaccttcaaaaaggtcaggcgcggtggctcacgcctgtaatcccagcactttgggaggctgaggtgggcagatcacttgaggttaggagtttragaccagcctagccaacatggcggaactccatctctactaaaaatacaaaaattagccagtgtggtggcgaatgcctgtaatcccagctactcaggaggctgaggcataagaatcacttgaacctgggaggcagaggctgcagtgagccgagactgtgccactgcactccagcctggacgacagtgcaagactgggtctcaaaaaaaaaatttttttttcaaaaaaagaagtccaagaccagatggctcaattagtgaattctacaactatttaaaaaagaatta

SEQ ID NO: 327973 - DNA, 591 bp, Homo sapiens
agactgacaacaaaaaatagagaggaggcacaaataacagtgctgaacttacataaattaaaaggaatatataagaatactatgaatatttgtacacaaaaattaggtaatctaaataaattctcagaagcataaaattaattgaactccagaaaaaaagaggcatctgaagacatatataacacaattagatacattgaattagttaccaaaaaccttcaaaaaggtcaggcgcggtggctcacgcctgtaatcccagcactttgggaggctgaggtgggcagatcacttgaggttaggagtttgagascagcctagccaacatggcggaactccatctctactaaaaatacaaaaattagccagtgtggtggcgaatgcctgtaatcccagctactcaggaggctgaggcataagaatcacttgaacctgggaggcagaggctgcagtgagccgagactgtgccactgcactccagcctggacgacagtgcaagactgggtctcaaaaaaaaaatttttttttcaaaaaaagaagtccaagaccagatggctcaattagtgaattctacaactatttaaaaaagaatta

SEQ ID NO: 327974 - DNA, 560 bp, Homo sapiens
acacagtcaacatcatactaaattgtgaaagactgaaagcttttcctctagaacacgacaaggatgctcactttcaccatagttctgaaagtcttagccagagcaattagtcatgaaaaagatataaaaggcataatgcccaggtgcggtggctcacacctataatcccagcattttgggatgccaaggcaggtggattgcttgaggtcaggagtttgagatcagcctggccaacatggtgaaaccccatctctactaaatatacaaaaattagctrggcatggtggtgcatgcctgtaattccagctactcaggaggctgaggcaggagaatctcttgaacctgggagacggaggttgcagtgagccgagatcgcaccactgcactccagcctgggtgacagagtgagataaattaaataaataaataaataaaaatgttttaaaagatataaaaggcatacaaattggacagaaataagtaaaattatctctgttgcagttgacattatcttatatgtagaagactacattttttctcaaaatagaattaattgaatt

SEQ ID NO: 327975 - DNA, 560 bp, Homo sapiens
acacagtcaacatcatactaaattgtgaaagactgaaagcttttcctctagaacacgacaaggatgctcactttcaccatagttctgaaagtcttagccagagcaattagtcatgaaaaagatataaaaggcataatgcccaggtgcggtggctcacacctataatcccagcattttgggatgccaaggcaggtggattgcttgaggtcaggagtttgagatcagcctggccaacatggtgaaaccccatctctactaaatatacaaaaattagctgggcatggtggtgcatgcctgtaattccagctactcaggaggctgaggcaggagaatctcttgaacctgggagacggaggttgcagtgagccgagatcgcaccactgcactccagcctgggtgacagagtgagataaattaaayaaataaataaataaaaatgttttaaaagatataaaaggcatacaaattggacagaaataagtaaaattatctctgttgcagttgacattatcttatatgtagaagactacattttttctcaaaatagaattaattgaatt

SEQ ID NO: 327976 - DNA, 562 bp, Homo sapiens
tggaagaaattacgccacaaggaacattgggttttgcttccagacccttcagcctactaaccacgtgaacctggtcatatcacttacattttctgagtcttagctttattagacacaaattgtgtttcatgatgatttgtagagaactaaatgttcaagtgttcactgggttctttttaatataagatacactatttgccatgcttactgtcgcaaatacagggagaaaggatggagtatgatgataaccaccctcccattcttgtttcctgttttagactaagtacttcttaatccagcctttttttgtccaaacctatatgtaacccagcttacaatggagcagccttattgccaagatcatttttttctcactgatatcattaaatgcagtatttttcattgcctctctgagggccttttcatttcctctatgtctccaaaatggtcccagaacattagctggtcctracttctactagggacactgaaggaattccttcttgtaatgttgctagtgaagatttatttctagtttctgaacggaggttaggtaaatcga

SEQ ID NO: 327977 - DNA, 376 bp, Homo sapiens
acactttaaatataaagatacatatatagattaaaagcaaatggatggaaagagattactgtagtaacactaatcaagctggagttgctgtaattattttaaatagagcatacttcacagcaaggaaagtgtcagaaataaagaggggtattagataataagaaagaggtcaaatcttcaggaagacataacaatccttaaaatgtatgtgcctaacaacagacaatcaaaatatgtgaggcaaaaaactgatagaactgcaaggagaaacarattaatctactattacagttggagagttcaacacccctgtattggaaatggacagatcgagcaggcaaattgtcagtgaagacagagttgaactcaacaacac

SEQ ID NO: 327978 - DNA, 529 bp, Homo sapiens
ctaaaacctaaaactgcaaaattctggaataaaatttaggagaaaaatctttgtgatcttggtttaggcaaaaatgtcttagaacacaaaagcacaacacaagaaaaatctaataaattaggtttcattaaaataaaaaatttcctaatgacttttaaccttcaaaacatcatatttcacagatgaaattctaacatgaagacatttagatcacaaagctgggaagtagtaaagcaagtgaaccaatataggtgttggcattcaaatgcaggcttttccttctccacgaatgcagaagttaatctaatatgaactatgtgcaaagataaataacttgtattagctatgccacaactctgtcaaagataattgaaaactggatttgtgtttatacatataggatccttatctcttgtttatacayacaggatccatatatctatatagccagatatatgtgcaactgtttaatcccatgggcatttggcatgaccagtacaaaggcacttcgtaaaggacttttcccaac

SEQ ID NO: 327979 - DNA, 551 bp, Homo sapiens
taacagagtataatggaaacatctcttgttgtagttcataaagtgtggcaatggctctgttcattagccatgagtgcctgagattagtaacatccatcaatgagatccaagaaatgccatgtggacaggatggtgcagaccccacagacaaatccaaacccactgtgttggtgactcttccctcttgaggaaatcctatatattttttggatcaagggttttttattactgactgtgaaatagagtcatgcagctcataatgacgtttagctcgatgatagactgcatataggacagtagtcctataagattataatggaactgaaaaattcctgttctatctattcctgtatctctcctctgtctgggtatgtttagatacacaaatacttaccacgtgttacaactgcctgcagtattccgtacagtcacaggctgtacaagttgtagcctaggagcaataggctatgccctacagctgacatgtgtagtagcttctatcctctaggaytgtgtaagtgcactctgtgatgtgcacacaacaaagaaat

SEQ ID NO: 327980 - DNA, 525 bp, Homo sapiens
agtttattatttaaaccataagtttttagttttttaaaatttcaaaatatgcagggtttctaagtttagatattttattttagcttcaatttagttatgtcgaacaaacatgaagtctgtaatgcatatgctgtggattttattgctgtttgctttatcagatagtgcctgatcaaatttctaatattccttgtgtgcttgaaaataatgtacattctctaaatattgaatgtaagctcaattragttgtttttattttcaatattcttgcttattttttgtctgctttacatatttataattaagagaagcattttgaagttaataatatatggatgatttttcaaatctccctagaattctatcaatatttgccttccacgtttcgagaccattacactaggtgtagacatatttaaaattcttatgtcatcttgacacgaacacttcatcactgcatagtgactctcttgatgcctaataatttttattactttaagtccatttttcagcataagctttctt

SEQ ID NO: 327981 - DNA, 566 bp, Homo sapiens
tcaaatctccctagaattctatcaatatttgccttccacgtttcgagaccattacactaggtgtagacatatttaaaattcttatgtcatcttgacacgaacacttcatcactgcatagtgactctcttgatgcctaataatttttattactttaagtccatttttcagcataagctttctttcagttagaattttcctgaaatatctttttacattctttgtgtagaaaatgtctaatccagaaagcaaaaactttcctaggcacttctgaggaaggaattttaatacagagaactggctacaaatatgatagaggacatagagtagcaaaaggagaaaagcacgttaatcccgatgttaaaactgcatgagattatttcagtcatgaagctggagaagcaaatgcacatggagcttcccgagcccacagtggctgtgcactggtaccactgctgtgggaaccacgtgagcaggaagcaggtgcctgaactccctggctgccccctgcacccactgccgagggacrttgcttgtgtgatttcctttttgtatggttttattgcat

SEQ ID NO: 327982 - DNA, 546 bp, Homo sapiens
atgatatatttgaggataaagaaaataactgtctgcctagaatttttaaatcatcagccataacctttaaaaatgaagataaaattaagacattttcagaaaacaaaactaaagagaagtagtcaccagcagatttgcacttaaaaatatggactaaagggagttactcagaaagaagtgaaatgatcctagataaggatatagcaatgcaggagaaaaagaagaataaaggaattataatatttataaattaatgttgaatatataaattsatgtcatatagaaattaaactatatttaaagaatacaatacacaacagtaatactggagaccaggaaagtaaacgcagttaaaggggttaaagggctttaagattcctcctctgcaattttctggtaaatagtataaaagtactaagttattttagactctagaaatttatattttaatctctagaaaaaatacattaaagccattagaaaaatacagaactgacaagctaatgtagggggaaaatgaaataataaaagaatgcttgcttaatc

SEQ ID NO: 327983 - DNA, 589 bp, Homo sapiens
ctatgaaatcctataaaaactctttccaaacctasttttttataggatagcagtgagaggtaccaaattcataggcttactaggtgggtacttggcacataggtcagcagtaaatacttgctgaatgaatcaggataacatatgctcttagggttcatgcatatttaaaaatttctgcaaataattttgatgctcagcttcttttcaagcccagtatactacttgaaaataacctgtgaaatgcgactacttcttcaaccctaaattacaattagacatcattagagggtgacaccaactcaaattaaaacaaacaaacaaacaaaaactgtactttagatttgatggagcaaggctctataagcattccctgagggctataatgatgtctcattcattattatgtccacggagcctgacatagatgattgaatgcttggtgactcaaccaaactggaataatattataattctttctgtggcctttcacattttttattttctttctttaaagtttgcccttcttttattattattattattttgcgacagtatctcactctgtcatccaggctggagtgttatgggg

SEQ ID NO: 327984 - DNA, 589 bp, Homo sapiens
ctatgaaatcctataaaaactctttccaaacctagttttttataggatagcagtgagaggtaccaaattcataggcttactaggtgggtacttggcacataggtcagcagtaaatacttgctgaatgaatcaggataacatatgctcttagggttcatgcatatttaaaaatttctgcaaataattytgatgctcagcttcttttcaagcccagtatactacttgaaaataacctgtgaaatgcgactacttcttcaaccctaaattacaattagacatcattagagggtgacaccaactcaaattaaaacaaacaaacaaacaaaaactgtactttagatttgatggagcaaggctctataagcattccctgagggctataatgatgtctcattcattattatgtccacggagcctgacatagatgattgaatgcttggtgactcaaccaaactggaataatattataattctttctgtggcctttcacattttttattttctttctttaaagtttgcccttcttttattattattattattttgcgacagtatctcactctgtcatccaggctggagtgttatgggg

SEQ ID NO: 327985 - DNA, 589 bp, Homo sapiens
ctatgaaatcctataaaaactctttccaaacctagttttttataggatagcagtgagaggtaccaaattcataggcttactaggtgggtacttggcacataggtcagcagtaaatacttgctgaatgaatcaggataacatatgctcttagggttcatgcatatttaaaaatttctgcaaataattttgatgctcagcttcttttcaagcccagtatactacttgaaaataacctgtgaaatgcgactacttcttcaaccctaaattacaattagacrtcattagagggtgacaccaactcaaattaaaacaaacaaacaaacaaaaactgtactttagatttgatggagcaaggctctataagcattccctgagggctataatgatgtctcattcattattatgtccacggagcctgacatagatgattgaatgcttggtgactcaaccaaactggaataatattataattctttctgtggcctttcacattttttattttctttctttaaagtttgcccttcttttattattattattattttgcgacagtatctcactctgtcatccaggctggagtgttatgggg

SEQ ID NO: 327986 - DNA, 607 bp, Homo sapiens
ttgagttgagggggtgtggctagaaggatatcaatgtgctgggggaatgagatgagaacttatgaaggaactttggaaggatatttaatcacttaaaaactaagctgaggttacaaaatccatagccaaaaactccaaaaaatggaggaagtttaaataaaygaaactgtattttctttaatattttaattctctaacaccttttattatcctgtaaaggtcactgaaatttttttcattatctctggaaaaataattatttggacatattattaaagcaaagtagcctaccatttcattccattaattcacttcagtgtcagcattgatcttgggaaaatttgggttggattgtcaatttggtacattttattttttagccaaatgattccaaattcttattcatattttcgttaccacatacagtttaagcatgatcaataaggcaagatggccagatttaattcacacagtatagtgcattagaggactccttctagatcacttttgttcaaattttaatgtacataaggattaaatagggtctttggtaaaaatgcaagtctctgtgttcacaaattcttatttgttatgtatctcatgggtg

SEQ ID NO: 327987 - DNA, 583 bp, Homo sapiens
cttatccacagtctattcaatctgtctctagcaggagggagctgggaagctgtatgtttaacaagtgctcctagagagtcttattatcagaaaaaaaggaaaatagccacaagtttgacattattttacagattaacacaataaagaaataaaataaaattattaattttatggtaccttgagwgattcaggaaagcaactcttcaacattttctccagtatcagtaatttggtagaacagtttagcaccaacatcttttccagagctcttgcaactccacacctaattagaaacttgaaggtaggcatttaatttttgcctgttaatatttggatctatttaggagttttcttgtaattctattttcattgggtataattctgactgccattgctccccctgaagagggaaaagggaagatggggaggcactgggatgggtaaaccggagaatacatgggaagtgttaatgacctaatcccaaacagatgtgagtatctatccttggttaagtctattatatacattgattgtactctaaactctgtcttcagagcatgtataacagttgtaattttgtatt

SEQ ID NO: 327988 - DNA, 628 bp, Homo sapiens
atcatgaggtttatgtgagcctgaacctctggaaagcatatgatcaagccctgtgggctctagttcactgagtggtacacttgaggtgtctgtgctctctgcaggagtcagaagagattgcaggggccagggcagcacccgaacattaagaggcttttgaatcccagtctggaccaatattagaaactttgaaaagatctagtttccagacttcaggatggcaaagaaagaagtacagccatcatctcttcactttttcatctgcttaacttttcactcatttgtgtcatctctaaatacaattttaactttgtaatagatacttatttgaaatacatttatttattcgaattcaatatatcctgatagaaaacgaaacaaaattatttcaaagggcagtggaatgtgaacctcttaattaggtttgatgtctagagatctttttatgcctgaatactgaagtagcaaatgaaaagagtacgaattagaayatttgttgataatttgctcctttattacctggtttgttccctgaaggatctaaagccatttatgaaaatacttaggctgggcgtggtgtctcatgcctgtaatcccagcactttggaaggccgaggcgggtggatca

SEQ ID NO: 327989 - DNA, 562 bp, Homo sapiens
atagactacaaaacacacggtggccatagtcatcttttggttcatgataaccacaaatgtgttccgaaaactgcataaatagaaaaaacattgcgagaayatttgctctaaacactcctaccctcccactacaacatcttttgattttctcaaatgtcttccaccactggccttaaagagttaagctgattactcattcactaccaagggaccggcaagaaagataccaaatgtcaacttcttgaaagaaaggccttctataaatccaaacaaacctctttttaaaaaagaaccaatagccctttcaactgaagaatgtgatgtgggtctcttgaactctagaatcctctgatccttctgaattctccatcatccagctcacctcatttatgtttctgccgctcacacaggttcacattcagaatgccacccttgctggaggagttgctgtgggcacttgtgcggatatggcaattcacccatttggttctatgattattgggagcattgcaggaatggtctctgtgcttggatacaagttcctgactgtaagtacagcaga

SEQ ID NO: 327990 - DNA, 618 bp, Homo sapiens
gcattttaactgaaattgttaatttaaaaaaattaacagtgttattttaaatgtctttaccagaaacaactgtctcctagcagacagggaaatttgataatcacagtcagattatagaaggattagtctttttcttgatctctccaaaatggaggaggaggcacatatgatgagctgaacagtcagttccatccaatccacacaaagaaggatgagttggaataatacagaaagcagttggttctgcagaatcaacaacactggtatatggccccaactctgctactaactagttatgtgacctctgaggtatcactcagcatttctggttttcagtcttctcctctgtaaaataagaagattggagtatttattctccaaaatcccttctagctctatcagatgtagattcttccctaagttgggtataaatgtttacttaaatgaccagaggaaaaacaactatcaagcaaaccccagagaatggaagggatgccacaatattggaacaatttggtatgaatgtcatccatgtgaaaaagctgagaagatcatagagtccagatcacacagagtaaattaagaaaaatcagaatgytcaatttttttaaattgtgt

SEQ ID NO: 327991 - DNA, 616 bp, Homo sapiens
tttttatatattaaaatatgtaaacccttcagataaggagaaaaaaaaaggaatctgagtttagtgcatcctttcccttggatgatgagactggaagaccaaaaaaactcttattttccaattgttttattcattggagtcactcattcagtctttcaacaactctttattgtctgctatgagtaagctgctgtgctaagaagatccccacattcccaggtcatttgtcattcatataacacctttatgcacttcaatggccttttatcacattctttcattctcaaaattacaaagtattttttactaatttcagtttaaggcaatgacttctaagatgacatatagagatatacttgaatatcttcaatgagmtatctctacaatatatgctgaaattagctttagtagctcatgttgttttatgtattactctatcctctgttcctagaaaagaaactgacagagagtggatactcaatatttattaaatgaatcagatcaggtatcaattttttgagagtgctaaaccctccctaaggaaagtcttatttccaaagtttacatgaaaagatgattctcttctttaaggtgtatctcagaattttctaacact

SEQ ID NO: 327992 - DNA, 625 bp, Homo sapiens
cttgtagttaatggtttaaaaatacagcaagaatctagcaggtatacagaaataatttgtatcattgcaaaagagtattaaaaatgatgacaataatcttgctaaaaatcgaagacccataaattccagtaaacataagtgctcccctcccaatcaaattagcaagatcttgttatccatcacttacaatgtaaaacaattgcttggccaggtgtggtggctcacgcctgtaatcccagcactttgggaggccaaggcgagtggatcacgaggtcaggagatcgagactatcctgaccaacatggtgaaaccccgtctttactaaaactacaaaaatcagctgggtgtggtggtccatgcctgtaatcccagctacttgggaggctgaggcaggagaattgcttgaacccgggaggtggagattgcagtgagccaagatcgcgccactgtactccagcctggcgacagagcgagattctgccttaaaaaagaaacaaaccaacaacaacaacaacaamaaaaaaaaaaaaaaagaaaagaaagaaaaagaaaaaagaactactcagctctgggacagtgaggtcaaatgggataggttggcacaatcatttgaaacaaatgttac

SEQ ID NO: 327993 - DNA, 605 bp, Homo sapiens
atgagggtggtttcccccatgttatttttgtgatagtaagttctcatgatatctcagggttttatagggggcttccccctttactctgctctcattcttctctctcctgctgtcttgtgaggaaggatgtgtttgcttccccttccaacattattgtaagtttccggaggcctccccagccatgctgaactgtgagtcaattaaacctctttcgtttataaattacccagtctcaggtcttgggtatgtcttcatagcagcatgagaatggactaatgcagaattaattccatttattatggaaaaggatcagaaacacactcattactgaggaattgttctagattaaaggagggaaaagaaacatgacaactgaatgcaatcataatttaagatttccttttgttcttaagaatactattgggacaatggcaaaatctgcataagatctgcagattagatgataatatgttaatgctgattttctgatttttgagaattgtattgtgtttatgtaggaggatgtttttacttattgttaagaaatattaaarcatataggaataaaggcaaagtatttcttcaaagtactctcaaagagttca

SEQ ID NO: 327994 - DNA, 558 bp, Homo sapiens
atgtgcttggggtgacacctaaatgtgatccttaagaataatgatctccccaaaatgcccgcaccctaattccyggaacctagaaatatgtattattatgggaaaagagatttaaggttgaagatgaaattaaggctgctaatgagctaaccttgagatggggagattatcttggattatctgagtgtgttttatgtagtcacaaaggtccttaaaagttggggaaggaggcagaagggtcagtatcagactgatgtgatatgagaaactcatattgctgaatttaaacatgaaaggaagccaagagtcaagaaatgcgggaaccctcttgaatttgcaaatggcaaagaaacaaattctctcttccagaaaggaacacaatcctagtattggctggtaccttgattttagcccagtgagaccattttggacttctgacctccagagctataagataaagttgtgttgtgttaagccactagctgtggtaattagttacagcagcaaaagaaaactaatgcaaagggtaagtaggatttcaccagtgaaagcagctag

SEQ ID NO: 327995 - DNA, 545 bp, Homo sapiens
tgaggcatgcatataaatttatattcaacataaatatatgtaatatattcaaatacaagtataatatcaggttatgatagtatatattctttggggaagtgtgcacataattttagatgcaataatrtattcattgaaattaaagaaaagctttacaactgaattcttccatatagatattttggaatttcaaaaagtatataaatcacttgcctattatttttgcttatgtttgcaggcacactgaatggccagtgagattttactaattaagctgctcctcacaggcttatagaagtaaccaaatttcaattgaagcatgccacttcttgggttaatacatcaacaaggatattatttcattttcttgaatactgagagtgaattctgcttggctaagaagtcataaatcaataacagtataatccatgctaaaatatatggtccctgctatcactaatttacagactaagtgataacacatgttgtggttcattttatgtgtcaacttgactgggccacagattacccagatatttgatcaa

SEQ ID NO: 327996 - DNA, 574 bp, Homo sapiens
tctggtacctgaacaacacttttgatagtgaggatgattaattaaggtacagggcagtggcttaaacaagtatacttgcctgtccctcaccaccatcagaacctcctaggactggggcccaagtggttatatttataaaactttcaaaggggttttaatggtcagccttgcctgagaactccttgaaagcctcctacatacttttgacgtctaggcaatatgcatacttgacttaaacttttctcccaagtgcagccagctagaaaacccatgcattcctcagtgacccagctccagaatgagttytgtctgttttctcgtgcttgcttttgtgtcactcttgaatgccaatatgttcattattctcaactctcacttttgtataatcatgctgttggcgctattttgatcctcttccatctggccctattgatattcaatgagagaaaagtgaacaacatccagctatctaggctcctatggggtctacccttcatctcccctccctctgcctgctcagaggttgactctgtttgccttgaagaaaggctgagtcaatactcccttctttcac

SEQ ID NO: 327997 - DNA, 574 bp, Homo sapiens
tctggtacctgaacaacacttttgatagtgaggatgattaattaaggtacagggcagtggcttaaacaagtatacttgcctgtccctcaccaccatcagaacctcctaggactggggcccaagtggttatatttataaaactttcaaaggggttttaatggtcagccttgcctgagaactccttgaaagcctcctacatacttttgacgtctaggcaatatgcatacttgacttaaacttttctcccaagtgcagccagctagaaaacccatgcattcctcagtgacccagctccagaatgagttttgtctgttttctygtgcttgcttttgtgtcactcttgaatgccaatatgttcattattctcaactctcacttttgtataatcatgctgttggcgctattttgatcctcttccatctggccctattgatattcaatgagagaaaagtgaacaacatccagctatctaggctcctatggggtctacccttcatctcccctccctctgcctgctcagaggttgactctgtttgccttgaagaaaggctgagtcaatactcccttctttcac

SEQ ID NO: 327998 - DNA, 457 bp, Homo sapiens
ctgtgtggaatgtaatttaaaattcaaccacccataacaccaatgcaagagagtaataataaggaaaactgaggaagtgcataggaactctgtctactttctgctccatttttcggtaaacctaaaactgtcctaaatgtagtctattaaatagaaaagttcaacaactctatgaggtaggaactttcatagaattcgcctgtaggtgaagaaccagagacttgagcaaagctgggtggaaattgttaaagaccaaactcatgatcatcaccgatgctgcttctcttcctcccttwtggaagctgaatcccaaacaggcctatttatgcttttccttcacatttatcttcaaggaccctggaaaaatttgtccctgagttgagagcgggggaaaaatgttcattgaagagtcagcacatgagcctacacaggatttgtgcaaattgagaacacccag

SEQ ID NO: 327999 - DNA, 581 bp, Homo sapiens
aattttatgtttagccaaactagccgtcaaatggaaggccataatgacaatcttcttcacaaaggcaaggcaaagactccaaaggtttgtcctccatagaccttttcttagaaagttactaagacatgttttccaataaaacaaggaacgaagtcaagaaaagcaggacacggttttcaggaactactggattaaaagcaggaaaacagtggcatctttgtcccaaatgcattgatttgaagaaaccctagaaaattgacattggaatagatggagccctctagataagccttggaaaattttgaggttctgttagaggaaaaagacctacgataaaaacagatggctttcaacttaactgtaggatcattttttctttgagtggcrtaggaattatgatattggattatgatgtatataggacatgtaacaaagaaatgtaaatataacacacactgctctcagagtttaataatttgtatgtgggcacatagtaaagatcgctaatttgtttttaacttctagaatcaaattataaacaaagcacagaaaatgattataattctagaatggaatattag

SEQ ID NO: 328000 - DNA, 431 bp, Homo sapiens
aagaaatttatgtcattcctgcagtgtgtaagaaatgctaaatctggtgataggctagtgagttaatgccaagttctggggttcaaactggaggggtagaaggcatccaccagcacccccaagacccatcacccaatcaaagcagatatgacttcaccttgaagtcccctaaaacaaacaaaaagatgccattgtgttttgaacagataaaaatctgatcaaaacacaccctaaaatttgtgaagagaakatttggagagcatgctttcattaggaaaaccaggcctgggcaggtaaatgtagggatggattaagagtgagggggtaaggctgggcatggtggctcatgcctgttatcccagcatgtttggaggctgaggcaagaggattgcttgagcccaggagtttgatactagcttggcaacatagca

SEQ ID NO: 328001 - DNA, 565 bp, Homo sapiens
taattttttttttgcttctcttgttcatgaggcttatttcagaggctttttcccccagaatctttactattgacagacagatctgctcaatattttatgctcaacaatatakggtcactggctcccaatctgtaataaatcatttttcctaagcatagaatacaagaaaattataaaaaaatatatcatgaacttactgggtagaataccagtaaaactcaacaatgacaaaaaaaatcaggcttagatttttagaatatgagaattagaaaggaaatttggtattaggtagttcaactatcattatacagcaagaaaactgaactttcctgagattaaatgagtcttcagcaaaaattagttagtttcagagctctcttgtttttcaggctagtggatttttgatagctcatttgacttcgattttgactttgactttaatagactttgacctatagtatgtttgctctaaacctactttagctataattcttcactccactcccaaattctcagaatgcttaaataaaattattcaattattttattaaaactacagtattgg

SEQ ID NO: 328002 - DNA, 594 bp, Homo sapiens
taattgagttgtttataacacagatgataaattcttgaagggatgaacaccccattttacatgatgtgattattatgcattgtatgcttgtatcaaaacatttcatataccccatcaatgtatgcacctactatgtacccacaaaaattaaaataaaaacacttaaaacaaagaaaattttacagtccagctgggatggcaaaaacctaagcaaatataatagaaaaagatagaaagtagaatgggtgtacaaagagggaagaaactgatttgtcttgaagacttaatkgataactactatttgaacttggtcttaaaagccagttggggactttcccaattgacagtagaggaatggatataataggaagaagatatggtctatgagaaggcatagagtcatgacagagcatgttatgtgtggtaggcagaattctaagatggcccccaagattcccacccttgctggatgtgccctgtatagtcccttcctcttgagtgtgagcaggatgtgcctatgaatatgatgggataccagtcacatgactatgttgtattatctatcaaaaggaattttacagttgcgattaagat

SEQ ID NO: 328003 - DNA, 548 bp, Homo sapiens
tttagaaggtaagatcaacctgatgactgacaggagaccarcatgaaagaggaagattagtgaagaatgattcaaacatccttgcctcaatgatatgagaataagaaaagataaacaattagagagagaacttactttctattttgaaaatgtcatgttttaattgattgcagtaattctaagtggttaagaaggaactgctaggcagttaaaaatgtagttctggactctggaacaaggtgaaggctggagatttgtttggatagttatcagtagagtttaaagcacaggaataaatgagataattcatgtagaagatgtacttggaaaatatgatgacagagtgaacttggagggacatcaacatttaagtgtacaaataagaggagcaggggaggaaaataagaaattctttttacaataagaataaaatctagagaaaatcatatattgaaagctaagggaggataaattttcaaagaaataaaggttgaagattgccatatgttaattagtaagtagagtaagcattaaaggaaagcatttgg

SEQ ID NO: 328004 - DNA, 548 bp, Homo sapiens
tttagaaggtaagatcaacctgatgactgacaggagaccagcatgaaagaggaagattagtgaagaatgattcaaacatccttgcctcaatgatatgagaataagaaaagataaacaattagagagagaacttactttctattttgaaartgtcatgttttaattgattgcagtaattctaagtggttaagaaggaactgctaggcagttaaaaatgtagttctggactctggaacaaggtgaaggctggagatttgtttggatagttatcagtagagtttaaagcacaggaataaatgagataattcatgtagaagatgtacttggaaaatatgatgacagagtgaacttggagggacatcaacatttaagtgtacaaataagaggagcaggggaggaaaataagaaattctttttacaataagaataaaatctagagaaaatcatatattgaaagctaagggaggataaattttcaaagaaataaaggttgaagattgccatatgttaattagtaagtagagtaagcattaaaggaaagcatttgg

SEQ ID NO: 328005 - DNA, 604 bp, Homo sapiens
tcagtgtactccactgttctaagtaaatgacccactttgctaaagtggatgtctgtgctgtcccagtctgtgggggttgytatccatgagcacatccatcctgttattgggtaagtcatctgcacgacaacaatagcctgacgtaccatgcttttatgagcctgaagggcagcatatacagctactaactgctttctcagtctaggggtgaggggtagttacccatgaatgcacccatcccactattactaactgcttctttatcaaggattaccagagctcagcttccttctatactcaagacggaaggcctattggcatactcagacactctgtgtgctgttataggccctaactcaagctatctgtagtcattgcacttttagcttgaacgggcacccctggttgactgctcacagggcttgtgcctgctaaatagcccacttagctaccagatatgctgtctcagctgcatcatcccaatctcaggcaagaggggcattgatactcctaaacctgcaagagaatcagaggttagcataacattatcaataagatcatgaaacacggtggggctttgcatatagccctgcagcaacactac

SEQ ID NO: 328006 - DNA, 487 bp, Homo sapiens
gaccctttgtgaaccaaccacccaggaacccctacatgaaacaaatcttcccctaaacaatgtgcctgtccattctttctttctatcatctacctatctatatctatctctattatctatctaatatctatctatcatctctatagctcacactgtgttgcaggtggttgtttacctatctgtttctccatctggaatgtgaagtttctgagggcaaattcatgtggcatttacctttatatcccagaacctagtacaattgctgccatatacacactcctctggacaaggaagtggtcactatcaagaaatcatatcaggatygcttaaagagtttatattccaaaagataccatgatattttggggccaataggatttttaggtctagctattcatccaaggagtaagaaacatacttctcattgaactccgtaggcaacatattggtacgtgtgagctgagtgattcctggctgaggcagcttc

SEQ ID NO: 328007 - DNA, 537 bp, Homo sapiens
tgacagatctattctcataatgaagatttcagaaaagaaggtgttttctagcaaaatatgctcttcttttcccaggaaaaggggggaaagtgtttgtattattttaaatagcaggctgtcgctgaacgtggttccacagttcagcacttgaggcagatggttaaaagccacatgcttgcggattttcccactttttccacactcacaractcacaaccacttttggtgcccgtggtttaacctctgtttctctaactcctgtttatgagtcaagcggtttcatgtcatcagattgatggggaaagtgtgaacaaggataaggatgtggaaggagtttccgcactgggaagcaccacagtgtgccaatgctaaaaaaggaaaaaaagaattcaaagtatttgggctttgagggattgtatttagttaactttgaaagtttgaatgcgatcaaagtagctatctgaatgtttaaaagacattatttactggaatatatataaaaatctgtgttgaaacagactgaggtgatggtgcaga

SEQ ID NO: 328008 - DNA, 537 bp, Homo sapiens
tgacagatctattctcataatgaagatttcagaaaagaaggtgttttctagcaaaatatgctcttcttttcccaggaaaaggggggaaagtgtttgtattattttaaatagcaggctgtcgctgaacgtggttccacagttcagcacttgaggcagatggttaaaagccacatgcttgcggattttcccactttttccacactcacagactcacaaccacttttggtgcccgtggtttaacctctgtttctctaactcctgtttatgagtcaagcggtttcatgtcatcagattgatggggaaagtgtgaacaaggataaggatgtggaaggagtttccgcactgggaagcaccacagtgtgccaatgctaaaaaaggaaaaaaagaattcaaagtatttgggctttgagggattgtatttagttaactttgaaagtttgaatgcgatcaaagtagctatctgaatgtttaaaagrcattatttactggaatatatataaaaatctgtgttgaaacagactgaggtgatggtgcaga

SEQ ID NO: 328009 - DNA, 543 bp, Homo sapiens
gtggtaagggagttattcatgtacattacacagcatacaaatgaaaacagaatacatttggcaattttctacttatgagtcagggctgttttggaacttctgttcaactcagtyctgaactgattctgtaattttcctcctcacagctcaaatactattaatgaattcattcaatcgtctacttgctaataccttaatttaaaaaaattcgagggaactttatgatagtgataacatttgcaaagggattcaaaattcaatagatgaaagactgagataattatttgcaaaccttagataataatacaattggacataaaatttgcctcctaatttcctggaaacaaggcaacaagggaaaattttctattttaagaaattttaaagataattttgcttctgaagaacaaacaaaataaaagtatctctgctcataggtctttgcttgaatttctcagccagtgattcaacacttaagttcttctcctcaatgcctatgggatccttgaagataggcatcatttcttgtaacatagttgtgac

SEQ ID NO: 328010 - DNA, 543 bp, Homo sapiens
gtggtaagggagttattcatgtacattacacagcatacaaatgaaaacagaatacatttggcaattttctacttatgagtcagggctgttttggaacttctgttcaactcagttctgaactgattctgtaattttcctcctcacagctcaaatactattaatgaattcattcaatcrtctacttgctaataccttaatttaaaaaaattcgagggaactttatgatagtgataacatttgcaaagggattcaaaattcaatagatgaaagactgagataattatttgcaaaccttagataataatacaattggacataaaatttgcctcctaatttcctggaaacaaggcaacaagggaaaattttctattttaagaaattttaaagataattttgcttctgaagaacaaacaaaataaaagtatctctgctcataggtctttgcttgaatttctcagccagtgattcaacacttaagttcttctcctcaatgcctatgggatccttgaagataggcatcatttcttgtaacatagttgtgac

SEQ ID NO: 328011 - DNA, 524 bp, Homo sapiens
gctgttttggaacttctgttcaactcagttctgaactgattctgtaattttcctcctcacagctcaaatactattaatgaattcattcaatcgtctacttgctaataycttaatttaaaaaaattcgagggaactttatgatagtgataacatttgcaaagggattcaaaattcaatagatgaaagactgagataattatttgcaaaccttagataataatacaattggacataaaatttgcctcctaatttcctggaaacaaggcaacaagggaaaattttctattttaagaaattttaaagataattttgcttctgaagaacaaacaaaataaaagtatctctgctcataggtctttgcttgaatttctcagccagtgattcaacacttaagttcttctcctcaatgcctatgggatccttgaagataggcatcatttcttgtaacatagttgtgacttgattaacgcatgttgaatgaatgatttcccagaaatcctttattaggttttcacattgcccta

SEQ ID NO: 328012 - DNA, 524 bp, Homo sapiens
gctgttttggaacttctgttcaactcagttctgaactgattctgtaattttcctcctcacagctcaaatactattaatgaattcattcaatcgtctacttgctaataccttaatttaaaaaaattcgagggaactttatgatagtgataacatttgcaaagggattcaaaattcaatagatgaaagactgagataattatttgcaaaccttagataataatacaattgracataaaatttgcctcctaatttcctggaaacaaggcaacaagggaaaattttctattttaagaaattttaaagataattttgcttctgaagaacaaacaaaataaaagtatctctgctcataggtctttgcttgaatttctcagccagtgattcaacacttaagttcttctcctcaatgcctatgggatccttgaagataggcatcatttcttgtaacatagttgtgacttgattaacgcatgttgaatgaatgatttcccagaaatcctttattaggttttcacattgcccta

SEQ ID NO: 328013 - DNA, 622 bp, Homo sapiens
gtgtttgaagttttctcttggatatcaaagtttttgtaaagggcatattgccttggcctataaaacaaagccattaaacatcaagattctttttaatgaacaaatagtatgcagtaataaataaaatgttttaaaagatgtaaccaracaggctgctcaaaagcaaagtaaacagtttagtagataagaaatagaactgaaatataagcagtaagtattgtggaagcaacagttctggagatcttcatgcccaataataggcatagtaactgagtcttgtttcctcaaaggaaaccaatactaaaagttttccatgcatggtagggcactagatctagccttacttcttggagtcagtagccagagaaaggccccctatatgtaaaggtagaatttgaaaacagttgtcaacttattgcttgaagctgtggctttaaaagctgttgtaggtctagaatacagaaatactaagacataggctcatgaccaggaactaagccaacgagctccatgaatgtatttggaatagttcaatgtcactgctgaacaggaacccctaaacatcgttataaaacctggttctagacagggagcccaaaaggtttgccacacatacacagaa

SEQ ID NO: 328014 - DNA, 620 bp, Homo sapiens
gcacactcattcatttacatgttgtttatgctgcttttgtgacatcacagcaaagatgagtagttgtgaccgagactgttgggtctgcaaagcttgaaataattaccacctggtcttttacaaaaagttttccarttgctgcttgggaaaggacaccagttcctataatacgcagagctaaagacagagatagccagtaaagaaattcggtagaagggcatgtcaaagcttactagttggccccaatatccattctgcccttcttagaaaaatagaactgattttcagttggactttttcacttggaatatagattgtgtttcacagtctcttgcagatagaggtagcttttaattaaattctggctaatgggattgtattagtctatcttcttattgctatgaagaaatacctgagactgggtaatatataaagaaaaagaggtttaatggactgactcacagttccacatggctggggagaccttacaatcatggcagaaagtgaaggaggaagatcttacatggtgtcaggcaagacagcatgtgcaggagaactgccctttaaaaaccatcagatctcatgagacatattcactatcatgagaaaagcaggggaaa

SEQ ID NO: 328015 - DNA, 388 bp, Homo sapiens
tttttgtatttctgtggggttggtggtaatgtcctatttgtcacttctgattgtgtttatttggatcttctctcttttcctttattagtctagctagtattctatcaatcttatttactctttcaaaaaaccaacaccttttggatttgttgatcttgtgtatggtwttttgcatcttaatttcatttagttcagctctgattttggctatttcttgtcttctgctagctttggctttagtttgatcttacttttctagtttttctagatgtgatgttaggttgttaacttgagatctttctaacttttgatgttagagtttagcattgcaaactttcctcttaacgctgctttggctatgtcccaaaaattctggtatattgtaatt

SEQ ID NO: 328016 - DNA, 388 bp, Homo sapiens
tttttgtatttctgtggggttggtggtaatgtcctatttgtcacttctgattgtgtttatttggatcttctctcttttcctttattagtctagctagtattctatcaatcttatttactctttcaaaaaaccaacaccttttggatttgttgatcttgtgtatggtattttgcatcttaatttcatttagttcagctctgattttggctatttcttgtcttctgctagctttggctttagtttgatcttacttttctagtttttctagatgtgatgttaggttgttaacttgagatctttctaacttttsatgttagagtttagcattgcaaactttcctcttaacgctgctttggctatgtcccaaaaattctggtatattgtaatt

SEQ ID NO: 328017 - DNA, 591 bp, Homo sapiens
gtcaaacatcaacaaatctattaatgaaataaaccacaatttcaaattaggaaagggaaaaaaaattataccttcaataagtcaaacatgatatttcaataaacatgtgtaatagaagcacttaacccacttagtatagaaataaattctcatctgataaaactctcatctgtctattaaagatctgcaatgaaaactatatttaatgttgaaattttggagcattcacataaaatragaaacaaaataggatgttctatgtcatcacttatattcaacattctactgcagatcttaaccatgcaggaagatttttaaaaagccataaaatgaataaaaattagaaatgaaaagtcaagatatatttatttgtagctacaatgattttctgtgtagtatatacaagacaatccacaaatgaatttttaagaactaataaaagaattccacactactactcattaaaaggtaaacaaccaaaatggaaaaattcaatgggaaaatacatttcattcacaattgcaacaaaaacttaagatacctaaacataaataatgagaaacatacaagacctttataggaaaaaaatgt

SEQ ID NO: 328018 - DNA, 561 bp, Homo sapiens
catacattggaaaagaggaatagtctcagaccaataacctaagttcccaccataagaactcagaaaaagagcaaaataaacccaaagcaagcagaaggaaggaaatcataaggatcagaactgaaatcaattaggttgtaaacagaaaaacaataaaaataaatgaaacaaagtctggttcctcaaaatgatttaaaaaataaatctttagcaagactcacaagggaaaaaaaaaagaaaacacaaattgtcaatatcactgaagacacagacaatatcaatatagaccttgtctacatcaaaagaataataaagtaaatatgatgaataaaaaaagttcatatttatatgtgggttttgatcktgtcatcatgttgttagctgattattatgcagacttgatttgtagttactttatagtgtcaatggtctatgtactaaagtgtgtttttgtgaggccagtaacagtcattcctttcatatttagcactcccttaaggacttcttctaaggcatgtctggtggtaataaattcccttacatatgcttgtcctgaaaaaa

SEQ ID NO: 328019 - DNA, 536 bp, Homo sapiens
cttgctttgttctctggccccttgaggttaggaatctgtagtgttggaggggccgaggtgttctcagtctgtaggtcacaacactctgatgggggggtgtcaggcaaagtacttcatcagggcagtggcagtgggatacatgcttgcttgcacatgccagcagccacagcagtgtgatgaagtgcatgcacattggcttgagatggccactggtgggagtggggtggtgacatttctctgtaagctcccgccagtggtggtgactgtgcagcaggggtgaggcactgggaagggcagatttgctggcgtccatgcacwtgtttgcaccagaggtggcagaggtgtaacaggggctcattttcattcagttcaaaacattttctaattttcctgtgctgttttttgttttttttttttccttttttaaccatgggtacttactagagaagtgcttaaaattcaaaatgctgaggttattctgggtattgttctgttgtttatgtctaatctaattccacagcggtgcaaaaacaaac

SEQ ID NO: 328020 - DNA, 632 bp, Homo sapiens
gtaaatatggttaataatgttattcaatgcttctacatttttctgattttctgcctgcttgttctactggttcctaagaggagaatgtttaagtctccaacttaactatggataattataaatgtgtctgtttcccttttcagttcygtcaatttttgcttctatatgaaagctttataattgagtgtatgcatagttaaccctattgtgtcttctgaattgaaatatttatcatggcaaaatgtaatattctgataacattcctgctaatattccttgttctgaacagtaacttttctgatgttaatgagatcattccagctttcttatagtgtttcatattatgcatttttccacttcccttttaagttgctttcatctttatatctaaagtaaatttcttatttccaacataagggtcttgcttttttattcagtcttacaatgcctgaccttggaatctacttgtcttcgtctgttctttgtttcttttcccctcttttccttttgtcttttggatttattgatgaattattactatttcattttatgtccattcttgggttattatctatttatctttgttttaatttttgttgattgctccagggtttataaaaatcatgttaaaa

SEQ ID NO: 328021 - DNA, 632 bp, Homo sapiens
gtaaatatggttaataatgttattcaatgcttctacatttttctgattttctgcctgcttgttctactggttcctaagaggagaatgtttaagtctccaacttaactatggataattataaatgtgtctgtttcccttttcagttccgtcaatttttgcttctatatgaaagctttataattgagtgtatgcatagttaaccctattgtgtcttctgaattgaaatmtttatcatggcaaaatgtaatattctgataacattcctgctaatattccttgttctgaacagtaacttttctgatgttaatgagatcattccagctttcttatagtgtttcatattatgcatttttccacttcccttttaagttgctttcatctttatatctaaagtaaatttcttatttccaacataagggtcttgcttttttattcagtcttacaatgcctgaccttggaatctacttgtcttcgtctgttctttgtttcttttcccctcttttccttttgtcttttggatttattgatgaattattactatttcattttatgtccattcttgggttattatctatttatctttgttttaatttttgttgattgctccagggtttataaaaatcatgttaaaa

SEQ ID NO: 328022 - DNA, 572 bp, Homo sapiens
tatacatcattagccatatttatctttaattcttttactgtaagttacagcatttaatttttttctttcttataaatttagaaatgagaattactatttcacacagacttcctattctgatagtctgttatattatactttgaagatagctcctgggaagagattggtaacagtgtaggaactgatagggaaattctgacatagtattttccaaaactttcttaaaaatgagagcattttcaactttgaaaaaaaaraaaagcctgtaagggttgggttattattagtttcctcttaaaagctgtcaaagttctcagaagccatatgtttaagttgtcaaatttctcaggacaaaatttacctgcattttgcttaaatgaaaattttaaaatgatttttacatctcatttggtatacatataaaatatattagaatatttttatctaataaaataccaaatataatattttagatatggactatttctcactaatatagaattatttaactcactagttgtacaaaaaggagcccagagcctttatttgtgcttttttgactcagcattttt

SEQ ID NO: 328023 - DNA, 554 bp, Homo sapiens
taaaataatatttctcattcacagcctcatttaaagtagatttaaattgaccttagcacttattttatcattaattttcaaatctttatcaaaactttatcattatttgataattattaattatcaaaactttatcattaatttcaaatatacctcaaacaattgtgaatcaccggcaaaaatttgcattcattaatacctagaaataaatgttccttcatcttttttgccatctcattaagtttgcatttttataattgcacaggcatttactttgacatggtatttgagactcatcgcttctttttgggcggtggaggaacatcactaaaatgcatattcaaaaattgtattttgcttatatatstgtgtttggtgaatagtaatactatttctggatttcagctttagaggcatacataatgtcaggatagagatggcataataaatgatacttctgtattttcccctggagttctaaactggttgtgaaatgaaaaataaatcagataggaatcatgtatcacatttatcatacataaagctgatattgg

SEQ ID NO: 328024 - DNA, 404 bp, Homo sapiens
tttattacagttttgccctgatctctttttctatttattttacagatttacagcccacatttattgtgtgctcactgtgtaacgtgttctgtgttaagtgcttgatactcatgcatttgcaaaaactctctgaggtgggtaattattttacagaakaccattttataagcatccttaaatgcttttgattgtagcagtaagtaaatagatgaatacacaagttaatctctaacgctcatctatctaattcttatatagagagtagtcaaactatacatagtatacacaatgagatgagatattacttaattctttatcagtctggtttgcataggggactggtacatgacatgttcatgagtggatccatcggatagctgaacatagcacattctgcttaacct

SEQ ID NO: 328025 - DNA, 290 bp, Homo sapiens
gaattgagaagaaataaataaaatgagatttttaaaggcttaatttaagaggatcaaatgaccacctttgtgatttggattataaagtttggataaattacckaactttcttccagtatatgaaagaagatttaagatagagtagtagacagtgccttggcatcatagctgaggttaaaacaagaagaaatagacttcataatagtggatttgtactacaattgaagaactttctaattccaaaagttggaaaaaatactagattctatgagtaaggccatagaagactc

SEQ ID NO: 328026 - DNA, 591 bp, Homo sapiens
gtcaaacatcaacaaatctattaatgaaataaaccacaatttcaaattaggaaagggaaaaaaaattataccttcaataagtcaaacatgatatttcaataaacatgtgtaatagaagcacttaacccacttagtatagaaataaattctcatctgataaaactctcatctgtctattaaagatctgcaatgaaaactatatttaatgttgaaattttggagcattcacataaaatgagaaacaaaataggatgttctatgtcatcacttatattcaacattctactgcagatcttaaccatgcaggaagatttttaaaaagccataaaatgaataaaaattagaaatgaaaagtcaagatatatttatttgtagctacaatgattttctgtgtagtatatacaagacaatccacaaatgaatttttaagaactaataaaagaattccacactactactcattraaaggtaaacaaccaaaatggaaaaattcaatgggaaaatacatttcattcacaattgcaacaaaaacttaagatacctaaacataaataatgagaaacatacaagacctttataggaaaaaaatgt

SEQ ID NO: 328027 - DNA, 605 bp, Homo sapiens
ttgatgaaccagcatttgctcattatgaatcctcacacagacagagcttacaagggtgtgttttgatggacatacctgttttctacaaaagtgcagtcttgcaatttcaaatatgaatatacacttaaaaggggaataaaatatgggaagctggaattaattacaggagaaatatgatgtgcatatttttttggcttcaagagaataatttaaatccacgttggaaagaacttaaaattataatgtaacaaacctttataatacagattttaaactactaaggatgcattttaagactaggtatactcatagtaggttgggcatgtgcgctaaagcagtggtcctcaaagcattttccccatgtactccctaaaaaattccaggaaatttgaaaaaccatgtgccctctggcacattttcaagttgacatctaaaaaatttcagcataagtttaaatagtttcaaagaatgttgtttatgatagtttataacattgatgttttagacctcttttaaataaagcaaatagaattgaaatgtcacagtaggttgataaacactatcrtccgttaattattttcttttttaatgtataagctgcttct

SEQ ID NO: 328028 - DNA, 588 bp, Homo sapiens
gccaagccagacaatgaggctcttgttctttatgaattatatttacttattttagctttacttttgtgttcatatgacttcgaaaagaatattggatgtggagtccagccagagtgtttacacacaatttaatgtgattttgattgtaaatgaaatacaagtctcctaaagatgctacctgggttggcatcatcaagggctctaaaaacttgatgagatttcatctacagcacgagcttcttaggtgttggttagaattcctcatggttttacaaaagatttcttgcataattatacacaatgagaataacttagaaagagacttggtacatatccatcatttagtgttgcctttcacaataggcaattgaattttttaaaatgccaytattattctcttagtagaaaatgatatgagtaacatgtttcctactaagcactgtatgtcagagactatattgaactttgcagttgctccctgaaataatttttcacctaatatgaattaattttttaaaaagcaaatgagagcttagcaaatgaaactgataatcatagttcaaaagtttggatattaatccttgatat

SEQ ID NO: 328029 - DNA, 566 bp, Homo sapiens
agtaactatgttatgtgtcattaacaatgtgaacacaaattattgatattaaggttccagtatcagctctgaaaatcttacaatgttcacgaaaaaggatgagactcatctgaggttttctttcatattttgtatatttttgaggctgtatttggacaaaaaaaaaaaaaaaaacttcctctctatggcaatctacatcttagataccttcaacagtccatagaactagctccgtgccttagatctttgccacaaacagcaccagcattgaactttgttgggaaaagtctcctactgcatgagttttgatcaacaaatggaatcaaakctcctcaagtctgatgttctatttcctactgaaccaactggatatcccgattcagggcccaagaaaacttgtgaatgtcaaagacctcttagcaagcatgttctgatgcaataaaccaacccaaagttaaaaattaaaaacattgtaataatgctcaatactcaacattcaggcagtccttagactgaaagtctgttggtacaaggtacaggatgagttttcttaaggtttctggaaa

SEQ ID NO: 328030 - DNA, 616 bp, Homo sapiens
tgatgagacaggcaacatgacctctggggtactggcaggcagtgttcttgacctgagtggtggttacaaggtgttcattttctatttattcattaaattatgtatgtattccctatgcattctacttaaatatatttcatttttaaaggtaaattttacaaatatttatggattgttcctttattactttttatatgtgagggaaagctcyaacttgctttacctttctaagatatcccattttctctataccatttgttgactaatatatctcttgcccactggtttgtaacagtgccttaattagtttttgtgtttgaagttccagaatctcttcctggcctatgtattgtgttccgttgatggatctttccatcccatggtaccctttactattattgtcttcatttttattactattgttatgcccttttctctctccgtgcacatcttcatgtttgaactctaaaaacacaccgccaatctcatgattctacaagtcttttgtgtcctccctaaaacatgcatttctatttggctttcagattttttcacccatagaaatgtctacactaccacaactttgtttttcaaggtttcaatcactttatacagt

SEQ ID NO: 328031 - DNA, 498 bp, Homo sapiens
acgtattgacttactacagaaacaggtagtaatgaggcaaaataaaaatgagcaaaagtgggacattgattataaatggctctcctctgtggatataagaatgtgtgggatagtttgattttgactttgaccttcattttaatgagctgagtgcagcctaaaggctaaatgtcatttgaggtcaatgttttccactctgacagaaggacttaractccttttgtattccttctccttgctttcttaaaaaaaaaaaaataatgaaattggacacagctgaccaaaaagtgagttcttcctttcaaatatagtttcaacagtgaggtagaaggattttgctgtgaaaagacaaatggccctgaattagggtataatttttaaaagattaacctcattcagaaataaagcaatgaattagcaagcaggatcttgatgttgggtggggtatcaacctttaaatacagccttgtttcttcaggctgggtttcaatgtgcagg

SEQ ID NO: 328032 - DNA, 498 bp, Homo sapiens
acgtattgacttactacagaaacaggtagtaatgaggcaaaataaaaatgagcaaaagtgggacattgattataaatggctctcctctgtggatataagaatgtgtgggatagtttgattttgactttgaccttcattttaatgagctgagtgcagcctaaaggctaaatgtcatttgaggtcaatgttttccactctgacagaaggacttagactccttttgtattccttctccttgctttcttaaaaaaaaaaaaataatgaaattggacacagctgaccaaaaagtgagttcttcctttcaaatatagtttcaacagtgaggtaraaggattttgctgtgaaaagacaaatggccctgaattagggtataatttttaaaagattaacctcattcagaaataaagcaatgaattagcaagcaggatcttgatgttgggtggggtatcaacctttaaatacagccttgtttcttcaggctgggtttcaatgtgcagg

SEQ ID NO: 328033 - DNA, 563 bp, Homo sapiens
taagaaccaatgagttcatacaggtgataaggtaaataagtaaataaataaggaaaagtgaaatctcttccttgtagaatgtgccaactgataaatgtagaagaaataatagagctggaaaattaccattttgcagccgatatggtaatgactgattcaggccagaatcattaatggatactaaaattattaaatgaawgtttaaaaagcaatggggtaattacccaatatcaaagcatttacccacagaagacttattaattggagaagaaaaaaatgggtagtttttagtggaaaaatgtggagggggcatcatcttccctaagtaaccctagttaatgccaccagaaactgacatcatgctcttcctaatgtaatgcactgaggatacaacctcacacatattgtgttcctgccccaaatgcacatctgattctaataaagaggaaacattagaaaaaattgttgaaggacacttcacaaaacaatcagcctgtgctctcttaaaaaatgtcaatatcatgaaagacaaagacagccttaggtattgtttcataataatg

SEQ ID NO: 328034 - DNA, 563 bp, Homo sapiens
taagaaccaatgagttcatacaggtgataaggtaaataagtaaataaataaggaaaagtgaaatctcttccttgtagaatgtgccaactgataaatgtagaagaaataatagagctggaaaattaccattttgcagccgatatggtaatgactgattcaggccagaatcattaatggatactaaaattattaaatgaaagtttaaaaagcaatggggtaattacccaatatcaaagcatttacccacagaagacttattaattggagaagaaaaaaatgggtagtttttagtggaaaaatgtggagggggcatcatcttccctaagtaacccwagttaatgccaccagaaactgacatcatgctcttcctaatgtaatgcactgaggatacaacctcacacatattgtgttcctgccccaaatgcacatctgattctaataaagaggaaacattagaaaaaattgttgaaggacacttcacaaaacaatcagcctgtgctctcttaaaaaatgtcaatatcatgaaagacaaagacagccttaggtattgtttcataataatg

SEQ ID NO: 328035 - DNA, 537 bp, Homo sapiens
ttcttcatctgtaagatgtacctattttaatatcaacttcacaatacctacttttatgaaaatcaattggatcacaaatgtaaattacctagtaggtgctcaatattttgattccatcaccccagctgcaaaccctagcctcgtatggattgaatacatggaataggagacccagtgtgtttgttctagatgaaatacatgagatatgtctttgggawccattcagacatgcaggtggacactgcagtagtcatctaaaacaattctttcttctctctgaactagttcaatgtgaaaatatatagctttccatgccctgttaatgtcttaatgaaacctgcttccttaagagtgtcctgcaccaagaatacagacatgattagtcctaaggtgccactacaatccatagagcgccgtgggcactaagagagaaatctcaatgcacaggtaaatttctcaagttctctgaggaactaaggatatttacacttaaagagttatattccaaccacatataaaaaacacataattaaatca

SEQ ID NO: 328036 - DNA, 584 bp, Homo sapiens
gctcatgaatgattatgattcccaagtggaattcccaaaatagacctctcctctgcactttagtccattatttctagctttcttccggacatttccactcgattctcctgcaaactcaacctgtcccagtggagcttaccatctttcccctaactcatcctctaacttttctgactgttgatctcagctccaatttttcagatggccagaccaactctggctctcccaatattcagtatcctccagttttatgtcttcttttatatgaaatctgtggatttacactatcatctctacagccatcacagtctgcagcctgattacatttctttggattcattgaaactgtgtctcctacatatggatgttagttaattttctcaaacagtgttttatmcggttcaccttttttgcaaaattctctagagatcctcttcttaatgagacaagtttgaattctttatcttggcattccaagcctttctctctagttaatgaactttatttgctactttttggaccttcttcctacttaatgacgttatgtcctcatatgtaggtcagtctcccttataggcaactcc

SEQ ID NO: 328037 - DNA, 542 bp, Homo sapiens
tgcaaggaacatcacattctgtgggaacaagagccaaactgcctcatcatgggaacaccttaccaacacatagcagtacatagcagcaagccatactgcccagacccctcccacctaggcctataagtaccccarcctgtaagcggtggtgggcactggcattaggctggttccccacctctgtaggtgttatgctggacataaagcctgcatttcctgttgaactgccctctgtgtgtgtgtctttctttaacccttgtcttcccttcacaacctaacatctgtgtgtgtgtgtgtgtgtgtgtgtgtgtgtgtgtgtgtgactaggtctcgctgttattcaggctgctcttgaactcctagccgtaagcaattctcccacctcagtctccgaaagtgctgggattacaggcaagccatcatgcctgggccttcttctttataccttatcatttttttctttctcttgctagtctaggtggccctaatctactcaagcactctgatcttcatcttttatatctctttttatgaataaaccc

SEQ ID NO: 328038 - DNA, 596 bp, Homo sapiens
taaaacctcaatgagttaccaccacatatcygttagaatggttgataatatcgccaatttctaagttattcaggcttgagaggcttccttagtttactcaatgaaacatggagataaaggagaaattatcagagccagatttctcctttgaagtgttacttttctccattaatataaccaccatcctcagttctaattacttcacacctatgtgactgcaacagccttgagatagccttcctaactatacaagacgtggtccttaaatatcattatcattcttccaatcactgaccctgagtggttccttatctctaagtaaaatttaaacttctatgcttgccttttattttttgtatttttaaaaataaatgaaacatgataaagattaatattatataaaattcttaaaagctgacatctccaccctcaaatagtatttacctagaatgttgggagataattctttaatggcttctcaaattactcctagtcttatggtagatttttctttgaggttaggttttcaaggatgtttgtatctccttctagatcacagttgtttcctgaccaggataataaagataatggctcat

SEQ ID NO: 328039 - DNA, 542 bp, Homo sapiens
tgcaaggaacatcacattctgtgggaacaagagccaaactgcctcatcatgggaacaccttaccaacacatagcagtacatagcagcaagccatactgcccagacccctcccacctaggcctataagtaccccaacctgtaagcggtggtgggcactggcattaggctggttccccacctctgtaggtgttatgctggacataaagcctgcatttcctgttgaactgccctctgtgtgtrtgtctttctttaacccttgtcttcccttcacaacctaacatctgtgtgtgtgtgtgtgtgtgtgtgtgtgtgtgtgtgtgtgactaggtctcgctgttattcaggctgctcttgaactcctagccgtaagcaattctcccacctcagtctccgaaagtgctgggattacaggcaagccatcatgcctgggccttcttctttataccttatcatttttttctttctcttgctagtctaggtggccctaatctactcaagcactctgatcttcatcttttatatctctttttatgaataaaccc

SEQ ID NO: 328040 - DNA, 571 bp, Homo sapiens
gaaatttgctatccagatggaagtataagtttctacagagatatgttattgcagcagtgttctgaatctcatcgggtttgttggcaatttgcctttcaacaaagggtttttttttttttttttgataagggtggcttccacagagatttaaggagaacaataaaaattttcattttaataaataagccccatttcaacgtcccttctcctgtatcattcctctgattcttctctgtcgttatttgtttctattaggttaaatcattttacatttctggtatttaaccattttgacccacaaaaacagggatttcatttgtttaacctaatacagaaacatcttttcaagcrgaatttaggaatctacaacaatgagcaagattatattttcatctccaaaatgtacgttaagtctgtttgtttctctttatatccactgtgaacccatggtccatgccactaccttctttcacttgggttactacagtagcctctggactgatttccttacttctgctcttttctcattcttgcctctttaaggagccagaatgatcttttctaaacaaac

SEQ ID NO: 328041 - DNA, 436 bp, Homo sapiens
aatgttgtttgatagcattttacccagagtagaacttctttcaaaattgtagtcaatcatctcaaacctgctgctgctttatcaactacgtttatktaatattctaaatcctttgttgtcatttcaacaatgcttcaccaggagtagattcaatctcaaaccactttcttttctcacccataagaagtaacttatctgttcaagttttgtcatgagattgtagcaattcagtcacatcttcaggttccacttctaatactagtcctttccaccacatctgcagctacactatccactgaagtcctaaacctctcaaagacaatgatgagtgttggaaccaatttcttccaaactcctgttaatgttggtattttcacctcctcccttgaatcacaaatgttaatggcatctagaatgatgaatcctttccagaagg

SEQ ID NO: 328042 - DNA, 436 bp, Homo sapiens
aatgttgtttgatagcattttacccagagtagaacttctttcaaaattgtagtcaatcatctcaaacctgctgctgctttatcaactacgtttatgtaatattctaaatcctttgttgtcatttcaacaatgcttcaccaggagtagattcaatctcaaaccactttcttttctcacccataagaagtaacttatctgttcaagttttgtcatgagattgtagcaattcagtcacatcttcaggttccacttctaatactagtcctttccaccacatctgcagctacactatccactgaagtcctaaacctctcaaagacaatgatgagtgttrgaaccaatttcttccaaactcctgttaatgttggtattttcacctcctcccttgaatcacaaatgttaatggcatctagaatgatgaatcctttccagaagg

SEQ ID NO: 328043 - DNA, 587 bp, Homo sapiens
cctcttgctaatgctactgctgatctaaggcttgactgataccttatcattttggcatgttttaactgaccaccacgacacctggcagctcagttctttctgcatcagcttagttcttaacaccaccttcttctcctacttcataagtgtcttggctgttcctggttctttgcatttacatataaattttaggatcagctgtcaaatttgacccactcccttctaaaaaattattgggattttgattgagagtgtattgaatctatagattattggggagaatcaacattcttacatgaattttctaattcatgaacatggtatagcattccatttctttagggtcttaatttttcccaataatattttatggttttctgtgtcrgtcttgatcatctttattagatttatttctagacatctgacatttcttccatgtaattgttagtagtgtcatttttaaaaatttactttctgtttacagagacttagcattgatttttatatattgactttgtagccagcattctaataacatatagatattttaggtctttacatataccattcgcaaatgatgacagttg

SEQ ID NO: 328044 - DNA, 521 bp, Homo sapiens
taaaccaacctatgcaggccgtctgcaatagaatgttttttccttcgtctttgagtcaggagaagaatttgttatttcaaaggactataggaaatatgagatttatatccatcatggggaactctccttattcaagattttaactacaaatgattaatattctggaatttctatttcttggagtaaatctaatttacaggaaatcatttrgtgattccttggcttatttcccattttaaataactattctgtattttgtccatttttctaaatactgcaagggtaagttgtacatatttagttagtcaaaagaataaaaaacttaaaaacaaaatatctccaatcttgcaaaacttttgacagctaatttattcgtatccacaccaactggattaaaaataatttatcagtagatgtcttcttagcaaaggtgacaggtgagccttgactgctaaagatcctaggtgcaaacctctgaaaagagagtatgttttcaccaaaggaatattctgggttaatta

SEQ ID NO: 328045 - DNA, 606 bp, Homo sapiens
ggagcatgctatctgctttctctttcaacatacacacacacgtgcgcgcacacccacacacacacacacacagcccttgtctttccagatgatccttaactggaaagagaaatatcagaaaatttccttggctaacattatactatactgatgcagtctcaagttgatgtggaaaggagagaatagaaaacaggggcaagaaaagattggatgaccagttgtttaatgctcaattttttggccttcaattgtttaaagcttaatttttattttggccatctccaacagaatagtcttgggtatggctaaaattgaacagaaattatttttagagaaaattaatttttagaaaaagaaaagaggtgaggaagactcccaattagcacaggctgttctttctctttcagagagaatccactacgaaatagctaccttgttaggcaactggtaaagagtgttgcaaaacaaaaatgtggaaagtgtcaagaatctgccagccctttgttggacaagctatgctatcactatttaaaaaaatcaaattatactagtggracaatttgaagagtgggtaacattaattgaatgaattcttaatctctaata

SEQ ID NO: 328046 - DNA, 461 bp, Homo sapiens
ctgagtggaaaattatggccctgctgggctccagatcttaagacgggaaaatgttggaaattcctcctggtcaccatctaccctaacgtcccgcccccgcactcacggctttgaatatktaaacaatttcaatttcctctactaacagttgatttacccacagaatgaatcgaagggtactcaacaaatgggaggactcgggcagctttcctgggatatcacaccatatagactgagaatttcagaaacgcaaagtgcgcgtcccagcagggcgagaatggcgttaactatgtcaccaccgcccaaattccctataatttaccacttatcgttcctggctttattctccgtgcgtgcagggacatgtaattctctaggagacggtggtccggacttggttcccgactccctcgtggctgcaaacaggggcagctgatttgggtggatgcagaggttgtggc

SEQ ID NO: 328047 - DNA, 524 bp, Homo sapiens
catttatattgtaaatatagacactcacataaaatgctatattcaaaattatatatatatgtatatatcttcagacacaggtatgtttacctctttttacaagtagcacctatacatattgtcttgcatcatgcttttttcacttaagagtatatctttgagagattagtagtcttatatatgcaagtcttataaataatagtcttatatatgtttctggaaggatacatgaaagctaataagagtgtcctaytgatggcagtaggtaattagtggcaaaactttgctatacaacttttcatattttttgaatcatgtgaatgtagtacttattttcgaaatgaaaataattgaataaactgaataaaattatgtgtattcctttttttctctcaaaagatcagccaagatggaagttacaaatggaaactacataatactgacattcttctttcctttctcaggaggaaatgctttagtactaactagaaatgttctatggaatgtatttgtaagttttgcta

SEQ ID NO: 328048 - DNA, 530 bp, Homo sapiens
tttggatattatagttatttttgcccacgtctcattttctgtacacagctataaaaattttgtaggcaagaccttcagtgactgattaaactttacatgccccagcacataccacataggcttaggtgtgcaagtaacagaggtgaattctgttgggattaaaggttaatgtaggagaagcagagacaaataacactgaaaaactaggtactgtctagtgcctgccattagtgaggcagtttccaagtgccaattccaatattcattatgtctttcctaagcaacaagaacatttattggaaawccccaccactaccatcaccatcaccaccagatgtctaccaatgacatgtataaataaaaacgttatgtgacctcacatctgttagaatagcatatatgtatatatgagagagagagagagaattgtacacacacttgttactttcatatatattatatatatgctattctaacagatatgatgtctatatctatgtatctatctatgtatctatctatgtatctat

SEQ ID NO: 328049 - DNA, 635 bp, Homo sapiens
taggcttaggtgtgcaagtaacagaggtgaattctgttgggattaaaggttaatgtaggagaagcagagacaaataacactgaaaaactaggtactgtctagtgcctgccattagtgaggcagtttccaagtgccaattccaatattcattatgtctttcctaagcaacaagaacatttattggaaatccccaccactaccatcaccatcaccaccagatgtctaccaatgacatgtataaataaaaacgttatgtgacctcacatctgttagaatagcatatatgtatatatgagagagagagagagaattgtacacacacttgttactttcatatatattatatatatgctattctaacagatatgatgtctatatctatgtatctatctatgtatctatctatgtatctatgtatctatstatctatctatctatctatctatctatctatctatctatctatctagatatatacacatacacatatatacctatatatgaaaataacaagtgttggtgagaatgtagggaaattggaattcttgtgcattgttggtgggaatgtaaaatggtgcagccactataaaaaacagtatggtggttcctaaaaaactttcatgtagaatcaccgt

SEQ ID NO: 328050 - DNA, 551 bp, Homo sapiens
taaaatttgcatttagtcactagaaacagtgcaagccaggaaatagtggaacaacatctttggagtattaaaagttaacaaaaaattctggaattctaaactaggggtagttcagaaatacttaccaaaaacaaagacttttgaacatacaaaagctaaaagaatccatcaccagcaaacctgcatttctatgacattaaagaaagtcttcaggaggaggaaattagtccaccaagyatcagatggaaatcagaatctacatataaaagtatgaggcacacctgtaaatatagcaaatatttttcttatttttagtcaattcaaaataagtggccatctaaaaccaaaatagtaacaatgtgttgtgaggtttataacatatgtagaagcaaaatgtatgagaacaatagacaaaggcccagaggggagaaatgaaagtatactggtataaggttcttgtactacatgtgaagtagaataatatcacttgaaggtagactgtgattaatgaaagatatattctgtaacccttaaagcaaccactaatataa

SEQ ID NO: 328051 - DNA, 575 bp, Homo sapiens
aaaaaaaaaaaaaaagctagcttgtagcatctattggtctagacgtagaagaggacacatttaataaaatgttcatttcatagaggaaataaattgggttcttttctctcataaatgaatatttctttaaatggtaagtgttggagcttagttaagatttctgacttttctgttgtgtatttgtagcttgcttttggtcaacagcagatctttctggcatattgacgttagccaatcagaacacaagaactgaacacaagagggaagacctctttgtgtaaytgaccagtgactgagcaaagaaaaaggttaataggaacttacatttaccaggcgggtggatgttttgtaaatcaacagttttgattttgtgggccttaaagtgtttaattctcccattgctatgattcagctgcaaccttggctttaatgcttttgaaataaatgaaaaatgtcattttatcttattatttatcttaagggaatagttacaacttctgcctcctagctggtgcacgttcctaccttaattgttgactgtgggggtcagttccatctgggcagagctgtgtgtc

SEQ ID NO: 328052 - DNA, 575 bp, Homo sapiens
aaaaaaaaaaaaaaagctagcttgtagcatctattggtctagacgtagaagaggacacatttaataaaatgttcatttcatagaggaaataaattgggttcttttctctcataaatgaatatttctttaaatggtaagtgttggagcttagttaagatttctgacttttctgttgtgtatttgtagcttgcttttggtcaacagcagatctttctggcatattgacgttagccaatcagaacacaagaactgaacacaagagggaagacctctttgtgtaattgaccagtgacygagcaaagaaaaaggttaataggaacttacatttaccaggcgggtggatgttttgtaaatcaacagttttgattttgtgggccttaaagtgtttaattctcccattgctatgattcagctgcaaccttggctttaatgcttttgaaataaatgaaaaatgtcattttatcttattatttatcttaagggaatagttacaacttctgcctcctagctggtgcacgttcctaccttaattgttgactgtgggggtcagttccatctgggcagagctgtgtgtc

SEQ ID NO: 328053 - DNA, 585 bp, Homo sapiens
aataatccattttacaatctgcctttgccgcttgatcaaaaaaggcaagaaaagccttcttgctttctcatttataactttactgatgatccaggggtgtaaaaacctctgagtcaccaagcaaagttagggacattagtgtaggcactgagaaaggaaatgatcctgatgactgggtagcaatttctttctcatgtcaggtggttttcaattcttagcttttaaacgaagactgaatctagttgtcacctcatatattgttaaaaataattttggataatagatcattatgtgattttttgttttacaaataactcagacggatgaacacaattgggaactctattacagcaaacctctttctattccatctacttattcagcactttgcttaaatacttggagaaagttattatrtgccagggacaggtttaagccctttacaagcattaacccatttaatactcacaagaaccccataaggtaagttttattatcatcccctgttttacagatgaaaaagaaagctcagaaaggttaactgtttgtccaaggtcagagaggtaggaaatgacaagagctggg

SEQ ID NO: 328054 - DNA, 575 bp, Homo sapiens
aaaaaaaaaaaaaaagctagcttgtagcatctattggtctagacgtagaagaggacacatttaataaaatgttcatttcatagaggaaataaattgggttcttttctctcataaatgaatatttctttaaatggtaagtgttggagcttagttaagatttctgacttttctgttgtgtatttgtagcttgcttttggtcaacagcagatctttctggcatattgacgttagccaatcagaacacaagaactgaacacaagagggaagacctctttgtgtaattgaccagtgactgagcaaagaaaaaggttaataggaacttacatttaccaggcgggtggatgttttgtaaatcaacagttttgattttgtgggccttaaagtgtttaattctcccattgctatgattcagctgcaaccttggctttaatgcttttgaaataaatgaaaaatgtcattttatcttattatttatcttaagggaatagttacaacttctgcctcctagctggtgcacgttcctaccttaattgttgactrtgggggtcagttccatctgggcagagctgtgtgtc

SEQ ID NO: 328055 - DNA, 575 bp, Homo sapiens
tttagaggatgtacatcctcttattgttctatgagtgatatagtgttagtccattttcacattactataaagaaacttcataaaggaaagaggtttaattgactcacagttctacatggttggggaggcctctggaaatttataatcattgcagaaaaygaaggggaagcaaagactctctttacctggcggcaggagagaaaagagtgaggagccaagcggaaagagtcccttataaaaccatcagatctcgtgagaactcactcactaccaggagaacagcatggaggaaccactcccgtgatccagtatcctcccaccaggtctctccctagacgagtggggattatgaggattacaaaaatttgggtggggagacagccaaaccatatcagatatgttagtctttcttttaaaaagtcttagttttattcctgaatgacagtttatatcggtataaatgtgtatgttgacagcgcttttctaccctcaacactttgaaattatgtctccatagtgcctattgtttctgaagagtctaaaagttccttctaaaaagaagcctctgccaatct

SEQ ID NO: 328056 - DNA, 626 bp, Homo sapiens
aattctcctgcctcagcctcgcgagtagctgggactacaggcgtgtgccacgaggcccataaatttttgtatttttagtggagacagggtttcaccatgttggccaggatggtctcaatctcttgacctcatgatcctcctgcctcggcctcccaaagtgctgggattacaggtgcgagccactgcccctggcctctttttgatccaggtggagacttacagcaaaatctcccttttcttgaagtatcacgagtgactctctgtttattgtgattcaaaagacgtcacaccacaacatcatcttatctagagttcatgtaaaaaggctaaggactgccaacttacattaggcaatggaacttgataatttgatattcaggttactgacattgatccttttgataatgaaatttgagcagatttggagttagcagygttgtaaagcattatgtgcatgttggcctgctttcgtggagccagaagtttgtatctctccctcaaccatgctgatgtaggcactctcggcagctggctatggactcagctacagaggacacactcaccagcagacaacagacaaacctgtgttgctcagaggtgactggaccattccagtctagggtctc

SEQ ID NO: 328057 - DNA, 598 bp, Homo sapiens
tgcttttctgcttcatttttcccctcattattgtttatcactacgtaactatacattttacttaccttgtttgtcggcttcctcactagaacatatgtcccacagggtcagacatttttctctgttttgttcacaactttattcgagcasctagaacaggaccactcatgtagtatttgttgaaaatttgaagaaattgattttattaattgaatatatttgagtaaccaaacatattgccatccaatatttttaaaggtatttggggagaaatatggcagaaatctagtttaaacttatgccagacctgggaaagataccatgcagtagtaaccttacccattatactcaagaatgagatctccaagaatagcgttttcttcgttgcaggccactggccagcatccagccagacgcctcattgccaatgaaaagccagcttcatgaccctaaggataagaaaaccagtgctcacaactaccaagcgaggcatcacagacagggtggaatcacttcttaccgattgataacatcacagtgatgggataatatctcggggcagtgaggaaaggtgccgtgttatggtcttggttatagt

SEQ ID NO: 328058 - DNA, 605 bp, Homo sapiens
ttaaatattagctcttgctcctgctaattagagactataaaggcagaaaagaactacaataatgttggaagatgcttgctttcatgttttcagagatgaacatccaatatgttctacttaaaatataagatattaggaatccaaggtttccatttcaaaagccaattagaagtggtaagagattttaatttgggaggtaacacaaggctcattctaggattaccctaatgaacatctcgttacttttgctttgaatgtgctgttgcagaaagagcttggagaaagtgctggacaagctgtgaagataaagtgtaagtataaaaattttccatacataacacacacacacacacacaatctgaagaattgaattttctrtctgctcggaacagttacctctttgtgctacccctaaatttgctgaaatgtttcccttaatggtggtgcatttgaaaaggagatttaaaaacatgtaatttttgtcttcatgaacatgacagagccagtcatgtactggaggccacagggagagtccaggggcctttgtggctgggatgaaatcctgaaggccccaattcctgctgagaatccatcagtgccaaagg

SEQ ID NO: 328059 - DNA, 605 bp, Homo sapiens
ttaaatattagctcttgctcctgctaattagagactataaaggcagaaaagaactacaataatgttggaagatgcttgctttcatgttttcagagatgaacatccaatatgttctacttaaaatataagatattaggaatccaaggtttccatttcaaaagccaattagaagtggtaagagattttaatttgggaggtaacacaaggctcattctaggattaccctaatgaacatctcgttacttttgctttgaatgtgctgttgcagaaagagcttggagaaagtgctggacaagctgtgaagataaagtgtaagtataaaaattttccatacataacacacacacacacacacaatctgaagaattgaattttctgtctgctcrgaacagttacctctttgtgctacccctaaatttgctgaaatgtttcccttaatggtggtgcatttgaaaaggagatttaaaaacatgtaatttttgtcttcatgaacatgacagagccagtcatgtactggaggccacagggagagtccaggggcctttgtggctgggatgaaatcctgaaggccccaattcctgctgagaatccatcagtgccaaagg

SEQ ID NO: 328060 - DNA, 605 bp, Homo sapiens
ttaaatattagctcttgctcctgctaattagagactataaaggcagaaaagaactacaataatgttggaagatgcttgctttcatgttttcagagatgaacatccaatatgttctacttaaaatataagatattaggaatccaaggtttccatttcaaaagccaattagaagtggtaagagattttaatttgggaggtaacacaaggctcattctaggattaccctaatgaacatctcgttacttttgctttgaatgtgctgttgcagaaagagcttggagaaagtgctggacaagctgtgaagataaagtgtaagtataaaaattttccatacataacacacacacacacacacaatctgaagaattgaattttctgtctgctcggaacagttacctctttgtgctacccctaaatttgctgaaatgtttcccttaatggtggtgcatttgaaaaggagattwaaaaacatgtaatttttgtcttcatgaacatgacagagccagtcatgtactggaggccacagggagagtccaggggcctttgtggctgggatgaaatcctgaaggccccaattcctgctgagaatccatcagtgccaaagg

SEQ ID NO: 328061 - DNA, 605 bp, Homo sapiens
ttaaatattagctcttgctcctgctaattagagactataaaggcagaaaagaactacaataatgttggaagatgcttgctttcatgttttcagagatgaacatccaatatgttctacttaaaatataagatattaggaatccaaggtttccatttcaaaagccaattagaagtggtaagagattttaatttgggaggtaacacaaggctcattctaggattaccctaatgaacatctcgttacttttgctttgaatgtgctgttgcagaaagagcttggagaaagtgctggacaagctgtgaagataaagtgtaagtataaaaattttccatacataacacacacacacacacacaatctgaagaattgaattttctgtctgctcggaacagttacctctttgtgctacccctaaatttgctgaaatgtttcccttaatggtggtgcatttgaaaaggagatttaaaaacatgtaatttttgtcttcatgaacatgacagagccagtcatrtactggaggccacagggagagtccaggggcctttgtggctgggatgaaatcctgaaggccccaattcctgctgagaatccatcagtgccaaagg

SEQ ID NO: 328062 - DNA, 566 bp, Homo sapiens
ctcacagaataatatgtcttgaagaagtgttaagacgacacatctccctggtaacctttttctcagtctaaaacagttgagaatatcagtaattgtttcatatagtaagtatttrtataaacatttctattgccaagcatccaattcagttcccatgcatcaaacaattcaatgcgtcttttttaggacctactatgggcaaagcacattgctaatcagtgagcaaataaggcccctgaccttgaggagagcaaaagggctttttagataaataatctaaggagagagaagaggagtaagtcatgagtgcataaagacatagaaaagtttgatcaaattgcacacaagttcagtttacatgtccctcacagctatattcatattttcccacactactaaatcgttggttgtatattgagaaataaactgctagtttccaacccaatatccaccttccccttctctctacattactggagtcaaaaacatgcctcgcagggaaaaaccttaaattttccgacctcctttacatttaagggtggcagatgtgatggaagcaaaagtca

SEQ ID NO: 328063 - DNA, 566 bp, Homo sapiens
ctcacagaataatatgtcttgaagaagtgttaagacgacacatctccctggtaacctttttctcagtctaaaacagttgagaatatcagtaattgtttcatatagtaagtatttgtataaacatttctattgccaagcatccaattcagttcccatgcatcaaacaattcaatgcgtcttttttaggacctactatgggcaaagyacattgctaatcagtgagcaaataaggcccctgaccttgaggagagcaaaagggctttttagataaataatctaaggagagagaagaggagtaagtcatgagtgcataaagacatagaaaagtttgatcaaattgcacacaagttcagtttacatgtccctcacagctatattcatattttcccacactactaaatcgttggttgtatattgagaaataaactgctagtttccaacccaatatccaccttccccttctctctacattactggagtcaaaaacatgcctcgcagggaaaaaccttaaattttccgacctcctttacatttaagggtggcagatgtgatggaagcaaaagtca

SEQ ID NO: 328064 - DNA, 566 bp, Homo sapiens
ctcacagaataatatgtcttgaagaagtgttaagacgacacatctccctggtaacctttttctcagtctaaaacagttgagaatatcagtaattgtttcatatagtaagtatttgtataaacatttctattgccaagcatccaattcagttcccatgcatcaaacaattcaatgcgtcttttttaggacctactatgggcaaagcacattgctaatcagtgagcaaataaggcccctgaccttgaggagarcaaaagggctttttagataaataatctaaggagagagaagaggagtaagtcatgagtgcataaagacatagaaaagtttgatcaaattgcacacaagttcagtttacatgtccctcacagctatattcatattttcccacactactaaatcgttggttgtatattgagaaataaactgctagtttccaacccaatatccaccttccccttctctctacattactggagtcaaaaacatgcctcgcagggaaaaaccttaaattttccgacctcctttacatttaagggtggcagatgtgatggaagcaaaagtca

SEQ ID NO: 328065 - DNA, 611 bp, Homo sapiens
tttgctcttgcttaagacttatttagaaacacctacgcttccttttctgtatcatgttcattgggcacaaagtgcgatctgttttatccactagtaaggagttgcacagcaactatattttaaaggtgcatgtctccttttggataatgcaaagataatacttgaatayaaaaagttaaagagttttgaatccacttggatagtttctccactgatgggaaacctgcacctctgtttacggttactttggaaatctggaaggtatgtgtttaacaaaatggatttttcacataagtggaaatgtcattatttattcaggctcaccaccttctcattggttcatggaatcttaaaattgttctcacacgtttttagatgttatccattctggataggaaatataagctgaaattcagccacgatgtatgcagaatatggctggttattttccaattatctactcttccctttctctattttaatagagctcctgaattttacatgaccacccagaataaagattatacatttcaagtctctattgcagttatgtgtggccacatgactaaattgtggtgaaaagggtttgattggaaatgataatttcaact

SEQ ID NO: 328066 - DNA, 595 bp, Homo sapiens
ccaaagaagactgattttgctccagcattaatacaaactagttctgtggtcgagtaccagataaaagctgtggttgtaccaaagaatactagcaggtagaattgaattcatgaatgttccgagtacgtatgaaatgagttcacattataactaatactagtctaagcttctttctagccagatatgtagattctaaaggggggtcttccagtggtaatggaggggagctttrtgcactaggtatcaagggtcctaagaacacagaaatgagactgctgagaacatatgttcctgattcaggagcaaagaatgcatttgcttattatggaatatgagtggggtaatgtgtaagaatttgcaagccacaacacaggattaatgtcaactttacttataatttcctaaaacaaattatatgtgttttgagttcctattccaaaaagctggcaataaattcaatctttgttatcactgagtttgctacacagactctaagatctgctacacagactctgagatccccagagccaagcccagtgcctgtttcctgttcatgaagttcattgcctgtatgctcactgttcaagtcaacagg

SEQ ID NO: 328067 - DNA, 616 bp, Homo sapiens
cctaaatgtaaagtataaaattataaagctctcagaagacaatgtaggagactttgatgacrtcagatatggcaataactttttatatattgtaccgaaggcacaattcatgaaagaaatgattaataagctagacctcactaaaattaaaaacttctgctccgcaaaagacaatgttaagagactaagaagacaagccacagactggaaggaatatctgcaaaagacacatctggtaagactgttaaccaaaaaacacaaaagactcattaaattcaacaataagaaagaaaagaaacaacacaattaaaaatgggccaaagaccttaagagacacctcattaaggaaaatatacagatgctaaatagcatctcaaaagatgatttacaccccatgtcaccagggaaatgcaaattataacagcaataaaataccactacacacctattcaaatgtcaaaaatatagaacactgacaacaacaaaggctggtgaggatatggatcaacaggagctctccttcattgctagtgggaatataaaatggtacagctactttggatagcgttctggtggtttctaacaaaattaagtatacggttactagacaatcaat

SEQ ID NO: 328068 - DNA, 519 bp, Homo sapiens
atgcacacaacgcaagaacaaattgggaagactgacactacccaacctcaaagcttactatgaagctaaagtaatcaagacagtttagtactggctaaagactagacaaataaatcaatgggaaagaatagagtccagaaataggcccatataaatatagtcaactgattttgacaaaggagtaaaggcaatacaatggagcaaagagtaattttcaacaaatggtgctgaaacaattggacatccacatgcagaaagaaaaaaaaatgaatctagacacagaccttacaccctttacaaaaattaactctaaatgcatcatagacctaaatgtaaagtataaaattataaagctctcagaagacaatgtaggagactttgatgacgtcagrtatggcaataactttttatatattgtaccgaaggcacaattcatgaaagaaatgattaataagctagacctcactaaaattaaaaacttctgctccgcaaaagacaatgttaagagactaagaagac

SEQ ID NO: 328069 - DNA, 580 bp, Homo sapiens
tataaaattataaagctctcagaagacaatgtaggagactttgatgacgtcagatatggcaataactttttatatattgtaccgaaggcacaattcatgaaagaaatgattaataagctagacctcactaaaattaaaaacttctgctccgcaaaagacaatgttaagagactaagaagacaagccacagactggaaggaatatctgcaaaagacacatctggtaagactgttaaccaaaaaacacaaaagactcattaaattcaacaataagaaagaaaagaaacaacacaattaaaaatgggccaaagaccttaagagacacctcattaargaaaatatacagatgctaaatagcatctcaaaagatgatttacaccccatgtcaccagggaaatgcaaattataacagcaataaaataccactacacacctattcaaatgtcaaaaatatagaacactgacaacaacaaaggctggtgaggatatggatcaacaggagctctccttcattgctagtgggaatataaaatggtacagctactttggatagcgttctggtggtttctaacaaaattaag

SEQ ID NO: 328070 - DNA, 607 bp, Homo sapiens
aattgtaacaaacataccactctcataggggatgttaataatgtggaagttgatgaacctgtagaggacagaaggtatatgggaagtctctatacctaccactcaattttctgtgaccctgaaacttctctaaaaatagtctattaaaaatgcatggaatgtaataccttatttatagatatgcaatgttgtagtaatccttttttttttattttctatatttctgatgctatgacacratgggggctctgctgaccccgaagaaactggccctcctagggctagctagttgctagagacagtaaaagactttcctgtgagtgtacttttcctttgcaaaccaaccaatccagagcccagaccccccaccgtcacctcctttatatggcccccatagggctctttcactcagggccaccattcccctgccctaatcaccccagggcctaccagacaactagagaaaacccctatacccttgagccagctgaaattattcaaattagtcaatgttaaacctattcaccctgcctcacctgtttctttctgcagaacccacaataaagactttgcccgtgttttcccctagctctctctgacttctgac

SEQ ID NO: 328071 - DNA, 544 bp, Homo sapiens
actaaaattaatatgaaaccacaaaagaccccaaatagccaaagacatcttgaacgaaaagaacaaaactggaggcctcacactacctgacaacaaatcagctggtactgcataaaaacaatggaacagaatagagagcccaaatatcaatccacacacttacagccaacccattttggaagaaaatacaataaggagagagtagcctcttctataaatgatgctgagaaaactggataaccatatgcaaaagaataaaactagactctatgtctcaccatatagaaaaatcaaatcaaaatgaatcaatatttacatcttaactcagtcttgattttctttaattgccctctacaygcaatgattcatgtcaaaagacaacagcggcaattctttatgaaaaccctaagcagttaatgcccttgatagaagtgaagagacctaatgtataaagaataagagaaagaagtaattatgactaaacagaggttcaagttcaaggaaaggataactttggtattttgaataggagagggataagaaa

SEQ ID NO: 328072 - DNA, 565 bp, Homo sapiens
atgtgcatgccagaaagtagaaaataaggcctataaaaattcaggagaatattatattctgaagatctaatagtccaaggactgtcagtatatcctcttcttagtaaaagacaagttgctatatattgtactgagagcacacacacacaaacacacacacacacaaaagtgcaattcttggtaagtttctctgtgtttgggaagcaacataaaccatatatgtgaacctgtacagatttctagtttttttgtgtgcaagcttgcaaattcaccaccccttcctgcaatgactgaasataagtcccctccgaagctcatgttgaaattgaatctctaatgtggcagtatggagaggtggagcctttaaaatgctattaggtccattaatccattaacccattcttataaagtccccagtcccacttccatgataacccattaattcaagaattaagtagttcatgggaactttagaagaagaagaaagacctgagtgaccatgcttatccccctcacccctcacatgattccctgtgccacctcaggatgctgcagaaagttctca

SEQ ID NO: 328073 - DNA, 559 bp, Homo sapiens
ttctcctttcttcttggatgcatgatttctaaataaaagtctggtgttccttgtttttctacaggtatggtttcttgttgttttgttttttgtttgtttttgcaatttgaatatgatgtggccaggtgtcatttttttggtgtttatagcttcacattatctgagattccctgtgttatagtttggtgtctgtcactaattttggaaagttctgtgcctttatatttcaaagatttttatgcctcattctttctctcttctctctctgataatccaatgatatgtaggttatactttcagaaattgtcctacagttcttggatttttctcttctgtttaattattactattctgtttttctttgtattttaatttggaaaagttctactgatatatattcaagctcactaattcatttyttggccatgtttggtcaactgattagtccaccaaaggcatttttctagttgtagcattttcttaacattcttagagttctcatttatctgctttcattcccatttgtttttgtacattgtatatttgttattaaagcctt

SEQ ID NO: 328074 - DNA, 468 bp, Homo sapiens
tttatgcctcattctttctctcttctctctctgataatccaatgatatgtaggttatactttcagaaattgtcctacagttcttggatttttctcttctgtttaattattactattctgtttttctttgtattttaatttggaaaagttctactgatatatattcaagctcactaattcatttcttggccatgtttggtcaactgattagtccaccaaaggcatttttctagttgtagcattttcttaacattcttagagttctcatttatctgctttcattcccatttgtttttgtacattgtatatttgttattaaagcctttaatatattagttataattattttaaattmcttatttaataattccaacatgtgtgtcatatttgagcctgaccagatgtttacttttcctcttcatatcttgtattgtcttccttttagcatgccatataatttttgttgaaa

SEQ ID NO: 328075 - DNA, 584 bp, Homo sapiens
gctatttatcagagccaacatctgccccctccttgttccccaccacagtctaggtttgtgggaagatggttacctgagttggcacacaaaattgaaaataaggagtaaagaggaaggaaacagaataaatgttgatagtagcattttcccatccccagatatcttttccttattttctgtctctgtatgacaaaggcattagaaagaaggaaatgtaccttccctaaggaaggtaggggatttatgaaattgtaattatttctggtcaactgatagagtttctggtaaaaaaaaaaaatgaaagagatgactcatatgacttatggtctttacgttctgtgatacttgagtcactgaagtagaactgaatgaattgatccatattagaaatggagtctttcctggaaaattcagctatatgactcctttacctctgacctgtatctgaaattgaaaacttaccacttctgtcttcgacctctcttttcttgctggaaaatatgctaaamaaataattacatcatggtaacaataggccaggaaatttccaagcatttggcaaattgtaaatcagtaactggtag

SEQ ID NO: 328076 - DNA, 587 bp, Homo sapiens
attcatagagcacttacctcatgctaggaagtatgataagtgatctatatgcataaaacagggatttcacatgacaacttcaactgggtaaatatgcttttcaccacgcccccaggaaagaaatagcaacattgtttttaaagatcctttgaggagaaattgcwtgggaaatgccaaggctgagtggagaaagtttgtaagcagcgaggccaaatattctgaacctgaaagacggggagataccccaaacctgggaaggggtgggggttttgactggttttgcaggtagtgaagatccacacctaattcagtttctgctctctcagaagatacaaggccttggagtgaatggctgtgtgctgtgctaggggcactaaaagctgaacctcccagtcttagcaaaggcccctacacccaagcttgacacagaactagcagagcctctgctattagagttgaactataagcatctaatagcaactaccatgggttgaggagttgagaattgttttccttcaagacacaatataagactcctagattctttggaaacaactatctgtggctagaggcaaagaacaaatatg

SEQ ID NO: 328077 - DNA, 529 bp, Homo sapiens
gtgaggcagccacatgtgactccacagggagcagccaggagaatgaattcctcaacctaactgtactccctgtctctcatcccccctatagacagagcctaaccagaagccagagaacatgggaactcaatgatgcatcctgtatgtcagcctcctgggcgcagagcaggattgtaaagcttgaggaagctggaagatggctcaggagagacagcagctctccatcacattcatagagcacttacctcatgctaggaagtatgataagtgatctatatgcataaaacagggatttcacatgacaacttcaactgggtaaatatgcttttcaccacgcccccaggaaagaaatagcaacattgtttttaaagatcctttgaggagaaattgcttgggaaatgccaaggctgagtggaraaagtttgtaagcagcgaggccaaatattctgaacctgaaagacggggagataccccaaacctgggaaggggtgggggttttgactggttttgcaggtagtgaagatccaca

SEQ ID NO: 328078 - DNA, 587 bp, Homo sapiens
attcatagagcacttacctcatgctaggaagtatgataagtgatctatatgcataaaacagggatttcacatgacaacttcaactgggtaaatatgcttttcaccacgcccccaggaaagaaatagcaacattgtttttaaagatcctttgaggagaaattgcttgggaaatgccaaggctgagtggagaaagtwtgtaagcagcgaggccaaatattctgaacctgaaagacggggagataccccaaacctgggaaggggtgggggttttgactggttttgcaggtagtgaagatccacacctaattcagtttctgctctctcagaagatacaaggccttggagtgaatggctgtgtgctgtgctaggggcactaaaagctgaacctcccagtcttagcaaaggcccctacacccaagcttgacacagaactagcagagcctctgctattagagttgaactataagcatctaatagcaactaccatgggttgaggagttgagaattgttttccttcaagacacaatataagactcctagattctttggaaacaactatctgtggctagaggcaaagaacaaatatg

SEQ ID NO: 328079 - DNA, 449 bp, Homo sapiens
cttggattaattatctcaattgatgccatattaagtctcacaattttccaagagtaaaatttggttaatcacccttgaaacttattttccataatccctcagagccaatcagccagtatcaagtctatgcyctctctgaaatgcacctgaaatcagatccttcttattctttccccactaccattatggctatccccttagtccatgcttctatttttctcctgcctgaccctggtaatagacccctctctgatctctctaccagtaatctccccacactaatttattatatatgctcctaccagagttatatttataaaagaatgttttgatgacatctgtctcttgcttaaaaatgcattcagtgacattcccctattcattaaaactcagttccttgtcagggcccgcaaggcctaaatgacctgattccaacttcccttaccagc

SEQ ID NO: 328080 - DNA, 504 bp, Homo sapiens
ggctgtactactttacatccccactagtagtatataaggatccccttttctccacatcattgccaacacttattatatttcattttttaataaaatccattctaacaggtgcagatgatattttgttgtggttttaatttgcattttcctaataattaggaatactgagcattttttaattaatctattggtcatttgtatgtcttcttttaagaaaygtctgttcaggtcctgtgctcattttttaagcgagttgctttcttgttcttgagttattaaaattccttatatattttggatattagctccttatcagctgtatggtttgcaaatattttttgtaatctgtgggtttcttcttcttctcaatcctttagagatttaaaaattattcatagctcatgagcaatacaaaaacaggccttgagttggatttggccagcaagacatagtttgacaattcctggtcttgaagaatgtgtttatcagaatagtacaaattga

SEQ ID NO: 328081 - DNA, 437 bp, Homo sapiens
ttttaaaacagtgatatacagaagaacacagacaacaaaatgatgtcaggaaaacaatgtatgaacaaaatgagaagttcaaaaatgatatcagagaataaaaaaaaaaacaaacagaaattctgaagctaagaaacacaataaactgaactgaacagaaaaattccacagagagctccaacagcatactcaatcaagcagaagaaagaacctgygagctaaaagacagctgctatagtttaaatgtctcctccaaaaatcaagttgaaatttaattgctattgcaaacattttcaagaggtaagaccattaaaaggtgattagatcatgagagatccacccttatgggtaggctggatactttttaaaaaaaagagtttttagcagtgggttccctctctttgtccttctgatcttttgccatgtaaggaacagtg

SEQ ID NO: 328082 - DNA, 544 bp, Homo sapiens
tgtcttgataattaaagtggatttcttgtagacaacatatagttacagataaaatatagttggattattttttcatccactcagacaatctgcatctttaattaatgcattttgaccacttacatttaaagtgatgattggtagagytggattaatgtttaacttatttgtaattgttttctaatggttgcatttattctttgtttctgtttatcatcttttaatgcctttactggttttaattaacaattttatataattctattttatcttctctcttagcacatcagttatcactttaaaaacatagtaattgccctggagtttgcaatgtgcattttttccagctgcattgatgtatattgacaaataaaaattttatgtactaatgacatacaacaaaatgttcagatatatgtataacattatgagatgattaccacaatcaagctaattaacatatccatcacttcacataattatcttttttattttgtggtgagaatatttctactttcttagcaaattttaagtgtagagtaca

SEQ ID NO: 328083 - DNA, 301 bp, Homo sapiens
caagggttttcttttctacacatcttcaccaacacttatcatcttttgtcttttgattaatagccattctaacctgtgtgaggtggtatcttattatggttttaatttgcatttccctgatgattagttatattgagcatgttttcatatactgtattagtctgttcttgcactgctataaagaaatacctgagactggrtaatttataaagaaaagagttttgattggcttacagttctgcaggctctgcaggaagcaaggcggcatcagcctctggggaggcctcagaaaaagcacaaa

SEQ ID NO: 328084 - DNA, 337 bp, Homo sapiens
tggcttgctgctggaatctttggatgagctgacttggtgcttgggtcagttggaaggtgggcctgtamctagttccacaagggtggccctaggactagggtctggatcctgaggccatggtagccaagtaggcctggatcctgaggccatggtagcttgctttgtaccaggtccacttgtcgagccagtcacctcaatccccacagacaggcctgaagtctggatccacagggtagtaggaagaggcctgacactatgtatgcaaggatcatcctgaagtctgtgtccgcaagagttaacctggcactaggatgtttgttgaacctgaagctgcaaa

SEQ ID NO: 328085 - DNA, 545 bp, Homo sapiens
gaaaaatctgacagttactgagaaaaaaagaaaaaaaaaacatgaaaatagccaaatctgtccaatcttgtatttatccattcaggctataaatggtgttattgttgaaaagaagttaaaatttcttcagagaaaaacttttttttggagaaaatggcattctttgctcactaaataaatgtgtgtaaaattaatttgattcccttctattaataaccagtaaaaatataatagtggattatcattcattcattcactctacaaatacttttaggtcccagcatgggctagatccagggtgcaacactgatgaaaacaggctccagcaaaaatgagatgtatttctgccctcaaagcaccgataatcttcataaattaaaattattatgaggaacacaaacaggcaattcacacaagaataacaaattgtstagaaatgtatataaaatactcatcctcactagtaatcaataaatgcaactttaaaattacagtaagatactgtttttcatcaaccaacttagaaaagactttctaataataat

SEQ ID NO: 328086 - DNA, 570 bp, Homo sapiens
taagacttggtgttcaatagatcagtaaggtgactgtagttaacactaatctattatacatttcaaaatagctagaagagaataatttaaatgtttctagcacaaagaaaagctaaatatttaatgtgatggatatcccaattaccctaatttgattatatgactgtatcaaattatcacatgtaccacaaaaatatgtacagctattwaatagcaatagaaaactaattaattaattaattttaaaaaggaaaagctacaacttgcatattgcaatttaagtaataaaacaagataatcattaaactaaaaaaataaaattacatggtgatgatggttgcagaactctgtaaataaaaaccattgaattctacactttaaaatggtgaatcttgtgatatgtaattaaacctcattaaagctcttatttaaaaaaaggtttgttgtgaagatcaaagatgataatctatgtaaaatgttggacacagtgcctattacatagtcagcactcaataaatattagctattaatattctagagtgactgaatttaggaagctttgtgtgactc

SEQ ID NO: 328087 - DNA, 518 bp, Homo sapiens
ttctcactagatgtaaatgaaagcagaggccagcgatgagaattccaacatcagacacatgtggggaggtcagaactgaaaagaaattctagaaccaaagagcaagaagttgaagagtttgagataaattgtgtcaataaacccagatgaaattctgtctgtttaaaatagcaccatgaatcaccctagcacatttaaagggtattggctcaaatcactgcttctatttgttagctgccaatttggtcaaaaacaatttgcctaaaaccaaactagtaaaaatgataaaacrtgactattcttctataattggttattcatatattattaatgtggaaataatgtggaaggtgtttagaattgtaatggtttgttttttcctttttcaggatttagaagatttttctccagttttttaaacttctgttttcaatttatgatgcattttcatcccattatgtttgcttttctgatttagcaatacttttatgattttgtaccaaattgctcaaaccgac

SEQ ID NO: 328088 - DNA, 529 bp, Homo sapiens
taaaaatttgtccatttcttctagatttttgagtttatgtgcataggcatgttcataatattctatgatggttttttgtatttctgtggggtcagtgatatatcccctttgtcatttctaattgtgtttatttgtatcttctctcttttcttcattagtctacctagcagtctatctattttactaattttttcaaaaaaaccagctcctggatttgttgatcttttgaatgtttttttatgtctctatctcccttagctcaacttcaattttggttatttcttgtcttctgctagctttggggttgatttgctcttggttctctagttttttcagttgtaatgttaarttgttaacttgagatctttctagctttttgatgtgagcatttagtgctataaatttccctcttaataggaaatttctcttaattgccttaactgtgtcccagagattctagtatgttgtatctttgttctcattggtttaaaagaacttcttaatttctgccttaatttctttttttacc

SEQ ID NO: 328089 - DNA, 649 bp, Homo sapiens
ttggtctctttacataatcccatatttctcggaggtatgttagttgattttcattcttttttttctctattcttgtctgtttgtcttatttcagaaggcaatcttcaaactctgagattatttcctccacttggtctatcctgctattaatacttgcaattgcattatgaaattcttatagtgtatttttcagctctattatcaggttgtttatattcttttctatatgggttattttgtctgtcagtttctgcactgttttatcatgatttttagcttcgttgcattgggtttcaatatatctttgtagctcaatgatcttcctttctatccatattctgaattctattgctctcatttcagccagttcatcccagtttccaaacccttgctggagaggtgatttgctggtttgcatgatagaagacaccccagctttttgagcttttggcattcttgyactgattctttctcatctttgtgggcttacctaccttcaatctttgagattgctgacctttggataagtttttttttttcttttatcctatatgatgaccttgagggtttgattgtggtgcaatgtggattcagtcaactggctttgtttctggaagatttttaggggttcaatactcagcttccagct

SEQ ID NO: 328090 - DNA, 577 bp, Homo sapiens
gtgccagggagctttttaaaatacatatttccagagcatttaaagtgcccctccccatcgctgtgattttgatgtgtctaataagtactaaagatcatgccatgtgctttgtatatgatattgtactgctgtaacaaacaggatagtgcagcaattaacagaccaggctctgaatccagacttcatttaaaagctgcttcatcacagattagctaagtaacctggagcaatttacttaagcacattgtgtcttcagttcctcagctataaaataaggacagtattagtgcctgcttcattcacttgtgccttctatgtagttagcattcatgatcgtggactatataatagccaattttaaawccttatggaaaactgatggcgattactattattttcatttgacatatgaaaaaactgaggtttaaagatgagaaataactttcctaagttcatctagtttgctaccaagctaagatttggtacattagcaataatggagaacatatgatataaaaaatgctgggggagtttggtcatggtggatttgaaatggtggtgaaacaattgagtagag

SEQ ID NO: 328091 - DNA, 643 bp, Homo sapiens
gcaacaaaattaagtaaggtcacaagaaattttctgaaacttctcatatgatgaatgttcctcagaataatgatgatcatgaagctagaaatgtactcaagttgattctcaattatatgcactaacagagaacagcaatggggtaaacaatccaaattgagagaatggtaaaaaaaataattttttgactttagaaatatcttctatgatttgtctccagagtatgtactttcataattttgaataatttctctccttaaaaactcttcaactgttcccatcaactataggataaagtccaataattcttaatgtgccccttgtgatctgtgacctctctgtttccataggtctttgtcctccagtcatactaaattatttgtggtttgttaaatctatgcagttttcaaatccagaagctaaagtgtggctgatatttcttatttctctttttccacttggcaagtttttactccccttccataataaattcaaactctcctctgtgaatatttgtcctccctgtagcctacttactgggagatactaatgagctctccactgtattctttcagaattatttycctacttctttcttggaactcacagcactatagaacaactgtctacatgtgtcagtttt

SEQ ID NO: 328092 - DNA, 441 bp, Homo sapiens
agtcacatctgaatttcatttcattttgataatgtctgtactcatttcactattattttatttgctattgttgacattttgcaatagtttgtaacaaatttaacaaccaaatttttaaagcttattaagatatatgtatacatatatacatacacaaacatatacatatataaatatgtgtaaatatagttaaaataataatatctaaaaataacttataaacttattcacctgaatctgtgttcatccaagcacctgctaaaaatgcaagaggacattgccatatacatgcattatcactgagaggtaagyagaaaaatgaaaggagtgtaatttcctacatatataccacagattccatctattataccaatattctcacaaaaaaattgtgccttattattcaggtgctggtgttttagaaagaaaagttatgtattt

SEQ ID NO: 328093 - DNA, 535 bp, Homo sapiens
aacaatatcatatgctgatgagaggtcaagtaagatgagaattggaatagtcctattgaattcaatgacatagatgtcattgatgtcctcagaagaagccctttcaggaaacggtgaggggagacaccagaatgctttgggttaaaaagatagtgagaagggataaaatctggagattgagtgcrgtgcagagatgagaagataatttctaggatccaaatcagaggtggatttattattgactttaggtaaaaagagagatacctcccatattgtaatccgagaaggaaagaagctttgtgcagatgtaggtagacttgcaggtttgatagctggacaatgagggaattcctgtctattgattttagttttcaaggaaaaagaacaatttatcctctagagattaagtagaaacatgtctgattgtgctagtggggtcctggtttttaagagaatgtaaagggcatttactagtcatggggagtgtaacatcagtttaggagaggttcatggaaggactacagtgcagagttga

SEQ ID NO: 328094 - DNA, 550 bp, Homo sapiens
ccgtatcttgccagaactacagcaatagactagtctctttggaagtgccttggtaatttattctacatagtatagacagggagatatgtgcaaaacacaaatctgatattcatgttaatttatatttaaaatccttaacagcttcttactgttaagacaaagaccaaaatctttaacatatataacatgattataaaatgtatcatccaaaccaagagacgtttgagattggcaggaagcactaccaatacttaagatgggaaagctattgtaaccccatactamcctgggcaaaatgagattgattgtaaacctatgtattagatcttactcggttaaatatcttaagtcttccatcatgtcacattatcctaagctgcttccatccagatacaatgggaaagctaatacaaccccatactatataaacctatgtattaactcttacatggttgaacatctttagtcttccatcacatcacattatcctaaccttccttctatctagataaccaattatttttgtttttcttctgagcctgcctccctc

SEQ ID NO: 328095 - DNA, 494 bp, Homo sapiens
tggaagtgccttggtaatttattctacatagtatagacagggagatatgtgcaaaacacaaatctgatattcatgttaatttatatttaaaatccttaacagcttcttactgttaagacaaagaccaaaatctttaacatatataacatgattataaaatgtatcatccaaaccaagagacgtttgagattggcaggaagcactaccaatacttaagatgggaaagctattgtaaccccatactaccctgggcaaaatgagattgattrtaaacctatgtattagatcttactcggttaaatatcttaagtcttccatcatgtcacattatcctaagctgcttccatccagatacaatgggaaagctaatacaaccccatactatataaacctatgtattaactcttacatggttgaacatctttagtcttccatcacatcacattatcctaaccttccttctatctagataaccaattatttttgtttttctt

SEQ ID NO: 328096 - DNA, 576 bp, Homo sapiens
cgcgggcggcgggttctctcggtggcgccgtatccagagcagcgcccgcgtscccaggcggtgatgtcgccgcggccgaggatcctctgtgccagctccggccgcgcagcccggggagggtgagagacggcgacgcgggccggcaagcgggggcggggcggaggcaggacggggcggggttgaaggcggggctgaaggcggggcctcagggaaggcgagagacagcgacgctggctggcgggcgtggggcgggacggagacaggacagggcggggtcagaggcggggcttcggggaggacgggaggagccgtgagcaggccggcggcgggcggggcggggccgaaagcaggtgaggcggggccaagcgccccgggtttctaagcggaggaagctctaggcgtttgtgttctgggcttgcagcggtggccgcgcgctcccggaggagtcgagctggaggaggggacagtttgggagtgcgagagtctaaagacgctgccaggctggcgttaaaaccttttggttatgggaagacgacaactatataatagagccatagtgggggctgtgggattgac

SEQ ID NO: 328097 - DNA, 649 bp, Homo sapiens
tgactcctgtaccctattcaaaactccttcaagtcatgagtagcactcaagtcccctttgtaagtactatatctgcttttgaaatgagttgaacctcgaacaattgggctgatacagagcctcgtctcctccactgaggtttattcccaaacaaggatcctcttctgacacaacttcctgtaaaatctggattgtgcctctacatggcccctgatagaggaagaggacccatggcctccaaccacatttatgagagagtagagttgggggaaacgggragctgactccagagattcctatctgtttgcagaggggagcctagaatttagggttagtaaacacagctactagatgtacagaacatttctcagaacaaagtgtggggcagggttatttctatggattcaaagtgtctcatgatgcgagggcaaggtgagtcagagagaattaatgcgcgaacatctgccaggcaaatattcttccaatgttgttttcagattttgaaatatcagtatgatcattttcactttagagaagaatgaattcaggtaccgacattgtggcctttcagctctgccccatgcatctgtgctgaagcagtggggatgcagctagcctcccagcattctcagatgggctttcagactaa

SEQ ID NO: 328098 - DNA, 593 bp, Homo sapiens
cattaaaataaaacaagagccacaactgaacaattcaaatcattggcagaaagggtggtaggtaaatggcactgtyaaaaatgaagagagtcttgttttctgtgaactaaaaatggatagctccaattattgctccttccacacatgaagatggtacaaagttagttaattataaataatgcatccgaccatagaagggatgagctatatgctatgttattgtacattaaaaacctttatgagtgtggcaagagacacatgtaccaacagctgctaaattcagaatcctggagcagtatcttattttaatgtaagtgaagaacagtgcagtctattgctctggggatttctctctatataaaaggatcttaaatctacatgagattttactccgtgatttcaaagtacttatgaaaatctgttttctttatttgcctatctttcaacctacccacaaccacctatcttacaacagaaacaatgctttctagagtagattctccagaacagaagcctttctcgcgctcctttccttcctttcttccttcctctctctctcttttatttttcttttaaaattttatttctcaaca

SEQ ID NO: 328099 - DNA, 581 bp, Homo sapiens
tatagcatctgtaactgtttagaaacagacaccaaacttaagctgcaaattttattgcccagttggccagcagtaataggccacaccaataataaagacaaaaccacaartttaaagcaggcagtagagtctggaaatactttttttttttccgcaattgctttgaatacaaaacatctcaaaatgacagggattttgcctgcagagttgctaatgaagatgtggctaagagtgtttcttgagtttgtttatccagctgcacaagagtcagtatgacagtaagtagatttattaaaacttaaaaataccaaagccaaattctgggggaaaaagtttccccataagtctactaaagccttgaattcataaatgagaagctttattgctaccatatttgcttacatacagtttagcttttgatatgaaagaaaaatttaaacaaagtaaaacttgcaaagggatcataagatgttttctccagggctcttccaccctccctttcccctggcctggtatccttacaccagtgtttctcaacaggacatttggcaatgtctggagaaatttcaatgttggtctcg

SEQ ID NO: 328100 - DNA, 459 bp, Homo sapiens
actcagaaacatgtatgtagctattttgcagaacgtttaatagtcttgcctttaaattatttattcacatgtgaggaagtgagatattagagtcaagcaataaaggcaaataagatttataaaacagaaaagagaaaaaaatgaatacaacctagaaacaatgaaagttgtattttggggggcaagttgattaaatggcagttagcagaggagtttgttgcccagaagtgagagtttagctgtagagcagaagtgacaggttcctctgtagagtgttggccactaacccrccatcagcacctgtatcttactcagatctagccagtatcatatttcctcagtaggcttccttgctggaaagccactaaaagtttcctttttccatccatgtgaggcagggagacttctccctctgctcctgagcatttacttccttctctttttctgagaatcaatttc

SEQ ID NO: 328101 - DNA, 540 bp, Homo sapiens
taattaacatagcagtgcagagatatatatcagtgtctctttgacatactgatatcatcacaaaaataataactataagtgatgcataggttaattagatttagtcaaactgtaatctacatatacttcaaaacatgatattttacatgatacttacaattttacctgtcaatttattttattttatttttctaatttttttttttttgagacaaagtctcacactgttgcccaggctggagagcaatggcacgatctcagctcactgcaacctctgcctcccaggttcaagtgattctctgcctcagcctccccagtggccaccacacttggctaatttttgtatttttaatagagacagggttttgccatgttggccaggctggtatcaaactcccgatctcaggtaatctgcctgcctcagcctcccaaagttctgagattacaggcgtgaaccactgtgcctggccttacctgycaattaaaataataataataataatgaaaataataataataataattggctagctacttaaa

SEQ ID NO: 328102 - DNA, 578 bp, Homo sapiens
ggtctccatttgttttattatgaatacttactatactagcttacaatctgccagctgctattctatgggctttacatattaaacttaacttttacaacaaccctatggaaggttctgttattataatccttttacatcttgaagggaatgaggcacagaaatattaagtaactggccagaagtcatgcaatgttagtacattgtagtggcaggatttgaacttaggaagtttggctccaaccaactggaaataatttcctgcttgtctttctttacctcagcaaacttttgcagagctcccaaggaatgcatggtgatatattttacaatggttagcccagttccatccctgatctcgaagagcacataattctaaagtaaattctaaagtaaaaaggctttctaaactcaccttaaacatagataacatgtttctttggaaacatacttagcaatttatagatcttagtataaagaaaaatgatgttattaacacatttrtaaatattcagataattatttttactcttcccttaagcattttgcataatttaaaacaagattttatttattccaaa

SEQ ID NO: 328103 - DNA, 610 bp, Homo sapiens
tgctgtataaatttaagaataactcaaccatgagtttcactggaagtcagaaaacatttagaagggttaatgaataaactacatatcaaaatgtgtggaatataagcaatagggtttaaaaaataaattaatagccttaaattagtatagtaaaaaataataataatttaaaaatgggaatgaaaaaaaattacctcctgacattgaggagctggcctgtcaccatcagccaggcccaatatcctcttgttgaacatgaacatttcacagaacaaagccactctgtcacctcagtgatcaagacaaaaaygacactactccataatcatgtttgaatacagaaaaagtataaacattttctaaaccacaaaatagtgcacattcatgtctcccggttaatataagcaatggctactttttcatcaattacagctttagcctctctgcattcatgtctccttctagataagatttattcagatacccaatcatagaactactcccacttcctaagagcagctaatccagagaaaagccacacttcttaaatctctctcactaaaagaagcaataaatccagcttactcctggtgggttttggcaggagtcc

SEQ ID NO: 328104 - DNA, 569 bp, Homo sapiens
gcaaattatatctaacaatgtataaaaagaattatacatcacaaccaagtacaattaactaatgcaacctatcacatcaacaggttaaaggtaataaatcacatgatcgtatcaatagatgcagaaaaaacatttcataaaattcaacacctattcatgataaaactctcagcacactagaaacagataaaacttttccattctgacataaaacaattataaaatacctgcaaataacaacatacctaatgacaaaaaactagagactttccagctaacataaagaataaggcaagaatatccttttaccatactttcaggcattctagaagtcctcgttaatgcaataagacatgaaaargaatttaaaattatacaaataaggaagaaagaaataaaatcatttttgctcacaaatgacataatcatctatgtggaaaatctgaaagagtgaacaaaaaaacttccaggagctaataggtgattaaaataaggttacaagatatgtggttaatatacaaaagtcaatcgtttttgtatataccagggatgaacaagtgtaatttgaa

SEQ ID NO: 328105 - DNA, 577 bp, Homo sapiens
gatttgacttgcattatagataaactgtgctacctaataagtcagtgtgaatatgaaactgtaagttaaaactatacttacaaaatatataaagtacactatggtgtacatatgtrttatctaccataaacttacaggttcaagttgtacttttattcaattattttctctcctgggttggagaatttccacacctttcctgtccccagcgtgtgcacacacacacacatgcacacacaccacaaacatacacactgcggctaacctgcttctataatctccttattataattgaattgtatattaatagaatattatttggatctagccagacaaaaattcacgtagacatttttatgcaatctgaatggttctgcctatttcaggtcttttgctggctgtgcaggtctcatggcactaaagtcatgttcatggaacatttatgtgcataacgtcttgcttacattaaatgatttaaacttcctaaattcagcaaggcattctgttttcaaaaagtaggagagtgcctcaaaaatctaaataacttatactaagtcataaagctggtgagtggcag

SEQ ID NO: 328106 - DNA, 596 bp, Homo sapiens
tgaattaactttgcactttgtcaaaaatgattcaccataagcatatgggcttatttctgcactctgtattctgttatrttgatttatatttctgctttcattgatgcaacactgtcttgattattgtagctttagagttagtattaaaattatatcattttaatccttcaaatttttactttttcaaaatttttttagtttctttgcctttccaaatgaattttaaatttcatgtgaatttctccaaaaaattcctgttgtgatttagttaaaattgcatcatattttcagatcaatttagggagaaatgacataataacattccattataaatggaaataactccatttacttaggtgttctctgatctctttcatcagtgttttataatttttagcattctgaccctgtacatatttttagatttatacttaataacttaatgagttttgatattgtaaatggtacttttaatacaaatttttaatcggctttgctgttatgtaaaaatggagttgaatatttgtagtagctttgtatcatgtgattttgctatactcaattattagttataacacctttttgtggattttgtg

SEQ ID NO: 328107 - DNA, 551 bp, Homo sapiens
atgcttgataatacagtataacataatatagtatcttataaaggcaatgtgaacaaaagctatgggaccrcaatggagagatggatttaagtggataatctgagatttcttaaaagaaaaatcatttatttggaactagatcaaaaaaatgaataagttattttctagtagaaaaagtgaggaatagcctttagtactcagaaagctatgttacagaaaaaaagacaaaggaaaaaatcttattcttttgaggaaaagcactgagcaatatagcttgagtgtagggtacatgtgtggggtgatgggagattaggaccaaattgctgtacttctgccaaattgtggagtttggtttttagtctacataaaaggcaaatgatttaaggtttctaataagggaaaagacatagtcaaatatgaaccaaatgaataagtacagcagcagcatgtataaaaacaaggcatgtgcaatgattaattttatgtatctacttgactgggtgcccagatatttggtcaaacattattacagatttgtctgtgaagtgttt

SEQ ID NO: 328108 - DNA, 564 bp, Homo sapiens
tttaaattcatgtctgctctagacctggagtttcatgaagtttgcctgttagggcagcaccttgaagttgccagtacttctaattcaattcaaattaatttaatttagtttaacttaatacacattttaaagcatttaatatacgccaaactttctgcttagcttggggaggtggacaattactgctcataatgggcagcaaagtaatggaggaggtaaacgaagcaaaacttacaaaaatatcataaataaatactatggcagccataaatacatgatcttmcactataggacttgctgacatagctacttatctcttaacagtcatgaccaatatggatttttatcttccagtctagagttgggtgacatttcaaaccccacaacacttgtacacattggtcttcaaggattttacagttaggttgaaaattgatatctaatgtgtttcaagcctatacacacacacatgtatatgcaattgcatatatatattgtacatgtatatgcaattaaacctcagaatgtgcttgtctatctatggagagaggccaagggcaccca

SEQ ID NO: 328109 - DNA, 569 bp, Homo sapiens
gatttaacataaaagtaaataaagtctaattgaataatattatagtatctcattggagcatataaaatatgatcttcagaaatattacattattgattgtgatgtcataatataaaaatgtcaactgttacaaaatgaatgtattaatttagtacacttagaagaagtatcctaaaggttttgttctcattgcatttgttcttatttttgttgttttgtcaattggacattagtttacagtgaatatgaaagaagatacatccaaaaatactcagaaaattatgaagaagattaatgaggttggatttgtcttacttgacattaaaaaataaacaatatggtctaacataccaagaacagacaatgaattagctagtaagagaagaaatagatgccatatgtttaggtgggtgtttgcgtgtttgtgtgtgtgcgtagtgtgtaggagagagagaggggaggcatttcattatatatctaacacaatattttattttatgaaactgcaaagccatcttaaakaaaataaatatgaatttctatttgtcttcttccagaagagtaaattc

SEQ ID NO: 328110 - DNA, 522 bp, Homo sapiens
aaaaccaaagttcagaaacatttcaaatagggatcttatttccttgtttaaaagcaacaatamatttttgcaaaatgtagtataatcctatatatcaagtttctcagtgacataatggatctcatttatcttccaggaatattacacttcttttgactgaatctgttgcttctacaaatgcctcttggagtgcaggtttgtcatctgttagttatcatctttcaaaattttattttagtcccatctctgttcactggtgagatattatttgttctacattcacagtgtctgttactcatctactaactactcatcctcccttctgccactatcctaattcaactgtcaagaactctgggaagctacagtagtctccccataattttccttagctctcatctttccgtgccttgagtacactctgagtgtacttctggagctaccagatcaattgactgccagatcaatttcctgaagaccagtacttattatatcacttctctatttgagaagagccaaaaa

SEQ ID NO: 328111 - DNA, 560 bp, Homo sapiens
tgtgtttccatcatacatacttagtcctttgctattcatgtggaacatattataaaatgaaagagactgtctttgatcttaaaaaagaacagcctggaaggaaaaaatgttaccaggcaattacttggtaaaaataagttatagttaagttgttgacttcccaagtgaaggcgttgtctaagaaacattccctaggggcttgaacttatttaccgaatgtgaacaatgggaaaaggtaagagcccacaatttatttccagctgaggttacaktaagatcatttgggatatagatatggatatatagttatatattcagcatatatatgcatgtaatgtatgtgtgtgtatatatatatatgaagtcacataattctatatgtacatgtcgttttaattatgtatatgtttgtttgtgtgtgtacaagctatatgcacactatatacacaaactaagtagatctggctgaagcataccatcaaagaagagctagatttgcagttgatactttcctgatcaactgtattttcaaatgtcatgcttttgcacagcatattact

SEQ ID NO: 328112 - DNA, 509 bp, Homo sapiens
tcacaactagaagcttatttttgagggctattgtccttcacttaagtctgtcctcaaatgtatgcataggtatttgttcgattttatttttaaataatatagaaaatgaaatatttatgaaatatctgatattaaataaaacatcaatgtatgaaatacytataaaatatatatatactgttgtactgaatgagttggatcttcagagtaaattcctagaatttggactgtagatgaaaaggttaacatatatctagtttttttgtgtgattttttgtttgtttgtttttgagatatttccagattccctcattaaggattttaccagtttgcattcctactaaatatgtaagaaagttattgtttcgacatactcttacaagcaaagtatattaatactcttgttagcagagtgtattattatgcatcttaatttttgctattctgataatatgatggtttttatgtgcatcttttgattatcagagaggctaaacatctttccatat

SEQ ID NO: 328113 - DNA, 603 bp, Homo sapiens
ctaatttatacaatataaaaaagggtggtgaaattcataaagtcttcaaattacaatcacttatattccgaagttacatacattgtggcttctttgcaatataaaatactctttataataattaatttaactcagtatctccacttccttttaatatttctcaaaattaatattctgtggaatatatactatcatcattgcactagatatttttcgtaggatgctggaaattcttaatcatttaattttttaattgtcatattgtattagtagagaaagtaaggtttagctggttagtgctctgtaaagacamcaatgttcacgtttgagcttgttgtgttcagaaaacatctcataaagcagcaaaaataaaaaaataaagtcataattattgactctcatgatttcaagaaagcatgtcggcatgtgggaaatgagaaagattaagttataaaagaaaagaccaatttaaggtgaggagacagttgaatgccaggagtttgcaaaaatggagttttcttggaatgagatcttagccttggccacattcatgctcactgtcttcactctccatcactgcctgtggaaatgcttgcaggctgt

SEQ ID NO: 328114 - DNA, 627 bp, Homo sapiens
aatggaattaaatggcaccaaaggcagattactctcctttatggagtgttaaaaaatgtattaatatttrcaagtatatatgtacacatttacgtgtaagtatgtgcatctacttattttactatcttaactaattacaagataaaatgagcaagaagaattttaaaaatatcctcattaacaatatttgtaaccgtaattttacatacatcagtaaccatgattttaattacattttttgtgatataccagatgttcaaacagcacaatttgtattaatttagaactttgtattgtaagaagtaaattttaagtgcttctttgacatctttaagccccactaggccccagaggccttgccatgagttttcctgctctcgtgagacatgtccttacacaacaagacagactctctacccagctcaatcaactgtatctcacctggtcctcaacaaaatgggtttcacttccttgccaccatataaaattatttaaataaacaaatttcattcttctaagagaatcaagggtcatttcaccctcttgttactacaaagcctgcctcccatagccctgatgattcattctgcatctgaatgaacttcgtggctctgcacggtatatagc

SEQ ID NO: 328115 - DNA, 434 bp, Homo sapiens
gattgcttgttaaaaatgcaaatgacttgtctttattccaggactattgatttagaatatctagaaatggaggttggaaatctgcattattaaaaagcaccccagaaaattatttttctcattaaagtgacactaacaatgacagtagtaattaccgtgattattcacaaaattgaatwgttgaagtagtgggggaagatgttcagagaattaaaaaaccttatgcaggcttttgtgtcaaaatcatttatgctaacatagaaacatgtttacaaatgaacttcgtaagggatagtcaaagaagccactgacagcaacaaagatttgagtcaacagaccatgccatgtctgttgtcaattacagaagccaaattaacatatttaacatatttttgatgtctcagatccctgccgcctaaaacttcctaccttag

SEQ ID NO: 328116 - DNA, 536 bp, Homo sapiens
tctagagtctggttcccagagatcttgacctgtgggccaccacctatatcaaaatcactggattgcttgttaaaaatgcaaatgacttgtctttattccaggactattgatttagaatatctagaaatggaggttggaaatctgcattattaaaaagcaccccagaaaattatttttctcattaaagtgacactaacaatgacagtagtaattaccgtgattattcacaaaattgaatagttgaagtagtgggggaagatgttcagagaattaaaaaaccttatgcaggcttttgtgtcaaaatcatttatgctaacatagaaacatgtttacaaatgaacttcrtaagggatagtcaaagaagccactgacagcaacaaagatttgagtcaacagaccatgccatgtctgttgtcaattacagaagccaaattaacatatttaacatatttttgatgtctcagatccctgccgcctaaaacttcctaccttagccactccttttctttgagcttctggaattgtaaacctgaatt

SEQ ID NO: 328117 - DNA, 585 bp, Homo sapiens
cccacccaaatctcatcttgaattgtaatcccataatccccacgtgtagtgagagggaccyagtgggaagtaattgaatcatgggcgtggtttccaccatgctcttctcctgatagtgagtgagttctcatgagatctgatggttctataagcatctggcatttcccttgatggcactcattctctctcctgctgccttgtgaagagctgccttctgccatgattgtaagtttcctgaggcctctccagccatgtggaactgtgagtcaattaaacctcttttctttataaattacccagtctcaggtatttcttcatagcagtagaagaaaggactcatacatgcagctattagggtaatgtttcaaaaagtatagatacaggtaaaacttaagtagctgtaattcatcaatgcttaatcaaactctagtttttcttaatgtgcttgctccataagtatttcaattctcaggaacaaaattgacaggttaaactgaagattgaacataagctactatctttgcttccttgtaaaacttcacttacatgagaataagtggataacagagatgtacttccataaaa

SEQ ID NO: 328118 - DNA, 585 bp, Homo sapiens
cccacccaaatctcatcttgaattgtaatcccataatccccacgtgtagtgagagggacctagtgggaagtaattgaatcatgggcgtggtttccaccatgctcttctcctgatagtgagtgagttctcatgagatctgatggttctataagcatctggcatttcccttgatggcactcattctctctcctgctgccttgtgaagagctgccttctgccatgattgtaagtttcctgaggcctctccagccatgtggaactgtgagtcaattaaacctcttttctttataaattacccagtctcaggtatttcttcatagcagtagaagaaaggactcatacatgcagctattagggtaatgtttcaaaaagtatagatacaggtaaaacttaagtagctgtaattcatcaatgcttaatcaaactctagtttttcttaatgtgcttgctccataagtatttcaattctcaggaacaaaattgacaggttaaactgaagattgaacataagctactatctttgcttccttstaaaacttcacttacatgagaataagtggataacagagatgtacttccataaaa

SEQ ID NO: 328119 - DNA, 549 bp, Homo sapiens
aagtgaggtataggcacattatctcttgaagtaaatatagcatgcattctgtatttgatgggaaaaaagcagaagtatttggatatacattaagagaaaagacrcttgtcattttcttttgaaagcacataaaattctctttatgtttttagattttgctttccaaagagtagttaatatgaaatatcaaaatagaaacttacgtttcataagccatatgagagatttcagtgctaatgggcagaaagagaagatttgagtttcaatgggcatttcagcagaaaaggacagtttgctgaccatttcagtatgagtgttagagaacatggctgtgtcagagaatgtaatattccttctagcaataaataacctcaggttatagtctatcttaaaactatgcttagttaaacagattataggctcacatatctgtttagttagcttcttctttttctgtttaatctcacagaagtgtgtattaatccttagcaactttctagaaagatcttagagtgggagtactttacacaatttccttttttattatcc

SEQ ID NO: 328120 - DNA, 549 bp, Homo sapiens
aagtgaggtataggcacattatctcttgaagtaaatatagcatgcattctgtatttgatgggaaaaaagcagaagtatttggatatacattaagagaaaagacacttgtcattttcttttgaaagcacataaaattctctttatgtttttagattttgctttccaaagagtagttaatatgaaatatcaaaatagaaacttacrtttcataagccatatgagagatttcagtgctaatgggcagaaagagaagatttgagtttcaatgggcatttcagcagaaaaggacagtttgctgaccatttcagtatgagtgttagagaacatggctgtgtcagagaatgtaatattccttctagcaataaataacctcaggttatagtctatcttaaaactatgcttagttaaacagattataggctcacatatctgtttagttagcttcttctttttctgtttaatctcacagaagtgtgtattaatccttagcaactttctagaaagatcttagagtgggagtactttacacaatttccttttttattatcc

SEQ ID NO: 328121 - DNA, 610 bp, Homo sapiens
tgtcaacttttttggtagtctttttttttctttttcaattccaaattagaacttgaatttattttttcattaagacctccaaggtttgcactgacatcattcatagtatttaaagtaatcttgttactgagtatgttgcaatgtttaccatattcattttcttctgtgctctgatcttttcagtacattactgaaataggaatatggtattatcacatcttggcagctccatgtgctccctttcctcatgcccttaattctctccatataccttacrtcagtagtaattgggtaattaggcagaaatgctgtcgcctgagtaagggtgtaagaaatgtctcattgaacagaataatctttctttgtactcatgattcatttttgatatgctacaactctatcagcagggaaactttcctccctgtcgagattctaacaggcctttaagacaagaatagacggagaggttctgttattagtctcaattctgaggcaaattgtgttattcttctatagtcacattttctgccccacagtatgagattttcggagatggcagaaaagtcttctgttgagggttttatgaatcacaagataagggttctattgt

SEQ ID NO: 328122 - DNA, 566 bp, Homo sapiens
tttgtctcagctgaaggtttcggagtatgtctcggagaaagtttccttcaataataatatacttctccaaaagttttaacaagagatatgtaataatctgaaaacaaatgatacaatatacaatgcaaagctaactttcattctttttcatagaactgtagcaaaaataatcctagaaatcaaagttcgagaagaatctctttgcaggcaataaaatatatatgtagcagaggaattatcacgtggtggacctatataataaattaagctctcaatcaattaagtsaaagaatatgaaataagctgaacaaaagtggaaatcctaattccccacatttatttcattaaggtgcaggctactgaacttatctttgccttatctgtaaatcagcaattgtagggtttacctgcctatatgtgtgtgacaaatagcaccaagaagactgtattaactccactaaatcactttatgccaatacaggtattttgagaaataaattgtgatcattccatttatatggattacagttgtttaaattgctatttttgtgttccctttacattgc

SEQ ID NO: 328123 - DNA, 587 bp, Homo sapiens
ctaaataatacacaagcaaatgctgtctttgaatggcacaggttcaagaataggtcactagaagctaagcctaatgcccatcatgtctggggaacccccggaggggaaagtggtagcatgtctacctgttttaatcccccagtagcacaagcagttgctctggaaaagtgcaataaactgccttttcagataaggtaatacacgtgattatgaagaaaagctttgaaatccatgcagtaaatcatttttaaaaacaatgtgttcagaattcttcagactaataaattattcttcctgtactctggtagtgttccytacttcgctggtttgtaaaggtggcccttggagactctgaaacattgaaacctggtttatttttatataacatttcaagtacacatagaaattagccccaaagattttttttttcctctgccaattgccctaggatgaggcttctcgccactaaacactagggagatggtaagaaagatataaatgtaaaatctaatgtgtaatcttttttgtaattacaaacaaaactgcaacatggagttttagttaagtcaccacatagtcagtacaag

SEQ ID NO: 328124 - DNA, 587 bp, Homo sapiens
ctaaataatacacaagcaaatgctgtctttgaatggcacaggttcaagaataggtcactagaagctaagcctaatgcccatcatgtctggggaacccccggaggggaaagtggtagcatgtctacctgttttaatcccccagtagcacaagcagttgctctggaaaagtgcaataaactgccttttcagataaggtaatacacgtgattatgaagaaaagctttgaaatccatgcagtaaatcatttttaaaaacaatgtgttcagaattcttcagactaataaattattcttcctgtactctggtagtgttccctacttcgctggtttgtaaaggtggcccttggagactctgaaacattgaaacctggtttatttttatataacatttcaagtacacatagaaattagccccaaagattttttttttcctctgccaattgccctaggatgaggcttctygccactaaacactagggagatggtaagaaagatataaatgtaaaatctaatgtgtaatcttttttgtaattacaaacaaaactgcaacatggagttttagttaagtcaccacatagtcagtacaag

SEQ ID NO: 328125 - DNA, 660 bp, Homo sapiens
ctccatggagagcacttggcacatttcctggcatacagaatacattcaataactgttagctgttttattaccatatggttatctattaaatatggttaataattctcacagataaactataaaaatttattcagaaagggcacctgaaagcagatgaaaatatataaatcaattttattaaattgtacatcagtactgtcaagtaacatttattgatcctcatcaatataaagtacaaataatacaatgagcaagttaatagaatatttaagaataaaacaacaaaaagcatggataacttttataataggtaaatcagtcattgctgttgagattttgatttctttaggttaattctcttmatttaatccaaaataatgtatagactgtcagccaacacattaaaaaaactattaaaaattgagtgattttttttaggataatatattaaacagtataagcaaacatttatgggccatttatggccagttatcaataaggttatgaataataatttcttcatatattttaaatttaagaaacacattaaataatgtgtatagttattcccagaaatttaatccatgttttaatttagaatcagttcctaggaaatgaaacataacttctattatgtgttcatttttaatggtttctatc

SEQ ID NO: 328126 - DNA, 564 bp, Homo sapiens
ccatgaaggcaataggaccctttgagagatcttaaggaaggaaatgataactttgaattcacatatcaaataggttttcataataactgtgtgacaaacacagtttcaaagggatgaagtatataggcaaaggcaccagctaagaaaagacaaatggtagtgatgtattgtgagctatttggccaacagatactattcacggtagccactgaatgggaatagaatggttcataggtttaygcatataaaaaagaaggtggcattaaaaactgtctgggccaatttcattcatggagacaagaaaaaaagaaggaacagattggaggaaattagacattccatttcagacatttgctttttgaggtgactacaggatgttcaagtggaaatgatagtaaacatttggcacttatcagtctgtagcttagaagacagttctgggagtcatcagttatataagtggtttgaagagcaggggagaagaaggaaggaggatggaagaaaaggagtacgggagaggtgatgggagggaggaagaaaggaggaggtaagttaagcaaaagt

SEQ ID NO: 328127 - DNA, 503 bp, Homo sapiens
ttagaaggctagggaaatatgccaaaatatacccaacaaatgcagtcggcattgcactgcaagctatttctggtccaactaccaggagttgaaagagttagggatgggagagtccctccaccgtcaaaatcatttttggtgagtgctagattgacatatgtctcatctgggatagtatggaagaattcatggcacactgattcagctgagaataacataactttttatgttctgcaattaaaatttattgttacagcaacctgttgcctgtaaagtgctaagggattactgccatcatagcaatataagggccttcagatagcttgcttgctgctttctatgctmtttacgtagttcacaattacatttactccttcttcatcaggaggaatatgttaacttattactttccaaaccacactaatcaatcctattcatccctctcctcctaaaaacaagcaaacaaaacaaacagttggcttcatggcttataagggaatgcc

SEQ ID NO: 328128 - DNA, 593 bp, Homo sapiens
gttacccacaattaaaattattgttttatatattttttcttttctacaaagcaaacgtaaactgctgccacttacaatttaatttaaacagatatttggcttctaagatgtttgaaacatcattctagaaaagaacaaatcactttggtatttgtactaaatccatattatacttacccctcaccagtactgaaatcaactaactaggatttacaagaatgaagatcaaacaacagaacttggcgtgaggcacacacagttctgagaaatcaactggagaccaacaatgagatgcttacagtcctgattagctctagaaaagagctagagctagaaaaagaactgggttcttatgagagaaatcatttctttctaaggagtayatatcacagatagagttacatagttaataaattagacaatggcattgttatggagtcaaagtattttcaaatacatatactttaaaaaaggtgatatttctgccactgtcagagaatttataacaattcaataaccttaaatcatatcccataaacaactcaaaatgttaccataaaacttttatttttgttctccctgaaagcatggtg

SEQ ID NO: 328129 - DNA, 632 bp, Homo sapiens
tatctttttgcatatttaagtattataaaatagcaccaaaaagtacattatagataagaataaaatatactgtataaaagtagagatactgtggcactacatcaaaacactaaaaatttccaacaaaacttatccaggagaggaaatattcaaaacagaaatgaattcatttcaaatatcaaaataacttttgtacagacaggaaaataataggccttcttctatataaatcctgttattgtttgtgatgcattttatagtatcagtttttcatttttgtgccaataactgatcatctttctgctgtgaaatattgtactcactgtattaagcaaatactgtaatagttgttgaatattttacctgactctgcacagaaatcccactagtaacttttcttattagtatactttcatcttccacttacatacccagtcatccttctccaaaatattagtagaagtattccaagaatcttttgggaaaatattctttgatcctgggyatctttactggaagaaacttacctgcattattaatgaacacaatgtaattaaatctaaaccatttacacttttaatttgaagttgtattgcttcataattaacccaaacggagggaaaggtaattaa

SEQ ID NO: 328130 - DNA, 603 bp, Homo sapiens
atactgtggcactacatcaaaacactaaaaatttccaacaaaacttatccaggagaggaaatattcaaaacagaaatgaattcatttcaaatatcaaaataacttttgtacagacaggaaaataataggccttcttctatataaatcctgttattgtttgtgatgcattttatagtatcagtttttcatttttgtgccaataactgatcatctttctgctgtgaaatattgtactcactgtattaagcaaatactgtaatagttgttgaatattttacctgactctgcacagaaatcccactagtaacttttcttattagtatactttcatcttccacttacatacccagtcatccttctccaaaatattagtagaagtattccaagaatcttttgggaaaatattctttgatcctgggtatctttactggaagaaacttacctgcattattaatgaacacaatgtaattaaatctaaaccatttacacttttaatttgaagttgtattgcttcataattaacccaaacggaggraaaggtaattaatttttcaggcaacaatttcattgcataaagttacatatcaattaatacgtgtatta

SEQ ID NO: 328131 - DNA, 647 bp, Homo sapiens
agggcagaaattgggttaaacttaaaaataattctttgtcctaacattgcttacacatgattgtttatttgcattgaaaaatgcaaaagactattaaaaatactgatcattaaaaattttcatgagtttaaaccactcataccactccaaaacaaatatttttaacattttggcaagcataaggttgttatccgtcatttttgtttgcttattttaaatcttgtatgtgtatgattttcagacattaacattgttaattgcattctcattctggggaaggtctttattctcattccattcagaaactaaacaggctcgatagtaataggtactttgctaatcaaaatatgatacaaggacaagcagcatcagcaccaccaaggagtttgttgaaatgcaaagtgttaggctcacttctgacctattcaggcagactctgcattgtaacaaaatctgcaaatgatgtgtatgagcattggagtytgagatgcccaggataaagacactgcatatacctaaattctagggctttgagtggctcataaatgtctaccttcggcccagctcaactttcatgtcatctggccacgtgatgctttccttgaatattatcaaagcacttatgcccagtatgtccatagcaaact

SEQ ID NO: 328132 - DNA, 602 bp, Homo sapiens
agaaaatccacacataagtagaccagcacagttcgaaagtatgttgytcaagggccaactgcatatttatttttgaatccatatcttcctctactgttttcatttctggcttattctaacgctatttccagttacagctacagtataaaagtagatgaacataatgtatttcaacatgcagaacttgtataaatcaatataaaacagtgaacaacaccaaaaaacattttacaaatataatatgcatcattatgtatatatgtgttagtgtatatatgattttctaaaagtgcaagaattacagagtgaattttgaatgttcataaagttatttccaatcaaacatttcttaagctgactttccaaataaaagtatgtacttagctcatgaatcctgaccttaccctagattatattatatccaatgtcttatattacttattcattcatcatgaatttttaaaaatatcagatgttatgcctttataacattcctgattgttcaacatatatttcattcattacaatctgcattcatttatgaatttattacataacatttaaaaacaaaactgagaaaaaaatatgtatttgacaaaaaa

SEQ ID NO: 328133 - DNA, 596 bp, Homo sapiens
atataacatgaattgcacatcctgtttcaggattatctaattaggcgttttattctcaatacaaaattaaggttcagagtatattacttgagcacaattttttaaatacaggttgaagtaaagtactttttacaggatttttatctatctacattttttttttttggtcagtcttccctaaataaagctaagcttgaagaaagaaagctgagagggtggaattcaaaaatagtttcttgcctcaagcaccacacattgatatgatgatgatatattgtactgttgccattttttcactgaatcagaggtggtaggaaattaaatggtttaaaytgcagcagaagaatatatgttagattccaggagtattatgccaattataaccattctaaggaaagttattggggtgaaggaaaggaattggagaaacaaaatacaatgttactttgtgtaggttttgaaaattggcaaatgtgctagataatattttggatcttattaagtgatttatttgaaatatgcaccaagttttatgaaagagtacaattcttgtagcagtgtacccatatcattaaagtaatattttaagccatatt

SEQ ID NO: 328134 - DNA, 501 bp, Homo sapiens
tcaaatatctcctgagtgaagccttctctcaccacctcaagctaaatatgtgtccaccctctgacccttttattccctacctcccaatatattttgcttccccttagctttcacctctgtctaataaaccatatgttattttatcatgtttatatttttgtttttataactaggatatatgttctctgagagcagggatttttgctagtttattctatgctatctctcaggatggaaaacaatatctgatacatagaaggycctcaataaatatttgttgaaatgaagtatgctaagaacagttgtgaaaagttataaacaatcatcaacaatgttcaatactaacggtctggcttaaaaatatatgagcatgcatgggatagaatattaagtggtcaaactttgtaataacagaaattaatgtgctattaccttaagtgaaaaagctaagtatacaattttatatatatatatatatatatatatatataacataaagtc

SEQ ID NO: 328135 - DNA, 563 bp, Homo sapiens
ttttcttcagttctaccttctgaatggctaattatatcttcatctgtggctaatctcctttgtaaaatgtccatttaattttctgttaatctactttttcattactagaagttccctttggtctttgctcaataatcttgattattttatgatctccctttccttatttatactttcaatcctggaacctcatgaatacttttaatttaaatatattaattacagacacatatattttatwtacagtagtcccagtacttaacatttctgcagattttattctgctgtctattctttctggtagttttcatgcggtggtgccctattccattctggatttggtgacttctgattatgaatacatattctttagaacactgtccataagttttatttgtaaatacattgccctagaaaggatatgtttttgtaaggactaatgacttgggaatatttagtataaattattggctatgaattcttattaattattggctattttttagggaaaattctgataattgagaaacacatcgataagagggcctgttggtaattacgaa

SEQ ID NO: 328136 - DNA, 574 bp, Homo sapiens
tttaattggctcatgcttccacaggctgtacaggaagcatggctgaggagatctcaggaaacttacaatcatggtggaaggcggagaggaagaagggatgtctggggaggccttaggaaacttacagtcatcacagaaggtgaagaggaagaagggatgtcttacatggccggagcaggagaggagatcaaagcaggaagtgctacacacttttaaacaactagatctcatgagaactcactcactatcaygagaacagcaaaggggaaatccgcctccatgatccaattacctcccagcaagtccctctctcaacatggaagattacaactggatgagatttgggcagggaaacagatccaaaccatatcagctgtgatttgatgtgatggactggactgagaatgacttatgggggtgaaggcatggaagttgaaggtcagcaaggggctatggttgttttccaggtgcagagaaatggaagaatttggaatatgtcttgaagacacttgaacagatgggcaacaaaggaaggataaagggcaaccgtggatctgtggcgtatgcacccgag

SEQ ID NO: 328137 - DNA, 539 bp, Homo sapiens
ggaaaggagaacagccacaatccgcaatctgcaaataatagggaaatgagaaggaatatttaacaaagcaacgcaactggccagagaaaaatgtagtaaggagaactagcaactgcaatcatgtatcagtaaaatgaggtaaaaatacaagggaataaacaaaccttccattcagcttcagaaagcatatccaagcccacagtactttcaaaatagaaaataatattgaagcaaaaacaaactgtaggaaaatctccaggcagagaggcagaggctgctagaaaatcccaagtctgttaagcatcatctactgcaccttgcttctcaaagcgtggttcaaggatcacctatttcaaaattacctgggagcttgtgagaaaggcataatcctgggcttmttcctaaacttgttcaaccagaatctgcattttaataagattttcttaatgatttacatgcacattaaagtttaagaagcactggttctactataaaaaccatgttgaggtgttaataaaagacagttattacacaaattg

SEQ ID NO: 328138 - DNA, 539 bp, Homo sapiens
ggaaaggagaacagccacaatccgcaatctgcaaataatagggaaatgagaaggaatatttaacaaagcaacgcaactggccagagaaaaatgtagtaaggagaactagcaactgcaatcatgtatcagtaaaatgaggtaaaaatacaagggaataaacaaaccttccattcagcttcagaaagcatatccaagcccacagtactttcaaaatagaaaataatattgaagcaaaaacaaactgtaggaaaatctccaggcagagaggcagaggctgctagaaaatcccaagtctgttaagcatcatctactgcaccttgcttctcaaagcgtggttcaaggatcacctatttcaaaattacctgggagcttgtgagaaaggcataatcctgggcttawtcctaaacttgttcaaccagaatctgcattttaataagattttcttaatgatttacatgcacattaaagtttaagaagcactggttctactataaaaaccatgttgaggtgttaataaaagacagttattacacaaattg

SEQ ID NO: 328139 - DNA, 539 bp, Homo sapiens
ggaaaggagaacagccacaatccgcaatctgcaaataatagggaaatgagaaggaatatttaacaaagcaacgcaactggccagagaaaaatgtagtaaggagaactagcaactgcaatcatgtatcagtaaaatgaggtaaaaatacaagggaataaacaaaccttccattcagcttcagaaagcatatccaagcccacagtactttcaaaatagaaaataatattgaagcaaaaacaaactgtaggaaaatctccaggcagagaggcagaggctgctagaaaatcccaagtctgttaagcatcatctactgcaccttgcttctcaaagcgtggttcaaggatcacctatttcaaaattacctgggagcttgtgagaaaggcataatcctgggcttattcctaracttgttcaaccagaatctgcattttaataagattttcttaatgatttacatgcacattaaagtttaagaagcactggttctactataaaaaccatgttgaggtgttaataaaagacagttattacacaaattg

SEQ ID NO: 328140 - DNA, 590 bp, Homo sapiens
catttcttgtaaacaattttcaagttgcaagccaggctccctgcttatctccttccattgaaagaagaaaaagtataccatcaggtcaggctgtctgaggtraaaatttggcggaacatcagcatacctttcttgccctgcatgcactaaaaaatgactaaattatctagccactaagccctcacactctgctattcttaacctatagttcacaatcagtctcctcttttcatcactcctgatatcctgatatccctaccccaggtccttttcaactatccatttcttatctcgtattaacttcttatggaaattcaaacacatcagaaaccccaacccaccctcctattcagcaggaaaagcttaactcttgcattcctggaaggtagaacccatctgacttgagcatcatcagctttcttcctcatgacaagaaacgactcagaatttctctttttctgtccaaggtaaggcctagtctatgtggtcttaacgccaatttcccttgttgcattcagtacagccttcctccatagtattcttgaccccacttcctcttgcctggctccatcatttgagataatggctgc

SEQ ID NO: 328141 - DNA, 453 bp, Homo sapiens
ttccaccacaaccctaattccccatctttatttatcagatgaggctcagagagagtctcagtttgcccaaggtcacccagcaagtgcataacagaaactggacttgttcccatattttcagactccaragccaccacacttcttactctctaccccaggtgccttccatggttgactaaatgaatgaatggatgcatctatatcaatcatgcttgcatacagaatgcagaatctttgaaaacatttttctttctctgacctcatctgacagcacttcatgcagccctagatatggaattagtatctagtaaatgttgctgtcgaagttgcaacgcaaagtacatggcagaccttaggtacccgagtgagactgatggaacctcattgtgctgaaatgctatctttaggattcctgtcataaacataccttacatgtaaaccagctttataatt

SEQ ID NO: 328142 - DNA, 572 bp, Homo sapiens
tcctataatcccagctgctagggaggctgaggcaggagaattgcttgaacctagaaggcggaggttgcagtgagccgaaatcgcaacactgcactccagcctgggtgacagagcgagactccatctcaaaaaaaaaaaaaaaaatcctttagttaagaaaaaaaaaagwctgcatttacaagtacttgcagttaatcaaattatacttcttctgcattgccatgcaattgccttaacggtcaatgacatttatcaacagtccagtggaagggacacactgtgctagatcctgggaggagctatgaaagaagatacatgagtcaagcaggaatggcccctgttgttctaattttcactcaagctgagaatacaaaatgagcaaaagagaaaatgtcagaacacttagagtaatcagtgtaaatgaagccagcacaaacggcatgtatgggtactgagagaatgtgggcaaggcaccaggtgcccctttggaaggtgagaggcagtggagctcctgtgagagctttctcatgctgttgaaggagtcatcgtgtcttcttattttttttttcaaa

SEQ ID NO: 328143 - DNA, 584 bp, Homo sapiens
ggctctgcccctgcagcaggtttctgcctggacatccaggattttccatacaccctctaaaatctagatggaggctcccaagactcaactcttgtactccatgcactgaaggcttaacattacatggaagccaccaaggcttatggcttgtcccttctgatgtagcaaactgagctgcacctgggcccctttgagtcatggctggagcgggagcaactgggatgtatggagcagtgtcctgaggtgaggctgtgaagggcagtggggctctgatcctgaccctcaaaaccattctgttctcctaagcctctgggtctgtgatgggaggggctgctgcaaagttctctgaaatgcctttgaggctttttccccactgtagttggttttctgtttctttgttaatctgcttaggataatggcctccagctgcatccwtgttactgaaaatgacatgattgtattctttttatggctgcatagtattccatagtgcatatgtaccacattttcttcctccaatccactgttgacaggcacctaggttgagtccatgtctttgctattataaacagtactgtgatgaa

SEQ ID NO: 328144 - DNA, 620 bp, Homo sapiens
aggaatatgaaaaataaatgtggcatagtaagtgtagacttaccaatagctaataatgtcattaaggttttaatgtcttagctagaacttccatttacaaaactcctttttctgacttagaatatttacaagaaaaagcaaacatccaccatttatcttctcttgtaaaacccttgaaattcattactataaggaaattccttatagtaagtgaggaaataaaaaatacaattatagccttttaagaaaataatcaaagaagtaagtttcatgtcaaaattattcttggcagacaaatgcatatttatagaaaaattcatcaccctatgagatttcattatttaaaaatataatttgaaaatgagtgaaacattaaattctagacaattgggaggaaaaaaaatcctgaaacaaagtaataccaataaacagaacttaggcagataagagtatgttaagagtaaagatagaacacagaatttaatgttagaagatggaaaaacaatagaactgactaagcctggtttaaaatcaaacaatgatatgaacatttggtaaactaaattttaaaaagaraaggagaaagagaaaatacaaatcaacaaatttagaaatgagaa

SEQ ID NO: 328145 - DNA, 578 bp, Homo sapiens
tttagtctcagtctcacctggggccctgactccccagcagaggggctgcataccctgtcctctctggccttgcttccactcacttgctgcctgtgagaggtggtagcttcttrgcacacctcatgaaggcagcatgtaagtgagaagtgtgatattaccttaaaatgccatccctgccagcggcagattatgcattaagaaaacatatttcacctctcctattttaatggagttattaggaacaagtataatatttcctttaaataaactaagagagagaaagaaaaaaatgatgatctacaactctaacgtcttgttatgggaacataagaacagtctgcattttctgtacctttacagttatgtttgtacataaatggggtttgatttagttagtcctgtgctcaggggtgaagtgagggcagaacacgaagtctcatccaagttcaagggctcagtgaatcctcaatcccaagtaagactgctttctccttgtttagtgcagaaccagcaaacaagctatgtgaggtgaaagatacacaatggtatgagtggatgtggttctcagggttcctttg

SEQ ID NO: 328146 - DNA, 578 bp, Homo sapiens
tttagtctcagtctcacctggggccctgactccccagcagaggggctgcataccctgtcctctctggccttgcttccactcacttgctgcctgtgagaggtggtagcttcttagcacacctcatgarggcagcatgtaagtgagaagtgtgatattaccttaaaatgccatccctgccagcggcagattatgcattaagaaaacatatttcacctctcctattttaatggagttattaggaacaagtataatatttcctttaaataaactaagagagagaaagaaaaaaatgatgatctacaactctaacgtcttgttatgggaacataagaacagtctgcattttctgtacctttacagttatgtttgtacataaatggggtttgatttagttagtcctgtgctcaggggtgaagtgagggcagaacacgaagtctcatccaagttcaagggctcagtgaatcctcaatcccaagtaagactgctttctccttgtttagtgcagaaccagcaaacaagctatgtgaggtgaaagatacacaatggtatgagtggatgtggttctcagggttcctttg

SEQ ID NO: 328147 - DNA, 578 bp, Homo sapiens
tttagtctcagtctcacctggggccctgactccccagcagaggggctgcataccctgtcctctctggccttgcttccactcacttgctgcctgtgagaggtggtagcttcttagcacacctcatgaaggcagcatgtaagtgagaagtgtgatattaccttaaaatgccatccctgccagcggcagattatgcattaagaaaacatatttcacctctcctattttaatggagttattaggaacaagtataatatttcctttaaataaactaagagagagaaagaaaaaaatgatgatctacaactctaacgtcttgttatgggaacataagaacagtctgcattttctgtacctttacagttatgtttgtacataaatggggtttgatttagttagtcctgtgctcaggggtgaagtgagggcagaacacraagtctcatccaagttcaagggctcagtgaatcctcaatcccaagtaagactgctttctccttgtttagtgcagaaccagcaaacaagctatgtgaggtgaaagatacacaatggtatgagtggatgtggttctcagggttcctttg

SEQ ID NO: 328148 - DNA, 556 bp, Homo sapiens
ttttgttaaatataccaatatgagatctgatccagttacttggcacatcacaagtatcataattacttgtctatttgtcaccacgatttttggattatgagcaatttataggcaggctgtgttatattcaaagtttacaacatcatggcrccagcctagggtcttagacattgtatgtgtatgacaaatattaaacacataatatcagtgacaaatggtagactgtggtacatacacaagaatgtgctacattaaattttacatttatatgtttcatttcaagagctcttttgttttttacatttatttttctgtatcaaaattactctagggcatgaaccttatctattatgtcttttctgtctgcctacagattctaatatagtgctggatactccatgtgtgctcagtaaatgttgactgactaagcatttaataccttaaaacagaaattcaataaatgtagtcccagtgacctgaaagagtagtgcttctccttgcgtttcaaatggattaccaaggagtatctttagagccaggattttagaaacaacta

SEQ ID NO: 328149 - DNA, 500 bp, Homo sapiens
aatagcataattgagtctgaattatctagactggctttcacttaactgaaaagctcactactccatttatctttcatgcaattattgatgtgtttgtgtttaattctatcatgtttgtgattttttttctatctgtcccattttctctttatatctgtttctatcatctcttgagtgaatcaagtcttttataatatattctattttagcttctcaattgactttttagttgcacctctttgtggagattacaattcacaactatatggactgaaytgtgttccctcaaaattcatatattgaaactctaacccccaatgtgttagtatttggagatgaggcttttgaaaggtaattaggcttaaatgaggtcatgagggtggggtcctcgtgatatagttattaccattgtaagaagagaccagagaacttgcttgctttctctctccactgtatggggacatagtgagaaagtagccaggaagagagccttcaccagg

SEQ ID NO: 328150 - DNA, 517 bp, Homo sapiens
cctgtgtgaatgccttgattccatatgygttataaatatatctgtaatgtgacctaatcatagaatgaagatgtgtgtggtccatctctgcctatgcaggtatcttccatttgcccttccagatcgaccctcacccttgtctaccctgtgctctgggaagctgacctctttgtattcctctgcccactgtcttaacacttaaaatgggtttggctaatgagaaatgttggcgggagatgggagggagggaagagattgagatcagggtgtttattccccagatccctccctggaagggcaccacatcatggctgtgtcttgtgatggcctctgtttctctcaaggtggcctctcccaccatattttctcttctccaggtttgagtaactaccatctcctcttctccccttgggcgtaggggtggtaaaacaccccttctttagtccttggttcctgcagtatccttgtggctcctctacactctgactgtgtgcttgtaaatagttctttaaataaa

SEQ ID NO: 328151 - DNA, 563 bp, Homo sapiens
gcaaataaatgatgaaggaagtattcaaattaataaatgatgaaggaaggatagaattagaatgtcaccattttgaaatatttagttgatgaatatattggagcatcgagcgtcagtggctgctaacatcacagaaagagcagcaaccagacattaygttcttcttgatggataaacatatcaccacccatgaaacaatctcgtccccacaaaaaaaaattaaacctgaatctgatccaactatttcatccaactgtttatgctggggaaatacaaaagaagaggaacatattaaacaaaaccacagaagtttaataagaaattctgctatagtctgactgtgttccccagaattcatgttttaaaaaatacccaatgcataagtgttgggaagtgaattaatgctgcattgggtattaagtgtttgaaacacgaattctgagggacacaggttctcttcttgctgcttttctgccatgtgaggacatagcattcctcctctccagagaatacagaaggcgtcatgatggaaccagacatctaacctaccagtaccttgatct

SEQ ID NO: 328152 - DNA, 633 bp, Homo sapiens
cttcctcttaacccccagaaagaagcgagcaagccattttgaacaattctgtacaatgagcccatactcctttttatagcagatcggtccagagatgattcgtgatccaagttggtctattagatagaacagaaaatgcctgcgtaacctccttaaaaacggacatcgattgaaaccrcctcctccatttgcttgttgtatgaactttgggtaaagaatttaacttctcttgacctatttcttcatctgtaaaaaaaatagtttgaactaaatgatttttaaatttcctttctgctcttgcagtatggcttctcacaataaaggtgggttctagagtcaatgaggccttggttcacagtcatatcctgtcagtcactatagtcttatgacttaaaaagatttctcaactttctaagcatcagtttcaaaatggggactatgataatgtctgccttgctattaaatgatataatacatgttctgggcttaaaacactactacacacagtcaagcaccccatagtctctggttgctaccactggtgttatttctacttcagcaagatttaaaattaaagaaagaagcaaggaagaaaaggaaaccaaggtgaaaacatcataattgttcagccaa

SEQ ID NO: 328153 - DNA, 523 bp, Homo sapiens
taatgtctgccttgctattaaatgatataatacatgttctgggcttaaaacactactacacacagtcaagcaccccatagtctctggttgctaccactggtgttatttctacttcagcaagatttaaaattaaagaaagaagcaaggaagaaaaggaaaccaaggtgaaaacatcataattgttcagccaaaagaattatctgaataaaaaaaattaaacctttgattcactgatactgcaaaaaggttgggagagagagtaaataatcaatatgactctccaagcaagtaaaaatgtacaggatgtwtaattgtggccctaaaaaagaaggcaacactacttatatcaagctctatcactctcagaacttgaaaatccaataagaaagggtcctccaaatacaaagagcgttgggtaaaatcataactctctcgtgagtgataacatctataaactattaaacttaaagaaccatgtccaggacttatttatcccattgtctttctttgtaaccttgtcttg

SEQ ID NO: 328154 - DNA, 515 bp, Homo sapiens
tgggtggcttcatttagcatgcccttcacacttagtggcttggctctaccagccagctctctttggtctgcttccatttatctcttttctgttagccacaatgggtccactagctgggttgatgctgattctttctttaggtgaaactcagctcttcccttgatgttctgaggactcacctattaggttcataaggcttcaactgagaatcccctgtttttcccttgaacctcactgtagcttccttagcaagctcctacctcttccagcacctcctccctctttcttttaaagtctagtggatcatgaaagccactggactcaggcttcttgttccccttgtctcctcrtactgctctccctacattgttggagactatgagttactacatgatgtcaccatatttgttttgcttcatgaacaatttcgaaaaattttaaaaggtaattctgactgtatagtattttcaactactgcactgacttacaatctaaactctgtgataaaagaaata

SEQ ID NO: 328155 - DNA, 460 bp, Homo sapiens
ctcttttctgttagccacaatgggtccactagctgggttgatgctgattctttctttaggtgaaactcagctcttcccttgatgttctgaggactcacctattaggttcataaggcttcaactgagaatcccctgtttttcccttgaacctcactgtagcttccttagcaagctcctacctcttccagcacctcctccctctttcttttaaagtctagtggatcatgaaagccactggactcaggcttcttgttccccttgtctcctcgtactgctctccctacattgttggagactatgarttactacatgatgtcaccatatttgttttgcttcatgaacaatttcgaaaaattttaaaaggtaattctgactgtatagtattttcaactactgcactgacttacaatctaaactctgtgataaaagaaatagggaaattcaggttcttaatatttga

SEQ ID NO: 328156 - DNA, 601 bp, Homo sapiens
tacatatatatttctattttactaggattatcttaatttctttatggatgtgggacttgtgagactactttaatttgaatgtttggaattgatctgagatgcagtctgtaaatgataaaacctaaacacgtgtctaaaaactttaaaattaattgactctttattcagctggcctgcaaaatgactccatataaattacattgctatatgtaaattgtttgaactttagctgccatgttccatataaacaaacagcagctataaacagtgttaagtgaagtgaaaactggtttccctatggaggctcaaaatgtgaagcctctcatgaattttagcctcatatacttctataatcaacatctcttttcacagttttaattaaagtgatawcagtgcttaatgtaatacccatgctcgtttgctacccgaggcctatgtgtagcacccgcatcctatgcaggtatgcattggttctcacttggaccaacttcaaattgcggaaggagtaatcgggcattacgtgtatttgctccagtggacatgtataccttcagataatttttttgaacaaaaaacttgggagatcacctggtctaacatt

SEQ ID NO: 328157 - DNA, 632 bp, Homo sapiens
aatgttaaatattaagaccctaggaaaacaattgcattcctggggggaggtctataaacggctgctttggaagtgtccatcttatgcggttgagataaggactgaaatacaccctggtctcctgcagtaccctcaggcttactaggattgggaaattctagcctggtaaattttggtcagactggttctctgctctcaaactctgttttctgttaagatgtttatcaagacaatacatgcatggctgaacayagaccctcatcagtaattctaattttgcactttgccttgtgatctttgctttgcccttcgccttgtgatctttattggcctcagaagcatgtgatctttgtgacctactccctgttcgtacaccccctccccttttgaaatccttaataaaaacttgctggttttgcagctcaggtggggcattacggacctaccgatatgtgatgtcacccctggcagcccagctgtaaaattcctctctttgtactctttctctttatttctcagaccggccgacacttagggaaaatagaaagaacctatgttgaaatattgggggcgggttaccctgatagatatctctcattgttagggttgaaaacattatttaattattttta

SEQ ID NO: 328158 - DNA, 620 bp, Homo sapiens
gactgtgtggataacatgagacttcattttcatatactagacctaacatagagttatactgaagtacaacagtcagggattgtgaaaaatacagaagctttggagccagaactgagttcaaattccagtttcaacatctaccagatgtttaaatgcaacctcaggtaagctacttaataaactyaaagccatttccttatctgtaaattggaaaaaatagtatctagtttctaagagttttaacagtatttgggaaaatatacaaaaagcttagcttaccaattatggtactagtagtcattctcattaaggtgacagcagacaagcctggattttgaaggttaatataatctgacattataggattaggtatatactagaaagtgatgagaaggaaatttttggctgtggatatcaaaggatgtgcttagctccaaactccaaactgcagaggaatttggtcaaaattcctgtggggggtataatattggtagtaaaggggtggataatatctgagagacatcaaaaaaagatattgattttagtcaacgataaaccatgagagtcaagttttagaaactagatgactaataagggaatacaggaaaatcaggagaaag

SEQ ID NO: 328159 - DNA, 495 bp, Homo sapiens
gtagacgatgtgaaatgaatggatgtggctgtgttccaatacagctttatttatgggcacagagatttggcttttatatagttttcacatatcacgaaatgtgattcttttgattttttttttaaccactgaaaaatgtaaaagccaatctctgcttcggacctgtgccagaacagggagtagcctggccgtatttggcccatgtgccgtagtttgccaatctctgtggtaggtattctataacccaaattttacagtgagcaaatccagagaagtaacgtgcccagtccttaacaatgaaatgtgtaaccaggatccacacagagcctctcttagcyaaagctcatgttctgtatgtcgcatgtggctgcctgtccttggatctcccgtcggaaagagctgcacaaaccgtaacagcagagatagttgtatacggaaaatttatctcattggcctattgaggctagctggaaaagctctgcattgtggcttgca

SEQ ID NO: 328160 - DNA, 587 bp, Homo sapiens
aaagcagcagccttctgggagctacctgcataggagggacagcccgagctgctaagccgggtctgcacaggactgagggctggctgatgacaggagggcctttcgctggggctgctgggtcttggtttctcgggctggttttcctgtcgttggaaactgcattgccctgagctctgcgtgctgaaataaatctaagggcaagtccagctgttggaggaatgtagttgtgtttggaataagtagcatcggtagcgtgccttttcctcatgtgaatcaccagggctctttcttgctcaggaagttggaggcacaaatcctgtatcccctcacccccgccccccgttttttttttttttttcattaaaaattctgttttgccaatagttttgcaccttttcaatttttgtgaatcgtctctagaggtttgcagttggctaccattctggcccttgctctgaaactccatacagctggttaccatcgagccgcatgtgcctggtacattgccagctcctctgtcagtgctgataaattcctaaagttacacgagytcagctggacggagcaggtttttgttgtttttgttt

SEQ ID NO: 328161 - DNA, 551 bp, Homo sapiens
ttttcactgtgttcaaacagcaaccctttgcaatttgaggcaataccagagagaggccgtggaagtgatcagggttgcagaatgctatgcaaaaaaagaaaagcaagaattacctaagatgttccatagccacagtattttgaatggcatgagctatggctgaggcacaacagatagaaggataacagacatcttttccactttccatgggagtttctgaagttaacgtattttatctttcaaagcaattttagctttacagaaaacttgaggagaaagtacagagttctcgtattcttccgtccacccctaaacacacagtttcccctgctattagcgttttgcattggcgtggtgcwcgtgtggaaactgatgaaccaatactgacaaggttgaccattagggccccctcttggtggtgtacattctctgggtgttgacaaatatataatgacagggatccacagaacagtttccctgccctaaaacttccctgggctccacctattcatcccccttagatgccccccaaatccctggcaaccactgac

SEQ ID NO: 328162 - DNA, 510 bp, Homo sapiens
aggaactacatgaatcttagacaactattaagacctgtgtgtgaactagcttgacatgctggagtcccaaggaacccatccacaccatcaagctgtactcacctgccagcactttaccacaggtcttcaccaggcacagaggaggactatactgaagactgagggaaagtcaagaaatctgagagagagagatccttgaggcatgtgaaccttccctaagtgcaaggcagcatcccagtgaagactggagtcagggcagaagagttaaaagaaatctgtctgagaaagtctaggccttcactaggtcaaaacagttgcaacrgaggccagaaataaggcagaagaactgagaacagttgctcagagtgttgcaaactttcattaagtacaaggcactggatgccaaaggcttgaagcagcagagcaaaaagaagagagacctcctgagattaataaagtcagaaacaggaaaggaaaaagaactccctagcaaccaaaacagtctgggag

SEQ ID NO: 328163 - DNA, 411 bp, Homo sapiens
agaattgagaactagaataaaaatatgaggagatctgatgttctaaactgcawtgtgtccacaaaaaccacctgtggaaatgaactcaaggttgacctcacagactccaccaacagattctgatataggtctagggcagagacaaactaaatttgtaacaagtgctcctgatgattctgatagactgtccaggaaccatactttgagaaatactgcatttaggagctaaaagagagagcaattggaatattaataaaagtcatgatttacactgtgggctttaaacaccaagtctgaggaccattctaaaagtgcatgtgggtttcaaaatcaaagcaactaagtgagaaagcaaatgatgtttaagtgcccgttagactttttttgaaactataaagaataaaaagttaa

SEQ ID NO: 328164 - DNA, 411 bp, Homo sapiens
agaattgagaactagaataaaaatatgaggagatctgatgttctaaactgcattgtgtccacaaraaccacctgtggaaatgaactcaaggttgacctcacagactccaccaacagattctgatataggtctagggcagagacaaactaaatttgtaacaagtgctcctgatgattctgatagactgtccaggaaccatactttgagaaatactgcatttaggagctaaaagagagagcaattggaatattaataaaagtcatgatttacactgtgggctttaaacaccaagtctgaggaccattctaaaagtgcatgtgggtttcaaaatcaaagcaactaagtgagaaagcaaatgatgtttaagtgcccgttagactttttttgaaactataaagaataaaaagttaa

SEQ ID NO: 328165 - DNA, 411 bp, Homo sapiens
agaattgagaactagaataaaaatatgaggagatctgatgttctaaactgcattgtgtccacaaaaaccacctgtggaaatgaactcaaggttgacctcacagactccaccaacagattctgatataggtctagggcagagacaaactaaatttgtaacaagtgctcctgatgattctgatagactgtccaggaaccatactttgagaaatactgcatttaggagctaaaagagagagcaattggaatattaataaaagtcatgatttacactgtgggctttaaacaccaagtctgaggaccattctaaaagygcatgtgggtttcaaaatcaaagcaactaagtgagaaagcaaatgatgtttaagtgcccgttagactttttttgaaactataaagaataaaaagttaa

SEQ ID NO: 328166 - DNA, 591 bp, Homo sapiens
caatatttaaaatttctagcaaagaatttaaaagtggggaatattccctaattaygttatggagctaatacaaccttgaaagtaaagccatacaaagcagtataagaaataaaattacatgctaatctcacttagattgttgttgtatatgtgacaaatagaaaaaattttaagtaaaatattagcaaactgattaagcaatgcataggcaatggaaggatggcccaacatttttaacaaatattaatgtaatttaccacatcaacagatttaaaaagaaaaaatatgatattaatagatgcagaaaaaccattagaatattttttaactattgtgagggttgtaagtaatgacccaaataaatggagagatattttgtaagtggattgaaagattaaatatgaaaatgttaactctctaaaaatcagttcaggaatttaatataattctgtcaaaatattgacaggcaatttcaaagaactttacaaactgctcaaaaagtaaatggaagaacaatgagtggggcttttccttccaatgatgttacattagcacttttgggctaagtgaatcaactagaaaactagacaa

SEQ ID NO: 328167 - DNA, 445 bp, Homo sapiens
tgatacagaagtgaccaaaatttytagatttgataaacacattccttttgagcttataatgacaaaaagaataagacccattaagtcagtgaattttagagaaattaagaaaaagggattttttttttgtattcagaaatcttaaaatggaaagatggcttagatagtagttttcaaagatggaatcctaatgtgatcacagatcattccggtgaggaagcaaagggaaactttcacagaaattctttgataagctctattttaaaaagatggaaagacaggcactttaacaaagttaaaaagttctggaagggttaatcttgggaggcaagatcaagttgtgttctagaatgtttgagaaatctgagtttgattaatctaaaaaatataggagttagggagggctatgatgattctcatatttgaagaggaaggagaaatttgt

SEQ ID NO: 328168 - DNA, 591 bp, Homo sapiens
caatatttaaaatttctagcaaagaatttaaaagtggggaatattccctaattatgttatggagctaatacaaccttgaaagtaaagccatacaaagcagtataagaaataaaattacatgctaatctcacttagattgttgttgtatatgtgacaaatagaaaaaattttaagtaaaatattagcaaactgattaagcaatgcataggcaatggaaggatggcccaacatttttaacaaatattaatgtaatttaccacatcaacagatttaaaaagaaaaaatatgatattaatagatgcagaaaaaccattagaatattttttaactattgtgagggttgtaagtaatgacccaaataaatggagagatattttgtaagtggattgaaagattaaatatgaaaatgttaactctctaaaaatcarttcaggaatttaatataattctgtcaaaatattgacaggcaatttcaaagaactttacaaactgctcaaaaagtaaatggaagaacaatgagtggggcttttccttccaatgatgttacattagcacttttgggctaagtgaatcaactagaaaactagacaa

SEQ ID NO: 328169 - DNA, 549 bp, Homo sapiens
tgtgggaccaaagttataaagactgaaatagcaatgggaatgasgagacagggatgaatgggagaacaatttaagatttagaggaatgggataggatcctgttactaaaagcatgtgtggaaataggggtgagcactggattatgcccaggatatctgctcaggttttgggtgagtaggggaggccattgccaaactaggtaatacacatgaaaaggtcgaaacttgacctgactctctccaatatcaatataagcagtctgcttaatacccatctttcttaatcccattggattttggtccccactaccaccacaggagcattttaggtattaggaaagctcactatgtcttgcctctttctgacatagcagaccatgcagtctactgacattgaaattatgttcaatgtaaaactgcagctacatggagatgcagagagatatccacgttattgctgcactgaaagctcaagttgggggtgttctaaaaggtttaggaatcaagaagaatgtacaaaagataagcttgccaaaaacaccaaataatt

SEQ ID NO: 328170 - DNA, 431 bp, Homo sapiens
ttactaaacctctacagcgcacatagcactcaactggatagcgagaggagtataactatgtgagaaactgtgtttatgcttcaatagattttgccamtaaaagtcttgagaatatgaggaatagcttgaaagagagatatatttttataatctacataacttctttaattaagcaaaataagtatattaataagaacttagtgtagtatttaccaggtttaatagtcagattggataatccatgtgcatgtaattaaaactagatctagaaagtgtgtgacagcttgtgtgcagtatccatgatcataacctcctccaaatttctccaaattataactaatttcaatttaaccatattgcataaattttacacttatgactcagtgataatattaatccttcttcccccaaagaacatatttgtaggctag

SEQ ID NO: 328171 - DNA, 614 bp, Homo sapiens
tgccagaatctaagatttttgctgcataatttggggcgtgtttaactacattattactgtttccatcattggctattgtagtcaaggacttcaaagcatgtttggaagaaaacaattaccgaatacaagttcctttgggcaaaagaaaaaactaaattcttgccttatgcaatacttcattttgaccatcttcaaataaatcatgttgagaaaacaaatgtcaagcatagcttaacaataagacctgccaagacttcatatatcaatgtgcaaaaaggcatgggaatactaccaacaagttattgatgacaaaatgttatattggggaatgcagggcaacttttacgttttaccttgaatattttgcatggtttgaatttttatagcaaccatcttacygctgtaactgtgttaactttgaaactcaaacactatagaagattcattgtttcacaacattttaaaattggtttggatccagcaatttctaaaacctggctaatttacttttgcatagtgaaaaagagcaattagcaaagaatactttcctccacagccatagtctgttcatttctgggacagtgtttgtggctctgaatcaaaaaacatcagaa

SEQ ID NO: 328172 - DNA, 570 bp, Homo sapiens
gcagctgctatggtttgagtgtgtcccccaaaacatgttagaagcctaatcccacatgcaacagcactgagagatgacacctaaaaagaggtgagtaggccatcagggcacagtgaatgcactaatgccattgtcaagggagtgggttcattactgcaggagagagttccttataaaagacaagctcagcccattttgtctgtctgccggtctgcctgtccatctctctctctctctctctctttgcccttctgccatgtgttatcttcytccatgggatgacagtgaaagaagaccctcactcaccagatgccatcaccttgacactggacttcccagcctcaaaaacaaactgtgagccagtaagtttctgttttttttataaattacccagtctcagatgctctattatagctgcacaaaacatattaggacagtagctgatatttataaccaaggtaacttggactacaaagccaaggaaataagcaaggtaaaatgctgcatagcaaagctaaagtgtaaaaagaaatatgcagagttcagaggatcatcaaaacagagtgggat

SEQ ID NO: 328173 - DNA, 418 bp, Homo sapiens
actctcctaacatatcttgaaaatctatggtgacccattgtctctaggcagttaattaactgaattttacattttagactctcgtttcctctgcagaattgagatgacatatagacttagaacaaatgtattactscattaactttctcaaccttgtctggccggtttacatttgtaacaactaaatgggaaaattttcctgatttatcttacttaaggaatataataggtagcagaaatgctaatcattccctattctaatcctcaaaatattttcatgacaggtgtattgttcttattacatctacatcccattgtattaatgagaaaattaacacttagaggggttaacttgtaaaaataattcagcagagccaagacatgaaccaggtctatctgacaacaaacttgttgcccc

SEQ ID NO: 328174 - DNA, 507 bp, Homo sapiens
tataataggtagcagaaatgctawtcattccctattctaatcctcaaaatattttcatgacaggtgtattgttcttattacatctacatcccattgtattaatgagaaaattaacacttagaggggttaacttgtaaaaataattcagcagagccaagacatgaaccaggtctatctgacaacaaacttgttgcccccatccgctgcactagacagcctcctgctgagttaggtgccttatgaaagctcataggagcttatccaaacaaaggacagtgagcacatctatattacgattccttaaatcttccatagagtttatgatgcaagcaagaaacatgctttggtagctatattagtcattggctcccaaacctcataactgttaactctacccagaataaagagtaaggaaaactttctgtaaatacagggagattcttaatcggtcacctgacacagcaaatgacaatagcttatattcatacacatgaacaaaaaggtttg

SEQ ID NO: 328175 - DNA, 418 bp, Homo sapiens
actctcctaacatatcttgaaaatctatggtgacccattgtctctaggcagttaattaactgaattttacattttagactctcgtttcctctgcagaattgagatgacatatagacttagaacaaatgtattactgcattaactttctcaaccttgtctggccggtttacatttgtaacaactaaatgggaaaattttcctgatttatcttacttaaggaatataataggtagcagaaatgctaatcattccctattctaatcctcaaaatattttcatgacaggtgtattgttcttattacatctacatcccattgtattaatgagaaaattaayacttagaggggttaacttgtaaaaataattcagcagagccaagacatgaaccaggtctatctgacaacaaacttgttgcccc

SEQ ID NO: 328176 - DNA, 507 bp, Homo sapiens
tataataggtagcagaaatgctaatcattccctattctaatcctcaaaatattttcatgacaggtgtattgttcttattacatctacatcccattgtattaatgagaaaattaacacttagaggggttaacttgtaaaaataattcagcagagccaagacatgaaccaggtctatctgacaacaaacttgttgcccccatccgctgcactagacagcctcctgctgagttaggtgccttatgaaagctcayaggagcttatccaaacaaaggacagtgagcacatctatattacgattccttaaatcttccatagagtttatgatgcaagcaagaaacatgctttggtagctatattagtcattggctcccaaacctcataactgttaactctacccagaataaagagtaaggaaaactttctgtaaatacagggagattcttaatcggtcacctgacacagcaaatgacaatagcttatattcatacacatgaacaaaaaggtttg

SEQ ID NO: 328177 - DNA, 507 bp, Homo sapiens
tataataggtagcagaaatgctaatcattccctattctaatcctcaaaatattttcatgacaggtgtattgttcttattacatctacatcccattgtattaatgagaaaattaacacttagaggggttaacttgtaaaaataattcagcagagccaagacatgaaccaggtctatctgacaacaaacttgttgcccccatccgctgcactagacagcctcctgctgagttaggtgccttatgaaagctcataggagcttatccaaacaaaggacagtgagcacatctatattacgattccttamatcttccatagagtttatgatgcaagcaagaaacatgctttggtagctatattagtcattggctcccaaacctcataactgttaactctacccagaataaagagtaaggaaaactttctgtaaatacagggagattcttaatcggtcacctgacacagcaaatgacaatagcttatattcatacacatgaacaaaaaggtttg

SEQ ID NO: 328178 - DNA, 542 bp, Homo sapiens
atatgttaagtcatgattgaaagtttgccatttctccatcaaaaatttaatcgtgcagtttttcacaagaaaattgactcacattgttggtgtcattagcaaaatttcctttcagccaactgttgtacttcctgttatgtgccagttggctgytatcttccatagctgaggcagctgcatttcagcagtgaaagaggcacaaagaaattgaaaagcttactgggatttcttacgatgaaaggaattgtatgcctgtgtgcatgcacagaagaggatataaataaaccttctccaaaagagaaagtacatataagatagttgaaaaccttaaatagaaacttctgaacaattgacctactcttagtgattaggcttatcatcttcacatgacaatgaaacatttttaaattttaatttaagtttttttatttccaaattttattttaagttcaggggtacatgggcaggatgtgcaggtttgttccataggtaaatgtgtgccatggcagtttgctgtacaaatcattccatcgcctaggtac

SEQ ID NO: 328179 - DNA, 568 bp, Homo sapiens
gtgtccacacattctcatcattcatctcccacttataagtgagaccaggcagcatttggttttctgttcctgcattagtttgctaaggataacggcttccaattccatccrggttcttgcaaaggacatgatctcatttctttttatggctgcatagtatttcatggtgtatatgtaccacattttctttatctagtgtattaacaatgacaacacttttattattgctcatgtcattagcctacctcaaatctgttttaaacattattccataagacagccctgttcaattgtgcatgtagtacacagcacaaacctaagggaactattcacatgacagatctcacatatttctatatgtatttaaataataaagttatcctattaaaaaagtagaatattatgataattttccatcaaatgatagcaaaggttttgaggaaaggatgcctttgttaatacattcaaagtcatcacaggagttagtttgttttctttttttttagtaattctctatgaagacctttttaagataaaaatacatttgttaatattgtgattgattgtt

SEQ ID NO: 328180 - DNA, 568 bp, Homo sapiens
gtgtccacacattctcatcattcatctcccacttataagtgagaccaggcagcatttggttttctgttcctgcattagtttgctaaggataacggcttccaattccatccaggttcttgcaaaggacatgatctcatttctttttatggctgcatagtatttcatggtgtatatgtaccacattttctttatctagtgtattaacaatgacaacacttttattattgctcatgtcattagcctacctcaaatctgttttaaacattattccataagacagccctgttcaattgtgcatgtagtacacagcacaaacctaagggaactattcacatgacagatctcacatatttctatatgtatttaaataataaagttatcctattaaaaaaktagaatattatgataattttccatcaaatgatagcaaaggttttgaggaaaggatgcctttgttaatacattcaaagtcatcacaggagttagtttgttttctttttttttagtaattctctatgaagacctttttaagataaaaatacatttgttaatattgtgattgattgtt

SEQ ID NO: 328181 - DNA, 568 bp, Homo sapiens
gtgtccacacattctcatcattcatctcccacttataagtgagaccaggcagcatttggttttctgttcctgcattagtttgctaaggataacggcttccaattccatccaggttcttgcaaaggacatgatctcatttctttttatggctgcatagtatttcatggtgtatatgtaccacattttctttatctagtgtattaacaatgacaacacttttattattgctcatgtcattagcctacctcaaatctgttttaaacattattccataagacagccctgttcaattgtgcatgtagtacacagcacaaacctaagggaactattcacatgacagatctcacatatttctatatgtatttaaataataaagttatcctattaaaaaagtagaatattatgataattttccatcaaatgatagcaaaggttttgaggaaaggatgcctttgttaatayattcaaagtcatcacaggagttagtttgttttctttttttttagtaattctctatgaagacctttttaagataaaaatacatttgttaatattgtgattgattgtt

SEQ ID NO: 328182 - DNA, 568 bp, Homo sapiens
gtgtccacacattctcatcattcatctcccacttataagtgagaccaggcagcatttggttttctgttcctgcattagtttgctaaggataacggcttccaattccatccaggttcttgcaaaggacatgatctcatttctttttatggctgcatagtatttcatggtgtatatgtaccacattttctttatctagtgtattaacaatgacaacacttttattattgctcatgtcattagcctacctcaaatctgttttaaacattattccataagacagccctgttcaattgtgcatgtagtacacagcacaaacctaagggaactattcacatgacagatctcacatatttctatatgtatttaaataataaagttatcctattaaaaaagtagaatattatgataattttccatcaaatgatagcaaaggttttgaggaaaggatgcctttgttaatacattcaaagtcatcacaggagttagtttgttttctttttttttagtaattctmtatgaagacctttttaagataaaaatacatttgttaatattgtgattgattgtt

SEQ ID NO: 328183 - DNA, 522 bp, Homo sapiens
ggtacaaagaagagccagtaccatttatactgaaactatcccaacaaactttttaaacttttgattgaaaaaatatatgtaaagacatgtccttttgagtcaagttataaaagccatcaaccacaaaagtgctcatttattcattcatttgttcaaaccatagatttttgtcagatgtctgttttatgtctggaaaygtcagataccagaaatttcacaataattaaaaatcgaggtggccttaagtcaatcgtgaatgcaaagcaataccaataaaaatatgaacaatatttttacaagtctatacaaaagttcatattcaaaataaaatatgcaagaatagacatgcaagaataactacaaaaataattaaaaatagagctatcagaggaagtagacatatgagatactaaatatatcataaattaaacagtaaggccctagcacatgaataattagacaagaaaacagaatagaaagttcaaaaataggctcaaatacatttactacataatataagta

SEQ ID NO: 328184 - DNA, 564 bp, Homo sapiens
caaattattgttaaacaagcttgtttaggtgtgataagatattgtgtttatgtttcaaaaatattctttgcctttattgatctatactataatatgcacaattgaatgaggcatagaatttacttcaaaatgatcagctgttatgcactggtagggttttatagtaaaayaatatttgatatgctttgaaattgttgaaagtaggtcttggttataccaagttcattagaatagtctctctactttgtatatatttaaaattttccataataaaacatttaaaaatattctccagaaccagatggatttaccagagaattttccaaacatttagacagcaataacatcagccttacacagcctcttccatagaagagtagaagagggaccagaaggattctgagaagagaaacctggggcaggattattttcttttttaatttactctaattttcttgtaaaaaaaaaatagacacatgaaatagagtacaaaaccaaaaacccacataaaatatctacaaaaaactaagtgatatgttatcttcagaaacttcaaaatgtaag

SEQ ID NO: 328185 - DNA, 584 bp, Homo sapiens
gaagtaacaggtgacctgaagttacatgttgaaaagacagagtatttgctgctgaaaagtctgatgacagtctgatttttttccttgtaaataactcatgaactctcaaaagatagttaaatatactcaaaaattagtcttaaaatatgaaaaaattaaaataaaataatttgatatctatctagtgggataaaccttgcaataaacagtctgactccatatgttaagtatttgactgctgacatattttaagcttcactcctcccccttgtctatctgccctacatctggacaaatgacaaaaaaagctcagatgcttccttctttggcaccagtgggaggtttaaatcctgcaaactcctacccatgcatggaagcccctatacctgcctactctccaaccatcatcaaaactccaagccagtctccttactctttcaagtcatttttggaccagcttggaaagactgctctactctctcaaaaagcttcataatgagagtggtaagccttttyatattctcttggagtacacgtagttttattggtcccaatacccaaaccaaattttgggtggagatcca

SEQ ID NO: 328186 - DNA, 615 bp, Homo sapiens
cgtctcctttgtctgatttgtccctacctcactgtcaatcttgatatccattttcaccactgtgcaaaaccactgtacagtgcattgtaagcacttacaatatattgttgacctactacatgcaggacagttttccaggtggccttggacctacccagttctccctccttttttgtgtgtagttctcaagaggaactgtagaatgttctgggaatgcaacatcctgagataaggaggggctgacctgaacagtccattgtgccagtcccctctataaacagaaagtcactttggcccagtatgtcatactgtccctacagtataaaacccaaggcaggctacctgttgggggtccctcggctgtggtgcaagtggggcacatactgatgagattttgtcttccccaggcagctttcctgagccttgaggggacaggctcgtcatgaatcctaggcattttttttttctcttgctgcttatctgtaagtaataaatccacttatgtaacttgttgtatgtgtgggtgttctgtctcactggactcagacaaatggtagccagtgcacagtgaacctgcttcacacacattcccgygatctaatttgtgcctgtgta

SEQ ID NO: 328187 - DNA, 325 bp, Homo sapiens
gaaattcactctgatgaaattgcacagtacttggtgtggtgactgacatcttaagtggccaccagaagagctagatgacacaactcagaagtgtgatggtattaattcccatggagcaatatttgactaatgggaaactgaagatgggaggaagaaagcaaatacctctctcmccttcttactccttcccatgcactattccaattacagatacacaaagctcatttgaagtcctgtatggccaagcaggtgcttttactgagtgattcactatgcctatttatggctcattgggaagcagtgaccagcagggtaatagcatttt

SEQ ID NO: 328188 - DNA, 416 bp, Homo sapiens
gtggcaccctttcaaccatgagaaatacattcttcaccaatttttctctttaaaaacatctttaaaacatgcagtaagaaacggctagtagggggaaaattataaatgtttaggaatatttaggaaagacagatatttcaaaatatattctagaatctattaatacgttttccttttaaatttggcctmttttatgggagggcaccactttctcttgcctctcttgtttggataaattaaagtttattaaataaacaaagaagacatttttcaggatgagctatttatacaacgatggaagtaagtcccatcaatgtttcaactaaagtgctaaattgtaagtttgcttttgaaattaaagatatttatgggagtactgagttgtgataaaacaggcccaaagcaatctccacata

SEQ ID NO: 328189 - DNA, 416 bp, Homo sapiens
gtggcaccctttcaaccatgagaaatacattcttcaccaatttttctctttaaaaacatctttaaaacatgcagtaagaaacggctagtagggggaaaattataaatgtttaggaatatttaggaaagacagatatttcaaaatatattctagaatctattaatacgttttccttttaaatttggcctcttttatgggagggcmccactttctcttgcctctcttgtttggataaattaaagtttattaaataaacaaagaagacatttttcaggatgagctatttatacaacgatggaagtaagtcccatcaatgtttcaactaaagtgctaaattgtaagtttgcttttgaaattaaagatatttatgggagtactgagttgtgataaaacaggcccaaagcaatctccacata

SEQ ID NO: 328190 - DNA, 584 bp, Homo sapiens
cttgctctcatacttgcatacataacattttatcacctggttttaaaggtttagtaatcacccagtatccactcatggttcccaggtcaagaacacttgtttctgtycttctgtgcttagttagcaacctaattagtcaagccccatcttggcaccagacccttcagctccatctaaaaatcttaagtcaccgtcttgttctctatacttcctgactcctaattttattcctatccccttaatttcttctaatcaactctttactttccaattcatttttgcattattatcattaataccattcttatttttgctaatcttatagtctaattgtttctccattttcttttttaaaaaacttttctgttgtttttctatggtttcattaataaaatagtttttgttaagtttggcacgtgctaggtacttaaaatactaatagtacttatattagttaataattattgaaaacctcataggcattgtgctagatgatttataacccccattgctaatcatcacagcagtcctgaaaagcaggttatattccattgtactcattaggatcctgtagattaagaaat

SEQ ID NO: 328191 - DNA, 599 bp, Homo sapiens
aattccagccttgaggtttactgttgtttttacttcaggtcaaactgagcctcagtttctctgtgaaatttggaaaccttgtgagattattacttccaccatagttgagtggtactgagtggccatgggatatttggaatatggctgagggaagttaagttggagacacattttgtttgggtttagtgggacatagatatgtagtttgcaatcacttctaggggtagttaaattattgtaggatgtcttggtatgaaaacatcttctgatgctgagctgatttatccctcattatgacacaaaagaacaaggccagaggttgtgttctatgaagcctgtcattagaataaatgggtatgaaggaaaagcagatttaaaatgtatggagccagaagctagactggattattctagattctgtgatacttatggtgtttgtcagcttttgaattatatgatctgcttttattttctgatttacatatttattcacttttatatctaattcttgttcatatattagtattccttttcttcccaaattatatmtgctttaggccctataaaaacctccatcaactcccatttaatggtaaaca

SEQ ID NO: 328192 - DNA, 607 bp, Homo sapiens
taattcagtgatgacgatgacattttacctgttttattcactgctaattctcagttcctagaaaaatacctggcatatagtagatgtttaaaaaaattgtcgaatgaatgaatgccaacattagtagatggcgtatcatgtgatgccattccatatcttttcaagataacaccatttattttctccacttgcataggttaagtcaaggtccagattaaaaggtacatactcctcatttttttttctttaaaccatctttgcaaaaatttyctcatttttcatattgaagcaagctctataacattttttatctccatctcttcaccttatcttatcacttctgctattcattaataaggtgggagtgtatttggattggaacattcaaggtgaacattagtgtgcctcttcagatcttccttttctttaaagattattttacttttttattataaaagaatatattatcataattaaaaagtcaaacacatcagaattatataatagctccactcctctgactctacttctgcaaaaatgaccactgcttggaaattgttttatagccttcttatatctctttttttttcctctttataaactgtca

SEQ ID NO: 328193 - DNA, 629 bp, Homo sapiens
actcactggatgtgttgtttccttttggccaaactatcagggtctcccttgaacagcctgtaaagacttcaaataaagaatcatgctgataattgcctaagggcaggatttttgttttgcctaggagtcagtaatttaactgttacactgagggaggcttctgggttttgaatagaatttctttcaagrttgtattaaagttgttggtagatcaatagtttttcatcttggtgactatttgtctcctctcaaaaactagggattacacagtcactaagtgatacagactctagatgtattggagttgccacatgccgatggccctattctgtttgttctgtactttgtggctcgatatatatatatgtatgtatgtatgtatgtatagtttatgcagtggatttaactctttcatctagatttttgctcaatatcagataggatttaaagctgttatgttaaacatgttaaacagaagaggcagattattttttcatgtaattcctactcttgtatttttcctggtatcaatgtagaggataacctccctgaagtctttaaggcattattgttttaaaaaagattcacgagcccagctgaccttggcatagtatgctatagaatatact

SEQ ID NO: 328194 - DNA, 549 bp, Homo sapiens
ttattttttcatgtaattcctactcttgtatttttcctggtatcaatgtagaggataacctccctgaagtctttaaggcattattgttttaaaaaagattcacgagcccagctgaccttggcatagtatgstatagaatatactataaataggatttgtctcagtctttatccctgagcacatgaacgattttgttatattttttaccataacattgtacagcaacaaacatggggaaaataggtgtaacaatgagctccagggtatttctgagagataaaaagaaaaataaagattaatagagtttcttctttgcaaaattgttttagactgagaaatgggggtttatccaaggttatgaatgttagagtgaagtgttaaattaggggaacctaatcactatgtagtttttgattatcattagttgtctctaagacacgcttaaaaaagaaatattagtagagctatgaagcatttggttctttgtttttattgatttcaatccaaacagtgggaaactctcaaagaaaatgcctagcttgaaatacc

SEQ ID NO: 328195 - DNA, 549 bp, Homo sapiens
ttattttttcatgtaattcctactcttgtatttttcctggtatcaatgtagaggataacctccctgaagtctttaaggcattattgttttaaaaaagattcacgagcccagctgaccttggcatagtatgctatagaatatactataaataggatttgtctcagtctttatccctgagcacatgaacgattttgttatattttttaccataacattgtacagcaacaaacatggggaaaataggtgtaacaatgagctccagggtatttctgagagataaaaagaaaaataaagattaatagagtttcttctttgcaaaattgttttagactgagaaatgggggtttatccaaggttatgaatgttagagtgaagtgttaaattaggggaacctaatcactatgtagyttttgattatcattagttgtctctaagacacgcttaaaaaagaaatattagtagagctatgaagcatttggttctttgtttttattgatttcaatccaaacagtgggaaactctcaaagaaaatgcctagcttgaaatacc

SEQ ID NO: 328196 - DNA, 514 bp, Homo sapiens
ccattatcatgataacaaagaggatagtttaggttaaggagcagaccatcaaggttagcacccttgtatgcatacgtgtgtgtattaagcgctggacaaaaaaacaacaaatgaaggagagcatgagagcaattctttttcaataagagccataaatgctgaggtggacatttgtttagatgtctgcatttctttataaatacccaaagacatytaattaccaaattttaaaaatgaatatgaaatagacacatagactctttcatgtggtatttgcatttttaacttaacggcacaatgttccaaacttgggactaaggtgagcaagagagaagcaaaacaaaacatacagaaggacattaataattgaattaatttgggctcaagatgatttaaaagttcttgtatgaatggttggtgccaaatatgtgtagcagggctaccgttctctcctgaggagctcacactttctttaaggtctcacttggcaattgtcgtcctactttacagtgct

SEQ ID NO: 328197 - DNA, 517 bp, Homo sapiens
acattctgatgaaccttgtgacaaactgtaaattgaagatcatgaagttcttagagttttgttttggcatagaaatgmacaacttgaagtctttatgctttgggcatttaatttaattatgttcattcatttattcaacaaataatagtaggatgcctgtgtgcctggcattgggcaaggtgttgtgtaccttagaaagaacatgtgtttttttcaactggtctccatggccctgcctcagtattttctatgctgtggattgtgacctattagtaggttgtaaaataaaattaatagattatgaccagaatttttaaaaagtagaattgagaatagcagagtacactggatatagtattgttttatgaaactttgaaatatctctatttcagtatctatctctaagacactcatatatagctacaaggtatatttggatcagatcattataaaaaattgaaaaagcctgttctcagtattaatctgcatctctctgcactctactctacctgcccta

SEQ ID NO: 328198 - DNA, 517 bp, Homo sapiens
acattctgatgaaccttgtgacaaactgtaaattgaagatcatgaagttcttagagttttgttttggcatagaaatgaacaacttgaagtctttatgctttgggcatttaatttaattatgttcattcatttattcaacaaataataktaggatgcctgtgtgcctggcattgggcaaggtgttgtgtaccttagaaagaacatgtgtttttttcaactggtctccatggccctgcctcagtattttctatgctgtggattgtgacctattagtaggttgtaaaataaaattaatagattatgaccagaatttttaaaaagtagaattgagaatagcagagtacactggatatagtattgttttatgaaactttgaaatatctctatttcagtatctatctctaagacactcatatatagctacaaggtatatttggatcagatcattataaaaaattgaaaaagcctgttctcagtattaatctgcatctctctgcactctactctacctgcccta

SEQ ID NO: 328199 - DNA, 517 bp, Homo sapiens
acattctgatgaaccttgtgacaaactgtaaattgaagatcatgaagttcttagagttttgttttggcatagaaatgaacaacttgaagtctttatgctttgggcatttaatttaattatgttcattcatttattcaacaaataatagtaggatgcctgtgtgcctggcattgggcaaggtgttgtgtaccttagaaagaacatgtgtttttttcaactggtctccatggccctgcctcagtattttctatrctgtggattgtgacctattagtaggttgtaaaataaaattaatagattatgaccagaatttttaaaaagtagaattgagaatagcagagtacactggatatagtattgttttatgaaactttgaaatatctctatttcagtatctatctctaagacactcatatatagctacaaggtatatttggatcagatcattataaaaaattgaaaaagcctgttctcagtattaatctgcatctctctgcactctactctacctgcccta

SEQ ID NO: 328200 - DNA, 517 bp, Homo sapiens
acattctgatgaaccttgtgacaaactgtaaattgaagatcatgaagttcttagagttttgttttggcatagaaatgaacaacttgaagtctttatgctttgggcatttaatttaattatgttcattcatttattcaacaaataatagtaggatgcctgtgtgcctggcattgggcaaggtgttgtgtaccttagaaagaacatgtgtttttttcaactggtctccatggccctgcctcagtattttctatgytgtggattgtgacctattagtaggttgtaaaataaaattaatagattatgaccagaatttttaaaaagtagaattgagaatagcagagtacactggatatagtattgttttatgaaactttgaaatatctctatttcagtatctatctctaagacactcatatatagctacaaggtatatttggatcagatcattataaaaaattgaaaaagcctgttctcagtattaatctgcatctctctgcactctactctacctgcccta

SEQ ID NO: 328201 - DNA, 250 bp, Homo sapiens
ttcaatatagctaataaaggcatggataaatgtttattacataccggagacagatcatttctgtacagaaattgaggatgacctttactgataactcttatctgcctratatcctgagagggaggaaaagagaggggtaagagagaagcatatttactgatatttgtgaaaggagaaattatcatttgcaaataaaacattttaacagtgattatctcaagtcaccctcttgccctcacttccaccccaa

SEQ ID NO: 328202 - DNA, 250 bp, Homo sapiens
ttcaatatagctaataaaggcatggataaatgtttattacataccggagacagatcatttctgtacagaaattgaggatgacctttactgataactcttatctgcctaatatcctgagagrgaggaaaagagaggggtaagagagaagcatatttactgatatttgtgaaaggagaaattatcatttgcaaataaaacattttaacagtgattatctcaagtcaccctcttgccctcacttccaccccaa

SEQ ID NO: 328203 - DNA, 504 bp, Homo sapiens
ttaactgctgattttctttcttgttgtctagtgttatgattgctgactttctctgcactctaggaaatgatattactgagtgaaactcttgattaattatcatgtgatattttcattacagctatgtaaagtggccttattttwaaattaattttattttttattttaagttctgtggtacatgtgcagaatgtgcaggtttgttacataggtaaatgtgtgctattgtggtttactgcacccgtcccctaggtattaacatgagatatttcaatacaagcatgccacacataacaatcacataatgaaaaatggggtatcaatctcctcaagcaaacatttcaattacactcatttagttattttaaaatgtatatttaaattattattgactatagtcaccccaatgggctatcaaatactaggtcttatttattctatctttttttttgtaaccaataaccatccctatctcccttccactctgccactaccattcccagg

SEQ ID NO: 328204 - DNA, 504 bp, Homo sapiens
ttaactgctgattttctttcttgttgtctagtgttatgattgctgactttctctgcactctaggaaatgatattactgagtgaaactcttgattaattatcatgtgatattttcattacagctatgtaaagtggccttatttttaaattaattttattttttattttaagttctgtggtacatgtgcagaatgtgcaggtttgttacataggtaaatgtgtgctattgtggtttactgcacccrtcccctaggtattaacatgagatatttcaatacaagcatgccacacataacaatcacataatgaaaaatggggtatcaatctcctcaagcaaacatttcaattacactcatttagttattttaaaatgtatatttaaattattattgactatagtcaccccaatgggctatcaaatactaggtcttatttattctatctttttttttgtaaccaataaccatccctatctcccttccactctgccactaccattcccagg

SEQ ID NO: 328205 - DNA, 580 bp, Homo sapiens
tggaatatgaaaacaaaataagagatgattcccttatttttcagcttgggactactctggcaaaggaaaataatgtggataatatggatttggtcatcatggaacctgatgaaagtagctctgaatatatttcaaacaagtatgtctttgaaatagaaaatgaagaaaatagccctattgtaaatgctatttcatttacacatgaacccagtagatttctatcacatatacccttctccaatcatgaggcctcaaggagtcttctgtatcaaataaytcaccctgagtttgaaactaaagaaaaataccaaaccattattattaaagaagaaaactctgactctagtattgttgcctcttctttcaaagattataccaaaaacttcaacactcagcatccgaaaaccatggctccttccctaattgatgcaggtgagacttcttttcctgagtttctagaaagaacatctgcaggaaaggacactctaagtgcagatgatgccaccatcattttccctgaagtttctggtttagaaaatgaaaaaatcaagtatttctttgtacctcacatggagacaat

SEQ ID NO: 328206 - DNA, 580 bp, Homo sapiens
tggaatatgaaaacaaaataagagatgattcccttatttttcagcttgggactactctggcaaaggaaaataatgtggataatatggatttggtcatcatggaacctgatgaaagtagctctgaatatatttcaaacaagtatgtctttgaaatagaaaatgaagaaaatagccctattgtaaatgctatttcatttacacatgaacccagtagatttctatcacatatacccttctccaatcatgaggcctcaaggagtcttctgtatcaaataactcaccctgagtttgaaactaaagaaaaataccaaaccattattattaaagaagaaarctctgactctagtattgttgcctcttctttcaaagattataccaaaaacttcaacactcagcatccgaaaaccatggctccttccctaattgatgcaggtgagacttcttttcctgagtttctagaaagaacatctgcaggaaaggacactctaagtgcagatgatgccaccatcattttccctgaagtttctggtttagaaaatgaaaaaatcaagtatttctttgtacctcacatggagacaat

SEQ ID NO: 328207 - DNA, 594 bp, Homo sapiens
atatgaagtaatttctttcacaaatgacttgtcagcagagccagatgtgttttttccaacagggaaaaacaatccaaataatatggatctaattaccactgggctcgatgatggttctctggactatgtgtcagagagaaatgcattttatattggaaaagaaggaaagagccccaaatcaaaaatacctacctttgctcaagacaaaaatctacagagtatttggatctcatactcccttatctactgcacatgtcactgagaatccattgaaaggaaatcctgcagaactcaaaactaaacaaaaataccaaatgttgagctccagagaagtaaaccctgattctgacaaaggttatttctttctcaaagattatattgccaagccctatggaaagtcacccagaatgatgattcaccccctagtagatgaaaatagaaatttttcttcaaagttttcagatgataaaactctggaagacaacagcccaagtggaagygacatcatgattattcttcatgatggtaaatagattgaacatattcacattccagatccaggagcaatggtaaccagaggagaaagcaggacat

SEQ ID NO: 328208 - DNA, 622 bp, Homo sapiens
gttcaacaactattaacaggaattcaacaaatggtgatgttgattcattatccactgtgaagagagaaactgttgggatttctaaatttaagacagatgctcattctttgggtataattatgagaatactttcacccaaacaaatgcaccctttcccttccaaaataaaagaaatggctaagcactctgttgaggaagacacagcttctaaattcaacctaagtsatgttacaaatgtaacaatcatcattccaactttggaaaaagcacttcctttaacctttgagaccagcacacttcggaagagcaataacagtgaggaggaggaagttattatttctgaagcagacaatatttttttaggaaattcaagtactttgaaagataattttttcactggtaaatttaatatttctgctggacccaaacttcttcccaacttaaaaataatcttttctgctgatcccaccatgtctatggagaagactttaaagcttaagtctaacaactttgctcctccagataaagacacaggctcagaagttttgttccataattcttccactggatcacacggccaagcatggaaatcaaccctttctccttctggtttcacatcaac

SEQ ID NO: 328209 - DNA, 593 bp, Homo sapiens
tatccactgtgaagagagaaactgttgggatttctaaatttaagacagatgctcattctttgggtataattatgagaatactttcacccaaacaaatgcaccctttcccttccaaaataaaagaaatggctaagcactctgttgaggaagacacagcttctaaattcaacctaagtcatgttacaaatgtaacaatcatcattccaactttggaaaaagcacttcctttaacctttgagaccagcacacttcggaagagcaataacagtgargaggaggaagttattatttctgaagcagacaatatttttttaggaaattcaagtactttgaaagataattttttcactggtaaatttaatatttctgctggacccaaacttcttcccaacttaaaaataatcttttctgctgatcccaccatgtctatggagaagactttaaagcttaagtctaacaactttgctcctccagataaagacacaggctcagaagttttgttccataattcttccactggatcacacggccaagcatggaaatcaaccctttctccttctggtttcacatcaacagtgaggtcatctaaatat

SEQ ID NO: 328210 - DNA, 579 bp, Homo sapiens
acttcaactcataaaatcatcatttcacctggtaccaatactccaacaacaggaacactgaatactatttttagtaaaagatttccacacagaaactttgcagagaaagatacaatcctattacagaaaacatattagatattactttaggtgaaaatattccaaataatgaccatgtaataatcactgtgcttgatgacagagcttttgagaatgtcacaaatgaatatgtcctggaacaacaggagagaaaatacaaccctattattaaaaaaaactcctctcacttacaacctcaaactatttggatctcatgcattctactctagtgctgatgcctctggacatctatctcaaggagccctaactgtgaccaatactaaagacatactgcaaaatttggtgtctagagaagagcacaacagttctgaccttgatgatattgttctcaaaatttccactggcaatttgagttttgaggctcccagctctaygactcatcccctaactcacacaagtgagaattgttacaaatttctaggtaaaaccattctgggcagggacaccctaagagaattt

SEQ ID NO: 328211 - DNA, 588 bp, Homo sapiens
tttgctaaatctgatacatcccaatttaaaaggaatctcttcaattgattccatattaacttttccagaagtatctaggtctaatgatcaaagctcttctcctgaagtcactaccaawgaagggaccattatagacactcccactggaacttatggcctaccatggaaatcaactcttcttccttctaatttcacaacattaacgagttcttctaaggactgtgaatttaatccagttatcaaaatgaaaaaagacaccacaacaactaataacaatattacacctggagaaaggaattcttcatctgacaaattcaaactttcacctgctaccattatttcaacaaaaggtatgaaaaatattatttataatagtagatatggggacaagacatttatagagaaagatatatcaattgaagtagttccttttatagaaaacatttcaaaagagacaaatgacacccctttggcagatggaaatattccaaataatgagaatatgataactattatgcctgttgacagtgcccttgaatatgatgaagataatgatgtctttgcaccagtggagaaaagaagtgttct

SEQ ID NO: 328212 - DNA, 613 bp, Homo sapiens
agccaaccagcactgtggtggattccactgttccttccactgaaggcagttatgtgagtggtgattttatgttacctggagaagataatgttaagtctagaggattccaatctctgctgagaaccaacatgctccttcttgattccttaaatgaaaatccagaaacccctggcctaatgagagataactccttttctgaatcttcaataactaggtcagaagagttagaaagagcaaytgaatatgttggtgccattaatggaggcaatgtcccagagaagcaggttataataactcaaaccaacattcattcctatcccttggcttggcaagtttctccaattgaatccacattttcaaataatcccacagatagtgaaattaacttttctttctctgtgaatggaaatactcctggaaattatgaaactgagactgatgaaatatattccaaatctcaaagagcaatagagaaagccttttcccagataaaagagtctcaaaatagtgtctacaagataagaaaaatagctaatctttctgatcaagaagatccagctactatgtttaaattaagtcactttacaaatacaacagttctcattccagctat

SEQ ID NO: 328213 - DNA, 521 bp, Homo sapiens
aatctttctgatcaagaagatccagctactatgtttaaattaagtcactttacaaatacaacagttctcattccagctatatggaaaatccctccttcagcaaccaagctcaatcttctctccaacagtgacagtgatgttgatgaagaattccatatgtctgaagcaggaaactcattttcagaagataccagcaaactaaaagatgattctttcactgtgraatttgatgatacttctttcaaatctcaagcacctcccaatttaaaaggaatctcctcagtttattccacatcaactctttcagaagcatctagacctaatgatcaaagctctgcctttcatattagagtctctaacacaggcaggtccagcacaaacactccagcaagattacatggcctgcaatggagaccaactcttccttctgatttcacaacatccatggatgctcccatatattatgaactcactcctgttaccatcatgggaaaagatatcacaaagaagattgattatag

SEQ ID NO: 328214 - DNA, 538 bp, Homo sapiens
ccaatgtcaaaaccaaagctcatagacccacaactcacttcctaaccaatgcaagtgagaaggcttctagattttatgacaaaacatctgtcaaaaaaaggcaccataaatggtgatgatgacatcataattccctctgaawgctctgactttggaaataaaataattgagtattccattttttcatacgtgaaacctgtagttgacaacagaaaattcacaactgatactactaatcatgctatcaaaagtagttataacttgttcaggaaaaacatatcacctgccatttataagacatttacacccagtagggcagacactatcacatccagtatacctgattttgctgaagatgaaacaagtgtagctgcagcatctgattgaaggtttagtggttttcctttagcttagctttctagtgatgacatttccaatatggatgaaaacccagctcttactttttctcctttgagaaagatgtcgtccattaaaccaaatgttcctgctatctccactgaggacagaaataacatgg

SEQ ID NO: 328215 - DNA, 535 bp, Homo sapiens
aatatttaatcaaatggatgatattttcatacaactctaagcaaatttacacagtggtatgtatgcaatatacacatgcacacacatacacacgcaagcagaatgtctggattacatatatcacaatatataatctctaggaaggactgcaggtgattttgtttcattctctgtgctttcgtgcgtttttaaatgctctccaatcatccagaacataaactgtacacaggagaggatgaatgtttgtcaaccccattaactagaaaacctggaagccaagctaaatctttcactcttacttgcttcccatacccaattaaaatattacaagtattttgagtgttccctatgtatcagacactacttyatttttcatttacaaggcatgtatatgcactgactatgttccaagcaccatgaaagtgttttgagacactgtagtgaatcaaatgacaccatccctgccttcatggaaattaatctaccataaaagacaaattttagacaatctcaaataatcacacaggaagaaatg

SEQ ID NO: 328216 - DNA, 535 bp, Homo sapiens
aatatttaatcaaatggatgatattttcatacaactctaagcaaatttacacagtggtatgtatgcaatatacacatgcacacacatacacacgcaagcagaatgtctggattacatatatcacaatatataatctctaggaaggactgcaggtgattttgtttcattctctgtgctttcgtgcgtttttaaatgctctccaatcatccagaacataaactgtacacaggagaggatgaatgtttgtcaaccccattaactagaaaacctggaagccaagctaaatctttcactcttacttgcttcccatacccaattaaaatattacaagtattttgagtgttccctatgtatcagacactactttatttttcatttacaaggcatgtatatgcacygactatgttccaagcaccatgaaagtgttttgagacactgtagtgaatcaaatgacaccatccctgccttcatggaaattaatctaccataaaagacaaattttagacaatctcaaataatcacacaggaagaaatg

SEQ ID NO: 328217 - DNA, 535 bp, Homo sapiens
aatatttaatcaaatggatgatattttcatacaactctaagcaaatttacacagtggtatgtatgcaatatacacatgcacacacatacacacgcaagcagaatgtctggattacatatatcacaatatataatctctaggaaggactgcaggtgattttgtttcattctctgtgctttcgtgcgtttttaaatgctctccaatcatccagaacataaactgtacacaggagaggatgaatgtttgtcaaccccattaactagaaaacctggaagccaagctaaatctttcactcttacttgcttcccatacccaattaaaatattacaagtattttgagtgttccctatgtatcagacactactttatttttcatttacaaggcatgtatatgcactgactatgttccaagcaccatgaaagtgttttgagacactgtagtgaatcaaatgacaccatccctgccttcatggaaattaatctaccataaaagacaaattttagacaayctcaaataatcacacaggaagaaatg

SEQ ID NO: 328218 - DNA, 571 bp, Homo sapiens
ttttaatcattttatcctcaaaacagtcttagtactgagagcactgcctagctgaaaagcatcattattttrtaaactccaactatacttctttcaagggctttgtttaggaaaataacttgatagtcccctttgcttggaggagatgaggctctgaggcataaaccaaactgcaacagttaaacaattaaaaagataatgtgctgtacaatacaagttaacagaatttggggctagggcttagaaataacaagaagaacagcacactggcaattggttagagtccaggaagatgagtgtccagtgagattcctggtggtcaatgaacatttttccaagaaagcgtgcctaattatgtgttttaccttgcgccatttcaaagcaaagtttctccttgccctgaaatttgattaaacgtctgtaagacacaaggtcttaaatatgcacttcttgaaaaaataaagaaatataggaggcaaagaagaaacagataagtaattagagaatgaatatgagacagtctttcttcccaaatattctaaatagtgatgacctgagaaaggagtgatgg

SEQ ID NO: 328219 - DNA, 516 bp, Homo sapiens
gcctaattaaataaatattgctaaataccacacacacacacatgcacgcaggtacgatgcatggccagtaatgtaaagaatatctaaaatttcacttgactgttttgatcactttgctatatgttgtgggtttcatgtttctattttttggttgaaataatgaaattgtattattgttttgtgcttgaaagtttgtatatatcttatcctatgtatggtttttcacagttgtcttcattgagtagatgtttctgaaggatgatgaaaatgagtgctgctattaagatttggatctaagtttcaaaaaagcrggaaagaaaaatctagtggtggaagagggataatagtcagaaggttcatgcagtttctcagtcttaactatatttcatttctttgtgattatcttaagttagtagactatttacaagaccttatatatgcattttttaggaagttccttttgccagtgaagaactaaatgagaacaactgtgttttaaaaatcatgtggtccttg

SEQ ID NO: 328220 - DNA, 516 bp, Homo sapiens
gcctaattaaataaatattgctaaataccacacacacacacatgcacgcaggtacgatgcatggccagtaatgtaaagaatatctaaaatttcacttgactgttttgatcactttgctatatgttgtgggtttcatgtttctattttttggttgaaataatgaaattgtattattgttttgtgcttgaaagtttgtatatatcttatcctatgtatggtttttcacagttgtcttcattgagtagatgtttctgaaggatgatgaaaatgagtgctgctattaagatttggatctaagtttcaaaaaagcaggaaagaaaaatctagtggtggaagagggataatagtcagaaggttcatgcagtttctcagtcttaactatatttcatttctttgtgattatcttaagttagtagactatttacaagaccttatatatgcattttttaggaagttccytttgccagtgaagaactaaatgagaacaactgtgttttaaaaatcatgtggtccttg

SEQ ID NO: 328221 - DNA, 555 bp, Homo sapiens
aatgtattacccacttttcgctaagagrccatcaggactaatcttgtgtcttacacttcttcatctttttcctctaagatttcatgtctctaagttcatccacctgtattcagaccgtcatcctcagaggtctgtataatctctttcttcccccatctacaaacatcaacactgctctctcaaactcatgaaaattcatcagcaggagcctctatattctcagtttcttctctgtgtgtttgcagtaatacattgcaaaactcaaaccttgtctgtatctcaagtacactatgtgtactagaatacttggtggaggtggttgtgttttctccatactctgttctgcagggcttgggagcaaaagtatagatcactcatctttataaatatgcaaattagaggctcagatattttgcaaataaaaataaaattgtaccttgaatcagggtgaaataacaatattaagaagaatcacacatactcattcttttcaccccatcaccacatgtcagctaagtacacaggaccttgttgagtaattcacagcaacttgtt

SEQ ID NO: 328222 - DNA, 465 bp, Homo sapiens
gagtgagaccctttccatggaaagaaaaaaaaaaggagagcattaaacacaaataaaaattgtgtgcttactttaggtgtcttaagaagttttaatttataagtgtttgatggcaatgtggaaagttaagtgtcctgaagaaaaaagtcaaacatggaatggaaagataaagctctcatgacatcatgaggccatttcctaaatagtcgtatcataatacttctgaytcaaacatcaacaaatagatgcagtagaaacttggaaatctcagccatcagcttcttcttattgctatctgaaaccatttcctatctctatcttagcttagaaaatgattttttcatatcaaactctaagacttgtgattcacatctcagatatttaggtttgttagaatggtgtttcttctctgcaactatttataagcagtgatcagatggtactcaggaatttttatggggcaag

SEQ ID NO: 328223 - DNA, 465 bp, Homo sapiens
gagtgagaccctttccatggaaagaaaaaaaaaaggagagcattaaacacaaataaaaattgtgtgcttactttaggtgtcttaagaagttttaatttataagtgtttgatggcaatgtggaaagttaagtgtcctgaagaaaaaagtcaaacatggaatggaaagataaagctctcatgacatcatgaggccatttcctaaatagtcgtatcataatacttctgattcaaacatcaacaaatagatgcagtagaaacttggaaatctcagccatcagcttcttcttattgctatctgaaaccatttcctatctctatcttagcttagaaaatgattttttcatatcaaactctaagacttgtgattcacatctcagatatttaggtttgytagaatggtgtttcttctctgcaactatttataagcagtgatcagatggtactcaggaatttttatggggcaag

SEQ ID NO: 328224 - DNA, 571 bp, Homo sapiens
ggagtcattgatagctagacagtttctttttctttataattgttttctgagggacctggctctgtcagtcttctcttttactttctgcaagtaatatctgccatttaattagctcattttcttcagaaaaacactatcatttatgttcaactcaattttttttctccctatcctatcagctcttcatcccactccctgaattctaaatctaaccacttcttatcatctttcttgctttcattctmatctgtcatttacttttacccaaattactgtagggcccgttgatttgacctcttgattctaatcttgccgctttcacctaacacgtacagagaggtcgaagacatcatttgggaaataaatataaattgatatttccctgtttataaaagattcagtttcaaccaccaatacccttgttgttgtgacctccttttcacctctttcctgcaaagcaaagctctatgaaagagtattctaaatttgccaaccccacttctcacttcccatttgctcttcaacctggcttttgcccttaacatgccggtaaaagttttattcatatcac

SEQ ID NO: 328225 - DNA, 592 bp, Homo sapiens
ttataattgttttctgagggacctggctctgtcagtcttctcttttactttctgcaagtaatatctgccatttaattagctcattttcttcagaaaaacactatcatttatgttcaactcaattttttttctccctatcctatcagctcttcatcccactccctgaattctaaatctaaccacttcttatcatctttcttgctttcattctcatctgtcatttacttttacccaaattactgtagggcccgttgatttgacctcttgattctaatcttgccgctttcacctaacacgtacagagaggtcgaagacatcatttgrgaaataaatataaattgatatttccctgtttataaaagattcagtttcaaccaccaatacccttgttgttgtgacctccttttcacctctttcctgcaaagcaaagctctatgaaagagtattctaaatttgccaaccccacttctcacttcccatttgctcttcaacctggcttttgcccttaacatgccggtaaaagttttattcatatcaccaatgaaacaaacaaaaaattccaaggcacttctgtgggaccagccttgcattt

SEQ ID NO: 328226 - DNA, 592 bp, Homo sapiens
ttataattgttttctgagggacctggctctgtcagtcttctcttttactttctgcaagtaatatctgccatttaattagctcattttcttcagaaaaacactatcatttatgttcaactcaattttttttctccctatcctatcagctcttcatcccactccctgaattctaaatctaaccacttcttatcatctttcttgctttcattctcatctgtcatttacttttacccaaattactgtagggcccgttgatttgacctcttgattctaatcttgccgctttcacctaacacgtacagagaggtcgaagacatcatttgggaaataaatataaattgatatttccctgtttataaaagattcagtttcaaccaccaatamccttgttgttgtgacctccttttcacctctttcctgcaaagcaaagctctatgaaagagtattctaaatttgccaaccccacttctcacttcccatttgctcttcaacctggcttttgcccttaacatgccggtaaaagttttattcatatcaccaatgaaacaaacaaaaaattccaaggcacttctgtgggaccagccttgcattt

SEQ ID NO: 328227 - DNA, 592 bp, Homo sapiens
ttataattgttttctgagggacctggctctgtcagtcttctcttttactttctgcaagtaatatctgccatttaattagctcattttcttcagaaaaacactatcatttatgttcaactcaattttttttctccctatcctatcagctcttcatcccactccctgaattctaaatctaaccacttcttatcatctttcttgctttcattctcatctgtcatttacttttacccaaattactgtagggcccgttgatttgacctcttgattctaatcttgccgctttcacctaacacgtacagagaggtcgaagacatcatttgggaaataaatataaattgatatttccctgtttataaaagattcagtttcaaccaccaatacccttgttgttgtgacytccttttcacctctttcctgcaaagcaaagctctatgaaagagtattctaaatttgccaaccccacttctcacttcccatttgctcttcaacctggcttttgcccttaacatgccggtaaaagttttattcatatcaccaatgaaacaaacaaaaaattccaaggcacttctgtgggaccagccttgcattt

SEQ ID NO: 328228 - DNA, 499 bp, Homo sapiens
atggggctatttaaattaaattagattttaaatttaaatttaaccactagaacagtgtttcatcaayggttaatagttactaatatataagaaaaggtaacatcattaatgtaaaaagaaatctgaagtaatggttaatgagaaagtataaagatgtgtgatcgtgattaatgatacttactgtgaaacacgctgcaagagcccaaaggcccaagatccaagtcagtgatttcatcctttcagttgcctctgaaagtaagcacaataggtgatcagtatgattgttttttattaaaaagtactatttaaaatgtctcaacacatggatataatgtagtacagatatactactgtagcctttttaggaaatttgcctaacattattttggattcagtattactgtgggacaacattagtaggcttataaaatttgacttcaaaatagtggaagtagtttttatttttgacttgtaaactgatactggagataatgccaaa

SEQ ID NO: 328229 - DNA, 499 bp, Homo sapiens
atggggctatttaaattaaattagattttaaatttaaatttaaccactagaacagtgtttcatcaacggwtaatagttactaatatataagaaaaggtaacatcattaatgtaaaaagaaatctgaagtaatggttaatgagaaagtataaagatgtgtgatcgtgattaatgatacttactgtgaaacacgctgcaagagcccaaaggcccaagatccaagtcagtgatttcatcctttcagttgcctctgaaagtaagcacaataggtgatcagtatgattgttttttattaaaaagtactatttaaaatgtctcaacacatggatataatgtagtacagatatactactgtagcctttttaggaaatttgcctaacattattttggattcagtattactgtgggacaacattagtaggcttataaaatttgacttcaaaatagtggaagtagtttttatttttgacttgtaaactgatactggagataatgccaaa

SEQ ID NO: 328230 - DNA, 499 bp, Homo sapiens
atggggctatttaaattaaattagattttaaatttaaatttaaccactagaacagtgtttcatcaacggttaatagttactaatatataagaaaaggtaacatcattaatgtaaaaagaaatctgaagtaatggttaatgagaaagtataaagatgtgtgatcgtgattaatgatacttactgtgaaacacgctgcaagagcccaaaggcccaagatccaagtcagtgatttcatcctttcagttgcctctgaaagtaagcacaayaggtgatcagtatgattgttttttattaaaaagtactatttaaaatgtctcaacacatggatataatgtagtacagatatactactgtagcctttttaggaaatttgcctaacattattttggattcagtattactgtgggacaacattagtaggcttataaaatttgacttcaaaatagtggaagtagtttttatttttgacttgtaaactgatactggagataatgccaaa

SEQ ID NO: 328231 - DNA, 593 bp, Homo sapiens
gtggaagtagtttttatttttgacttgtaaactgatactggagataatgccaaagagttgttcataaatgattgaacaatagaagcttttgtaactacagtttttgcctttagaggtaactactttgacatgtacaattatttacatttgaatacttttgcatttttaaatagcaggtacattgttttatagatttctataggcttgggtttgaaatattaacatattaactagatcatatgttagtgtaattccttgggatatctcaaaaataaggaaaagaaagaaatcactctgtttgatgtagtgtaagaaaaaaagagtcatattatatatctcctagttttaacaacattccactaaattaatttagtctgtgatgtgtggtctcaaagtgcttccaaaaatccrtatatggtagatcaaagaccaagtcagagaatatggaggagtccagatattttattcacagttggctcacaatttgtgaaatatttcaagtacctgatagcttgagttctgggaaagcaactccatgcaccattgtacaaatggcttcctgacagtcaactctgcacataggttgagtgtgt

SEQ ID NO: 328232 - DNA, 590 bp, Homo sapiens
agttgcagaatgtactaaaactattgttgctggttggcaagggcagtgtcagccacctcagctgggttagactcagttgccgcagtgtttgtgacagcctcagattggagcctgctgggagctgtggtgttggaaatggcacctgtagttttgctggtagaggcaatgggagtggccgtggtggccacaacagttgcaggagcagaggtggctagcagtgcttgagaactagggtttacatcattctcaggtggttgtgtaggtccagatgatggacaatgtgggtggttggggtgatgagggctttgatggtggaagagatgatggagaccaaggggaaccacaggaactgtttcaaattttataaactgcttgtagtttggctttccaggactttgtttcagtggtttaaaattcttttcagaactwtggctagacttcagagagagaacacaaaacaagcaaataattgtttttacacagatgggatgcataaactaaagtcaagctttaaatatgtatttatattaccatttacatttatacaattattctaaattcatttcataagtaagttgatagaataatat

SEQ ID NO: 328233 - DNA, 590 bp, Homo sapiens
agttgcagaatgtactaaaactattgttgctggttggcaagggcagtgtcagccacctcagctgggttagactcagttgccgcagtgtttgtgacagcctcagattggagcctgctgggagctgtggtgttggaaatggcacctgtagttttgctggtagaggcaatgggagtggccgtggtggccacaacagttgcaggagcagaggtggctagcagtgcttgagaactagggtttacatcattctcaggtggttgtgtaggtccagatgatggacaatgtgggtggttggggtgatgagggctttgatggtggaagagatgatggagaccaaggggaaccacaggaactgtttcaaattttataaactgcttgtagtttggctttccaggactttgtttcagtggtttaaaattcttttcagaactatggctagayttcagagagagaacacaaaacaagcaaataattgtttttacacagatgggatgcataaactaaagtcaagctttaaatatgtatttatattaccatttacatttatacaattattctaaattcatttcataagtaagttgatagaataatat

SEQ ID NO: 328234 - DNA, 619 bp, Homo sapiens
tatgtcaattcaataatacccgggcagagttgaaactctggccaaagccatgggcatcaaaccaaggtagctgaaggacactaacagcaatacagcaaggtgaacagcaaggcatggaccacctattggatgctccccacaatcgcttaaggaagcttctacttcccctcaagtatccaagactttagcacgggaatgaaataagagcacagagacacactgaattctaattgccgtcactctaaatgagagcccagctagagaccagtctccccaacagtcaggagaagaccagttctaatacactcacaggagaacagagcccagaaaaatccaaccctcatccacatgttctaactcttctatgaagtaagttagaattcaaggggaaaacagataatatgactgcccactttagaagttcttcttgactaggttctggcctcatgcagaggaaagtagtaattccaaaacattgatctrcataaaaaattatttagtttcttatttgttcttcagatttctaggaacattcctgctctgaaaattttgactccgtgttgtgggattaggcaggaatttgcaacttgaacaagtagtacagataattaatcatttg

SEQ ID NO: 328235 - DNA, 587 bp, Homo sapiens
aggttacaggaattgagtacattaactagaaagatattaaagatagagggagaaaagatagagtggtggtggatgctggaagaatttttaaaagttctcctaaatttagagtttgaggaaaataagaggaaccaaaatggaaattaagagcagctttaagtgactcgagggggaaaaaaaaagaaggaaaagtcaaaaagttttaccagccagaaaaatgaatcaccaagccaagagctgctacaacattgagtgggaagaatatctaacagctaccactggatttggctacacagagatcatcgttgatctggctgtttattttgaatggtaacaagaatgacaagaatgaagtaaacataggacaggattatagggggtcttgggttcrtgttggagaaataacactttacataaattgattatcccttgtatgtttaaatctgtatattttaatggcttcagaaatctttggaccctaaaacttactgaggaataaattaatgtgtgtgctaatgctaaagtcacaatgacactcactctaggctccagatgacatcaaatgtctcctcacaatctgaaaatag

SEQ ID NO: 328236 - DNA, 644 bp, Homo sapiens
  misc_feature (1)...(644): n = A,T,C or G
aggttgccttagatcagtagatatgggaaatatccaatgttaccagtactcaagtaaattttagactatgaggtccacaagaacagagatgtttacctgctttggttactaatttatccctactacctgaaacagtatctgaaataaggtatgtgctcaaagaataatgtccaggacctgaaatattgtatgtgctcaaataataatgtacagttttgcaaagccccacaaaagctacattagtatttgaagtgaatgggtgacaccatggtaaacatgtttttatcttggtgggagaaawgattactagcactctcagatgttcttaaaatatattttcctgtgaaaacaatgtcttcagaagtgttctgagtctctgctacttgtaaattaaataattcaatactcaactgaaaatcattatcactcttattactctaaataaatggctgagaaattactatgtgaaatagaacaccttcaaaatttgaggaatgaccggatcatgatctttcaaccacggaccctgataatcaaaggaaaacactgtgactaaatagttcagatagaatggctggtgttattactttaccaacttggtttagccattttaaattctgtcatctctttnnnnnnnnnnnnnn

SEQ ID NO: 328237 - DNA, 501 bp, Homo sapiens
gtgatttctgcatttccaactgaggtacctgattcttctcattgggactggttggacagtgggtgcagcccacggagcatgagctgaagcagggcggggcgtcacctcacctggaagtgcaaggggtctrgggatttccctttcctagtgaagggaagctgtaacagactagctggaaaaacaggacattccctgcccaaatactgtgcttttctcaaggtcttagcaaccggcagacaagatgattatctcctgtgcctggttcagtgggtcccatgcccactgagcctagctaactgctagcacagcagtctgagattgctctgcgaggcagtctggctgggggaggggtgtccgccattgctgaggcttgagtaggtaaacaaagcaccgggaagcttgaactgggtggagcccactgcagctcaacaaggcctactgcctctagaatctacctgtgtgggcagggcatagctgaacaaaaggcagcagacaacttct

SEQ ID NO: 328238 - DNA, 501 bp, Homo sapiens
gtgatttctgcatttccaactgaggtacctgattcttctcattgggactggttggacagtgggtgcagcccacggagcatgagctgaagcagggcggggcgtcacctcacctggaagtgcaaggggtctggggatttccctttcctagtgaagggaagctgtaacagactagctggaaaaacaggacattccctgcccaaatactgtgcttttckcaaggtcttagcaaccggcagacaagatgattatctcctgtgcctggttcagtgggtcccatgcccactgagcctagctaactgctagcacagcagtctgagattgctctgcgaggcagtctggctgggggaggggtgtccgccattgctgaggcttgagtaggtaaacaaagcaccgggaagcttgaactgggtggagcccactgcagctcaacaaggcctactgcctctagaatctacctgtgtgggcagggcatagctgaacaaaaggcagcagacaacttct

SEQ ID NO: 328239 - DNA, 501 bp, Homo sapiens
gtgatttctgcatttccaactgaggtacctgattcttctcattgggactggttggacagtgggtgcagcccacggagcatgagctgaagcagggcggggcgtcacctcacctggaagtgcaaggggtctggggatttccctttcctagtgaagggaagctgtaacagactagctggaaaaacaggacattccctgcccaaatactgtgcttttctcaaggtcttagcaaccggcagacaagatgattatctcctgtgcctggttcagtgggtcccatgcccacygagcctagctaactgctagcacagcagtctgagattgctctgcgaggcagtctggctgggggaggggtgtccgccattgctgaggcttgagtaggtaaacaaagcaccgggaagcttgaactgggtggagcccactgcagctcaacaaggcctactgcctctagaatctacctgtgtgggcagggcatagctgaacaaaaggcagcagacaacttct

SEQ ID NO: 328240 - DNA, 501 bp, Homo sapiens
gtgatttctgcatttccaactgaggtacctgattcttctcattgggactggttggacagtgggtgcagcccacggagcatgagctgaagcagggcggggcgtcacctcacctggaagtgcaaggggtctggggatttccctttcctagtgaagggaagctgtaacagactagctggaaaaacaggacattccctgcccaaatactgtgcttttctcaaggtcttagcaaccggcagacaagatgattatctcctgtgcctggttcagtgggtcccatgcccactgagcctagctmactgctagcacagcagtctgagattgctctgcgaggcagtctggctgggggaggggtgtccgccattgctgaggcttgagtaggtaaacaaagcaccgggaagcttgaactgggtggagcccactgcagctcaacaaggcctactgcctctagaatctacctgtgtgggcagggcatagctgaacaaaaggcagcagacaacttct

SEQ ID NO: 328241 - DNA, 315 bp, Homo sapiens
aggagccttgaaatctgtgtgtgtatttctcccaaatccttgggtgaccataaaatatgcacatgcaggacaagatattaaggaggatcccagggcaaaccaatagctggaaaactaaaaaactgagcagtcatttcagcagtttcttttgcagtggagatgagcaagcagttagagtyctacctacttggaggaaactgataaggatccctggctttttattgaacctgattaacatcactgtttttttttttttttttttttttttaccagaaaagcaaccttgtaactgcaaacaccatgttgatagaattg

SEQ ID NO: 328242 - DNA, 574 bp, Homo sapiens
ttcttagcccttttgtctttgaatatttcctgtttcctttatgtattgttttattgggagaatgttattaggcattatcaatccatgccctttgtcttttaaactctctttaattttcagagctcaagtgagtcagcacattgctttttatttaccattaccagtaatcaaacgtctttgagtgcatatgagggacatggcttcccaagagtcccagaattatgtggagaatcttagttccaactatttgcctgaagtgagcctaaagtcctgtcttttgccttcatcttggttttaaaattcgagatcctgtattaaaaaggccaagcctgcccttcagggcagtctctgagtccctacacatgttctcctccctggattttgtttcctttttgtttttgtgctgggggtttcccttactattattttgcaccaaagtcaattatacgtttaaaagtatatttattataagcmatttataatgtatcagtttcaaaaattttatatatatttcccatgcccttaaaagtaggcaaaatgggacagatatttcatattattttagtaggcatga

SEQ ID NO: 328243 - DNA, 620 bp, Homo sapiens
ttgtggcctcagtagatggagttgtagcttctctggctggagggatggcaactcagttgttgtgccatctgcagttttattgatgatattgtcccctggacttgtagcatcaggggtcagggtggtagttgcgctgttactggtcagtgaatcagattcagcagtataggtagaagtacctggtaaggtggtggcaacacttaatacagttgtggcatcaccaccctgtacagttgtggtggtaccagaagacgtgttaccagtgcctgaaggtatgggtagtgacacttgtggtgacataaaccactggagttgtggaggcctctacggttgtagtggtagatcctacaggtattatggctgtagttgcaatagctgttgtcctggtagctggagatgtggagtctgctgctgaggacgtagggttagctatggaggttgtggcagaaggttcaattgtggcatctttggcctgagtggtgacagcttcggtgattgtgtcatttgctggttyggaggtagtctccacctctgcagttgaagctccaaaaccctgggtggtagtttcactcagggtggtcaacacaccaggctcagcagtagaagctgaagtcacaggg

SEQ ID NO: 328244 - DNA, 619 bp, Homo sapiens
gatgactggacaggtattttctttttacttgatgtcctagaattagaggttgattggctggctgctttggctgctttgttagttggtacagaaaggtgtgcagccctagcaggtagagactttgatttttgaatactgaaaggtgacgatgaagcccttttgggggatctatggacaggtgaggcagaggcatgagaatgggcttgaggtttccctaagagctgtgtgaatgaagatctgctttatggtgtcctggcaggggagctttggactgctgactattgattgtctttcctgttgcctgatgctgtkattgctgacactcactgaactgcaggggcagagaatagaagatattaccaagagaggcattgaatcaattattgtttcatattttcattttagttgctgtagctggtctgttctttagattaggaggagttttggttttgaatgtattttaatttagaataaattgcaatataaacttaaaatagaacaagatggtgaaataggaagtctcagactttactcccccaacagaaagttcaactagcaattatccacagactataacttctttataagaaccccaatacttggaaacaggcctgggaaa

SEQ ID NO: 328245 - DNA, 619 bp, Homo sapiens
gatgactggacaggtattttctttttacttgatgtcctagaattagaggttgattggctggctgctttggctgctttgttagttggtacagaaaggtgtgcagccctagcaggtagagactttgatttttgaatactgaaaggtgacgatgaagcccttttgggggatctatggacaggtgaggcagaggcatgagaatgggcttgaggtttccctaagagctgtgtgaatgaagatctgctttatggtgtcctggcaggggagctttggactgctgactattgattgtctttcctgttgcctgatgctgttattgctgacactcactgaactgcaggggcagagaatagaagatattaccaagagaggcattgaatcaattattgtttcatattttcattttagttgctgtagctggtctgttctttagattaggaggagttttggttttgaatgtattttaatttagaataaattgcaatataaacttaaaatagaacaagatggtgaaataggaagtctcagactytactcccccaacagaaagttcaactagcaattatccacagactataacttctttataagaaccccaatacttggaaacaggcctgggaaa

SEQ ID NO: 328246 - DNA, 524 bp, Homo sapiens
caggaaactggcattttctgtagagaaatttttctatgcaaatacttgtctttacaggagtaaatgaagttaaaaatatggaactttaggtaactaagtaattagacttggtctttcgttatttagcatcttttaaatgaatataaaactgattttgtgtcattcaatagcatttattttactctgaagaatcagataaagcatgctccatagaatttcaatcatcccgctttttttttactgtgtgacctggaaatatgagataacctcctctccaccaaasagttcacaggtcctccagtgcataagaagtcctctgcctcttagtcaaggaaaatgttaacttgcagtaatgactacattattgggaagcacactgaaagaggatcttatgaaccattaaatgtagcacaataaaggtgaaagctaccttatactcatcatgtaacagtcctactataaacatggcttaatgtacctttacttataattgtgtttgtctaaaacttcatcaagttttttgg

SEQ ID NO: 328247 - DNA, 524 bp, Homo sapiens
caggaaactggcattttctgtagagaaatttttctatgcaaatacttgtctttacaggagtaaatgaagttaaaaatatggaactttaggtaactaagtaattagacttggtctttcgttatttagcatcttttaaatgaatataaaactgattttgtgtcattcaatagcatttattttactctgaagaatcagataaagcatgctccatagaatttcaatcatcccgctttttttttactgtgtgacctggaaatatgagataacctcctctccaccaaacagttcacaggtcctccagtgcataagaagtcctctgcctcttagtcaaggaaaatgttaacttgcagtaatgactacattattgggaagcacactgaaagaggatcttatgaaccattaaatgtagcacaataaaggtgaaagctaccttatactcatcatgtaacagtcctacyataaacatggcttaatgtacctttacttataattgtgtttgtctaaaacttcatcaagttttttgg

SEQ ID NO: 328248 - DNA, 591 bp, Homo sapiens
gagaaatctgggaagcgtgcagcaaaagagccactgtaatagaatggtgagccttctaggggcttcacttcagaaattccttctagggacttcacttcagaaattcagatctctaaagaagaaagcctcttcccagtatatctgggggagaaatatcaacaaatcaccttcaatgtcttttctaaaacacctagcaatgtgtgaactccaatggaatgttgacattaggtaatatcagaaaggaaagttcactaatggtcacatagcatgaagaaatgcagccattaatctgttctccactctgttagttctcttagtcagtctccctgcaatcttcaaagcataataactctcatttgcaccacttctaaaagtagctaagtatgttttgaaattgtacggttcatttcatgttcattctaacagcaattacaatattctgtagttaacacagcgtaaagatcactgaaactctataataattatgccagccagttrtaagtgaatcactctggtagaagtcctgaaatataataccaccaaataacctttcttggccacccacacaagacagctttccctctcagagca

SEQ ID NO: 328249 - DNA, 505 bp, Homo sapiens
gttcagtgagatcactgttgagagcacgttcacagcgctggccttgtgcacagtcagcacatgttgggcagggctgttgctgatacgtggttgactgtcattgctagactgtggctttaccaggggcattgtctttattgccgagcccagagccacccctagtacctgctgtgtttatagagtgattgagtggcagggtcagagactggggcaatggcagcagaaacagaggaaagaagtggggcttctaataggtcctgagccagtggcccttgagatgaarccttcttgccaaggtctggggctgtgctgtgtgttctaggcccgagactggaagctaggcctggctgcagctcccgctgagctggggaagtgcaggtcagcatcctgcttcattaggacacctccaagcccagcttagacgtggatgccaggtgaccccctgtttactctgagcccagacagaggacagggaagtgtgcaagggtggggacccccatcacag

SEQ ID NO: 328250 - DNA, 577 bp, Homo sapiens
tttaagctcatctgtagttcaaactgcctatccgtgtatttgtccattcatcctgattcatttattgagcaattcttttgtgccaggcactgtgctgggtgctggtaatgcaatgatgaagatggcaggcatgactctgccctccaggagtttctaggatgctgagggagacaaacaaaaaataagtaaatccatgaaagaagtattggtgggacctgcccccaatatttcaacataggttctttctattttccataaatgtcagccagctgagaaataaagagacagtacaaagagaggcattttacagctgaaccactgggggtgacattacatattggtaggaccatgatgccccctgagtctcagaccagcaagtttttattaagggtttcaaaaggggaaggggtgtaagaagagggagtaggtacaaagatcacatgyttcaaagggcaaaaagcagaactactagtaagggtctaacaaagatcacatgcttctgagggaacaggacaaaggcaaaagcagaactactaataagggtccagcaaagatcacaaagcaaaagccaaaagca

SEQ ID NO: 328251 - DNA, 538 bp, Homo sapiens
cccaccaggccccacctctaacactgttgattacattgtaacatgagatttgggtggggacacataatcaacctatatcagctgctttcatgctatgggtggcagagttgagtaactactacaggagactgtatggcccatgaattctaaaatatttactatctgatgctttcaagaaaaagtttgcaaaccctgctcttgaaaargaagggagggaagaggagaggaggaaggcaggaaggagcagagagggacacggggctgtattcaaacatctgttgttaagaaagagaaattcaaagcatctggcatggcccaagttatcaaactaggagcactccattgaagtttcaggacaaacactgtgctgaatataaggatgaccccatctgtaatgcctaactttgtttttattaactttgttcttagactttccttttcttttaatcacttagccttgtttctacctgaattgactgtcttttagctaagagagctagacagactttatcttggctctttcaccggcagccccttc

SEQ ID NO: 328252 - DNA, 538 bp, Homo sapiens
cccaccaggccccacctctaacactgttgattacattgtaacatgagatttgggtggggacacataatcaacctatatcagctgctttcatgctatgggtggcagagttgagtaactactacaggagactgtatggcccatgaattctaaaatatttactatctgatgctttcaagaaaaagtttgcaaaccctgctcttgaaaaggaagggagggaagaggagaggaggaaggcaggaaggagcagagagggacacggggctgtattcaaacatctgttgttaagaaagagaaattcaaagyatctggcatggcccaagttatcaaactaggagcactccattgaagtttcaggacaaacactgtgctgaatataaggatgaccccatctgtaatgcctaactttgtttttattaactttgttcttagactttccttttcttttaatcacttagccttgtttctacctgaattgactgtcttttagctaagagagctagacagactttatcttggctctttcaccggcagccccttc

SEQ ID NO: 328253 - DNA, 612 bp, Homo sapiens
tttgctctccctataaaaacaggacatactaagccaaggaaagcaccaatctagtttgttctccccagatcttcaaaatgttggaattagtatgagtcgaaaatatttcacatggtttgatttatttatttatttatttatttatttttatttatttattttttttttttggagacagagtctcattccatcgtccaggttggagtgcagtggcacaatctcagatcaccacaacctccgcctcccgggttcaagcaattctcctgcctcagcctcccaagtagctgggattacagacatataccaccacgccctgctaatttttgcatttttagtagacatggggtttctccatgttggccaggctggtctcgaactcctgacctcaaatgatctacccgcctcggcctcccaaagtgctgggattacaggtgtaagccaccatgtccggccagtttgattttttattgtggtaaaatacatacaaaatctattattttagccattttcaaaggaaaaattcagtggygttaagtgcatccaccacattgtacagccatgtcccccatccatctccagaacgctttcatcctgtcctgcaaatatgcggca

SEQ ID NO: 328254 - DNA, 338 bp, Homo sapiens
tttttccctataaaatctattctttaaactgtcaaggctcctggctgcagtcctttgctggtggcagtgggctgggtactgccactggggagaaatgctscccacttagggaaagggaaactggttctctttaagaggcagagggaggtttccagtgccagtttgtttggaggcaaaatggctgttgtattaaaattgcccaaacttgggctggtgcctagtgtgtttagagctcaaagccatgattgttttcatttttttttttttggttgttggttttccatccttttgcatggcaggtttctgctaatagcttcaacctcaagagtcccattata

SEQ ID NO: 328255 - DNA, 338 bp, Homo sapiens
tttttccctataaaatctattctttaaactgtcaaggctcctggctgcagtcctttgctggtggcagtgggctgggtactgccactggggagaaatgctccccacttagggaaagrgaaactggttctctttaagaggcagagggaggtttccagtgccagtttgtttggaggcaaaatggctgttgtattaaaattgcccaaacttgggctggtgcctagtgtgtttagagctcaaagccatgattgttttcatttttttttttttggttgttggttttccatccttttgcatggcaggtttctgctaatagcttcaacctcaagagtcccattata

SEQ ID NO: 328256 - DNA, 338 bp, Homo sapiens
tttttccctataaaatctattctttaaactgtcaaggctcctggctgcagtcctttgctggtggcagtgggctgggtactgccactggggagaaatgctccccacttagggaaagggaaactggttctctttaagaggcagagggaggtttccagtgccagtttgtttggaggcaaaatggctgttgtattaaaattgcccaaacttgggctggtgcctwgtgtgtttagagctcaaagccatgattgttttcatttttttttttttggttgttggttttccatccttttgcatggcaggtttctgctaatagcttcaacctcaagagtcccattata

SEQ ID NO: 328257 - DNA, 554 bp, Homo sapiens
ttttgtgagttcctatgcatagtggagacctgttctagtgacggtccctggggctgagcctgtgggtcagtggaatgatgctgtgaggagggtcttgttatagcagatggcccaaaaaaggctgatggatcatgagcagctggaagaatgkagagtttgggggacgtagttcctacctggctttccaacaatgtgtaagcccggaattcttacataagtccatggagaagggaaaggaatgctggtaacgacaagattgaattctccacctgccaggcatccagggactcagagcagatttaactgaagttacagaaataggaatgtgacatttcttacatccgggtgtgctggagcaaatgtattccctctcaggtttgtggggaaggagaatgctaacagacaagactccaggtttttgctgttaaacctggtgcctagaaatgcattttctactggatgcagatagaagctccatatagacatatccatcgctgcatctctcctgccttgtgttctccctaattttccctttttaacccacagaggaagga

SEQ ID NO: 328258 - DNA, 554 bp, Homo sapiens
ttttgtgagttcctatgcatagtggagacctgttctagtgacggtccctggggctgagcctgtgggtcagtggaatgatgctgtgaggagggtcttgttatagcagatggcccaaaaaaggctgatggatcatgagcagctggaagaatggagagtttgggggacgtagttyctacctggctttccaacaatgtgtaagcccggaattcttacataagtccatggagaagggaaaggaatgctggtaacgacaagattgaattctccacctgccaggcatccagggactcagagcagatttaactgaagttacagaaataggaatgtgacatttcttacatccgggtgtgctggagcaaatgtattccctctcaggtttgtggggaaggagaatgctaacagacaagactccaggtttttgctgttaaacctggtgcctagaaatgcattttctactggatgcagatagaagctccatatagacatatccatcgctgcatctctcctgccttgtgttctccctaattttccctttttaacccacagaggaagga

SEQ ID NO: 328259 - DNA, 550 bp, Homo sapiens
taggtggtcaggtggagttattcatgcctgtaatctcatactgaaggggtggcctgcccttccacacctgtgggtatttctagccaggtaggctgagagacagaaaagaaataagacacagagataaagtatagagaaacaacagtgggcccaggggaccggcgcatagcataycaaggacctgcattggcaccggtctctgagttccctcagtttttattgattattatcttcattatttcagcaaaagggaatgtagtaggagggcagggtgataataaggagaaggtcagcaacaaaaatgtgagcaatagaatctatgtcataatgaagttcaagggaaggtactatgactggacgtgcacataagccagatttatgtttctctccacccaaacatctcagtggagtaaagaataacaaggcagcattgctgtaaacatgtctcgcctcccaccatagggcggttcttctcccatctcagaattgaacaaatgtacaattgggttttataccaagacattcagttcccagggacaggcaggagaca

SEQ ID NO: 328260 - DNA, 550 bp, Homo sapiens
taggtggtcaggtggagttattcatgcctgtaatctcatactgaaggggtggcctgcccttccacacctgtgggtatttctagccaggtaggctgagagacagaaaagaaataagacacagagataaagtatagagaaacaacagtgggcccaggggaccggcgcatagcatatcaaggacctgcattggcaccggtctctgagttccctcagtttttattgattattatcttcattatttcagcaaaagggaatgtagtaggagggcagggtgataataaggagaaggtcagcaacaaaaatgtgagcaatagaatctatgtcataatgaagttcamgggaaggtactatgactggacgtgcacataagccagatttatgtttctctccacccaaacatctcagtggagtaaagaataacaaggcagcattgctgtaaacatgtctcgcctcccaccatagggcggttcttctcccatctcagaattgaacaaatgtacaattgggttttataccaagacattcagttcccagggacaggcaggagaca

SEQ ID NO: 328261 - DNA, 550 bp, Homo sapiens
taggtggtcaggtggagttattcatgcctgtaatctcatactgaaggggtggcctgcccttccacacctgtgggtatttctagccaggtaggctgagagacagaaaagaaataagacacagagataaagtatagagaaacaacagtgggcccaggggaccggcgcatagcatatcaaggacctgcattggcaccggtctctgagttccctcagtttttattgattattatcttcattatttcagcaaaagggaatgtagtaggagggcagggtgataataaggagaaggtcagcaacaaaaatgtgagcaatagaatctatgtcataatgaagttcaagggaaggtactatgactggacgtgcacataagccagattkatgtttctctccacccaaacatctcagtggagtaaagaataacaaggcagcattgctgtaaacatgtctcgcctcccaccatagggcggttcttctcccatctcagaattgaacaaatgtacaattgggttttataccaagacattcagttcccagggacaggcaggagaca

SEQ ID NO: 328262 - DNA, 528 bp, Homo sapiens
ttccctcagtttttattgattattatcttcattatttcagcaaaagggaatgtagtaggagggcagggtgataataaggagaaggtcagcaacaaaaatgtgagcaatagaatctatgtcataatgaagttcaagggaaggtactatgactggacgtgcacataagccagatttatgtttctctccacccaaacatctcagtggagtaaagaataacaaggcagcattgctgtaaacatgtctcgcctcccaccatagggcggttcttctcccatctcagaattgaacaaatgtacaattgggttttataccaagacattcagttcccagggacaggcaggagacagtggccttcctctmtctcaactgcaagaggctttcctctttgactaatccacctcagcacagaccttttacgggtgtcaggctgggggaccgtcaggtctttctcctcccatgaggccacttttcagactatcacatgggtagaaaccttagacaatatgccgctttcaagggcagggctcc

SEQ ID NO: 328263 - DNA, 506 bp, Homo sapiens
gtctttaggatattaatcacctcaaacattgatcatttctttgtgttgggaatatttcaaatcttattgctatttagaaatatacaataaatccatttatcaggatacaaaatctatgtacacaaatcagtagcagtgctatacaccaacatcttccaggctgagaatcaaatcaaacccttttataatagctttaaaaataaaatacttaagaatatacctaacyaaggaggtgaaagacccctacaagggaaactacaaaacactgttgaaagaaatcatagatgacaaaaacaaatggaaacacattccatgctcatggatgggtagactcaatattgtgaaaatgaccatactgccaaaagcagtctacaaattcaatgcaattcctatcaatgtaccatcatcattctttatagaactagaaaaaacaatgctaaaattcatttggaactaaaaatgaatctgcataggcaaagcaaaactaagcaaaaagaaccaatcta

SEQ ID NO: 328264 - DNA, 354 bp, Homo sapiens
ctcaaatataatcaggtaaaaagagcaaattctctgtgactctacctttttgttttgttcaggccttcagtggattggatgaggctcacccacactggggaggamaatctgctttattcagtctagcaattaaatgttatcctcatccagaataccacagagacacacccagaataatgtgtagccaaatatctgggcaccccacaacccagtcaaattgttacataacactaaccataatgtcttgcttctactctctcgccattactgcatggtcaaatccttcccttatctcaaggcttagttcaaatgttacctcttaactaagccttccctgctaaccccaatattaat

SEQ ID NO: 328265 - DNA, 354 bp, Homo sapiens
ctcaaatataatcaggtaaaaagagcaaattctctgtgactctacctttttgttttgttcaggccttcagtggattggatgaggctcacccacactggggaggaaaatctgctttattcagtctagcaattaaatgttatcctcatccagaataccacagagacacacccagaataatgtgtagccaaatatctgggcaccccacaacccagtcaaattgwtacataacactaaccataatgtcttgcttctactctctcgccattactgcatggtcaaatccttcccttatctcaaggcttagttcaaatgttacctcttaactaagccttccctgctaaccccaatattaat

SEQ ID NO: 328266 - DNA, 541 bp, Homo sapiens
tcgggtagcatggtcattttaacagtattagttattccaasccacgagcatgagatgcctttccatttgttcacgtccttctcaatttattttatcagtgtcttgtgcttgtcattgtagatgttttttgggtttttttccccatccttggttaagtttattcctaggtattttatttttgtagctattgtaaatagaatttcttccttgatttctattttagctagtttgttactggtatatagaaatattactgatttttgtatgttgattttgtgttctgaagctttactgaattatacatccgtttttaaattttttttttcttttttcttttttgagatagagtctcactctgttgcccaggctagagtgcagtggtgctgggattataggcacctaccaccatgcctggctaactgtatttttagtagagacagggtttcaccatgttggccaggctggtctcaaactcccaacctcaggatctgcccaccttggcctcccaaagtgctgggattacaggcatgaactaccatgt

SEQ ID NO: 328267 - DNA, 573 bp, Homo sapiens
cacagaagtcaaaaattgaggtttgggaaccactgcatagatatcagaagatgtatggaaatgcctagatgtccaggcaggagtttgctgcaggggcagggcactcatggagaacttctactagggtagtgcggaagggaaatgtggggtgagagcctccacatrgagtccctactgcagcgccacctagtggagatgtgagaaaagggccaccatcctccagaccccagaatggtggattcactgacagcttgcactgtgtgcctggaaaagctgcagacactcaatgccaacccatgaaaggagccaggaggggatttataccctacaaagccacaggagtggagctgtggctttttttctcccaaggccgtgggagcccacctcttacatcaccatgacctgcatgtgagacatggagtcaaaagagatcattttggacctttgagatttgactgccccactggattttgggcttcatggggcctgtagctcctttgttttggcaattttctcccatttggaatgactgtgtttacccaatgcctataccttcattgtatctaggaagta

SEQ ID NO: 328268 - DNA, 293 bp, Homo sapiens
ggcttctttggttgctggcagtggcagcactggrccaggtgggcaggtgcaccactgggctcctgggtggtgtgtgtggcagtctgatctctagttctccaggtgatgtgtgcaggttctggtggtgggtaggcaggtgtttcctcaggcctctcagtagtaagtgtgagcactagctctggaggcagtgtgagtcaatctccaggcccccagatggtacattcaggcaccagcatattcctatgcatttctagataaaagtatttttcagaaaacctgagcatatgtcctat

SEQ ID NO: 328269 - DNA, 293 bp, Homo sapiens
ggcttctttggttgctggcagtggcagcactggaccagktgggcaggtgcaccactgggctcctgggtggtgtgtgtggcagtctgatctctagttctccaggtgatgtgtgcaggttctggtggtgggtaggcaggtgtttcctcaggcctctcagtagtaagtgtgagcactagctctggaggcagtgtgagtcaatctccaggcccccagatggtacattcaggcaccagcatattcctatgcatttctagataaaagtatttttcagaaaacctgagcatatgtcctat

SEQ ID NO: 328270 - DNA, 293 bp, Homo sapiens
ggcttctttggttgctggcagtggcagcactggaccaggtgggcaggtgcaccactgggctcctgggtggtgtgtgtggcagtctgatctctagttctccaggtgatgtgtgcaggttctggtggtgggtaggcaggtgtttcctcaggcctctcagtagtaagtgtgagcactagctctggaggcagtgtgagtcaatctccaggcccccrgatggtacattcaggcaccagcatattcctatgcatttctagataaaagtatttttcagaaaacctgagcatatgtcctat

SEQ ID NO: 328271 - DNA, 607 bp, Homo sapiens
gtagtctcaattgcagttgctgtgcatggtataatatccttgctacagcaaatttaatggcctcagattcatggtatgcagccattggtctgatgaataatttcttttccaaacctatccgaaagaagaattagaagaaatttgtatacatttaggggtcttgcccaggccatgtgggcattcttcagagtatcactttagtccttctttttttgagacagagtctcactctgttgcccaggctggagtgcagtggcatgatcttggctcactgcagcctcacggttcaagtgattctcttgcctcagcctctggagtagctaggattacaggtgcgccaccaccatgcctggctaatttttgtatttttggtagagatggggtttmaccgtgttggccaggctgctctcgaactcctggcctcaagtgatctgccggccttggcctcccaaagtgctgggattataggcatgagccaccatgcctgacccacattagtcaattttactgattatatcatgttaattgaactgcctggggcaagtacactgggctttggtaagacacagacctccagagggtgggagataaaccctacaaagattca

SEQ ID NO: 328272 - DNA, 607 bp, Homo sapiens
gtagtctcaattgcagttgctgtgcatggtataatatccttgctacagcaaatttaatggcctcagattcatggtatgcagccattggtctgatgaataatttcttttccaaacctatccgaaagaagaattagaagaaatttgtatacatttaggggtcttgcccaggccatgtgggcattcttcagagtatcactttagtccttctttttttgagacagagtctcactctgttgcccaggctggagtgcagtggcatgatcttggctcactgcagcctcacggttcaagtgattctcttgcctcagcctctggagtagctaggattacaggtgcgccaccaccatgcctggctaatttttgtatttttggtagagatggggtttaaccgtgttggccaggctgctctcgaactcctggcctcaagtgatctgccggccttggcctcccaaagtgctgggattataggcatgagccaccatgccygacccacattagtcaattttactgattatatcatgttaattgaactgcctggggcaagtacactgggctttggtaagacacagacctccagagggtgggagataaaccctacaaagattca

SEQ ID NO: 328273 - DNA, 461 bp, Homo sapiens
agtgcaccatacccctatttttaacaaggataggcctggatgtcatatctttgttttaaatccaattttaaatccaattttcagaatattaaatcagtgacagtgtgacccaggacaagcttttaatttaaaagcaaatctagctctggcaaccatttttctcattgacataatggatagttctttcaagcctgygaagcgttgttcttatttgttaatcacagcactccagctatgcatacctcaccacatgaaatctagatggcaattttggcttctccagtctatatggtatatatcttagaatcagtgacacggaagacttttgacatcatttcgaatatgtagatatgtgtttttaatgaaaattgttttatttgattatagctaaaatttggaaatgacataaggttaattgcattatgtaaatacgcttaagactctctatgtatgaaccatgc

SEQ ID NO: 328274 - DNA, 461 bp, Homo sapiens
agtgcaccatacccctatttttaacaaggataggcctggatgtcatatctttgttttaaatccaattttaaatccaattttcagaatattaaatcagtgacagtgtgacccaggacaagcttttaatttaaaagcaaatctagctctggcaaccatttttctcattgacataatggatagttctttcaagcctgtgaagcgttgttcttatttgttaatcacagcactccagctrtgcatacctcaccacatgaaatctagatggcaattttggcttctccagtctatatggtatatatcttagaatcagtgacacggaagacttttgacatcatttcgaatatgtagatatgtgtttttaatgaaaattgttttatttgattatagctaaaatttggaaatgacataaggttaattgcattatgtaaatacgcttaagactctctatgtatgaaccatgc

SEQ ID NO: 328275 - DNA, 495 bp, Homo sapiens
tcttacatttagttctttgatctattttgagttgatatttatatagcatgagaggtargggtctagatttattcttctgcatatggatatccagttttcccagctccatttattgaagagactgtcctttccccatgagtgttcttggtaactttgtcaaaaattagttggctgtagataggttggttgatttctgggttctctattccattccattggtctgtgtgtctgtttttatggcaacaccatggctattttgattactatagctttgtagtaaattttgaaatcaggtagtgtgatgtctccagttttgttctttttgctcatgattgctttggatattcaggttcttttgtgattctatacaatttgtttatttttctatttccatgaataatatcactggtattttgataggaattacaatgaatctgtagattttattgtgtagtattgttattttaacaaaattaattcttctaattcaggagc

SEQ ID NO: 328276 - DNA, 528 bp, Homo sapiens
atgttgtaatccttctatttagagcagatctttatacatagtagatatgcaatatatatttgttggatgttgtatgaatagggacagaaagaatgaaatctaagggtccccccaaatcatatctgaatcggtggcttcactctttgwccatctgtaatgttaactcttttccctcagttgatgacaaggagcacagtccaacatgtccattgctttctgtattgctttctgctttctctgtcatcggagctgtctactgaggaaaagccaaggacagatggctccctggatagaggagtcttcaaaaaacagggagagtaaagtcaaagctgagattttccagtttatgcccattacaccttgtacacctcctctgggcaccttcctgacccctgacccagcaggccggtgcactcacacccttcctgcatgttgaccacttcctctctctggtctttggaagtggaacagctctgaagaaaacattggatataaatattttctttttctctgagatttcctttcaac

SEQ ID NO: 328277 - DNA, 528 bp, Homo sapiens
atgttgtaatccttctatttagagcagatctttatacatagtagatatgcaatatatatttgttggatgttgtatgaatagggacagaaagaatgaaatctaagggtccccccaaatcatatctgaatcggtggcttcactctttgtccatctgtaatgttaactcttttccctcagttgatgacaaggagcayagtccaacatgtccattgctttctgtattgctttctgctttctctgtcatcggagctgtctactgaggaaaagccaaggacagatggctccctggatagaggagtcttcaaaaaacagggagagtaaagtcaaagctgagattttccagtttatgcccattacaccttgtacacctcctctgggcaccttcctgacccctgacccagcaggccggtgcactcacacccttcctgcatgttgaccacttcctctctctggtctttggaagtggaacagctctgaagaaaacattggatataaatattttctttttctctgagatttcctttcaac

SEQ ID NO: 328278 - DNA, 550 bp, Homo sapiens
ggcacactgcagtctcaaactcctgggctcaagtgatcttcctgcttcaacctctcaagtagctgggactacaggtgcatgccaccacacctggctaatttttatttatttattttttttgtagaaacaaggtctcattcttctgcccaggctggtctcraactcctgatctcaagtgatcctcccaccttggccttccaaagtgctaggattacagatgtgagcttgcccttcacagaaaattataaaagacccaaccttggaatgaaagaaaaatttggatagtaacaataataactttattatctagtataaagggcacacccaactgtattatttgtattaaaaagattgttctggtatcttgaaagtgtggctgtttttacatgtctaattaataatctcacacagtgaaggagctgtctcattaccttcttgaagcccgccatgactttggcgttctacaatgtataccaaggagggatgactaattccaaagcaaatgtccgttcatgctcagtccagagggttcctttttttttgttctcag

SEQ ID NO: 328279 - DNA, 534 bp, Homo sapiens
ttccttttaatctttctctagtttctcctacaatcagcaatctatatcagttctatacatatactagatgtagaattgatgttttatgatgataagaattacagtgatgatggtggtggtagtaacagtggaggctgcaaacgttttgagtagactgaagcataaaaaataccaaaaattcttccatatataagtatattttcagatagtcaagtataggtaagaattcaatgaaaaatacctatcagatagcttctccaccctgactattctatcagcaaaaccaggaatacaaagctgggcttccagctgcatttttctcagagtgtaactagcgattcacaaaatttacccctattttcccaacactagtaatctaaaaaaagagctggggtaatttttcctatccttcccagatgacattgcaccttttctgattcaccrcaccattagaatctcagagaagccactaagtagtaagtttagctacaccttcatcaagaagaaagaatagtgcctgggttctattcacag

SEQ ID NO: 328280 - DNA, 593 bp, Homo sapiens
gtgaactgcacattgaagggatctaggttgtgtcctccttgtgcgaatctaacaaatgcctgatgatctgaggtggaacagtttcatcccaaaaccatccccccaacaaccccagtggaaaaattgtcttccacaaaaccggtccctacttccaaaagggttggagacagctggtataacctaaaccttagcattactcaacagcttcataatctccactttacatacctcacactctgattaacccctcctaactcatgagctcactctctcctgtacccctggacctgttttctacctccttttcatgtcccttaaccccttcatgcccccyctttcttcttacacgatgtaaattccatgctcaatcatgataggcacctctcacacacttcctcatctctgttgtccctcttactcgacaaaacaccagccctggttaaactctgttctccacctacatcaggcctgaccctgtgtaactggctgtagctggagaaggggcgtggccctgcacactgcacttctttctatcctggacctttaccctgaagtggacccaaaggctgctccacagtcacacctcatcttcc

SEQ ID NO: 328281 - DNA, 578 bp, Homo sapiens
actgttcagaaaaagtgagggcaatgttaaaagactaaagtttaaaagttagttgaagaaggagcaggttagtgctaagagatacaagtaccaacaattgtcattagaggaattgagggggttgagttgtcccaaaattttaatttccatattggcatagcaatatcaactaagtaaaggaaaaaaccacaaagaatstaggttagggtccaaaatgaagtatctcaaatgctgggaacacaggtttagatttgaagtcaattgaaagattgaacacaggtttagatttgatgtcaatcaaaagattgacatcattttccaataggaacaaatgataaatggtgattaaatccccaagacagccaataaaacctgtttaaccctgacagcgctgaaacgtaaatttgcaatagaaaagcagaaaacatatcatttccatactgacacttattattaaaaaattaagatttatcaagagagttttatttctattagaagctggtacttgagagaaaagtaagataatggaaaagtaaatgagcccttcagaagaaggaacttaattcttcccaccaggc

SEQ ID NO: 328282 - DNA, 578 bp, Homo sapiens
actgttcagaaaaagtgagggcaatgttaaaagactaaagtttaaaagttagttgaagaaggagcaggttagtgctaagagatacaagtaccaacaattgtcattagaggaattgagggggttgagttgtcccaaaattttaatttccatattggcatagcaatatcaactaagtaaaggaaaaaaccacaaagaatgtargttagggtccaaaatgaagtatctcaaatgctgggaacacaggtttagatttgaagtcaattgaaagattgaacacaggtttagatttgatgtcaatcaaaagattgacatcattttccaataggaacaaatgataaatggtgattaaatccccaagacagccaataaaacctgtttaaccctgacagcgctgaaacgtaaatttgcaatagaaaagcagaaaacatatcatttccatactgacacttattattaaaaaattaagatttatcaagagagttttatttctattagaagctggtacttgagagaaaagtaagataatggaaaagtaaatgagcccttcagaagaaggaacttaattcttcccaccaggc

SEQ ID NO: 328283 - DNA, 558 bp, Homo sapiens
aaatgcacatgagatggggagagggagtaagacaagaaagaggaaagatttctgtgagagatcagtgggaattcagaagagggatagaaggaggaatggaaagaacacgatgtgttttaataaagagatgaacttgcagaaatgaccaaatgaggcaaatagagggagtgggcatagcatggcacaaccagcccaggactagatagcatggaaccacagacaagggcatcccctcctgctyctgggtgctcctcttccagatgcaggaatggcacaaggcagggcttttctgcacactggattccattattccaggtgttcacatatgcctgggagggcagaataaaggatgtattgggagaagacactggatcaggaatatactcactcacaggtggccaggtgactgaccccccagctcaggtttgctggcagtggagagtggctgaggatgggcagcctggtgggaagggcatgcagtgtgcaccatgtgccttctttggacaggggccacctttcaagccacttttagagacactttttttccattgtagtggc

SEQ ID NO: 328284 - DNA, 558 bp, Homo sapiens
aaatgcacatgagatggggagagggagtaagacaagaaagaggaaagatttctgtgagagatcagtgggaattcagaagagggatagaaggaggaatggaaagaacacgatgtgttttaataaagagatgaacttgcagaaatgaccaaatgaggcaaatagagggagtgggcatagcatggcacaaccagcccaggactagatagcatggaaccacagacaagggcatcccctcctgcttctgggtgctcctcttccagatgcaggaatggcacaaggcagggcttttctgcacactggattccattattccaggtgttcacatatgcctgggagggcagaataaaggatgtattgggagaagacactggatcaggaatatactcactcacaggtggccaggtgactgaccccccagctcaggtttgctggcagtggagagtggctgaggatgggcagcctggtgggaagggcatgcagtgtgcaccatgtgccttctttggacagsggccacctttcaagccacttttagagacactttttttccattgtagtggc

SEQ ID NO: 328285 - DNA, 445 bp, Homo sapiens
ctgcttttagaattctttgtatttgactttccacagcttgaccatactctgcctgaatggggacctgtttgcattgaaactatttgcagttctttgaacttcctttgcctggatgtccatctctctctcaggacttggggatatttttgctatgatttcattacataccttttcctcaccttctcttyttcttctgaatgcccataacacaaacattttttcacttactgatgtcccataaaacctgtagccttttaaattcttttttattctttattcttttctttctttgactgtctgtgttacttcaaaagatctgctttcaacttcagaaattctttctttcacttggtctagtgtgttgttgaagcttgcaattgtatttttttttaaatttcattcattgaattgtttagttctagaatttctgtttggttctttctaa

SEQ ID NO: 328286 - DNA, 445 bp, Homo sapiens
ctgcttttagaattctttgtatttgactttccacagcttgaccatactctgcctgaatggggacctgtttgcattgaaactatttgcagttctttgaacttcctttgcctggatgtccatctctctctcaggacttggggatatttttgctatgatttcattacataccttttcctcaccttctcttcttcttctgaatgcccataacacaaacattttttcacttactgatgtcccataaaacctgtagccttttaaattcttttttattctttattcttttctttctttgactgtctgtgttacttcaaaagatctgctttcaacttcagaaattctttctttcacttggtctagtrtgttgttgaagcttgcaattgtatttttttttaaatttcattcattgaattgtttagttctagaatttctgtttggttctttctaa

SEQ ID NO: 328287 - DNA, 579 bp, Homo sapiens
ttttaatcatcaattcaatttatttaacagatagttattcacattttctgtttcttcatatgtctttcaagaagtttgtccatgtcatgtaaccagtaaattttaatggcataaaggtgtttataatatgcttccctattgtttgtatgatcaatacttatatcctccattttattcctaatattggtaactggtcacttttatgtttyttgaacagcattgctagtcatctaacaattttaataacattttcaaggaaccacttattggttctgttggtttcctctattgtttgttttctatttcatcgattattactctcctctttattattttatttttttctacttcctttgggtttaatttgctttttttcttggtttcttaatatggaagcacagtcattgactttaaaacagttctattttctaatataaaaatccaacaaatacttttttttctgaatactgacttagctgcagcctataaattttgatatgctatgttcataccaccattcaaagtattttctgatttctctgtgatttcttccttgaagagtattcattgctcaatttc

SEQ ID NO: 328288 - DNA, 436 bp, Homo sapiens
ggctcacttgcattcaccattccttgctaaccctgtcgaaaacaccctcaaaattttgcccaggttttactgcttgttatcaagggaatgaaagtctcatctttttccacatcttaaccagaagcatacctttcagaggtgtgaagagtcaaygtcaattgttatgacatggatacaaagaagcagaggctagtttggaaaactggcctcagagggacgaagaaaagattttttctgctagtatggcaatctcatttctcccttcttgagtgggacattgcatcacttggatccttcatgagtggagtgcaaaatctcctccatcttctcctttctgtggaggagaactgctgagaaatatcacgcaaatgacacccctgggtagtaagccagaggtggagctttgggacagagaacagagttgttgcttttctct

SEQ ID NO: 328289 - DNA, 436 bp, Homo sapiens
ggctcacttgcattcaccattccttgctaaccctgtcgaaaacaccctcaaaattttgcccaggttttactgcttgttatcaagggaatgaaagtctcatctttttccacatcttaaccagaagcatacctttcagaggtgtgaagagtcaacgtcaattgttatgacatgratacaaagaagcagaggctagtttggaaaactggcctcagagggacgaagaaaagattttttctgctagtatggcaatctcatttctcccttcttgagtgggacattgcatcacttggatccttcatgagtggagtgcaaaatctcctccatcttctcctttctgtggaggagaactgctgagaaatatcacgcaaatgacacccctgggtagtaagccagaggtggagctttgggacagagaacagagttgttgcttttctct

SEQ ID NO: 328290 - DNA, 413 bp, Homo sapiens
ttcctttgcatgtgaaaaatccagttttcccagcaccatttatagaaaagactgttcttycctcattatgtcctcttgatggtgatttatcaaaaattagttgaccatgtgtgtttggatttatttctggactctctattctgttccattggtctgtgtttctgtttttatgccagtaccatgctgttttaattactttagctttgtaatataattttaaatcaggaagtgtaatgcctccagctttgttctttttgctcaacgtagttttggctatttggggtcttttatgtttccatatgaattttaggattttcttctgtttctgtgaagaaggttgttgagattttgatagcaattgtgttgaatctatgtcttgctttgggtagtatggatattttagcaatattaat

SEQ ID NO: 328291 - DNA, 625 bp, Homo sapiens
attacagtaataataataaacaatmatgagctttaaatcttacagcagcgctgctgctcagaaacaaactaaaaggaaccttgaaaagggaaaccaccacagctccttttgtcccgccttcagggaacaatgctgtttactctgtatgaaccagaggctggggagaaggaatgtagttttgctctactaaagaaggttccacaaagagctgagaagaggctgtggtgataggagcaagcaagtagatgaatggccaaggagcacagcagaaggaaccacatggagagtgagcagcgtcgccagcttgggaaagtctgagccagcattccaagtcaggcaggagaaatcaggggaagttaggggaggcatttgtaaatctgcatggtgttaagatgacagctttgaggagggcagagagagggtatgggccacatttaagacaagaaaactcaccttgttttaaagatagtggcaaaacaaaaaagtagatctcatgggattgctatacctaaaaacagtttatggtgacatgcaggcaggtcaagattagggggatgctaggattactcttgccattgatttttgtccaatgagaattgttaactgtaaattgtagtttcagagt

SEQ ID NO: 328292 - DNA, 611 bp, Homo sapiens
aatgcactcttcccatataatccagcaatcatgctacttggtatctacccaaataaattgaaaacttatgtccacacaaaaccctgcatacagatgtttatagcagccttgctcataattgccacaatttggaagcaaccaagatgtccttcaataggtgaagtgataaataaactgtagtacatccagacaacagaatattattcagcattaaaaacaaatgagctrtcaagccataaaagatatggaggaatcctaaatgcatactgctaagtgaaagaagacaatctgcaaaggctacatactatatgattccaactacacgacattttagaaaaggcacaacttcagacagtaaaaacaccagtcattgccaggagtttgtggggatggagggaaggtgaattaggcagagcacaaggaaggtttcggacaatgaaactattctgtatgatacgtcatgataaatacatgtcatcatacaagtatttaaaacacaacaaatgaaccctaatgtaaactatagactttagttcatgataatatatcaatattttccatcagttgtaacaaacgtaccatactaatgcaagatgttaataataggggaa

SEQ ID NO: 328293 - DNA, 611 bp, Homo sapiens
aatgcactcttcccatataatccagcaatcatgctacttggtatctacccaaataaattgaaaacttatgtccacacaaaaccctgcatacagatgtttatagcagccttgctcataattgccacaatttggaagcaaccaagatgtccttcaataggtgaagtgataaataaactgtagtacatccagacaacagaatattattcagcattaaaaacaaatgagctatcaagccataaaagatatggaggaatcctaaatgcatactgctaagtgaaagaagacaatctgcaaaggctacatactatatgattccaactacaygacattttagaaaaggcacaacttcagacagtaaaaacaccagtcattgccaggagtttgtggggatggagggaaggtgaattaggcagagcacaaggaaggtttcggacaatgaaactattctgtatgatacgtcatgataaatacatgtcatcatacaagtatttaaaacacaacaaatgaaccctaatgtaaactatagactttagttcatgataatatatcaatattttccatcagttgtaacaaacgtaccatactaatgcaagatgttaataataggggaa

SEQ ID NO: 328294 - DNA, 544 bp, Homo sapiens
gagctttgccttgaatgcttgtagtagaattcataattcatgaacatatgtggggtagaatgctgctagtatatgcaaagcatgactacatacaaaatgaggatataaatacaagctaatgatgtactattcacatgggaatggaatmtacttagcattctttagtactacgcatttcccaatggaaataatatgtattttaccagtaggtatcaaatgaatttgacacattttagataaaactgacctatagtctccgtgtttgaaatctgtgtgacacatcaatcccaggaatagtttatcagaaatctagcccaggtcaataaaatgtgaatatcagtccacacgcagatattcaataaggtatataaaaagaattgatattctcggtttaggtgccagttttcatagaactgcagaactagaaaagatccggaaatgatctgatttcactcccacccaacattttatagctgagaatttaacagcactaagtgaagactcaaatttgagtccaacagctggtggtcaccctggtggtcag

SEQ ID NO: 328295 - DNA, 544 bp, Homo sapiens
gagctttgccttgaatgcttgtagtagaattcataattcatgaacatatgtggggtagaatgctgctagtatatgcaaagcatgactacatacaaaatgaggatataaatacaagctaatgatgtactattcacatgggaatggaatatacttagcattctttagtactacgcatttcccaatggaaataatatgtattttaccagtaggtatcaaatgaayttgacacattttagataaaactgacctatagtctccgtgtttgaaatctgtgtgacacatcaatcccaggaatagtttatcagaaatctagcccaggtcaataaaatgtgaatatcagtccacacgcagatattcaataaggtatataaaaagaattgatattctcggtttaggtgccagttttcatagaactgcagaactagaaaagatccggaaatgatctgatttcactcccacccaacattttatagctgagaatttaacagcactaagtgaagactcaaatttgagtccaacagctggtggtcaccctggtggtcag

SEQ ID NO: 328296 - DNA, 501 bp, Homo sapiens
gcataccacacgttacctttctaaaattattatgccttttcaaatacatttttattcccttatttttatctaagcccacatagcagtgtctcctaaagttaagtgatcatagaatcaactgagttcttcttaaacatagaaattcagaggaccatctctcaggcagtctgattccctacttttgtagttggcccaggaatgtacatttgtaaagagtggctgggtctagtgagggaaatttttkgaaaaactgtgataaagaactgttgaattaaaccaaggcctctttctctacctcacactttctgaaaagaaatatttctttttctaatcatagagctatgaccactggcaaggaattgcccttattgcccttgtcttactataagtcactgaagcctagtaattgtttgccctgtatcgttaggcacagacaattttacttggtgaagcacagggcttgatggtccttcctcctccaagcccagccattccagcccc

SEQ ID NO: 328297 - DNA, 522 bp, Homo sapiens
ggttaaaaatcgttcagcttcacatcagatttctaagaacctagaatccagggaattcctatccccagggagttctcagggaaggctaatgcaatgctctgttcttctagcagagtgcaccatacccctrtttttaacaaggataggcctggatgtcatatctttgttttaaatccaattttaaatccaattttcagaatattaaatcagtgacagtgtgacccaggacaagcttttaatttaaaagcaaatctagctctggcaaccatttttctcattgacataatggatagttctttcaagcctgtgaagcgttgttcttatttgttaatcacagcactccagctatgcatacctcaccacatgaaatctagatggcaattttggcttctccagtctatatggtatatatcttagaatcagtgacacggaagacttttgacatcatttcgaatatgtagatatgtgtttttaatgaaaattgttttatttgattatagctaaaatttggaaatgacataa

SEQ ID NO: 328298 - DNA, 592 bp, Homo sapiens
tactgacacactgaaagtctgacttcaaacaacatagactgatgctgagtccctgatatggtaccaacaagactttggatggttgtttacatcacagtcccctctagtctggaacggatagcaatataccctgcttgggatggactcaggtgttgattatgggtctgctgttcccaccacaaggccttagttagtgccactatctgagggctcatggggtgtctgatctgctgatctgggattccctgcataacattgcctcagaccaagggacatactgtgtagcagaggaagtatagtgctaacatgacatggaagccactggacctgttatataccatacgccgtaccatccagaagctgccrgcctgaatggccaaaagaatggcctcttgaaggaacagctaaggcaccagcttggagatgataccctgtagggatggggtgatacccttaaaccatggccattgcatgggcatgtgcccaaaagtagttaaaatatatgggtgtgggaatccatatatgcaaccaagtggaagaagtaggagtggcccatccagtatcggtctcagtaacccacttgaggaatttg

SEQ ID NO: 328299 - DNA, 520 bp, Homo sapiens
tctgggagttcattctccccacccccgccccagccacacacacatgggcaggtaccagccaaggactgggatgcagagatacttgcctccaggaaggacagctctctgggcacttctgatctctccatgggataaggctgaggctgtacttcagctgaaatcacctgcctctctccttccctcacttcctggagggtttttctggaggtcactttttcagtaaatcacccccacaagaatccctttctcaagttgtgcttctagagagttctacagaacttaaacactatttgacttttgaaactgcctatagcaatacttcaactgcaataacacctttttaagataataagagcttccagaaaactggggcgggggttggtgagggggaagttcctgtattcatttagttgyctagggctgccatacaaagtaccccaaactgggtgacttaaaacaacagaaatttattctctcacagttctggaagctggaagtccaagatcaaggtgtgggcaga

SEQ ID NO: 328300 - DNA, 520 bp, Homo sapiens
tctgggagttcattctccccacccccgccccagccacacacacatgggcaggtaccagccaaggactgggatgcagagatacttgcctccaggaaggacagctctctgggcacttctgatctctccatgggataaggctgaggctgtacttcagctgaaatcacctgcctctctccttccctcacttcctggagggtttttctggaggtcactttttcagtaaatcacccccacaagaatccctttctcaagttgtgcttctagagagttctacagaacttaaacactatttgacttttgaaactgcctatagcaatacttcaactgcaataacacctttttaagataataagagcttccagaaaactggggcgggggttggtgagggggaagttcctgtattcatttagttgtctagggctgccatacaaagtaccccaaactgggtgacttaaaacaacagaaatttattctctcacagttctggaagctrgaagtccaagatcaaggtgtgggcaga

SEQ ID NO: 328301 - DNA, 603 bp, Homo sapiens
ttagaaatactcttgaatataactttggagactttcatggcttttcagaagaaaatattgctcaaatcatgtgggcagttctgcaggatcaggcaaataaacttctgtctactaaaattgtttagccccaagggggctctttggacataggttcaggtaattctgcagccttagcctctccataaatggaaagaccacaggtccagagcctggagcacagtggaatctgaggtgtaggctgtggccaaggaaacttctcagcagtgtcccaagaggaactgtgttgggtgttgctaaaacacagtggtaatgtaatgtgtgccatgaaacaaatggaggcaagctttctgcttccaccctgggctctgtttcttcagaagcaagttaagaagaaggggagatggagctgtcaactctctgtacataaattcagaaggatgagcaaaggctggcaggatgatggataattctctacaatagatgtacatattcttatccaagaaagcaaccattgcagcagagtaaartatggaatatggaacagtggagaagaatgtcagcaagtagtaccagctcagtgaaagattataatccagcagaatc

SEQ ID NO: 328302 - DNA, 596 bp, Homo sapiens
ttttatcttaataacaactcccacacacattgtctagggtttaaattaggctggccttatttctactacttgcaggcacaggagataaaactaatgcatgggattcatgacttcctgaacagacactttgaggattctatgagaagaaacacttgaaaaggctcagagtgggctctcaggaagggaccgttattattacctctgtggcattccattacacgtcttcatcccctgcgacccctttctgactcccgaggatcacagaggaaatagctctctgaggtgagagaagatagtaacaggagaacagactgtgggtgagaaaactgggacccttgtgaagagacagagaggaagtgtgacaaagccggtgatggagaagctgttaatgaacctcacagtattatcagccaggaggtgccaaaccttcgtaactgcatttgtccccatttcactttctagakgaagcacaagggaaagtgagaacatagcctttacagtcacgtggaacctaagatgaattttggttccaatgcctatcagctttgccacgcctaccaccttggtttagtttgctcttttaacgaactgtcaaa

SEQ ID NO: 328303 - DNA, 570 bp, Homo sapiens
cctttctcccttcctcccttccttccttccttccttcattccttcctgttgtgtgttgcagaaaacgtctggggcttggggtgatcacttacaggagagagaggtaacttgcgggctccctctgccttcttggcttcactgagcagctttcagaatagggtgaaaaaggtggccatgttctcgcctctccacggggccatctggcttgctccttctgctctgacactctgcccctagcttctgcatggatagctcttcttatctttcatgctgtagctcaaacttaatttcctctgtgacactccccattcttgttcatagactctctcatgatttgtaattasagattgatttgtctgcttacttgtttaatttgtgcttcttctgcctcctgcacatctgtgtggacatttctctgattcctttccccttccagccctcagtgaagcattttccgccctgcttcctcattcgccctgttggccccaatgactggcttgcttcctcccacatcctaactggggctgggccaaggtcccagcatgccttgcagctgcatctgtccactat

SEQ ID NO: 328304 - DNA, 587 bp, Homo sapiens
agatcaagaaagaaaagacatggattatggaaaacagaacaagagaggcaaatgggatggagagggtggcagtgaaggaagagacccagttggcctctagacattggggattgggccaaagcatccagataggcacagtagaagggtacagaagaacaatcctcaaaacaccacacacagtccaagtatcaatggccaaaattgattatccaactcccaaaagtagtctcaaggaaaaactctgccactgcctttttcagaacaaaaggtgcaatgcaggttaaatcagggtcacttttcctaataaggtcccctagtgggtcagatatccatggactttaaatgtagttgtcatttcttaaattggcgaaaaaatcttcaagctacaaatgagtaatatcrtttaatccaataatcaccttatgagttaatgccaaacagaaactagagccagacactagttaaaggtagtaaagacagatgatattcagtactactgcagcaagggagagagttttcagtaaaactgagctcaaatctgaatataacaaagacaggtggagatttatagccaacaagtagggtga

SEQ ID NO: 328305 - DNA, 610 bp, Homo sapiens
aacctgctatgtcttctattttgttttctcagcttagagacaaatcttagattcaattatagcacttttagagagcccagtgcctttcatatttgtattagttttacctacctgcaattttctacctttatttccacttagtcttttaaaatttttcttcatgccttagcttatagtaaatatgttctggtaagatatttaaaattctttatggtaggcagcctggtataaataaacacatttattaagtgagttaataaatcacttgggtattcaagrgcatgacttttaatgatggaaatccagagtgagggtagtatttttagatataatgtcccttgccagacccctcaaataataccacatagtttactatggacttacacccagatgagtcctgaattgtcctctaagtaaagaaggaagaaaccactgttaaagttagtttcctaattttgcccctgggcaacccctttagagcacagcctcagtcttgagctttgtgggtcacgcttttccttgtcaggcagagaaagtctttatttcagctttgactttggcaaaaacctcagcatcttttcctgggcttgcaaaatggcagagttcttgc

SEQ ID NO: 328306 - DNA, 572 bp, Homo sapiens
agttctcttgtgaacacattcactcatgcatatttctccttgcttatcggacctctgaaggctagaagtgaacatagttcttgccaacgttggcctcctgaggcttctaggacttcragtcaattaactccatgaggtgtggtcagagtgaaaactttgcctcactcatccctgggagctttgcagagctcaggaatgaatcccaggagcttccgaattgccctggctgttggggcctgttcacattgttctcagtgaatacgagtcacctggaatttcagactgtcctttttctcattgaatttcataagaatgttgctttgtgtattttaaagatatgaatccagctgtgtactgaatctgtatataataattatgtgttgaataaaataatgaaagcaatagcaaattatatcaacatcacatattacaagtcagaacctatgctataaattcaagatttcaataagttaaggttcctgatactcacagctgagctgtgttagtaacaaaactttcagaaaaacgagtcagaacttccctcagccatccatgcatccatctatccatcc

SEQ ID NO: 328307 - DNA, 578 bp, Homo sapiens
ctatgcgtctcaggcatcagctcacctctgaccatcatatcacggtcagaatgattcttgacatgtgcaagaggctttgcactggacaaagcacttttgcacatcctattcatactacttcagtgagactatgtgtattttttaatcctgccatttccactttatatggtaactgattttttttctattttttttttcaaatatcattttggaagagagcatgacattctgtcttatacatagagcaaaaaaatgctccattgttggacaattggggcatttccagtcttttaaaagctacattacgttaggaattgtatagagatctggactccacatctcagattattttctgaagctggattcctctaagggagattctgagtcaaaaattacaaagcatataagattcttgagaactatttgatctttgccttattggttttattttcaagtgggtccccttgtggatactttaaaaaataytagtaaatgttcttctaactggatggtatgaaataattcattcagaaagatatagttggctctatagacatacacacacacacacacacaca

SEQ ID NO: 328308 - DNA, 526 bp, Homo sapiens
tcattttggaagagagcatgacattctgtcttatacatagagcaaaaaaatgctccattgttggacaattggggcatttccagtcttttaaaagctacattacgttaggaattgtatagagatctggactccacatctcagattattttctgaagctggattcctctaagggagattctgagtcaaaaattacaaagcatataagattcttgagaactatttgatctttgccttattggttttattttcaagtgggtccccttgtggatactttaaaaaatattagtaaatgttcttctaactggatggtatgaaataattcattcagaaagatatagttggctctatagacatacacacacacacacacacacacacacacactgmtaactgtaattctttttcattgagcaaacggtaaaatttctagtcaaacgtgaacaaaaaatgtatctctactctaattctgccagaacctgttctttagttgttattcttctgccttgaatattaatgtccttgatcc

SEQ ID NO: 328309 - DNA, 610 bp, Homo sapiens
tgtgtgcttagaaggtcttgccttgctgggttttatactgttttcagagaattgtttctatctgcggagagggcagacttcccagccactatccctagctacgtcccttcttaacttgctcctgcacccatatgtgcagtgatggaacataaggaggcctgctaccttcagggagggctctgcagaatgtttgattctattgacggtgactgtaattactctccctgtagcctgtgactccatgtgtattttgtgacacttcccgttgatccaaatagctcatagacctgtccctagggcttatctcccaggagtctccactcctcccaaacatgccttcttatcaagttacctagttgtgactggtttgttgtttaagcattcatgcattcatgygggctttgctactctttgagcaggattatttgtccagctttggcatacaggcaactctttactttcaaagtgacattgtatcatagcagtttttgtgatgccgagaaagggctgggttttcttctcatgttttggcatttcttagtcctgaaagtgcctgggacagcaaagtcaggagcagagtgggggaggggagcaccaaggagcagagaga

SEQ ID NO: 328310 - DNA, 625 bp, Homo sapiens
gtgcatgatcccctttctcattattataaccattccagaattcagacagtggtatacttactgcaatgatgatcacagtgaagctcagagagcttaggtaacttactcgaggttacacacctaatgaggggtggaaccacaatatgaaccaaggctgtcagactccaaagcctgtgtgcttcaccccagactgcagagctcagccccatctatgcttaacactgcattaggtttgccaggtagtggtgaaaaagatacaagtctttgtccttgagtagctcagagtcctacsgggcaggtggacgagtaaacagaccatgacaataaagttgaggtcgatgctgtgagaaggagagacctgggactcaacaggaaggcagacttgcagcatcttacccaagcttggcagtgggaaccaggaaagcttctggaagcagggatcctgggctgagtcttaaagaataagcaagcagatagcaggcctgtgtgctacagattctaccctggatcacagcagcccacttggttagagcttttcccctgtgcaactctgtcctcacagctcagcctggccaggtaccctgatcacctgatggaatgatgaagaaagcagatgggagcccag

SEQ ID NO: 328311 - DNA, 607 bp, Homo sapiens
acttaaaaaaaactcttctccttgccatttcaggatgtctaattaatgatgtgagtgggtaatttgctgcagtgctcactgattaatttatcaaatgccgaagcctttcccgtatgcctctcagtccaattagttaagcgttagatgtgacaggcaaggcagtgtctctaggaaaccccctgcctctcctgatcgtggtctccctgctttgaacatcccctgtggctcaatttctctccctattactcctgggtgaatagcccacagttkgttcctaagtacccagcacatcccaccctctctgtcatgagtggttcaaagcaggctgtagctcaggacaaagccacaaactcatgagatgtctcagaagggccacagccactgattccctgatgctactcctcagcccacaacttgattagactcagtgtagctctttacaacagacccacttatgttgttctctaattaattacaagcaaggcctcgcctgtgcctggtgtattgtcttttgcagagtggctttcacacctgttgtgatgaagactcaaggatagtaattattatcatctctatcagagaagaaaactgatgcttagacaggagg

SEQ ID NO: 328312 - DNA, 574 bp, Homo sapiens
agtatatagcttacttttctgccccttcacttcaaaactcctgctttatcttcatctttattttaaagggcctcaaagaatcacactagctggtctccactttctaactttccattcacttccaacctgtcccagtcttacatctgcccccattacttgtctgagaaagamctctacccgaaggtcatcaaatggcccatggattgttttatccattggtctctccaaagcccccattctacttccctgaactataagagatggtctgtgtgtttgttaaattaaagcaaatagaaatgaattgagttggaataaatcccaaggcattttacaaccctgatctctccttctttttttaaaaaaatttttttccttggttcccatgactgaattttcacatgtctgaatgctctctgtcagacttcattgatcccctttacctttcgtcttcttaaatgttgctgttcagggtcttcatctggcctcctttgttctcgctatgtagtctctcactaagttatctcattcacttcctggacttaactgccatatttataatgctaaagttcccatt

SEQ ID NO: 328313 - DNA, 593 bp, Homo sapiens
ctagctggtctccactttctaactttccattcacttccaacctgtcccagtcttacatctgcccccattacttgtctgagaaagacctctacccgaaggtcatcaaatggcccatggattgttttatccattggtctctccaaagcccccattctacttccctgaactataagagatggtctgtgtgtttgttaaattaaagcaaatagaaatgaattgagttggaataaatcccaaggcattttacaaccctgatctctccttctttttttaaaaaaatttttttccttggttcccatgactgaattttcacatgtctgaatgctctctgtcagacttcattgatcccctttacctttcgtcttcttaaatgttgctgttcagggtcttcatctggcctcctttgttctcgctatgtagtctctcactaagttatctcattcacttcctggacttaactgccatatttataatgctaaagttcccattcctttctcctgaatttcagacacatataaaaatgcattaataagaatagcataggttatgttgcartaataaataaacccccaaatctcaaaaattttatatat

SEQ ID NO: 328314 - DNA, 596 bp, Homo sapiens
acaatgtggtcatggtgtacctcctgctagagtctgaactaaacgaccagatccctcctttttcttttttttatttttccttttttttttttttttttgagatgcaatctcactctgttacccagtttgactgcagtggtgtgatcgcgactcactgcaacctccacctctggggctcaaacgattctcctgcctctgcctcccaagtagctgggattacaggcatgggccaccatgyctggctaatttttgtatttttggtagagatggggttttgccatgttggccaggctggtcttggattcctgacctcaagtgatccacccgcctcagcctcccaaagtgctgggattacaggcctgagccactgaacccggccgatccctcctttttctatctgtgcaaatttcatcctatttaagagcaggatgtctttttagaaaccttattctgtaaataccatctatttctgtttggtattgagaagtgctccatgagccagtgcctcagtgtggataaattgttgtgacatattatcctttggctatcacccacaagatacagtaattggctttcaacaattcatcttaagactt

SEQ ID NO: 328315 - DNA, 561 bp, Homo sapiens
ggattacaggcctgagccactgaacccggccgatccctcctttttctatctgtgcaaatttcatcctatttaagagcaggatgtctttttagaaaccttattctgtaaataccatctatttctgtttggtattgagaagtgctccatgagccagtgcctcagtgtggataaattgttgtgacatattatcctttggctatcacccacaagatasagtaattggctttcaacaattcatcttaagacttctatgtggcaccttctcacttaggtatctccccaagtgctcccacattgtgctctcctatttgcagagctctttcatcccatgatggcagcatttcattttcatggtggcttggtttacagtggtttcacagttcaatccctagaggtcagccttattttcttaaattacaaagtattggtgagacagggtgtgctacttacagccctccactcaggaccacctaaagcaaagctgagattcggggtaggaagacaatttaggacctggagaccagctctggggtttccctgatggatgactcttcagctgat

SEQ ID NO: 328316 - DNA, 586 bp, Homo sapiens
ccacctcaggtacacatactcacagacacatcaacagctttccaagcacgtgggttttatttcatttgttgatcaacctgcagtgtttcaatgcgaagaactctctgtacctcccctycatggtctcatgtcatctcagcgtctcagcaaggtcttgaaatcgtgaaaggtcagagctctccaatctgtagtgatttgggtcaccatttccttgagacttccttcgcctcttctttgattaaagctgtgtttgcctcgtcgtctcctgcttttttagcaattacactaattaagctaatttttctttgttctctcttgcaatttgcataaatggcaaatttatatatagtgcccttaattcttctataactgctctgtaattaacaggatgctcaggctaaatataaataagtgcagaaggaaaaacagccttctgctaaaatgctgataaaggctgggagaaaagaaaggcagaagaaagaaaacaattttaagctctgttcctaacccattatgcctgattgagacacagttggaggacgctagctaaaggtcagccactgcataggtatctccaagtgccctg

SEQ ID NO: 328317 - DNA, 586 bp, Homo sapiens
ccacctcaggtacacatactcacagacacatcaacagctttccaagcacgtgggttttatttcatttgttgatcaacctgcagtgtttcaatgcgaagaactctctgtacctcccctccatggtctcatgtcatctcagcgtctcagcaaggtcttgaaatcgtgaaaggtcagagctctccaatctgtagtgatttgggtcaccatttccttgagacttccttcgcctcttctttgattaaagctgtgtttgcctcgtcrtctcctgcttttttagcaattacactaattaagctaatttttctttgttctctcttgcaatttgcataaatggcaaatttatatatagtgcccttaattcttctataactgctctgtaattaacaggatgctcaggctaaatataaataagtgcagaaggaaaaacagccttctgctaaaatgctgataaaggctgggagaaaagaaaggcagaagaaagaaaacaattttaagctctgttcctaacccattatgcctgattgagacacagttggaggacgctagctaaaggtcagccactgcataggtatctccaagtgccctg

SEQ ID NO: 328318 - DNA, 563 bp, Homo sapiens
tataactgctctgtaattaacaggatgctcaggctaaatataaataagtgcagaaggaaaaacagccttctgctaaaatgctgataaaggctgggagaaaagaaaggcagaagaaagaaaacaattttaagctctgttcctaacccattatgcctgattgagacacagttggaggacgctagctaaaggtcagccactgcataggyatctccaagtgccctgtctctggagcaatttcaggacagaatttgggccatttgcttgcaattataataacatacaatttctcacgggggtggagcagtgtggtatggcagtcagtggggttgggtgtaatgcctagttctacttcttaccagctgggtcaccttgagctgaggaatcacaaagccaaacacctgaacttcaggtgctttcctgtcaccacacagtagaacacgcagtagccctgttatcccactatttctcagatgtgaaaatatacagtgatggagatgtgcttcaaaaacagtactaaatcaaggcattcatctacaaatgtgaattaaagtaacgacacgtag

SEQ ID NO: 328319 - DNA, 596 bp, Homo sapiens
agtcagtggggttgggtgtaatgcctagttctacttcttaccagctgggtcaccttgagctgaggaatcacaaagccaaacacctgaacttcaggtgctttcctgtcaccacacagtagaacacgcagtagccctgttatcccactatttctcagatgtgaaaatatacagtgatggagatgtgcttcaaaaacagtactaaatcaaggcattcatctacaaatrtgaattaaagtaacgacacgtagctatacattagtcctttgttaattcgtttagggtagtgattacaaaggtggcctttgccccaaactatgagaatcccagaagagaacttaggaaacaccattctggacataggctttgggaaataatttatgactaaattctcaaaacgaattgcaacaaaaaatttgacaagtgggacctcattaaactaattaaacaagagtttaatattctaatattccgaatctataagggacttaaacaatggaacaagcaaaaaccaaacacttccatttaaaaaatgggcaaaaggcatgaacagacacttctcaaaagaagacatgcaagcagccaacaaacatgaaaaa

SEQ ID NO: 328320 - DNA, 596 bp, Homo sapiens
atcctgtggtacctctcaatgctgtgattctgagggtcatggatgctcctctgttctgagaaagcgggtgcggagttccacattctcctggatgccttccatgacagggctcgctgagagactcgggagcggggacagcacgctcctttgtgggaacacacaacactccctgccatctgcctgaggcagggagaaaagaagacaatgttctgtcctcagcaggaactggcgctatcagaaagagatggaacaagaagatctgttccatttcaagcccaagagagtgaccactgatagctgtcctcaggattcattgaggactggatgagagggaatgtggaagaaaattttagtaggaaggaaataaatatggaggcttggggggagagaaggaagggagggagggagggagggagacatggctggaggaggagaggaaggaaggagtgggaggaagggaggcaggaaaggaaggagaagacagaaagaagtctaccatttctcgagcygatccgatgtattaggtaaggtgccaagctttttcatgccgtctgtcatttaattcccacaacaactcttattttacaggtaagtaa

SEQ ID NO: 328321 - DNA, 575 bp, Homo sapiens
ttaaccttaattctttaaaatatcctcagcaataaggttggggatgggggtgtttaatgaaggctagctaggggacaggcatgtttgttttaaagattaagtgataatctgaataattcaatgataagtatataaggcacacagcaattcaccttaggatatagtagatgccgaaatagatgttaccrtatctcaccttcatttttcaggtacttttacctggttatagctaccatattcccagaataatgcagaggtctcttcctttaattctcagtatgaaaaacctctctccattttaaatctgctttacctagaattctagaattctcagacttagttcaatatagccatcctttttttagagctttagagagagtacagaccaggtgtgagtcattccatcttgtgacttagtgtgtcttagagtctgagtcataaaaccacaaaggcacagaacatttggatgggaaaccaaagggagaaaaaattaaagtttctcttggcacacaaataatcttgaatcaaatttgtaacagaatgttgaaactgaaggctcatggtaagcctcatga

SEQ ID NO: 328322 - DNA, 619 bp, Homo sapiens
ctcttttccttgaattcagaggtctagttctctctaagcttcctcctctctgtcttctggctggtcttcagagtcatatgcctgtttgtctttctctctttctctctcatcacccttgatccttcaactagggggctttggctaaggtccctgacctttggctaaggtctcttttttgagcagaggaattactgaaatgaatgaatgataaattttaaaatgaaccgggtcaagtaatttatatttgcatgctttagtatctgcttttataacctgagtttaagcaacttaagtatagtgagcactggactgaggacatagtaacactctatgatgacttgttgaaacatgacaaagtgaatgaaatttagaattcttcargtgattcctcttactagggcctgtagattttttctttcctttcatttttccaatttaacacaaaggagaccaagactaatctgtgcatagcaaggtctgcttgagtttaaaaccccctcctcctgtcatcaataagactgaacagaggagaattaacaaaacaggggccatctctcatgtcttcttaacaagtagaccaagattcatgatctggagggaaagattggagaaaaagtga

SEQ ID NO: 328323 - DNA, 536 bp, Homo sapiens
gttactctctgcctataaaatctgcccccagactccagctccaggagatagatttgagtgctgcctcctgtctctttgccagtctgcttgcaatcaagcctttcttttctcaaaagctggtgccattgtattcacttctatgcatatcrtcagacagcgagcccattgctcagtaacaaatacattctataatgtactgaatattggaaatttcctaaaagagaaataatataataaagtgcccatttctcctatttgctatatctccccatgacaacctggatgaagtccaaacaacataatgagaggttggaaaaaggccacaagactctatctactgaaccctgtctccttctccttgcctcacacttaaccctcaggccacagggagctccttgttgctgtctcacatgtacacacacatgttcatactcacatatgcatgtacacatatacacacaagcacacccactcaaacatgcagccctacttcttgactccaagccttcctccatgtcgtttcttctgtataaatt

SEQ ID NO: 328324 - DNA, 656 bp, Homo sapiens
taaacctcttttctttataaattacccagccttgggcagttttccatagcagtgtaaaaacagactaatacaaagagttttgccaactcagaatgagattttctggacctcacaaggatgggcgtagtaataccacctttgagagttattatgagggttctaggaactaaaatctgtgcaagcttgttgcacctggtaaatgtgttataaatcatcaaactacacctagccaatgttcaayataggctgatgaatggagatgaagtcttaacgacaaggattcaaggggtctgcagagaacttattaaacaggtggattttgagtaattttgtagaaagaaagatggacgtactggaaaaaaaaaaaccagaaggatttacaggccaagaaaggaggcatttacataatttttcttggtaggagccaaggaatttacacagatttaactgtctgttctctagttctgagcacatttctaagcagctttgtctttgagagagggcaggagccaatgagtggctgtgaagtctatgctgaattctacagatagcacttttaaaaagttcagctgatagagcccacacagacccactgagccagagtctctggagtagaacctattttcttttcctaattttgtaacagagtcaatgcc

SEQ ID NO: 328325 - DNA, 438 bp, Homo sapiens
ctctggtgaagatcgcctaggatgccagggagcaacaataaacacagtcttttcactccaacccttcatttagatctgctttctctttgaatctcagttggctgcagcaggctcttggctaccttgctgaagaggtgtttggcaaatcatgaaagggcaagggctccccagagaggatattttccctcttatcggaacctttcaaaacagcaggagaagtgaggaattgcaactgggcatccaatcagctcctctgccgcagagaggagatgggggaaagggattctcaccttcaggctccacaagattttcagtattgagaaagacagcttctctctgaaagaagactggacttagatatcacattctgcaggaagtcttcyctcacctgaccctcacagcccatgctgggcagcctgcttttctctgtccctataa

SEQ ID NO: 328326 - DNA, 510 bp, Homo sapiens
ttccacactgccccactgggctaaagacagagggaacagggaggagggagagtccatacaatgctgtgttcaagttaccttcgtgcatctcagacaattgaatgtctcagccagccaccagccactttaatacatcatcccttttaactctcataaatacactgtggcttagagctaccccatttcactaaggagctgaacattattatatagcttttggagagtctgagttacttgatgaaagccagtttgggattctaatttaagtcagactggctctagtcaccccatttgtacattccattttgtatcttctcatgtgggtgggtacatctttataayaatgttcaaggccactctacagagaagagttaacacagcaggcctgaaactgctcatccgtagaaagccctgctgtcaaagtggtccttggctggtatctaggaagctggaaattgggaatgttcccactctttcctaactgatgaggttgactcacagtgcctcaac

SEQ ID NO: 328327 - DNA, 532 bp, Homo sapiens
atgaaagccagtttgggattctaatttaagtcagactggctctagtcaccccatttgtacattccattttgtatcttctcatgtgggtgggtacatctttataacaatgttcaaggccactctacagagaagagttaacacagcaggcctgaaactgctcatcygtagaaagccctgctgtcaaagtggtccttggctggtatctaggaagctggaaattgggaatgttcccactctttcctaactgatgaggttgactcacagtgcctcaactatttgtgcaagcattgtggtttatgctgaacatctgcttactttctgggagactggaatttagcacatgtaggtatcttacatgatcagcccccattaaagaccttggacactgagcctctaacgagcttccctggtattataatatcattatactatgtaatacactacgtaaagtcaaaatcagatgcattagcaatatggacacaaacagtaactggttgctccatcataaagcacccaagaaacctatagaaag

SEQ ID NO: 328328 - DNA, 362 bp, Homo sapiens
cccattccccattggtcaaaattactccatcggtgttaactctctctcagttctgggttgtatatgcataagtgcccaaggttccaacatgtggttagagaagtccaggagaagaagcaggagacacgtgacagattccctggtgagatatcgccagctcacacctgcgtgaagctggctgaaaccatggctgaaggaggaggtgaggctgagatgtataaaggktccacagcacccttgtaactaactcaatcctctgatcctgttctccaactggcatttggcactgccaagcctgccctacccagttgagcctccctgggctttattcatttattcagtcattcaacaagtgtgtgtgt

SEQ ID NO: 328329 - DNA, 510 bp, Homo sapiens
acttgtgccttatttttcttctaatcccaacacttaacagaggtcttgactcagggcttatttttgaataaatattcagtgaatcaaagctgtgattaataaactattaactgaacagatgaacacataggtgcatgaggagggatctgggtgaagagacagacatggggcagtcagatgggaacagggatcctgaaacctgcagtgctgcctgcatttgacaaaaggaaagcacctctcttcctgcctagtccccagggctgggcacagaggaagcctccatatggggaagtgaagacagaatgtctctgagaataaacagatttaagaagaagatgatgtccccattgtgctggcagaggaggggtgcagttggcaatgcccagctccaccgccrggcccagtggggagctgtactttggagaaatggaattcaaggacatcagaaggcagaaggctgtagtggaaaaagagggcatgaacttgggcatcatacagacctggacaaga

SEQ ID NO: 328330 - DNA, 570 bp, Homo sapiens
gtggcagaaagaagagcgtgaagggggaagtgccacacactttgaaaccatcataactcatgagaactcattaacacaggaacagcaagggggaaatccacccccagtattcaaccacctcccaccaggcccctcctacaatttgatatgagatttgggacactcaaatctaaactatatcattccacccctggcaactcccaaatatcatgcccttctcacacattattccttctcaacagttccccaatctgaactcatttcagcattaactcaaaagtccacaatccaaagtctcatatgagaygaagtaagtcccttccacctatgagcctgtggaatcaaaagcaagttagttagttccaagatacaatgagggtataagctttgggtaaatgctcccaatccaaatgggagaaattagccaaaacaaagaggctacaggctccatgcaactctgaaactcagcagggcagtcattaaatcttaatgctccaaactaatctcctttgactccatgtctcacatccagggcacgctaatagaagagatgggctcccaagaccttgg

SEQ ID NO: 328331 - DNA, 581 bp, Homo sapiens
tctccatttggaacatgtccatgcatcagtaacttttatttttttttctgaggagaactggaatccaatgtaactagtcagccatcttgaaaaagaagagaaaaaatatttgactttttaagccatgcacatgtattacattgattagaaaaaaaacttaggaaaatgaaaggaagaatgtggatgtagttttcttccacccagttactctytggagatacacttggttatgtcagatgcattcactcatctggggatatttcacaatatatagacacacttccagagaattcctcagtgcccttcattcacatcaaagtttgtaataaccacttgatatggtttggatgtttgtcccctccaaatctcatgctgaaatgggattctcagtgttggaggtgaagcctggtggaaattgtttgggtcatggaagcagatccctcatgaatagcttagtaccatcccattgataagtgagttcttgctctgagttcatgaaaaatctgtttcctttaaaggatcctggcacctcctttctctctctcactcccattctcatcatgtgatatgttggctccccc

SEQ ID NO: 328332 - DNA, 581 bp, Homo sapiens
tctccatttggaacatgtccatgcatcagtaacttttatttttttttctgaggagaactggaatccaatgtaactagtcagccatcttgaaaaagaagagaaaaaatatttgactttttaagccatgcacatgtattacattgattagaaaaaaaacttaggaaaatgaaaggaagaatgtggatgtagttttcttccacccagttactctctggagatacacttggttatgtcagatgcattcactcatctggggatatttcacaatatatagacacacttccagagaattcctcagtgcccttcattcacatcaaagtttgtaataaccacttgatatggtttrgatgtttgtcccctccaaatctcatgctgaaatgggattctcagtgttggaggtgaagcctggtggaaattgtttgggtcatggaagcagatccctcatgaatagcttagtaccatcccattgataagtgagttcttgctctgagttcatgaaaaatctgtttcctttaaaggatcctggcacctcctttctctctctcactcccattctcatcatgtgatatgttggctccccc

SEQ ID NO: 328333 - DNA, 602 bp, Homo sapiens
actactttgcagttttgaagaaaaaaagaaaacccacaacaataaatataatcaagttatctgagtcagaatgaaaagacgattgtcattgcccacacttcaccagccttcaggaagtttctgcagcaacgtcaagcacctcttcttttaaattgattatcttatgataactgtcacaaagcaaagttccccagagaagatgcgtgtcaaaacacaaaggaggtgtgttcaggctcatggcattgcttgtaagaaaatccaagcaggttgccaaacaatgtgaagatgtcaagaatgaggggaaatgatgacaattcctgtttgaggagatgatgtcccattgccaaaagcaaracagagtcatgtgaatgggaagaggagtgcagataaactggttttggcattgttagaaagcagacctaggttttataaaggctcttaaacaaaacgtgaccatgccaaagctcttggggatagaagagaacagagacacaacaaaattgtggcaggtagaagacgtaagaaaagaattttctcagctacagaacaagaatttgagatgaactcatcccttttcaaccacaaaaacaaaatttggaatc

SEQ ID NO: 328334 - DNA, 501 bp, Homo sapiens
ccatgactgcagtcccatagcttgggtgatgctacttctcactcatggtttctgatgtcctcatcccctggcttccaggggaccatcccaggacatgcctgggcccatagctggctccctggccctgcatcctccacatgtcccttattctattcccaggcaccacgcctacctccaagtaccagaggcagggctctccacagggtgctcagggagcccttcctcccttaccaggcataacgtgggggaaagcctgcgtgcctgccccatgaggaggacacaggaatycccagcatgtgacattctccctaaagagagccctcaccttcctaccgatcaacttcccagtgactctgtcctacccttcagggaagtgacgagttagggtttttgaactgatttgggggccacaccttagtaagttcataaattatccatcatcattttttaggatctgcaaccacttaataccacttgttctcaaccctggaggtttggcca

SEQ ID NO: 328335 - DNA, 530 bp, Homo sapiens
ccaaaaacacatgatacatgaagaatggtcttttctaaaaatggtgttaggaaaactgaatatccacatgcaaaataatgacattagactcttatttcttaccacatagaaatatcaacccaaaatggattaaagacctaaacataagacctgaaacaatgaaactactggaagaaaacatagggaaaatatttcatgacattgatctgggcaaagatttttttggctaagacccctaaagcacaggcaatgaaagcaaaaatagacaaatgagattacattaaactaaaaggtttctgcacagcaaaggaaacaatcagcagaatgtctttaatgtttagaagtttaattatcatgtgtcttggtatagatttctttgagtgtatcctatttggggttcacaccccttcttgaacctggaagttaacatctcttgccaaatttggggagtttttagcaattatttcttcaagtackttttcaatacgtttatctttttattcttctctctgctttggagactttagtct

SEQ ID NO: 328336 - DNA, 474 bp, Homo sapiens
aaaaagtgaaagaaattggctttatttaacccaacagagtgaggtctttggtgggtttcctaatagccttaaggtgtagaaaggaatattagattaaagatgatcagcagcagtaatatgcatcaaaaatccatgcactcgatcatagcaaaaaaacaaaaaacaaaacaaaaaaaaaaacaaaaaacaaaaaacctcaagcagacaaaagaaaaagaaaagaacattgagtgcaggagttgtgaggtagtgggtaggaagtcacattatgctatagactgtcctacctacctgcttttggtgtattcctaccagtcactagttcacccctctstccccgtcaggatcccacattcccataatgctgaacttactattggcagaatttgcagtgacatttcatgcctgcacacccttgcacacacagctctgtctacagtgctcctttctttgccctgtctctcctgggaatgg

SEQ ID NO: 328337 - DNA, 552 bp, Homo sapiens
ttgcagttgtcggacaaaggttccccttttcctataggttgtaaactgagggctgttcttggcttatagaagcccccaaatttttattttgcccgtaaccctcttctcccatcttcaaagccagcagcagcagttggagtccttctcacacaagaaaatctctccagcctcttctttcacctctgcatgcctctgactctcttgccttccttttccacatgtaaggactcatgtgattcaattggttactgggataacccaggacggtctttgcatctcaaggkcctaaccttaattacagatggtgggggtatcagtgatgggaacagagacaccatgtagcatttatggcaagctccaaagggagaatcagcacagcctggaaatggggagaaaggccaggccatccccagcagggaatgcttcactttatgaaaacaatgcctgtcatgcttctgggccctgtgagagataaatcatctccccatgagacatcaagctgccaaataaccagaactgggtatcacgagccaggtcctaggcgactcactg

SEQ ID NO: 328338 - DNA, 600 bp, Homo sapiens
ttttaatggtcaggtctagaagtagcttatgtcatttctatacatccccctggacaaaatgcaatcacatgatttccatttaacttcagtggaaacagagaaatgtagtagtcagtgtgccaaaatataggaaaataaaacaggatttggagaacacctagtattgtctctgccacactatgtttattccccttgcaccatcctgtcccaccatacacacaaaaagccacccaggaaagcataatcttccacagaacttagcaacatcctaggtataagaagcccctggtcccactgatggcctttattcccaggtgaccatttctaggaatcagactccagcctaactacagtcaagaaatcctgaaggagtcatctcaaggcagaccccaggggaaggagaactgctcagtaactaatgaatcatcctagaagggcagaaacaggagcagggaaaactctcaccctggctaatgagaggagagacatttgcaagctcattgggagtttgacgaggatttgtcccttggaggttgaagggttgcactaattcatccstcgttgtagtagtcagggttctctagagggacaggactgata

SEQ ID NO: 328339 - DNA, 599 bp, Homo sapiens
agacttaccttgttttgacagcctgcaagtgcaggacattaacaccccaggggtgagggttctgccaccaaggtacaaaaaatactggtgggttaaaactcccaccccacccctctcctacagaggacagctctggaaagcatctgacacatcgaactgagctcctgtttgccacaaccacagccttgaaatgcatcckgatgttggcttttcatttgtagctgatcccacactcctcctttccagaatcacctcctaagcaaactacctgcatttgtgtctttgccttagactctttttgtctcagccatgttaagatggccccaggcaacacccagacattgccctttgaggagctcatggcatggtggtggggtcagatgagtgtagtggtaaatccaacacagtgatacacagccagtgatgggcaaagcaaaaaggactttgggcaagtaaaggagaggtgcctggacctatcttggggtgttatggaagacttcctggaggaagtggtgtttaagttgagacctggaaattgggaagattctggccaagtgaagagcatgtgtgtaggtataaggtgatagcaaagggtggaa

SEQ ID NO: 328340 - DNA, 599 bp, Homo sapiens
agacttaccttgttttgacagcctgcaagtgcaggacattaacaccccaggggtgagggttctgccaccaaggtacaaaaaatactggtgggttaaaactcccaccccacccctctcctacagaggacagctctggaaagcatctgacacatcgaactgagctcctgtttgccacaaccacagccttgaaatgcatcctgatgttggcttttcatttgtagctgatcccacactcctcctttccagaatcacctcctragcaaactacctgcatttgtgtctttgccttagactctttttgtctcagccatgttaagatggccccaggcaacacccagacattgccctttgaggagctcatggcatggtggtggggtcagatgagtgtagtggtaaatccaacacagtgatacacagccagtgatgggcaaagcaaaaaggactttgggcaagtaaaggagaggtgcctggacctatcttggggtgttatggaagacttcctggaggaagtggtgtttaagttgagacctggaaattgggaagattctggccaagtgaagagcatgtgtgtaggtataaggtgatagcaaagggtggaa

SEQ ID NO: 328341 - DNA, 542 bp, Homo sapiens
ccatgttcttctgcctgcttttatcctaaccatgctggcagctgcttagatagtgcccacctggattgagggtgggtctgcctccccctgtccactgactcaaacattaatctcctttggtaacaccctcacagacacaccaggaacaatactttgtatccctcagtccaatcaagtcagcactcaatattaaccatcacactcaggtacttcattctctttgcctctcaacctgcttatccaagtcaaaccaggctaaaacaaaatgtcaacggctgtccagcaaaagaaaaagttgacaaaagcccccttcttgacctctcrcatgaagttagatcatctcctttctgtgattgttaagcatttacaacacttctactgtaacattatactgaaattatttgtttccatgtgtaactcccttaagagatgaaatggtagttacttctaatgggaagaacatgaattctggggtatgaactcatgtgtactctcatgattgatatcctccacaaggagctggctgtgcaggctgtgtaacc

SEQ ID NO: 328342 - DNA, 542 bp, Homo sapiens
ccatgttcttctgcctgcttttatcctaaccatgctggcagctgcttagatagtgcccacctggattgagggtgggtctgcctccccctgtccactgactcaaacattaatctcctttggtaacaccctcacagacacaccaggaacaatactttgtatccctcagtccaatcaagtcagcactcaatattaaccatcacactcaggtacttcattctctttgcctctcaacctgcttatccaagtcaaaccaggctaaaacaaaatgtcaacggctgtccagcaaaagaaaaagttgacaaaagcccccttcttgacctctcgcatgaagttagatcatctcctttctgtgattgttaagcatttacaacacttctactgtaacattatactgaaattatttgtttccatgtgtaactcccttawgagatgaaatggtagttacttctaatgggaagaacatgaattctggggtatgaactcatgtgtactctcatgattgatatcctccacaaggagctggctgtgcaggctgtgtaacc

SEQ ID NO: 328343 - DNA, 542 bp, Homo sapiens
ccatgttcttctgcctgcttttatcctaaccatgctggcagctgcttagatagtgcccacctggattgagggtgggtctgcctccccctgtccactgactcaaacattaatctcctttggtaacaccctcacagacacaccaggaacaatactttgtatccctcagtccaatcaagtcagcactcaatattaaccatcacactcaggtacttcattctctttgcctctcaacctgcttatccaagtcaaaccaggctaaaacaaaatgtcaacggctgtccagcaaaagaaaaagttgacaaaagcccccttcttgacctctcgcatgaagttagatcatctcctttctgtgattgttaagcatttacaacacttctactgtaacattatactgaaattatttgtttccatgtgtaactcccttaagagatgaaatggtagttacttctaatgggaagaacwtgaattctggggtatgaactcatgtgtactctcatgattgatatcctccacaaggagctggctgtgcaggctgtgtaacc

SEQ ID NO: 328344 - DNA, 553 bp, Homo sapiens
ttcggccaacaatagttgattgattccctgcctactcatgactgaggcttgcccccttcagccctctccgtccaagtggtaattttggtaattggatgctggaaaatattatgtcatttcttgcatttcttagtcctctcagttgactgtgggcatctacctctactttaaaaggtgagtagtatctgaaagaaattgctcaatgattctctctctcttrtgtgtgtatgtgtgtgtgtgtcagagaaaagagagagatagacataagaacacaaacacacacagaaagagaaaggaggagaaacagtatgacaatcttccttttgcaagcctaaacaatagagttgaatattgtcaattttacactgttgttgtgctttgccgggaaacacatatggttcctcccttgagggcattggactggatgctactctgcctgcaaggtccttgcctcttgtaagtggtcacttgtgcagcatgcttgagaactcacgattccagaggagagttggtagctggcttggcacagacctggaattaattgatcactcat

SEQ ID NO: 328345 - DNA, 553 bp, Homo sapiens
ttcggccaacaatagttgattgattccctgcctactcatgactgaggcttgcccccttcagccctctccgtccaagtggtaattttggtaattggatgctggaaaatattatgtcatttcttgcatttcttagtcctctcagttgactgtgggcatctacctctactttaaaaggtgagtagtatctgaaagaaattgctcaatgattctctctctcttatgtgtgtatgtgtgtgtgtgtcagagaaaagagagagatagacataagaacacamacacacacagaaagagaaaggaggagaaacagtatgacaatcttccttttgcaagcctaaacaatagagttgaatattgtcaattttacactgttgttgtgctttgccgggaaacacatatggttcctcccttgagggcattggactggatgctactctgcctgcaaggtccttgcctcttgtaagtggtcacttgtgcagcatgcttgagaactcacgattccagaggagagttggtagctggcttggcacagacctggaattaattgatcactcat

SEQ ID NO: 328346 - DNA, 603 bp, Homo sapiens
gctgcaaagccttgaattaaagctggtgggaagttgtgcagagtattggctgctgggataagagcagaggccgagaggattagaagccatgcacaggctgggtccaatacaccacagaactccatgactgctatttatttaggttctatgagagttcccaacacagtcacattataaaatgarcatctgcccctttctaccgaggaagaactggcgctcaaagaggccaggtgacctgcccttgatcatgcagtttgtaaacagcacagccgagatttaaacccagtaactgggactgcaaagcttgtgctttctccaccatgccacgctagcccactggctctgggatggaaacaagtccgttcttctaatgtaaggctccacccctctttgctagtcactggagcatcccttttgatccagtcctctgtaatcaggcagaggttcagcattcagtcccagctgcagatcaggtggctgctccaatgacctcacttccagctgtaggggtacctgtagtcctaggagagccacagctcctcacattcaggtagtgcttcatagttgaaaaaaaaaaacagttttaaagacaaaaaacacata

SEQ ID NO: 328347 - DNA, 585 bp, Homo sapiens
tctctccaatgtccagctgtagtctctgacatccagctgcttcccctctctgctaagtctggggtttttataggcacagggtagggggcagggcaggaccatgggtggttttggaaaaggcaatgtttgagcaggaaaacagggatataagttctcactttgggccatagtctcaagcttttcggcttgagagtggggcttctccagggaaccacccctgtctgcctagaatttctctgctgccccttgtccctatcattatgactgtaaacaggtaaaaagtatttagacccacaatgaagatagtacctgtagaaaatccattagcagttgaggggtttcatcaacattctgaaaaacatacagagaatggcaattgatgttacaaagcagatagagccacagctttgtgtgttagcatagtgaggtgaacawgaaaaagtcacatcttgtaataaaaaactctggaaaagtccaggacttgggagtgctcggtgagaccaagagaaacacgaatacaggggacggggaccaggggaatttgctgaaaaactggacccaaattagcttctcttcctccttagc

SEQ ID NO: 328348 - DNA, 585 bp, Homo sapiens
tctctccaatgtccagctgtagtctctgacatccagctgcttcccctctctgctaagtctggggtttttataggcacagggtagggggcagggcaggaccatgggtggttttggaaaaggcaatgtttgagcaggaaaacagggatataagttctcactttgggccatagtctcaagcttttcggcttgagagtggggcttctccagggaaccacccctgtctgcctagaatttctctgctgccccttgtccctatcattatgactgtaaacaggtaaaaagtatttagacccacaatgaagatagtacctgtagaaaatccattagcagttgaggggtttcatcaacattctgaaaaacatacagagaatggcaattgatgttacaaagcagatagagccacagctttgtgtgttagcatagtgaggtgaacatgaaaaagtcacatcttgtaataaaaaactctggaaaagtccaggacttgggagtgctcggtgagaccaagagaaacacgaatacaggggacgsggaccaggggaatttgctgaaaaactggacccaaattagcttctcttcctccttagc

SEQ ID NO: 328349 - DNA, 586 bp, Homo sapiens
cacctgaaaataaatgtaataaaagatattaatgacatagagtaaaaattatgaacattattgagagaaattttaaaagaackaaaaaatgtatggatatggcatatttatgacttaaaagacttagtattggaaaatgtcaattttccttaaattgacatacagatccaatgcaattccaatcaaaatccagcagatttttaaaaacagacaagctgatttcaatgatataaaaatgcagtgtcaagaaaagcaaagataatctgcaagaacaaagctgaaacttacatttccagatatcaagacttattttaatgctacagtagatatctcacaatggtattggcacaaataaacaaacagatcaatgaaacaaagtagggtccataaatacattgttattaccagacttcagagaaataggcaatggatcattcttcacctaatggctctaggtcaattaaacagtcatatagaaaaaatattgattctattatacctcacaatatatacaaaataatttctagatggattatagcctttggtgtgaaaagaaaaatattaaggcttccaaacacaaacatag

SEQ ID NO: 328350 - DNA, 586 bp, Homo sapiens
cacctgaaaataaatgtaataaaagatattaatgacatagagtaaaaattatgaacattattgagagaaattttaaaagaactaaaaaatgtatggatatggcatatttatgacttraaagacttagtattggaaaatgtcaattttccttaaattgacatacagatccaatgcaattccaatcaaaatccagcagatttttaaaaacagacaagctgatttcaatgatataaaaatgcagtgtcaagaaaagcaaagataatctgcaagaacaaagctgaaacttacatttccagatatcaagacttattttaatgctacagtagatatctcacaatggtattggcacaaataaacaaacagatcaatgaaacaaagtagggtccataaatacattgttattaccagacttcagagaaataggcaatggatcattcttcacctaatggctctaggtcaattaaacagtcatatagaaaaaatattgattctattatacctcacaatatatacaaaataatttctagatggattatagcctttggtgtgaaaagaaaaatattaaggcttccaaacacaaacatag

SEQ ID NO: 328351 - DNA, 457 bp, Homo sapiens
tacaaccacaattatgttcaagataagataacttgattttataatttttaatttaaattttcaagactaaatcaaacattttcccccactttatcatgaaacctgagtttcttttttgagtggaatcacataaagtggccttttatggtttttgttctctgataatatgaacttgagattcttgaccatttacttttcagtacttgatgaatttgtcctaatcatgtgtaactgccactgccttaattcagatatgttttacctgaactgtttcacaagtttctaaatgaactcttgactctcytgtttcctgctctgatccatgtgcacacacgactatgaaagatctttatctttctaagttgcaaaatgactgtgtgtgcctctgcatgaaaccttcaacaacactcctttatctatggattaaaacccacattctctactttggcatgtgttt

SEQ ID NO: 328352 - DNA, 341 bp, Homo sapiens
tgcaaaatgactgtgtgtgcctctgcatgaaaccttcaacaacactcctttatctatggattaaaacccacattctctactttggcatgtgtttcttttgccggggctgccataacamagcaccagaaacagagtggcttaaagaacagaaatttatcatctcccagatctggagaccagaagtccaaaattaaggtgtccgcggcgttgattctttcttagagctgtgagagagccttggttccatggctttctcctggcaggtaacctctggcattctttggcttgtgaatggcattgtccctgtgatttcatattgttttccttctctgtgtctttgt

SEQ ID NO: 328353 - DNA, 521 bp, Homo sapiens
ttgcaaatttaataaacttttcaaaggttgagagttatattggaaaaaaaccagcagagacaaagatttgatgccaaaataaaggtaagtttacaaaaatgttttaggttctagaaactagtggtgtaggaataacaggaacagtgtgttgcataatattttccatacaaatatttactgactccaagggcaatagcagtaaaatattaccccagggtgaaacttaccactgagattgggttgaacagccagtggatctttatttacccaaaggcaaatgtatttgatgtattagcctgggctctccaaggtggggtgttggatgtttatttgcttttatggggttactccccctgatctatcctataactgctgagtgcctgctatttatggagtttgctttttccaggagagagccagcagcttgtagaagcatgcygggttacataatggtcctgctagtctgaggagagccttcttctctaacaggattcaacactgctagggaagaaaggaggaaa

SEQ ID NO: 328354 - DNA, 578 bp, Homo sapiens
ttcagagggtgcaagccccaagccttggtggcttccacgtggtgttgggcctgcaggtgcacagaagcaaaaatcgaggtttgggagcctttgcctagatttcagaggatgtccaggcagaagtttgctgtaagggtggagccttcatggagaacctctgctggggcaatacagaagggaaatgtggggtcagaatccctacacagagtccccactgggacactgcctagtggagctgtgagaagagggccactatcctccagacaccagaatggtagatccactgacagcttgcactgtgttcctgaaaaagctgcagacaacgtcagcccatgaaagcagctgggagggggggctgtaccctgcaaagccacaagggcggagctttccaagaccatgggagcccatctcttgcatcagtgtgacctgtatgcgacacacgaagttaaaaggakatcatttcagagctttcagattttactgcccagctaaattttcgacttgcatgggccctgtagccccttcatttgggccaatttctcccatttggaatggatgtatttacacaatgcctgtac

SEQ ID NO: 328355 - DNA, 593 bp, Homo sapiens
gatataaaataaatagaacatattctttgccttgatggagcacagcttttggttgttttggtttgactgtcccaaccacactgcttatagtcagtggtacttgcctctgtgatctatttcaaygtggttcagtaagttcagcttccataagtccactaatgtgtgagttatgaatgtgggcttttagccttcaccctggatagcagagaggataagtctgcaatgactgacaaccacaataaaatgaaatttacacaggcatatatttatttcttcaacattcttatttctgctggaaaagtaatatacaaattacaagtttctgaaaagataaattttggtcacattctgatattctgtatacttatattttctaacctatcttcacatcatacaggaaataagaataaatccatttgttgtaattactgatgcttaagatccttgcataggtctcttttcacattggagtagcaacagagaattcttttttaattcctaaaagcatgaagaatccagacaccaatctccagcttccaaagtgtgtgtatgtatgtatgtatgtatgtatgtatgtatgtatgtatatgtat

SEQ ID NO: 328356 - DNA, 403 bp, Homo sapiens
gtccttaatcctgtggctttgtatgatccaagtatggtaggcagaattctaaagacattgccccaagattctcatcctttcattactcaatcaaatgtcaatctaggcactggtgtgaaggaatttgcagatgtaattaaggttactaatcagttggccttaaaatggggagatatctggttgggcccattgtaattctataagtccytaaaatcagaagagaaggacagaagctgtcagggacatatggagaaagagaaagtaggagagatgaggcagaagaggagttcagagagattcaaagtgtcagagcaacctaacccaccattgctagttttaaagataaaagggacctgagctggggagtgcaggtggcctctaaaagctgagagtggccttcagc

SEQ ID NO: 328357 - DNA, 472 bp, Homo sapiens
aagctatgattgtaccagtgcagtccagcctgggcacagagaaagactctgtctcaaaatacatacatattttttatccttcatcaagaaataarttaatatttaaagggtaaaaacacagactccaagagaagcagcagagccaatatataagctgacatgttctttttgcttggttgggtttctgccatttgcaaacaacagtcttgactacttcaatatgtcaaataacataacacacacatacacacatagtgtaagaataccaggagagattttttaaaatccatagtcagagccttttatgtgccaatcagtatttaatatgccaagttgtaaaataaataaggaaaaataatttgtgtaagaaaattatgttgctttaaaaatcaagtagtcttgggccctagaaatagatacactatgctttcttgaagcatccgtggaacattaacaaaaacggatcctctat

SEQ ID NO: 328358 - DNA, 563 bp, Homo sapiens
tgatactgcaaaattcaagggatcattagttgctactatggcaattacatatcaataaattagaaaatttagaagaaatggctaaattcctagacacatacaacctacccagattgaaccatgaaaaaatccaaaacctgaacagaccaataacaagytaacaagatcaaagccataataaaatgtctcccagtaaagaaaagcctgagatccaatgacttcactgatggtttctaccaacatttaaagaactaagaccaatcttactcgaactgttctgaaagatagtggaggatagaatacttccaaactcattctatcaggccagtattaatctgataccaaaaccagacaaaaacacatcaaaaagagaaaaagaaaactacagggcctgatgaacactgatgcaaaaattctcaacaaaatatcagcatagtgatttcaacaacacagtaaaagatcattcatcatgaccaagtgggatttatcccagggatgcaaggatggcttaacacatgcaaatcaatcaatgtaatacatcatatcaacagaatgaagaacaa

SEQ ID NO: 328359 - DNA, 549 bp, Homo sapiens
tgtacatacaaactcatagaaatatgcagcttatgtgtgtttttataaatggtgtcaataaacaatatattattaagatctactgatgctgacactgtaaccaaacaatatcttgaaatactaatctttgtgggtactttcctcgtttcatcattgtattaatgtctcctattcagtcaaggacctccaagttgacttgagaagaatacagattctctgagtagtaattaaaagagaacaaaaactctstgtgtgtgtgtgtgtgtgtgtgtgtgtggtgtatattttctacttgagaatcacataggaaggccctaaggagggcaaggaaagcatagaatttatgtcataacaatagaccagagagagactttaaaaaaaaaggtaattatggcttccccaaaacctttcataatatgactgtctaagaagactattggatcaatgctttaaggatatgacacagaagtcagaaacataaatgtctgtggaggctaggcagatgctataaatgcccagatcaggatgaatggcaaccaaccacttacg

SEQ ID NO: 328360 - DNA, 593 bp, Homo sapiens
tttggtgggcttaatctaatcacagacatccttaaaaacaaggatatcactctggctagagtcagaaatgtaagtagactaataagcgagagggatttgaagtgtaacaggaatttacccactgttgctggctcaaagatggatgagaccatsagccaaggaatgcaggtggcctctagaaattgaaaacaatctctcagcccacagtcagcaaggaaatgaagatctcagttctacaaatgcatggaactgaattctgccaattattcaaatgagcctggaagcagactcttgccaaagaagacttcagactgacagacaccttgatcctggcctactagtaactggaacagagacatcagctgaatctactgggcttctgacccactcaactgtgggataatacatttgtgttgttttacaccgctaagtttgtggtattagcagctatggaaaatgaatacacctggctaacaaaactttgagcatgaagaaagaattgtctaggtgtctaggcacaaaaagcaagtctcctataggaacataaagacaggggtacctcagatgcacacaacattcaaaaccaggaaaag

SEQ ID NO: 328361 - DNA, 593 bp, Homo sapiens
tttggtgggcttaatctaatcacagacatccttaaaaacaaggatatcactctggctagagtcagaaatgtaagtagactaataagcgagagggatttgaagtgtaacaggaatttacccactgttgctggctcaaagatggatgagaccatcagccaaggaatgcaggtggcctctagaaattgaaaacaatctctcagcccacagtcagcaaggaaatgaagatctcagttctacaaatgcatggaactgaattctgccaattattcaaatgagcctggaagcagactcttgccaaagaagacttcagactgacagacaccttgatcctggcctactagtaactgraacagagacatcagctgaatctactgggcttctgacccactcaactgtgggataatacatttgtgttgttttacaccgctaagtttgtggtattagcagctatggaaaatgaatacacctggctaacaaaactttgagcatgaagaaagaattgtctaggtgtctaggcacaaaaagcaagtctcctataggaacataaagacaggggtacctcagatgcacacaacattcaaaaccaggaaaag

SEQ ID NO: 328362 - DNA, 590 bp, Homo sapiens
ttcctgggctaattccgagaaatgccattcatttctcgccaacaacaagtcatgaacaatgggcggggtagagggggaagctccccacggagggtcttgctttctggacatgacagccaaggactctgaatgtggaagatggcagaagaggcagcctttgggtgggagctctgggaaagcagaggggcaggccagatggcacattgtgcacatgttactgcagggttagtcctggggaaatgtcacacaaggaaaatgtgtttccagagtgtctatgtgctccattatcagcgaaacaatgttgtcatgttgcccacagccctctggagatcccactgctgcaagatcttacccagaacggctttctgtgggcagttmtcttgacctcctttctcaaaatctcccctgggccctattactgtagtgcagtcctcaatccgactgcatcagaattaactgggatgcttgtgtgaaatgcatgacacccactgcagcctaaatgattcaggatttttggtgtagggtctgggagtctgcattttatcaaatctcccaaggtgatccttaagcatgttaaaatttgagtagta

SEQ ID NO: 328363 - DNA, 567 bp, Homo sapiens
tcctgcaaaagacatgctctcattcatttttatggctgcatagtattccatggtgtatatataccacattttctttatccagtctgtcattgatgggcatttaggttgattctgtgtcttcagaattgtgaatactgctgcaatgaacatttgcgtgcatgtgtctttttttttccccaaatactgcatgttctcacttataagtgggagctaaatgatgagaacttacgracacaaagaaggaagtaacagacactggggtcttcttgaggatggagggtgagaggagggagagaagcaggaaagaatctgtacaacaaaccctcatgacaggagtttacctatttaacagactttcataggtatcctcaaacctaaaataaaagtttttttttttttaaatctcttcagagattatactactgccacattctgggaaggcaggcttcaaacccaaacccacacccagcttccctccaccattgatcatttccacttcctgtcccctgctcatcttgccaaaacaacagggaaggctatgtacttggactctagacaagggaaagg

SEQ ID NO: 328364 - DNA, 567 bp, Homo sapiens
tcctgcaaaagacatgctctcattcatttttatggctgcatagtattccatggtgtatatataccacattttctttatccagtctgtcattgatgggcatttaggttgattctgtgtcttcagaattgtgaatactgctgcaatgaacatttgcgtgcatgtgtctttttttttccccaaatactgcatgttctcacttataagtgggagctaaatgatgagaacttacggacacaaagaaggaagtaacagacactggggtcttcttgaggatggagggtgagaggagggagagaagcaggaaagaatctgtacaacaaaccctcatgacaggagtttacctatktaacagactttcataggtatcctcaaacctaaaataaaagtttttttttttttaaatctcttcagagattatactactgccacattctgggaaggcaggcttcaaacccaaacccacacccagcttccctccaccattgatcatttccacttcctgtcccctgctcatcttgccaaaacaacagggaaggctatgtacttggactctagacaagggaaagg

SEQ ID NO: 328365 - DNA, 592 bp, Homo sapiens
cctagtcagggaggtgaaggacgacttctgagactgtctctccagcctcaactcgcaccacatccctccttgttctctgcactccagggtgaggaaagattggctcaaaaattagggagataactggtggcagtcatacactcctgggatccccaacttctgatcccaccatgaatccagtccctccccaaggctgtaggggtctataatgttctttctacattatacatgctacataataccctaatctaggaattttcttttactcttctttcttttggctgtttcctgtttttcagagacagggtctcactctgtcatccaggctgtagtgcactggcacaattatagctcactgcagcctcaaactacaagctacccttctgtctcagcctcctgagtagctgggactacaggcgtgcaccaccgtgcccaacyaattttttttttttttagagacatggtctcgctatgttgcccaggttggtctcaaactcctggtcacaaatgattctcctgcctcggcctcccaaagtgctgggattacagacatgagcccagcctaggaattttctttttgagaaactacttg

SEQ ID NO: 328366 - DNA, 621 bp, Homo sapiens
tctgatccttccttaacctactttccagcctcatttctctgacaccaacacacacatctcctttaggctggctggctgatctctttgttctgttacatgctatgtttcttcctaccttccctcctgttatgtgcttcacttaaactgttatttttcacaagcttggaatagcccccgctcctcttctacctattcgcatcctactcatctttcaagggtccagttgaagttgcacctcttctaatagttttgcccaatcactctagttctcattgatcttctttgaccaccttcaggacttaatctggttcaaaaataagcattcaraaatatattcttgcactgttattgctttgtgtcttcctgtttcccctggcataacataatattaatcatatatcatgctgactggtttatttaatacaaaaagagccacagtcacaaaaagctcttgacagcattccaagtacagatgcagtagggaggcaggagaaatggtggaacttacaatttgctcaacccaagcccgttcatccaacatatctcaaatgagcccagggagaaaatggaagtcactttttatgaaattttgatatttctgctaactccttcaaggtgaat

SEQ ID NO: 328367 - DNA, 622 bp, Homo sapiens
gttctgattggaggcaaaagtaccagaagaccttgcaagattacaaccaagcataggattctgtatgtgcatatggcaatttgggggactgttatatttgtctacttgtttgcattgttttggtyttcttgatgtttggttttgtgtgtgtgtgtgtgtgtgtgtgtgtgtgtgtgtgtgtgttttgttttgatttttttttttttggtttttggtttttgggtttttttgtcacaaagaatagcagtaccaacacatagagaaaggtgtgctccttgtcctctaagtgggctcttggaattagtaagtaggcatttgaggcattgatttctaagctgtagagtgcacagtgtattggcatctggatgaagccatctggctccaggattttatcactgaccagagggccagagggcatgtttggcttccaggaagtcaggctggtcaggaacccctttgggaaggaagaagggctttggacctgtggagtatgcctgccttccctcaaagtgaggttttattgtgttatcatggggggaggaaggcagggggggccaataaagagatggggcctcgctctgctgtccttccagttcactgtgggacattcacagagctgatt

SEQ ID NO: 328368 - DNA, 622 bp, Homo sapiens
gttctgattggaggcaaaagtaccagaagaccttgcaagattacaaccaagcataggattctgtatgtgcatatggcaatttgggggactgttatatttgtctacttgtttgcattgttttggtcttcttgatgtttggttttgtgtgtgtgtgtgtgtgtgtgtgtgtgtgtgtgtgtgtgttttgttttgatttttttttttttggtttttggtttttgggtttttttgtcacaaagaatagcagtaccaamacatagagaaaggtgtgctccttgtcctctaagtgggctcttggaattagtaagtaggcatttgaggcattgatttctaagctgtagagtgcacagtgtattggcatctggatgaagccatctggctccaggattttatcactgaccagagggccagagggcatgtttggcttccaggaagtcaggctggtcaggaacccctttgggaaggaagaagggctttggacctgtggagtatgcctgccttccctcaaagtgaggttttattgtgttatcatggggggaggaaggcagggggggccaataaagagatggggcctcgctctgctgtccttccagttcactgtgggacattcacagagctgatt

SEQ ID NO: 328369 - DNA, 622 bp, Homo sapiens
gttctgattggaggcaaaagtaccagaagaccttgcaagattacaaccaagcataggattctgtatgtgcatatggcaatttgggggactgttatatttgtctacttgtttgcattgttttggtcttcttgatgtttggttttgtgtgtgtgtgtgtgtgtgtgtgtgtgtgtgtgtgtgtgttttgttttgatttttttttttttggtttttggtttttgggtttttttgtcacaaagaatagcagtaccaacacmtagagaaaggtgtgctccttgtcctctaagtgggctcttggaattagtaagtaggcatttgaggcattgatttctaagctgtagagtgcacagtgtattggcatctggatgaagccatctggctccaggattttatcactgaccagagggccagagggcatgtttggcttccaggaagtcaggctggtcaggaacccctttgggaaggaagaagggctttggacctgtggagtatgcctgccttccctcaaagtgaggttttattgtgttatcatggggggaggaaggcagggggggccaataaagagatggggcctcgctctgctgtccttccagttcactgtgggacattcacagagctgatt

SEQ ID NO: 328370 - DNA, 514 bp, Homo sapiens
ccaagtaaagtatcctttcatctctcttctcctttctctgttttccaccccaggcctttgccctcaacccagagccaacctatggtaacacagcaatagctgaattgaagcaaaacctgttaacagtcaccaaaggctgagtttcggccaagcagatagctcctccaggcagcccttcaaaagccaggcagaggcaagggggtaaatagcctgtggcctatctgcagtagaatggccagatggtttgctggtgccaccaaatgaaggagtgatctggtactaagatagaaggcttccagggaccctcccagccctaaaaatcttaagcccaagtgtagtcatcagatgccaaggacactggagaaagtctttggagcatgtagaacaccaagccaattggagtgcctgctagsacagcacaggattcctagaattccggccacaccatatacacccccacccccagagggcagccagtggccacagcagaggccttacccagcaggctgagacc

SEQ ID NO: 328371 - DNA, 467 bp, Homo sapiens
tgagaccctcatcagaccctccaagagcctacttccttacttagggcctgcctgcttgcactgtgctgagttcagggaggtggacaaactgtacctcccactttagcctaagaatctgacttgccatggactctccaggcagtgaatcattttgagcaagcacttaagcaactttccactgagtcattctgaggactgtcaggtttgctaatcctgatatatactgtgtataccctttgttcagatcctatacccatcctgatattggaggagaggggttataaacaacagaactttaaggatgtgctcattagaagtcatttgtattagggttccctttgccctactgactctaacarggcctgaagcactaagagaaatcctgctggtaccaacttttgatttgtgtatgcttttggttacatagctatcaagagtatgtactctttacctggagtggcagtgca

SEQ ID NO: 328372 - DNA, 507 bp, Homo sapiens
atgagctgcctccttggtcgtcaggaagaggtagactggattttcctaacagcgtwcccactgctccagcagcctggagccttgtgtgccaccactttccttgcaccctctgccagtggcctccagggaccactttctgaagccagctgctaacagttttccaaacaaaataatatgtgcattgggggataacttttctcaattaatcttcaagtaccaaatgcctcttttcttcctttatgcctaatgtgatagcaatgggctctttcagtcacctcctgacatatcctgtccccgaggtcattatctcttttccagtcatctcagaatagtttttcaaaaatgtaaatctcatcaaatcatttcactacttaaataacttccctggcttctcatcatatacaggaaaaataccaccccctggacttgacttctttgtgtctccaggtgcctgatgtcattgggctgttgttgcaagtggttctggttattagcactatacagtat

SEQ ID NO: 328373 - DNA, 507 bp, Homo sapiens
atgagctgcctccttggtcgtcaggaagaggtagactggattttcctaacagcgtacccactgctccagcagcctggagccttgtgtgccaccactttccttgcaccctctgccagtggcctccagggaccactttctgaagccagctgctaacagttttccaaacaaaataatatgtgcattgggggataacttttctcaattaatcttcaagtaccaaatgcctcttttcttcctttatgcctaatgtgatagcaatgggctctttcagtcacctcctgacatatcctgtccccgagstcattatctcttttccagtcatctcagaatagtttttcaaaaatgtaaatctcatcaaatcatttcactacttaaataacttccctggcttctcatcatatacaggaaaaataccaccccctggacttgacttctttgtgtctccaggtgcctgatgtcattgggctgttgttgcaagtggttctggttattagcactatacagtat

SEQ ID NO: 328374 - DNA, 525 bp, Homo sapiens
cagaatacacattctattcaacagagcatggaactttctgcaaaatagaccatatgataggtcataaaacaagcctcaataaatttaagaaaatcgaaattgtatcaagcactctctcagaccacagtggaataaaactggaaatcaactccaaaaggaaccttcaaaaccacacaaataaatggaaattaaataacctgctcccgaatgagcattgggtgaaaaacraaatcaagatagaaatttaaaaattcttcaaactgaatgataataatgacagaaccttatcaaaatctctgggataaggctaaggcagtgctaagaggaaagtgcataaccctaaacacctacgtcgaaaagtctgaaagagcacaaatagacaatctaaggtcacacctcaaggaactagagaaacaagaacaaaccaaacccaaacccagcagaagaaaggaaataaccaagatcagagtagaactaaatgaaattgaaacaaaaaaaagacacaaaagataagtgaaacaaaaa

SEQ ID NO: 328375 - DNA, 525 bp, Homo sapiens
cagaatacacattctattcaacagagcatggaactttctgcaaaatagaccatatgataggtcataaaacaagcctcaataaatttaagaaaatcgaaattgtatcaagcactctctcagaccacagtggaataaaactggaaatcaactccaaaaggaaccttcaaaaccacacaaataaatggaaattaaataacctgctcccgaatgagcattgggtgaaaaacgaaatcaagatagaaatttaaaaattcttcaaactgaatgataataatgacagaaccttatcaaaatctctgggataaggctaaggcagtgctaagaggaaagtgcataaccctaaacacctacrtcgaaaagtctgaaagagcacaaatagacaatctaaggtcacacctcaaggaactagagaaacaagaacaaaccaaacccaaacccagcagaagaaaggaaataaccaagatcagagtagaactaaatgaaattgaaacaaaaaaaagacacaaaagataagtgaaacaaaaa

SEQ ID NO: 328376 - DNA, 586 bp, Homo sapiens
aaaagcactcgataaaatccagtatccctttatgattaaaaccctcagcaaaatcggcatacaaaggacataccttaatgtaataaaagccatctatgacaaactcacagctaacataatactgaatggggaaaagttgaaagcattccctctgagaactggagcaagacaaggatgccyactctcaccactcctcttcaacaaagtaatggaagtcctagccagagcaatcagacaagagaaagaaataaaggccatccagatcagtaaagaggaagtcaaactgtcccagtttgctgacaatatgatcgtttaccttgaaaaccataaggagtcttccagaaagctcctaaaactgataaaagaattcagcaaagtttctggatacaagattaatgtacacaaatcagtagctcttctatacaccaaaagcaatcaagtggagaatcaaatcaagaactcaaccccttttacaaaggatgcaataaaataaaataaaataaaataaaataaaataaaataaaataaaataaaatacttaggaatacatctaacaaaggagtagaaagacctttacaaggaaaac

SEQ ID NO: 328377 - DNA, 550 bp, Homo sapiens
tattttgtgtttcctaaggtatgttttatgacccaraatatggtctattttggcgaatgttccatgtgatcttgagaagaatgtatattctcatgttgttggatggagtattctacagacatcagttaaatccagttgactgatgattaaattgaactatgtccttactgattttctgcctgatggatctataaattactaataaaggggtatagaagcctccagctctaatagtgtgtatttctccttgcatttctatcagtttttgcctcacatattttgatgctttgttaagtgcaaacacattaaggagtgttatgttttcttggagaatatacccctttattaatatgtaatgccccccatttttcccggataattttccttgtcctaaagtcttctttgtctgaaattaatataacaactccagctttctcttgattagagctagcacagtatatattgttccattcctttacttttaacccatctgtgtctttatatttaaactaggtttctttcatttagcataatgtcctccaagtcaatc

SEQ ID NO: 328378 - DNA, 495 bp, Homo sapiens
tgatcttcttgcctcagcctcctgaggtgctaggattacaggcttgaactgccatggctcccaccgtattttaaccatcatttccagtgtcctctcctgcaacatgttttccagaattgctaaacaaaagtaattgttgattggtttgactttcatctttgttttaggtcactactgaaggtgcttttcagaaaggatttaatattttttagtttaggaagcctctccatttcccccttcatacatcctttggcctcccacccttcrttgcccagctcttgtcttgccttttcaagaaaacttcacttgattacttctgcacttgatggtctctttgtgggaagggaaagcaatcaatagagcagattgcttctgcgatggtagagcttccaaaggtggcaagttcaccatgtccctaaactctcttcctctccaccctgccagaatgcctgatatgcccccagattcaatcattagttagagaagggccctatc

SEQ ID NO: 328379 - DNA, 565 bp, Homo sapiens
ttcaacatttcagaaagaatctgagtatacatgtggaagcaaatcctacaaggtggctccttcaaatggcattactaggttagcataaatattcatacttrtatgagtctggggccactaaaacttgaatggaggtaagctaaaagttactttgtaggtttaaatccacattgcagagtaagctataactgtatattatgtgtttgattctgaattatttttcttgcttagattagctcaatcagaggttgacataatatttacctatttaaaatatgaaactgaatatgttttcctatcagctatatgttctgcatggttgaatgacctacccttttcttacttgataaagaagaaaggggataataaaagataaagaccaccgaaaagactactcaagcactgaaataaaacaagctatacaaatgtgggtttcaagttcatttgcacatttctaaaactctcttccaaactgtttaagattctgacttgcaggaaagtctgtttccaaaaggacagtatatattgatgtgatgaggaaggtattcttaatatataactttca

SEQ ID NO: 328380 - DNA, 565 bp, Homo sapiens
ttcaacatttcagaaagaatctgagtatacatgtggaagcaaatcctacaaggtggctccttcaaatggcattactaggttagcataaatattcatacttatatgagtctggggccactaaaacttgaatggaggtaagctaaaagttactttgtagrtttaaatccacattgcagagtaagctataactgtatattatgtgtttgattctgaattatttttcttgcttagattagctcaatcagaggttgacataatatttacctatttaaaatatgaaactgaatatgttttcctatcagctatatgttctgcatggttgaatgacctacccttttcttacttgataaagaagaaaggggataataaaagataaagaccaccgaaaagactactcaagcactgaaataaaacaagctatacaaatgtgggtttcaagttcatttgcacatttctaaaactctcttccaaactgtttaagattctgacttgcaggaaagtctgtttccaaaaggacagtatatattgatgtgatgaggaaggtattcttaatatataactttca

SEQ ID NO: 328381 - DNA, 593 bp, Homo sapiens
atcaatacagtggtgactccaactacctatttgaaattcacacttatatgtcaggtaggtattataaatttaacatgtttaaaactctattcctggtcttcctccattaacctgctcctattatagtctttttcatctcaataagtggcaaatctttattcctttttgctaagatccaaaaccttgtagctatacctcacatctgatctgttgaaaaytgtcaactccaccttcaaattttattgaaaatttgacatcttctcaccatgcgcactatgccactctggcccgagttaccatcttatcttgcatggattattacaatgactttctaactgctgtttctgcttctgtcctggcccaacgtaaacctgttctcaacagagaagcaagggcaatcctactaaacaatcaatcagatgacactccttttctcaaaatcccctaacagttcaccttgtccctcagagttaaaaccaacatcctatccacgacctaccttcaaagccctacatgatctggccctgttccctctctgacctcatctccctcactctatcttctccaaccacactggtctccttgctgttcct

SEQ ID NO: 328382 - DNA, 644 bp, Homo sapiens
gagtgctggagtgtggcagtctccatttataagctgtatgactttgggcaagccacttaactttcctgagcctcagtttcctaatgggacatgtgagactcaagtgagacaactcagtaaatggtcagcttctctgcaaaatgggtcaaagcatgcactacaagcatgaagaaacaaaatagtaaaatagtcaagttggctcaaaaatattacgaccagccagacacagtggctcacgcatgtaatcccagcactttgagaggctgaggtgggaggatcacttgaggccagaagttcaaggccgaaggtcaaaggaaagcagacacctgtgaagaggcaaaacccaagggactcctggctttataacaacccattatcaccggaactaatcaattccccttaaaactaacccagtctcactagaatgagaactcactcactactgtgagtatggcaccaaaccattcttgagggatctgcccccatgacccaaacacctcccgmtaggccctacctcccaacaccaccacattgggggtcaaatttcaacaggagttttggtggggatagactcaaatcatagcactgccctactctcattcccactgacactcacaaagaaactacagaatctaataaataat

SEQ ID NO: 328383 - DNA, 541 bp, Homo sapiens
tgccagccactatgcaaagcacttggtgtacacaatctcgtttcttcttcaaatgacaatgctcacgctcattatgctattatttcccccactgtactgataagaaaacgaaagctggagaggttaggtaacattcccaaggtacataagtaagtcaaggagctggggattggatctaggctaactacagagcctccatgacaaaacctactgccccctcaccaaaataaaaaacagttaagaatatactttgaaaagcattaagctatctaattttargtattcctttcgtctaattccacttaattaaacttctaagatgtgaacaggtccacgcatttgcttgctcaataatcacctcaaatgaccaagggagaatgtggaggaggaaaacccacgccttcctgggtggctctcacaatagagaagttctaagtgggcttcacatgtttcaaactctctaagtatcttcttccttcccttcaatcttttggtggctcgcctttcctgtgaagtccagaggcccacttttagccaaatc

SEQ ID NO: 328384 - DNA, 541 bp, Homo sapiens
tgccagccactatgcaaagcacttggtgtacacaatctcgtttcttcttcaaatgacaatgctcacgctcattatgctattatttcccccactgtactgataagaaaacgaaagctggagaggttaggtaacattcccaaggtacataagtaagtcaaggagctggggattggatctaggctaactacagagcctccatgacaaaacctactgccccctcaccaaaataaaaaacagttaagaatatactttgaaaagcattaagctatctaattttaggtattcctttcgtctaattccacttaattaaacttctaagatgtgaacaggtccacgcatttgcttgctcaataatcacctcaaatgaccaagggagaatgtggaggaggaaaacccaygccttcctgggtggctctcacaatagagaagttctaagtgggcttcacatgtttcaaactctctaagtatcttcttccttcccttcaatcttttggtggctcgcctttcctgtgaagtccagaggcccacttttagccaaatc

SEQ ID NO: 328385 - DNA, 541 bp, Homo sapiens
tgccagccactatgcaaagcacttggtgtacacaatctcgtttcttcttcaaatgacaatgctcacgctcattatgctattatttcccccactgtactgataagaaaacgaaagctggagaggttaggtaacattcccaaggtacataagtaagtcaaggagctggggattggatctaggctaactacagagcctccatgacaaaacctactgccccctcaccaaaataaaaaacagttaagaatatactttgaaaagcattaagctatctaattttaggtattcctttcgtctaattccacttaattaaacttctaagatgtgaacaggtccacgcatttgcttgctcaataatcacctcaaatgaccaagggagaatgtggaggaggaaaacccacgccttcctggstggctctcacaatagagaagttctaagtgggcttcacatgtttcaaactctctaagtatcttcttccttcccttcaatcttttggtggctcgcctttcctgtgaagtccagaggcccacttttagccaaatc

SEQ ID NO: 328386 - DNA, 542 bp, Homo sapiens
tttttcatatgctttttggccacatgtatgtcttcttttgagaagtrtctgctcatatcctttcccatttttaatggagtcatttggttttctgttgtttttgttgagttgtatgagctccttgtaaattctagacattagtctcctgtcggttgcatggtttgcaaatattttctcccattcggcaggttgtctgttcactctgttgattatttcctttgctgtgcacagtttaaagtcttatttgcttattttttatttttgttgcttgtggttttgaggtcttagtcatgaattcctcgcccataccaatgtacagaagactttttttcctaggttttcttctaggatttttatagtttcaggtcttacattcaagtctttaatccatcttgagctggtttttgtgtatggtgagagacagaggttcagtttcattcttctgcatatggcaatgcaagtttcccagcaccatttattgaaaaggatgtccattgcattagccgacttcaaattgtactgcaaggctatagtaacccaaa

SEQ ID NO: 328387 - DNA, 516 bp, Homo sapiens
tactagccccaaatctgcatctaacattttataatagtctccaggcaccaggacaatagctagtgcttgtgcacctgtgtgcaaggagagagtaattttacatcttggcattagtttctttactgtttctgttgaagggatgttggcactctactctccaacttactccccgccttgaagaatagggtgggaaattgggttaattattggttttctcttcctgcttttatccccactttcttttaaagacagacaaactgaagcttgactagctaataaagaactttactgaatgtgcaatagctttcacatttggactaagtggatggaagcagggaggggacagtgaggatagaaacaattattgcrcacctactatattccaggcactccacatacagtaggccattgaactgccacagttaccttatcatcatcccctttttacatactataaggaaacaagctcagaaaggctatatgactttttgggattctaattcaagtatgcttgat

SEQ ID NO: 328388 - DNA, 622 bp, Homo sapiens
gaagggaaaagatgggtgtgactattaaagtgtaatacagggtatccttgtggtaatggcgctgttttatatttttactgtggtggtggtcacatgaatatacacatgcgataaaattgcatagaattatatacacaggcaaatgagtgcatataaaacyggtgaaatcagagtaagatgaatggattgtaccaatgtcagtgtcctgttgtgacattgtactatatttatgaatgatgttatcattggggaaaactaggtgaagggtatttgagatctttctgaattatttcttacaactgcatgtaaatctaccattatcttaaaataaaactttttaaaaaatgagtatgagattatgctctcatccctatttaataaacagagaaaataaagcatgaaggtaatcatcacttaagtttctataagacctggtaggatgtctagattaggactcacccaaatgggagttctcaattcagaaatcaagattggaactaatacaaaatacaaggatgactaacatttacactaatgaaaaacctgtcagagaattccagcagccccatatacagttgcctgcaactgcataagagatcttaagcaagttcaatagaatcaa

SEQ ID NO: 328389 - DNA, 628 bp, Homo sapiens
atttactaccttcaaagattggtgaatttatcaggacaaggcctaaatttaaaagattaagctgtaatgacaatttcaggtgtcaggcaacttggcagggaagtgggggtgggcttgggcaaagctgatccgatggctggacaggtctcagaatcacaggtcacaggaaatcaaggtaataattgcctcttctgcttactcaagaagaaaacaggccctggttcaagggtcagtctggcaactcagatgaaargcccactacaggacattttgctaatcctttccttaaaataccctagatgtgactcttatttcaaactaagttaaaaacagactaagctgaaaacactgattttatttcaaactatgttgattgcttttccctttgagagtttcatttgtttatcagcagaaattcctgggctaattccgagaaatgccattcatttctcgccaacaacaagtcatgaacaatgggcggggtagagggggaagctccccacggagggtcttgctttctggacatgacagccaaggactctgaatgtggaagatggcagaagaggcagcctttgggtgggagctctgggaaagcagaggggcaggccagatggcacattgtgcacat

SEQ ID NO: 328390 - DNA, 450 bp, Homo sapiens
taccctccttactccattcttcagattatagcccaagtagactttctgaattgaaatttgattaaataatttctctgtttcaagctattaactgctccccagtttcttctggaagaagtccaaatgtattaagacagtagtcagtatcctatatgatttgattcaaacctttcttccaatatcatcaaccactgattttcctttgtctctctctttccttgttaacaattttactatttgccctagtcacataaactatatgttttgttttgtttctttcctgaccactcttctktagtgaccaaaatttggccatttctgttcattgctcgtgtgcacagtacacaacattgaaagtacatgttttcatatctgcattcctaagtccaagagtaccgtcagagtgggaatgatgcttgcttatgcctgaatccctagattttatagtat

SEQ ID NO: 328391 - DNA, 560 bp, Homo sapiens
aaaaatgaaatgtatttggcttataaattttctgacttcttggatgtctgaaaatatctttctatcaaacttgaaaaaaacattggcccatttaagacagaactacactattttccccagtgccttgttccgctgtttcttatttcccaattgtattagtctgggttttccagagaatagaaccaatagaaaatgtatatatttcctacagagagagagatttactataaggatttggcttacatggtcatggatgctgagaaatcccaagatctatagtaggcaaactgaagacccaggagagacaatggtagaattccagtctatgtccaagtcaaaaggcatgaaaaaaaccattgtatcagattaaagaccatcaggtagagaaaactaatctctcttacttttgttcagtttaggtcttctgtgaattggatgaggcccamccacactgggaagggcaaactgctttagagtctactggttcaaatgtgtatctcatccagaaacaccctttcagacacatatggaataaagtttaaccaaatatgtgagtacct

SEQ ID NO: 328392 - DNA, 566 bp, Homo sapiens
ggcttttttttttcagttttctgatttcaattattattattgttggcttttgagagttctagttatattctaagattttattaaatatatttaaagtattttgagtccatgacttactttttaaattcttttttttattttattattattatactttaagttttagggtacatgtgcacaaygtgcaggttagttacatacgtatacatgtgccatgctggtgtgctgcacccattaactcgtcatttagcattaggtatacctcctaaagctatccctcccccctccccccaccccacaacagtccccagagtgtgatgttccccttcctgtgtccatgtgttctcattgttcaattcccacctatgagtgagaatatgtaaactctcttaatagtgtctctcaaaaagccaaagttctgaattgatgaaatcatatcttatacacttattttgaagattaaatgatgagtgcatgtaaattattaaaatggtacttggaaaagagtaaatttctgttttatcatagtctgaatgtgctacctcatgagaactttactctttcaa

SEQ ID NO: 328393 - DNA, 566 bp, Homo sapiens
ggcttttttttttcagttttctgatttcaattattattattgttggcttttgagagttctagttatattctaagattttattaaatatatttaaagtattttgagtccatgacttactttttaaattcttttttttattttattattattatactttaagttttagggtacatgtgcacaacgtgcaggttagttacataygtatacatgtgccatgctggtgtgctgcacccattaactcgtcatttagcattaggtatacctcctaaagctatccctcccccctccccccaccccacaacagtccccagagtgtgatgttccccttcctgtgtccatgtgttctcattgttcaattcccacctatgagtgagaatatgtaaactctcttaatagtgtctctcaaaaagccaaagttctgaattgatgaaatcatatcttatacacttattttgaagattaaatgatgagtgcatgtaaattattaaaatggtacttggaaaagagtaaatttctgttttatcatagtctgaatgtgctacctcatgagaactttactctttcaa

SEQ ID NO: 328394 - DNA, 566 bp, Homo sapiens
ggcttttttttttcagttttctgatttcaattattattattgttggcttttgagagttctagttatattctaagattttattaaatatatttaaagtattttgagtccatgacttactttttaaattcttttttttattttattattattatactttaagttttagggtacatgtgcacaacgtgcaggttagttacatacgtatacatgtgccatgctggtgtgctgcacccattaactcgtcatttagcattaggtatacctcctaaagctatccctcccccctccccccaccccacaacagtccccagagtgtgatgttccccttcctgtgtccatgtgttctcattgttcaattcccacctatgagtgagaatatgtaaactctcttaatagtgtctctcaaaaagccaaagttctgaattgatgaaatcatatcttatacacttattttgaagattaaatgatgagtgcatgtaaattattaaaatggtacttggaaaagagtaaatttytgttttatcatagtctgaatgtgctacctcatgagaactttactctttcaa

SEQ ID NO: 328395 - DNA, 576 bp, Homo sapiens
gagggccataagaccagatgagctgatttattgatttggatggcaccacctgatccatcaagtgaaaggtctgaaaaatacctcaagcaccaatctcaagttttacaatagtgatattattcctaggagcaaytggcgacgtttagaatctggtgacctgtaattgcatgactcctaaatcataatttctaattttgtggctaacttgttagtcttagacaaccagttttgggattagtcttacaaaagcaaattttgggaaagggctactatcatctttgttttaaactgtaaactaagttagttagtttgtcctgaacccaggaatgaacaaggacagcttggaggttgaaagcaagatggagtcagttaggtcagacctctttcactgttattattttctcacaaatataatttttgcaaaggtgctttcacattatggaggtagtaaataatttttagggcaattaattggtttttaagaacatacatggcctgggaaaaagtctgttggtctcatagagtagacaacagatgcaactgaagtctgtccatgcgtgttgacagactttagtc

SEQ ID NO: 328396 - DNA, 576 bp, Homo sapiens
gagggccataagaccagatgagctgatttattgatttggatggcaccacctgatccatcaagtgaaaggtctgaaaaatacctcaagcaccaatctcaagttttacaatagtgatattattcctaggagcaattggcgacrtttagaatctggtgacctgtaattgcatgactcctaaatcataatttctaattttgtggctaacttgttagtcttagacaaccagttttgggattagtcttacaaaagcaaattttgggaaagggctactatcatctttgttttaaactgtaaactaagttagttagtttgtcctgaacccaggaatgaacaaggacagcttggaggttgaaagcaagatggagtcagttaggtcagacctctttcactgttattattttctcacaaatataatttttgcaaaggtgctttcacattatggaggtagtaaataatttttagggcaattaattggtttttaagaacatacatggcctgggaaaaagtctgttggtctcatagagtagacaacagatgcaactgaagtctgtccatgcgtgttgacagactttagtc

SEQ ID NO: 328397 - DNA, 559 bp, Homo sapiens
tttgttttaaactgtaaactaagttagttagtttgtcctgaacccaggaatgaacaaggacagcttggaggttgaaagcaagatggagtcagttaggtcagacctctttcactgttattattttctcacaaatataatttttgcaaaggtgctttcacattakggaggtagtaaataatttttagggcaattaattggtttttaagaacatacatggcctgggaaaaagtctgttggtctcatagagtagacaacagatgcaactgaagtctgtccatgcgtgttgacagactttagtctttccttctgcaatatgatttcagttaatgaaaactcagggaagggaccagaggtgattgttttcttctttgacagatctgaactttatgcagattagggaactttagagaacaacttcatcctttgctttagggtagacagaggattgaaaaacagaagatgtggtgggaggaaggtcagagggaccttgaggctttttctcttgcccaatatgtcaaagtgccatatgttagggtatttatttctgagccccagcata

SEQ ID NO: 328398 - DNA, 559 bp, Homo sapiens
tttgttttaaactgtaaactaagttagttagtttgtcctgaacccaggaatgaacaaggacagcttggaggttgaaagcaagatggagtcagttaggtcagacctctttcactgttattattttctcacaaatataatttttgcaaaggtgctttcacattatggaggtagtaaataatttttagggcaattaattggtttttaagaacatacatggcctgggaaaaagtctgttggtctcatagagtagacaayagatgcaactgaagtctgtccatgcgtgttgacagactttagtctttccttctgcaatatgatttcagttaatgaaaactcagggaagggaccagaggtgattgttttcttctttgacagatctgaactttatgcagattagggaactttagagaacaacttcatcctttgctttagggtagacagaggattgaaaaacagaagatgtggtgggaggaaggtcagagggaccttgaggctttttctcttgcccaatatgtcaaagtgccatatgttagggtatttatttctgagccccagcata

SEQ ID NO: 328399 - DNA, 540 bp, Homo sapiens
ctttccttctgcaatatgatttcagttaatgaaaactcagggaagggaccagaggtgattgttttcttctttgacagatctgaactttatgcagattagggaactttagagaacaacttcatcctttgctttagggtagacagaggattgaaaaacagaagatgtggtgggaggaaggtcagagggaccttgaggctttttctcttgcccaatatgtcaamgtgccatatgttagggtatttatttctgagccccagcatagtcctgggttataacactatcaagaggattttttaaaaagatttacacctcaaaagggcagggaaatgatttataattgcaagtattctaaagtaaattatctttaaaaggagacatcaggacactggtcaggagcctactcagtaagaaattagatgaagttcagtcaagatgaagggaaggtgtcaaaaccttcttggccacttgggaagctgcgaatattagcaaagcttcaaatccacactttacttaatattgtaaaaacagtgaaaagaaatc

SEQ ID NO: 328400 - DNA, 540 bp, Homo sapiens
ctttccttctgcaatatgatttcagttaatgaaaactcagggaagggaccagaggtgattgttttcttctttgacagatctgaactttatgcagattagggaactttagagaacaacttcatcctttgctttagggtagacagaggattgaaaaacagaagatgtggtgggaggaaggtcagagggaccttgaggctttttctcttgcccaatatgtcaaagtgccatatgttagggtatttatttctgagccccagcatagtcctgggttataacactatcaagaggattttttaaaaagatttacacctcaaaagggcagrgaaatgatttataattgcaagtattctaaagtaaattatctttaaaaggagacatcaggacactggtcaggagcctactcagtaagaaattagatgaagttcagtcaagatgaagggaaggtgtcaaaaccttcttggccacttgggaagctgcgaatattagcaaagcttcaaatccacactttacttaatattgtaaaaacagtgaaaagaaatc

SEQ ID NO: 328401 - DNA, 540 bp, Homo sapiens
ctttccttctgcaatatgatttcagttaatgaaaactcagggaagggaccagaggtgattgttttcttctttgacagatctgaactttatgcagattagggaactttagagaacaacttcatcctttgctttagggtagacagaggattgaaaaacagaagatgtggtgggaggaaggtcagagggaccttgaggctttttctcttgcccaatatgtcaaagtgccatatgttagggtatttatttctgagccccagcatagtcctgggttataacactatcaagaggattttttaaaaagatttacacctcaaaagggcagggaaatgatttataattgcaagtattctaaagtaaattatctttaaaaggagacatcaggacactggtcaggagcctactcagtaagaaattagatgaagttcagtcaagatgaagggaaggtgtcaaaaccttcttggccacttggkaagctgcgaatattagcaaagcttcaaatccacactttacttaatattgtaaaaacagtgaaaagaaatc

SEQ ID NO: 328402 - DNA, 526 bp, Homo sapiens
tgttgcatgtatccttgtaaattggtagtctttggtatttgttgtcctgaattaatttcttaaaagaggttgtcacgtaagaagaatccaataaataattaactgactggagtgtggttgagacctcattatctatgtataytttcatggtgttggagcttagcttctgtactctgctcactttcagcaataactttaaaggacccaagacactttgattttaaagtgataatcaatgagagacatattgttcttgtctctggttctctaaagctctacagcactgtgtgtgaagaaataagatgttgtctgcccagagaacagacctcttctaacacaagagacatttctacagaaaagatcacccgttatgaccttttcattttgggggatggatcgtttcgtttcagctcttatcaactgtcactatgactcagacaatttaaggaacctgtttgtacctagacacatgctcagggtgatttggtattgcctaataagtgccccttttttattgtgcactgga

SEQ ID NO: 328403 - DNA, 607 bp, Homo sapiens
tggtaggagagttggaataaggagatacggtgctaatgcttcctgaagcatttcttttgttaaaaagaaagactcagctctagcccactgcaatgttttgttccttcactgtctcatttccttacttcttaaatacgttttcattggctgagtttaggcttatacaaaatcctacacaaagaggaataatgataaamtagatgttaattagaatttttttctattttaactcatctactgtatactcccaactctgccataatttgtatcaataccaactgagagccttaatttgccctgttgaaaataagggatgagatttccctccccttatttttctcagagcatttactttagaaaacttgtaagtactatctccactctttgaaatgcacaaatccttttgaaaactagatcgtcctttttacagttttataatctaggaatgtctgtcttaaggaccggaaaccatctgtctgaaatataaatatcaaggtagtgctcctatctccctgtttctgtgggaacataggagccttgctccaaattgcaaaactctctcttatcatgaagatacaaaaagtttggttttttaccttaataaagc

SEQ ID NO: 328404 - DNA, 607 bp, Homo sapiens
tggtaggagagttggaataaggagatacggtgctaatgcttcctgaagcatttcttttgttaaaaagaaagactcagctctagcccactgcaatgttttgttccttcactgtctcatttccttacttcttaaatacgttttcattggctgagtttaggcttatacaaaatcctacacaaagaggaataatgataaactagatgttaattagaatttttttctattttaactcatctactgtatactcccaactctgccataatttgtatcaataccaactgagagccttaatttgccctgttgaaaataagggatgagatttccctccccttatttttctcagagcatttactttagaaaacttgtaagtactrtctccactctttgaaatgcacaaatccttttgaaaactagatcgtcctttttacagttttataatctaggaatgtctgtcttaaggaccggaaaccatctgtctgaaatataaatatcaaggtagtgctcctatctccctgtttctgtgggaacataggagccttgctccaaattgcaaaactctctcttatcatgaagatacaaaaagtttggttttttaccttaataaagc

SEQ ID NO: 328405 - DNA, 523 bp, Homo sapiens
agaaatttacaagcttattctaaactatatatgtaaatcaaaagattcagattcagtgacaaaacaatcttgaaaaaggataaatttggaagatgactattaccctcccaaggttgtcaaaacaaacatacacataatgctgaacatatttttgtcaaaggtgccatgtaaattcaatgaaaaaagcttactgtgtacaaaaaacaaacctacagaaaaaacgtatattcatgtaaaaaagaaatgaaccatgaccccttcytcatgccatatacacaaattaattcaaggtagatgacatattaataacataaaggctaaactttaaagggaacataaaagaaaatctttgtcattttagtgataggcaaatatcttttagacaaaacacaaaaggcactagccataaagaaaagttggcaaattagatttcatcaaaatttaaattatctgctcatctaattgcacctgaaataaataaaaaggcaaaacacggaaatgaaaaggtaagccacagagtaaa

SEQ ID NO: 328406 - DNA, 549 bp, Homo sapiens
cagtattcaatgaattggataattctcttacaaacgtgagagcctagtgtctatctgcttttatatccatgtttttacttcagctcccaggatacctttctttcacaaaccattaagtttcccagtgtatggaagcttttggattatttagcttatcataataaaaacagtctatgcagtataaacagtagaaaaggcagaaacaatttgtatgtatttctcctttttagagtaataaaatgccgtctataggatctacaaatataggaatagacattttcagccaaaaaattctcaggcataattaattttgttttttgttcccattccccaaacaataggtttatagagtatgattcttctcattgccaaaaaacaacaagaaaacaaaagaaaaraataaagttctccatggtgaaaactgtaaatgctaagaaggcaataaacttcatggaataagaacttaaaatttatagcaactatccatttatatgaattttcacttttgaacacaacttacccatctctttaaagcagagggttgaagtt

SEQ ID NO: 328407 - DNA, 638 bp, Homo sapiens
tttaggggaacaattatcctatcttcatctttatgatttctaaatgccacattaactgcactggtattgattcagataataaaatggcaatcagtattcaatgaattggataattctcttacaaacgtgagagcctagtgtctatctgcttttatatccatgtttttacttcagctcccaggatacctttctttcacaaaccattaagtttcccagtgtatggaagcttttggattatttagcttatcataataaaaacagtctatgcagtataaacagtagaaaaggcagaaacaatttgtatgtatttctcctttttagagtaataaaatgccgtctataggatctacaaatataggaatagacattttcagccaaaaaattctcaggcataattaattttgttttttgttcccattccccaaacaataggtttatagagtatgattcttctcattgccaaaaaacaacaagaaaacaaaagaaaaaaataaagttctccatgktgaaaactgtaaatgctaagaaggcaataaacttcatggaataagaacttaaaatttatagcaactatccatttatatgaattttcacttttgaacacaacttacccatctctttaaagcagagggttgaag

SEQ ID NO: 328408 - DNA, 546 bp, Homo sapiens
tttggatctggcttctttcacccagcataatgttttcaaggttcatccatatcatagcatgaatcagtatatcttgaatcagtactttttatggctgaataatatttcattgcatgtttatactcattttgttttccrttcaaaagttgatggatatttagtttgtttccacgtttttctattacaaataatgctgctatatttgtgcataactttttgcacagaaatgtatttttaatcatctggggtctgtctatatctaggagtaaaattggtaagtcactaaaactctatattcaacattttcagaaaccacaaaactattctttatattgaccgtgtgccattatatatttttgaggaaatgcttaaaggttctaatttttccacatcctcatcaatatttgttattcccttttttatcttagccaacctagtagatatgaaatagtatctttatcttgatttggagtaggatttctccaatgagtaatgatgctgaacttttttttcatgtgctttttggccatttgtatgtctttttca

SEQ ID NO: 328409 - DNA, 593 bp, Homo sapiens
gttattcccattctgctttcttcccttccccttggcaactactaatctactgtctggctataaacttgctcattttggatattttacataaatggaataatatgcagccatttggatctggcttctttcacccagcataatgttttcaaggttcatccatatcatagcatgaatcagtatatcttgaatcagtactttttatggctgaataatatttcattgcatgtttatactcattttgttttccattcaaaagttgatggatatttagtttgtttccacgtttttctattacaaataatgctgctatatttgtgcataactttttgcacagaaatgtatttttaatcatctggggtctgtctmtatctaggagtaaaattggtaagtcactaaaactctatattcaacattttcagaaaccacaaaactattctttatattgaccgtgtgccattatatatttttgaggaaatgcttaaaggttctaatttttccacatcctcatcaatatttgttattcccttttttatcttagccaacctagtagatatgaaatagtatctttatcttgatttggagtaggatttctc

SEQ ID NO: 328410 - DNA, 554 bp, Homo sapiens
cagatacacagcttgccgttattttctcccattctctatgttgtattttcacttttttaatagtgtcatttgaagcacaaaagtatgtatttttataaagagtaatttatctattttttgttgcttttgattgcttgtacttgtaacgtcgtatctcagaaaccattgcttaatccatggttataaggacatacacatattttaactgagttttacagtttaatctgttacatttaggtttttcatccattgtgagttaagttttgtctatgtgtgcagaagaggtcctctgtttgtattttactcatttgcaacctgagagagaaagaagtggttgtttttcactggtactctgcaaattcaacaattacattacaaatgctgatgacaccaacttttttgtcttaataaatttaatcttgaacttggagctccagttgtttctatgcaacttcttactgacatccatgattaataattagatgccttatatacgctttcatmaattgtatgaccaaactctataatactttcaaacatcatgtaagttaaac

SEQ ID NO: 328411 - DNA, 520 bp, Homo sapiens
gtggcatttgatctcagggttctgcagtggatgatgacttcaacaaaacaacaaagcaacrtaaagaccaaggacctaaaagaccaagagctcatacacagggcatgaggtgcacagaaaacctgataatatagctgctgcatcattttgtgaatatgtctaaaagaaattcccatgtaaatactatattcgtttttgtttcgtttaatagtaacccagtactttgtgaatgatccctgtgggaaacactagtgtctttagtcaagagcattcattgaggaacagactgtttttgataatgttgcaaaaagtcttaaattttttaatctgatactcaattaaatgaaataatagagggtaaatttgccatctaaataagcaagcaaaccctagtctagtactttaatggaaaatgaagaatgtgtagggggagcatatgtgattgcattatttcacaacaatatattctaaaaataatttctatgatgcagatattattctacatagctcatagtggtgc

SEQ ID NO: 328412 - DNA, 559 bp, Homo sapiens
tcaagagccacttatgattttaaaactgagcagacaaggccagttgagtaaataaatgttgcttttaaatattgcattaatttcgctatctaggacaagggaaatgatactatggatggtccttccaatattgagattacagttgttaatatgagatgtcttcctaaaacacataacacacttkaaagtgaatctggaatggatgcacttatagtatgtcagttaaaaaaaaaaggtcgtaaaaagacttctgcatttttattcacagatatgtggctagtttcatattaaatgagagataaatattctattactacctagagaacaataataccaacatctctggtgaaatttacttgtgatatgtatagcactatctttctagacagaaagatctcatataatgaagtcactagtgatagtacaggccttcctttggtaataacagttttttgcaaagctttttctaaagctggatcagattcacatatgtttctatcatacagatgatggcttctgagtcctttggagccctgtcagtaaccactttctccatctc

SEQ ID NO: 328413 - DNA, 559 bp, Homo sapiens
tcaagagccacttatgattttaaaactgagcagacaaggccagttgagtaaataaatgttgcttttaaatattgcattaatttcgctatctaggacaagggaaatgatactatggatggtccttccaatattgagattacagttgttaatatgagatgtcttcctaaaacacataacacactttaaagtgaatctggaatggatgcacttatagtatgtcagttaaaaaaaaaaggtcgtaaaaagacttctgcatttttattcacagatatgtggctagtttcatattaaatgagagataaatattctattactacctagagaacaataataccaacatctctggtgaaatttacttgtgatatgtatagcactatctttctagacagaaagatctcatataatgaagtcactagtgatagtacaggccttcctttggtaataacagttttttgcaaagctttttctaaagctggatcagattcacatatktttctatcatacagatgatggcttctgagtcctttggagccctgtcagtaaccactttctccatctc

SEQ ID NO: 328414 - DNA, 595 bp, Homo sapiens
aaaaaaaaaaaaaaaaaaaaatcaataaagtgaaagcatattaattgatgagcaatactttcttataacataagcacagtaaaatggaaattgtttttaaacaattctcagtctaattttttcttatagtgtcataaccaagatgaccaagacaaactatttgtttaaacttcagactgaggacttctgctgctttacttatagttgcttaggaatgatgataatggtaaattttaagttctgcaactgatgatgatgatgatgatgaycatgatcatgatcatgatgtatggtttcttgctgtattacagttcctgttctaagtgctttatatataaaatgacaccatcttttcaacaatcttattatgatcattgtacagatgaggaaaatgaggcataacgaggttgaacaagtcacccaaggcaacatagccaaacgtaaggatggaatgtgaaccaagatacacaggttctagaatccacgccccattctgctacatcacactgcctctccttgtaccgaaagcgtcccaattatagaatgtgtatctgccatggtcaatgtcatttcagaagtttgtaagggctattcc

SEQ ID NO: 328415 - DNA, 609 bp, Homo sapiens
agcatgtaatcctcacaataagtttatgcattaggatctactaatttccccatgaatggtaagggcatcgaggcacaggggaactgggaacgataaccgaggcaacctccttattagaatagcagctaaattaaatattctcatgtagtctgaaacaataattattagaatagtcaatattactatattaccatatttacagtattactatgaaaaccatttttacataacctaaaaacagcayacaaatcagaacatttagcatttttctttgtgtaggctccaagagttttcccaggagattggggaagggtaggtaaatgtgtgtttttccagaagcacacatcgggacatcatccctacacctccatccattgattctggagcctttttataaacaagtctctagaaataaatagaataaatatttccaaggaaaaaaaatgtttaaagaatgctgatctaatttatgctattgataaggattctcctgttatagattagaatatcagattggatttcagcaggaaatagaagatacactcaattgcaattaagataatttaatggagagtgtgagagtttaaagtaaccaatcaaagatgttgc

SEQ ID NO: 328416 - DNA, 579 bp, Homo sapiens
ttttccagaagcacacatcgggacatcatccctacacctccatccattgattctggagcctttttataaacaagtctctagaaataaatagaataaatatttccaaggaaaaaaaatgtttaaagaatgctgatctaatttatgctattgataaggattctcctgttatagattagaatatcagattggatttcagcaggaaatagaagatacactcaattgcaattaagataatttaatggagagtgtgagagtttaaagtaaccaatcaaagatgttgcagaacccagggactctaaatggcaggaagccactaccaccaagcctctatggcaaagggaagagcatcaaggggagagatgtgcaatggcagagatgttcaacasaacttacaggtgagagaggaggcaaccactgccagaactgtggcttccgtggccactcactgccagaagtggggaggagtttggtgaagaaatatcctgaccactctgttcactcacccatcaacctactggtacttttctctattgactatcacaaattcaatctaaagctgaaaggtaagaacctccaggc

SEQ ID NO: 328417 - DNA, 586 bp, Homo sapiens
agcctactccttagaacacagaacaaaagccagagaataaaaggaaattgttctgtggggaagggagaagttataaatggagattaaataatattctccacacattttcaactcagcgtccattcttgaccaacagaaaggaaagcgcaaagcccamctctcaccaagtcatcacagaatggtgtaaactcaatcatactctccataggtccaaaataacaacattggctatataaggttttaaaatgaaaaaaaaaaatgaatcatttgatataagacataactgcagtagttcctaactctctggctaatcacaagagatagggactatagtagttttgtcttatatcaaatgataaataatgttaattataagttattaatattataattagtattgattataagttaccaatattctgagtaatatcattagtaatattaatcaaaatcaatgatcatagatctcttcttcctttatctaattccacattctctttaccttacctagccccttagtatgttgagatattttatactttttggggcaaaccaaaattgtattcttatagaatccatgctcatg

SEQ ID NO: 328418 - DNA, 551 bp, Homo sapiens
aacccaattttctcttggtaattttgataaaacaccacagtttacaagttgatcctttcatttgcttgtgagttcagtgaaagggaagtccaaaatgacaagttggtagccttatcttccagtttaatggaatgaccttgacacagatgtgtctgtcttgggtgtctgccaatccaactgacctcaagtttgtgtagataggaagaaaaaccatctgaaggaactgttaggtattagagtgaaagggcactcctcattccacccactgatataacaaccatggggaacagcacaatatatgcccacagtgtatacaaaaggacattaacttttctgggttttttttttctccctctctcagatggcactgcaattgaggcatcagttggccatttccaacattctatcagaccagctgattttaagggatgagcacacataaaatcagcaaattctgtggcatgattcttagcacccttygttagtgttaaaatgaattccttgataagaggcagtgttgtattggctaagtacaaaggaataaggtattc

SEQ ID NO: 328419 - DNA, 608 bp, Homo sapiens
ttattcttgcctacgtagccacttggtacataggcccattcagcaagagccaggaatctgaaaacaactgtagagaaagccacagaacaggtcttcatgtctagttcattactgagatcctcctctgtagtggatggtctttaggacacaagcatctttgcactttgkgcttttttaaataggccaattcacataacacatcaccactaccaaccccacatcccagactttcctagcagcaatattccaatcttgtcctttctaagtccttgacttgctagttgacccatcaggcattgctcagaagttagggtagaattagacctttccaaatagagaaactgtaaaatgtactgctcagatttctgtcaaataggaagattttctttccatccatcaggactatccctgtgtagatctataatgcagcagctgactacttatagttgttgacagccacacaaaatgctgacccattattaaatcaggcctctctgtattcttcttgtccaaactggttaattggatcctcttctattattagaaaccttattaagtttccataactgagggttggaagtgacagtgaagcactcgaaggggtgcag

SEQ ID NO: 328420 - DNA, 550 bp, Homo sapiens
ttctttccatccatcaggactatccctgtgtagatctataatgcagcagctgactacttatagwtgttgacagccacacaaaatgctgacccattattaaatcaggcctctctgtattcttcttgtccaaactggttaattggatcctcttctattattagaaaccttattaagtttccataactgagggttggaagtgacagtgaagcactcgaaggggtgcagtgggtgagctccatgtgttatgcaatttacttgtgtcttccaaacctactgaggcctggtcttgcacatatgatttccattaataatgacatactgctgcatgcaaataaccttattattttatggatcaaaaaatattacatgagcagctgaggttgccaggtgacttgatgtcttgtgattaggagtgcagtagtggtctaggagcattttttccaatagataatagtgacaggccagagagatcatcagttttgcatcagtatcttagggatctccactgtgattctacccaggggctacacatgcctgcactatctgccat

SEQ ID NO: 328421 - DNA, 608 bp, Homo sapiens
ttattcttgcctacgtagccacttggtacataggcccattcagcaagagccaggaatctgaaaacaactgtagagaaagccacagaacaggtcttcatgtctagttcattactgagatcctcctctgtagtggatggtctttaggacacaagcatctttgcactttgtgcttttttaaataggccaattcacataacacatcaccactaccaaccccacatcccagactttcctagcagcaatattccaatcttgtcctttctaagtccttgacttgctagttgacccatcaggcattgctcagaagttagggtagaattagacctttccaaatagagaaactgtaaaatgtactgctcagatttctgtcaaataggaagattttctttccatccatcaggactatccctgtgtagatctataatgcagcagctgactacttatagttgttgacagccacacaamatgctgacccattattaaatcaggcctctctgtattcttcttgtccaaactggttaattggatcctcttctattattagaaaccttattaagtttccataactgagggttggaagtgacagtgaagcactcgaaggggtgcag

SEQ ID NO: 328422 - DNA, 600 bp, Homo sapiens
ccatgcttattatgataattacaacccttctatcttggaaggttaaacattactattacaggatccaatatttccattgaaatcagaagcctaatttcctggtaacatctcccagggcctttctgagatgctagtactcccttcaacaaygtatttttaacaacaacaattcctttttcttgggaaaaaggaatcttctcaaaaagggttctcttgaatgctacaattactatataaccacaaataggttgtgcacagtaaatgaattctgtatttcttgaaatatttctgtatttcaagactttagaaactcttcttctacagtatggcatggaagttccaacatatcaaacttactgattttgagaacaagtggtaagtccaggcttctattaatcagccttaaatatattgccaaatacacagtcaaacatattggttcaagtacctgagacaaagttaattttcagagtgctaatattgcttcaggcaatattaactttcagagtgttaatattactctaggtactcgaaccaatatactcacaataaattctgattaagtgcatctaaactgatcaattcttcgagaccaagttt

SEQ ID NO: 328423 - DNA, 600 bp, Homo sapiens
ccatgcttattatgataattacaacccttctatcttggaaggttaaacattactattacaggatccaatatttccattgaaatcagaagcctaatttcctggtaacatctcccagggcctttctgagatgctagtactcccttcaacaatgtatttttaacaacaacaattcctttttcttgggaaaaaggaatcttctcaaaaagggttctcttgaatgctacaattactatataaccacaaataggttgtgcacagtaaatgaattctgtatttcttgaaatatttctgtatttcaagactttagaaactcttcttctacagtatggcatggaagttccaacatatcaaacttactgattttgagaacaagtggtaagtccaggcttctattartcagccttaaatatattgccaaatacacagtcaaacatattggttcaagtacctgagacaaagttaattttcagagtgctaatattgcttcaggcaatattaactttcagagtgttaatattactctaggtactcgaaccaatatactcacaataaattctgattaagtgcatctaaactgatcaattcttcgagaccaagttt

SEQ ID NO: 328424 - DNA, 504 bp, Homo sapiens
ctgggtatttgctgtatagcatagtgcctatatagcatagttagcaatactgaactatgttcttaaaaatttgttaggagagtagatttcatgttaaatattttactgaataccaaaaaccaaaggatcacagtaatcttctagaagtaatggatatgtttattacctggatattgtactcatggttttatgagtgtatatatgtgtccaaattcaaaaaataaycataaatttaatgtgttgagtttattgcatatcaattatacctcaataaaactgatttttacaagaggatttgattcaatgacttggtgttgatgagcctagcatcttgatagataacgaagttaacattaatagataatacacataacacttttactaaaaatcttccagacacttgtctagttgaagtcaattgaactgtgatttttggtaactttttatgtgagattagtgttgatactcaaattataagtataattagctgctatttttaagcaa

SEQ ID NO: 328425 - DNA, 504 bp, Homo sapiens
ctgggtatttgctgtatagcatagtgcctatatagcatagttagcaatactgaactatgttcttaaaaatttgttaggagagtagatttcatgttaaatattttactgaataccaaaaaccaaaggatcacagtaatcttctagaagtaatggatatgtttattacctggatattgtactcatggttttatgagtgtatatatgtgtccaaattcaaaaaataatcataaatttaatgtgtkgagtttattgcatatcaattatacctcaataaaactgatttttacaagaggatttgattcaatgacttggtgttgatgagcctagcatcttgatagataacgaagttaacattaatagataatacacataacacttttactaaaaatcttccagacacttgtctagttgaagtcaattgaactgtgatttttggtaactttttatgtgagattagtgttgatactcaaattataagtataattagctgctatttttaagcaa

SEQ ID NO: 328426 - DNA, 568 bp, Homo sapiens
caaacttctgaaaaaaaaaaaactaagaaaaaatatttcatgtagcatagaagaaatgacattttacttacatgaaataattcaaataccactaactatataatcagaaaacatgaaggccagaagtaagtggcagaatgctttcacctactgacggaaaacaaaacaaaacaaccaagcaaacaacaaaaacactgtcaatgcagaatctttagcaaaaatatctttaaagagtgaaggaaaactcaayatatcttactcttgacctacacaacatattgtaagaatatacccatgatagctgctcatgaaagtgtataaatttcaaaagtgaaatatgccattatttggcattacagtgcacacattctaaaatcacatgaagagctttactgctcctaatttctcatattagattctgctaccaatggtgtaccaaggaaactgtgggacaaaacattatcttttgtttaacctttatttctaaccatatttttagggatatgtggtggtctgaagttaaatataatgcaaaatataaacatttaccatgacaaatattttttga

SEQ ID NO: 328427 - DNA, 568 bp, Homo sapiens
caaacttctgaaaaaaaaaaaactaagaaaaaatatttcatgtagcatagaagaaatgacattttacttacatgaaataattcaaataccactaactatataatcagaaaacatgaaggccagaagtaagtggcagaatgctttcacctactgacggaaaacaaaacaaaacaaccaagcaaacaacaaaaacactgtcaatgcagaatctttagcaaaaatatctttaaagagtgaaggaaaactcaacatatcttactcttgacctacacaacatattgtaagaatatacccatgatagctgctcatgaaagtgtataaatttcaaaagtgaaatatgccattatttggcattacagtgcwcacattctaaaatcacatgaagagctttactgctcctaatttctcatattagattctgctaccaatggtgtaccaaggaaactgtgggacaaaacattatcttttgtttaacctttatttctaaccatatttttagggatatgtggtggtctgaagttaaatataatgcaaaatataaacatttaccatgacaaatattttttga

SEQ ID NO: 328428 - DNA, 568 bp, Homo sapiens
caaacttctgaaaaaaaaaaaactaagaaaaaatatttcatgtagcatagaagaaatgacattttacttacatgaaataattcaaataccactaactatataatcagaaaacatgaaggccagaagtaagtggcagaatgctttcacctactgacggaaaacaaaacaaaacaaccaagcaaacaacaaaaacactgtcaatgcagaatctttagcaaaaatatctttaaagagtgaaggaaaactcaacatatcttactcttgacctacacaacatattgtaagaatatacccatgatagctgctcatgaaagtgtataaatttcaaaagtgaaatatgccattatttggcattacagtgcacacattctaaaatcacatgaagagctttactgctcctaatttctcatattagattctgctaccaatggtgtaycaaggaaactgtgggacaaaacattatcttttgtttaacctttatttctaaccatatttttagggatatgtggtggtctgaagttaaatataatgcaaaatataaacatttaccatgacaaatattttttga

SEQ ID NO: 328429 - DNA, 632 bp, Homo sapiens
gaaatatttttaaaataattaaaatagtttcagagacattcaaaaccaaaaccaagtataagtaactctatggaagactaatgagattcttgaccactgaaaattatctagcctacaatgatagtttataagggctagatgttttatattcccacaaaaaaaatacattaaaattctggggaaaaaatttaaggaatttctgttagattacacaaaayagtaatgaagcatttctaagctttctagatattaaaataggctcttttacttatttttcttattatttatccactctcagtgataaagaaagtggattgccacatgaatacatagacaataaatagctttacagaatgaagtcaaaaagtttattcgaatacaccggaatattcattatataataaaagcatttcataactatagggagataatggactcttcaagaaatcatgtttacgcaattctgagacccactaaaaagcttggtgccaaatcacactcctttcaatcaaatacatttgataaatcaacactattccttttgaatgtgaaaaaaaagacaaactccgaaagctgaaaaaaatgagtaagtttgactaaatgaatcttcaacatgaaaaagaataacacaa

SEQ ID NO: 328430 - DNA, 590 bp, Homo sapiens
aaaccaaaaccaagtataagtaactctatggaagactaatgagattcttgaccactgaaaattatctagcctacaatgatagtttataagggctagatgttttatattcccacaaaaaaaatacattaaaattctggggaaaaaatttaaggaatttctgttagattacacaaaatagtaatgaagcatttctaagctttctagatattaaaataggctcttttacttatttttcttattatttatccactctcagtgataaagaaagtggattgccacatgaatacatagacaataaatagctttacagaatgaagtcaaaaagtttattcgaatacaccggaatattcattatataataaaagcatttcataactatagggagataatggactcttcaagaaatcatgtttacgcaattctgagacccactaaaaagcttggtgccaaatcacactcctttcaatcaaatacatttgataaatcaacrctattccttttgaatgtgaaaaaaaagacaaactccgaaagctgaaaaaaatgagtaagtttgactaaatgaatcttcaacatgaaaaagaataacacaa

SEQ ID NO: 328431 - DNA, 632 bp, Homo sapiens
gaaatatttttaaaataattaaaatagtttcagagacattcaaaaccaaaaccaagtataagtaactctatggaagactaatgagattcttgaccactgaaaattatctagcctacaatgatagtttataagggctagatgttttatattcccacaaaaaaaatacattaaaattctggggaaaaaatttaaggaatttctgttagattacacaaaatagtaatgaagcatttctaagctttctagatattaaaataggctcttttacttatttttcttattatttatccactctcagtgataaagaaagtggattgccacatgaatacatagacaataaatagctttacagaatgaagtcaaaaagtttattcgaatacaccggaatattcattatataataaaagcatttcataactatagggagataatggactcttcaagaaatcatgtttacgcaattctgagacccactaaaaagcttggtgccaaatcacactcctttcaatcaaatacatttgataaatcaacactattccttttgaatgtgaaaaaaaagacaaactccgaaagctgaaaamaatgagtaagtttgactaaatgaatcttcaacatgaaaaagaataacacaa

SEQ ID NO: 328432 - DNA, 599 bp, Homo sapiens
gacaaatgctgctataaaaataatttttatgtccaggttataaatgaatgaatacaaaacaaatgattgttgcatgcataagaartaaattttggattatgggtgtgttttaattatttaatgtatcttaattatttcatgacaaatggtattgtcaaaaatttaaatatcagcccaggcgctgtggctcacacccgtaatcctagcactttggaaggtcgaggtgggaggatcacttcaggtcaggagttcaaaaccagcctggccaacatggtgaaatcccgtctctaccaaaaatataaaaaatttagccaggcatggtgcctggcgcctgtaatttccagctacttgggaggcagaggcaggagaattgcttgaaccttgaaggcagaggttgcggtgagccgacatcgtgccactgcactctagcctgggcgacggggcaagcctccaactcaaaaaaaaaaaaaaaaattaaatatcaaaaaatggtataatcttttttatcttacccaaatcaaaagaaatataaatttaaataactttccaaatgtgtatatataattcttttataataattatatatattatttagatgt

SEQ ID NO: 328433 - DNA, 599 bp, Homo sapiens
gacaaatgctgctataaaaataatttttatgtccaggttataaatgaatgaatacaaaacaaatgattgttgcatgcataagaaataaattttggattatgggtgtgttttaattatttaatgtatcttaattatttcatgacaaatggtattgtcaaaaatttaaatatcagcccaggcgctgtggctcacacccgtaatcctagcactttggaaggtcgaggtgggaggatcacttcaggtcaggagttcaaaaccagcctggccaacatggtgaaatcccgtctctaccaaaaatataaaaaatttagccaggcatggtgcctggcgcctgtaatttccagctacttgggaggcagaggcaggagaaytgcttgaaccttgaaggcagaggttgcggtgagccgacatcgtgccactgcactctagcctgggcgacggggcaagcctccaactcaaaaaaaaaaaaaaaaattaaatatcaaaaaatggtataatcttttttatcttacccaaatcaaaagaaatataaatttaaataactttccaaatgtgtatatataattcttttataataattatatatattatttagatgt

SEQ ID NO: 328434 - DNA, 493 bp, Homo sapiens
  misc_feature (1)...(493): n = A,T,C or G
tatactacaccgtggccacttcaatgaacagcaatcagccaacattgaccatgactgatgacagaggctatctgacatcagtaggccaagtcattttgcctactgaattacctaatacctcttttgtggtagctgctcactggtgagtgttcccatgtgataaaaatatcttcacaagttgtgcttgctcttatgactctatttacatgtcaattggtgcaactcatayaattccatcttgccacagagtagagttgaaaggaatagagggtatattggaaggggcatatgaaaaatatacagcacaatttatctttttttttcttggcatctactatttttttggtggtggtctttttctttnctttttttttttttttttgagatggagtctcgctctgtcacccaggctggagtgcagtagcgtgacctcggctcactgcaagctccacatccctcattcacgccattctactgcctcagcctcctgagt

SEQ ID NO: 328435 - DNA, 403 bp, Homo sapiens
tatatatatacacatatatatatacacacacatatacatacactttctggaagattaatgttgtcaaatttgagaaatttttagaataactgagttatcagttttgtgatagattatcaactgctgttcttatgaaattcttttattgctcaaattttttcactgaaaaaaaytgaaaatgcaatcagtctatgagggatctctgtattatttttgtaggaagtaatttttctgtggaagaatttattttttctccttcaaactctatgattcaaacatcaagtaaaactcaatatacacaggcatattggttgtattttatcctatgatttatacagactactgtaacttctggagctttctcagaggagaaaagaagatgaatgttttatgaggaaggggc

SEQ ID NO: 328436 - DNA, 403 bp, Homo sapiens
tatatatatacacatatatatatacacacacatatacatacactttctggaagattaatgttgtcaaatttgagaaatttttagaataactgagttatcagttttgtgatagattatcaactgctgttcttatgaaattcttttattgctcaaattttttcactgaaaaaaactgaaaatgcaatcagtctatgagggatctctgtattatttttgtaggaagtaatttttctrtggaagaatttattttttctccttcaaactctatgattcaaacatcaagtaaaactcaatatacacaggcatattggttgtattttatcctatgatttatacagactactgtaacttctggagctttctcagaggagaaaagaagatgaatgttttatgaggaaggggc

SEQ ID NO: 328437 - DNA, 403 bp, Homo sapiens
tatatatatacacatatatatatacacacacatatacatacactttctggaagattaatgttgtcaaatttgagaaatttttagaataactgagttatcagttttgtgatagattatcaactgctgttcttatgaaattcttttattgctcaaattttttcactgaaaaaaactgaaaatgcaatcagtctatgagggatctctgtattatttttgtaggaagtaatttttctgtggaagaatttattttttctccttcaaactctaygattcaaacatcaagtaaaactcaatatacacaggcatattggttgtattttatcctatgatttatacagactactgtaacttctggagctttctcagaggagaaaagaagatgaatgttttatgaggaaggggc

SEQ ID NO: 328438 - DNA, 601 bp, Homo sapiens
ctaacatccttatcctgctatttttgtttccagttttagatgttacttaattagatgatgttacttaatcaagatgattaggaaatattatttcaaaatattattccaaaataaggtaataaccaacataaagactaacctctcacagcagaatgcagaaacaaaaagaaaatgacaaaatcttcccatacctcttgtagtcttggctcagagctgcaaaaggtcatctctgaccatgcagcctgcatcagtggaggaaagggatgaatattctacctgctttcatgggaggcgctgtaaaatctcaaggcacaaggacaaagatgacaaaattcagaaacaagaacactagagattgtagctttcaacactctgaagattggaggcagccctttgttaaaaaggcttatccagaaatgccatgagatggttaaaatggtttatattttacggtacaccaaatgccagtccaatatgcaaaaaaaaaaaaaaaaaaaaacwctcatgaaataactaaaatgtgtggcgctttttatgatacaggaaaaagaaaaaagtgaatagcctattattactgcaaaaaaaaaaggtctgctcagtc

SEQ ID NO: 328439 - DNA, 632 bp, Homo sapiens
tgacatattggaagacaagctacatatttcagcagacaactggaatatatagtttatatatctatacccatatttatacatatattaatkaaaaagaaaaatctacacataaaatacagtaagagaaataaatatatcaatagtttcacaggttagactttgctgaaaagaatttcaatgtttaagtcacaataaaatgtaagtactgaagaataccaagaataaaaagtggtagaaaatcctacttatgtgcaagaacaatcatagaagtagagaagagacttaaaggggcacgacaattcataaaatgataaaggccaagagtttttcaaagctgatttaaagcaccacttggaatattcaagaaacccaagtaatgtaatcaaagaaaaccacgcatcatacaaaaactgccaaataccaaagacaaagaaacacatattcaaaagtcaaagcaactttcagattaccttcagagtataacaatacaacaaatagcttagtgctgtaaaaaaattaatggaagccagaagataaatgaataatacctttagagtgtgtttctatacagtatttctatatccagtgaaaatctttcaaaaatgaaattaactccaagaagacaggaaaaa

SEQ ID NO: 328440 - DNA, 517 bp, Homo sapiens
gtcatggtcactgtataaataggctcattgagaaagcacctggatggctgccaccttcagcgtaattcatatgctctatctcatttgggagagctttatccatagtggcagcttgctagtcagcatttataggggtcaaaatagttttaaatatttaagctgtttgagaagcccatatttccgaattccctgtcaccaatcttcctattttgttctttccatttcccttataagtcagtcaacccaatagccactgcccgtgaatcaacatagatctatatttcaggccacctcttcttttatatgaagtgatgtactctaatttctcaaaagtctgttaawtaaagagatgtctctatgtgactatttttgaagatcgttcctgaatggggctttaatgtaacaactaatcagacagttgattgcatatggtacacattgtttcataaaccaaactgctacatttttttctttcatttctttctttgtcaaatggtcataaatagggtgatgatag

SEQ ID NO: 328441 - DNA, 489 bp, Homo sapiens
ctagatcaaaataccaacaaattcagcatctgaatctgataagggcccactccctggttcatattgggggttctgatacaaacatatcaattttgctgggacataaacattttagtctgcaggaagaagtaaaatagtatatattcacatatatcttagattaccaaaattgcaaatatgctgcctaaaaataataggaactttgctaatttacattcccaccaatagtttacaaaggatctcttttctccataacctcaccaatatgtgttatcttttttgataacagccaatgtaacagttgtgaggtgacatcccattgtggttttaatttgcatttccctgatgaatagtgakgctgagcattttttttttcatatatgtgttggccatttgtatgtcttctattgagaaatgtctgttcagatcttttgcccattttctaacggttgttttattgttactatgttgctaaattccttccatgtt

SEQ ID NO: 328442 - DNA, 521 bp, Homo sapiens
ttaaataccatgaaggaatttaggcattgtcttacacgatgaagtgccactaacgggaaccaagctgagaaataacatgccttggttgtggtttatatcaagtattctgtgttttatgtaaagtattctgactgcagtgtatgagaataaatttaaggaagacagcccagtgaagaaacttttgctgtgctctacgtgggagatgacaaagactcaattttattttatttaaattttaattattttatttattttgaaacagaatctcactctrtcacccaggctagagtgcagctgcactgtctcgtctcactacaacctctgcctccaaggttcaagcaattctcatgcctcagcctcccaagtagctgggattacaggcatgcaccaccatacttggctattttttctatttttagtagagaaaagttttcactactgtgttggtcaggctggtctcgaactcctggcctcaagtgatctgcccacctaggcctcccaaagtgctgagattattggca

SEQ ID NO: 328443 - DNA, 592 bp, Homo sapiens
tctgtctctattacgtacaactgggcatggctaaagggyctggctgagagatcctgccaagtgaggaggatctgggtcccacttaaagaagcagtccagccacaatcaggaaaagctgctgtgttgtgctgttggggggaccctcccttgtccagaccatttcaactctccaaagcccacaagctggaactgctgagctgtccaaccatccttggtggtgggcctccccttccctgggtacttcgtgccagggagagatcagatctctatctctaatacatggaagcagcatggctggagggtccatctgggatgtcctactcagtgagaaggaatggatggaggccctgcttaaagaggcattatggccacaatctggcaaagccactgtgttgcactgctggggggagcctcctcatctgtttggactctccaaagcccacaggctggaatggctgagtgaaccaaacagcagagatggtgcctgcccctctccacagggctccatccagtctcagacaggctttaccctgttgctggtggctggctcaaattccaagctggtgggtcttatgaggtgctaaggaagccc

SEQ ID NO: 328444 - DNA, 569 bp, Homo sapiens
ggcttgtgcaatgctgaagtgatttttctgtccaacttggactataagcagccaaagaaacactctgtctccttcctaataaatacaaattttgcactctacaaatgattgaataagtttgacaatcataaaagtggtcaaagaagtaaaaagatgtgcttgaccatgttccaatctaaatgtaatggatgtgattgatgatttttgtacatttaataaactttccctctgccaaccatttaatctcgtttttaaaatttataaagccttggggttgaaatgctagtaaagcacaataattgatattctgtaatataaaactacwgcacctgtcccattttctttgcaaaactcaaaataactgtgaagggctacctgaatagatgtaaatgcatatgttttctttcctttagattactccaagcagtgaagtacacactgataatttatactgccaagattgtgaaggtaggaataatactataaataagaagatcggaggtttttctgcaaataaattggcatatagtcgttgtgacttcaatactctcttcttgctgtgtgttggg

SEQ ID NO: 328445 - DNA, 553 bp, Homo sapiens
actgactcagaggcccatctctttctcatctccccatgctgaagggatcagcrtggctaagtggctgggggaagctgggagcaggaaacagaggcaaggctagaaactcaaaaaagggccatttgtccaactaacaaccacatgaactccatcaggaggaccacccacaagtgacttggagtgcctaacccacagactccctcctctcaactggcccacaggcaccttcactgttccacatacttcacccatattcctggtagcttacttcccatgtgcactccctcaacaacgagtgggagcctttgcacacaagctcatgagcacatgcagtcagccagcttgattctgcaggattggagaaaggcagacaaacttaagcatttcaaggcactgccatagggaaaacaaacagaagactgtcaacaccagacctggttttgggaaactcttgaatttgtaagaattttctcccaaaagggaacatgaaggatggagtgagtaaatccatagaaaaggtctgagagagcctcagaatccctagcctggctca

SEQ ID NO: 328446 - DNA, 572 bp, Homo sapiens
ttgaacacatggagattcctggagtgtggtgtccacagagggtatgtaaattccatgtctcttgccacataccttgctttcatctggctttttatacatatcctttgtaacatcctttataataaactggtaaatgtaagttaagtatttccctgagttttgtgagctactctagcaaattaattgaacctgaggaggtgaccataggaaccccaatttataacctgtgtgtcagaatcacaggtcacartctgtgcttccaattggtgtctgaagtgggggcagtcttgtagggccgagtcttcaacccgtggaattggacactctctacgtagatagtgtcagaactgaatttgattagtctgccacagaattgcctggcgtgtggagcaaaacctccactcatcttgtgtctgaagtgttgaatgactgtttaagaatagagggtaagaaaacatttggtttttcctatatccacatatattctaataagccaacagatatttattaacaggctctggagctggcctgcctgagtctgaagcctggttccaccccttgccagccagtga

SEQ ID NO: 328447 - DNA, 536 bp, Homo sapiens
gaaatctcacctccctcttctgatgcaggggatgaaagtgcctctgaagaggaacaaagatctgtgctattgtaaagcatagcattttcccattgcatttgaattgagtatattgctcttttggttttgctaagattacacaaaatgtaattacatcgacactgttcacctgggaacctaagaaacgaatgctaatgcagccytactgggggagggaagcttcttgtatggtgaagacacttttcccctgaccagaatttgcctggttttctcagttataatcaatccaggcagcataggaaagcactgtgcctctgcactgctttagaatcccacagtttctccatatgggaacacatgtgtgtttatgttttagtgttggggttcatggactaaatgttctcatttccccttttttcctatttagtctgcctagcagccttgtgaatacccatgtattctctgcaattaaaatttaatttaggactaactttattttaaaatagaagttgaatcaagtaatgtgggtttggggc

SEQ ID NO: 328448 - DNA, 536 bp, Homo sapiens
gaaatctcacctccctcttctgatgcaggggatgaaagtgcctctgaagaggaacaaagatctgtgctattgtaaagcatagcattttcccattgcatttgaattgagtatattgctcttttggttttgctaagattacacaaaatgtaattacatcgacactgttcacctgggaacctaagaaacgaatgctaatgcagccctactgggggagggaagcttcttgtatggtgaagacacttttcccctgaccagaatttgcctggttttctcagttataatcaatccaggcagcataggaaagcactgtgcctcwgcactgctttagaatcccacagtttctccatatgggaacacatgtgtgtttatgttttagtgttggggttcatggactaaatgttctcatttccccttttttcctatttagtctgcctagcagccttgtgaatacccatgtattctctgcaattaaaatttaatttaggactaactttattttaaaatagaagttgaatcaagtaatgtgggtttggggc

SEQ ID NO: 328449 - DNA, 594 bp, Homo sapiens
tttgttgctatttctcaagattgttttaactattcagggtctattggggtttcatatgaattcaagagttgttttttctacagaaaaatgccactggaattttgaatctataaattggtttgggtagtatagatattttttttttctttttctttttttcagacaggctctcactctgtcacctaggctggagtgcagtggcacgatctcagctcactgcagccttgacttccagcaatcctcctaccttagcctctcaagcgatcctcccacgttagcctcccaagtagctgggactacaggyatgtgtcaacatgcccaaattatttttgtatttgtttgtagagacagggttttttcatgttgcccaagcttgtctcaaactcctgagctcaaatgacccacccaccttggcctcctaaagtgctgggattataggcatgagccactgtaccctgacctgaacattttaacaatattaattattcaaatccatgaatataaaatatctttccatttatttgtttcttatttgatttctttcatcactgttttatagtttttagtgtacagatctttcacctccttggttaa

SEQ ID NO: 328450 - DNA, 569 bp, Homo sapiens
gtttggcacttcctgcttctctctctttctctcttgcagccatgtaagatgtgccccacttcccctttgccttctgccatgattgtaagtttcctgaagcctccctagccatgtggaactgtgaatcaataaaacctcttttctttataaattacccagtctcaggtatcctttayagcagtgtgaaaatggacgaatacaacttttgtcttttattatttttaagttcattagtacacgtgcaagatgtgcaggtttgttacataggtaaacatgtgccatagtggtctgctgtacacatcatcccatcacctaggtattaagcccagcatcaattagctattcttcctgatgccatctgtcctccttaccaccattctccaacaggcccctatgtgtgttatgcccccctatgtgtccatgtgttctcatcattcagctcccatttataagtgagaacatacagtatttggttttctgttcctgaattagttttctgaggataatgacctccagctccatccatgtccttgcaaaggacatgatctcatttcttttcatggctgcat

SEQ ID NO: 328451 - DNA, 445 bp, Homo sapiens
agggcccagttagcagaactagtggcacttacccaagccttagaactgggaaaggggaaaataataaatgtgtatacagatagcaagtatgcttatctaatcttacatgtccatgctgcaatatggaaagaaagggaattcctaacctcagggggaacccccattaaataccacaagcagaaaggaaagagagaaagagacaaagtcagagagagagagagagaggaagagacagagagacaaagagggagtcagaaagagagaaagagacagaaaaaggagaagtcgaagagagagaaagagatagaagtagtaaagaaaaaacagtgtatcctattcctttaaaagccagggtagatttgaaacctataattgataattgaaggtcttctctrtaaccctataccaccttgttgtcagtgtaaacaagggcatagcccaaaag

SEQ ID NO: 328452 - DNA, 515 bp, Homo sapiens
  misc_feature (1)...(515): n = A,T,C or G
tgcagttgcttccacaactgtcactggataatcattgagtaaatggtaaagtccttctctgtattttctgtaatattcttgtgctttgtaacagttatctcttgctgcataacaaascaacccaagccatggtatctgaaaatgtcaacaaattattgcttatattgattgggtagttcttttgctgtaattgcctagttcatacatgagctacagttgagacagacgagctggctggttttctgttttgatattgtctggagaaaaagaacaaagaccccttaactcaacctgtatcttacttcatctacagccaatcagcatcaaaggcccaagaaactattaaccacaagttcctggttntggggctagggacttcaccgaggacctgaatgcacagctaggcttaagcttcaactcacagtgatcttttttctcattttaatgctaaaaatcatactcagaggtggaggtttaaaatgttaatgttacatgaattgtatgaagaagcatgt

SEQ ID NO: 328453 - DNA, 515 bp, Homo sapiens
  misc_feature (1)...(515): n = A,T,C or G
tgcagttgcttccacaactgtcactggataatcattgagtaaatggtaaagtccttctctgtattttctgtaatattcttgtgctttgtaacagttatctcttgctgcataacaaaccaacccaagccatggtatctgaaaatgtcaacaaattattgcttatattgattgggtagttcttttgctgtaattgcctagttcatacatgagctacagttgagacagacgagctggctggttttctgttttgatattgtctggagaaaaagaacaaagrccccttaactcaacctgtatcttacttcatctacagccaatcagcatcaaaggcccaagaaactattaaccacaagttcctggttntggggctagggacttcaccgaggacctgaatgcacagctaggcttaagcttcaactcacagtgatcttttttctcattttaatgctaaaaatcatactcagaggtggaggtttaaaatgttaatgttacatgaattgtatgaagaagcatgt

SEQ ID NO: 328454 - DNA, 630 bp, Homo sapiens
taaattgactttcaattttgtgatttatgaacttaaaaggaatagtttccatctatcttgtttgtgcaaaatataatctttgcaatcaacaaagaagccagcatattttaattctaaaattgttttaattattatctaattatgtcaacrttattggcattgtgagcttggagattttagttccatagagcaaaatacagttgatgtttattttttaattccttttattgtttgtgttccaaacggacaaacaagcagtaaaatactgacaagttcctatgcctgtgtctgcatttcttcagaagtcaggacactaaatagaaaaatgtgttgataaatagaaggctttattagtttagatgacacttctggatttctgtaggaaaaaaaaacaaacccataaatctgatcatgaaatctactacagtagtctatcatttagaaagtgttttgctaatggtggtatcacatgatcctctcttaaaattctccctctcctcttttattctcttgaggataaacaggtagaaatcaagttgtagtgtgtataattattaattcctgagtgaaaaaaagatgggggcctgagaaagaatgaaaatgccctattcattctgcatgtactgaccc

SEQ ID NO: 328455 - DNA, 587 bp, Homo sapiens
ccctcaaacatttcagtagctctctgtggtctcgtgaaaaataattaaggatgtactaattcttccatgatccatcttttctgtgcatcctaattctatctttcttcaaggactcaaaagaagtattttttctagcctcaaaatacaatgtcattctgkgcttaaaatttgttcagaatctcttcattcccttaggaagaaaaaaacccacaaaaatttctttgcatagtgttcaagaacttccatgagctggcctcccctgatttgttcaccctcatctctctccaagcctccaaacatatcatttctctcaggcttccatgacccacacatactatttatgcttcctgacacaccttcttccacttgtccacctggttcatgattacattcttcaggtcttatctcattattactccacatcccctgagttctttgaggcaaagtaaggtgtgattctcttctacattctgtctaggtctccagtaaaactgttatttcataatacttacttactttaaaatctctctcttttgtttaatctagatataaactcctttaggagaaatcataacttttaattttta

SEQ ID NO: 328456 - DNA, 587 bp, Homo sapiens
ccctcaaacatttcagtagctctctgtggtctcgtgaaaaataattaaggatgtactaattcttccatgatccatcttttctgtgcatcctaattctatctttcttcaaggactcaaaagaagtattttttctagcctcaaaatacaatgtcattctgggcttaaaatttgttcagaatctcttcattcccttaggaagaaaaaaacccacaaaaatttctttgcatagtgttcaagaacttccatgagctggcctcccctgatttgttcaccctcatctctctccaagcctccaaacatatcatttctctcaggcttccatgacccacacatactatttatgcttcctgacacaccttcttccacttgtccacctggttcatgattacattcttcaggtcttatctcattattactccacatcccctgagttctttgaggcaaagtaaggtgtgattctcttctacattctgtctaggtctccagtaaaactgttatttcataatacttacttactytaaaatctctctcttttgtttaatctagatataaactcctttaggagaaatcataacttttaattttta

SEQ ID NO: 328457 - DNA, 561 bp, Homo sapiens
taaaataatttttaaaaattctatttccatgcctattgtaattcacaagagccaagatatggaatagcataagtgtgcattgatggataaataaataaataatatatgtatatatataccacatacacacacacacacacacacacacacacacacacactggaatattattctgccttaaaaaagwaggaaatcctatttgtgatagcctggataaaactgaagggcattatactagatgaaataagccaggtacagaaagacaaataatgtgtgatctcaattatgtgaaatctacgagttgaatcatagaagcagagagtagacttgtggttgccagggatctgggggctggggaaactggaagatggtcaaagtatacaaagtttcacttacacagaatgaattaaattctggagctctaatgaacatcatggtggctatagttaatattactatactgtacacctgaaatttgctaaaagagaagatcttacatgttctccccataaaagaaaaggttattaggtgaggtgatagatatgttaattagcttgatca

SEQ ID NO: 328458 - DNA, 535 bp, Homo sapiens
aagacaaataataagatggataaactgagatcttaaagacccagatataattttaaataaggctcaagaaatgtccataccaaaatgatattaattcccaaaatcccacacttagactactgtcaggttactctactccttcatcccacctttgtagtaactaggtgaagacattgaagctgaataataaatgatccaatggatttggaaaattttatataaagagccaagtaaaaggaacatgcatgttcataacctagagttagtaattgatgacatttgaatgtatgaaatattctactargaaaatgttgcaagggaagggacataaaagaatgggcatctgtagttcaagtgattaagaaaattttactatagacatttgagggctccttttccctcttttgaaaaattgatgttaagaccacatttagcagatttcaaattgcaacatgtatttgaaatgaagcatgagttcttcaaaaatctttttaatatcccactcactataacattgaaaaggattgcacttgat

SEQ ID NO: 328459 - DNA, 496 bp, Homo sapiens
gctccccatggcctctgcacktgcccatctgcatgctccccctagggatttgagcaccgaaggaatgagccacacccctgtcacatgtcctgtgagggggataagggaactctcccatttcaccaaaatgaaggcaaagaagactgcagaggggcttgggaaactgctctgcctggagatacagctttaggagtcatggtcaaataaaaacaaaggtatagttgattctcattgtctgctatgattatgctttataaattcactgagtgcactaaattagcaaatactaagatgttgctccttggggaaatacatggttaggttcctgtgagcctctcttcacacattttcatccactgatcaatacataacattgttttatgtgtgtttctgcttaaaaacaccttattatatatatatgtgtgtgtgtatatatttatttatttatatttgattccttgaaattgaaaagccaacagcaccctaactgatgcct

SEQ ID NO: 328460 - DNA, 605 bp, Homo sapiens
gtaagtctttcatttctgagaatgacagcccttccaaaagtagagcaacacaatgctctcaggaaatccaccatctgctttcttatgcttttataacaaattacaaacctatagcaaaacagaattgagagaaaacagagtataaataatgctaatggcattcatttgagatgttcaaaaatgtatccayttttaattaagccaagatactctcttggtccccaaagaaaactgctttagagttaaatcgccaaatggccagacattttcaacctggtctaggaggcattcttaattcattctaatctaggctgaatttatcaggtattagaacagaccaagatggtggacaccaggcctctgtgtcaccttaatcccatgaaaagaaccggattagagttataataaacataattgagaaaaagacatgctctggacagtgtgtgatagaccatttttcaacatgactgtttgttggtgccaacagacaggaaggacctagtgccagctatttcccatcatttgaaacttaactattgtttcagttttgcatgaccaaacaggcatctgaaaccacagaataaaaccattttattctgcctagc

SEQ ID NO: 328461 - DNA, 576 bp, Homo sapiens
ctagtgccagctatttcccatcatttgaaacttarctattgtttcagttttgcatgaccaaacaggcatctgaaaccacagaataaaaccattttattctgcctagccaaaccattttcagtgaaatttcataaatccaaacaatcttgccctcagactagaataaaagtatgccaaatatcaggacgtgattttttttcttttaatgactactgtccatctccagaaagaaggattctgtagcaaggaatcctcctaaagaccatcagcaaaggtagccagcagccacaactgacattctgcttactctctctttctagcagatgccctcctcattaacacacccagggcttctgtggctccgtgtgcactgcaaaccattagcttgctctagtgtctctgtctttcctctgctgttttctccatcccaactgaaagctattctatgatttctggcatctctattaagtagtgagtcgcatggaaatgattaacttttgaactgcaaaactgaaaacactctcttgcagactgtggaaatgaaacatgtcatgcagcaaacggtttcccgtgatg

SEQ ID NO: 328462 - DNA, 576 bp, Homo sapiens
ctagtgccagctatttcccatcatttgaaacttaactattgtttcagttttgcatgaccaaacaggcatctgaaaccacagaataaaaccattttattctgcctagccaaaccattttcagtgaaatttcataaatccaaacaatcttgccctcagactagaataaaagtatgccaaatatcaggacgtgattttttttcttttaatgactactgtccatctccagaaagaaggattctgtagcaaggaatcctcctaaagaccatcagcaaaggtagccagcagccacaactgacattctgcttactctctctttctagcagatgccctcctcattaacacacccagggcttctgtggctccgtgtgcactgcaaaccattagcttgctctagtgtctctgtctttcctctgctgttttctccatcccaactgaaagctattctatgatttctggcatctctattaagtagtgagtcgcatggaaatgattaacttttgaactgcaaaactgaaaacwctctcttgcagactgtggaaatgaaacatgtcatgcagcaaacggtttcccgtgatg

SEQ ID NO: 328463 - DNA, 521 bp, Homo sapiens
ctgttgttcacttctggtaggttatccrtgatattttaagtgtgtttgttttacatcaatttaacttaacatgaaaatccttaaataacttacgagaaatactgataaagtcacgtgttgacatctcctgaagttttcggtttcaagaatatgaattggatgagttgaactcattatcttaaaaaaaaaaaaacttgttattctttctgaagccatcaaacaggtggcagacttggcacttgaaatataaaccaatcctttagtgtcgctcaatgttggatacgtacaaccatcaatgctaattgaatagacagatcaaactagtgaaagacaaaaatctgggaagtatagtgaacacactaaaggacagaaggaagatttcaaaagatctgacaagtaggataacggccgaaatctaatacaataacttaatggcaataagtgcataattttacatttcattctctttttttttctttttctttctttctttttttttttgagatggggttgcctctgta

SEQ ID NO: 328464 - DNA, 521 bp, Homo sapiens
ctgttgttcacttctggtaggttatccgtgatattttaagtgtgtttgttttacatcaatttaacttaacatgaaaatccttaaataacttacgagaaatactgataaagtcacgtgttgacatctcctgaagttttcggtttcaagartatgaattggatgagttgaactcattatcttaaaaaaaaaaaaacttgttattctttctgaagccatcaaacaggtggcagacttggcacttgaaatataaaccaatcctttagtgtcgctcaatgttggatacgtacaaccatcaatgctaattgaatagacagatcaaactagtgaaagacaaaaatctgggaagtatagtgaacacactaaaggacagaaggaagatttcaaaagatctgacaagtaggataacggccgaaatctaatacaataacttaatggcaataagtgcataattttacatttcattctctttttttttctttttctttctttctttttttttttgagatggggttgcctctgta

SEQ ID NO: 328465 - DNA, 607 bp, Homo sapiens
acataaatggcaagtctctgaaagagaaatttatacaaagaagttttcaagacaacactttcaaagtagtaatgcccactttttccatggtgaaaaaattgatatggcaaaggaatattctcacaaattcagcaaatccaattcagttctccgttttgaaaacaacactttaagcaatgaaaatactatttgaatttcaccagagctttggaaaaagatatatttagtggttattaacctagtacttattcttccattgcacaaaatgcctcttttcctgaagaatcccctgcagagaattcccaggctggggcagggcagctgccttgcaattggcatccaaaccacacggcatagccaataataacttgcagttaaagtagctgcaagacaaagatggtagtcatttaaaataatttctgccactggaatttttttaattttcaattacttaagggtcaattcacctggaattctgggtttgacctctttaactattttttttttttaagaatcaagggtatagaaggtataggcataaagcaatrtaagtactccttcatgggacataagctttagggaactaaagataggttaattctatgcc

SEQ ID NO: 328466 - DNA, 539 bp, Homo sapiens
tcctgggttcaagtgatcctcctgcctcagcccccaagtagctaggattacaggggactgccacyactccaagctaatttttgtatttctggtagagatggggtttcatcatgttggccaggctagtctcaaactcctgacctcaggtgatccacccgctttggcctcccaaagtgctgggattacaggagtgagccacaatgcctagccaggttttgtctttagttctgtttctgtgatgaattacatttattgatttgcatatgttgaagcaaccttgcatcctaggaatgaacctacttgattgtggtggataagctttttgatgtgctactggattcggcttgccaatatttttttgaggatttttccattgattttcatccagaatatcagcctgaagttttctttttttgttgttgttgtatctctgccaggttttggtattagggtgatgctggcctcatagaatgaattagagaggagtcctcctttacattttttggggatacttacagtagaaatagtaggagctctta

SEQ ID NO: 328467 - DNA, 585 bp, Homo sapiens
ctttggttttcttttactttttccttttgccaaatactatcacattccaaagttcaatacttcactcactgctttcctctattaaagcaagtcccagcacatggtgtactttcttttcattcttgtagtaatcatttattttagagtttcagttactgtgtttggcataagagttattcaaagtgaaccaggccaagattttgctctagaggcacttacgatctctaatttcccctgaatttctatcctgtatcttccactctctatagggcatcttcctcttgatatcctatcattttcttctacttattaaccgctctcctcctccactccctaaaccaattattctcctgcaatttttctgttttttgtcaatggtgccatcaccccttcaacagtctttccctgttatcaagtctttaaatcttgccaygttttcctttcatgtttgttgctgtctttccactccagtggaaagaacctttgtcacggaccttatcagctcatcaacagagctactgcaatactctcttaattttctttctgcctctgaatatcgtctctttcagtcattcctagacacct

SEQ ID NO: 328468 - DNA, 533 bp, Homo sapiens
gttttaaggatgcaaagatgaataagctatatctgtgtcctgaaggaatttacattctaaaaaagaaatgatgcctaaatagattattttgagatcatacaaggttaagagagacatatttacagagctctacaggtatctaaggttcactttatgaatctttgctagtaatttttctcaatattttttcttcagtaagaggaaatattatgcccttacttcagggaggaaaagggaatgttaagaacagtcaggggaaggacatgggacaagatccayggtttttgcttccaagaagagacaagggaaaaaatgagagagggaagccaagaaacctcacattcaaatgacttaattatctctcagctggcttgtgcaatgctgaagtgatttttctgtccaacttggactataagcagccaaagaaacactctgtctccttcctaataaatacaaattttgcactctacaaatgattgaataagtttgacaatcataaaagtggtcaaagaagtaaaaagatgtgcttgacc

SEQ ID NO: 328469 - DNA, 596 bp, Homo sapiens
gtatttacaaaaaatattgtgtgaatatttgcaccaagaggcatttacaaaaatgtttatagtaggatttttcatacagctaaatattcatcagcaacacaatggtgctatattcatacaacagcatggtgctatatattcatattgtggaatactaccccacacagaacattaactacagcaacatgtaacagcatgggtaaatctcatagacatgttatcragcaagagaagccagacacaaaagaacacattacttcatttctatagggtttaaaaacaagcaaaactatagtgtttaggcatgcacattttggaataaaaagtgaagaaaagtatggaaacaattatcataaacatcaagagtagaaagtgtgcattgtaactcagaagagccatagaggggacttctgggttgctatcagtgtactatatcttgctctagttggtggctgcatggctgttcactataatactatactagttctacattatgtattctgtaatttactgtgtgcctgttatattccagtataatttttaaaatatatgataaaataaaacaaaaaaagtattacttacgaagatctcctacc

SEQ ID NO: 328470 - DNA, 491 bp, Homo sapiens
tctaagcttggattcaccaggagactctgagatgaggatttgatggcaagtagtttatgtggaaagtgatcccaaaaatcactggtagaggataagaaagtgagacagggagagaaagaagccaacaatgggtgtattaccaagcaaattacaccagaggtaactggagcttaaactctgccagccagtgtagaatgtactcctcagggttatcccacctgacggccaggaagctggatatttagctaacaatttctgtcagtcatcggtcatgggctggtggggtaaggaaggtattgattatcctgcactattgacttgccagtgtgtccacagagcctgttctgggcccaagaaacccctcagacaaagaggtaacagctgtttgcaatagaaactttggccaggatagccaaggcgggcagattgcttgagcctargagttggagacaaccttgggcaacatggtgaaacccagtctgtaaaaagaa

SEQ ID NO: 328471 - DNA, 636 bp, Homo sapiens
gaattctttgcataaccgcatgtcatgaagatttttccctgttttcttctaaaagtgttagagttttttggtttacatttagatcttttttgagataatttttgtacaaggtgtgagatctaggtaaaggtttattttttacttatggaagtttagttgttttaacaccatttattgaaaagactatcttccccagttgaattgattttgcaccttcatcaaaaatctgttggacaaccttatgatgtcagtctacttctggaccatattttgatctatgcatgtrtctgtccctcctccaataccacactatcctccttactgtttattattgttgctatacaataagtcttaaaattgagtagtgtgatttcctccaacttcattattctttttcagtattactttagctattctagttcctttgtctctctatatataaatttgagaattagcttatctatctatctatctatctgtctatctatctatctatctatctatctatctatctatctataaaactgccattttggccaggcacagtggctcacacttgtaatccccacactttgagaggccaagaagggagaattgcttgagcccaggagttcaaaaccagcctgggcaacatag

SEQ ID NO: 328472 - DNA, 636 bp, Homo sapiens
gaattctttgcataaccgcatgtcatgaagatttttccctgttttcttctaaaagtgttagagttttttggtttacatttagatcttttttgagataatttttgtacaaggtgtgagatctaggtaaaggtttattttttacttatggaagtttagttgttttaacaccatttattgaaaagactatcttccccagttgaattgattttgcaccttcatcaaaaatctgttggacaaccttatgatgtcagtctacttctggaccatattttgatctatgcatgtgtctgtccctcctccaataccacactatcctccttactgtttattattgttgctatacaataagtcttaaaattgagtagtgtgatttcctccaacttcattattctttttcagtattactttagctattctagttcctttgtctctctatatataaatttgagaattagcttatctatctatctatctatctgtctrtctatctatctatctatctatctatctatctatctataaaactgccattttggccaggcacagtggctcacacttgtaatccccacactttgagaggccaagaagggagaattgcttgagcccaggagttcaaaaccagcctgggcaacatag

SEQ ID NO: 328473 - DNA, 646 bp, Homo sapiens
gtctatttactgagtgcccaaggactttagtgagccttgaaatatcacaactttaaagagaagctacatggcttaaataatttgaacagcagagcaaattttccatttgtgagtgaaaatttagaggcctattatcttgaagtcatttcagagggtccagtgatctgaagcatggtagtggtaccttccttccaaagttcaagataagttgttaagccatgaactcacctatcattaaaaaagaggtacaatgcttggtaggtcttcttggaattaggaggtaacatacatcatatttgaatacactgctcagacccatttattgaataaccccaaaggctgccagttttaggcagggcctagagcaatggaaagctctgcagcaggactaagctgaaatacaggtagycacttcagatttaggatccggcagattcaatgatagtcaaagtgtctgtggcaaacacaggtgctggatgaagactttggcaagatcctaaaggagaacagaatcaccaaattttagaaaaataaatgtgccttcttctgtagataacttgtgggtaactattttccttttgaaaaatagcttctagcttatcagtgggtcctaatggagactgtaccctctgagtatgagacatta

SEQ ID NO: 328474 - DNA, 629 bp, Homo sapiens
caaagaaaatcccaggagctgatggtttcactgctgaattctaccaaccatttaaagaagaactaatatcaatgctactcaagctatccccctaaaaagaaaagaatacttctgaactcatttctacaaggccagtgtcaccctgataccaaaaccagggaaagacatgtcaagaaaagaaaactacaggccaatatccctaatatggatgcaaaaatactaaaaatatactagcaaactgaatgcagcaataccttgaaaagatcattyatcatgaccaaatgggatttatccttgggatgcaaggatggttcaacatacgcaaatcatcaatgtgatgtatcatatcaacagagtgaaggataaaaactatataatcatttatattgatgttgaaaaagcatttgataaatttcaacaatagatcatgataaaaaccctcaaaaaaactgggcagagaaggaatgtatctcaacgtaataacagccccacagttgtatcatactgaatgaggaaaaactgaaagcctttcccctaagttcttgaataagaaaaggctgcccaccttcaccactgttattcagcatactactggaagtcccagctagagcaatcagacaagtgaaata

SEQ ID NO: 328475 - DNA, 576 bp, Homo sapiens
tagacattatccctttttttaatctagttctttatttttcatttttaaccaaaagtatttcaattaaaatatcatagaactgcctttgtttttctctgagaattttatggaattaatgttatatgaaactcattttggataatgttggctattaaatggtaaaaatcaaacaaaagggacagcttctcccaatctcattctgtgacaaactggacaaaattctggttcttytgaattcctaatctatagcacattatcagttttattttatatgcacatgtttctaaacataatcatgaaatttagagctttaggacaccttggaaatgatgtcattgaacttttaaattttacttcaaaagaaatggaaatccagaggaggtcagtgttttactcatgattacacagataaatggcaattatctcaaccatgcattttccatacattgcaatccatagcatccctattaataaggagtctctttgtgcaaaaatgccttagtgaatctctccagatcctgcttgtttgcaggaagtgatgtttgttaactttctaggtacttcttagaggcctac

SEQ ID NO: 328476 - DNA, 499 bp, Homo sapiens
ttcctttaacataatgtgatatagaaaactctaaacataaaccaataagggaggttatgggaataggttggagtgagggtaagttgctcatttaatttacaaataaatatttattggcaataccatgaaactcargtttcattcaattgaacacttttggtgagcatctttgggtgcattgtttatattcttagtaacataatacaagatttggaagcgcccttacaattcccattatcttctttcatcccccagaaatgttagatatgtcccactctacagaaaagctactataataaactagtgaatcaaagagtaagtatggataaagaaaacacagtgtgagaaacaatgtaactttggattgggtacaccttatttctgaaaaattagaaggaagagagtttttgtaaagacatccttttctctcttgcagcttctatcaggattttaagagggcaggcagaactttaaagcaaaggaaattgcttgtttttgt

SEQ ID NO: 328477 - DNA, 621 bp, Homo sapiens
acacagtgtgagaaacaatgtaactttggattgggtacaccttatttctgaaaaattagaaggaagagagtttttgtaaagacatccttttctctcttgcagcttctatcaggattttaagagggcaggcagaactttaaagcaaaggaaattgcttgtttttgtgaaattaaccagtctgttatcaaggcggaggacaagatacgaatgctaatcattgtgaagaaactcattacggaattttctccaatacataggcaaaagagttaagtattttgctctaaggtgaaaatcccaaattgtggaagaatggggggaagttaagatttaataattaattgttctttgctctttggatttttcagacttttatatmtctaaagctttgttgaagtataaattacatattataaaacttacccctattaactgtacaatttgataagttctgacaaatgtacaccatcatgttgttaccatttcagtcaagtttacagaccattcctatcatcctccaaatatcccttctgatctttgtagataatcccacctctccttgtcattcccaggaaactactaatctgatgtctgttcctaatgttttgcttttcatgaatatta

SEQ ID NO: 328478 - DNA, 566 bp, Homo sapiens
acattcaaattcaggaaatgtggagaatgccaaagagatacttcatgagaagattatccccaacacacacagtcatcacattctccaaggtgaaagggaaagaaaaaaatattaaacgcagctaaagagaaaggccaggtcacctacaaagggaagcccatgagattaacagtaagcctctcagcttaattcctacaagccagagcagattggggggccaatactcaacattcttaaagcaaagaaattccaacccagaattacatatccggctagattaagtattataagtgaaagagaaataagatcattttcagacaagcaaatgctaagggaatttgttaccaacagacctgacttacaagaactcytgaaggaagcacaaaatatagaaaggaaagaccattatcagctgctacaaaaacacactgaagtatacaaaccagtgaaactataaagcaaccacataaacaagtctgcaaaataaccaactaacatcatggtgacaggatcaaatccacatataataatacaattttaaatgtaaataagataaatcccccaaa

SEQ ID NO: 328479 - DNA, 371 bp, Homo sapiens
tcattggttaactgcttacagaaaatgtggtattaatatatatacaccatggaatactatgtagccataaaaaagaacaagatcatgtcctgtgtaggcacatggatggagtggaggccattatccctagcaaattaacacaggaacaraaaaccaagtactgcatgtctcacttagaagtgggagctaaataatgagaacacatggacacatagaggggaacaacacactctgtggcctttcagagggtggagggtgagaggaggaaaagggtcaggaaaaataaataatgggtactaggcttaatacctgagtgataaaattatgtatacaacaaactcccatgacacaagtttacctatgtaacaaac

SEQ ID NO: 328480 - DNA, 545 bp, Homo sapiens
tgtgcccctgttccaaggatctgtagaatttgaacttgagagatgatttaggttatctggtggaaggaatttctaagcaataaagtattcacgaggtggcctgggmtgcttctaacaacctatgctcatatgtgtgaacaaataaatgacctgaaactagaacttatatttaaaaggaagcagaatgtaaaagtttggaaaatttacagcctggccttgcagtagaaaagaaaagcccactttctggggaggacttcaagcaggatgtagaaatttgcataagtaaagaggtgccaagagctgacagccaatacaatgaaaaatggcctccaaggcatttcagagacctttgaggtcacccctcccatcacaggcccagaggcctcagagggaagaatatttcctgggccagactcaggatcctgctgccctgcccagtcttgagacattgttccctacatcctagccactccagctccacccatggctcataggggtgcaggtacagctcaagccactgcttcagagggtgccagtcctaagcc

SEQ ID NO: 328481 - DNA, 548 bp, Homo sapiens
catgtaagagacatagacatttttgacatggaaaagtaaagtctgaatcttgaaactgctcacagccattcagtgtataatcagtacattggtgacttgagtggaaggatcacaaaascttgaagaaagggctaatttttttaggtttataagtaaacatgtgtacacatattcacatacatatactcctatatatgcccattaaaggctgactttcttgttaaaaattgaaccatgagaaaaatgctctggttataaaacatgttttatttttgtgaattgtaatagaatacaaactatcttcaaaaaatgcctgattaatgcatatgtttctattccatcaacgtttctttgaaaatataataatttcatgtgtaaccggaataatagagagtatatttataaacgaccaaattaaagatggaagtaatattttttcttgcaaggcttccttgccaaaacattatatatataacagaagtctataaaaaggtcatgtttcacattacagatgggtcttgacaaagtaaagctgaagtaaacagttt

SEQ ID NO: 328482 - DNA, 566 bp, Homo sapiens
ggatctcagtaaagttcaagtgaatttagtaggagtgaaacaacagaaagaatgacagattttgttatgagtagaatatcgacatataagatttcacaggaggaactgggtgatgacaaggaccagtctacagccaagacagtgtgttgcgtccattcacattctctcacatacatatggacaagatcaggaaggagaagatttacattacctgcttccttaaaggcatcctgatayagcacactggagaaggactggagagacttgcatggtctctgggcttttgtgacacaatttggtcttttcttgataaagtgagcgtgaaaatatctgttacatttctatttcaggtatgctatgaagaataaattatgtatgtgcaagtcctttgaaagctgaaaagtactatacacaagttgagtatagctaaagaataattttttaaaagatcttgggatatttcttctcattaatacagtgttgaaaattttatgaatgggagttcactcatgatttggctctctgttggtctgttattggtgtataagaatgcttgtgatttttgc

SEQ ID NO: 328483 - DNA, 624 bp, Homo sapiens
tttttgtaaacctcatggtaaccacagagcaaaaatttataatagatacactaaacataaaaagcaatgaattaaagcataccatcagagaaaaaccacataaccagaaaggatgaaagaaaggaagagaggggttacacaatggctagaaaacaaataacaaaatggcaatagtaaggcattgcctatcaataattgaacataaatgaactaaattctccaattaaaaaacatagaagggtagaacatattaaaaaaactatatgctacctacaagaaattcactttrtctataaagacatgcacaacctgaaagtaaagaaatgtaaaaagaaactccataccaatgaaaaccaaaaaagaacaagagtagctatacttatatcagatacaatagactttaataaaaactgtaaaaagagacaaatatggtcattatataataacaaagaaatcaattcatcaagagaatataacaattatatctatgcacccaacactggagtacccaagtatataaagcaaacattaatagatctaaagggagagaaagactgtaatacaatgatagtaggagatatcaacattgcactttgagcaatggacagaccatccagacagaaa

SEQ ID NO: 328484 - DNA, 624 bp, Homo sapiens
tttttgtaaacctcatggtaaccacagagcaaaaatttataatagatacactaaacataaaaagcaatgaattaaagcataccatcagagaaaaaccacataaccagaaaggatgaaagaaaggaagagaggggttacacaatggctagaaaacaaataacaaaatggcaatagtaaggcattgcctatcaataattgaacataaatgaactaaattctccaattaaaaaacatagaagggtagaacatattaaaaaaactatatgctacctacaagaaattcactttgtctataaagacatgcayaacctgaaagtaaagaaatgtaaaaagaaactccataccaatgaaaaccaaaaaagaacaagagtagctatacttatatcagatacaatagactttaataaaaactgtaaaaagagacaaatatggtcattatataataacaaagaaatcaattcatcaagagaatataacaattatatctatgcacccaacactggagtacccaagtatataaagcaaacattaatagatctaaagggagagaaagactgtaatacaatgatagtaggagatatcaacattgcactttgagcaatggacagaccatccagacagaaa

SEQ ID NO: 328485 - DNA, 605 bp, Homo sapiens
caaataaatatccctatagtgttacatcataactttgactttggtacagactgtaggcattaccagcagtctctattcctaccaaattaaagtaggaatcctaaagaaamcagttcacttccatgtatctttatttagttgaacaagacagcctacctaagcaaaataatgagacacataagaactagcatgtattttgaaaagaaattcccccagggttcagctaattactatcttaaaacaactgcctatattcagatgccaatcgaaagattaaatcagtggctatgaccatattatttgcctcttaacactacagacaatgtgtctgcggttactgtactaacagcagggtaccaagcatcctgtggagcattctgtacaggatgatgctttgagggaacacagctgctttcagggggagaaaaactgcagatttaaatttcagaatgttttcctttgggtcattttgtacttgtgagcagaaagttcactctcttatgctctccttcaacacacacacacacacacacacacacacacacacacacttcatactgatgcaatcattaccaaccatgatgagtgtggtttctgcaagtcag

SEQ ID NO: 328486 - DNA, 490 bp, Homo sapiens
cttgttgcaatccctgagggtaatcagcatttcatattctccttcatgtggttgctgttagtaagcctccaaattctgttctcaattaccacagatatgctaaatgtatgcatagcagaaacttgctaatttgtaacttaaaagactggaaaacaatgagcttaaattaattaagtatctggtatttttaaaaattacgaaacaaccaaacattaactaggctgagaaagaacaattattgtactctatatgaacagattatatgaagggataatggcttacatgagacttctgagttagctcacaactatatgtgttcatggagctatgtatttaaatgccagttgcaatatgccaaggccaatttgcrgaaaattaatttacctaagaaccaatttactgaatgaccagttcactgtgttacagaagcatttcttagagttgtagtttttcctgtgtccctgctcttgccttctcctttaccacatta

SEQ ID NO: 328487 - DNA, 608 bp, Homo sapiens
gaggctaggatgcagcaggattattacttaatgtcaggcagttcaggctaccaaacaatagcaacatgtctttatgtcccttaatttctttcagagatggaaatgcttataaagccagccttctggggtgaggggttgtgagcctagaaccccacagagtgttaaaagtgaaaatgggatatggtctctgtgcgtcatatatacatagagcatttctctttattattgttttctctttatcagttttaactttttcagtatttttactacccagaaatcatggttttgttattcttcctttttctacctttaaagaaatagtttctttgtaataaaaaattatatatcttcctccctaatcacttgctttggcayatttagagacagaattttactgtgtctgatcttccctacatcttctgctgagggaatattctttcctgattcataattttatgatcattcaaaagagcaatctgttataacaggacatctcataccacagctctgctttaaaccattatttaatttttccaggcttctaaaactttcacttaatgtctttagccttatgctaatagttgttcttattgtataaattgccaccc

SEQ ID NO: 328488 - DNA, 598 bp, Homo sapiens
ccttttggtattcagtcttgttcctcrcaccaagtcacacactgatgtctctggtctcaaatcctcaaggtctcttaaagctctctgtgctctacagcccagaattacagcatgttcagatcagaggggactatactaatcaggaaattcaaacacttcagaatgcacatgaggaaattgagacaaaaagcttaagagacttacccaagtccacacaggtggaaataccttcatcagcaccattttattttatttatttattcactgattctcagaagtgctatcatattcttaaataatttgttgctatcatagaagagtactctttttgtttttttttcaaaattttgttcgctagagtaccctccccttactataatttggtagtttgttttttgctccagatgtggttaaagcaagcacttttataaggcaaatctggtaactgacatcaaagcattacaaagccaaacattaaggagccttaaggaaccttgagggaagacacaaatatttctcccacttggctccaccctatctggctagaattctaaggcagtgatacaagaagtgagtcttctcatctttctattaggat

SEQ ID NO: 328489 - DNA, 580 bp, Homo sapiens
ggggctgcctgcttcatgttgccagtgctgggaataactcctaaacccagactagacccaagtcaggggtgagtaaaggaacccccaggcaccacattaccactgtggacctctgagatcttagctacaggagtccccacgatcccctcagatctttggactggcaggggcagctgctgggagaacacacrggcactgcttgaactctaatggagcccaaaaggcttcagtgcactgggcagctgcctgaaaatgcgactctgggcacccatcccagcaaaggctctgtgtccttccctaagtgttcctgttctctgtctggcacgatagagctgccccagacatgttcatgcctctaagacagaccgcactgccattgtcacaggaacaaagtgcatctgagccacaaacccccatgcctgccattccctcccaagactgcctgtctgatcattccacaggaggtccacagcataatctccattgccctgacctgagcgatttgttggtggattgagagcagttcacccccaactctggctccatcacagctggtgcttgacctcaaggggtcagggga

SEQ ID NO: 328490 - DNA, 580 bp, Homo sapiens
ggggctgcctgcttcatgttgccagtgctgggaataactcctaaacccagactagacccaagtcaggggtgagtaaaggaacccccaggcaccacattaccactgtggacctctgagatcttagctacaggagtccccacgatcccctcagatctttggactggcaggggcagctgctgggagaacacacgggcactgcttgaactctaatggagcccaaaaggcttcagtgcactgggcagctgcctgaaaatgcgactctgggcacccatcccagcaaaggctctgtgtccttccctaagtgttcctgttctctgtctggcasgatagagctgccccagacatgttcatgcctctaagacagaccgcactgccattgtcacaggaacaaagtgcatctgagccacaaacccccatgcctgccattccctcccaagactgcctgtctgatcattccacaggaggtccacagcataatctccattgccctgacctgagcgatttgttggtggattgagagcagttcacccccaactctggctccatcacagctggtgcttgacctcaaggggtcagggga

SEQ ID NO: 328491 - DNA, 540 bp, Homo sapiens
ataaatgataccacagaaatacaaaagataaggagagattactgtgaacgtctccatgtgcacaaactagaaaacctagaggaaacggataaattcctggaacatacaatgtcscaagattgaacgaggaggaaacagaaatcctgaacagaccaaggatgagtaataaaactaaattagaaataaaaaattttcaaagcaaaatgcctgggaccagatagattcacagccaaattttaccatatgtacaaagaagagctgatacccatcttactgaaaatattccacaaacctaggaggagggactcctccttaacccattcaatgaagccagcatcaccttgataccaaaatcaggcaaggaaacaacaaaaatggaaaactacaagtcaatattgctgatgaacatagatgcaaaaatcctcaacaaaattctatcaaactgtatccaacagcacatcaacaaaataatttgtcatattcaagtggcttttatcccaggaatgcaaagatgattcaacatttgcaaatcaataaatg

SEQ ID NO: 328492 - DNA, 540 bp, Homo sapiens
ataaatgataccacagaaatacaaaagataaggagagattactgtgaacgtctccatgtgcacaaactagaaaacctagaggaaacggataaattcctggaacatacaatgtcccaagattgaacsaggaggaaacagaaatcctgaacagaccaaggatgagtaataaaactaaattagaaataaaaaattttcaaagcaaaatgcctgggaccagatagattcacagccaaattttaccatatgtacaaagaagagctgatacccatcttactgaaaatattccacaaacctaggaggagggactcctccttaacccattcaatgaagccagcatcaccttgataccaaaatcaggcaaggaaacaacaaaaatggaaaactacaagtcaatattgctgatgaacatagatgcaaaaatcctcaacaaaattctatcaaactgtatccaacagcacatcaacaaaataatttgtcatattcaagtggcttttatcccaggaatgcaaagatgattcaacatttgcaaatcaataaatg

SEQ ID NO: 328493 - DNA, 540 bp, Homo sapiens
ataaatgataccacagaaatacaaaagataaggagagattactgtgaacgtctccatgtgcacaaactagaaaacctagaggaaacggataaattcctggaacatacaatgtcccaagattgaacgaggaggaaacagaaatcctgaacagaccaaggatgagtaataaaactaaattagaaataaaamattttcaaagcaaaatgcctgggaccagatagattcacagccaaattttaccatatgtacaaagaagagctgatacccatcttactgaaaatattccacaaacctaggaggagggactcctccttaacccattcaatgaagccagcatcaccttgataccaaaatcaggcaaggaaacaacaaaaatggaaaactacaagtcaatattgctgatgaacatagatgcaaaaatcctcaacaaaattctatcaaactgtatccaacagcacatcaacaaaataatttgtcatattcaagtggcttttatcccaggaatgcaaagatgattcaacatttgcaaatcaataaatg

SEQ ID NO: 328494 - DNA, 540 bp, Homo sapiens
ataaatgataccacagaaatacaaaagataaggagagattactgtgaacgtctccatgtgcacaaactagaaaacctagaggaaacggataaattcctggaacatacaatgtcccaagattgaacgaggaggaaacagaaatcctgaacagaccaaggatgagtaataaaactaaattagaaataaaaaattttcaaagcaaaatgcctgggaccagatagattcacagccaaattttaccatatgtacaaagaagagctgatacccatcttactgaaaatattccacaaacctaggaggagggactcctccttaacccattcwatgaagccagcatcaccttgataccaaaatcaggcaaggaaacaacaaaaatggaaaactacaagtcaatattgctgatgaacatagatgcaaaaatcctcaacaaaattctatcaaactgtatccaacagcacatcaacaaaataatttgtcatattcaagtggcttttatcccaggaatgcaaagatgattcaacatttgcaaatcaataaatg

SEQ ID NO: 328495 - DNA, 538 bp, Homo sapiens
tgaacagaccaaggatgagtaataaaactaaattagaaataaaaaattttcaaagcaaaatgcctgggaccagatagattcacagccaaattttaccatatgtacaaagaagagctgatacccatcttactgaaaatattccacaaacctaggaggagggactcctccttaacccattcaatgaagccagcatcaccttgataccaaaatcaggcaaggaaacaacaaaaatggaaaactacaagtcaatattgctgatgaacatagatgcaaaaatcctcaacaaaattctatcaaactgtatccaacagcacatcaacaaaataatttrtcatattcaagtggcttttatcccaggaatgcaaagatgattcaacatttgcaaatcaataaatgcaattccccacatgaacagagttaaaaacaaaaaccatatgatcatttcaatagacctagaaaaagcatttgatgagacccaacatggtttcacgataaaaaccctccacaaactgagcattgaagtaacacctcaaaataa

SEQ ID NO: 328496 - DNA, 604 bp, Homo sapiens
tatttctaaatctgcagacatgaaaggtcagtgtggtcaccccctgggacaaacatagatcctctgcacatgcaattttaaytagtcagggtttcagagcagggcaccagccattgttactttatggtgatagttttattgattccgtgacaatatagggattcgacagatactaagtgaatgaagcctgtacaggatttacagaggagagccactccgttttagaaaaacatatagcctatctttttagaaattattacaagtggagtttgcacagctttgaatgttttaattgtctttttctggccattttataattgctacgttgaacagtgatttactacatatagtttcctaaattggcatcagttcgatttgtcttctcccaacccaactgtacctcagcaaagggacaggtaccttacagtgagaagcatctgtgccagcaggccaggtatcgcaggcatgagtgtctctgaacagtctatgctcattctcataatgacgagcggtctccagttggttcatttattgttcctcgactctgagcactgctttaggtgacggaactgggatttgaacctaggccattctgactttagca

SEQ ID NO: 328497 - DNA, 604 bp, Homo sapiens
tatttctaaatctgcagacatgaaaggtcagtgtggtcaccccctgggacaaacatagatcctctgcacatgcaattttaattagtcagggtttcagagcagggcaccagccattgttactttatggtgatagttttattgattccgtgacaatatagggattcgacagatactaagtgaatgaagcctgtacaggatttacagaggagagccactccgttttagaaaaacayatagcctatctttttagaaattattacaagtggagtttgcacagctttgaatgttttaattgtctttttctggccattttataattgctacgttgaacagtgatttactacatatagtttcctaaattggcatcagttcgatttgtcttctcccaacccaactgtacctcagcaaagggacaggtaccttacagtgagaagcatctgtgccagcaggccaggtatcgcaggcatgagtgtctctgaacagtctatgctcattctcataatgacgagcggtctccagttggttcatttattgttcctcgactctgagcactgctttaggtgacggaactgggatttgaacctaggccattctgactttagca

SEQ ID NO: 328498 - DNA, 573 bp, Homo sapiens
tgatgcattatttaaattcacagtctttaatttctctggaatccaaatgttacgaattgaggataaatatattttaaatgcttggaagacaactttatacacatggtcttttttttttttttttgtctttcatacgtgcagttgggactttacagtccttacttccaacacttgttttcgacatttctgtggttttgtgttgcactctagcagacctgtggaccgagaagaattagaaatagtgactatggtagaagagccaaaagtagaayattcaactcagggaatttgtgaaatgtcctttatctgaacatgtgccttaggctggcacataacaaactgtcagaaattgatgttgatgcatgattttttttttttttttggtgctatgctctgtaaagcaagatattgcaaaagaagtaaaaacagactttgtttttctatttgttttgagacaggcgagactatagtgtgttttctctgggcaggcttaaatatggtaggcagagctgggttttaggtttggtagtaacagcaggacatctcaaacactgaaagaaaaagagccaaagg

SEQ ID NO: 328499 - DNA, 578 bp, Homo sapiens
cttgggacaggaatgaatgagtgtcattgacaaaaattactttccagtgatgttttgttgctcatcaagctgtgtgtgctgataattccttttacttgtgaagaagttagatcacattcttatatatctaaagacaaaaaaatttcctcaatgatttgtataaatattttaaaatttttgatgctattttcagcagcaagtttaggatttyaaaatggaactttatggttttctttaattcatctgtagattagaggattctatttacataggaggtattttttcttcttaatgatctgtaattgttaggaaaaactttgagaacacagctttagcaagaataaatgttttgcttgagtcattgtctctataacagtgctgtgctgaaatagagtataaatctgataaagaatgaatgaccatatgttcaataagattatcattgatggttactgctaagttacaggtgaagcatattatttttttctccctctatcccaacttccaaatccctactccaggaactcagaagaccaaaaacagcactaccgaattgctccctctcctcccctgcatct

SEQ ID NO: 328500 - DNA, 634 bp, Homo sapiens
aggctggtgagtgacagtaacaagaagtgaagggtgatactactgctaccactgttaaaataatggcaagtgaatatttatgaaatccatattaatatttatggtacttttgaaaagcattatctcaaggaattctcacaataatcctttgaaaaagacactattatttttcccatgttatgaatgagttaactgagttttagaaaaattgaataaattgcctaagtccacacaactatttcaagtcaccartatagctatgtgaaatggttttcaaagaattcacccatccttcatccatctatctatctgtcccttcatccattcattcatccatttgcttaacaaccttgagtgtcttctaggtattaagctctgaggattaaaaaaagtgcctaaaatcctagtacctgcccttgagtctgatgagaaggaaatttaagagaacaactgataaaagctatagtagaggtgtaattttgttatttgtaaaatgagagtgctgtgttgcctaatctttaatatttctttcaattccgccactgtgattctagaaacagcaagaagtaatcaacgaaaaacgaaactgtacacagcctggtggtataaaacttgaacctagttaactgttgtt

SEQ ID NO: 328501 - DNA, 527 bp, Homo sapiens
caaaatcaacatagatttaattgaattcacctcatgcaagtactgacttaggagaacactattcatatgtacagaatataaattctgggccacaaattcaagcaygtgagaaataatcaagacttctatacagtcacttaatttccatttcaagctgtcatccccataaaccagtaggaaacttgggctcaggcataaggagttcccccacttcataccaaagttcaggaatactattagcagcaccaaggtgttgggagctctggttacctgtacagttgattcttgaacaccattggattgaattgtatggttctacttatacatggatttttttcaaccaaacacagatcaaatatacagtattcatcggatgtaaaacccacatatatggtgggctctttgaatatgcaggttccacaaggccaacttcaggtcttgagtatgcatggattttggtatattcaggggtcctggaaccaatccccatgtgtaccaaaagacaactgcagaacctattaaacaac

SEQ ID NO: 328502 - DNA, 496 bp, Homo sapiens
caatccaaatggtacacttatctaatcacctgaaaataatatgaccagcatataagcaataaaagtgggtaaaatattcagtggaaatgttcatctcacacaagaattcttatccaactcaagtttttggtttcctargttacataaatattgaaaacacatttaaaaaaatcagtcttgttcacagactcttagaatcattgaacctttaactttcctagcgggaagagaccagaaagagggaaaagtagagaagccaaaacacataaaaatatttacaaagtgagttaagccttctttatcttacaggtaaagaaaccgaaacccagagagactgaacagtctacagaagatcacccttcttgttggcttcagtttaaaatgaaaggcaacctaacatagttcagaatatccatttaacagtgttattctgctatctgccactgatgcctctgagctttatgagtgctttatgagaagaactgagagcctttat

SEQ ID NO: 328503 - DNA, 645 bp, Homo sapiens
tgctgccattaggttctttgtaactacttcattcataccagtttcttctccttcccccagatcactgtagtttccccagagaaatgacttagtggagtgagctgatcattgactaggagtccatgtgatggtgcttgttctcttgcagactcattctcagcacacctctgcctacctctgtgcgccaggtggttggtctctgtgaatcgcatcatccaaactcctttgamctctgtcttccttctggttgcatttggccaacaggagtcaggagaatggaggagagagaagccagagtatttcttccctgcttcatctctgctttggggatgcttggcaatgatggtatctctctctttactactcaaaatttgagcaagtattctctttccatggtttcagttctcagttgtttccagtactttatttctttctcttgttcccttggccctaggggtggtagcagcttcccaccattgctagcttctgggtgcctcattctcctggtttgttcctatttctcacactgctgttattaatcacctctgcatttggagcatctgggttcattctgattctcgccaggagactacctgatatacataacaactggcttttacacgcagctctgtactaaccaggcca

SEQ ID NO: 328504 - DNA, 486 bp, Homo sapiens
gcatgctagccctgaagagacttgagaccacaagcagagttccttgtgttcttcagaactaccagagttggagctggatgacaagaagacattacaaacctccagtggccctaacctcccaccccttcaagcatgcctcctctggggagagactgaaacagctaaaatacagaaagaagtctgagagctcccggaaaaaaatgacaaatgcatattttaaataaatagagaattccctaaaaccagacaaaatatttgtagaaaaatkaatatttaaccttaggctaaagaagatggaaggcagttctgttcattccccaatacactgtctctccaccatcaaaagatctttgtagtagcagtaaagagataatagatatagaagaatatgtgtgcttattgtttttaaaaaataaaacaaggacaataaagaaaacataagcacaaatcaaaaagaatcaaactggcatctttctgttcatatgc

SEQ ID NO: 328505 - DNA, 616 bp, Homo sapiens
cagcatatatacataaacatacaaaacgtgttaattggctgttttgtgttaattgactttaggacaactgtaggttattagtaaagtttttgagagtccaaagttatatgtggattttacattacatggtggataggagcaggcagtcagcactcctaacctctgtatcattcaagggctaactatayatagttttatctaaaatgcacagaaatttgagacataaagttatttttaaccaaatcttcagaaaatttcctcaattgttcaattatgtccatgtgagttaaaagacctgaacgtgctagacatccccaaatagtcctagacatcctgaaattgtccaattatgtcaatttgatttaaaaggcctgaaagtcctagacatcccccaaaattagtgatgctgggccacacagccttttgcttctgcaggcctcagcccctagagccatttctgtgaatcagttgccctttcctgtcctcaggtcggcactgtgaatagaacaactaagtagttcaagctactcacccaagaattgaaagacctagataatgacaatgaattagtttaatattattgttgtaggcaccataatcatcaaatatagagcct

SEQ ID NO: 328506 - DNA, 493 bp, Homo sapiens
ctctggcgcacctgcgtgattggagatttagagacagaaaaaggagagtaatatacaggaaacagaagtgaggtgctgaaacagcaggattggttacagctcagcatttgtcttatttgagcatggctagaatagttggccacctttgattggctgaaactccatatttggcccaagaggaggttacagtctgtttacacatccagttaagttacattttactatgcacttagaaacctttaggccaactgtagaatacataaggcttaggctaaacrtaatttaacagcagagacaattatactacagaaattaataaagtgaggttctgagaggttaaagaatttgtcacaaggaacagaagccaactttaaaccaaaatttgtcttaaacccaaagacctgttcttcttattagccagtcattcttcttgggctgatcactgcatctcttttaactttcacctcctcatctgtaaaacagcattaataat

SEQ ID NO: 328507 - DNA, 600 bp, Homo sapiens
gaaagatctcccaaagataaatgcagaaactgatggcttcatggctgaattataccaaacatttgaagaagaaccaatatcagtttttctcaaactttttaatacaaattgaagaggagggaatactcccaaactcattttacaagccaccattaccctgaaattaaagccagaaaagggcactgtaagaaaaggaaattatagaccaatatattcctaattaacacagaagcaaaagacctaaataaaatattagcaaaccagatttaacagcatagtaaaaggatcatacaccatratgaagtgggatttatccatggaatacaaggttggttcaacaaattcaaatcaataaatgtgataaactatataaacacgatgaagaacaaaaaccacaagatcatctcaatacatgctggaaaagcatttgacaaatttcaacatcacttcgtgattaaaaactcacaacaaaatagggataggatgaatgtatcccaacaccatgaaggccatgtatgataaccccacagctatcattctcaacagtgacaaattgaaagccttttctttaagatcaggaacaatataaggatgctcacc

SEQ ID NO: 328508 - DNA, 533 bp, Homo sapiens
agatttaaaggtttaatgatacccagtattgactagcttgtgagacataaaccacaaagggaaataggattgtcagaaaatattgcttgcatattggtggaaatgtaaattggtacattttaggaaaatacaagtctcccctacttcatctaatttcactttctgcagtttcagaaaattacctgcagtcaactgtggtccgaaaataccaaatggaaaattccagaaataascaattcttaagctgtaaagtgtgtgtgcagaatagcatgatgaaatcatacactgtaccattccctcccgactgggatgtaatccatccctgtgcccagtggacccatgttctctacagtagccacctgttagtaacttagtagccatctcagttattagatccattgtggcagaactgcagtgcttggttacaagtaacctttattttacttaataatggtcccaaggcacaagaatagtaatgctgataatttagatatgtcaaagagaagccataaagttcttcttttaagtgaaaa

SEQ ID NO: 328509 - DNA, 533 bp, Homo sapiens
agatttaaaggtttaatgatacccagtattgactagcttgtgagacataaaccacaaagggaaataggattgtcagaaaatattgcttgcatattggtggaaatgtaaattggtacattttaggaaaatacaagtctcccctacttcatctaatttcactttctgcagtttcagaaaattacctgcagtcaactgtggtccgaaaataccaaatggaaaattccagaaataaccaattcttaagctgtaaagtgtgtgtgcagaatagcatgatgaaatcatacactgtaccattccctcccgactgggatgtaatccatccctgtgcccagtggacccatgttctctacagtagccacctgttagtaacttagtagccrtctcagttattagatccattgtggcagaactgcagtgcttggttacaagtaacctttattttacttaataatggtcccaaggcacaagaatagtaatgctgataatttagatatgtcaaagagaagccataaagttcttcttttaagtgaaaa

SEQ ID NO: 328510 - DNA, 629 bp, Homo sapiens
ttagactttggcattttttagtaactttagtcagaagtttctctggccagagaaatcttgaataggtcaagcccctctatgagaaagggactctctggcacatgtgcacaggcacaggatccagatgaatgcagacttgggccaactgcttctccaaatgcacagctggctggtggccccagtttgtttgccaggatcagaacagggcagtttgtatgagacacagaggagtttcgactcctcascatggggcagcaggttaattgtgttctgacccccactcaatggtatgcagctcgctcctagcaagtgtgtgggcaagaccattagacaagcaggcaatcacctgaggctcacaggtgattctctatttagatatagcctcaacatatccatttggaatacctgacaatcacctgaggttcacaggccagccctcctgggcaacttgacagaggcaataactgacgttgaaaaagcctctggagggagagagaaaggggaaaaccatgacagaagtagaaatgggtgagtagaagagggaagtgagggaacgaggagcagagagaaaaagaaaaggaattcttaacactgttcaacctgcttttctggtcctttccctcacctgc

SEQ ID NO: 328511 - DNA, 629 bp, Homo sapiens
ttagactttggcattttttagtaactttagtcagaagtttctctggccagagaaatcttgaataggtcaagcccctctatgagaaagggactctctggcacatgtgcacaggcacaggatccagatgaatgcagacttgggccaactgcttctccaaatgcacagctggctggtggccccagtttgtttgccaggatcagaacagggcagtttgtatgagacacagaggagtttcgactcctcaccatggggcagcaggttaattgtgttctgacccccactcaatggtatgcagctcgctcctagcaagtgtgtgggcaagaccattagacaagcaggcaatcacctgaggctcacaggtgattctctatttagatatagcctcaacatatccatttggaatacctgacaatcacctgaggttcacaggccagccctcctgggcaacttgacagaggcaataactgacgttgaaaaagcctctggagggagagagaaaggggaaaaccatgacagaagtagaaatgggtgagtasaagagggaagtgagggaacgaggagcagagagaaaaagaaaaggaattcttaacactgttcaacctgcttttctggtcctttccctcacctgc

SEQ ID NO: 328512 - DNA, 192 bp, Homo sapiens
gtcaaactcatcagaagatacattctggattactaacctaaatattttttatccttactgtgtgtttcttaacaatgcaacagcatyaattttccccaccagtgtaaacattattaattgctgtaagttaagcaaagaaacaccattaattcctaaagtcaaaacagaggcagcaacaagcagtagagtcgc

SEQ ID NO: 328513 - DNA, 602 bp, Homo sapiens
gacaagtgtaattagtaccatgttccacagcctgcaaaataaggtcatattatctgaattgcagatttccccacctgcttccagtgcagccttgaaggtgtgactctgctactgccatagattttcccgttgctaaagagctgttctgtgaaccacataatgaagccactactagggctgcggatcgaaaacttggctgcccattagaatttcctgacgagctttggaaagcctggctgcccaggccacacccagaccaattgcctcatcatttacaggagtgtgacccaggcatcactgactgtgttgtttaatccccccaaccaggtgactttaaaagaacaagaaaatctttttctgggtcttctccctgtagattcttatttaattggtacaggtagcaaactaagcatcacgaatttctaaaagctctccaggtgattccaatgtgcaatcacatttaaaartgactcctatagagaatagagacataaagaaaagtcagaagtgctgtgtctctgacccttgcatcctgaagataaaagataaaaggcccttggagtgcttataaaagtaaagtgtttagattaattcattgaatt

SEQ ID NO: 328514 - DNA, 397 bp, Homo sapiens
agctggggtgcccggctggttgccaacaccaagattagccctgccgcatccacacagtccatgtgcagggaagaaatgagaaatactgtgccctgaggctggacaaggggaatttctcctggggctcagagtgttgtacttgcacaacagtgatcatcgatgttgtctacaatgcattcaataacgagctggtccgtaccaagaccctggtgaaraaatgcatcatgctcatcaacagcgcaccataccaacagtggtaccagtcccactatgcgctgcccctgggccgcaagaaggggaccaagctgactgctgaggaggaggagattttaaacaaaaagcgacctaaaaaaattcacaagaaatacgataaaaggaaacagaatgccaaaatcag

SEQ ID NO: 328515 - DNA, 629 bp, Homo sapiens
gtgtctattggacaagagatcaaatattcttttttgttaccttttgtcttctggacactgtaaatctgtggctcctgaacctaagcaagcatcagaatcatctgaaaggtttgttaaaggctagatacatcagacccaccccacagtttctgatttgataagtccaggttggggcctaagatttcctctctaacatttccaacaatgctgatgctgctggtccggagaccacattttaaaaaaatcacttttgtagaattgatgcctgttttcatgttttaactctttactttagagccgaagttcctctttccaacctgttaagaagacaactgtaagttstgatcaagcttgactgggattgcaaatgcagaaagaaatatctctaggcaagtgcagtagtcactctcgcacaaaaacttctggacataatctgtgcaaatcatgacagggtcttggaggcaatggggtctttaactttgtctattccatattttttcagagacgccaccggcaatctattagagcagtgctcacaaccttttccaggttgggacatacccagcaaaggataatttttgtaccacacaggaataaaaatagaggctcctaaaggctagaagaagcct

SEQ ID NO: 328516 - DNA, 649 bp, Homo sapiens
ttgttctttatgtgccatgcaatatttatatgtcaaactctttgccagcactacaaactaagcattgtcctagattgtcataaaaccactacatcccagcttacttccaacaggactctcggctgggagtcacactgaaagtccctaggaaggcagccttttctgggtggagtaaacatccagactgctaagatattttttattcaaatcagttcaacaagtactttgtctgaagttcaacagcactctttttttaaattaawttttttttaattttcaaaaatcatatgtttatagtataaacataaccttttgatgtatgcatacattgagaagtgactaaatcaagctaaataacacatttattacctcatatgcatttttttagtgataatatttaaaatctattcctagaaattttcaagaatacaataccattaactataatcatgttttatagcagacatcctaaacttaatcctcctccataactgaaatgttatatcctttgactaccatatgatccatcaattcgacttctgggtacatatccaaaaggaatgaaattaggatgtcaaagagatatctgcactcccctgttcattgaagcattattcccagtagccaagatatggaaacaaccaaagtg

SEQ ID NO: 328517 - DNA, 492 bp, Homo sapiens
aatgttttatactgaaaaaagaaaaagaatctctaaacattgaagaaaattaacgctcctgactgctaaagatatgcttttacattcccttagttctgatcacaaactatggcccacgaagcctaaaatatttgctatctggccctttacagaaagtgtttgctgccctctgccttatgtcattaayttatcgtaattacaccatgagggagacattgtacacactattcagatagaggatagggagctgagctttctatttttttttaatacaagtataaaagacaggatttaaccgcagtctggtaattctaaagctttcattcattctactaaactgcactgcaataacctggagttcttacaatgcaaagttacacatagagcaagtacaaacagaaaggatcggagggagatcagtgggggtgtcatttggggtcaggacattctgagggagagttggacagtattttaccgtataaccttagtgtg

SEQ ID NO: 328518 - DNA, 476 bp, Homo sapiens
ttcttcatcattctccttcaagttctcacccacagcagtaatacagcattaataaaagcctaatatagaatgttcatatttctctgctttgatcctggactgggggctgccaggtctaggctagcagctggcctagggtaattctcctcccccacactgtcttccccctgctgcactataccggcgttaggcctggagggcaggagcaagagacagtatccaaaggtaacaggcctatcaaattacataagtaacctgcatttcttttcttttcttttcttttcttttttttcytttttttttttttttttttttttttttgagatgcagtcttgctctgtcgccaggctggtgtgcagtggtgccatctcggctcactgcaacctccgcctcccaggttcaagcgattctcctccctcagcctcaagagtagctgggactacagacgcccgccaccacgcccagctcatttttgt

SEQ ID NO: 328519 - DNA, 551 bp, Homo sapiens
ctatgtcttttcctcaaactccctgtccaggtctctaaatttctatctgagggactcacccccaaaaccccatttagaatgccttataccttaaatgtatattttcccattctaagaaaccaaacatgacagtatcaagaattcatttttggtttgaggttagtatccttctgactattctggcaggtagaaagcatgttgacaacaaaaatgcctttctgaatttttcacagcactattctgaactttttgtaatcagaaaaggagaaaaataatttctcatttctattaaatattcagtgggcaaatactaatatgaaagaaaattgaaattctatggcacactcaataagtagcagtttagattatattagaaatattgttaattctcttygggtcgattaacagagtcaaaaatggaaatctaaaatgaagctagaacattgtattaagtgttacaatgtatgcctctttccctaacctgtgagggacagtgacggaactgaagcctttggaggacctcagggtgaatctggcctcccacatgtaga

SEQ ID NO: 328520 - DNA, 580 bp, Homo sapiens
cccttcctacacattaatcatgatgcagcgagactctctctgctccacatgaaggcagatctccaggcactcagggcacaagatcacttggataaggagcctgagataccccacccttcctgtgcatatatcctggtgttggagggtgggatctctgctccgtgctcaggcagatctttaggcatctggagcacctactcttctagattagaagtttagatcatcttccatccctgttcagagaacttggagctgaggtagtttcccagcctcacaactaggcacccttctcastgcttggtggctgcccacaggattctttctcggtgttggtgcctgtgcctgccattggaggacccccaggcagacctgtctggtatggccctgcccttcattgcccccactccccttaggtttgagcagggagctcaggccactataaattacatgaatcagcccacactgcctgaggtaacagagaacttctgccagtaaacaagggttaaatatatacccagccacgtttgccacagctggcttttacctgtaagcaccatctatgggcttgtaggttgaactc

SEQ ID NO: 328521 - DNA, 626 bp, Homo sapiens
cacccacaggctcaaagtaaagggttggagaaagatctacaatgcaaacagaaaacaaaaaataccagaggtcactatttttatgtcagataaaagagattttaaatcaacaacagtaaaacaaaaggacaaagaagggcattatatgatgataaagtgtttcactcaccaaggagacataactatcccaaatataaaatgcacccaacattgaagcatccagattcataaaacaagtacttctagacgtacaaaaaaaaagacttgaagaactacacagtaatagtggggaacttcaacaccccgctgacagcattagataggtcattgaggcaggaatctaataaagaaattctgaactgaaacttgacacttagcgaatagagtatgggccaatggagtatggcgggaagatcacatacaggtacagaacagagatgtacagaatactccacctatcaactacaaatacatgttcctctcatctgcacacacaacatacttcaagattgtccccatgctcagccataaagcaattcycaatgaatttttaaaaatcatgctaaccatactcttggaccacagtggaataaaaatagaaaatcaatatcaagaagatttctcaa

SEQ ID NO: 328522 - DNA, 497 bp, Homo sapiens
agctgtatgtgtgtggcatctatatttgggcccttatctctctttttctcatcctctatttctctctttcacttgaaagtgactcacacagcctctgctcaatccaggaatctggccttgaaggagaacgacttccatctccctggcttttggttcagttgtccttcctgggaccccagagtacttcttacaactatgccagaccttgtyggggaggaaagcatcagaactctttggcagatttttctaagcagggccgtctctctgcttgtgtttctcaatgctgtttatgtgaggaaaagactgaaaacacctgggctaaatccttgaacagtcccaactccaatcctttaaccctttttgtcttcctggttcatcattttattagctgtcattctgttactgtttaccagggtggtgaatacagcagaacctgagtttggggaaaggtcaaggtatcaaaataagctgtgctagttattgccactcaccaactt

SEQ ID NO: 328523 - DNA, 560 bp, Homo sapiens
atgccttggtgactatggtcaaggtaatagagggttatgcctgcccgaccaggtcctttgctcagaaagctgaactgattgctcttaacaggggctttagagctgtgccaaggaaggtggataaatgtttacactgactctaaatatgccttcttggtggtgcatgctcatgtggctatctggaatgagagaagccttttaatatcagagaataaggacattagatatccagtggaaatcctggccctgttagaagcagtatcctcacctacctaggtcaccatcatgtactgccctggacaccaaaaagatgatttccaagtgatcartgaaaagcaagcagtggacaaggctgcaaaatgggctgcttgagaagcacaaatgcttggggctttaatatccacttagacctattggatttgaaacctctttataccaagcaagatgaaggattagcctgtgactggggagttgctaatgcaaactctaacttgtcttgaaaaactaacactcctggaatggtcctactctgtgaagccctagtgtgcccagtttacaaa

SEQ ID NO: 328524 - DNA, 620 bp, Homo sapiens
gtggacttataaccaagtagcctagcttcaaaatgcattttgaaactgttttcctttcttgattttagcattgaaacatactttaaaaactctttgttcccctaccttcccaccagacactcccttgtactgctagtttgtctactttcatggttaatcggaagtttcagggactaatcttgagaaaaaccaggtatagagacacagctgcaaaattccagagattacctcaaagtggttagtttataatctggccattgttgagatgacacctgcctgtaccccaggtggaccatgactcaaggtagccactggaacaagacatgcagacctcgtacccagcaccactccttcatgcttctcactccaagttcccctttttgagcccctctctccagcctgaagtttggaatggccttctaagggaataagcctggccatttctcaactgctagcatttraataaaattgcttcatttcaccacaccttgcttgttgagttttcggcttctgagcagtaagcgcctgaacttgcatgtggttacacacagtttaagaattttttaatatcattattatataaatatttacataatggtctcaattttttatcttagtct

SEQ ID NO: 328525 - DNA, 551 bp, Homo sapiens
ttgatgaaagaaaatgccacaaaaatgtccagccatttttccatgtctccttccccattccttccctaccttctcaacacaatccaatttccattcccatttggctcatgggaaacagctttctaggaatygagaagcaaatctgcccatgactcatattcttcatacctgcctctgtgcctggctcactactgcctttgcactcagggaaaagatttcttgggagaacttcattcaggtcgggtcagctcctcaggaaaacagacctaaacctgaattcaggtcatcttcatttttaattcaggtcatcttcatttttaatctgaacttgcctactgctgtcattttttcatctgcttttgtaaactgatccccctaccccaaaagtagcatctctttattgttttttttgttgttgttgttttgtatttttcttttttctgtgtgtgtgtgtgtgtgtgtgtgtgtgtgtgtgtgtgtgtgtgacagggtctcgctctgtcacccaggttggattgcagtggagtggtcttgactcactcagcacgctg

SEQ ID NO: 328526 - DNA, 631 bp, Homo sapiens
ttggaactcagtcctgccctgtcacagtggaaagcaatgctgggcagagctcagctggcacccaaagagaaggcatttagaccagccctaaccagaagggaatcacccacctcagcagtcagaacttgagtttcagcaagcctcaccactacaggctgaagggctctggggtcctaaataaacttgaaagacaatctaggccataaagactgtaactcctagagaggtcccagtgctgtgctgggcttggagcgagtggacttgggggcacacaacctagtgagacactggccaaggtgsacaagtgcccctcccccagcccctggcagtgcagctcgcagctccaaaagagaccccttccttccacttgagaagtgagggaagagtaaagaggactttcttctgcaagttggatagcagcttaggcatagtaggatagggcactgggtagagtcataaggcctctattccaggccctagcttctggaggacatttctagacacaacctgggtcagaagggaacatttttccttgaagggaaggacacggtcatgacaggattcattacctggcaactaaagagcccttttgggccatcactaatcagcagcaatagccaagtagaacaca

SEQ ID NO: 328527 - DNA, 469 bp, Homo sapiens
ccagaaagacagagctatgcgacctttcagatagtgaattcaatagctgttttgaggaaactcaatgaaattcaagaaaacacagaaaaggaatttagaatcctatcagataaattcaacaaagagattcaaataactaaaaaagtcaagcagaaattctggagttgaaaaataaaattggcatactgaagaatgcatcagtctgttaatagcagaacttatcaagmagaagaaagaattagcttgaagacaagctaattgaaaatatacagtcagaggagacaatagaaaaaaagaataaaaaagaatgaagcacgcctacaagatctagaaaatagccttaaaagggaaaatctaagagttattggccttaaagaggaagaagagaaagagatagcgatggaaagtttattcaaaaggataataacagaggacttcccaaaccttgagaaagatatcaatatacact

SEQ ID NO: 328528 - DNA, 394 bp, Homo sapiens
tacctgttcgtggtttatatatgtaacccataaaccctggatgatcactgatttactttctgcttctatccatttgcttttctgggcagttcatacaaatgaatttatmcaatatgtgccttttgtggctggcttgtttcatttagtgtaatgaggctcatttgtatagtggcaagcttattgttttgcttctttttattgctgtatcttggttgacttttgatatcagttctattgacgtgacaggaaaatggggggcaagaaatgatttcatcctctccaattttgccacctgggaagcctgattccatggaattgcccccggagcagcttcccatagggaagtcaccaaggttgagtcctctggccctcttcccaggctgtggggaggaaa

SEQ ID NO: 328529 - DNA, 499 bp, Homo sapiens
aaacggtcatacatctctgatggacatttctctcatctaaaagcaaggaggagaagggccttttgcagattttcaatccctgaaaccaccaaatgagacttggaagagactcattaagctgtgtaatttgtcctcagggcccatctgagggtttcttcccatacatttgttccttctctgcttgctgagttccaagaggcgaaaacccagagctctctctgtctctgrtgtttcctcatgctcatttcctttttcctttggctctttaggcatttactttgtttcttcctttctttccttttttccttttcttttctttctttcaatagtgttttggcttgtcacccaggctagaataccatggtgcaatcagggctcactgcagcctgaaattcctgggctcatgtgatcctcccaactcagcttcccaagtagctgggattacagggacgtgccaccatacccagctaattttaaaaaattgttgtagagtcagggt

SEQ ID NO: 328530 - DNA, 548 bp, Homo sapiens
gaaggaatctacataagtgatgaaatataactgtatatacagaaaaactatgaatggggacagttataaattggccttaaagtatctgaagatacttttatatttttgatcaatgatatgcttaggtttttatatacaagttagtgattgtagtagttaagttagaaaaatatataataaagcagtatttatgcccagaaaatcttaggaaggattaagtgtccttagagggaactagaaggttatcaactcaaggtggtagtgacrttttgttaatccatctagacatcttgaaggaaaatggtgtgtctcagttttctatctgagttaaatcaactatatatttcttaaacttgatgtagagttagcattcttgggggcaggccaataacaaatgaacattagcaatattttgttcagggtctcagaatacatcaaaatgtcttctagatccacaattatgtagtagtttaaaaggtcaaagaatgaatcattcatgacatgctaaaatacctatattgcataactgaagctgaacacgttgcagt

SEQ ID NO: 328531 - DNA, 558 bp, Homo sapiens
atgcatccaacaaaggtctgctcaccagaactgtaagaaacataacaagcaaaagacaaatattaataaattcattcaaaagtagacaaaagacatgaacaaacacttctcaaaagaaggcacagcaagggaccaagaaacacacaaaaatgttcaacatcactaatcattagagaaatgcaaatcaaaactacaaagtgataccatctcacagcagtcaaaatggctattaataaaagtcaaaaaccaacagataatggtaaggctgcagagaagagggaatgcttctacactgttggtggtaatgttctgccrctgtagaaagtagtttgcagatttcgcagagaacttagaactaccatttgacctagcatcccattactgagtacagatcctaaagaatgtaaatcattctattaaaaacacatagtacttgcatgttcacctcagctctagtcacaataacaaagacaaggaattaacctaatgtacccatccatggtgaatgggataaagaaaatgtgatacatatacacaatggagtataatgcagccata

SEQ ID NO: 328532 - DNA, 617 bp, Homo sapiens
tcaccatctgaatttgtcttgagactttttgagtggagacacctgagcttctgttaatattggcaactatttacagcccatagaatagaacgtgtcattgctgtgttaagtttagctcattaggtggggaagktcttttgtggcagtctggagactaatggatttagtgctctgagatataaagtatatgggaaaagaaaaatgtataaattatcttaagtacaaatatgggaaaactcactggagcttttaaagaaaggtgattaatgcaattgaaaactgcaggaaaaatagtccttttttattttatagtttgtcactgttactgaatatggcacagcaagaattaaatgtaaagtgctcataacatttggaagcattgcaaatattgatgaagaatctaggattttggggggaatagatacatagtatacatgaaagacctaagaagtatactcataaaaatttagagctaggataaagttgtaatatcaaatcaagcttcttgttttacaggtaagaaaaatgaagcccaaagatgagccagagctaaaattcttatttggactcaaggatgtacatcctttgaaattatacaaaatctaaaatatgtcatt

SEQ ID NO: 328533 - DNA, 374 bp, Homo sapiens
tatatgaactctgaaaccccaaataccaaaatcctactatataaaaatgatccacatactaaaaaaaaaaaaaaaaaaccagacacayaaatcgagtttaatttcgtatcatgctattttcctaaaatatagtttctaaagttattgcaaattagttcctgctgcttggtaaaataccatatttaaacttaattacaactgccttcctgcaatgaagggccaactttttcaaataatgtgttacagcccagtgactctagggagtctatggtcccattgctgcaaatgagcagatcggtgaaaacaaaaacatattaagaagtccacatttctaacaaacaccttgcaaagaataaaatggtaatttaaggaat

SEQ ID NO: 328534 - DNA, 374 bp, Homo sapiens
tatatgaactctgaaaccccaaataccaaaatcctactatataaaaatgatccacatactaaaaaaaaaaaaaaaaaaccagacacacaaatcgagtttaatttcgtatcatgctattttcctaaaatatagtttctaaagttattgcaaattagttcctgmtgcttggtaaaataccatatttaaacttaattacaactgccttcctgcaatgaagggccaactttttcaaataatgtgttacagcccagtgactctagggagtctatggtcccattgctgcaaatgagcagatcggtgaaaacaaaaacatattaagaagtccacatttctaacaaacaccttgcaaagaataaaatggtaatttaaggaat

SEQ ID NO: 328535 - DNA, 374 bp, Homo sapiens
tatatgaactctgaaaccccaaataccaaaatcctactatataaaaatgatccacatactaaaaaaaaaaaaaaaaaaccagacacacaaatcgagtttaatttcgtatcatgctattttcctaaaatatagtttctaaagttattgcaaattagttcctgctgcttggtaaaataccatatttaaacttaattacaactgccttcctgcaatgaagggccaactttttcaaataatgtgttacagcccagtgactctagggagtctatggtcccattgctgcaaatgagcagatcggtgaaaacaaaaacatattaagaagtccacatttctaacaaayaccttgcaaagaataaaatggtaatttaaggaat

SEQ ID NO: 328536 - DNA, 595 bp, Homo sapiens
atgattgatgaaaggcaagaaaaagagggatagtcagtgtacatgctcccttggaaggaaggaaggaaggagacggctgagttggaaagttccccatgtaggatccaggtcattttagtgcagaatatcctgctagttctgctaattgaacttggtgaagcagtagagaccctttggctgagtgaagagaaaggaaaggatattatactcagttcattatatctctgagacagtcacaaataaagctttaaagcacgacaagcacaatcctccacctcatgtttctcatgacccttcacacgtgaatattaagcatagttttcactatttcttcataagaaaaagatgaagtttctgaaagcctctgttcataaaatttataggaaaggggtttgtgaattgtaaagctccatatacaagtgttggataatacaactgatttgttatttcttcctattactatctgaaygattattttactttgcatttaatttgttgaagatagagaagctacctaagactgaagaaatgtaatgtgggggaaaaaatgggtaaagtgagagaaatctgagggaaaaagaaaatagtaaagtga

SEQ ID NO: 328537 - DNA, 609 bp, Homo sapiens
ctcttgcttaacagagtgaacatgaaagattaatctgatgccagggggtacagtgtcagtgcaagggatggaaaacagaatggaacatgttttttcatcaggaaactccgtatgttcccttgtggtgatgataaattcagcaaagagggtcaggttatgggaatttattctatctataagaacatgcttattttaattgtaatatcactaaagaagtaggaaaacctaacaatagtagacatttcaaaataaaatacagttggccctctgtacccacaagtccacgtctttggatacacccaactgcagtactgaaaataaaccaaagaaaaaaaacaaaaataaaaaataacataaatttaaacaatagtacaacataacaattatttaaatagcatttacattgtattaggtattataagtaatatagagtggatgtgcayaggttataggcaaatactacatcattttatacaagggactttagtgtctgcagattttggtatctgtaggggttcctggaactaatttcccaaggatactgagtgacaacagcatacatctcaggaaaaatgtccacttgttctaagtttccaaagttccaatgtt

SEQ ID NO: 328538 - DNA, 564 bp, Homo sapiens
atgaacttactggaaacaggattgcgtatgtatcgagactatgggagttagttaggagactactgggaaacttctagtaatctaagtcagagagagcctggattagagtggtagcagcccaaaggaagagaagcagacatctgagagctgtttaagagtagatcagataggaactggtaatgactcctgactaggagtgggatgagggagataaggggatgagggagataaagggaaaaagtatgaatgttaaactttctgccttgggatgctgacctcatttactgacacaggaaaagggagaagatgattaaagatgggggatgaagcaggggaacctgactagctgaatgttggatctgttcattttaaggtgcctgaaatatayccaaatggatataaatgtcaactcagttctgggctggagatatagatttggaatgcaccaacaatgcagatggtaatcctggcatgcgagtaggtgagatcatccagggagatggcctataatgagagcctacaacatgtcaggtagtttgctttaattttttttagtttattata

SEQ ID NO: 328539 - DNA, 316 bp, Homo sapiens
aattatgcagtctgtggtattcttttatagaagcatgaaatggacaaagacagactccattttcaagagcaagcacttttgtagtttctgagcgaattatgactgcaaaggaagttctataggtagcctcagatccactacctaggaagcatgctaccaagcagacctaggatctaggatttgatcaagtgctgggcaacatgatacctctgcaatttagcacctccctatatacctccagttggctcagcccatcagggctaaaactacmcctcatatcctagtgtctcttgtaggcagaagccgtgcctaaacc

SEQ ID NO: 328540 - DNA, 439 bp, Homo sapiens
ggcttccttactttctggcaaaaaagatgttccaggatcaatatactgcaccatacatggagtcagccatttctctagggaaccttgattccttttagtagagaacacagtttgaggtcttggactgaatgacttttgtgaacctcctttcctgagactacagcctgcatccctgcatatagcccgtttggagctcttgctgggcaccaacagatctcctaaaactgctatatagttctgcctcactcttacaaagattsatctcttgagagttttgtgctctactcccagatgtggtctttctggttctgaagcttttgcttcagtcaccctgaattttgccagccctatgcatgctataccttggattgccaacttgccctcactgaagccagtttctctggttagaatagttgccccaacccatgcctaatactct

SEQ ID NO: 328541 - DNA, 572 bp, Homo sapiens
cccttgtgtcaggaacctgggactaagactaaatatcaaaacagaaaatgctcctattacctctgtcacgaagggctttataagagctttggaagctctatgccaggaaccaggggcagagaccaaatgtatatttcttttcttatattggagacagagtctcactctgccactgaggctggagtgcagtgatgtgatcatagctcactgcagccttgacctcctaggctaaagcaatcctcccaccttagcctctccagtagctggaactacaggcgtgcatcaccatgtccagctgattttaattttaattttgtaaaggcagggtcttcctattttccccaggctgatctctaactcttggcctcaagcaatccttcctctttggcctcccaacwtgttgggattacagatgggagccctcatacccaccaatcacaaggatctttataagagaaggaggtaggagagtcagaattagagaaagtgatgtggtaatggaagaagaggtcagagagggagatttgaagatgctgcacttctggccttgaatatggagtcacgaggtaagt

SEQ ID NO: 328542 - DNA, 572 bp, Homo sapiens
cccttgtgtcaggaacctgggactaagactaaatatcaaaacagaaaatgctcctattacctctgtcacgaagggctttataagagctttggaagctctatgccaggaaccaggggcagagaccaaatgtatatttcttttcttatattggagacagagtctcactctgccactgaggctggagtgcagtgatgtgatcatagctcactgcagccttgacctcctaggctaaagcaatcctcccaccttagcctctccagtagctggaactacaggcgtgcatcaccatgtccagctgattttaattttaattttgtaaaggcagggtcttcctattttccccaggctgatctctaactcttggcctcaagcaatccttcctctttggcctcccaacttgttgggattacagatgggagcccycatacccaccaatcacaaggatctttataagagaaggaggtaggagagtcagaattagagaaagtgatgtggtaatggaagaagaggtcagagagggagatttgaagatgctgcacttctggccttgaatatggagtcacgaggtaagt

SEQ ID NO: 328543 - DNA, 480 bp, Homo sapiens
atgtagggtactttgttgtagcaacaacaaaaaatgaacatgaagctgggacctcatgttacagttgctcacgcctgtaatcccagaactttaggaggctgaggtgggaggatcgcttaagcccaggagcttaagaccagcctgggcaacataagacctcatgtctaaaaaaaaatkttttaaaaggccagacgcagtggctcacgcctgtaatcccagcactttgggaggccgaggagggtggatcacgaggtcagaagttcaagaccagcctagccaagatggtgaaaccccatctctactaaaaatacaaacattagccaggtgtggtggtgggtgcctgtaatcccagctactcgggaggcagagaatcacttgaacccaaaaggcagacattgcagtgagccaagatcgcacccttacacttcagcctgggtgaccgagactccgtctcaaaaaaaaaaaaaaaaaaaaaaccat

SEQ ID NO: 328544 - DNA, 480 bp, Homo sapiens
atgtagggtactttgttgtagcaacaacaaaaaatgaacatgaagctgggacctcatgttacagttgctcacgcctgtaatcccagaactttaggaggctgaggtgggaggatcgcttaagcccaggagcttaagaccagcctgggcaacataagacctcatgtctaaaaaaaaattttttaaaaggccagrcgcagtggctcacgcctgtaatcccagcactttgggaggccgaggagggtggatcacgaggtcagaagttcaagaccagcctagccaagatggtgaaaccccatctctactaaaaatacaaacattagccaggtgtggtggtgggtgcctgtaatcccagctactcgggaggcagagaatcacttgaacccaaaaggcagacattgcagtgagccaagatcgcacccttacacttcagcctgggtgaccgagactccgtctcaaaaaaaaaaaaaaaaaaaaaaccat

SEQ ID NO: 328545 - DNA, 464 bp, Homo sapiens
tttggcagcagaggcaggcggatcgctttgatctcagggcaacatagccaaaacccccctccctagccccacccccaccccgtccctaccaaaaatacaaaacagcagggcatggtggygggcgcctgtagtcccagctactcaggaggctgaggcaggagaatcacttgaacccaggaggcagacgttgcagtgagccaagaccacgccactgccagcctggatgacagagcaagactccacctcaaaaaaacaaaaacaaaaacacaaggttaagagggaccccagaccttacagatacaagtttaagagggacccctaagcaaaaaatgccaaccctttttctcccaatcattgaaacaccaggagggtttaatagttttgcagcctagctgtagcaggctgatgcccccaagatgcccatatcctaatcccgggaactggtgaacatgaccttatatggc

SEQ ID NO: 328546 - DNA, 570 bp, Homo sapiens
tcacagagctgtgcatcgatcaccacagtcacttttagaacgtttcattaccctatagagaaatccatacccctcagccactacctcctactctccccacctaccttcggcccccagccttaggcaaccattgattaattttttgtcactatagatttgcctaatctggacaaatagaattgtacaatatgtgatcttttgtggctttttttccctcttagcacagtgttttcaaagttcctttatgtcatagtgtgtatcaatatttcattccttctatggcagtattccatggtagagacacactgcattttgtttatcygttcatcagttggtggatatttgggttgtttccatgtattccatgtattggtcattatgaataatgctgctatgaagattgttgtacaagtttttgtgtggacatatattttatttttctgggatatatgcctaggagtgaaattgttgcattataggatgactgtacatttagccttttgagaaactgccagactgttttctaacgtggctacaccagttgggtgcaatggctcacacctgtaatcc

SEQ ID NO: 328547 - DNA, 525 bp, Homo sapiens
aaaaaattaaaaataaacaaacaaacaaaaaacagaaaccctaggcactcttaagagaattagaagtgaggaaaagaaaaaataaaatcaacgaaaagcaggaagagttttaactcctggaatcatctgagaaactatttcaaactataaatttatataccctacttctgaaagttctgattcagcaagtcttgggtagaagctgggaatctgtatgactaccaagctcccccaggtgactctgaatgtgcaggtagcgagtgaagaaaccactggctcccagggactgaccgaggaacactctttctcacaaaggaccagccgactccaacagggtcagtcctttctatatatgtttcactaactgccttgaaattattcarttgatgtaacatggagatttcttatctagttgaaattagagaaaatcagtgtttgggatataataacatttccctcaatctctcttaagtacataactaaccttaaagagctagagagacatatattatataaaatatacca

SEQ ID NO: 328548 - DNA, 507 bp, Homo sapiens
tacctatgttgacacatcattatcacccatagtccatagtttacattagagttcactcttgatgttgcacactctatgagttttgacaaatgtataatgaccatggatccaccaatatgaatcatacagaataattcactgccctaaacatctgtgctctgcctatttatcccttcctcccctttaacccctgacaaccactgatctttttaatatctccatagttttgccttttccagagtgtcatatggtggaaatcatacagttttatagccttttcagattggcttctttaacttagaaaaatgcatccaaggktcctctatatctttttatagcttggtagctcatttctttttagcaaaaaatattccgttataaatgtatcacatataacacatttttaaatcaaatcatctatatagacagagacatcacacaccctaagaactgcactgccctaagccctcaagaaaaatttaaattctgtccagtacactcttaggt

SEQ ID NO: 328549 - DNA, 563 bp, Homo sapiens
aaaaaaacctgtacaaagttataataatggaagtttcaaatgatataaatgcccatcccttagaggactaattaaataaattacaatacattcctatagaagaataccatgcaggcatatttcaaaatcatgtaaaaataagctctaytgagatgacagtatttagtgaaaaaaacagattacaaaatcctattatatagaacttttttaattaaaaaaaggatatgattggatagacaagttgctaataatggctatctctgaatggagaaaattttttgtgattttgttggagttgtttttgcttttctacatattctgatttttctgagataagcctatattgatttcataatcagcataggagaaaaacaataaaaatattctggaaaagattccacaaaacactagcagctttcattcccatagttcccatctgaaccaaaagacagaagtagctctttgcatgtaaactggcatggtagtattgtttctctcaacatcttaatttctgtacccttcttttatggtctgtgtctctctataaaagttcccaagaagga

SEQ ID NO: 328550 - DNA, 579 bp, Homo sapiens
tgtatgtgtgtcattttaataagcaagaagatatatttagattagaaatggtttggtctgcctttgaatattgtttattttactttactagttgagacattaaaggaagctgggcaatgcctattttatttctttgttggatattttagttcatacaaagcagagtacttctttagggctggttaattggttcaaataatttttaatttcctttctagtatcttctcaagttggaaaaatatacatacagtcctccttcaccttactctgtatttatattacccataactagcaagaagttcttgttctagattttttgtttgtttagttataacagagtaacataccatttaattacaatttttagccagaaaagtccccactattttactaacttgttaaaagatatctatataattgcctggccttatatttttcagtagattagaccgtgccaatcacaatcctgggtggatttgtgtaagtcacttaacctctgtgtgcctaaacaagttgtgcttttttaaaaggagttatgtttgggmaaagcctttgtcttcaagcagaatgtcacagaag

SEQ ID NO: 328551 - DNA, 564 bp, Homo sapiens
aatcaatgaatcaaatatttacttcctagtttttcagataataaataagcacttattatattctgataattaattaactttctaataaccataacaggtcagccggggtccttttattattatctccgcaacttgcaactaaggatcattaaaagatatatgcaaaatgctcagtttaacacctaatttatgctacacccaattttaagccaagagaaggttagatttataatgggatacaacactcaagcaacagaagtggaaaaaataaagattctgaatttcctatccactaattactttgttayaactggagaaatttttctggacacaggcgtaaatatttagtagatttaattctcttaagaataaatttgttaaaataaaaattaagaaaatatttgatagcttttccatttattttgggttttaaattgagataaccagacaaacgacagcaattttggtgattgctggatgatacaaacacctgtgtagctagggctgtacaggcatttttatttggttgacagacaactagaactgaaatcagttgctgaattt

SEQ ID NO: 328552 - DNA, 632 bp, Homo sapiens
agaaatctattttctaaatgcaacaacagctggttttgaacaatactggaatatagcaattttcagttattcaaaagtatttttctcttgctaaaattataaacattgagaaaataattttcagatttttctgaaagactactattttcaaagtgaaaaacaaacttgaatatcatctttagaaattattgctagctttttttttaacctagaacaacacatataatgatagagtgtaaccctcaccttcattttagaaataacttaaccctgcagtgcctgcaggaacttcaatatgtagacaatttctaaatcaccaaacatattgctcgaaaactacatccttctaggaagaatagacaaatgggccaattaagcctgaggtgaataatactttaaacctgtaaagctttgtaaataattgaaaaactgytcatcacttcaaatactgtcatcaacatacaaaataaatatagacaattccatatgaggttaactcaaaaaggaccttaacctttcaggtgcaattagtatctaaagttcatagaattgttcttggcagttaactcagtttcactggcaaatgactcagtttcttactcatggatttaactgaaaatgtttacaagtcc

SEQ ID NO: 328553 - DNA, 555 bp, Homo sapiens
agcatcaggctaaatagcattaagttatctaacacattacagtagagtaaaccaattccttcaggtatacttttctcttccatttttggcttctcactctcttttttttgtttgtttttatagatgggtcaatgcccattatcactctagatggataagggagccttaattatatacttatatttttgcactgtcagattggagtgggrtaaaaatgtttcttcttttatgtctaatactctttttttttttttttttttgctgtgccgtagaccattacataactgaagactcccaccttcaggcaggattgggtagtacgtgtttgtaactacctggcattgccttttgttgaggtaatttcagtttttattattattagtagtagtagtatactttaagttctacggtatatcttcacaatgtgcaggtttgttacatatgtatacatgtgccatgtttgtttgctgcacccattaactggtcatttacattaggtatttctcctaatactatccctcctccatcccccaccccacgacaggccctagtgta

SEQ ID NO: 328554 - DNA, 555 bp, Homo sapiens
agcatcaggctaaatagcattaagttatctaacacattacagtagagtaaaccaattccttcaggtatacttttctcttccatttttggcttctcactctcttttttttgtttgtttttatagatgggtcaatgcccattatcactctagatggataagggagccttaattatatacttatatttttgcactgtcagattggagtggggtaaaaatgtttcttcttttatgtctaatactctttttttttttttttttttgctgkgccgtagaccattacataactgaagactcccaccttcaggcaggattgggtagtacgtgtttgtaactacctggcattgccttttgttgaggtaatttcagtttttattattattagtagtagtagtatactttaagttctacggtatatcttcacaatgtgcaggtttgttacatatgtatacatgtgccatgtttgtttgctgcacccattaactggtcatttacattaggtatttctcctaatactatccctcctccatcccccaccccacgacaggccctagtgta

SEQ ID NO: 328555 - DNA, 613 bp, Homo sapiens
catccactatttgtctttttgtgaccggcttactacatttagcatagtgtcttcaaggttcatccatgttgtaacatgtgtcagaacttcattcctttttaaggctgcataatgttccattgtgtgtacacaccacayttgctctacccatttacctgttgatggacacttgggttatttccaccttttggcagttgtgaatagtgctgctctgcctaggagtgtacaaatatctgtttgagtccctgctttccattcctttgggtagatactgagcagtggcagttttgcatttaagccttactttttcagtatatctctagagaggctggctctatattatgagctggcagtaacagcatcaataacaggaaagaaaactggatgttagtaacaaagggttttaattttgtgttttaaactggagacacacgttaaggggaaaaaatccaagtaaaagcaagggatctcatttttccctctttttctcttttccttcttattcctctctgacttctctgcctctccccctcccccaacgcattacagccatccccttctctcctctcaagtatgtgacgagtgactggcctcccatgtttataaggctgct

SEQ ID NO: 328556 - DNA, 576 bp, Homo sapiens
gttccattgtgtgtacacaccacatttgctctacccatttacctgttgatggacacttgggttatttccaccttttggcagttgtgaatagtgctgctctgcctaggagtgtacaaatatctgtttgagtccctgctttccattcctttgggtagatactgagcagtggcagttttgcatttaagccttacyttttcagtatatctctagagaggctggctctatattatgagctggcagtaacagcatcaataacaggaaagaaaactggatgttagtaacaaagggttttaattttgtgttttaaactggagacacacgttaaggggaaaaaatccaagtaaaagcaagggatctcatttttccctctttttctcttttccttcttattcctctctgacttctctgcctctccccctcccccaacgcattacagccatccccttctctcctctcaagtatgtgacgagtgactggcctcccatgtttataaggctgctctgcaatgcgattgctcctccaggactttattaatgccatttacgattcccgtaataactaaaccacactgttctc

SEQ ID NO: 328557 - DNA, 613 bp, Homo sapiens
catccactatttgtctttttgtgaccggcttactacatttagcatagtgtcttcaaggttcatccatgttgtaacatgtgtcagaacttcattcctttttaaggctgcataatgttccattgtgtgtacacaccacatttgctctacccatttacctgttgatggacacttgggttatttccaccttttggcagttgtgaatagtgctgctctgcctaggagtgtacaaatatctgtttgagtccctgctttccattcctttgggtagatactgagcagtggcagttttgcatttaagccttactttttcagtatatctctagagaggctggctctatattatgagctggmagtaacagcatcaataacaggaaagaaaactggatgttagtaacaaagggttttaattttgtgttttaaactggagacacacgttaaggggaaaaaatccaagtaaaagcaagggatctcatttttccctctttttctcttttccttcttattcctctctgacttctctgcctctccccctcccccaacgcattacagccatccccttctctcctctcaagtatgtgacgagtgactggcctcccatgtttataaggctgct

SEQ ID NO: 328558 - DNA, 576 bp, Homo sapiens
gttccattgtgtgtacacaccacatttgctctacccatttacctgttgatggacacttgggttatttccaccttttggcagttgtgaatagtgctgctctgcctaggagtgtacaaatatctgtttgagtccctgctttccattcctttgggtagatactgagcagtggcagttttgcatttaagccttactttttcagtatatctctagagaggctggctctatattatgagctggcagtaacagcatcaataacaggaaagaaaactggatgttagtaacaaagggttttaattttgtgttttaaactggagacacacgttaaggggaaaaaatccaagtaaaagcaagggatctcattttyccctctttttctcttttccttcttattcctctctgacttctctgcctctccccctcccccaacgcattacagccatccccttctctcctctcaagtatgtgacgagtgactggcctcccatgtttataaggctgctctgcaatgcgattgctcctccaggactttattaatgccatttacgattcccgtaataactaaaccacactgttctc

SEQ ID NO: 328559 - DNA, 447 bp, Homo sapiens
gaggtctcctgcaggaacttttggggaggcctggatactttggagaccaatgggtatggatggaaagaagagcagaaatgattcagctcataaagcagtgaaaaggaatgatctaagtacaygaacaaatctttaaagcaaaatgttaaagtgtgggagcaagttctacagaacacatacaatatgatacttttttttttttttttaaagagacagggtctcactctattgcccatgcaggggtgcagtggcacaatcagagctcatagcatccttcaactcgtgggctcaagccatcttcccacttcagcctcctgagtagctgggacttcataggcaggcaccaccacacccaggttaatttaaaacaatttttttggctgggcgcgggggctcacacctgtaattccagcactttggaaagccgaggcaggcagatcatgaggt

SEQ ID NO: 328560 - DNA, 566 bp, Homo sapiens
aattcttacactgtttccttcttatctggagaggctagcacttctaatttttgtaattaatttaatgtggaaagaattttttttctttgcctttctcccccaccccatctctagcagggtatagctacagagtatgttgagtagggccttctggctttgcttctgtaaccctatgcacttctgttggcaggttttacactgggctgtgatatttgatctacaggccagtagatggcgcttaagggtaattgtcagctgcggcacaagcagakgagtatgtaactgatctttgtttactgtgaagttctctctattgtctcaggaggtgggctgggcagtggagagccccctaccctaagctttcctgttcttggagggtagctggagcccctagcttgcctaagaaggccccagtagtgagtgcaggcaccagccctgatgacagtgggtgggtggctcccggtgaaatgcgctgaggtgtctttggggtgaggaggttagggggctgtactggctccccatcctacataggcaggaacatgatctgtttgcctatcacacccctg

SEQ ID NO: 328561 - DNA, 550 bp, Homo sapiens
tgtgtattcataagtactgctatgtggtctcatgtatagctaggcttttaaatgcttttttgaaaacttgcaaaaatraaatctgtattatatagtagtctgttacattagcagctcccaagagccatgcattctggtatccatgcttttgcatagtttcctcctcttaaatctgggctggatccatgactggctttaaccagtagaataaggtggaagtggtgctgtgtcaggtctggtcctcagcctgaaaaagtctggcaacttctactgcttgctcttgagaatcttgagctgccaaataacaagtatggggctgggtgtggtggctcactcttgtaattccagcactttgggaggccgagctgggtggatcacctgaggtcaggggttctagaccagcctggccaacatgttgaaaccctgtctctactaataaataaataaataaaaataaattagccaggcgtggtggtgcactcctgtaatcccagttactcaggaggctgaggcaggagaatcgcttgaacctgggaggcagaagttgcag

SEQ ID NO: 328562 - DNA, 563 bp, Homo sapiens
taataactatgaccttatattgatactcactgttagtcttccaacttattcttgttttcttttctttttaattaaaaaaaaattgtggaaatggagattcactacgtttctcaggctggtctcgaactcctggcctcaggcaatacctcctgcctcagcctcccaaagtgttgggattacaagcgtgagccaccatgcctggccaaactttattctcctccaagatggtcattgctattcttgactctttggcttttcataaatattttacaaataakttatcaatctctgtcccaccaaaagcctcaaagttgtattgggctttcatggaatctatatatcactttggggagaatttatagctttataatgttgtcatccaatccaggaatttggtaatatctctctatttatatgagttttcttttatttttgtaaataatattttatagttaggattcttaaacatctttcacaatttatctctaggcattgatgttttatgatattataatggcaccatctttaaaaactcaacttcctaactgttataggtatgtaga

SEQ ID NO: 328563 - DNA, 489 bp, Homo sapiens
ctcaaattataatcttgattctataataaaaatttttagttttcaactggcatattcaactggaaatgggagttacccatttcctctataatttcaaattgactttcatatattaaaacccatgagttcacaatgatacttgtttttaaaaacttcatggttaaccttcataaattcacgctaggacatcagcgcattgttttgaaaactgatgaagggaagcaatcaagcctttgtactcctttcctgtatgcattctattttggggccaagaaagagatggtaaggraagtccttcacagaaatattcccggtaataaattcagatggaattatggagttagaaaaatcatcattttgcaagacctaatgaaatcatggatctaggtaacaatcgtcaactgatgctgaaactaccaggatggtggttttcaacctcacctgcccccaagagctgttacaagcctcagtgtgtaggctgcactccag

SEQ ID NO: 328564 - DNA, 646 bp, Homo sapiens
ccctcagtgtgctaaagatctgaggggatatagagagaaaattctgagtcacactttcatttcaygtagctgaaaaagcaacttaaacattggacttgactgaaattaagcttggacttaactgagctccttcaggaaaagcttaattacttactgagacaggaaaatcatcaggacactctcggatctcaatgtgggtactgggagtgccagagaaccaagattctccctcccactctctctgatgtgtgtgattcatatgaacattgataaaggatgtctcatccctccttcaagtaaacttgttctgacaaaatttcaccacactttgtcaaatggcaaacattgttcctaagaaacatcatatacgtgtttatgcaaattttgttttttaaactttttatcaagaaaagaaaaaaagtggaaaatatgtttttgcctgaaaagtgaatattataaacaagtagcttgggtttgaaagatagtctgtggaaacacagataaggctctatgctaagatgcttgctgctataatcctcagtcccctagtaaaagtttctgcaaaaagcttggccagccatgatgccattgagcattgacccccataatcaatctccctgtgactctcacggagaatgctgaagca

SEQ ID NO: 328565 - DNA, 603 bp, Homo sapiens
agttttctctagtaaaaatttattgttttggggcttgatggcttttgtgggtttataacaacccatgaaacaacaatggcattcctctaacaacaacggctttttcagtggtgtaaccctcccagactttcatgatgttctccctgtagaggttctcttccatagcattgacaatcccctccatagagtatcatgtgcaataaaccttaagaatcgtaggacccccctgatctagaggctgtattagagaagtgtttaggggcaagtagacaacttttatatcttcagtgttgaactcatggggttctggttggttaaggacattgttcaatatgaacaaaactttaggaagtttttccttaatggaaagttacttcctgatttcagggaaaaagaaataattgaaccaatcagaacaagcattctcgttgtccagatgtttttgttgtacagtcataaacttgmagctggtgtttatcttttctctaccaggctcatgggttagcagctttatataacagatgtgggtcgtcctgatcatcaacctgtctttgcacaaaacactagagttagcctatcccttccttccttaaatcctgctga

SEQ ID NO: 328566 - DNA, 576 bp, Homo sapiens
gaaaccattgtttcatatccctgaatttggggtggtttgttaagcaacactagaactgaacagtgtccttcaatctctgaattaatccataatgtagcacatatcatactctgtcaccattttctgcatacgtaaatatacatgcatggccacaggactagaaacttcactacacccctacatctaactatgtgyctgaaatagaacaaattctcaaaaattattgttctgaataaactttcaacaagaaattttgacatcatcatcatttcttttctttcttatatttccaaattcaatgcattctacttcctaaatgtctttcaaatccatccacttcccttctcactaattctcagttgaggtcatcctcatttcttggcaggaatcttgaagagtcttttttctggtcacactgccacattttctccaaataaagtcctagagaaaaatgaaatgaagatttattagttggttctcacgctgctatgaagaaataacctgggtaatttataaagaaaaaaggtttaattgactcacagttcccacatggctggggaggcctcaggaaactta

SEQ ID NO: 328567 - DNA, 335 bp, Homo sapiens
ggttctccagggagcaatgtaacgtttgtcaaatcacagtgtgcctctcttcggagaaccccagagaggctcaggggcttctgaaacaggccctgatgcccaccagaaatggtcccaggcaggttcacctcaggacatcagaggagccttgaaaatctcttattttgacaaacactttgtcaagtgtttcctgactgcctgtatgtgacacaggccttgcgccgggcagagtctaagctgagcaggcacacgcctaggggaagcagcctccaggccatttcagcaaaragacaaaggcggtagaaaggtgagcagggatgttccaagccaagcct

SEQ ID NO: 328568 - DNA, 561 bp, Homo sapiens
aggatgtttgccttataataattcatttagagatcaaaaagtcaggtcagtgttaccccagagggactagtgaccagaaggggcatgaagaggccctgcccgggggctgatattgtcttgtttctagatccaggtcatcattcatcattacacaaagctcatgagtttacaaatattcactgaatagtacacttagatacactatctatatgtaaattatgcctcaattataatttaaaagataacaaagggatacacacatgcatgtgaaatagaaggagaagaggccttggtttaagaatctgggaagagtcaaggtcactggacaatttasataagggtatgtctttggtatatccaagggtcatgagttgatgaagctatagtgatgtgtattagtcaaagtctgctttcacctgcaacaccaggctttacctgtatcactcgtatttctcggaccatatgagccatttctaatttacctttactgccttccaagggctcttccaatggtacgttcttgagacttgcctgaaacaaccttgaaaaacagcttcactc

SEQ ID NO: 328569 - DNA, 561 bp, Homo sapiens
aggatgtttgccttataataattcatttagagatcaaaaagtcaggtcagtgttaccccagagggactagtgaccagaaggggcatgaagaggccctgcccgggggctgatattgtcttgtttctagatccaggtcatcattcatcattacacaaagctcatgagtttacaaatattcactgaatagtacacttagatacactatctatatgtaaattatgcctcaattataatttaaaagataacaaagggatacacacatgcatgtgaaatagaaggagaagaggccttggtttaagaatctgggaagagtcaaggtcactggacaatttagataagggtatgtctttggtatatccaagggtcatgagttgatgaagctatagtgatgtgtattagtcaaagtctgctttcacctgcaacaccaggctttayctgtatcactcgtatttctcggaccatatgagccatttctaatttacctttactgccttccaagggctcttccaatggtacgttcttgagacttgcctgaaacaaccttgaaaaacagcttcactc

SEQ ID NO: 328570 - DNA, 573 bp, Homo sapiens
accttacacgatctcaattcttttaaacttgttacagtttgctttgtgcctcaggatatagtctataatgctgaatgttccatgacagcttgaaaagaatgtgtattttgctgttgttggatgaagtgttctataaatgtccgtcggatcctgttggttgatgtttggttctatatccttgctaattttctgtctaatatttttatcaattgctgagagggaggttttgaaaatagccttttaaaattgtggattcatctagctataattgtggattcatctactttttctctcaggttagtttttgtttcatgtattttgaatctctttattttggtacatatacgttaaaggttgttgtatcttttctggtgggttgacctttttatcattatacaatgtccctctttgccccagtcatcaatcttctttcctctgaagtctactttttctgatattaatatagcgattcctgtttttttcccacaatgaatgttttcatgatgtattttttcaatttttaaaattttacattcaatctacctatgtcrttatgtttgaaatgagtttctt

SEQ ID NO: 328571 - DNA, 575 bp, Homo sapiens
caggactgggtgcttcccttcaaggcaatgggtttccttctggctaagtgtgtgtctagaattgtcatctgggagatatggcctagaacgggggccttatgaacctggctggtgccctatcttcctgtggctgagctggtattcaagatgcaagacaatgttctctttaygcttccctcttctctcctgaaggaggaggaaggagttatttttgttgctgcaagcagcatagcctggggttgggagaggggtggcacaagcactcccttagccacctcagctagtgtctaattaagttgcatgccccccaagtccactggctccaagtccaacacagcactaggacttaactagcagtttcagtccttgtggcccaaactgcctttcacgtttatttagaaccccagagcactttagcccacgaaggcgaggcctgccaaaactcaagttccaaccactgggatgggtgattcctcttctagctaggacatccatgggtgtcagctgagctcagcccggttttgctttccactgtgcattaggccatttttcacactgctacaaagaaatacccg

SEQ ID NO: 328572 - DNA, 205 bp, Homo sapiens
  misc_feature (1)...(205): n = A,T,C or G
cctgggaagcagtagggaaaggggtggtggtcattaaacagcacctttcaactgaaagcctccaggaccagggtggtggtgatggggcagatgaacacctctctcatgtgagaaagcggtgggactttgtgaggcagggatctcacagtcaggacaggaycctaactgcaccccttcttgctccttctctagcagcaatacannn

SEQ ID NO: 328573 - DNA, 586 bp, Homo sapiens
tagttaacttttggtttattattctgctgtactattttctaccctttatttcattwatttctgcatgaatgttactatttctttcattctgcttgctttaggttctgttgctcctctttccagtatcattacatggaaggttagtttactgatttgaaatctttcttctttttcagtataagtgtttacagccataaatttccccttaaggcctgctttagccacattccctaagttctgttatattgtgccttcacctcgattcatctcaaaatatgatttagtttcccttgtgatttctatttgacccactggttgtttaggaagggtactgtttaatttccatgtacttatgagtttcttaaacttctttctcttactgatttctaatgtcattccacggtggccagagaacatacctcgtattatttctattgttttgtgcttgttaggtttatttactggcctagtgtatgatctattctgaatagtgttccatgtgcaaattctgctgttgttaggtggagtgttttatagatatctattgggtttggttggtttatactgttaagtcttctatttcctt

SEQ ID NO: 328574 - DNA, 586 bp, Homo sapiens
tagttaacttttggtttattattctgctgtactattttctaccctttatttcattaatttctgcatgaatgttactatttctttcattctgcttgctttaggttctgttgctcctctttccagtatcattacatggaaggttagtttactgatttgaaatctttcttctttttcagtataagtgtttacagccataaatttccccttaaggcctgctttagccacattccctaagttctgttatattgtgccttcacctcgattcatctcaaaatatgatttagtttcccttgtgatttctatttgacccactggttgtttaggaagggtactgtttaatttccatgtacttatgagtttcttaaacttctttctcttactgatttctaatgtcattccacggtggccagaraacatacctcgtattatttctattgttttgtgcttgttaggtttatttactggcctagtgtatgatctattctgaatagtgttccatgtgcaaattctgctgttgttaggtggagtgttttatagatatctattgggtttggttggtttatactgttaagtcttctatttcctt

SEQ ID NO: 328575 - DNA, 586 bp, Homo sapiens
tagttaacttttggtttattattctgctgtactattttctaccctttatttcattaatttctgcatgaatgttactatttctttcattctgcttgctttaggttctgttgctcctctttccagtatcattacatggaaggttagtttactgatttgaaatctttcttctttttcagtataagtgtttacagccataaatttccccttaaggcctgctttagccacattccctaagttctgttatattgtgccttcacctcgattcatctcaaaatatgatttagtttcccttgtgatttctatttgacccactggttgtttaggaagggtactgtttaatttccatgtacttatgagtttcttaaacttctttctcttactgatttctaatgtcattccacggtggccagagaacatacctmgtattatttctattgttttgtgcttgttaggtttatttactggcctagtgtatgatctattctgaatagtgttccatgtgcaaattctgctgttgttaggtggagtgttttatagatatctattgggtttggttggtttatactgttaagtcttctatttcctt

SEQ ID NO: 328576 - DNA, 519 bp, Homo sapiens
gtcacacagtactgctctttggatgctgaatgatggggaggcctcttccctgcagactgtggttagcaaggtgaaggctgctggccatggccataacagctgggctgatctgtgatttctgccatgcctgccaatgtcagggtcaggtttgtcaatgtttttgtgttggtgtgtgagatgctggggagacgccatctgccatgcgtgtcagactccagattccatatggttacagcagggtttgggagaagtatccacagagctaggattagaataaagwggtgctaatggtgtgcagttgggaaggcaaaggaaactgtcaggaactcaatggaaaaagggttgaagaaaattaaagggagatcaggagaaataaaggaaagtataaaggaaaaagacaaacacctctgccactttaaaggtcaaagagtaacaataacacagaaaggctctttcaccttgccaggttcaacagtgggttgcattctggcttctttaataaagttcacaccatgggat

SEQ ID NO: 328577 - DNA, 596 bp, Homo sapiens
ttgccatcatcaccactcttgtgctttgagaccaatattaagtaaaacgcaagaactacgacaccctacagttgatctaactgagatggctactgagtgacaaccagcagggagcagagacactgtggatcccctggacaaggggatgattcacgtcctgggcaggacagagcgsgatggtgtgagatttcatgacactactcagaacagcaagcaacttaaaactgatgaactgtttcagaaattttccttttaatatttttgggcaatggttgaccacgggtaactgaaaccacagaaagtgaaactgcaaataagtgggaactactgtacataatacatatatatatgtatatggtgcatgtagatacatttacatgtgtgtatgtatatatgtatgtgtatgtatgtacgcacggatctatcttgttaggaattgcaagagcttcaaaatctattatcagatcatacatttctttagccaaacaataaatcctctttgatgagtcatggcactcgcatatccagtttaagaaaaagtacaaggtcagatggttcagaataaacaaatcaacaaatgagcaaacaaaaccagc

SEQ ID NO: 328578 - DNA, 526 bp, Homo sapiens
taagattaatgtcatactccatggggaaaactcaagcacttggaacatttgtaaaaaggcaaccctcaggtactcagggtgctcagctttcaaaagagcaataactttgaacagaggccaggcatgcagttccccagcaatgctctagatggttagaaatgacccaggtttcacsatattagctctgacaggcagtcctgaatgtttatgaatccagcctatgtgaggtctttctagaaggtctcaaatggtttcttagaaaggaacagatgtaaaacgtgatcataagggatgtgctcagttatttttaaaacattaattttaattctggagtatttccagagtacatatattatcgaggaaagacttaccctgtctgtgtgtgaagggatcctggccacgactttggttatgttcttattttcactgtctcaccagtgtgtaatgtttgctcattcttatccttatgtttctgttttggggtttgaggcagaggtgcaggggatgaggagaaaaggaggatggc

SEQ ID NO: 328579 - DNA, 526 bp, Homo sapiens
taagattaatgtcatactccatggggaaaactcaagcacttggaacatttgtaaaaaggcaaccctcaggtactcagggtgctcagctttcaaaagagcaataactttgaacagaggccaggcatgcagttccccagcaatgctctagatggttagaaatgacccaggtttcacgatattagctctgacaggcagtcctgaatgtttatgaatccagcctatgtgaggtctttctagaaggtctcaaatggtttcttagaaaggaacagatgtaaaacgtgatcataagggatgtgctcagttatttttaaaacattaattttaattctggagtatttccagagtacatatattatcgaggaaagacttaccctgtctgtgtgtgaagggatcctggccacgactttggttaygttcttattttcactgtctcaccagtgtgtaatgtttgctcattcttatccttatgtttctgttttggggtttgaggcagaggtgcaggggatgaggagaaaaggaggatggc

SEQ ID NO: 328580 - DNA, 543 bp, Homo sapiens
attctaacatcctctgtcattctaaaattaccatgcaaaagtggagattaggaagacactcctatcgccagacactcagggctgagccaggcggagcagccatgctgggaaatctcagaagccggggtcggaagccaagggacttactcgcagggacaccttctgggcttgatggaagaaccactacttcgacctccaaactgagtacctcttggaatacccagactgcgaattttgaattaggatgaaaggtaacatcagcatcccacggagggcctccagtacattcaaatgcatgggttgggaaggggaagggtaactttttggcatgataccagctggtggggcttccaatgcaaatgctggtgaggttgacccaatgtcctttgatgggcaggagagggagtgggctctttgcgaatttagtaaaaagaggctgtcactttgaagctgccaaaagcagcaagaggccttgttttagaatgcatttttaagygttgttctatttgcagagtgacagctgggacagctgaggaggagagt

SEQ ID NO: 328581 - DNA, 554 bp, Homo sapiens
ccagtgataccccacgtgggtgcttggaaatgggcatgcctgccttccccaaggcaggtgtgcgaggagcatcttagcgtcaaagcatttcctaactcttcaacaggactgtggtcttcattgtaaacttgcctattagagatttgttttgtgtctgtctcattagactttgagtctctcaagcagagaccatttcaaagaaagactccgacttttgcatagtctataaaggcaggaatgtrgacaaagatgtcattttaaaaaatcagtgataaaaatggaaataaaagggtttcatgggtaacttcgatttagctaaaatcatttttgaaactagacaaatcatgtcttactttttctttcttcagtctcaatcagcactttgcaacacaggctgagagatgatgacatgaaaacagctcagaagaggggtgcctgaggaagatcagccaccttgagtttaagtttaacccaagacaggaacatgggattaaagctggcagaagggcaggggccacagcatgttccaagccaggaaggtaggagcagaggca

SEQ ID NO: 328582 - DNA, 558 bp, Homo sapiens
ccatcacctcggttttaagccctgcatgcattaggtatttgtcctaatgctctccctccccttttcccccacccctcaacaggctggggggtgtatgtgatgttcccctctctgtatccatgaattctcattgttcaactcccacttatgagtgagaacatgcggtgtttggttttctgtttttgtgttagtttgctgaaaatgatggtttccagcttcatccatgtgactgcaaaggacatgaactcattcttttttatggctgcatagtattccatggtgtacatgtgccacattttctttatccagtctatcattgatgggcatttgggttggttccaagtctttgctattgtaaacagtgctgcaataaacasacgtggggacattctctttttgaatacttagtgtgctaatagcttttatcatgaagaggtattaaagttaataaaatgtttttgtgcatctactgaaatcatcatactgtttttctcccaaaccataccaagaactcagagttgaactgtgatcacgcttgtcagggcttagatggcatat

SEQ ID NO: 328583 - DNA, 484 bp, Homo sapiens
ctttgcccatttttctaccatcttttatttagttatgatgcagtagtttaaaaaatgtccataacatatattactataatttgataatatttggactcagactctttacttactagacatgttgcaaaaattgtcagtctatcagtctatcatctgttgtttctttgcttttattgrtttttttgttttctttgagaccaagagtcttgcttctgttgcccaggctggagtgcagcggtgcaatcttggctcactgcaaccttcgcctcctgggttcaagcgattctcctgcctcggcctcccgagtagctgggactacaggcacgtgccaccacgcccagctaatttttgtatttttggtagagatggggttttaccatgttagccaggatggtctccatctcttgacctcatgatccacccaccttggcctcccaaagtgctgggattacaggcgtgagccaccgtgcctggccttattgca

SEQ ID NO: 328584 - DNA, 484 bp, Homo sapiens
ctttgcccatttttctaccatcttttatttagttatgatgcagtagtttaaaaaatgtccataacatatattactataatttgataatatttggactcagactctttacttactagacatgttgcaaaaattgtcagtctatcagtctatcatctgttgtttctttgcttttattgatttttttgttttctttgagaccaagagtcttgcttctgttgcccaggctggagtgcagcggtgcaatcttggctcactgcaaccttcgcctcctgggttcaagcgattctcctgcctcggcctcccgagtagctgggactacaggcacgtgccaccacgcccagctaatttttgtatttttggtagagatggggttttaccatgttagccaggatggtctccatctcttgacctcatgatccacccaccttggcctcccaaagtgctgggattacaggcgtgagcyaccgtgcctggccttattgca

SEQ ID NO: 328585 - DNA, 553 bp, Homo sapiens
ttggaataccagggagcatactgcaaaactggatagggaatcacaacagtgacacctgggttctgaaacaaagctatgctcttttcagtgagccttttataataaaaaataactgcttgctgctgatagtcctctagagatcagaaacatgagcacaggacatgagtaaacagtagcctctgatctgtactgctcatcatgaccttggtgytatctgatgcatcaactcataaaacttggaatgcccaacagtttctctttaccaagtagaagtaatatatgcaagattcggcttgagaaggtcataaaaacacaagaattttacatgagcagatggatccatttcccaatgtgcctgccacataagccatatttcctaaatccacacatagggccttagagaaaattctctatggctggggagaaaatcattcaagccttgtttgcagatggcactttattaaatgttggtatgagtggcaagtgtattgctatagtcattatagccccacttgtgagtagccttggatgatattgaaaaacggagaaattc

SEQ ID NO: 328586 - DNA, 553 bp, Homo sapiens
ttggaataccagggagcatactgcaaaactggatagggaatcacaacagtgacacctgggttctgaaacaaagctatgctcttttcagtgagccttttataataaaaaataactgcttgctgctgatagtcctctagagatcagaaacatgagcacaggacatgagtaaacagtagcctctgatctgtactgctcatcatgaccttggtgttatctgatgcatcaactcataaaacttggaatgcccaacagtttctctttaccaagtagaagtaatatatgcaagattsggcttgagaaggtcataaaaacacaagaattttacatgagcagatggatccatttcccaatgtgcctgccacataagccatatttcctaaatccacacatagggccttagagaaaattctctatggctggggagaaaatcattcaagccttgtttgcagatggcactttattaaatgttggtatgagtggcaagtgtattgctatagtcattatagccccacttgtgagtagccttggatgatattgaaaaacggagaaattc

SEQ ID NO: 328587 - DNA, 498 bp, Homo sapiens
tattcagatcatgtcacgcccctacttgaagtccttccaagacttcccattgtacttagaataaacttcaagttcctattgtcacctctaaagtgtggaaataaagaccaacgatatgagaaaagcaaagtctatatagagtttgctatagcaaggaagtcarctctattatttgcattttggcagagcctcaaaggaagccaaggcaagaaaactttacagtaggaaaaagggaaggcttcagatgtgccctgattggctgttggcatggggaagtggcaggcagctaactagaagtaggcattctatgtgattggttagggatgcatatttggctttctctgctaggtcctaagttagaagtagggacacacacacacacacaaagctgacagcttttattaatcaagccctggccattttgtgccaattgttacggaagttactgtttagcctcctggattgtcattagagatagcaatctggcttcctgcaagt

SEQ ID NO: 328588 - DNA, 602 bp, Homo sapiens
gatataaataatttgcaatcacaattttgaggcactaaaagtattcttattttatacattaaatattgtcaagtaataagatagcataaaatcttaggctaaagagaaaaataaatattgttctattgttaagttactgaagttactaaattagaagaatgatgcttaaattgattttgttataaaatttacttttgtacatgcacttggtgaaaaaagcaacactagatttttttttwaaaaaagcactattaatccttttaagtcaatgtttagaaaatacaaacctagtgacatttaaatggcactctggagtctaaaactgtttcaatgtcattttcaatgttgaaatcagcttcagatgaagatgtaacttttaagagtcatttgggtattataatgagaaaaaaacaattaagaaaagctgtataaaatcctctaaaccaaacacataagaggaatggaagaagaggagagactattattgtttttcaacataaaatttgatatcaaagccaaacataattttcttgcaaaatttgatccggaatttacagttatgtgaatttaagcacagacatagttaccaggatgctctttat

SEQ ID NO: 328589 - DNA, 576 bp, Homo sapiens
ttccaccttggaactttctcacactgataatgaggaggaaggagagtataatgaagtaacagaagaggttacagagcaggtttatttgccagccaaagctaaagcggcaaaggagggagaggttcatccctacccttctagacgccctcattattattttgaagaaaaagaccctccagatctttcttttctggaggacactgggcgaaaactagttaccccggtgactgttcaagcagtgccttgagcgaccactcttaggtttattcaggcaggaattcagcaagctagatgagagggtgatttagaggctcagcagttccctattagaatacaccccccagatcaacagggaaatattatagctacatttcagtcttttattttaaattactcaaaaaatttaaayaagctataaatcagtatggaccaggttctccttttctaatgggactgttaaagaatgttgccatttccagtcggatgattcctactgactgggatgctcttactcaagcttgtctaactcctgctcagttcttacaatttaaaacttgatgggcagatgaagcttcc

SEQ ID NO: 328590 - DNA, 656 bp, Homo sapiens
attaatagctcttaataagatcaaaatttgggaaagaataaaaaagcatttagaaggacactctctaaacttgtttttggacattgcaagattaaaagaacaaatatttaaagcatcccaggcacacttgaccttaatgccaggaactggagtgcttgaaggagctgcaggcagattaacagctagtaatcctttgaaatggataaaaacacttggaagctctatgatttcaatgatgattgtgcttttaatctgtgttgtttttctttagtatagtctgcagatgcagatcctgactcctgcgagaagtagctcaccgtgacaaagctgcccttgcttttatygctttgcaaatcaaagaagggggacatgttgggaacagccccccccccccaaaatctggccataaactggccccaaaactggccataaacaaaatctctgcagcaatgtgacatgttcatgatggccataatgcccatgctggaaggttgtgggtttaccagaatgagggcaaggaacacttggcctgcccagggtggaaaaccacttaaaggtgttcttaaaccacaaacaatagcatgagcaatctgtgccttaaggacatactcctcctgcagataactagcccaacacattcctttatttcagcccat

SEQ ID NO: 328591 - DNA, 656 bp, Homo sapiens
attaatagctcttaataagatcaaaatttgggaaagaataaaaaagcatttagaaggacactctctaaacttgtttttggacattgcaagattaaaagaacaaatatttaaagcatcccaggcacacttgaccttaatgccaggaactggagtgcttgaaggagctgcaggcagattaacagctagtaatcctttgaaatggataaaaacacttggaagctctatgatttcaatgatgattgtgcttttaatctgtgttgtttttctttagtatagtctgcagatgcagatcctgactcctgcgagaagtagctcaccgtgacaaagctgcccttgcttttatcgctttgcaaatcaaagaagggggacatgttgggaacagscccccccccccaaaatctggccataaactggccccaaaactggccataaacaaaatctctgcagcaatgtgacatgttcatgatggccataatgcccatgctggaaggttgtgggtttaccagaatgagggcaaggaacacttggcctgcccagggtggaaaaccacttaaaggtgttcttaaaccacaaacaatagcatgagcaatctgtgccttaaggacatactcctcctgcagataactagcccaacacattcctttatttcagcccat

SEQ ID NO: 328592 - DNA, 656 bp, Homo sapiens
attaatagctcttaataagatcaaaatttgggaaagaataaaaaagcatttagaaggacactctctaaacttgtttttggacattgcaagattaaaagaacaaatatttaaagcatcccaggcacacttgaccttaatgccaggaactggagtgcttgaaggagctgcaggcagattaacagctagtaatcctttgaaatggataaaaacacttggaagctctatgatttcaatgatgattgtgcttttaatctgtgttgtttttctttagtatagtctgcagatgcagatcctgactcctgcgagaagtagctcaccgtgacaaagctgcccttgcttttatcgctttgcaaatcaaagaagggggacatgttgggaacagccccccccccccaaaatctggccataaactggccccaaaactggccataaacaaaatctctgcagcaatgtgacatgttcatgatggccataatgcccatgctggaaggttgtgggtttaccagaatgagggcaaggaacacttggcctgcccagggtggaaaaccacttaaagrtgttcttaaaccacaaacaatagcatgagcaatctgtgccttaaggacatactcctcctgcagataactagcccaacacattcctttatttcagcccat

SEQ ID NO: 328593 - DNA, 534 bp, Homo sapiens
aattgcatatcattgtgcatgcatatgcattaaacatawttgcaactggataatcttagacattagagaagcactggtttaaggtaaataataattcatttttaataggaaagaacattggagaatgttaagacagccttagccaccaatgtgccagaaaaaaaaaaaaggaacatactctgttggttgaatgcattaaatttactcaactgtgaggagctaatagaggagcaaggataaacaaggtatgggattccagaaggttgtcaaactggtacgaaaattcaagtttcttaatttctggtctaatacacacagatgggatagagataggaataggaaggggtttatggagggaaataggagaatatggaggggatagggagaggaatatggagggggacagaaaaagggagagagagagacatacagattgcttttagaaaataaagttctccttttgactcattggtctttggttaataatggaaaccttctcagactatataatatagaaaggcctatattatatta

SEQ ID NO: 328594 - DNA, 534 bp, Homo sapiens
aattgcatatcattgtgcatgcatatgcattaaacatatttgcaactggataatcttagacattagagaagcactggtttaaggtaaataataattcatttttaataggaaagaacattggagaatgttaagacagccttagccaccaatgtgccagaaaaaaaaaaaaggaacatactctgttggttgaatgcattaaatttactcaactgtgaggagctaatagaggagcaaggataaacaaggtatgggattccagaaggttgtcaaactggtacgaaaattcaagtttcttaatttctggtctaatacamacagatgggatagagataggaataggaaggggtttatggagggaaataggagaatatggaggggatagggagaggaatatggagggggacagaaaaagggagagagagagacatacagattgcttttagaaaataaagttctccttttgactcattggtctttggttaataatggaaaccttctcagactatataatatagaaaggcctatattatatta

SEQ ID NO: 328595 - DNA, 545 bp, Homo sapiens
gatagagagaaagagaatgaaaggcaagaaagtgcatcaacccttaccttatataaagctaaacttgagatagatcatagacctaaaagtaagaccaaaaataataaaacctctagacaacaatatagtttaaaattaaatatagattcatttcataggacacattaagccyaaaacatcaatgagtaagttaataaattaaacttcatcaaaatttttaaaattcttcttttcaaatgttccattcagaaaataaaaacacaagccatagactgcgtttgcaagcttcattcctgataaaggactgctaatcagaattcagtcaaaaaaacaaataacccaataataaaattgacaaaagatttaaacagacatttcactaactaacatgcccataatgaatacaagaaagatgaaaatctctttcactaaccttgagtcactaatgaggaaccctcattagtcatgggtgaaatgtaaattaaaatcataatgtagtaccactgcacacatattacaatggctaaaatcatcaacactgacaa

SEQ ID NO: 328596 - DNA, 547 bp, Homo sapiens
taattccatcttataagttatctgattttcaatttaaaagttctttagtcaaggttacaagattagcataacctcaaatcaagaacatgtttctgggcacggcactgcttcactagtcagtagctcaacgaacctatcaatattggtgtaattgcatgaggcaccagcttcatttacccaaactgaagagtacatcatatgcttttcctcatgaattttatgttgtttgtaaaaatttccaagggactatgtctagggagtgaataataaaaagtggtgaataagtatataattataacaggtttgatttgctttttaatgcttaatttacattagtaaatattcatgttaagtaagtaatatctgctttgttaatgaagtgagcatctccatttttacctgataaataygatttgttaacacgtttaattctcactcaaatgtgtgaaacttgttttgttttaccctcattgtacagattaggggtccaacattattaacttgcccaagattctgtgtattataacaggaatcaaatatttctgac

SEQ ID NO: 328597 - DNA, 611 bp, Homo sapiens
gattacatgtagccatgtaaatgtacttcaacaatttactcacaagagatatgcatcctctgagctaaatgtaatatattaaaaatgttaagtatgcttcactagatcttttgacggctctgcatatggaatagtatgtcaatgtcctgctatacatgtgtgccagacatagataggctcagaagttactatatccattcacatgctgagtgacttatgatattgtcacaatggcatttataaacaatctaacaccactaatgatttctgttggcatgyggtctctttagaaatctacgtatcctctctttggtttacctcagcaaatttatctagttttattaaagaatttttctaccccccggaactattttattataactagtcattctaggttgtatcaaagtactgataaatagtgttcaaaactctattggtagttgcctgtccattagccattactctaagtccatttgctatctagaaatgtcaagtggaccgtgggaaaatgtctacaccattacaattgcattaaaatgaaattgaaaactaccaaccgtacatcttctctggcagtcataatgctttaccacagcaaatcactgcattta

SEQ ID NO: 328598 - DNA, 611 bp, Homo sapiens
gattacatgtagccatgtaaatgtacttcaacaatttactcacaagagatatgcatcctctgagctaaatgtaatatattaaaaatgttaagtatgcttcactagatcttttgacggctctgcatatggaatagtatgtcaatgtcctgctatacatgtgtgccagacatagataggctcagaagttactatatccattcacatgctgagtgacttatgatattgtcacaatggcatttataaacaatctaacaccactaatgatttctgttggcatgtggtctctttagaaatctacgtatcctctctttggtttacctcagcaaatttatctagttttattaaagaatttttctaccccccggaactattttattataactagtcattctaggttgtatcaaagtactgataaatagtgttcaaaactctattggtagttgcctgtccattagccattaytctaagtccatttgctatctagaaatgtcaagtggaccgtgggaaaatgtctacaccattacaattgcattaaaatgaaattgaaaactaccaaccgtacatcttctctggcagtcataatgctttaccacagcaaatcactgcattta

SEQ ID NO: 328599 - DNA, 375 bp, Homo sapiens
gcaattacttttgtaccaacttaataaatttaccttccaccctgctactttcctgcaacaagtttgccataaaatggcaatgttcaatcagtaccaggacagtattgagggagagtagaacatacaaaaagctcaataggacacttgacaatatgtcaagagagttacctattatatgctaatagaaattgagttctcagagataaaatgtgatttctaaatgccacctggctttccatctgacacattcatgccatctgcttctgatgaaaattgaaagattgcttgctagtgctggtcaaatattatcatgtcaatcaaattcrctttctcctatcttcaattgccttggaaatacaaattcttcccatcttc

SEQ ID NO: 328600 - DNA, 675 bp, Homo sapiens
aacaaatatttaaataaaatgtaaaatttattctacattgcaattaccttattggcttattggatgattttataaatctgaaatamaatgtaaaattgtagacatattattttcctctgtattgaaacatttgatatttaatcaccctaggaattatttattttttacttgacaattatttcaactatgccaaacaatactaaaatgctaaaatagataaatgataatattgtctagaagatgacataatgttaaaataaatcatcaattttcattaaccttaacaatttaaattacgttttcttatattttacatcaactttcaagaaggcatataaaattctggagatattatttgtagtgctaatttttttcaggtattgttatgtacaggtaaatatctaaaatttttattttcttccataacagcaaagagaagaaatttgaaataggaagacatattattgttattggacgaattagaagataggatatatagagtaggctaatctctactgacaatgctgtaattcatcatataagcacaatctcaaggtatgagtatatgatactatctcagttgaactttttaaaatgaacactacttaatatttctaacaaaagaaaacccacattcacttagttattcaataggaaaaacttcacattactttc

SEQ ID NO: 328601 - DNA, 562 bp, Homo sapiens
caaccttccaaccttccaacctgaaggttgccttccaaccttcaggaagcttgatggaaagcttactgaagccctcaccagaagccaagcagactccaacgtcatgattcctctacagcctacagaatcatgagccaattaaatctcttttcttataaattacccagtctcaggtatttctttatagcaatgcaagttgacaaacaaaattagccattaggcagggttttgtctttcttcctttattctataggtatttctccaggttacacatttccttgtgtagtatgagtagttattcttaataatcattttgctcttcttttacaactatataaatggatgaaggattcacatatatatgagtaaaatccattgttcatayggatagaaaacaatctttatggggtaggcagattggtgtctccccaaatatgacaatcttagagcatgttgatatgtggctttaaatggcagaagggacttggcatccagtgtggtttgaatgtgtccctcaaagttcatgtggaagaaacttaatccccagtgcaacagtgttgag

SEQ ID NO: 328602 - DNA, 562 bp, Homo sapiens
caaccttccaaccttccaacctgaaggttgccttccaaccttcaggaagcttgatggaaagcttactgaagccctcaccagaagccaagcagactccaacgtcatgattcctctacagcctacagaatcatgagccaattaaatctcttttcttataaattacccagtctcaggtatttctttatagcaatgcaagttgacaaacaaaattagccattaggcagggttttgtctttcttcctttattctataggtatttctccaggttacacatttccttgtgtagtatgagtagttattcttaataatcattttgctcttcttttacaactatataaatggatgaaggattcacatatatatgagtaaaatccattgttcatacggatakaaaacaatctttatggggtaggcagattggtgtctccccaaatatgacaatcttagagcatgttgatatgtggctttaaatggcagaagggacttggcatccagtgtggtttgaatgtgtccctcaaagttcatgtggaagaaacttaatccccagtgcaacagtgttgag

SEQ ID NO: 328603 - DNA, 611 bp, Homo sapiens
cattggactccaacttgtgagagctacttggtggactaagccygacaaagccatagtggtagagcttccagaggttttgggggcctaataccacctcagtgtgctgagaatgggtgacataaaataagaggaaattactctccagcatgaagatttaatgttgtttcccctgttgcgttttaaacttagttggagcctacactctttttttttttggcctattttccgcctttagaatggcaatgtttatgctatgcctgtctcgttgtggcattttgggaacagataatttgtttaattttacaggttcacagctggagaggtatttgcctcaggatgaatcacatcttgagtttcacccatatctgattcagataagactttagacttttgggttagtgttgggatgagtgaagactttgtggctcttgggatggaatgaatgtattttgcatgtgagaagggcgtgaattttgggggtcctaggcaaaatgttataatttaattgtgtcccccaaagttcatgtgttgagaatttatctccaatgataacagtatcaagagatggaactttaagaggtgattatgagagctctggactacgctgttat

SEQ ID NO: 328604 - DNA, 620 bp, Homo sapiens
atctagtatatgaaggtaatttccacaaatcatataacttcatgttctgtagtaaatgagactttactggcatgagaagggaaggcatatccagggtaaaacaagtggaagaaaataataacacaattcttgttccttaacaataacccaccacagtttaatgtctgatttaatgattccttaaacaatayttctaatgtgcattacatatggtccattcattgtcttacacaattctgcatgcttctcagatagttttcccaaacgcagctgttgtcctttaaattcttctaagcacagtcttttagtgaagtcctcgtaaattctaccaggaaacaaattggtaacattttatgtttatatacattttgtaaatgtatgttgtttaaataatgtgggcataattcatcattaattaatgttagaacgtgaaatttctttggtactcatatccaagctgttcctccaaagatacatctacctgattatttcaagtatttaaagcttgaggagaatcaataatgagttgtgcaatgaaaagtacacaacaaattcttcaataagaatctgcaatcactttgaagataaataactgaggaaagtgtcttgataaacagatt

SEQ ID NO: 328605 - DNA, 620 bp, Homo sapiens
atctagtatatgaaggtaatttccacaaatcatataacttcatgttctgtagtaaatgagactttactggcatgagaagggaaggcatatccagggtaaaacaagtggaagaaaataataacacaattcttgttccttaacaataacccaccacagtttaatgtctgatttaatgattccttaaacaatacttctaatgtgcattacatatggtccattcattgtcttacacaattctgcatgcttytcagatagttttcccaaacgcagctgttgtcctttaaattcttctaagcacagtcttttagtgaagtcctcgtaaattctaccaggaaacaaattggtaacattttatgtttatatacattttgtaaatgtatgttgtttaaataatgtgggcataattcatcattaattaatgttagaacgtgaaatttctttggtactcatatccaagctgttcctccaaagatacatctacctgattatttcaagtatttaaagcttgaggagaatcaataatgagttgtgcaatgaaaagtacacaacaaattcttcaataagaatctgcaatcactttgaagataaataactgaggaaagtgtcttgataaacagatt

SEQ ID NO: 328606 - DNA, 620 bp, Homo sapiens
atctagtatatgaaggtaatttccacaaatcatataacttcatgttctgtagtaaatgagactttactggcatgagaagggaaggcatatccagggtaaaacaagtggaagaaaataataacacaattcttgttccttaacaataacccaccacagtttaatgtctgatttaatgattccttaaacaatacttctaatgtgcattacatatggtccattcattgtcttacacaattctgcatgcttctcagatagttttcccaaacgcagctgttgtcctttaaattcttctaagcacagtcttttagtgaagtcctcgtaarttctaccaggaaacaaattggtaacattttatgtttatatacattttgtaaatgtatgttgtttaaataatgtgggcataattcatcattaattaatgttagaacgtgaaatttctttggtactcatatccaagctgttcctccaaagatacatctacctgattatttcaagtatttaaagcttgaggagaatcaataatgagttgtgcaatgaaaagtacacaacaaattcttcaataagaatctgcaatcactttgaagataaataactgaggaaagtgtcttgataaacagatt

SEQ ID NO: 328607 - DNA, 554 bp, Homo sapiens
atgctctacctctgagactggtattaggccccagctttgatttttggctcttccagtttaggaacctactgcactggaggcactgaggtgctcctggattgctagtcacaactctctgatgagtgttgccagccaaagccctttttagggcagtagcagcaggatccattctcatttkcatatgccagcagcagcagcagtagcagtgtggtggggtgcatgctcattggctgtggcagtgtgctattgggtgccagggtgctggcctctgtgaagatgttcacagcaatggcaatggcaacagggattgggaaggtgggggccccctgctagcaactgtagcatgtttgcactggttgtgatgttagctaggggtggagcactggtgggtgcaggattttgtgccccctctgtgtgtgtacatgtggacagcagcaatgctcagggtggaggtgggtctgctgttttctgtgaatagttttgcacaagtggcagtgtaagtacagacttggggtgctggggagatggggctggcagctttgtgccagtaatac

SEQ ID NO: 328608 - DNA, 598 bp, Homo sapiens
acaccggggcctgttgatgtatgggggagggrgggatagcattaggagatatacctaatgtaaatgacgagttaatgggtgcagcacaccaacatggcacatgtatacatatgtaacaaacctgcatgttgtgcacatgtaccctagaacttaaagtataataataaaaaaaagaaaacgtgtctacaaaaaaaccaacacacacacacacacaaaaaaaaaaaagaaaaaaaaaaagaaagaaagataataggtctccaatagggaaatgtctagtagagccaaggaggcagggccactccagaaaccccagactggtggagacacagatgtgcaattctagcctgggggagccacaggcacctgattactccctgtgaaagcttgggtgtgagctgtgcccagtgaagctatgggtgtaaggttttccagagtcttggggtgccaacagcttccccaggatgtccagaaggcaaagtatcaaagtttcaagtcaagccttaatgttttggacctgcccagaatctctaatccttctttctatcctgattctcgcttttggaatgggaatgtctatcctatgcttgtctccgtattg

SEQ ID NO: 328609 - DNA, 598 bp, Homo sapiens
acaccggggcctgttgatgtatgggggagggagggatagcattaggagatatacctaatgtaaatgacgagttaatgggtgcagcacaccaacatggcacatgtatacatatgtaacaaacctgcatgttgtgcacatgtaccctagaacttaaagtataataataaaaaaaagaaaacgtgtctacaaaaaaaccaacacacacacacacamaaaaaaaaaaaagaaaaaaaaaaagaaagaaagataataggtctccaatagggaaatgtctagtagagccaaggaggcagggccactccagaaaccccagactggtggagacacagatgtgcaattctagcctgggggagccacaggcacctgattactccctgtgaaagcttgggtgtgagctgtgcccagtgaagctatgggtgtaaggttttccagagtcttggggtgccaacagcttccccaggatgtccagaaggcaaagtatcaaagtttcaagtcaagccttaatgttttggacctgcccagaatctctaatccttctttctatcctgattctcgcttttggaatgggaatgtctatcctatgcttgtctccgtattg

SEQ ID NO: 328610 - DNA, 598 bp, Homo sapiens
acaccggggcctgttgatgtatgggggagggagggatagcattaggagatatacctaatgtaaatgacgagttaatgggtgcagcacaccaacatggcacatgtatacatatgtaacaaacctgcatgttgtgcacatgtaccctagaacttaaagtataataataaaaaaaagaaaacgtgtctacaaaaaaaccaacacacacacacacacaaaaaaaaaaaagaaaaaaaaaaagaaagaaagataataggtctccaatagggaaatgtctartagagccaaggaggcagggccactccagaaaccccagactggtggagacacagatgtgcaattctagcctgggggagccacaggcacctgattactccctgtgaaagcttgggtgtgagctgtgcccagtgaagctatgggtgtaaggttttccagagtcttggggtgccaacagcttccccaggatgtccagaaggcaaagtatcaaagtttcaagtcaagccttaatgttttggacctgcccagaatctctaatccttctttctatcctgattctcgcttttggaatgggaatgtctatcctatgcttgtctccgtattg

SEQ ID NO: 328611 - DNA, 595 bp, Homo sapiens
gctactcacactcacgatcatattctagaccttgtcattgctaccacctcctatctttccagagtactgtctttagtacagcaccactccaaacttaaaccagagtgtggcaggagaatgtggctggagagaaataggtcaccaaagtgaatggtctcatattaaatgcagtggccaaaagcctccagtggactcttcacgctacaaggcactcatagtgtgcagtttttgttttcattttattttattttattttatttagagacagggatcttrctatgttgcccagggtggtctcaagctcctggcctaaagggatcctcctgcctcagcctcctgagtagctgggattacaagtgccagttactgtacccagccatagtgtatgttcttcatccattctctctccgacaacctagatgattattttgtagctcctcttctcatcaaacaccaaatacttcctccctatacttacttccagctaatgtcctcctctatgtttactaaaacaattgaaggaagcagaggagattctcataaaaccatgtattagttttctagtggtatgtaacaaatcactacaaatgtagtg

SEQ ID NO: 328612 - DNA, 505 bp, Homo sapiens
ctccattttaattattttcttctgggaggaaagagtatttcttgacacctcttttgatttcatayaaaataatcatgtgttattacttgattagtcctctgtataaaaataaacaagaaaatgaagcttatttttacagtaacattacttacactttgacacatcgtagaaaatttattttgttccggagtctccattaatgcaacaatcaaatccttaaggtcagttgcattattttttcttccataaataattatgacatttattttgtataactcaacacttggaccaaaacttaatatccaaatgtgaaataaagagtgatatatataatatatatgtatatataagtgatatatatatgtatatacacacatatgtgtatatacacacactcacatatgtatatatagagagataagatacatatatatatagagagaagatatatacattcttagatgtgtttctattgtatcttctctttactccattttctttgcct

SEQ ID NO: 328613 - DNA, 612 bp, Homo sapiens
aaagcatggatcaccatagatattatggaataaggatttatatattacaaaattatggaagatctagaaaagtaaaggtctggaaagggggttagaaamgttagacagagctcagtaactagccctggtataggtgatagaattggggttttcagggacactagaagctgtattctctacctgctggaaaataattctgacagtagcatggtattaaagtatgtggcagaatgttggttctttgtgactactgctttcctgaatttgcaaatagatgtgtctttgagctaatggtaaatgttatatcagcaggatgagcacttagaaaaaagagcacgtagaaatgcaggaaagagcagaagcaaagtagtttcaactaggccatctctatcagcctttcatttttctctaaccaacaaaaacctttagagaaaaatgattgcttctttactgctgcctccaaaatcttgcatactttcacttttgaccaactctcttctagaatgggattctgggaacatagattttaataacctaattaatattaaaatagtccaatacacgtggtattagaaaagtcagagatgtgcagccctaaaaaacagtaagatc

SEQ ID NO: 328614 - DNA, 552 bp, Homo sapiens
ctgaaaaacttatatacttaagggttctcttactgctcttaaattattgactccagactttctcgtccttcaaagtcttggatggatattcaaaccttgactaaagtcacctgataaggtgagtttcctttcgcttgaatttatacaaaaggctgtcgtgtctgctgatagttctgaaattcctgctgcttattttaataatgtcttaactttagcgttgccagaagtctgactatttaaagctctcttctcatcacctaattcttttcagacgccaccattcaatgtcaataccctcagatgcctcaaatctttcctgaccatccacattcataataaatgcaccaaactaaggctaactgaactctgattttacagcttgcttttttgatttctggagcaaaacatttccaaatactcattctttytctatgtaaatctaaatattatcatttaaaattacctatttacttactaggtaaaaaaagagcatattaaaaaaaagcatgaaaacagaagaaagtaaaaatggaataaaatgaaagaaaaaaa

SEQ ID NO: 328615 - DNA, 620 bp, Homo sapiens
atgttgaaaaggaagaagtcaaatgatccctgttttcagataatatgatcttatatttgaaaaaaaatctaatgactgcacaagaaaactataaaaattcagtaaagtggcaggatacaaaataaacatacccaaatcaggacatttctatatgtcaacagtgaacagtacaaaaaagaaattttaaaagcaatcctatttacaacagccacacagaaaattaaataamcaaagaagtgaaagatctctataataaatcaaataattaaaaaatatttataatacattacaacaaagaagtgaaagatgtctataatagaaaccataaaacacttttgaagagaacaccaaaaaactagaaaaaaattcaatgttcatggattagaagaatcaatattattaaaatgcccatactgcccaaagcaatctacagattcagtgtaatccctatcaaaataccaatgacattctttacagaaatagagaaaactatgctaacatttatgtggaaccacaaagcaccaagaatagctaaagctatcccaagcaaaaagaacaaaactggagaaattacattacattacctgacttcaaattatactacaaagctttagtaacca

SEQ ID NO: 328616 - DNA, 568 bp, Homo sapiens
cttgaaatcaaggtgacagatggggttgcaatctcatctgaacctgagccttatctttcaaatgtattcaggtttctctgcagaattcggttccttgaaattgtaagactaaggcacttatgtccctgctggctattggctgaagtcactctcagctcatagaggccaccagagtcctttatcatcacatggttctctgacaacatggaagtttactggttcaaggttagcaagagaatacctcttttgtctgcagcagcacagtcctatatcaggtaatgtaatcataggagtcactatctcattaygtacccttatattcacagatccccgccatgctccatgaagccatctaagaattctcctaccacacataagcagtagaggagacggtggcaattatgaaatcaagtgcctttttccaaatttactgctgctactaagccccagccaattgttgctacatgagaatcaataccaagttttccaaattttcaagtgatgctgaaaatccaaagttgtatactgtgttttccaatatttaaaatagtgccaagcattcagctgt

SEQ ID NO: 328617 - DNA, 623 bp, Homo sapiens
cataaattatcccacaggtctatcaaaagaagaaagataaacacacagaaagatagttggcttaatccattttgtgctgttataacaggataccacagcctagttaccttttatgaatagaaatgtattcactcatgattctggaggctgggaagtccaagctctggaaagggccttcttgtgtcatcccatggcagaagagcaaaaagaggggaagagagaggcaaaagggggatgaacttacacctttataaggaagccactccttttataatagcattaatawacttatgagggcagagccctcatggcctatcatctcttaaagatcccatttcttagtactgtttgaatggtaattaaattcagcatgaatttggaaggagacaaacattcaaaccatagcaatagtatacaatttaatacttctcagcaataaaaagtaacgaactgctggtgcatgcaacagcacaaatgaaatccaaaaacatgttgagtgaaagaagaactcagattcaaaattaatcgataatgacagacattaaaaaattgtcttctctggaagaggcagtagatttcactaaaaaagaatatgaggaaactttttagttggataaaaatat

SEQ ID NO: 328618 - DNA, 525 bp, Homo sapiens
gcacctggtcagttaaacagaccacacattatttaagactatgagaataaaggtgtattatgtttgctttccattattcttaagaaggttaatggtactcagccatctgtatttactaattgtctcttatcaaagcttgggtcttcccctcccatagagagacaagratcttatctttcttgatgattacatttcaaaagatgactctcaactccttgaaaaagatatttcagagttgtagatgatttacatctcaaagaggcataaaaagaatttgcaattccaagttttctaaagtaagtgttttaagaaaagggagtagagacctatagtcagaaagaagcgtgactaaagtttagtcaaactcaggggaagttaagaccatcttggtaaatactatgagtactcttattgaaggtacagtcaccctttgctatgactactgaaatgtctttgtaaatcgttttcctttttttctgttttgcctttcttttttactacagataaataaaattagattttttc

SEQ ID NO: 328619 - DNA, 525 bp, Homo sapiens
gcacctggtcagttaaacagaccacacattatttaagactatgagaataaaggtgtattatgtttgctttccattattcttaagaaggttaatggtactcagccatctgtatttactaattgtctcttatcaaagcttgggtcttcccctcccatagagagacaaggatcttatctttcttgatgattacatttcaaaagatgactctyaactccttgaaaaagatatttcagagttgtagatgatttacatctcaaagaggcataaaaagaatttgcaattccaagttttctaaagtaagtgttttaagaaaagggagtagagacctatagtcagaaagaagcgtgactaaagtttagtcaaactcaggggaagttaagaccatcttggtaaatactatgagtactcttattgaaggtacagtcaccctttgctatgactactgaaatgtctttgtaaatcgttttcctttttttctgttttgcctttcttttttactacagataaataaaattagattttttc

SEQ ID NO: 328620 - DNA, 525 bp, Homo sapiens
gcacctggtcagttaaacagaccacacattatttaagactatgagaataaaggtgtattatgtttgctttccattattcttaagaaggttaatggtactcagccatctgtatttactaattgtctcttatcaaagcttgggtcttcccctcccatagagagacaaggatcttatctttcttgatgattacatttcaaaagatgactctcaactccttgaaaaagatatttcagagttgtagatgatttacatctcaaagaggcataaaaagaatttrcaattccaagttttctaaagtaagtgttttaagaaaagggagtagagacctatagtcagaaagaagcgtgactaaagtttagtcaaactcaggggaagttaagaccatcttggtaaatactatgagtactcttattgaaggtacagtcaccctttgctatgactactgaaatgtctttgtaaatcgttttcctttttttctgttttgcctttcttttttactacagataaataaaattagattttttc

SEQ ID NO: 328621 - DNA, 525 bp, Homo sapiens
gcacctggtcagttaaacagaccacacattatttaagactatgagaataaaggtgtattatgtttgctttccattattcttaagaaggttaatggtactcagccatctgtatttactaattgtctcttatcaaagcttgggtcttcccctcccatagagagacaaggatcttatctttcttgatgattacatttcaaaagatgactctcaactccttgaaaaagatatttcagagttgtagatgatttacatctcaaagaggcataaaaagaatttgcaattccaagttttctaaagtaagtgttttaagaaaagggagtagagacctatagtcagaaagaagcgtgactaaagtttagtcaaactcaggggaagttaagaccatcttggtaaatactatgagtactcttattgaaggtacagtcaccctttgctrtgactactgaaatgtctttgtaaatcgttttcctttttttctgttttgcctttcttttttactacagataaataaaattagattttttc

SEQ ID NO: 328622 - DNA, 546 bp, Homo sapiens
ttgaacacatgacaaagatgtgcattagcatcatatttagtgtagacatgtagaaattaaaaattagaaaaagtaaatgccatatggaatcaaaagatgaataaagaattccactgctgtaattgtaagtaaaagttcactattgttgtctatgtcctcaaaataaaaaagaaaaataaaaagcgtgctctgaatatttaatatatttttgtaactctgcacagtctttgctaaactggggttcacaaatattgatggatcttttataaatgtatgttaaatcctttacctctgcatttgaaaaataataatttataagaaagatactttatcatactatcytttttgtttcttttataaaattattatttttcaaatctcaaggtctggtataatagaacatactgatgaagactatattccacttttatctttccaagttaaagtttccttttcagttcttatctaaaactctgaacatgactgcatgtttcttatatgtattgatttctttccttgtttttcttatattttaaaattatttgt

SEQ ID NO: 328623 - DNA, 546 bp, Homo sapiens
ttgaacacatgacaaagatgtgcattagcatcatatttagtgtagacatgtagaaattaaaaattagaaaaagtaaatgccatatggaatcaaaagatgaataaagaattccactgctgtaattgtaagtaaaagttcactattgttgtctatgtcctcaaaataaaaaagaaaaataaaaagcgtgctctgaatatttaatatatttttgtaactctgcacagtctttgctaaactggggttcacaaatattgatggatcttttataaatgtatgttaaatcctttacctctgcatttgaaaaataataatttataagaaagatactttatcatactatcctttttgtttcttttataaaattattatttttcaaatctcaaggtctggtataatagaacatactgatgaagactatattscacttttatctttccaagttaaagtttccttttcagttcttatctaaaactctgaacatgactgcatgtttcttatatgtattgatttctttccttgtttttcttatattttaaaattatttgt

SEQ ID NO: 328624 - DNA, 595 bp, Homo sapiens
gggtttttgtttgtttgtttgtttttgtttttcctaatgagcgaactggaatagctgggagcagttttaattgctttcttccctgcttggttggttgactgaaacccaattcacctatggtgctgagcaaattaagttgagacgccaaacattctttaatattagcaaaggaaagaatacaaagagtatggaggatgggaatgctggagtgattttaacatatgtgacatgtacattcttttctgaaatttataartttttgcaagtcattgcatttcttctttataaaatgagttaataaagttacttttctcctgggtctattgtgagaattaaatagtatatattgtatatgtctatataaataatatatgtggattacatatgtataaatatattgtaaattataatatttctaactattagcaatagtcatgctaatgcacataataaaaatgatgaaaagccccaagagaaaaagtggacaactttttatcaggaccttaagaaatatattggggaaggttacgtcaacatcatattgagaaatattttaggccaaggatttcaataagcatgaaagagaatcctaagg

SEQ ID NO: 328625 - DNA, 612 bp, Homo sapiens
gcagtaagttttagagagtattaaaatgaagattactgacatatatcatggtgctcatttcactagattatatcatgtttatcctctgaaatagcattattagtgtttttaatgacactttaacagaaagatgccatttgataaaattcacctaatatccatagaaggcacaatgctcattcagcactcaaaaatcattattccagctactataattaccatactgtaacagagttttctctggaaattggtataagttaaataactggaccattctctccagtgcttacctgttttcaatctgataaagaaaatcaatagccaggttagtaagcaaatatttggcaagcaatgcatttctaataatgaaactgataattatacttctttcatagagctgtaattgaatgaatttaattgcctcttcygtttaactttaatgctaggtttcaaattgttgtatggacaggaaagtaacattagaaaaattactctactgttgctttcttttctatacagtggtttgaactcaagcaataaagttaaatgaaaaaggctctatactcaattttcaattatagtaaaggcagggagccacaattatccctttca

SEQ ID NO: 328626 - DNA, 553 bp, Homo sapiens
ctgtaattgaatgaatttaattgcctcttctgtttaactttaatgctaggtttcaaattgttgtatggacaggaaagtaacattagaaaaattactctactgttgctttcttttctatacagtggtttgaactcaagcaataaagttaaatgaaaaaggctctatactcaattttcaattatagtaaaggcagggagccacaattatccctktcattaccatgatgcttttcattgctgcctaggaaacttcctccctgttgttgtttgatgctgctgtgcttctcaaaatgaagagcacttgaaaatggaaggttaaaagtaaggaaccaaatcaaagggaaaatgtgaaaatgtaaaaattgacattatcaagatgaaatggtgaagaaaaatatgtgaattgataaattgactttcagaaactctatgggggatggagaaactttgaaagatttaaccaatctttatttcaaattttgtgattataatttagctatttaaaattttaaaatcgtcaagcaatatttgttaatttcaattagaatattttc

SEQ ID NO: 328627 - DNA, 556 bp, Homo sapiens
caaaaggaatccttaagccctaaacataatatccacttttccaacagcaagataaagttttgaaccttctcgttaaagccatttcctgaaagttatacataccctgccttatcttaccatccaaccacagctgttagagaggtcaggacagacaatccctgttgaagtgggaaggtaatgcactcagctaaaaataattgctctattattaaagaagaatggagagtgtaaacaactagatgatataggagttaagaaggaattacttaggcagacagcaagggcatgggaatacttggtaaggcctttctttttaatgaaaaatagctccaaatcattttttagcaaagagcagcctgcaagctgggagcttgcaygagtgaatgctggcaggaaccaaggactagacgttttcaagatggcggctccatcttcccttctctttgttagccaagtgtacagtaagaagcagacaagatggcaccaatcaactggaaagtccacttgcataataagattagggcgggacaaccagccttccccaagcactatgtag

SEQ ID NO: 328628 - DNA, 556 bp, Homo sapiens
caaaaggaatccttaagccctaaacataatatccacttttccaacagcaagataaagttttgaaccttctcgttaaagccatttcctgaaagttatacataccctgccttatcttaccatccaaccacagctgttagagaggtcaggacagacaatccctgttgaagtgggaaggtaatgcactcagctaaaaataattgctctattattaaagaagaatggagagtgtaaacaactagatgatataggagttaagaaggaattacttaggcagacagcaagggcatgggaatacttggtaaggcctttctttttaatgaaaaatagctccaaatcattttttagcaaagagcagcctgcaagctgggagcttgcacgagtgaatgctggcaggaaccaaggactagacgttttcaagatggcggctccatcttcccttctctttgttagccaagtgtacagtaagaagcagacaagatggcaccaatcaactggaaagtccacttgcataataagattagggcrggacaaccagccttccccaagcactatgtag

SEQ ID NO: 328629 - DNA, 545 bp, Homo sapiens
tagtataatactattttccttgcttaaaatacatattaatttatgtaaaaatgtttaccttatatatgaactatgttacaaaacatacatagcagaacttttaaagaattgaactattgataaaataatactttaaagaactccgttctaaaattagtgaatttttaggaaaaaatatatacttagagcaagttatattttaatattttaagtgaatctatatttctaagatacttttaataacttgaaaattatgggtcatatttcctgttggawctgaccagattatgatttactttgtgaattagcagatgataggctaatatagcacatataaaaaatgtcagtcctgctttttcctgtttgttcacttgtgcatatgtacctagaactctttgatccagaatatttttgaaattttttctcttgtccatagtacaaggatttttttagttaaaattagaaatagccatgaatctcaatatattaaaagtaaatagaaaagtaagagcatctttgtctgctctccccttatgtacttgtca

SEQ ID NO: 328630 - DNA, 553 bp, Homo sapiens
actacaacagaagtcaactttagtgattttctttcctgacaattctagttcctttcttaaaaaaaaaaaagatatgcagctacttttggattgaaaaaggtgctatgtttcagcattaacaatagccattaagttcactgatggttctatctactacccacaatatgtgctayataatagatatttcgtaaactatttcgagtgaatagtgtttaatctctcagatctgcaattctaagtagacatacttcatatatgtgaaataattgggaaattcaagagccagtatacttgagaagagtagaatattatgaacataccagtggctcagtgatcaaactaggaaaaagaaatgatgtagatgttggaagagaatttgtctgtatgttgtcactgtatgttcctgagttttaaaaagaattaaaatggtttaggaaaaataagtaaagcaaaggcacatctatactgcgctaggtaaaatatatgtttagtcttaatttatttgagtcaatttatgtttttaatgctgcttttataaaatgtaagtttacat

SEQ ID NO: 328631 - DNA, 497 bp, Homo sapiens
agatgaaggagccctaattccagtgagggtgtcttcctggcttggacatacggtgccttctttctatctcctcatgtttctatccatttcctctcagtgctctgtttctccatatttattttggagtggtttctggacagtctaatacaccacagtttaatatttttctctttatggcttatctataagcaccttcttccaagaaacagaaattggaatctaggtgttcatttcaacacctaggaattttagttgatctgtcattttccaacatacktctgaattgtctttttaccttacattgtatgtgaacagcctgtatgcaattcggtatcctctagctgcatgttattgttttcttggaatttacagatttttaaattcaaagtcatttagatacaacctattatttttcagcaaatatttatactgccattgttttgctttgtggaaggatgtaattcctatccctgtcaatgttcgatatttttcagcaa

SEQ ID NO: 328632 - DNA, 559 bp, Homo sapiens
tttacatatgcttgggggttgccttgaagtctttttttttcttttttttcttttttttttttttgagatggagtctcgctctgtctgttgcccaggctggagtgcagtggcgcaatctcagctcactgcaagctccgcctcccgggttcacgccatgccattctcctgcctcagcctcctgagtagctgggactacaggygcccgccaccacgcccagctaattttttttttttgtatttttagtggagacggggtttcaccgtgttagccaggatggtctcgatctcctgaccttgtgatcctcccccctcggccttaaaattgctgagattacaggcgtgagccactgtacccggccgccttgaactcttaaaggcctgtgattcaccatgagaacagcccatgtcccacatggtctggcaaaaacactgccactgacctacagatcatgagcaagaaataaaggtttgttgttgaaagacactgaggttttaaagttgctttcaatatagcatcattattgtaaaatagaaacagcaagtctcagagtatgagaga

SEQ ID NO: 328633 - DNA, 559 bp, Homo sapiens
tttacatatgcttgggggttgccttgaagtctttttttttcttttttttcttttttttttttttgagatggagtctcgctctgtctgttgcccaggctggagtgcagtggcgcaatctcagctcactgcaagctccgcctcccgggttcacgccatgccattctcctgcctcagcctcctgagtagctgggactacaggtgcccgccaccacgcccagctaattttttttttttgtatttttagtggagacggggtttcaccgtgttagccaggatggtctcgatctcctgaccttgtgatcctcccccctcggccttaaaattgctgagattacaggcgtgagccactgyacccggccgccttgaactcttaaaggcctgtgattcaccatgagaacagcccatgtcccacatggtctggcaaaaacactgccactgacctacagatcatgagcaagaaataaaggtttgttgttgaaagacactgaggttttaaagttgctttcaatatagcatcattattgtaaaatagaaacagcaagtctcagagtatgagaga

SEQ ID NO: 328634 - DNA, 556 bp, Homo sapiens
tggtaagaccctcaacctaccaayagtttagtcccatatgggtcttcctcagggttgagtgtcttcattacttggtaacaggcccccactgtgagcaatcatgaatgagaagaaggaacagcagcatcaatgccatttatattctactcttgacaatcatacaatatcatttttgccatattatatttacttagagacacaaagtccagcctacattcaagctggactttgtgtccacattttaaaaggaaggataccaaagaatttttggatatactttaaaactaccacaagaggtaacccaatttgatttcatcatcacttaaaaaattaattgaagcaaagtccttggcttacagtttatgcatgttaaattgaaagaggaacagatttaaaaacaattgtagagtttctatgtgatgtttgcctctctagatagttttaagtagatgtactctcataattcaagcaattctcattgtaatattaatatgttaactaacatataagaataatactaagaaagcacaccacatttttttctactgtgtttata

SEQ ID NO: 328635 - DNA, 592 bp, Homo sapiens
aatatgaaaacttctcctttcagctcaattctacagtcaatgtccatcatcagttgttaataccrgaatccctttttatctccataacaacaataaaaagagaacctttctgtgggattccctgttgcatgcacaggtgctcatgtggccaggtgtgcacaacaggaaggagttaagatgaagccatcagaacgataacaatcatgccttgatgagtttttgttattttaagacacacctgctccaagtcagcaggatttctgaggaaaataagaaatgcgttggatgtatcccaaggcacataaaagattgaattcaattctgtctagctgatgtttagaaatttacagcagtgctgactgggctaaatgcctttcttgcaaaattccagaagacacagtgttttatttgtaagagaaaattacatagaagatcctttgttaaaagtgcacaacctcctccctgccatcacccatctttcctcccacttgatttgaggtgttggacatttccaaagtagaaatatgatgggaagataaaccgttatttgtaatgaaaaactagtgtcagttcacaattttaggattgatga

SEQ ID NO: 328636 - DNA, 496 bp, Homo sapiens
tcaattaaataaatagatttaaattatttgtcaataaaaattttaatgtatttagataaatcacaatcattacagataattaagaatttgtgtaggtgagaattgaaatgaaacttggtagattatttggatattgataggcaactttttttgctagagctaaaaataaaatttggaaattctggaactgaagataattaaaawtatgtaataatatatagcagagatatgaacattttccttcaaagaaatgtattttgtgatgaaaatagattgattataacaaaaatggttgcacatattaaaaactaacaaaaaggaataattgaaaagaaacatacatatgattggtaaaacaaaacagagttgtatagtatagtctttgaaacaaaactaatgcctatttcaaatggaaagctattgaattttcttataaatctgataaattacatgaattatttattgtttgatgacaaaataatacaatataatttta

SEQ ID NO: 328637 - DNA, 542 bp, Homo sapiens
ataaatctgtgttgttttaagccactaaatatgtggtaatttatcacagcwgcaatagaaaattactgtgctacctaagagacaaaaatgttctgcatcatttcttttcatatatacattttatctgctataaccccacatttcttgtattttagtcacaaattacgtatcatttcctaaaaaaccttccttaatccatatttctctcctgtagactccttatctcctaatctatctaacatcttaaataatcactagcatagaggacgatctgaataacatgatttatgaggcagttatatgatgagtctctgtttccttaacttgactgtgagtctgagagagcagatgccacatctttacaccctacttgcttatgttcagagccagcacagtgccttgcacttcgtaggcacttaggagatagttgttaaataggtgagtgagggattgagtgaaggcatttgtccactgccttctgtgtaatattaaagtaaaaagtttgatatatatgatttatctgactattcacaaaatggcat

SEQ ID NO: 328638 - DNA, 665 bp, Homo sapiens
ctaaaataggatgatacagagcagactcaccaaattcactcagtttcttcatttcctgtgaagaagaaatgccttcaagctaaatatttgtagccatagtttataattcagtatatgtgatcatttctactactatcatctgagtaacatgctgaccaagagctatggtgtttatcctaaatctataaatgccaactccagttaattcattttttattataaataaatacattatctagataactcttatgtaaatacataaaacatgaaaaggtaaatgaaaacaactataattttaattaaaaactagattgaatgttttagaaatatttagtaaaagccaattgctaaaaagaaaattaaaatttgagcttaaaaatgcttgcaaaattgcaaaaccatataatgctatacataattggaaaatataaaaatgtcaaatttttaaaattaaattttttttttatattttacattcttattctactttatgagaatcaaattcaaattatgggtwtgatttataaaggactttactctgcgcctcaacatcaaacacttgactccatttcaaaagattatcaaataaatgctaacttatatgttaattgaaagaaaatgaagcatatatgaatcacttgtttttaaagttttagtcttacttg

SEQ ID NO: 328639 - DNA, 537 bp, Homo sapiens
ggtttctattaatgcaaaattaagttgaagagtcaagctggcactagcaatgatgtattcaaattayatagtgcagatgagtcagttctgatattacattaattagttttaaaaatatctgaaaccaacttgaatcttggagttacagcatgagcaaaggtcaactgggtcttatagtgaacatcggttaccaatttttacacagcgatatattttcctctaataaacctacatgcctcagttttctcatccatgaaatagcatgaacataattcacagggatatttgaatcttaaatcagctaatacatataaagggctcagaacatacattagtgcacaataggcactatatgtgctagatgattgttatttccatgctggaacacaacacacaaaatgtaccttcacagatattcacatcagattgtcaacagagaaaaaaatagtgactgaacaacttgacttcttatgcctccagatatactgaactcaagatcccacttcataggtatgtacatgtgacaaaaatatgtgc

SEQ ID NO: 328640 - DNA, 507 bp, Homo sapiens
gccaggctaaccttaagcaattacttttttacaatctttgaacattattaatcctgaaatgattttccttttcacattggccacgagaagcttaaactcaattttatgtcttttctctagcaatcattgagactcaactctacgtcttctctctagcaatcatatgatacgcatttgtagccaaataatattttggatgtctttgttcattctccattcgagccmtactagaagccttcatttcctacctctgggaagcattgttataataaaaaaattttttaaaaagccgaggttcagtttataagcttcagaataggttcgtggcagagggaatagatgagaaaatacattttaagtctcacatccaggcacgtcaacatcatatgccacaaccctaaagggattatggcagaaagtgcatgctagaaataataaatatggaataactggtgaagcttcacactaccctgttctggccatgaactggaggatgggaatgtgggc

SEQ ID NO: 328641 - DNA, 556 bp, Homo sapiens
gtcctgggctgaaagctgtccagggctggggagggaaggagctttaaaatggacccagattgaagcttaagatgaactgaggttttaataatcataattgaccagaaagttataaaatctgtctaaggtgccattaagagatctgctatgcaccaagggagactggatttagcaccgtgtggaggtcagattgctaataagcccgttctatcactgtgagagactaagtccttcactatcagaaaaactttccatcaccagtggactctgctggaccgtccaccccttaggtggtgttgctgacatgggctcagagggctgggctcctggggcacagagcccggaggggcttgccagagaagagactctgagctggggacattggaaggaattaacagtcagagggtaccagcccagtccatgttgagggagacgaaggggaaaggtgcttctagcacaaaggcctggaggcaggatgggctttggtgtgttccagaaactgtggtttyacctagggcaatgatttcctggctttggagttcacagaccgtaagaa

SEQ ID NO: 328642 - DNA, 573 bp, Homo sapiens
ccctctccaatgggaagatttcccttcactgctgaatttcagggctacccttgcagcaggctactgggagatagtggtacatttttgggttcaaccggaatatggagttgacttatctgtgaagtaggcccaaggttttccttctccatcagctggtgatagagaactccctacaaccaggagctgaaggaaacacattggtgcaacataagtaggtgacatgagatctgggtcacctgtttgtgtcctttaggcctgctagggactgatcttgaatatgctgttttcattaaatggtggaattctccagtgtccacacaacttatgacttggcaggtctaaacatacccagaccatgatggacagctctggtctcattgttccttgatatcccatggtcaggtgattagtccctactacagcccaatagcatgcctaaacctgccttttgaatggtgaggtgttttttttttttttttttttttttttctgtagatagttcagtcttgctctaraatcctagggttttgttctgtaactcccctgcttaatctcaccaagactcctcaaaac

SEQ ID NO: 328643 - DNA, 557 bp, Homo sapiens
gtcaggatttaatttttaatccttggaggaactctgtgaggtagatgctgctaccttcctttaacagatgagaaacctgagacctggagagggctggatgcttgccctttgccttctagtgggcatgcacccaatctgtctgattcccaaatgcccacccctcaccaacaggcagggatgccaccctccttgctaagccttgctaaattcagttattgtacttccttgcacaggctcttgatccattcctatggtgggtgacataatggcccttccgaagatgtccgtgtcctaattcctggagcctgtgaatacactggctgcatggcaagggtggagattaaggttgcagatggaatgaaggttccagctcaccttaaaatagagattatcttgggttatccgagtggacccagygtaatcacaaggtttctttaaatgtgaaggagagaggcaggagaagatctaccctgctggctttgaagttggaagggtgccacaagccacaagtgaaggaatgtgggcagcctctagaagctgaaaaaggcaagaaagtg

SEQ ID NO: 328644 - DNA, 618 bp, Homo sapiens
ctgccaggtcttaaggtaccaaatatgaagccactaccttaaagatgggatgttcaaggtttaacgatttcttctttatcttggaagaaataccacagtatgccccataccactggacctttaaaaacttttctgatgtggcaggcctctgagtctttgtagggcttatctccaacccctgatgcacacatcttaccaggacttctgagttcttgccatttcctgctcatttgaattgttattatgatgctrtcagtataataggcccgtctgatgttctgtggaatgttgagaaaaagatggttcctttgaactgtatggtgacagagagcagaagagttaaataggtctgggcaaaaccattcatatgtacagttatgtatggcaagtgaatgcaaacttgttctgatcttcctcgagagagactgaaaaaaatgtattcatcacattgtaaaccacatactaagtgctggaggctgtgcacatctatgctactgaagatgtctggcaaaaagacttgcagttgaggctactgcttggttaagtttatggtagtccattgttatctgccaggagtcatctaattttgctgatggcttatatggggatatgatgggg

SEQ ID NO: 328645 - DNA, 415 bp, Homo sapiens
gtgaggccacagccactgctgcaggatgtagcggtttaaatgtttgagaccttgggtgcttccccagggcctccagccctgtccccatcccaaacaatgggatctgttgagccagatggctcccaggcaacaggaagccctgggtccaagccccaaacatagagccttggaggagatgccccagtgacctctagctggagagcacaaaggggccgatttttcctggctatggggctggagygggaaaaagcagcgctgtggctttgactctagagaaacgtgactggcctagtgttccagcctttgccctgcagctctctgttccatctgctgacttcatgggattgtccttcgagtccagctggaccatggtgcaaggcaggggagacagggccttttcttcccctccctgtgg

SEQ ID NO: 328646 - DNA, 434 bp, Homo sapiens
ctacattagtcaagacgatgggcaaattgatcaatggaacagaggggagaatgtagaaatagacctacacaaatttagtcatcagatctttaacaaaggagcaatggcaacacaatggagaaaagatagtctttgcaaaggagtgcaaattaaaataataggatactacttactacctattacattggagattatttttaatatggaagttaggacaacatgccttgatsacaattttataaaacataccacaacttttaaaatatccatcaattccactttaattattggtgatttgcacaatgtaaaataacaagaggtgaataaaattaaactaatagatatgttcactgcagcaataataacaataataggaaattctaaaacaaccacaatatccaataatgaaaagacaattcaatttagtacaatgt

SEQ ID NO: 328647 - DNA, 539 bp, Homo sapiens
agacgatgggcaaattgatcaatggaacagaggggagaatgtagaaatagacctacacaaatttagtcatcagatctttaacaaaggagcaatggcaacacaatggagaaaagatagtctttgcaaaggagtgcaaattaaaataataggatactacttactacctattacattggagattatttttaatatggaagttaggacaacatgccttgatcacaattttataaaacataccacaacttttaaaatatccatcaattccactttaattattggtgatttgcacaatgtaaaataacaagaggtgaataaaattaaactaatagatatgttcactgcagcaataataacaataataggaaattctaaaacaaccacaatatccaataatgaaaagacaattcaatttagtacaatgtatacggtcattgaaaatgatgttataagtatttaataatctgagaaagtatttataatctggacaargctatattgcattgttgcttttgtgtaaatcctgtaggattttctacaaa

SEQ ID NO: 328648 - DNA, 552 bp, Homo sapiens
ctcaagagagacggaaaagttagcccatgaacttcaagcttgtggtaattaatagagtagctaatattggactaacacctatgcccataaaaattattaactgtagacaacatatatattttttaaaacctgttttaggaacttgggggtggccaaagcaaggagaaactagagaggatatgatctcatgaaggagagtatattggcttactatagcaggtagagcagtttggtaaactgggtatcttagttcaggctgccatagcaaagtgccctagactgggtggctacaaataactgaaatttatttcttgctgttctgggggctggaagtctgagatcagggtgccagcagggttgggttctggtgaggccctkcttccagattataaagtgccaacttctagttgtatccacacgtggcagaaaagggcatgagaggcctctaagatctccttaataagggctctaatcccagtcatcccagtcatgaggatccaccctcatgacctaattacctcccaaaggtcccactttctaatttcatcacac

SEQ ID NO: 328649 - DNA, 354 bp, Homo sapiens
agagcagtttggtaaactgggtatcttagttcaggctgccatagcaaagtgccctagactgggtggctacaaataactgaaatttatttcttgctgttctgggggctggaagtctgagatcagggtgccagcagggttgggttctggtgaggccctgcttccagattataaagtgccaacttctagttgtatccacacgtggcagaaaagggcatgagaggcctctaagatctccttaataagggctctaatcccagtcatcccagtcatgaggatycaccctcatgacctaattacctcccaaaggtcccactttctaatttcatcacactgggagttaagatttcaacatat

SEQ ID NO: 328650 - DNA, 593 bp, Homo sapiens
tgagtgaataaatgagtgggtgagtgaataaatgaatgagtgaatgaatgagagagtgaataaaagagtcagcaagtaagtaaatgaatgagtgagtgagtgaatgaattagtgactgaaagagtgaacaaatgagttagtgagtgaatgagtctgtgagcgagtgaatgaatgagtgaataaaagttagcaagtaagtgaatgaataaataaatgaattagtgagtgaatgaataaatgagttagtgagtgaaggaataagtgaataaatgagtgaatgaatgaatgagtgaataaatgttagtgagtgagtgaattaatgaataaattcatgaatgaatrcatgagtgagtgaataagtaaaggaataaatgagtggaagaatgcatgagtgagtgaacacatgaatgacagagtgagtaaaagactctgaggctcctggccagcccctcacatcaatcacatatgccggctggagatatcaggcaagagctagaaacttcacaattattacccgtataaaaatgtcctaccttacacttgtacaacagcaatttatgccttccccaagctctgtcacacacaccctttgg

SEQ ID NO: 328651 - DNA, 593 bp, Homo sapiens
tgagtgaataaatgagtgggtgagtgaataaatgaatgagtgaatgaatgagagagtgaataaaagagtcagcaagtaagtaaatgaatgagtgagtgagtgaatgaattagtgactgaaagagtgaacaaatgagttagtgagtgaatgagtctgtgagcgagtgaatgaatgagtgaataaaagttagcaagtaagtgaatgaataaataaatgaattagtgagtgaatgaataaatgagttagtgagtgaaggaataagtgaataaatgagtgaatgaatgaatgagtgaataaatgttagtgagtgagtgaattaatgaataaattcatgaatgaatgcatgagtgagtgaataagtraaggaataaatgagtggaagaatgcatgagtgagtgaacacatgaatgacagagtgagtaaaagactctgaggctcctggccagcccctcacatcaatcacatatgccggctggagatatcaggcaagagctagaaacttcacaattattacccgtataaaaatgtcctaccttacacttgtacaacagcaatttatgccttccccaagctctgtcacacacaccctttgg

SEQ ID NO: 328652 - DNA, 592 bp, Homo sapiens
ggattgtgagcggggaagaaaagagggacaagggggaccatgatgggacagcgtcttcagggagctagtggaggacgaggaccaggtgattgagaagacctctcacccttgtcgtccagccactccacacatctcccaggggctggggtcccaggccatgtgggactaccaacatttgcttcctctgcagtccctccaggtctgcacagctctccttgtctttccagagggtgctcagtcatccttcagcaayctccgaagctctcccctaagtgggagcaattgtctcctctgtgctcccctggatcccctgtgacctccatcgctgcatctgtaacactttacagaatgtgctggtttccatggctgtttcctccaccagcctgtgagctctgtgcccagccttgcacagagtaggtgctcaatgagtgtgttctggatgagtggatggattgtccaaaaggaaggagaaagaagcaaaaaaggatgtgcccacagagagagagagaaaggaaagaattttcagtcacaggaaccacatgcgccaaagaataaagtcagatgaaagctgagaagcattcgtttcagttgg

SEQ ID NO: 328653 - DNA, 578 bp, Homo sapiens
tttcaggaaccagaatgtctggaatttagaagacctttgagatttaagatcagagcaaagggtttggaaacaggctgtggaagacaaggggatggcagttgggatgagggacagatatttgatgaacatgtattttatgcagtcactttgtctattattacttctcatgccaccatagaaccataagcctcatgatgctaacattaaggtkggcatgttgaaacagcgttgcttgtgagtgaagacccataacacagagaatgcctggattcacagaaaatcatgctgctaggaacagaatggtgtccccccagaattctgggcccctggtgtgatggtatttggagacggagttttggggaaagaattagatttagatgaggtcatgtggttggggctcatgatggaattagtgactttataagaagagacaccacagagcctgctgcttttttctctaccgtgtgaagacacagtgagagggggactgtctgcaagtcaggaagagaggtttcaccagaaactgaccatgttggcaccctgatctcagacttccagcctccagaaatgtgagaaaa

SEQ ID NO: 328654 - DNA, 578 bp, Homo sapiens
tttcaggaaccagaatgtctggaatttagaagacctttgagatttaagatcagagcaaagggtttggaaacaggctgtggaagacaaggggatggcagttgggatgagggacagatatttgatgaacatgtattttatgcagtcactttgtctattattacttctcatgccaccatagaaccataagcctcatgatgctaacattaaggttggcatgttgaaacagygttgcttgtgagtgaagacccataacacagagaatgcctggattcacagaaaatcatgctgctaggaacagaatggtgtccccccagaattctgggcccctggtgtgatggtatttggagacggagttttggggaaagaattagatttagatgaggtcatgtggttggggctcatgatggaattagtgactttataagaagagacaccacagagcctgctgcttttttctctaccgtgtgaagacacagtgagagggggactgtctgcaagtcaggaagagaggtttcaccagaaactgaccatgttggcaccctgatctcagacttccagcctccagaaatgtgagaaaa

SEQ ID NO: 328655 - DNA, 578 bp, Homo sapiens
tttcaggaaccagaatgtctggaatttagaagacctttgagatttaagatcagagcaaagggtttggaaacaggctgtggaagacaaggggatggcagttgggatgagggacagatatttgatgaacatgtattttatgcagtcactttgtctattattacttctcatgccaccatagaaccataagcctcatgatgctaacattaaggttggcatgttgaaacagcgttgcttgtgagtgaagacccataacacagagaatgmctggattcacagaaaatcatgctgctaggaacagaatggtgtccccccagaattctgggcccctggtgtgatggtatttggagacggagttttggggaaagaattagatttagatgaggtcatgtggttggggctcatgatggaattagtgactttataagaagagacaccacagagcctgctgcttttttctctaccgtgtgaagacacagtgagagggggactgtctgcaagtcaggaagagaggtttcaccagaaactgaccatgttggcaccctgatctcagacttccagcctccagaaatgtgagaaaa

SEQ ID NO: 328656 - DNA, 618 bp, Homo sapiens
atttatggtttcaggtcttttatctctccagccatcagggaaaaaataactttggcagyagtaaaagtagactggccactcttatctctgtcagacttgggggaaacgttgtcagattgcctggctcacatgacagggatatttttcttctagtcttgatcctgttccctggcaagttggatgtgatttgtcttaacactcagcttcccctgccaggacatgcacagcatgtttggacacatggtcttttaaaaatgttattttgaacgttattcttattcatcttggggctgattgttttgggggtctggagcattagatttggctgctagtctgcttgagcctcactggggtcctctgggggatgggcgactcacttctctgtgggatgaatcccccagagacagttggatccattgaaagaaaaatttcctaacaaacccagttatgcatagaacctgtggtgttgtatggttgtggaatacatctgggggaaattttacctatacctcttctcgactgtgctacctctagcatgattgactcttgttgtcagcccatcttgagtttacagcacccaaagggtataagatctgaatcaggtagaaagagagtgtg

SEQ ID NO: 328657 - DNA, 618 bp, Homo sapiens
atttatggtttcaggtcttttatctctccagccatcagggaaaaaataactttggcagcagtaaaagtagactggccactcttatctctgtcagacttgggggaaacgttgtcagattgcctggctcacatgacagggatatttttcttctagtcttgatcctgttccctggcaagttggatgtgatttgtcttaacactcagcttcccctgccaggacatgcacagcatgtttggacacatggtcttttaaaaatgttattttgaacgttattcttattcatcttggggctgattgttttgggggtctggagcattagatttggctgctagtctgcttgagcctcactggggtcctctgggggatgggcgactcacttctctgtgggatgaatcccmcagagacagttggatccattgaaagaaaaatttcctaacaaacccagttatgcatagaacctgtggtgttgtatggttgtggaatacatctgggggaaattttacctatacctcttctcgactgtgctacctctagcatgattgactcttgttgtcagcccatcttgagtttacagcacccaaagggtataagatctgaatcaggtagaaagagagtgtg

SEQ ID NO: 328658 - DNA, 618 bp, Homo sapiens
atttatggtttcaggtcttttatctctccagccatcagggaaaaaataactttggcagcagtaaaagtagactggccactcttatctctgtcagacttgggggaaacgttgtcagattgcctggctcacatgacagggatatttttcttctagtcttgatcctgttccctggcaagttggatgtgatttgtcttaacactcagcttcccctgccaggacatgcacagcatgtttggacacatggtcttttaaaaatgttattttgaacgttattcttattcatcttggggctgattgttttgggggtctggagcattagatttggctgctagtctgcttgagcctcactggggtcctctgggggatgggcgactcacttctctgtgggatgaatcccccagagacagttggatccattgaaagaaaaatttcctaacaaacccagttatgcatagaacctgtggygttgtatggttgtggaatacatctgggggaaattttacctatacctcttctcgactgtgctacctctagcatgattgactcttgttgtcagcccatcttgagtttacagcacccaaagggtataagatctgaatcaggtagaaagagagtgtg

SEQ ID NO: 328659 - DNA, 508 bp, Homo sapiens
ttccactatgtagctgaactgcagcccaagtagagagagtcaaactgttctttgcacagtcttggttcagaccagcctcagcgtttggacattatcatgtaagcaggtctggaagtgtggagggtgaaggggcagctgctgtgtgctcaagatgacctcttgcagyctctgtgtagctgggattggccatgggcaatgcagaaggtcatttgatctcttagaacctcaattgcctcacctgcaaagggaagctgaaaagaatcactcctagtctggttgaaaagaataaccaggaagtgcctgagatgtcataggcactcatcagtgttagcttcctgatcctttcccttcctcttgggtcctgatctggagtggtacatttgagtaagagccctccatgggtacattattctcacttcttcatctttatctcctacagctcccaaagctcaaggactttttttttcccctgcagttgtcctctctctctctcctgcatcattaattt

SEQ ID NO: 328660 - DNA, 551 bp, Homo sapiens
agaatcagaagaagactggggaagagctgagagtgtaaattataagggtgttagaccaatggggataaagtataatattcaagccaaattaattgacctgagtgtactcccccaggatttagaatatagcatgttggctggagtactggggatggtcctaacagtctgaaaaagttagccaatgaaatcctggactcaatgatagtttggagttaatgaggttgaaatgccagaaatttcctaacatattatagacaaagagttacaaaattcaaggaaataggactcggtccattatgttcaatcttctcagccatttactaacttgactcttttgggaggattcaaaaaactctcctttcactaagacataaggaaatgcactagtgagtcagggactagcatcctcaaggagcactgtaggtcacagctgttgctggacaaggctgcagtgaaaatgtgtgctttcatttcmgtgggaataatggggtcctggcatgtcaaaggccaagtagtaacttcactgttagggacaacatggtgcaactacc

SEQ ID NO: 328661 - DNA, 572 bp, Homo sapiens
catgagtgctcatcaaggcagaccaacatgtgcaaggggaaaaaattttaaggcctcatctgttatatggtcaagaagacaatcatattaggccttcccaaaaatgttcaagtgacagaataaatggctataaggccaacatattaattactgagcttttaagaaatggtcactgtaactaggaagcagaatataggcccagtagaaatacacacatgcatgcacattgaaataagacaagaaagatacctaaataacargctggtgctacaaaaatgaagaaaaatactagcaccaaatggaacaaacacattttgaagtgatagattctcatggtatgtctacccaaagaccaaacagcactcctgcagaccccctttgctctccttcaggattctattaatgaagcattttacagcataaaaaagtcaaccataccagctgattcaaagtatcccaaggcctcctgagcaggcccgtggaacataagtcttcctgaggccaataaggtgaggctatcaaacaacttgaagatggaatatcgaggctgatgaatggagaagatgattgtt

SEQ ID NO: 328662 - DNA, 509 bp, Homo sapiens
attcttcaaagaagtcaatttagctggttattttggggctgttatttttattaacaatattgagtttctgttgagtactaaaagatggcacattgttggctctagtaaaatattactgacgtttaaacttgtgcatcataatttctatacttaagtatatataaaatatatctaagagcttgtatccctagttaagccatactgctaattatgtatatatrtgtatatatgtatagccacatatatgtatgtatagccatactgctagttaagtatatatataaatttatctaagagcttgtatccctagttgaaccatattgctaatttctccaaatgtttttggtacgtataatttggtgtttctgtcagaacactggcacttttatatactatcaattaaaggcaaaattttattctttgagcatagatttgatatcatttggaaatcagtctggtaggatcaacctgggttacttattgtcaacagtgaaataatgtaatgaatt

SEQ ID NO: 328663 - DNA, 561 bp, Homo sapiens
actacagacatttgctatgttattcatcctttgtgtatgccatgtttccaatmctccatatataacaacccttgtgaaaaattcctcacagagttctctacagaaaaatgttgtttctcctgatgtattgatagtaatgattagaaaattagtctgtaaatgctctgtctacagatctaatttttgtgtttaattattatgattattcttgttttttttttctttttttgtggagacagggtcttgccatgttgcccaggcttgtcttgaactcctggaatcaagcaatctacctgccttggcctcacaaaatgctgggattacaggtgtgagccactgtacccagcctgatatgattattgattattcttaaccctgcatttactgatatcatttcctcctctcctgttctctttataattaatctttttatttatctcatgtcatcttttatcaactcctttaatgaaagctattaactaactttcaataggcagataataaatacagtaatgaaaccaaagagaatgctttttttttttttttttttttgtgacaggg

SEQ ID NO: 328664 - DNA, 561 bp, Homo sapiens
actacagacatttgctatgttattcatcctttgtgtatgccatgtttccaatcctccatatataacaacccttgtgaaaaattcctcacagagttctctacagaaaaatgttgtttctcctgatgtattgatagtaatgattagaaaattagtctgtaaatgctctgtctacagatctaatttttgtgtttaattattatgattattctygttttttttttctttttttgtggagacagggtcttgccatgttgcccaggcttgtcttgaactcctggaatcaagcaatctacctgccttggcctcacaaaatgctgggattacaggtgtgagccactgtacccagcctgatatgattattgattattcttaaccctgcatttactgatatcatttcctcctctcctgttctctttataattaatctttttatttatctcatgtcatcttttatcaactcctttaatgaaagctattaactaactttcaataggcagataataaatacagtaatgaaaccaaagagaatgctttttttttttttttttttttgtgacaggg

SEQ ID NO: 328665 - DNA, 561 bp, Homo sapiens
actacagacatttgctatgttattcatcctttgtgtatgccatgtttccaatcctccatatataacaacccttgtgaaaaattcctcacagagttctctacagaaaaatgttgtttctcctgatgtattgatagtaatgattagaaaattagtctgtaaatgctctgtctacagatctaatttttgtgtttaattattatgattattcttgktttttttttctttttttgtggagacagggtcttgccatgttgcccaggcttgtcttgaactcctggaatcaagcaatctacctgccttggcctcacaaaatgctgggattacaggtgtgagccactgtacccagcctgatatgattattgattattcttaaccctgcatttactgatatcatttcctcctctcctgttctctttataattaatctttttatttatctcatgtcatcttttatcaactcctttaatgaaagctattaactaactttcaataggcagataataaatacagtaatgaaaccaaagagaatgctttttttttttttttttttttgtgacaggg

SEQ ID NO: 328666 - DNA, 561 bp, Homo sapiens
actacagacatttgctatgttattcatcctttgtgtatgccatgtttccaatcctccatatataacaacccttgtgaaaaattcctcacagagttctctacagaaaaatgttgtttctcctgatgtattgatagtaatgattagaaaattagtctgtaaatgctctgtctacagatctaatttttgtgtttaattattatgattattcttgttttttttttctttttttgtggagacagggtcttgccatgttgcccaggcttgtcttgaactcctggaatcaagcaatctacctgccttggcctcacaaaatgctgggattacaggtgtgagccactgtacccagcctgatatgattattgattattcttaaccctgyatttactgatatcatttcctcctctcctgttctctttataattaatctttttatttatctcatgtcatcttttatcaactcctttaatgaaagctattaactaactttcaataggcagataataaatacagtaatgaaaccaaagagaatgctttttttttttttttttttttgtgacaggg

SEQ ID NO: 328667 - DNA, 477 bp, Homo sapiens
ttgtttgtctggaaaagtatttctttttcatacttgaaggacatttttgccagatatactattctagtgtaagagtttttttacataagcacttcaaatatgttatgccactctctcctggcctgtacagtttccactgaaaagtctgctgccagacttattggcacttcattgtatgttacttgtttcttttctcttgctgctttttgaatctttcctttatttttgatctttgggagtttgattattaaatgccttgagatgttcttctttgggttaaatctgattggtgttatataatcttatatttggttatcaataactttctgtgggttttggaagttctgtgttattcctttggataaaytttctatccctatctctttctctagctcctttttaaggccaataactcttaggtttgcccctttaaggctaatttctagatcttctaggcatactttatatttttttatt

SEQ ID NO: 328668 - DNA, 626 bp, Homo sapiens
ctcttcagtgcctctgtcagcaatatgaagttaaaaccaggcactgtgagtgctcacctgatttttcattcttaggaaggtgctttattttatattatttctttcatgactgccttgcctgaagaaagatgctttttatgtatagatagttattaaatttggtgttcctctctggggacaatcagtggagccttctattcacccatattgctctgccctctctctctgatttttttttttgttttttaaaaaatggggtttcactctgttgtccatgctaaagtgctgtggcattatcacagctcactgcagcttcaacctccggagctcaagcacacctcagcctcccaagtagcagggaccacaggtttgcaccaccatgcctggctagttttttaaatgtttgacattttttatacagatggrgtctcatgttggccaggctggtcccaaactcctgggctaaagcaatctttccacctcagcttcccaaagtgctgatattacaggcatgagccaatgcacctggccagggttttgtaaatatgaggatcattttttcatttggtaagactccctctttcctcatggtagtatttgcactttaagtatcccggaagagaaag

SEQ ID NO: 328669 - DNA, 605 bp, Homo sapiens
ccataacactgttcattgtctctcagaataaatgagtaagcatcttctcatattctatactggttgaacaatgagaataactgggaaattctggtgagtgcaaagtagtactgagtacttccattttcagagaagagaggcaattgtgtactcaggaccatttgaattggccacagctacctttgcactctggasagaaagtggaagataagaagggaagtgtagattcaccacacctgacgatgctgatggacagcccaatgtacagtgaagcttttcatctagtcagtaccaacagctgcgctgtgcaatctgggcctaaggtgggtatatcggatgatttttcatttggtggttgtttcaatgatctgcagtttgtaaatgacaaatggggcattaaagattaaatagtctaaccctatacactggtaatgtaatagctgaataaaatgaaattttaaaaagtggatttgcatggttaagaagcagttaatggagcacttagtcccccagataaatgaatttataagaaaattattgctacaatttcagggggctaaagaaaaccctgaaatgcatccatagccactggagtaagagctaga

SEQ ID NO: 328670 - DNA, 533 bp, Homo sapiens
ctcatgcatatcccacagagccatttaatgagaaggggcagagaagagggacactctttggacagtgcaaacccatactaactcatgtaattgagcttaacagcaagaataaaatcttatttctgtagtctaaaaaaaaaatactattttaaatgagcaagttcttcctgcagtcactcacttttaacaatagtggcatcaggggatctagtaggaaggaaacatttttattaatttttctcttrtctgccagaagaatgttgattttttttcatttacatttgttgcctgcaggtagcagaccagagaatcatatggtagaaattcttctttttgattaatttctttccatgtgttatgttatttcttatatataattgattttgggcttttgctcatagctgtacctcttttttatatctgtaccaactgctgtccttcaatcaagaaagttgaaggaaattacctgaatttcgttaagtttattaaaaacgagatctgtgaatatttaaattgagttttgaaatgttaat

SEQ ID NO: 328671 - DNA, 603 bp, Homo sapiens
gagacaaactttattcacaagatatgagactggtggcagggtgggcaggaaaggcttctcatataatatcctagattccagctacccatgcatttttcttacttcctttgttataattctatcttacccacatttgcaactgaaagcagcaagaatattaccttgcatttagccaaggcacttaatatttaccaaaataaggatttttcaattgaagttaattataataaagttggagaccaaatcaaagtgagagaatactgggcaaattttwaaaaaatctagacacagtgtcaaattattattatttttactatcgttggagaaagtttatcccactaaacagtgtgaaatccatggtcctttcctggttattcaatgtactctcaccctgctagaagtcatcttgaagatgtgagataagacaagcagcaatttttttttccccaaagtgagaaatgctaccacaacaaaaacatcaaaagcatgaatgtaggacgttagatttttttaaaagcacttatgagtaagaaaggaaaggatctgaacctaaacacagaactccttatatatattatgtggcataaatgaattaatcaaaat

SEQ ID NO: 328672 - DNA, 624 bp, Homo sapiens
ctgtgcctggccaggaatcacgctagacgctgcacgctgagtcatcctaactttaccatttcatctctaaggaggagaaataaccggcaaccaagacaaagctgaaggagatcataaaaatcctaaagtccattaatcctctgctttagagccaggctatatctctgttaaaaatgtatatgttaagtgcacctaggagttgggagttctagctggaggaaaagtgtggaacataggacaaacaacatgctaatgactgaaaaaaaaaagactcaactttcttctccttaaaataattactttataaaatgatttttaaaaaatctacttcatgttttccgtaagatttttggagcccttctttcaaataaacaaaacataagaaaagaagcactacaataaaaatctacatttctacatttgataatgcagaaaaattgaattagtgatgctgatgacaaattatgacaaacagcatgagaatgcaraaaataataacaacagatcgaaaagatgagaggtagtaaagaaaaaccagggaagacggattatagagctggacccactaataatatataatcctacatttctgtttacatttaactaaatagaaaatggtgaatt

SEQ ID NO: 328673 - DNA, 572 bp, Homo sapiens
gaggatgtaactatggtcttaggacagtcactccagctatactaatcagagtcttaactcatgaaaaataatgacagacttttaggaattaagaaaaaacattaaattacaattgttctgaacaagattcagtagatattattattaatttttttataaacagttggaaaaatgtttaatgtcagatgtacacaaaataatatttagtatatgatatagagaccatattraataatatgtaacatatatgtattataagataattctgtaatgtttaatttgaaagtagaaggtcataatgggtgggaataacaattcctgttttcacatgatatttttcaggataaatagtaatattactattgataggaaaagaatttcattattttactcttgcagaatgtgtgaccagggaattcccactgaagtcagttggaactggtagaaaagaaagacaactctttgatagatttttcatcccttgaggtcatgcaaggagtgctatccattcttcacttaagttgatgagctacaatggaaagagaatattttctctctggaaaattagaaac

SEQ ID NO: 328674 - DNA, 585 bp, Homo sapiens
tagaatcttcctctgatgggaatgatattagatacagtgagactttttgaagggaaggtaggggaagggataataaaaattatttaaatataagctttgaaatataaattttagaaacatagtttaaaatagaatgtcggactgggtgcagtggctcatacctgtaatcccagcactttgggaggctgcagcaggaggatcacttgaggccaggagtttgagactagcctgggcaatacagtgagacactcatatccacaaaacataaaaataattaggtgggcatggtggcttgggcctgttattctagctacttgaggctgaggcaggaggattgcttgagcccaggagttcaaggttacagtgaactgattgcattgttgcactccagctttggcaagactctgactcaaaagaaaaaaaaaatagaattccttgaatgccttgttttcccacacttgcttatgtatctcrccctttcatgtgctcgttgagagaaataatgaggaataaaattatcaagagataataccgatgaaaagttgtcttatttcatgtggaaatttcccttatgcatcaaatctt

SEQ ID NO: 328675 - DNA, 559 bp, Homo sapiens
  misc_feature (1)...(559): n = A,T,C or G
ctgatcttgatgacatgatctataccttattcatctttatgatttcagtgttnttcatatagcagatattgaaatgaatataaattaaattctgttccattctgttttctacatccaaatttatcatttcatatgagattattttgttttagtcatctttctttttttatttgcattctttctttaagaaaagattaaataattagaaagtttaaactattctttcctctccaaatttttttattaatgtgatatatattgcataccccttacctagttttataagttgctcaaartaggtgcaaaatgtaatttattttgagctgttaaatgtgtatacttaactactattgtagtgcttctttaaatactcggcaatacttattttcagtatctctaattatttgtaatgaatgaaacaaattggagcaaatcattcaatgaatctaggttatcaatattgagtattgctaccaagttgaaatctaagttctacagttctgatttggcagttaagtgacatttaatgaaagttttttaatcatatgaaactacttgt

SEQ ID NO: 328676 - DNA, 514 bp, Homo sapiens
atgcggtgacacagtggcagtggtggcctctgttctccctactgtggactcaactacagtgccctttagaaatgtactgctatattataccttcatgggaaagtcatgaatatactctcaatggcatcagaaccaaatgcatcaattcagattaacttatgaatattacaggtagttcttaaggttcttaaggtgttagtatcattatgatattaaaacacttgaaatagaagaaaatgagttttccaatggaaaataatgtttcaaactaaawtacataatggacccggacagatcgagtcttccttaagagagaaaatggcttccaacattggaagacaattagagatctgagaggcctggtttgttcacatagaatctcttttcctccaattcttttactttgggccagttacttaacctttcttttatttttttgagatggagtctcgctctgtcacccaggctggagtgcagtggtgcgatctcggctcaccacaacctccgcctcttg

SEQ ID NO: 328677 - DNA, 597 bp, Homo sapiens
atcttctaaggctgttacatttttttttcccaaaaaggaagataatcttatctcttctacagatgactgcatattttattgccatccttttcaaattgagaaatctgcatttacctcttagcgtctacacttaaatgcttgaagaatctagcccaaccaacatattgtaagtgaactcttgaatgagctgatagccatgaattttgtgaggaatgcacatgccagaattaggaaagtacaaaatccccgcctccccgctaggctgtcttctctgttccctttgtttcttctgagggcttcgcagttttgcagaacagccttcttatctctctttccttttctccttgggacttgccttccacagacctcttcagacattcttgcagaattgttcccataagatctctattttcaattggctktataccttccagttttatggcccatccagaacagctcagttcactttctgaagaagaaatgagaaagtgcaaaatgttaccaaatctttcctcctgtgttttcaaaaaaccacatttgatgctttctattttatatgcttttacagaaattctctttaaaaatcaaatatatgct

SEQ ID NO: 328678 - DNA, 563 bp, Homo sapiens
ctacttaagatacattcttactatattaataccattcacttaacagacccattggtggttgctcaactgaacatttgggagggacttgtgtccctccgaaattcctatgtggaagccctaattcccactatgacagtatttgaatatagggcctttacagaagtaattatggttagattattagctcataaatttaggagcctratccaataggattagagtccttataagaggaggaagagaaagcagagctcccgtctttccgtgtgcacaaacagaaaaggccacgtgtgcacacagctagaaggtggccatctgcaagccaggaagggagcccccaccaccaaccagaccatgctggcacctgatcttgggcatccagcctccagaactgcgagaaaataaatttcagttgtttaagccacacagtccaaggaattttgttatagaagctcaagcagattaatacagtggagcaaaacaaatagagaaaattaagggaagcaatatagccccaattttttttttagaaatattcttacactgaaagtatgatgtgacag

SEQ ID NO: 328679 - DNA, 612 bp, Homo sapiens
aataaatatttatcttgcatttattgtaataattgttaaaagcacttgggagaagttcaaggtgtaacatcatgctgtctgtattctcatttttttgatgtcatttccctcctgtgggcttctttaattattcatgtaccatatttgagtcactgatgcaataattaagcatctcatagaatggagagtagagtatggtttaaactacagaaygaagtgtacagattttagattctggcatgttaagttcagaagttcaggccaagcttcagtttccttatctttaaaatgggaataataatagcttgaaatactgtgatttggatgaaatttgaaagagatgatatttacaaagtatccagcacagaacttgggagagaataggacttgctaaacgtaagtggtcttcccttaccctaggactgaactttgttaaacacttttcactctgtcctttcagactgaccaatggttggaatgttgaccttattttgaaaatagtgtttacatccctggcgatcttaagaaccacattccatgaccgaagtctgttttatgtactcgtatttagaaggagactagggaaagaaaatttaggtaaatctttataaa

SEQ ID NO: 328680 - DNA, 638 bp, Homo sapiens
gttccaggctgtagtgagctatgatctagccactgtattccatcctgagggatagagtaagacctcgtttctttaaaaaaaaaaaaaaaaaaaaaggtccctttaggagaagaggggaaagacatattccaggtgaatgaaatcaaagggataataaatacaaaacacaaggagtgaggccaggcgcggtggctcacgcctgtaatcccagcattttgagaggccgaggcgggtggatcatgaggtcaggagatcgagaccatcctggccaataaggtgaaaccccgtctctaataaaaaatacaaaaaaaaaaattagccgggtgcgatggtgggcgcctgtagtcccagatactcgggaggctgaggcaggagaatggtgtgaacccgggaggcagagcttgcagtgagccgagttcacgccactgcactccagcctgggcgacagmgtgagactccgtctcaaaaaacacaaaacaaaacaaaacaaaacacaaggagtgttcagaagtcagaggtcagtgatcttttcatatttaaattgttctccagttgtagagactaagttgtgttacttatcagaactaatgattcaataacatgccttctgtgatgttggtgaaaaataaaatgttttc

SEQ ID NO: 328681 - DNA, 616 bp, Homo sapiens
tgagatatttacattctgaaattaattatggtactttttatttaaattaaaatcaggaagaaaagttcaggaaaaagaggttcagggaaattttatatatattcatctcaactacaaattagtaaagatcttatattcaacaaatgtgtcagagtccattaaagacattagaaaaccctatttcattgtaactaaactgcttgacattttaacctccaaacttttttataatcaaatgtagagattgtgtctgtcttgataagtctacatatagtatccatgctgcaagaataccaaaaaaaaaaaaaaatggatccttagttttacaggattgacaaagatgtctgttggccaaatcaagtgtaagagttcctgtaaagtcctcagatcaacaaatttttaaaaagaaaatcttttatgttcacttagayagcaaccagctcgaacggacaatccatttcttgtgtagtgcatccttagaagctggcttttaactctgaaggtctatggtcttggtctttggccttctagggtactgataattactgctcctactgcacctcccgtttagtccttcgctttctattctttggttcactcttccttccttgtcact

SEQ ID NO: 328682 - DNA, 490 bp, Homo sapiens
gtctctgccttcctgccctctggaggcactcactttatcacactggtggctagggatgctggggtcaggaggggcagygaaacaggcttgcacctccatgggtgcctctgccctcatccagcaccctatgcacaggccgcctgccactctggtcatgcctaccatggctggcaggtgctatttatcactgggtctttttacctaaatgtggcagggagagaggataaggaggggaaactcttcacagaaaaatgttctttctctctagatccacgggctccttattcttcacacgtctgacttgatcctttgcttcttccagattcagacctttcttgtaagtggtcccttcccgagtcccagtgtgctcattcttccaggggctcgtagttactgccttgagggaaccgtttgggtgtcagccacctgaccccaggttacaagcagaggagccacaattagcctctattcaaacaaaggattccatcta

SEQ ID NO: 328683 - DNA, 612 bp, Homo sapiens
ttttttcccatttcagttttaagatgcgctgtatttttcttattttcagggtcccgaaatcaggatgggtgtttcagttgatgcatgcgtttgatgtggttgtgtttcttttcctccgcctaaaagcagttattaaaatgatggcgtttgcagatctagatttgaaagaaaagaataatggtgcatcttgcaatcaatagtgttttagaatccaggaaacacagtaataatactcaacgaaaaagtcagttctaggatgccagcttccgcatccagtgtcttgtccccaggagcacgatgttccaagggtggggctgtgtcctgttgtgcctgctrcagccatgctttctttcctttaggatcagtgttggtgggggcttggcccaggattggatggtatcttgttttgtttttttgagatagagtttcactctctcgcccgggctggagtgcagtgatcgcagcccactacagcctcgaattcctgggctcaagtgccctcctgccatggcctcccagttctgggactacaggcattagcccctgtacccagccatggatgttttttaagtgtgcaaagattcctcctcattcttcaattaaaagcatagt

SEQ ID NO: 328684 - DNA, 511 bp, Homo sapiens
gctcatgcctgtaaccccagcactttggggggccaaggagggaggatcaattgagctcaggagtttgagaccagtctgggaaacatagttagaccatatctctacaaaaataaataartaaataaaaattttaaaagagaaggatgtctaaggaagtaggaagccttctattatgattattgtgtcatcatcttacttgaatctcacaggaatttcatgaagtagatgtgattatccccattgtccagatgtagaaaatgaggctaagagaggtacattagttaaggtaggctaaattaggctgcaataacaaataaacctccaaatataagtacctcgacaaagagatgtacgctcatgccataatctaatgtaggttgggaaactcttcctgagaacctcttatccaggaagtgactgaggaacccaacctctttctattttgtgatgccatcatcttcaacaggaggttcacaaacacctgaagctgtcaaaacagcaaatgcaaaga

SEQ ID NO: 328685 - DNA, 549 bp, Homo sapiens
ttctgctcactggctgtcaggctgcctgggggtctcggagggtccagagcaactgatggctggtgtggaggagagcgtgtgacagccagtcccaaggccaggctatgagagactatgctaattagtgaagtccctggtagggccaggtcactcggccaccaggtaaaaagtaccaggttatttctgccttggcagaaggagaaggtgcatgaatattactcattaatacrcctcaaggaaccactaggttagacaacaaaataccttctgcatccactcccctattacttcctcactccccaaacatcctttcagtctgctcctccagcttgagaaaccaggagggtcttcctaccgagtggtgcctcccgagcctctggggtacagcttgtgaccctcctcaatcaaatgaatcccagggttccaggccaggtgagtatagatggacttggagcttttcttatgaaatgtcttgagctgagtttctttttcctgctacgccgaactctgtatatgtttgtttttgttctaattttggcttcagaaaaa

SEQ ID NO: 328686 - DNA, 460 bp, Homo sapiens
tgtcgctaaggagtggaaccaagatgcccactgcttctggggccacattgatcacattcagacatccagaccctggaaaactcagggtcgtttctgagtctacagtctacattcaagaagaagggtrgaaattcaagaagtggccaagaaagactttcaacaacttactcggatgtcatcaggggaagactaagagtatggccctcaaggcgccttcaaggatggcattacttgctgaattcatcatggtcggggggcttcaacagtttacagaagccttcaaatatttcaggaagcctctgcttccatcctactctcccctgatgggctacagtctgtattacagcaggaatccttttgcaatgagttgcacttatcttcaggcaaatgccccagatggggatatgaggttttatttacagtctgcaaaatttccctaaagagattggtgcaaagcaga

SEQ ID NO: 328687 - DNA, 563 bp, Homo sapiens
tcaaaattattattgggcgcctaccatgtgccagcccccatgtggtgccctgcaaggctctaaggataccaagatgaataaacacaaccactgctcaggaggaatttacaacccaagggaggaaacaggagctcagggctgacaaccatggagggaagtgtcttggtttggatgaacctcattgggtgtgactctgttggtctctgtccctctctctgggtttgctgctgtcacttttcatggctctggctctgtcttcattgttctctgactgccttgtctccatcttccaggmccctagctgcagacctccctggcttggggagccgcaggcatcttctgtgtttatccctccaaccacatccctggccaatggctgcttctgcttccataccctgctcagcaggctcatccacactcatcaggaatcctggagagacctctcctatcccaaacctctctcaggctaaatggctacacaaccggaaaaggagccgtggagaaactgactccttgggggtgaaggcctcgggcctaggtgttttacagtcacctgtgcaaca

SEQ ID NO: 328688 - DNA, 433 bp, Homo sapiens
gagatctataacctatttgtagtgtttctgtctttggtttccttactttgtaacaaagaaatttcttttctccaaccttagctactcaaagtgtgtccatcaactggtagtattggctggcctgacctgggagcttgttacaaacaccaagactcaaacttcatcctagacatgaagatcccaggtgatcatatgcacattgaagcttcagaaagtctactctgaacaaccagatgaggccagggatcgtggctcacgcctgtaattacagcactttgggaggccagggcgggcagaccacccaaggtcaggagtttgagaccatcctggccagcatggtgaaaccccattgccacaaaaaaacacaaaagttatctgggcatggtggcagrtgcctgtaatcccagctacttgggaggctgagcaggagaat

SEQ ID NO: 328689 - DNA, 544 bp, Homo sapiens
tttttcaaactaatctcaagattcaagttaattccaatcaagatcctagcctgtgtttttaaagaaacaagtaagtttaatttctatttttgaagaaatatcataagtcaatcagattatgttagtactccaaattttaattttattcttcaaagttgttttgactgttctgggttctgtacatttccatatgaaattcatatgatctgattcaaagatttactataaactatagtattcaagacagtttagtattggcataaagataaactaattaatagaacataataaakttcagaaatagacatacacacataagaacaacagatttcatcaatgatgcaaaggcaattctgtggagaaagcatagtcttttcaactaattatgctagaacaactggatatccatatgaaaaaaagggaactcaactcatacctcacacaaaaattaactcaaactaatgtttaacgatcacgactgcctcagggatagtgaaggcatggaagaggagtgaagtgagaggtaggaattaattacaaagga

SEQ ID NO: 328690 - DNA, 558 bp, Homo sapiens
agcagtcttggtggttagcagcacaaggtagggtccttcctaggctggcatgagtttttcttctttccaccctctgattagaaggtgatcttcaggctggtgctggtttactggaaattctaggggtggtacctgtgcaaaaagactttcagttttgagggaaaggaaagtggaagatacaccaagtatacaatttctaagaaactgactttttgttttaaatgtggggacatcaacagtggactttatagtctttggtgccttcttactgagaaatttcctttagcacctatttttatttgtttttagaccaaagaaagccaaacaccattttatatttaayaatgcttcttgtatgacttttataccagataagctaaatttcatctttatattagtgtgctattaatgttaaacttagttttaataaaattttgtatacatatttattcaatatttaatgtcaaaccataaggtaagatttttatagactctttttcaccttttataatctttgttaaagagcaggttagtgctttaagaaaaacccattgtgtt

SEQ ID NO: 328691 - DNA, 610 bp, Homo sapiens
aaattagtcaatgctactaggcctgccttttatttcccagaatagtgtttgtttggagaaaatctagaggyatctgacttttacaataaaatgcaaaaacaaagcattcttaagccactcagtgttttaaaaaagaatgaaacaaccaaacacaactgtggtctttggctaactttctagagagaagaaaacaagccatctgccggtaacaggcggctctggggatggctgatcacagggccgaatgaaatattcgtagtaattagtggcagcaccaaaatagaaacttcagcagtgcttttcctgttgttatggtgacagccccccaacagcccacctccccgcaaagaccctggcttggtgcattctgtggccttccatctggtgccctcccattgaatgcagagaaactaaactgactgctcatttgtcccctcgaggttgtgtgtgtgtgccgggctgccaggaggaggagggcgtggactggaagattccacagggctgggccaaggctgtcccctgtgctcagccagagcgacaggagagcagctgatagcccaggctgccagacaggtgctgtcaaggggccgaaaactcactgatgtcagga

SEQ ID NO: 328692 - DNA, 610 bp, Homo sapiens
aaattagtcaatgctactaggcctgccttttatttcccagaatagtgtttgtttggagaaaatctagaggtatctgacttttacaataaaatgcaaaaacaaagcattcttaagccactcagtgttttaaaaaagaatgaaacaaccaaacacaactgtggtctttggctaactttctagagagaagaaaacaagccatctgccggtaacaggcggctctggggatggctgatcacagggccgaatgaaatattcgtagtaattagtggcagcaccaaaatagaaacttcagcagtgcttttcctgttgttatggtgacagccccccaacagcccacctccccgcaaagaccctggcttggtgcattctgtggccttccatctggtgccctcccattgaatgcagagaaactaaactgactgctcatttgtcccctcgrggttgtgtgtgtgtgccgggctgccaggaggaggagggcgtggactggaagattccacagggctgggccaaggctgtcccctgtgctcagccagagcgacaggagagcagctgatagcccaggctgccagacaggtgctgtcaaggggccgaaaactcactgatgtcagga

SEQ ID NO: 328693 - DNA, 492 bp, Homo sapiens
ctgaattacttgattgctgtctcacgacaggctccagaaagtcagccttgactttctggttcaaaacagatcaaggactgttctargcagtacctgctcattctttttatttgagtgaaatccctcacggctgagcttcttcagtggtgtaaagcaaagtggtgagtgatgatagaaacatcaggagacacatctaagacacggctatcccgtggcatgcagcagaagctgctgtgccatttgtgtgtatgtgctattcaccatgccatagccctctcagtatgcatggctgttctgggaacacagaggagacgtggggtggtgagcagggagacaccaggaaaagggaacttctaactctgactttttcttttcttgagacaggctctcgctctgtcacccaggctgcagtgcagcgttgccatcataactcactgtaacctcaaactcctggcacagtgataatcccacctcagcctctccagtagctga

SEQ ID NO: 328694 - DNA, 492 bp, Homo sapiens
ctgaattacttgattgctgtctcacgacaggctccagaaagtcagccttgactttctggttcaaaacagatcaaggactgttctaggcagtacctgctcattctttttatttgagtgaaatccctcacggctgagcttcttcagtggtgtaaagcaaagtkgtgagtgatgatagaaacatcaggagacacatctaagacacggctatcccgtggcatgcagcagaagctgctgtgccatttgtgtgtatgtgctattcaccatgccatagccctctcagtatgcatggctgttctgggaacacagaggagacgtggggtggtgagcagggagacaccaggaaaagggaacttctaactctgactttttcttttcttgagacaggctctcgctctgtcacccaggctgcagtgcagcgttgccatcataactcactgtaacctcaaactcctggcacagtgataatcccacctcagcctctccagtagctga

SEQ ID NO: 328695 - DNA, 574 bp, Homo sapiens
tttaaaaaaccctttttatatcccaaagtctgaattacttgattgctgtctcacgacaggctccagaaagtcagccttgactttctggttcaaaacagatcaaggactgttctaggcagtacctgctcattctttttatttgagtgaaatccctcacggctgagcttcttcagtggtgtaaagcaaagtggtgagtgatgatagaaacatcaggagacacatctaagacacggctatcccgtggcatgcagcagaagctgctgtgccatttgtgtgtatgtgctattcaccatgccatagccctctcrgtatgcatggctgttctgggaacacagaggagacgtggggtggtgagcagggagacaccaggaaaagggaacttctaactctgactttttcttttcttgagacaggctctcgctctgtcacccaggctgcagtgcagcgttgccatcataactcactgtaacctcaaactcctggcacagtgataatcccacctcagcctctccagtagctgagaaaggtgtatgccaccgtgcccagctaattaaaaaaaagatttttttgtgtg

SEQ ID NO: 328696 - DNA, 612 bp, Homo sapiens
actttgaaaatatatagcacaaaacaactgcaccactagctattattactattcctcaaaatatgtagtatttctagtcctgttgtctatacttctttcacctttctaagaggtgttgggaaatttattcttaacactgagattattaaggcacagctattattcccccttcttgtggcaataaaggacatattatttcagctatagctaacttataaaaatgttcagttactcatgtcttagcccgagtgaacatacattattatgctacattctttactatttgtaaaatagttgtcagctacaaatgcattatcctacacattgaagttaatgatggaaaaatgctgctgtcacagaaaattggattgtgaaagtagataaatgctcaggtgcttatttttaaaatagsaagcattcatcttgtgatagtattggcttccagtagctttatctccattacataagtgccaggcaggcaattattatcctggaagagtgtgaggacttgttatttcatcagcacataaagagtcttcctactagatgccatatatggtctgaagtcctggactccaatccaacctcttcatttaaacacttttaaatttg

SEQ ID NO: 328697 - DNA, 612 bp, Homo sapiens
actttgaaaatatatagcacaaaacaactgcaccactagctattattactattcctcaaaatatgtagtatttctagtcctgttgtctatacttctttcacctttctaagaggtgttgggaaatttattcttaacactgagattattaaggcacagctattattcccccttcttgtggcaataaaggacatattatttcagctatagctaacttataaaaatgttcagttactcatgtcttagcccgagtgaacatacattattatgctacattctttactatttgtaaaatagttgtcagctacaaatgcattatcctacacattgaagttaatgatggaaaaatgctgctgtcacagaaaattggattgtgaaagtagataaatgctcaggtgcttatttttaaaatagcaagcattcatcttgtgatagtattggcttccagkagctttatctccattacataagtgccaggcaggcaattattatcctggaagagtgtgaggacttgttatttcatcagcacataaagagtcttcctactagatgccatatatggtctgaagtcctggactccaatccaacctcttcatttaaacacttttaaatttg

SEQ ID NO: 328698 - DNA, 498 bp, Homo sapiens
ggtggtaagacacaaatgtagctgtcagaggagtagacagtatcctattgatctggtttgtcagctggttagcaggttagcatagggattgytccaatgaattcacttactttattgccagaattgaagaaaacttataaaactgtgctgcatttatttgtgttttacaagcagttattcagaatcaaatggaaatttttcactgcattggaaatagcctggccaaatcctcaaattccacagaagcagtttaggtgtttggtcttctcaatggtcagcttttggatgagttgggcacttgttttcctcaatgaccacctcctgtacatcttgacctggagacaaactactcagtttctcccagcagcattaactgggcctcactctgttcttgaacaagatgagttcaagtcagccagtgcaaccagatccagtgtagacagaatctggttctttgatcatcaaccctgggaggaactatcatcttcatactagtct

SEQ ID NO: 328699 - DNA, 592 bp, Homo sapiens
atctgttttcaaatgtgacattctttcccatgggaagtgctttcaaatgtgttttggttctgccttttgcttttgcctgccttcttgtctctcaccaggagaacaatgtcatattttactagaacataactctatcttgggtacatgggataaaaggatgacttgaaataaaaaacactaaaattttctatttagtagttaattgtggggaagttaaaattatcagatgaaaatataaagagtagtttatttacacatagtttagtactcactcagatgtttaaaataagtaaaaaacacacttgtagttatgtttatagttttggttgcagagcagagggagaaatgaaatctggagcattcgggcaggaaagcccaggaatggcttcagataagtcacagtgaagctggttcttgaaggatgcrtgagagctgacaagggagggctgtccagcagaagaaacagcaagtgctacgacgcaggattagctagtttctcaaatttaatctacccaattgtaactaaatacctattttcttcatatctcctttttatgtactttgaacttttccctttgtttttaaatgaaac

SEQ ID NO: 328700 - DNA, 592 bp, Homo sapiens
atctgttttcaaatgtgacattctttcccatgggaagtgctttcaaatgtgttttggttctgccttttgcttttgcctgccttcttgtctctcaccaggagaacaatgtcatattttactagaacataactctatcttgggtacatgggataaaaggatgacttgaaataaaaaacactaaaattttctatttagtagttaattgtggggaagttaaaattatcagatgaaaatataaagagtagtttatttacacatagtttagtactcactcagatgtttaaaataagtaaaaaacacacttgtagttatgtttatagttttggttgcagagcagagggagaaatgaaatctggagcattcgggcaggaaagcccaggaatggcttcagataagtcacagtgaagctggttcttgaaggatgcgtgagagctgacargggagggctgtccagcagaagaaacagcaagtgctacgacgcaggattagctagtttctcaaatttaatctacccaattgtaactaaatacctattttcttcatatctcctttttatgtactttgaacttttccctttgtttttaaatgaaac

SEQ ID NO: 328701 - DNA, 415 bp, Homo sapiens
ccccttcctcaccctgagatttcacatgctcttcagtgggcctccaggattgaactgtccttcctgttacgtcaaacagcaacatgaggatcaattatctacctatattccctgttgggctcaggatttggggtagtgaaggattgattcagatccctctgctggtacagaagacratccattatctcacttccagaccagtgcttttaacatctagatcagtgcttttaaaacttagatttgcctaagaattatccatgtatcttgttaaaatgcagattgtggtgcactaggtcttcttggttagatactctgcctttctagcaagctcccaggtgatgccaatgcttctggtctatggatcagtctttggaaggcaaggcactatatggctgtgaaaagtaggcccaccctc

SEQ ID NO: 328702 - DNA, 586 bp, Homo sapiens
gtgtaatggatacagttttgctttgggaagatgaaaaagttctggagatgaatagtggtgatgtttgcacaagagtgtgaatgtatttattgtcaccaaactgtacatttaaaatggctaaatagtaaattttatatcatataaaataacatatatgttaccacaactttttttttaaagaattggtactgtgtaactaatagacattcccctcaccaggaaatctctgaccaaaccgctcaattaggttaagaactatgtgctcagtaagtgtatctactggtgtgttttgttgccattttggcttcgcctccactctcattggaattgaacatgcccagcctgtcagctgagctgcgggtgggatggtttgtccccgctttgcaaggttagccagagaggacttcatcatgtatctgaggcttctcccctttaccaatagtggatgtcaggggagatgcctctttgctcctggtattttcttccgtgcagaaacaatcttaacaaacaggccattgtgacgtctggtcttcctcacttctgctcagcaaaagtggagyggcctccaccatgagggagagcctcg

SEQ ID NO: 328703 - DNA, 487 bp, Homo sapiens
aagcttttactcttgaccctgacttctccagataaactgctcacctaaacctttgctcttctgatggtcctcattctaccagctttgtcctcctaaacctccaggctgctttttctacctatgctgcttcagactaccaactgatgacaaattgtcggcctcgacttctctgcttttttcttcttcttcacttctgaggtctccgctcctgatggaaggctggtgttgaaaggattccagccacagcctggaccacaccccaggagccagtctgtcgatgctcttgtctyggtacctttctcataaatcagccagggaggggttcagtctgcatcctggccagagatcaatggtgctaatggtgtctggtccattagaggtggaagagttccagcctgtgcaagtctgcagcgaactgcaccatcagctctgccaggtacagactctgggaatattccttggtagttccctggtcactcagaacagg

SEQ ID NO: 328704 - DNA, 586 bp, Homo sapiens
  misc_feature (1)...(586): n = A,T,C or G
tttgacaatttgaggaactgccaatctgttttccacagmggctgcaccattttagattcccactaatgatatatgaagactccagttctctttatcctagccaacacattttattatatgtctttgtgcttatagctatcctagtgtgtgaagttttatctcattgtgcttttgattgcatttctctgatggctaatgatattgagcatctttttatgtgtttattgttcatttgcatattttctttggagtatgtctattcagatccattgcccatttttaattgggttgtatgtcgtattataattatttgtatattctagatatttaacagttatttgtatattctagatatcaatttgcaaatattttctcccattctatgggttgnctttttttttttttttttttttttttttgagacagggccttgctctgttgcccaggctggagtgcagtagcacaaccatagctcactgcagcctcaaattcctggactcaagtgatcctcctgcctcagcctcctgagtagtggggacccaggcatgaaccactgtgcccagcccttttttgactttcttgatgg

SEQ ID NO: 328705 - DNA, 514 bp, Homo sapiens
ttatgttttaaatttgtggaatgacatagcagatattttgagcatcattrtaggatccaattaaaattatgcatactgctattttcacttttttttttcgagatgagatcttgcttctgctgcctaggctgaagtgcagtggcacgatcatagctcattgcaacatcaaattcctgggctgaagcgatcctcccatctcagccttcagagtagctaggactacaggcacatgccaccatgcccagctaatttttttttttttttggtagaggctgaatctcactatgttgcccaggctggtctccaactcctggccccaagcaatcctcatgccttggcttcccacagtgctgggattacaggtgtgagccactctgcctggcctatttacactttttttttttctttttaacccaactactcaacgtggcatattttcacttttaatataatttatatgtacctggggaagctctttttgatattatcagtagaggccactaaaaataatgcc

SEQ ID NO: 328706 - DNA, 514 bp, Homo sapiens
ttatgttttaaatttgtggaatgacatagcagatattttgagcatcattataggatccaattaaaattatgcatactgctattttcacttttttttttcgagatgagatcttgcttctgctgcctaggctgaagtgcagtggcacgatcatagctcattgcaacatcaaattcctgggctgaagcgatcctcccatctcagccttcagagtagctaggactacaggcacatgccaccatgcccagctaatttttttttttttttggtagaggctgaatctcactatgttgcccaggctggtctccaactcctggccccaagcaatcctcatgccttggcttcccacagtgctgggattacaggtgtgagccactctgcctggcctatttacactttttttttttctttttaacccaactactcaacrtggcatattttcacttttaatataatttatatgtacctggggaagctctttttgatattatcagtagaggccactaaaaataatgcc

SEQ ID NO: 328707 - DNA, 487 bp, Homo sapiens
tacccctgttgtcctcattctgcagtgatgtgaggcacatyttgtgagccctctgtactgagaagtttcagacacaaacaaagaaatgaaaagataaaaagttttcctgtttcaggtgtttttagatacagaattttccatactggattagatcatttccccatcaaaaccaatatcctgcttagtcgacatgaagttaatgatggtgaaattgaagttaatgatggcgaaatgctttgaaaatagaagtactacatacattcgagcaataatgggctttcgtactagtaactttgtggctccaagcccaggctcatgaaaggatactttgaaaagaacattaaatctatagaagagatgaaatatttacagattaacttcttacttcttttcacattttatatgacttgagcaaataaatacttttttaaaaaaccaggaagtgttaagagttacggatgtttccagatctagctaagcacgtgtt

SEQ ID NO: 328708 - DNA, 626 bp, Homo sapiens
ctgacctagtgttcttgagatatagatttctacttggccacaaatgttgttgtctaagtctgtttgtgcttgtgctgctataacaaaataccttagactggataatttataaaaaaaaggaaatttatttctcacaggtctggaggctgagacgtcaaagatcaaggcactggcaggttcagggtctggtaatggcttgctgtctgtttccaagatggcacctgttgctgtgtcttccaaaggggatgaacactgtgtcctcacataacagaagagcggaagtgcaaaacaaggaactctctctctccctcaggcccttgtataagggtactaatcccaagtctgacggcagagcctcatagcctaatcacctcccaacagcttcttctcttaatactatcatctttgggtttaagttccaatgtatgaattttcgacagacacatacattcaaaccatagcagttgtatatgtagatakgcaaaaatataaacatgtaggcacgcaagaaagattgttgaaagaaatggtagaataagtttaaacatttatttcacaactgatgattgaattcattcaccaattagttgctttactgttaagtagttgtttgacaaacttcaaag

SEQ ID NO: 328709 - DNA, 409 bp, Homo sapiens
ataaacaaactctccatttcctctcaacgctttgggaacataattctattattccagctagctaaaaaaaaaaaaaaaaaaaaaaaaaaaaaccctttaaaaatatacattaatacatagtcaatgcaaacatttcaaacattagataggtgtgcaaaataaaaagtggaagtgcctcatcacccacttcttacactccccagcgctaacatttgttgttataggcttccaagcattttctatccacaaacaaacacagacacacacaccccacacattttttttattcttttcccaaataaaattggcggtacacccacaaattttaggatgaagacatgtttaaaagcatgggctttggagctcaccaraactgggctcacatcctctccaactactggctgtgacc

SEQ ID NO: 328710 - DNA, 247 bp, Homo sapiens
tacaccttctcaaggacgtttttctctgctctactcagcatcaacacactattacttgcaaactctttsaagtcaggagtcaggtaggtaactttactcttaccctgagaagggtaccttttggagtcccagttttatggattataatttactaggggagagaggttcctcaccaaggttgtgaggaccctgagttttgtcttctgtgccctgaaaagtcatcaaacttgaaattgtttataaggtt

SEQ ID NO: 328711 - DNA, 558 bp, Homo sapiens
acataataggtgctcaagaaatatttactgaagtaataaatgaaagctcatgacatttttttccataaagataaatagatggtaggtatgaaagggctttggaaagctgaaagtaaaacacaaatataaagtattcccattgtaaataagataaatatatggatatgcaaagattctttgtctggcaaaaaggagcatatttttaccatcacagttctggaataacattccctgatgaaggcatggtctctacccacaatgacctcacaacctaatgggagggccaagcctataaactactagctgcagtataaggcagaaaaaaaatagtcattcattagaaaggcaaatgttgagctgtaagtacagaagaaaaaaaatgattaatactgcccaggatttataagcaagatttctaagaaaagtcgtgttttagccttttctgggtatctgacatagtagagagtatgtgattcctgttcttgaagtkgtttataatccaatagggtagatactattgaaaaacttgagaaattcacaagtataaacatacccaga

SEQ ID NO: 328712 - DNA, 604 bp, Homo sapiens
acttctttggtccctggcttttgctttttcccttcttttccactgtatcctgaaatttcacagtgattccttcatcaaaggaatcactgcctcatcaaaggatcctacctcagcatgcaaaggtgccatattttggcagtagtrtgttctgagtcccatcatcggaaaaaactcagaggagttgactatagttttagtcaaagcgagtctttgtcaatccatgataggctttttcagtcttgaaacatgtccttcagttccaaaaatttttcttgaggtgcttattttctctcatctcttttgtgctgtttcatttactaaaattcctattattttgttagaactcctgtactactctaactttatttttttctctctcatttttcatctttttgcctttttactatactttctgggagatttttattaactttatcgcctaatcttactacatgtttttatttctgttctcagatttgtaattttcagaaactttttgttcccaaaatgttgcttttatactaacctaatcttgtttcatagttgcaatttcttctttttttgctgaggatattatattctgtggggtttggttgttttggaa

SEQ ID NO: 328713 - DNA, 504 bp, Homo sapiens
taataataatcttttcactaaagataatctagattaattgaataaatcagcttgaattaaaactcatcaatgtgcaacatttagatacctagtacgatttttttataaagcaaatcatgcttagataaacacagacctgatttgtctttgtaaatactgggttctctgctattggcacaatatgaaactgaggcgtggaggtgtgttgcctgctgtaaatggctaatagtttttaaaagtgttcagtaaccagattwacaaagcactgttattatgagtttgtccttttgcctctcattttattctaggggattgggctgtgcaaccagggcttttctaaagcacctagaagttacaaccacactcactctccccagaccctgggtttctaatcttaattattcctcccaacacttgctgatacctatgttgaaattttcaaacctgtcttgtgttgaggctttataataaataattcttaactgaatcaccctcaacatctag

SEQ ID NO: 328714 - DNA, 504 bp, Homo sapiens
taataataatcttttcactaaagataatctagattaattgaataaatcagcttgaattaaaactcatcaatgtgcaacatttagatacctagtacgatttttttataaagcaaatcatgcttagataaacacagacctgatttgtctttgtaaatactgggttctctgctattggcacaatatgaaactgaggcgtggaggtgtgttgcctgctgtaaatggctaatagtttttaaaagtgttcagtaaccagattawcaaagcactgttattatgagtttgtccttttgcctctcattttattctaggggattgggctgtgcaaccagggcttttctaaagcacctagaagttacaaccacactcactctccccagaccctgggtttctaatcttaattattcctcccaacacttgctgatacctatgttgaaattttcaaacctgtcttgtgttgaggctttataataaataattcttaactgaatcaccctcaacatctag

SEQ ID NO: 328715 - DNA, 616 bp, Homo sapiens
gtagtagtatctcattgtcatttttcatcaacaatttcttgattattagtgaggtygaacacattttcaaatgtttattggccattttgatcttgacttttgtgaggtgcctgcttttatttatttatttatttatttatttatttagagacagggtttcacttccatcgcccaggctggagtgcagtgatgtgatctaggctcactgccacccccgcctcctgggctcaagccattcttctgcctcagcctcccgagtagctgggactgtaggtgcaccccaccacacctggctaattttgtatttgttgtagagacggggtcttgccatgttgcccaggttggtctctaacttctgaggtcaagtgatccacccacctctgcctcccaaactgctggagttacagacatgagctgccacgcccgacaggctctcatttttcaatcattttttgaaatggggtcatctgcattcttcttataagttttgtaggagttgttcatatactttgcataataattattgaccaattagttatgtgtcacaaatattttcttatgttctgtggcttgcattttctttctgtaaatgctgtcttccgattaatgtaaatac

SEQ ID NO: 328716 - DNA, 616 bp, Homo sapiens
gtagtagtatctcattgtcatttttcatcaacaatttcttgattattagtgaggtcgaacacattttcaaatgtttattggccattttgatcttgacttttgtgaggtgcctgcttttatttatttatttatttatttatttatttagagacagggtttcacttccatcgcccaggctggagtgcagtgatgtgatctaggctcactgccacccccgcctcctgggctcaagccattcttctgcctcagcctcccgagtagctgggactgtaggtgcaccccaccacacctggctaattttgtatttgttgtagagacggggtcttgccatgttgcccaggttggtctctaacttctgaggtcaagtgatccacccacctctgcctcccaaactgctggagttacagacatgagctgccacgcccgacaggctctcatttttcaatcattttttgaaatggggtcatctgcattcttcttataagttttgtaggagttgttcatatactttgcataataattattgaccaattagttatgtgtcacaaatattttcttatrttctgtggcttgcattttctttctgtaaatgctgtcttccgattaatgtaaatac

SEQ ID NO: 328717 - DNA, 607 bp, Homo sapiens
cattttatgatgaccataaaaatttgaaaatatttaaaaaatatgatttagcaaatcttttccatgatagcaaaaacagcatatggaaatatattttatttatttatttatttattcattcattcttgagacagagtttctctcttgtccaggctggagtgcaatggtgcgatcttggctcactgtaacctccacctcctgggttcaagcaattctcctgcctcagcctcctgagtagctgggattacaggcacctgccaccacacccagctaatttttgcatttttagtagagatggggtttcaccatgttcaccaggctggtctccaactcctgrcctcaggtgatctgctgcctcagcctcccaaaatgctgggattacaggcatgacccactgagcctggccagggaatataatttagaatagtagagaataaacttcatggaaaaaatataagaggatttttaaaacgacaaaatataaaatacaaaagtgatataatacatgttcatgtatgagaagatgaaatatcttcaatataattctaaccactaccccacagtggtttgtttgttattttgaaaggaatttaacaaatgtatacta

SEQ ID NO: 328718 - DNA, 362 bp, Homo sapiens
ctaatttttgcatttttagtagagatggggtttcaccatgttcaccaggctggtctccaactcctgacctcaggtgatctgctgcctcagcctcccmaaatgctgggattacaggcatgacccactgagcctggccagggaatataatttagaatagtagagaataaacttcatggaaaaaatataagaggatttttaaaacgacaaaatataaaatacaaaagtgatataatacatgttcatgtatgagaagatgaaatatcttcaatataattctaaccactaccccacagtggtttgtttgttattttgaaaggaatttaacaaatgtatactaaaattagtatgaaagaatacagggc

SEQ ID NO: 328719 - DNA, 362 bp, Homo sapiens
ctaatttttgcatttttagtagagatggggtttcaccatgttcaccaggctggtctccaactcctgacctcaggtgatctgctgcctcagcctcccaaaatgctgggattacaggcatgacccactgagcctggccagggaatataatttagaatagtagagaataaacttcatggaaaaaatataagaggatttttaaaacgacaaamtataaaatacaaaagtgatataatacatgttcatgtatgagaagatgaaatatcttcaatataattctaaccactaccccacagtggtttgtttgttattttgaaaggaatttaacaaatgtatactaaaattagtatgaaagaatacagggc

SEQ ID NO: 328720 - DNA, 566 bp, Homo sapiens
tcgtgcaaactggctttagaacagcttcctaggaacggcttgggtatttgtttactctgaaagcatttcactctctattcacacgctttggtaacgtctctcctctgctagcttcggctaaccttggatgccctttccctctgtttagaattccacaaagataaatttccatttcaagcacrgcctcctgcttctgactaaaattgttcccatcactcgcagccgttttcctcctaatggggcttccatttgctctcctcagggcattctctagtccctgaagccagcttgcagaaaacacagcctgcttctcttcttttcttttatattcatgattatttggaatggaactgggttgagacacttggaatctagattcaagaaagttcccaatttttctaccatctttggctcatttcctagaatgaggttctgtggatgcgccaggtgattcaggctgtattgtcgacgttgctgttgtttttcaataaattatgtagaaggcacttctgccctagctctaaaaatcaggtttgctttggtacttttctgctcttctatgaagt

SEQ ID NO: 328721 - DNA, 566 bp, Homo sapiens
tcgtgcaaactggctttagaacagcttcctaggaacggcttgggtatttgtttactctgaaagcatttcactctctattcacacgctttggtaacgtctctcctctgctagcttcggctaaccttggatgccctttccctctgtttagaattccacaaagataaatttccatttcaagcacagcctcctgcttctgactaaaattgttcccatcactcgcagccgttttcctcctaatggggcttccatttgctctcctcagggcattctctagtcccygaagccagcttgcagaaaacacagcctgcttctcttcttttcttttatattcatgattatttggaatggaactgggttgagacacttggaatctagattcaagaaagttcccaatttttctaccatctttggctcatttcctagaatgaggttctgtggatgcgccaggtgattcaggctgtattgtcgacgttgctgttgtttttcaataaattatgtagaaggcacttctgccctagctctaaaaatcaggtttgctttggtacttttctgctcttctatgaagt

SEQ ID NO: 328722 - DNA, 352 bp, Homo sapiens
gaaagatgtcccatggctatgtttcccttgggctctgggaaagaaagcttatattaggtttgcttcctgactttttattgtccataaatggctgctagtgtaagaatccatgtttctgaaagcatccattttttaaaagtcctctctcactttctttgccttaactatttcaaaacaatggagtttcaatcttgaaaggaagstgagagctctgtgggaaagagtgagggctaacccactgaaattgcttggacctgatgctttgctctgttgcttggctcttcctcatgctcccccatctatgtctgaaactgtcatgtcagtgcattcattccctggttcatttattcat

SEQ ID NO: 328723 - DNA, 514 bp, Homo sapiens
cacagttctggagggggaaagtctgagatcaagctgtcaactgggttggtttcttcttggccatcttctccctgtgtcttacatggtcttccctctgtgtgtgtccatatcctaatctcctcttcttataaggacattagttatattgaattagggcccactttaaatactttagtctaacttaccaacctctttcaaggccctgtctctaaatgcagttgcattctgaagtactggggattaagaccgcaacacgtaaattttggttggggaaacagagttcagctcataacatctttgtatttctttctcttgcttgttgtaagcataacataaggcaacatatgtgaaaacacccacaagttaagtatgatatctgtgaaggtaaggtccttggggaccaggacaacactttgctcatggttgaattctacaaagcttcttgcacaggctctgscgtggggtgggttcctcataagtgttttctgaacatgaacacacaaatatcccttaa

SEQ ID NO: 328724 - DNA, 558 bp, Homo sapiens
tatatatatatatatatagcatatggattaaatgtgtatttgtgtggttatataagtgtgtttgtgcatgtgtcctattcaatgtactatgtactatacaatataytatacatataatgtatatatacaatgtactatataatgactagatcagaatacatagacaaaccaggtcattttagcattgtgtcaccaagaattataataaaatataaattaacatagatgataatgatcagggtggcagaaataacctccaatataaatttgatgaaggcaaaacactttttttctagtaggtcactgggtccccctgagtctaggcccgtgtcatgtatgttgtaataatcagtaaatatttgtggaattctaaatgaataaagggagaaggtactgaactttagttctatgaataaacacaattgtaacccctggaaaaggaagtggttaaagctatgttaagatctaagacaaaaacagaaataaacaataataaagacaagccaaaaaaaatctgaaaatcttcccctatagtgaatgcacattacattttttttc

SEQ ID NO: 328725 - DNA, 558 bp, Homo sapiens
tatatatatatatatatagcatatggattaaatgtgtatttgtgtggttatataagtgtgtttgtgcatgtgtcctattcaatgtactatgtactatacaatatactatacatataatgtatatatacaatgtactatataatgactagatcagaatacatagacaaaccaggtcattttagcattgtgtcaccaagaattataataaaatataaattaacatagatgataatgatcagggtggcagaaatwacctccaatataaatttgatgaaggcaaaacactttttttctagtaggtcactgggtccccctgagtctaggcccgtgtcatgtatgttgtaataatcagtaaatatttgtggaattctaaatgaataaagggagaaggtactgaactttagttctatgaataaacacaattgtaacccctggaaaaggaagtggttaaagctatgttaagatctaagacaaaaacagaaataaacaataataaagacaagccaaaaaaaatctgaaaatcttcccctatagtgaatgcacattacattttttttc

SEQ ID NO: 328726 - DNA, 549 bp, Homo sapiens
gtgtcacggaaaggaaggctgttgtaagcagacttgtgtggaaaatactctgtacttcaatcactaatccaaatgcatgtttattatgaggtctacaggggattgagcaatgtatagtctagatttattgttttcatttgcttcaaatgagaacttttaatgctctgatcagcatccttattttttattattatttattttattttgtttttttggagatggagttttgctctcgtagcccaagctggagtgcaatggcacgatctcagctcactgcaacttccgcctcctgagttcaagcgattctcctgcctcagcctcccaagtagctgggattacaggcgtgctacaccatragcttttttttttttgtactattagtagagacggggtttcaccatgttggtcaggctggtctcgaactcttgacctcaggtgatccacctgcctaggcctcccaaagtgctgggattacaggcgtgagccaccacacctggcctcagcatccctattaatcattggatatgaatggataagagaaatgataaa

SEQ ID NO: 328727 - DNA, 557 bp, Homo sapiens
acactctaagctagagttttgcacaccagtctttagcttctccttatcttatacgtgggtaagttaatctcattatgcacaatcagaaaaaaagaatatgatgaatttgagattctcattgagaattaatcgtctgatacttcccataaattcagtgccatctcctgagttcttartagcacagtagaagacaagataaattaccagtgactttaggtaaattatagagatttaccaatcttagacacaaagctgaaacttgtgacatttgcaaagtgttcaccaggcaacatgaaacaactcccaattaaggtggaaatcagcaaccatgaactcacacagaaggccttgcttcatatgtttttaaaaacaacttccttgtctagaatatttttatacagggccaagaaactgaaagctgaggatacatgctctcacacacaaacacatgcaaacacacacagttgcaaacacacacccctctcttatatcattttgcaggcagtgctgctcacaggcttgcagctttatctaggtaagaagcaaatggcaaaagg

SEQ ID NO: 328728 - DNA, 557 bp, Homo sapiens
acactctaagctagagttttgcacaccagtctttagcttctccttatcttatacgtgggtaagttaatctcattatgcacaatcagaaaaaaagaatatgatgaatttgagattctcattgagaattaatcgtctgatacttcccataaattcagtgccatctcctgagttcttagtagcacagtagaagacaagataaattaccagtgactttaggtaaattatagagatttaccaatcttagacacaaagctgaaacttgtgacatttgcaaagtgttcaccaggcaacatgaaacaaytcccaattaaggtggaaatcagcaaccatgaactcacacagaaggccttgcttcatatgtttttaaaaacaacttccttgtctagaatatttttatacagggccaagaaactgaaagctgaggatacatgctctcacacacaaacacatgcaaacacacacagttgcaaacacacacccctctcttatatcattttgcaggcagtgctgctcacaggcttgcagctttatctaggtaagaagcaaatggcaaaagg

SEQ ID NO: 328729 - DNA, 560 bp, Homo sapiens
gtgccactgcactccagcctggcaatgcagcaagactccatcaaaacaacaacaacaacaaacctataaagtgtagtactgatgaaaaaagtccatacaacccttcttgaagagactttgaaaatgacctctgtgtcacttgggcgacatgtctatcttaaaggatagaggaacaaaataagtcaagaccttataactgaccacagggaggttaaggccatcatcccaagtggagaagatattttaaccgtggagctttaaggcttttcactggttcccgactgatttgctttaaaaccaggaacckgcaaatgaatccaactgaatgatcaatttattccattattgtatttaatcaattattaaatggctgaagtgcttctcaaactctttttttcatgtataactcttgccccttccccctcctactcttggagcagttttgctcctacatttttttctaccccagcttacgttatttttaaatgaaaatagttgggctttcctataaacgctagcatagaaagagctgagatatatggtgttagacgctgtgtaag

SEQ ID NO: 328730 - DNA, 560 bp, Homo sapiens
gtgccactgcactccagcctggcaatgcagcaagactccatcaaaacaacaacaacaacaaacctataaagtgtagtactgatgaaaaaagtccatacaacccttcttgaagagactttgaaaatgacctctgtgtcacttgggcgacatgtctatcttaaaggatagaggaacaaaataagtcaagaccttataactgaccacagggaggttaaggccatcatcccaagtggagaagatattttaaccgtggagctttaaggcttttcactggttcccgactgatttgctttaaaaccaggaacctgcaaatgaatccaactgaatgatcaatttattccattattgtatttaatcaattattaaatggctgaagygcttctcaaactctttttttcatgtataactcttgccccttccccctcctactcttggagcagttttgctcctacatttttttctaccccagcttacgttatttttaaatgaaaatagttgggctttcctataaacgctagcatagaaagagctgagatatatggtgttagacgctgtgtaag

SEQ ID NO: 328731 - DNA, 603 bp, Homo sapiens
tgggacctaaatcgaaagtagtttgttgtatttatgaagtgatgytaaaattaatggatacaatatccccttcaaaaccaagtgagagtagagctggaaaatgcttaatacaaatctggattcttctgcaaataaatataaattgtatggttaaatggttgtattactcctccctgcctatccatcttaggcacgctgccccacctcggtgagcctcagtctcttcatctgtgaaatgagtgtgatcaactgaacaaactctaaggactgtcccttgtctaacattcactgcttcactaatgagtgtgcaagggacgttcttgtgcgagtgcacagcgggctgattctatttgtaacatcaaccagcggtgcttctaagtcctagtcagttcactgccatttagggttaacgctgcctttttctttgaaacacagagagcgttcatgacaaatataatgataaaaatagaacaattaatcacgttttaacagaaatttacaaaagaaacacgcctctcttacttgaaaccttcatcccatgatcaccagctccactgaacgagccctcactgtacatgatcttctgccttttccaaacaatat

SEQ ID NO: 328732 - DNA, 603 bp, Homo sapiens
tgggacctaaatcgaaagtagtttgttgtatttatgaagtgatgttaaaattaatggatacaatatccccttcaaaaccaagtgagartagagctggaaaatgcttaatacaaatctggattcttctgcaaataaatataaattgtatggttaaatggttgtattactcctccctgcctatccatcttaggcacgctgccccacctcggtgagcctcagtctcttcatctgtgaaatgagtgtgatcaactgaacaaactctaaggactgtcccttgtctaacattcactgcttcactaatgagtgtgcaagggacgttcttgtgcgagtgcacagcgggctgattctatttgtaacatcaaccagcggtgcttctaagtcctagtcagttcactgccatttagggttaacgctgcctttttctttgaaacacagagagcgttcatgacaaatataatgataaaaatagaacaattaatcacgttttaacagaaatttacaaaagaaacacgcctctcttacttgaaaccttcatcccatgatcaccagctccactgaacgagccctcactgtacatgatcttctgccttttccaaacaatat

SEQ ID NO: 328733 - DNA, 558 bp, Homo sapiens
caaaaactagacacacgtctggtgggaagagagagggagtatgttgcaagtcagcctttctcagtccttccaagtggcttcatcgagaacttggttctacaaccccagctcgtggttgctttactcctgtccccacatttcatctctgagtttctatgcagctctgggagcaagaacccagagacatctaaactgatgtccctaattgccaactctacactaatggctttggacagagatttctctatggtgaatcaccctccaattgccagtgagtcaaaccacttaactctaatctttaattcatattttataaacagtttcattcactcagacgtctttaatttaaaagccaggggcaatgrccacagcaattgcaagaagttccctcacagagagaaagaagaatggaaaaacaaagcttatgtcccttttccttctcaagagaaatcactatgaatgtagcaccatctcctccttccccgccctggctgtcacctctagggctcctcgaagaggagagttgggtgctgcaaagggcatttgcaatctgtcctg

SEQ ID NO: 328734 - DNA, 657 bp, Homo sapiens
atatgacaaacccacagcaacatcatactgaagagttttctctgggttttcttctagagaaaggggaaaagtagaaagtatttcccttaagaactgtaacaaaacaaggatggccagttttattgcttctcttcatcataacactggaagtcctagccagagcaataggcaagagaaagaaataaaaggcmtacaaaaaacaggaagtcaaattatgtgtatgagctgatgatgtgatcttatacctggaaaactctaaacacttctctaaaacacacctagatttaataaatgattttggtaaagtttcaaaatacaaatcaacatacaaaaattggcagcatttttatactccaataataatcaagatgaaaacacaaccaagaacacaatcacatttacagtagccacagacaaaaataaaatacctaagaatacatctcaccaaggatattaaagatctctgcaagaactacaatacactgattaaagaaatcatagctgacacaacaaataaaatatcccatgctcaaagattggatgaatcaatatcattaagatgaccacactgtccaaacaaactatttaaccagcactcccattactggatatctacccaaaggaaaacaaatgattgtatcaaaagaaacctgcact

SEQ ID NO: 328735 - DNA, 657 bp, Homo sapiens
atatgacaaacccacagcaacatcatactgaagagttttctctgggttttcttctagagaaaggggaaaagtagaaagtatttcccttaagaactgtaacaaaacaaggatggccagttttattgcttctcttcatcataacactggaagtcctagccagagcaataggcaagagaaagaaataaaaggcatacaaaaaacaggaagtcaaattatgtgtatgagctgatgatgtgatcttatacctggaaaactctaaacacttctctaaaacacacctagatttaataaatgatttyggtaaagtttcaaaatacaaatcaacatacaaaaattggcagcatttttatactccaataataatcaagatgaaaacacaaccaagaacacaatcacatttacagtagccacagacaaaaataaaatacctaagaatacatctcaccaaggatattaaagatctctgcaagaactacaatacactgattaaagaaatcatagctgacacaacaaataaaatatcccatgctcaaagattggatgaatcaatatcattaagatgaccacactgtccaaacaaactatttaaccagcactcccattactggatatctacccaaaggaaaacaaatgattgtatcaaaagaaacctgcact

SEQ ID NO: 328736 - DNA, 498 bp, Homo sapiens
gcactgcatgtataatgatgaacaaagtagaatttatccctaatgaatgagactgaacattttaaaataaaacatatacataagtatccgttgtgttaagtgcagtgaggttggggaaggatacacagtgcagtgaaaaaataagatgggaagtgttttatagctcagcaggtgagagacagygtctttgaggaagttctattaaacctgagatcagagggatgggcaggagttagccaggcaaagggaaggaaaaaaacctttccagacacaggaagccacatgctgaggtccttgaggaaagaaaaagattgactgtgtgagaacctgagagaaggtcaaagtgacattggcatgacagcattacaagaaatcaaggagagagtggaacagatgaagatggagaagtcagtagaagaaaataaatcagggccatttaggtcatgttacagagtttcaataagcaaaacactgacataatttgatttagtactaaaa

SEQ ID NO: 328737 - DNA, 546 bp, Homo sapiens
gttacactattatatgtgtgtgtaacttggtgacataggctacaggtcataggcaaaaaataagataaataaaaataaacactaatctactcccactaatgacatgcccctgctctacacctgcttggttgtcatcctgactctatgtgaatgccgtcactgcttattctttcatgaactctctctttaattttgctgaatcaaaatatgtcttcctggaacttactgattagcccaattgctatctatccctagacgcctttcagacaagcttagtttttcttccgcacaataacccttcaaacatttgaaccgagasatgttgtccctgctgaggtttcgcttcacctcacaaagcattctgggcttcaactcagttgatgttatgaacctttgctgattaaatttctctatataccctcacctgtttgagctgcgtatagctcttagaaagatagaattagattgtcctgcaaagagaagagccagatgtggctacaccctgatcaggaaaagaaaagaaaagaaacaggcgacgagcttcag

SEQ ID NO: 328738 - DNA, 450 bp, Homo sapiens
ccaggctctcctgttcacacctaggacaatacctaccattctgctatgggccactgtgagagttgtgagtggaccatgctccacacagcttcttacccagacagctcacctgagagggacctcacgtactctggwcatggacacagtcagtgccattctgagaagtgaacactggactataccctgcccttgggctgagctctgactgacgttactgcaaacacagcccagcccaggagggagggagaggccggatactccttcacaccctgggacaattcctcctgccctgctgcaggttgctgagagaccaaaactcaagcagaccacactctccacagtgttcggtccaagctgttgccagagaggtgccccaccctctctggttgtgggcccacagctggtgctgtttccagtgcagtgctgggctgtaccccaccctcagaccag

SEQ ID NO: 328739 - DNA, 509 bp, Homo sapiens
ctctctggttgtgggcccacagctggtgctgtttccagtgcagtgctgggctgtaccccaccctcagaccaggcatggactaacattgccgcaactatctccatgctgtggagggagaaggcagatcaggcactccatgcaccctgaagacaattcccaccactctgctatccttgctgtgggactgaggcatgagcagtctgcgtttcccatagcttcgtacccatactgctctatctgagaggggtcccaccctccctggtggcaggcccacagcacagcaaccacagctcacacctgagcattctgccagtggcctggggaccactccatctctgcctgtcacagccagcacccaaagaccctaccaggaggcctgaagataagtcttctgacccagagccattcacgtcacccagggcccagaaatttcccagtcccgtccaccactgttggcacctgatcacccctgcyggggcagccccatccaccactgttggcacctgatc

SEQ ID NO: 328740 - DNA, 623 bp, Homo sapiens
taacaaagttgatttcatgtaatgacacacattttcatgcttagtgtttgaaattaaaatatctgttctactttgttaataatatgaataaagcaatgcaggtaaactgttcagagaattgcctgatatttaaagtgttctataatagtcaattttgaacgttagattcaatattaatgtttttattttgtcagacatgtttacatactttataacttacatgtaatatggtaataatgttccaacataagccaaagacagccaagatgtgagaataaagtgagtttgggtaggaggaaatacattttcaggaaaacaaattctgtgttttaaaaaataaattatagatagctgctcaggaggctgaggcagggatattgcttgaacctgtgatgsagaggttgcagtgagccaagatcatgccactgcactccagcctgggcaacagagcgagactccatctcaaaagaaaaattataaatacattttatcagaaatttgattaataaatcaaatactaaatataaaatatgaatataattatagtgagtccatttctatttcatttctgtttcattttgaaatgttcatgtatagtcagattaactacttatggcaaccac

SEQ ID NO: 328741 - DNA, 548 bp, Homo sapiens
tttatgatgtttctttgttatgtgtataattttaagctctaaaaatttgccttatattaggtaaagatttttcaaaaccaaattcaacttttcaygttttaaatttttaaatttagatttcttttcttttaaaattcgagttttaaaaagcagcttacttaacttcaccctaaccttaatctcttaaataggtaaatgcattagaatgaataatggccacaaaaggggacctaatctggaacctgtatatatatatgtatatatatacacacacacacatacatggtgattatataaggtattatatacacacagtattatatatataaggtattttttatatatatggtgattatataaggttttatatatatatatatatgatctctgctcattacatttctgcctcccaggttcacgtgtgtttaaggattttgaatttaagaaatatgatttttaattttctttgaaacaaattattgcttttatttgaatttggaatgaagatccattaagatcaagttaaggttgtgcaatttgaagtaaca

SEQ ID NO: 328742 - DNA, 548 bp, Homo sapiens
tttatgatgtttctttgttatgtgtataattttaagctctaaaaatttgccttatattaggtaaagatttttcaaaaccaaattcaacttttcatgttttaaatttttaaatttagatttcttttcttttaaaattygagttttaaaaagcagcttacttaacttcaccctaaccttaatctcttaaataggtaaatgcattagaatgaataatggccacaaaaggggacctaatctggaacctgtatatatatatgtatatatatacacacacacacatacatggtgattatataaggtattatatacacacagtattatatatataaggtattttttatatatatggtgattatataaggttttatatatatatatatatgatctctgctcattacatttctgcctcccaggttcacgtgtgtttaaggattttgaatttaagaaatatgatttttaattttctttgaaacaaattattgcttttatttgaatttggaatgaagatccattaagatcaagttaaggttgtgcaatttgaagtaaca

SEQ ID NO: 328743 - DNA, 593 bp, Homo sapiens
tttttctgcctaaaaattgacatcatgtttttctaattttttttgaagggatgagtatgagagaatcctggggtaaagcaggaagacgtgataaatgtgcattgcttctcttagctgagtttattttttcctcttacagaatatctaaggacagagcttattgcttgataatccattaagtacttgagtctaaaatgcaataaygctttattgtcaactggttaatgctgattaaagagttaggactctctggcaagttgattagccatacttgaggatggtgtgagtaaacggtgtatttatgaatatgaaccactggatcctgtgaaagaacacatcttctaggtgtactaactatattatactgcctgaatatgagcaagcaactaatgagtatacctaaagaggtaacaaaagatttaaatactttaaaatacaaaagtttaatttggagaaatgttaaactttctattttgagtgttaaccaaaattaaaataacatacctttcaaattagtacagaagataatatcaaatacttttccctatattttaggaagaactcaaagaaaatatctgtgaaatgcaaaatag

SEQ ID NO: 328744 - DNA, 533 bp, Homo sapiens
ggtttacacacgccagtctttcagtttctattaagttcagatagcatcattagtctcatcaactctatggtcctgagaatgtttctggagtattaaatcattaggaaaatcctatcctttgagttacttcattagaaagttattgatcttgtttgatgatgaattgttacttctctgaaagtttgaaagtcctaccatctcaacaaattagactgcttttgttatttgcatcagttaattaggcagttttgttatttgcatcaacattttgtcttggtgcattttttgcattgtttaatttttattttataattttatgtatattatccatgttgaattttttaaaaattacaacagcaagwcatttattttagaaacactactgatgtcctattgcacgaaaaattctataaaactaattatgttacttaaccaaacttccctaagttatttgtaggtgtttgagtaatttaaaacttagttaaaagtaaaaatgctaattgtttttacaatttcagcttttatcatagatt

SEQ ID NO: 328745 - DNA, 533 bp, Homo sapiens
ggtttacacacgccagtctttcagtttctattaagttcagatagcatcattagtctcatcaactctatggtcctgagaatgtttctggagtattaaatcattaggaaaatcctatcctttgagttacttcattagaaagttattgatcttgtttgatgatgaattgttacttctctgaaagtttgaaagtcctaccatctcaacaaattagactgcttttgttatttgcatcagttaattaggcagttttgttatttgcatcaacattttgtcttggtgcattttttgcattgtttaatttttattttataattttatgtatattatccatgttgaattttttaaaaattacaacagcaagacatttattttagaaacactactgatgtcctattgcacgaaaaattctatamaactaattatgttacttaaccaaacttccctaagttatttgtaggtgtttgagtaatttaaaacttagttaaaagtaaaaatgctaattgtttttacaatttcagcttttatcatagatt

SEQ ID NO: 328746 - DNA, 533 bp, Homo sapiens
ggtttacacacgccagtctttcagtttctattaagttcagatagcatcattagtctcatcaactctatggtcctgagaatgtttctggagtattaaatcattaggaaaatcctatcctttgagttacttcattagaaagttattgatcttgtttgatgatgaattgttacttctctgaaagtttgaaagtcctaccatctcaacaaattagactgcttttgttatttgcatcagttaattaggcagttttgttatttgcatcaacattttgtcttggtgcattttttgcattgtttaatttttattttataattttatgtatattatccatgttgaattttttaaaaattacaacagcaagacatttattttagaaacactactgatgtcctattgcacgaaaaattctataaaactaattatgttacttaaccaaacttccctaagttatttgtagrtgtttgagtaatttaaaacttagttaaaagtaaaaatgctaattgtttttacaatttcagcttttatcatagatt

SEQ ID NO: 328747 - DNA, 561 bp, Homo sapiens
agaatgggtagtagaagaaggtrgtcatcaataccagctatcgccacatgaccagttgcagataagaggactgtaattgtcatgagtatttcctcctacttttgttaaaaacatgtttgtgcatgtatacacttgtactaagaaaatatttgcattttatttcctttttcctttatcatgtgacataagatttgttgattttatatgagcatttaagtattgttaactttatgtaatagcatttgggttggggattggtgtgtttccagttgtacaaagggtagttgtattatgttaggcataattatgaccttattattttctttatttgaagattatgtataatctcaggggatgtatatgggttcacgttgataaggggtgaactcatgatgattaatactgagtgtcagcttgattggattgaaggatgcaaagtattgatcctgagtttatatgcaagggtgttgccaaaggagattaaactccagtttttaaagccatcagatatcatgaggcttattaactatcatgagaacagcaccggaaagatccacctcc

SEQ ID NO: 328748 - DNA, 561 bp, Homo sapiens
agaatgggtagtagaagaaggtagtcatcaatamcagctatcgccacatgaccagttgcagataagaggactgtaattgtcatgagtatttcctcctacttttgttaaaaacatgtttgtgcatgtatacacttgtactaagaaaatatttgcattttatttcctttttcctttatcatgtgacataagatttgttgattttatatgagcatttaagtattgttaactttatgtaatagcatttgggttggggattggtgtgtttccagttgtacaaagggtagttgtattatgttaggcataattatgaccttattattttctttatttgaagattatgtataatctcaggggatgtatatgggttcacgttgataaggggtgaactcatgatgattaatactgagtgtcagcttgattggattgaaggatgcaaagtattgatcctgagtttatatgcaagggtgttgccaaaggagattaaactccagtttttaaagccatcagatatcatgaggcttattaactatcatgagaacagcaccggaaagatccacctcc

SEQ ID NO: 328749 - DNA, 561 bp, Homo sapiens
agaatgggtagtagaagaaggtagtcatcaataccagctatcgccacrtgaccagttgcagataagaggactgtaattgtcatgagtatttcctcctacttttgttaaaaacatgtttgtgcatgtatacacttgtactaagaaaatatttgcattttatttcctttttcctttatcatgtgacataagatttgttgattttatatgagcatttaagtattgttaactttatgtaatagcatttgggttggggattggtgtgtttccagttgtacaaagggtagttgtattatgttaggcataattatgaccttattattttctttatttgaagattatgtataatctcaggggatgtatatgggttcacgttgataaggggtgaactcatgatgattaatactgagtgtcagcttgattggattgaaggatgcaaagtattgatcctgagtttatatgcaagggtgttgccaaaggagattaaactccagtttttaaagccatcagatatcatgaggcttattaactatcatgagaacagcaccggaaagatccacctcc

SEQ ID NO: 328750 - DNA, 522 bp, Homo sapiens
tatattaatatatccacatacattattaatatatccacagtgctttctgattagtgaccttcgatattactattgtaattattttgggatgacacaagctgttactatataggatggcaaacttattcaacaaatgtgtgtattcagatgaatccactgaccagacctttctgcaatgtaaaatatgttcttattgtctttgtgaaaagtaaattgactgtaaatgtctagatttatttctgggttctctagtttgttcttatcacattgcattactctgatcttctcttctgttccctccttaaaaygtcccaatatagagaacccaattctatgggttctatttatatgcttatatatctatgtgtctgtttatatgccagtaccatgttgttttgtttactatggctttgtagtatattttgaagtcagatagtatgatgctatcagcttgattctttttattcaggaatgctttggctatttagggtcttttgtgggtctatacaaattttagatttt

SEQ ID NO: 328751 - DNA, 561 bp, Homo sapiens
agaatgggtagtagaagaaggtagtcatcaataccagctatcgccacatgaccagttgcagataagaggactgtaattgtcatragtatttcctcctacttttgttaaaaacatgtttgtgcatgtatacacttgtactaagaaaatatttgcattttatttcctttttcctttatcatgtgacataagatttgttgattttatatgagcatttaagtattgttaactttatgtaatagcatttgggttggggattggtgtgtttccagttgtacaaagggtagttgtattatgttaggcataattatgaccttattattttctttatttgaagattatgtataatctcaggggatgtatatgggttcacgttgataaggggtgaactcatgatgattaatactgagtgtcagcttgattggattgaaggatgcaaagtattgatcctgagtttatatgcaagggtgttgccaaaggagattaaactccagtttttaaagccatcagatatcatgaggcttattaactatcatgagaacagcaccggaaagatccacctcc

SEQ ID NO: 328752 - DNA, 522 bp, Homo sapiens
tatattaatatatccacatacattattaatatatccacagtgctttctgattagtgaccttcgatattactattgtaattattttgggatgacacaagctgttactatataggatggcaaacttattcaacaaatgtgtgtattcagatgaatccactgaccagacctttctgcaatgtaaaatatgttcttattgtctttgtgaaaagtaaattgactgtaaatgtctagatttatttctgggttctctagtttgttcttatcacattgcattactctgatcttctcttctgttccctccttaaaacgtcccaatatagagaacccaattctatgggttctatttatatgcttatatatctatgtgtctgtttatatgccagtaccatgttgttttgtttactatggctttgtagtatattttgaagtcagatagtatgatgcyatcagcttgattctttttattcaggaatgctttggctatttagggtcttttgtgggtctatacaaattttagatttt

SEQ ID NO: 328753 - DNA, 578 bp, Homo sapiens
agactacaataaccagacttcatgactttttaaaaagccttaagtcttagagaatatttttccagttcactacatagtatagaatgattccaaaatgttttggggaatactgggctctattcagactggtaaatgtcttagtctttaaaacatacattttttttagtttcrtggcctttctcatcttacaaaccattttattttaatcattcaataaatatttactgaaattcaatatgtgttagagactatcacaaattcagagagaagagatgaaaatatgcacagaacatttcatagccagttcaagacaaggcttgagctttgtccctgaaaccatagctataaagacacatacacacacacacagacacacacacaaaacaatagtaatgttacattgttgaatggaaaaattgatcaatctcttgatgaaagaatccttaattctagtcattctgcttcctagacattttttttgagttcttcactctccacttgcctcaccagtgaaatttcttacatgtaattctactctctgaatgaaatatcccattgttcttatgattggctgacaa

SEQ ID NO: 328754 - DNA, 567 bp, Homo sapiens
cacattatatttaaagccagaagaagttgtgttggacattacagcatatgaagattccacagaaatatttgagccagtagagtcagatgagaaaatcagaggacttccctttaatggagaagggactgtggaattttaagtaggaaatccacaaagccagctatacatatgaatgttattagaacsaaataagagcctgctctaagctcaatgctttgttgtgagaaagaaaaatggaattctaagttccccaatcaatgggacatccatcccagagcaaacttggaagaggagttcttggccataatggtacgggaggtcagtcatgcctcattatacttcctctgtcactaaccaccgttaggttttcttccccaagaactaaacagaaactggccctctcaaaatactgcagggctgatttcaatcagcttcctgactgtttcccctccttgttgtggtttccatacaataagcgactagcatttcttcctgataatagaccaccagccacagccaccaaccatggagcatttctagccaggctcaagaggatgtgcagtgggg

SEQ ID NO: 328755 - DNA, 488 bp, Homo sapiens
tccttgaattccagggaattctttcagatcttgtcaaagacaaccatggaaatacttctacaagtctgcaagagccacagtgtcattggtcttggggtgtcccctaatgcaggtatggctgagtgaccaaagacttagatcaaaacatccaagtttcactgaatacctggaaggccatcccaagaaggactagtacamaaaagctcacaatgtgaaaactacagtaaatacataattcttcaatgcctgaacactgacgaatatgcacaagcatcaagaccatccaggaaaatatgaccacacaaaatgaactaaataagacacaagggaccaattctagagaaagagatatgtgacctttcacataaagaattcgaaacagctattttgagaaaactcaacaaaattgaagataacagagaaaaaagtttcagaatcctatcagttaaaatttaaaaagaaatttgaaataataaaaaagaatcaag

SEQ ID NO: 328756 - DNA, 560 bp, Homo sapiens
attagtagagagaaaaaataataaagagcagaacagaaataaatgaaattgaaatgaagaaaacaacccaaaagatcaacaaaatgaaaagttggctttttgaaaagataaaatcgacaaattgttagtcaaactaataaaaaaaagagaagtcccaaataaataaaatcagcaatgaaaaagagacattaaaaccrgtgcttcagaaattcaagggattgttagaggctgttatgggcagctatataccaataaattggaaaacctaaaggaaatggataaatgcctagacacatattacctaccaagattaaaccatgaagaaatccaaaaccttaacagaccaataacaagtaacaaaatggaagccataataacaaatctcccagcaaataaaagcctggggccctatggcttcactgctgaattttaagaaacatttaacgaagatacaataccaattctactcaaactaatctgagaaatagaagaggagggagtactttcaaattcattctacaaggtcagtattactctgataccaaaacttagcaaagaca

SEQ ID NO: 328757 - DNA, 560 bp, Homo sapiens
attagtagagagaaaaaataataaagagcagaacagaaataaatgaaattgaaatgaagaaaacaacccaaaagatcaacaaaatgaaaagttggctttttgaaaagataaaatcgacaaattgttagtcaaactaataaaaaaaagagaagtcccaaataaataaaatcagcaatgaaaaagagacattaaaaccgstgcttcagaaattcaagggattgttagaggctgttatgggcagctatataccaataaattggaaaacctaaaggaaatggataaatgcctagacacatattacctaccaagattaaaccatgaagaaatccaaaaccttaacagaccaataacaagtaacaaaatggaagccataataacaaatctcccagcaaataaaagcctggggccctatggcttcactgctgaattttaagaaacatttaacgaagatacaataccaattctactcaaactaatctgagaaatagaagaggagggagtactttcaaattcattctacaaggtcagtattactctgataccaaaacttagcaaagaca

SEQ ID NO: 328758 - DNA, 532 bp, Homo sapiens
tccaacattgcttcatgattaaacccctcaaaaaatgggtatacaaggatcatgcctcaacatatacaaaaagaagccacataggacagacaatgaatggggaaaaactgaaagcttttcctctaagatctggaaactgacaagaatgccgacttttaccacttttattcaacatagcactggcagtcttccctggagtaatcgacaacagaaagaaataaaaacctyccaaattggaaaggaataaatcaaattatccttgtttgccgatgatatcatcatatatttgaaaaaacaaaaacacttcaccagaaaaccattagaactgataaattcagtaaagtaacaaaatcaacatgtaagaatcagaagcctttctatatgccaacagcaaataatctgaaaaagaaatcaagaaagtaatcccatttacaatagataaaataaaatatgcatgaatgaacttaatcaaagaagtgaaagactctactttgaggaaaaaatttacaatttctgacaaacactatatgac

SEQ ID NO: 328759 - DNA, 540 bp, Homo sapiens
aagcctgtatgccaatatttacagatgcttcattcataaattcctagaattggacacatctattttgtttttccttttataataaattctggaaaatataaatgtattgggataaaacaatagttgggtgtaatagttaagtacaggagtgtcatgcaaggaatawtttcaggggaagtaatgatcatgggtggggatggtagatgcatggctctaactctagatttcaatttagatttgtcaaaaatcatggaactgtgcaccacaaagaatgaactttcctgcatgaaaattaaaatcaaatcaatgagcattagggtatttcacaggaagaaatgcatactgtgacaaatgaatctcattgttttacaaatatatactatgttataacaccattaaaaagtgagaataaaggagctaactctggaaaatagcattttaatcagacactatgaggggaaaactgaaaaataattgtatgtaaatattctttttgggggtattttttctcataggagtactgattagaaattaagaaac

SEQ ID NO: 328760 - DNA, 528 bp, Homo sapiens
ttgtgaacataattatacatattttccaggtcaatatgtgcacatgaagacctccaaatgtagaaaatccagtttattaagatccccagcatctgcattctgaattcctttgttctgttttgctgaggtcatattttccagaggcttattcccctgctcaatacccattatcaaaccacasaaggggtgctcagtcagaaatattccagaaagacacacaactactctgacaggcagctatagcttccaagaatggtttcacaagaaatttgtggtaagatggtggagtagaaggcaccaggaatctgttacccagagaacaattgcagtggcagaatctgtataacataagtattttagaactcggaaggctttcaacgctcagaggaagtcttgcatgtaaattacagttaattttggtcaatttcaggtgttagcacagtagaaactattcttccccaacttccagcctcatggcaggcagatgtgcatgtgttcctaaagcagttgcaagcaagctgcaggagc

SEQ ID NO: 328761 - DNA, 641 bp, Homo sapiens
cttcttgtctgtacttaacacaaattgtgagtttctgggtttttttttgctagaattggatattctcagacaatacaagaaattcacattgtaatctcctcctcagctatcaaactgaactgttttcaacaactaatataataagaattttcaaaacaggaaaaagagaatatgtgtatggatacattttcatgtgtgtgttgagatgtaggtgtgggtgtatgtctggatggatataagacagatgattgacaggcattacagacagataataaagatagatatttagtttactttttcacaattaattgcattcacatgtaattttgagaaactgacttaaatgtataacaattatttttgtttggaaacatgggagtcayaaggtacatggttattaaagaaaatttttgaacattaacataaatttaattaattgataacaaagtcaacaacaaaagtatttcaaaagcaggtgttttttctgaagagctaattagccattgagttattttataaaattaaatgtataataatgttaaaacttatccttttgtctctttacttctgcaaagttattaaatctgaatataaaataatatatatccagtttatattattctatgtgccaactaccatta

SEQ ID NO: 328762 - DNA, 609 bp, Homo sapiens
cagaaaaacagccataatatagaatgtcagttttaaattaatcagaataatacacgtatgtggctttatggattagatcacatttacttttaaatgttgcgtgttttgttttgttccttctgcaatcaaactaaaatgagaccaattatacaccatttatacactgcaaagaaatgtacatgtttgtggagagctgaatatgggtgtgaagtgatcagttctagtattgatctacatatttaaattttaaatgatataaagtgaaayaaatatgaactttatggcaattgaagataaatcttcacttccaatattttttttttttttttgagacggaatctcactctgtcatccaggctggagtgcaatggcgtgatatcagttcactgcaatctctgcctcccgggtttaagtgattctcctgcctcagcctcccaagtagctgggattacaggcacatgccaccaagcccagctaattttgtgtttttattagagatggagtttcaccatgtttggccaggctgatcttgaattcctgacctcagtgatccacctgccttggcttcccaaactgctgggattacaggcatgagccacagagcccaga

SEQ ID NO: 328763 - DNA, 553 bp, Homo sapiens
tatttcactaatattttatagtttttagcaaacatttcctgtacatgttttgatgagttttcacctaagtatttctctctcttttttggcaattttaaatarcattttatttttaattttgggttccagtgttaaaatttagaaatacaattgatttttaaatgtttactttatatcttgtgacctggtcaaacttattattagttctggacattgagtttgttttattttggttttgtacattccttgtgaacctataatgtagtaaatcattaaaagtacattggatttgcaatataagttgatgcacattttgaataagtattgaggcttccagttcaggaatcctcaaggtaaacagttctaaataagcgaatatcacttttaccttgaagaatttcaaaattattttcaatcatactcctcacattttatttatcttaatatagataaacagcatatcaaaaattgtctagcgagtcagaacaaatgtttcatttaatcatctagcctacttactaagagtatataaataaatattttggcctacttc

SEQ ID NO: 328764 - DNA, 553 bp, Homo sapiens
tatttcactaatattttatagtttttagcaaacatttcctgtacatgttttgatgagttttcacctaagtatttctctctcttttttggcaattttaaatagcattttatttttaattttgggttccagtgttaaaatttagaaatacaattgatttttaaatgtttactttatatcttgtgacctggtcaaacttattattagttctggacattgagtttgttttattttggttttgtacattccttgtgaacctataatgtagtaaatcattaaaagtacattggatttgcaatataagttgawgcacattttgaataagtattgaggcttccagttcaggaatcctcaaggtaaacagttctaaataagcgaatatcacttttaccttgaagaatttcaaaattattttcaatcatactcctcacattttatttatcttaatatagataaacagcatatcaaaaattgtctagcgagtcagaacaaatgtttcatttaatcatctagcctacttactaagagtatataaataaatattttggcctacttc

SEQ ID NO: 328765 - DNA, 507 bp, Homo sapiens
tttattaaaaatatcatttctaaattccttgtatgtaatacttacacaatagttttaaaattacaaatttcaaaaactaaaaaaaaataaggatgatattaaaaatgaaacacaccaaaatattctgcctctgtcatccatttataattctgagtcagttttttcattttgctgtgtgtatgctacaactgccatgtttataaaacgagggacataattcttctcatgagcaaattaaaaataagtatttgacyggtgtgttgaccctactaaaataatggtacgaaatttcttaaatggagtattttgcatcttcatttcaaagatagtcctgttcatccatttgtgaaatatgcatgtactctgtcaatgtgtgcaacagtttatcagtaacagagagatatgcaagtagtataagtcatggttcattacctttaaagaattaaattctacttggaaagatacaaaagggcaaaaaaaaacacctcaaaaaatactacaagcaat

SEQ ID NO: 328766 - DNA, 507 bp, Homo sapiens
tttattaaaaatatcatttctaaattccttgtatgtaatacttacacaatagttttaaaattacaaatttcaaaaactaaaaaaaaataaggatgatattaaaaatgaaacacaccaaaatattctgcctctgtcatccatttataattctgagtcagttttttcattttgctgtgtgtatgctacaactgccatgtttataaaacgagggacataattcttctcatgagcaaattaaaaataagtatttgaccggtgtgttgaccctactaaaataatggtacgaaatttcttaaatggagtattttgcatcttcatttcaaagatagtcctgttcatccatttgtgaaatatgcatgtactctgtcaatgtgtgcaacagtttatcagtaacagagagatatgcaagtagtataagtcatggttcaytacctttaaagaattaaattctacttggaaagatacaaaagggcaaaaaaaaacacctcaaaaaatactacaagcaat

SEQ ID NO: 328767 - DNA, 622 bp, Homo sapiens
cttggcgggcagcttgacctgggatttccagcctccagaactgtgtgatttgtttaagccactccacgtatggtatttttgtcctggcagccagggcaaactgatacagaggcatttcctttggtgtcatccttagtggttgctgagaaatatggccagctttcaggatccccttcctatttacagcaggttggggattcaagggctacttgctttcaaatagtcatggccttttgaaacttgatctcatagtttctttagttgcactgcagtctatattcatctgttcaaatctagtcagttccatgtgccagttatttttgaaaaataatatctagatctgctacattgctttttwaaattttttaaattttttaatttttttacaaagtatctttttctcagagtgctctggaaagcctacacctttaatataatttgtatcctgaacttttaatgcactgacaggtagaattagttgacctaccattagattgacttatttcctctgtaagaagttttatcaggtgagaaattttggtaatagaaaaggtggccacatcttaatctgattctttgcttcaacggtgattttcaaaggacttagttgctcatatgtttt

SEQ ID NO: 328768 - DNA, 622 bp, Homo sapiens
cttggcgggcagcttgacctgggatttccagcctccagaactgtgtgatttgtttaagccactccacgtatggtatttttgtcctggcagccagggcaaactgatacagaggcatttcctttggtgtcatccttagtggttgctgagaaatatggccagctttcaggatccccttcctatttacagcaggttggggattcaagggctacttgctttcaaatagtcatggccttttgaaacttgatctcatagtttctttagttgcactgcagtctatattcatctgttcaaatctagtcagttccatgtgccagttatttttgaaaaataatatctagatctgctacattgctttttaaaattttttaaattttttaatttttttacaaagtatctttttctcagagtgctctggaargcctacacctttaatataatttgtatcctgaacttttaatgcactgacaggtagaattagttgacctaccattagattgacttatttcctctgtaagaagttttatcaggtgagaaattttggtaatagaaaaggtggccacatcttaatctgattctttgcttcaacggtgattttcaaaggacttagttgctcatatgtttt

SEQ ID NO: 328769 - DNA, 583 bp, Homo sapiens
gtgtattaaatgtatacaattgcaaaacaactgaagtttgttaccactatttgttatgtcaaaccacagtttaaatgtaacgtattctaaggccagcagagtatttcataatcagcatgaaaaatgtgtttggaagacaagttacaactggatggtaagagtaagtgagacrgttgacattaagaatgtttacagtgattctgagcaccaagaagggtgtttgttataaaacataacacacaagatctgaaaaggactgagttaaattatcactctgtgaggcaaagggtctgaaaaattcagattagtttttttatcttgtttgtctagaaaacttcagaaaacatatttatctcaattttatagatttatgcaattgatagatatttataactactgagcaatacgtctatcttagagatgagagtatgttaatattaactatttattgttcatcaggtcttgtgctagagacatttcctatgtttttcatttaatacttaagtaaatacaattattatatttaataattatgtaacagacccgaagatataggttttgtggggcttgcagtttatgcaat

SEQ ID NO: 328770 - DNA, 510 bp, Homo sapiens
tataactttggtttgcaattccacacttcattttcttctttcttgtagtttaagaaaataatgtgtttaaagtattcatgataaaagcattcaaaaaactaggaatataagmaaatcaacttggctgggcagggtggctcatgcctgtaatccctgtactttgggagacctaggcagtcatattacctgaggtcaggagttcgagaccagcctcgccaacatggtgaaacactgtctctactaaaatacaaaaattagccaggtatggtggcacagctactcgggaggctgagacaggagaatcacttgaacctggaggcagaggttgcagtgagccgagattatgccactgcactccagcctgggcaacagggtgagaatccatctcaaaaaaataaaataaaattatttcagcataataaataccgtataggtaaaacctacattatactcaaaagtagaacactaaaaacctttaagatcaggaacaaggtaagtatgctcactttc

SEQ ID NO: 328771 - DNA, 510 bp, Homo sapiens
tataactttggtttgcaattccacacttcattttcttctttcttgtagtttaagaaaataatgtgtttaaagtattcatgataaaagcattcaaaaaactaggaatataagcaaatcaacttggctgggcagggtggctcatgcctgtaatccctgtactttgggagacctaggcagtcatatwacctgaggtcaggagttcgagaccagcctcgccaacatggtgaaacactgtctctactaaaatacaaaaattagccaggtatggtggcacagctactcgggaggctgagacaggagaatcacttgaacctggaggcagaggttgcagtgagccgagattatgccactgcactccagcctgggcaacagggtgagaatccatctcaaaaaaataaaataaaattatttcagcataataaataccgtataggtaaaacctacattatactcaaaagtagaacactaaaaacctttaagatcaggaacaaggtaagtatgctcactttc

SEQ ID NO: 328772 - DNA, 514 bp, Homo sapiens
tttaattatgtttaatttcatttaaggaaaaacgcagatactgtccaaattcttactttatttggtgtcttataaatataataggtataacaaaaaatattttacaatgtgttttcataagcttgattgcatctaatctgtatttttattatggaagatgagctttaaatattaaccacaacaaaatacaatataatcattttaaagacgctgtgttgataaagcttttattatcattcttcctacttatctaccctataacsatagcacagacctaccctggtttctgtttagtgtcatagtcctcactgtcaacacaaattaactcaaggaggtaagcagtttgtttctcccttatgactttctcaggcaataaataaaaacctaggataaataaaatctgaaatacttatcgtggcaggtctattgtcatgatttgtagttgatgtggattatgcccttatagtaaacttctatgtcagaaatgttttgtcaataacaatattacacaaaa

SEQ ID NO: 328773 - DNA, 582 bp, Homo sapiens
tttaacaagtattataaatagtaaagctttttttgcaatcatttcggttttttatcaacccaccagaagcagcaccaaagaaaactggcatgttctctaagagtgaaaactaaacctattttgctctttaataactgtagttgaaggaaastgaaattaatgatagcattgttacagaagaaaaggaaaggaaaaataagaagaaaggctgaatgacggaagacaatggccaggctaaaaagttaatattgacacaggcaatacaagcatctgcaaaaggaaaaaattgagaactacatctggaggctctgaaatagatactactaaacctcaaaagcaacctttaaaggtaaagaaaaattgagaaaaacctgaaatattcagctttcctgaagtcagaacagggaaaaagagaaatagctctgaaaatgcagaattcctggcttccaaaccaaaagcaaataaaatgtctcaaaacacacattttaaaatctttaaaagtttacaaagaaaacagaggtatagcaactttaagattataattagataaacaaggttatgttttacccatttcatagccac

SEQ ID NO: 328774 - DNA, 582 bp, Homo sapiens
tttaacaagtattataaatagtaaagctttttttgcaatcatttcggttttttatcaacccaccagaagcagcaccaaagaaaactggcatgttctctaagagtgaaaactaaacctattttgctctttaataactgtagttgaaggaaactgaaattaatgatagcattgttacagaagaaaaggaaaggaaaaataagaagaaaggctgaatgacggaagacaatggccaggctaaaaagttaawattgacacaggcaatacaagcatctgcaaaaggaaaaaattgagaactacatctggaggctctgaaatagatactactaaacctcaaaagcaacctttaaaggtaaagaaaaattgagaaaaacctgaaatattcagctttcctgaagtcagaacagggaaaaagagaaatagctctgaaaatgcagaattcctggcttccaaaccaaaagcaaataaaatgtctcaaaacacacattttaaaatctttaaaagtttacaaagaaaacagaggtatagcaactttaagattataattagataaacaaggttatgttttacccatttcatagccac

SEQ ID NO: 328775 - DNA, 582 bp, Homo sapiens
tttaacaagtattataaatagtaaagctttttttgcaatcatttcggttttttatcaacccaccagaagcagcaccaaagaaaactggcatgttctctaagagtgaaaactaaacctattttgctctttaataactgtagttgaaggaaactgaaattaatgatagcattgttacagaagaaaaggaaaggaaaaataagaagaaaggctgaatgacggaagacaatggccaggctaaaaagttaatattgacacaggcaatacaagcatctgcaaaaggaaaaaattgagaactacatctggaggctctgaaatagatactactaaacctcaaaagcaacctttaaaggtaaagaaaaattgrgaaaaacctgaaatattcagctttcctgaagtcagaacagggaaaaagagaaatagctctgaaaatgcagaattcctggcttccaaaccaaaagcaaataaaatgtctcaaaacacacattttaaaatctttaaaagtttacaaagaaaacagaggtatagcaactttaagattataattagataaacaaggttatgttttacccatttcatagccac

SEQ ID NO: 328776 - DNA, 599 bp, Homo sapiens
gtaattgataaaattcgacttctttcataataagaaccctaaaagaactaggtatagagtgaacatatctcaacacaatgaaaaccatttatgacagacccacagctggtatcatattgaatagggaaaaagtgaaagcctttcctctaagatctggaacaagacaataatgtcccctttcaccactgttattcaacacggtactgaaagtcctcactagagcatttggataagagaaagatatttaggccatgctgaatggaaaggaagaagtcaaatgatcctgtttgcagatgatatgaacttatattcgggaaaacctaactactccacctgaaaactattataactgataaacaattcagtaaagttgcagaacacaaagtcaacatacaaaaatcagtatcattyctatatgctaaaagaaaataatctgaaaaaaatcaagaaagtaatctcatttacaatagctacaaataaagttaaataaccttgcatttaacttaatcaaataagtgaacaatctctataataaaaactataatgatggaagaaatggaacaggacaaaaaaaaaaggaaagatattctatgtcaatg

SEQ ID NO: 328777 - DNA, 526 bp, Homo sapiens
atcttgtcatttgcaacaacatagatggaactggagacattctgttaagtgaaataagccagatacacaaaggcaaactttgcatgttctcacttatttgtgaatggtaaaaattaaarcagttgaacacatagagacggagagtagaatgatggataccagaggctaggaaaggcagtggtttcagggaagcgggcatggttaatggattaaaaaatgtaaatagaatgaatatgaattactatttgacagcacaatagggtgattacactcaacaataatttattgtatgtttaaaatatctatatgagtacaattggattgtttgtaacataaaatgaataaatgctgaggtgatgtgtactcaagttaccctgatgtgattattatacgttgtatgcctacatcaaaatatttcacgtataccacaaatatgtatatatacctactatgtagtcacaaaattaaccaaaaaaaaaaagaaagttttcaggaccacaggcaaagacataaaatgtactacaaa

SEQ ID NO: 328778 - DNA, 526 bp, Homo sapiens
atcttgtcatttgcaacaacatagatggaactggagacattctgttaagtgaaataagccagatacacaaaggcaaactttgcatgttctcacttatttgtgaatggtaaaaattaaaacagttgaacacatagagacggagagtagaatgatggataccagaggctaggaaaggcagtggtttcagggaagygggcatggttaatggattaaaaaatgtaaatagaatgaatatgaattactatttgacagcacaatagggtgattacactcaacaataatttattgtatgtttaaaatatctatatgagtacaattggattgtttgtaacataaaatgaataaatgctgaggtgatgtgtactcaagttaccctgatgtgattattatacgttgtatgcctacatcaaaatatttcacgtataccacaaatatgtatatatacctactatgtagtcacaaaattaaccaaaaaaaaaaagaaagttttcaggaccacaggcaaagacataaaatgtactacaaa

SEQ ID NO: 328779 - DNA, 526 bp, Homo sapiens
atcttgtcatttgcaacaacatagatggaactggagacattctgttaagtgaaataagccagatacacaaaggcaaactttgcatgttctcacttatttgtgaatggtaaaaattaaaacagttgaacacatagagacggagagtagaatgatggataccagaggctaggaaaggcagtggtttcagggaagcgggcatggttaatggattaaaaaatgtaaatagaatgaatatgaattactatttgacagcacaatagggtgattacactcaacaataatttattgtatgtttaaaatatctatatgagtacaattggattgtttgtaacataaaatgaataaatgctgaggtgatgtgtactcaagttaccctgatgtgattattayacgttgtatgcctacatcaaaatatttcacgtataccacaaatatgtatatatacctactatgtagtcacaaaattaaccaaaaaaaaaaagaaagttttcaggaccacaggcaaagacataaaatgtactacaaa

SEQ ID NO: 328780 - DNA, 623 bp, Homo sapiens
ctagtcttatagattttataatgtaagtgaaagcaaatctgtaaaataagaatagaaaaccacratgctgactgataacaacaaagacaacactcataagtttctctaacagtgctttttctgcaactgtggagaaaaatggaaaatatatctgtgaatattcagggaattagaataaatatctgggtatttgaggaattttggtatcaaatgctactttccagagttgaacaagtattccacagccctaaagagctcctgaacactcaaaaggacttcataaaagaatagaagaaaagaatcctttttgacagccaaaattaactagaatacaatctaatattgcctttcaaacatccccatatacaaccatacctccctcaagatagataaaagcaaataaaacataaaatatgtaatccaaaaataaaataaatttaataaaaacaaatacatttttcatgctgtcaaaaggaaaacaataggaaggtacatgcacattatatggaaaagcaattgttacccatattaaatgtaggtaaattaaagaagtcaaaaaacacctacacaaaatataacatgtcaaaagagaagagcacagtaaaaaaaaaaagggagttcaa

SEQ ID NO: 328781 - DNA, 623 bp, Homo sapiens
ctagtcttatagattttataatgtaagtgaaagcaaatctgtaaaataagaatagaaaaccacaatgctgactgataacaacaaagacaacactcataagtttctctaacagtgctttttctgcaactgtggagaaaaatggaaaatatatctgtgaatattcagggaattagaataaatatctgggtatttgaggaattttggtatcaaatgctactttccagagttgaacaagtattccacagccctraagagctcctgaacactcaaaaggacttcataaaagaatagaagaaaagaatcctttttgacagccaaaattaactagaatacaatctaatattgcctttcaaacatccccatatacaaccatacctccctcaagatagataaaagcaaataaaacataaaatatgtaatccaaaaataaaataaatttaataaaaacaaatacatttttcatgctgtcaaaaggaaaacaataggaaggtacatgcacattatatggaaaagcaattgttacccatattaaatgtaggtaaattaaagaagtcaaaaaacacctacacaaaatataacatgtcaaaagagaagagcacagtaaaaaaaaaaagggagttcaa

SEQ ID NO: 328782 - DNA, 581 bp, Homo sapiens
aatatgatactaatctcattaataaagcttcaaaaatcttcaaccaaatactagtgaatggaatttagcaatatttataaaaaagtaaaaaacacartttttttctagaaacgcaaaagttgtttaactcacagcattagcagaaagggtttaaaaatcagatcatcatcttgatatatggattaagtattttaactctcataactcttcataacatgtcatgataaaaccaatagcaaattagaaatgagagacaatttctttactctgacaaaaagtacctataaaagtccttcatcaaacattatgcatggataattactgaaagttcccccttagaacatggatgactcaagcatgccaatatcacacaataatatataatattataatggaagtgctagtcacaaaaataaggcaagaaaagagaattttttaaatatagaagggataaagaaataaaaataaagaaaaacattatcactattcacagattatatgatcttatacatgtaaatatatgcatcaaaaagatatgtccaagaatgtccataactgccttagtcataatagcccaacaa

SEQ ID NO: 328783 - DNA, 581 bp, Homo sapiens
aatatgatactaatctcattaataaagcttcaaaaatcttcaaccaaatactagtgaatggaatttagcaatatttataaaaaagtaaaaaacacaatttttttctagaaacgcaaaagttgtttaactcacagcattagcagaaagggtttaaaaatcagatcatcatcttgatatatggattaagtattttaactctcataactcttcataacatgtcatgataaaaccaatarcaaattagaaatgagagacaatttctttactctgacaaaaagtacctataaaagtccttcatcaaacattatgcatggataattactgaaagttcccccttagaacatggatgactcaagcatgccaatatcacacaataatatataatattataatggaagtgctagtcacaaaaataaggcaagaaaagagaattttttaaatatagaagggataaagaaataaaaataaagaaaaacattatcactattcacagattatatgatcttatacatgtaaatatatgcatcaaaaagatatgtccaagaatgtccataactgccttagtcataatagcccaacaa

SEQ ID NO: 328784 - DNA, 623 bp, Homo sapiens
taacaaagttgatttcatgtaatgacacacattttcatgcttagtgtttgaaattaaaatatctgttctactttgttaataatatgaataaagcaatgcaggtaaactgttcagagaattgcctgatatttaaagtgttctataatagtcaattttgaacgttagattcaatattaatgtttttattttgtcagacatgtttacatactttataacttacatgtaatatggtaataatgttccaacataagccaaagacagccaagaygtgagaataaagtgagtttgggtaggaggaaatacattttcaggaaaacaaattctgtgttttaaaaaataaattatagatagctgctcaggaggctgaggcagggatattgcttgaacctgtgatgcagaggttgcagtgagccaagatcatgccactgcactccagcctgggcaacagagcgagactccatctcaaaagaaaaattataaatacattttatcagaaatttgattaataaatcaaatactaaatataaaatatgaatataattatagtgagtccatttctatttcatttctgtttcattttgaaatgttcatgtatagtcagattaactacttatggcaaccac

SEQ ID NO: 328785 - DNA, 625 bp, Homo sapiens
cctgcagtgatctgacttcatgtcatggagtttgtgttttcttacagtgctttcaaaaagggataccttgcttgtgcatgatgttgaaatgttagaaatgttagattttctatttaaatgactggagaaaaaaactcacaagtatctctgaattgggaatgtagtagtttagattgaatatagatgtttttcaaaaggcatttgtttcattattcctaaaatgaagaatttggcctgtatgactctcarggtctcttgaagctccagtgagtttctgacccattgttgtggacattcagggctttcattcagatggattttgtttctcatccaagaatttaaacttgtaagaccaattccaagtaaaatccttatttgttgacttctatatgtatcatcaaaatggtagtttaaagaggaacttgttctaaaaagtaaccttataagacattcaaaagcattagactgcaattgagtgagtgtaaacaaagcagtataatgtgatgatcaagagtgcaggctttggacggtgacagactcaggtttgagttccagctgtcagtagctgagtgatcttgagtaatgcaaacttcagtttcatcagttcatcatctgtaaagtggag

SEQ ID NO: 328786 - DNA, 558 bp, Homo sapiens
aaaaattaaatgaattaaaatataaagagtaccaaatactggcagtgaaaaggggcagtggtgcctattcttctaaacatgatagcttaccattatctcagccatgccaagagttttctgtaatctaaatatatggctttacttgatgggtttatttaaatagtgtaaattrtgaacaggaaaatcaaggactatttatttgcttataggaacttacaggattttgttaactgtagttaggagtgttttcaaggaagcaacatggtatatatatttcatgagggaaaaggactgtcactgtgctaagcttagcatctacatttctttacagaagaaactgatgaaaggtatacaatatatacagtcctgtttcgggaggcttttatgtaggttgactcctctaaactaggcagagtagtagactagaaaaaagggaaactattctaaaatggttttatgttattgttataatctagatgtttttacacttagatgtttttatacttgtaatcaaataagtttgatgtagttgacagatttttaaaattttttaattgc

SEQ ID NO: 328787 - DNA, 649 bp, Homo sapiens
gtccaccctttattctgaaattataccattcaaaatgaccaaaggcatctataccagccagccttctgctttggaaaaataggggaatctagttcatgccaagagaaactacatagtttagtgaccaaatgcagcaaactctaaaatcagttgtctggattcacataaggctctgtcactaactgtatgactgtaagcaagtgacctaacctctctgagcttcatctccctaatctgtaaaacgggactaataatagcagctacctcacagggttattgtgaggattatatgagataacatagcttaaaacagtacctgacacatagtaagcactcaataatgttagctattattatatgtctccatagaaataagtgctaaacaggccacgggcagcagcctgcagcactgctccacaacaggctgggaagcagaacttcacatccaaaatgagcttaacttaaaatccaagttcttcaagaaacaacaaaaaactaaccttaaccttccaaataaaatgagaaccagaacggaaatgttaactgcagaagggaatgaaaaagaagggaattcttcattccttcctatctttagagcaaacyggaatgaacaaagtgataatagcagacacatgtatgtggactcaag

SEQ ID NO: 328788 - DNA, 572 bp, Homo sapiens
tcacaggaatgcctagtcatctagttttagttgtagatgttatccatgggtctttggttttgcagccctgtttgaactgtctakttttatggggagataggagaaaatacaaaagctgtgatgtcatttctgaccaacagggaataagagggtcaaaatttatactcctattataaacaactagaaaactggacaaaactattggaagcaactattttcagacagtagaaaatagacagtacaggactgtgatatctgataaaagggagacaaagtgagccctaccatcacccaggctttcttcctaaaattaatttccagactttggcacagagaatggaaatccaaacagagcctgcaatcccagtgagttgagaagaaagagatgggaggtcaggtaggccaagatgctgcagttttcagggcagggcacttaagagaggaagacaacacagaggaagagctttagaaacctgcatatgcgttccttgaatctctggctgaatagctatctgtacatatgcagaacgaaataccataagactgagcaagaacaacttctggaaaaataa

SEQ ID NO: 328789 - DNA, 572 bp, Homo sapiens
tcacaggaatgcctagtcatctagttttagttgtagatgttatccatgggtctttggttttgcagccctgtttgaactgtctatttttatggggagataggagaaaatacaaaagctgtgatgtcatttctgaccaacagggaataagagggtcaaaatttatactcctattataaacaactagaaaactggacaaaactattggaagcaactattttcagacagtagaaaatagacrgtacaggactgtgatatctgataaaagggagacaaagtgagccctaccatcacccaggctttcttcctaaaattaatttccagactttggcacagagaatggaaatccaaacagagcctgcaatcccagtgagttgagaagaaagagatgggaggtcaggtaggccaagatgctgcagttttcagggcagggcacttaagagaggaagacaacacagaggaagagctttagaaacctgcatatgcgttccttgaatctctggctgaatagctatctgtacatatgcagaacgaaataccataagactgagcaagaacaacttctggaaaaataa

SEQ ID NO: 328790 - DNA, 583 bp, Homo sapiens
ccagcatttgtaatggagcttactctttccttcctgtacaagtttggcatcaagtaacagccagtatttgtggcctccacaaatttaagacctgtagtaaggaagattttaatactcccccaattcctgttctttgtaggttatattaaccctccaagagtggagaaatttgtttcctcttctcctccaaacgttaaatgtatgtattaaaaattttcctccatcataaagtcattctagtttaagcatcttgattcaggtgcttcagtgactattagcaacttactgtctttgaattgcccacccgactgtgctttgtgcacttagctcatcatcacaatgtgtacttatgtatatcttttaattttctgtttacttgtatttctaagcattttaaccctgggtatgagttttactctttaaagttatgtattatgycttctacattctttttgaactcccatatttcctaaagaatatttaaaattataattttttatctttaaaacaatatgaggcagaatattatttatgaaattacaggtgaattctaggataatcctagaactattctaatacagta

SEQ ID NO: 328791 - DNA, 523 bp, Homo sapiens
tgtgtccccgcccaaatctcatgttcaattataatccccaatgttggaggtggggtctggtggaaggtcatttgatcatggggggtggatccttcttgaatggtttagcatcagctccttggtgctactctcatgatayagttttcatgagatctggttatttaaaagggtgtagcccctccccactctctctctcttgctcctattgcagccatggatatgtgtgctcccctttcaccttccaccataattgtatgtttcctgaggcctccccagaagcagaagccactatgcttcctgtgcagcctgcagaaccgtgagccaattaaaccgtttttctttataaattgcccagtctcaggtatgtctttacagcagcacaagaacgaactaaaacccaatggaggagagcaagagacagtgccattcccaagaagttgtcacataaaggaaatggcagatggctttctagtactggttctgcctcttaccacctttgtgatttttgagcaaatcattttaa

SEQ ID NO: 328792 - DNA, 523 bp, Homo sapiens
tgtgtccccgcccaaatctcatgttcaattataatccccaatgttggaggtggggtctggtggaaggtcatttgatcatggggggtggatccttcttgaatggtttagcatcagctccttggtgctactctcatgatatagttttcatgagatctggttatttaaaagggtgtagcccctccccactctctctctcttgctcctattgcagccatggatatgtgtgctcccctttcaccttccaccataattgtatgtttcctgaggcctccccagaagcagaagccactatgcttcctgtgcagcctgcagaaccgtgagccaattaaaccgtttttctttataaattgcccagtctcargtatgtctttacagcagcacaagaacgaactaaaacccaatggaggagagcaagagacagtgccattcccaagaagttgtcacataaaggaaatggcagatggctttctagtactggttctgcctcttaccacctttgtgatttttgagcaaatcattttaa

SEQ ID NO: 328793 - DNA, 551 bp, Homo sapiens
ctgaattaagttgctattctaagttactgattaaaaaaaaacttcacatgctttatttagattgtaagcaggggcttctcagaggtctagaggggttcaaaccatttttaatttttgaggtttctcaagtttaaaaataaataccaaaacaaggttcaaaaactctgacatattttaagtgctcatggtagacaaaatagcatctttaacattgaaaaacacaatgcaatataattgtgttattcacaagataatgataagtttctagagaaaagtttactatcaccttagacaatgttgtctagcaaagggcataagtataagactgtctggtacacaccttctttattcattttcattcaaattatatgcatttaaatgcacatcttatttaatgataacagcaaaagctgaaacctgaggtcctctttgcatgccctttgctaggcccctgtaacttgaggctttgttcacataggctatacamgaacctgtcctctggtgctcgtacaggtagaaccaatttaactctaacctcctatacgaccact

SEQ ID NO: 328794 - DNA, 554 bp, Homo sapiens
cctctgctagggaagtccagaaaaaaatgtggctgggagcccccatacagagcccccactgggaaactgcctagtggarctgtgggaggagggccatcaccctctagaccccagaatggtggattcactgacagcttgcattgtgcacctggaaaaaccacagagagtcaatgccagcccatgaaagcagctaagggggttgtaccctgcaaagccacaggggcggagctgccctaggccataggaacccacctctggcatcagtgtaacctagatgcaagaaatggagtcaaaggagatcatttcagagttttaagatttaatgactgtcttgctggatatcagacttgcatggggcctgtagtccaatttctcccatttggagaatgggagtatttacccaatgcttgcaccccctctgtatctaggaagtaactaatttgctttgattttacaggcctataggcagaagggacttgccttgtttcagatgagactttggacttgggctttgggttaatgctagaaaaaattcagacttcagggaattgaag

SEQ ID NO: 328795 - DNA, 663 bp, Homo sapiens
gactatgtgcaaatcatttaatctgtttgggcctcagtttcctcatctgtaaaacagagagaaagctatttgtctcacagctctccctcagaagtaaatgatgtaatgagtaggaaagccttctgtgaaatgaatagaagtcagatgtagagtagttgaataacctgctacagcaatggtctccacaacctttttggcaccagggatcagtttcttggaagacagttcttccatggatagagagtgggctggggtgggaaggtctggggatgaaactgttccactttagatcatcaggaggcattagaatctcacaaggagtgtataacctagatccctctcatgtgcagttcacaacagggttcatgcttctatgagaatctaatgttgccactgatctgacaggaggcagagctcaggtggtaatgcttgctggtctgtttctcacttcctgctgtctggccaggttcctaacaggccatggaacctctagtgtgggggtccccaaccctcagaccaccaaccagtaccagggactcctgtgccagagggacctgttaccactaaatggcaggatggaggtaccaastttgcccatcttacttagctattccatactcttttgacagtgtctatttctctccctctttttttaaaaaaatt

SEQ ID NO: 328796 - DNA, 663 bp, Homo sapiens
gactatgtgcaaatcatttaatctgtttgggcctcagtttcctcatctgtaaaacagagagaaagctatttgtctcacagctctccctcagaagtaaatgatgtaatgagtaggaaagccttctgtgaaatgaatagaagtcagatgtagagtagttgaataacctgctacagcaatggtctccacaacctttttggcaccagggatcagtttcttggaagacagttcttccatggatagagagtgggctggggtgggaaggtctggggatgaaactgttccactttagatcatcaggaggcattagaatctcacaaggagtgtataacctagatccctctcatgtgcagttcacaacagggttcatgcttctatgagaatctaatgttgccactgatctgacaggaggcagagctcaggtggtaatgcttgctggtctgtttctcacttcctgctgtctggccaggttcctaacaggccatggaacctctagtgtgggggtccccaaccctcagaccaccaaccagtaccagggactcctgtgccagagggacctgttaccactaaatggcaggatggaggtaccaacttwgcccatcttacttagctattccatactcttttgacagtgtctatttctctccctctttttttaaaaaaatt

SEQ ID NO: 328797 - DNA, 609 bp, Homo sapiens
acatttttgccaacatctattattttttgaatttttgattatggccattcttgcaagagtaaggtggtattgcattgtggttttgctctgcatttccctggtaattagtgatgttgagcattttttcatttgttggccatttttatatcttcttttgagaactgtctcttcattgccttggcctactttttgatgggattggttgtttttatcttgctaatttgtttgagtttcttgtagattctgggtattagtcctctgttggatgtatagtttgtgaagattttctctcactctgtgacttgcctgtttactctgctgattatttcttttgctgtgcagaakctttttagtttaattaagttccatctatttatcttcatttctgttgcatttacttttgggtacttggtcatggaagtttttgcctaagccagtgtctagaaaggtttttccaatgttatcttcgagaatttttactgtttcaggtcttagacttaagtctttgatccatcttgaattgatttttgtataaggtgagagatgaggatccagtttcattcttctacatgtggcttgccagttatcccagcaccatctgttgcagag

SEQ ID NO: 328798 - DNA, 546 bp, Homo sapiens
aaatgtgtgccactgagggtttgttcttttatttcacaagcccaaaatatcaattacttgctaagttaataaaaattagtatctggtagaaaaktcttctatgttgtctattgttatttctaaagccatgtatccatatccgcttttgatgttttctctcttaaacaaaaattacttgcttagttaataaaaattagtatctggtagaaaattcttctatgttgtctattgttatttctaaagccatgtatccatatccgctttcgatgttttctctcttaaacaaaaacactatgctgaatgtgcagcaagtaggtgtggtgtagttattgctgatgcacagacatcatagacatttcaagtaaaaggcagcaacctgagaagttgcaatccacttgagaagtcatgattaataccaacatttttaaattagtagttgtctaaacaaaaattgtataaatgccatgaaaatatacttccattcttactgaaactgcctttgcaaaattataactgaggaaattatgacagtgaaaaaaaatcaga

SEQ ID NO: 328799 - DNA, 546 bp, Homo sapiens
aaatgtgtgccactgagggtttgttcttttatttcacaagcccaaaatatcaattacttgctaagttaataaaaattagtatctggtagaaaagtcttctatgttgtctattgttatttctaaagccatgtatccatatccgcttttgatgttttctctcttaaacaaaaattacttgcttagttaataaaaattagtatctggtagaaaattcttctatgttgtctattgttatttctaaagccatgtatccatatccgctttcgatgttttctctcttaaacaaaaacactatgctgaatgtgcagcaagtaggtgtggtgtagttattgctgatgcacagacatcatagacatttcaagtaaaaggcagcaacytgagaagttgcaatccacttgagaagtcatgattaataccaacatttttaaattagtagttgtctaaacaaaaattgtataaatgccatgaaaatatacttccattcttactgaaactgcctttgcaaaattataactgaggaaattatgacagtgaaaaaaaatcaga

SEQ ID NO: 328800 - DNA, 590 bp, Homo sapiens
ctttattttgagcctgtatgtatctctgcatgtgagatgggtctgctgaatacagcacactgatgggtcttgactctttatgcaatttgccagtctgtgtcttttaattggagcatttagcccatttacatttaaggttaatacgttgggtttgaggtcatctgtcaaataaaataggcaattagatctggatctcagaggacaagtagagacagaaaatataaatgtcagaagcatgggcataaaggtttttttataggtcatgaaaatgtaggcaataaaccatggtgagtgtgtgcagtgagctgatgagagaaggatctgattcatgggaaaactaaagaatcattgctgaatgggaaagatggtacatctctgccacggcccagaagcttgtttttgaatggtgtctggttctctgctctagatgacatgctgttgctccagaaccrtaagtgtccatgttgtgattctcctattggggctcaacatgatttccacacagcatctcttttcgtaatgggtacctttggtaccatagggtctactggccatttggcccatgtaacagggatgctcacattccagcc

SEQ ID NO: 328801 - DNA, 464 bp, Homo sapiens
ttgggtcccagatctttccactggtggaaaatttctttcagcggaggcacagttgcaatgctgggttcagcaagttagtctgatgggcttccctttgtgggtaaccccacctttctctctggctgcccttaacattttttccttcatttcaaccttggtgaatctgacaattatgtgtcttggggttgctcttctcaaggagtatctttatggtgttctctgtatttcccgaatttgaacgcagggaaaatctgcattctgccccaagaatcaggcagccctcgtgctcmtgaagggccttagagaaggagacttcttttcaccctcatccaccactgcagacacagctggagtttttcccacagaggctcggcatagacagcctttctggaacaattcagggtgattacattgccacaggaggtgcaccctccaggtgcagtctttcatgagaggtagagtca

SEQ ID NO: 328802 - DNA, 527 bp, Homo sapiens
tgaggaaaagggaatgcttatacattgttggtgagaatgcaaattagtacagcatctgtggaaaacagtatggacattttttaaggagctaaaagtagatctaccattcaattcagcaacccaactactgtgtatctacccaaaggaraataagtcatagatgaaaaagacacaagcacatgtatgtttattgtggtccaattcacaattgcaaagatatggaaccaacttaaatgtccatgtcctttgcagcaacttggttggagctgaagaccattattctaagtgaagtaattcagaaatggaaaatcaaataccatatgttctcacttacatgtgggagctaagctatgagtatgcagaggcatacagagtgttacaatgatatttggagactcagaagtgggagggaaggaggggagtgtgcgatacaaaaatacatattggtacaacatataccgcttgggtgacaggtgcactaaaatctcagaattcaccaatatttaactcatccgtataaccaaaaa

SEQ ID NO: 328803 - DNA, 607 bp, Homo sapiens
gggttttggctttcctgattggtccccactgccagccttgatgttgatggaataaccatagatgccctcatttcccctctgctggtctcaaatgccagttgtatggagatgactttcagtggaggcattccccttttatgatcccgtatattttggctcagcagcctgtagcatcataaaagtcattcctcaaaacaactggtagctaaactacaaaagcatgggctttttcacattgccagtgggaggggcagttgagaatttggcttgacatggacttctaacggaattatcccggatgttataaggtatctcagctacatacccccagtagctttttggcttggaaattgggagtattattcaggagttagtaggttctaataatgagtcaagtgtcactctctggtttatttgatgtcacctcaggtgagttttcaggcagcamtattgataagggaaagaggtaggtaataactgaggcaagatccctgagaaacttctcaagctataggtcatttatcgaattgcacatgtagggactgtgaaggggtttcatgatgatgttatgaagatgatttagaccatgtaaaatgtagattttatt

SEQ ID NO: 328804 - DNA, 569 bp, Homo sapiens
ctcagccactggtttgccagtgcccagaaacacaagattagcagctcttgtaatttcatcctccaggtaggtgttcttgtcagttcagtttccattttagtagatgtgtcttggctttgaatcttttcagacatcagtaaaatctccccacaggaaacaaactgatagacttccttgggttctgcatataataaacatgttttcctattrctgcattaattgtcactctggtttttgagagtctatctggtaccaccattctctcagtctcctggcctccacataaaaggtttccgagaacaactcttgactgtgtgctctgcctaggaccctgcaataaagtctcagtggtgactatgattgtgagaagcaaggctggggacaattgtttttgttatttagttcagacaaaactacatagggacattctatgtaaaaagtaggatttgctctttggggtggaagcgggacagagaggaaacagctcttcacaagacaatcttctgctgcagctcagtgcacagcacttgctcctcttaggcagatgtggcctctttagtttacataag

SEQ ID NO: 328805 - DNA, 633 bp, Homo sapiens
acaaactgatagacttccttgggttctgcatataataaacatgttttcctattactgcattaattgtcactctggtttttgagagtctatctggtaccaccattctctcagtctcctggcctccacataaaaggtttccgagaacaactcttgactgtgtgctctgcctaggaccctgcaataaagtctcagtggtgactatgattgtgagaagcaaggctggggacaattgtttttgttatttagttcagacaaaactacayagggacattctatgtaaaaagtaggatttgctctttggggtggaagcgggacagagaggaaacagctcttcacaagacaatcttctgctgcagctcagtgcacagcacttgctcctcttaggcagatgtggcctctttagtttacataagtccccacctgagccacttgcctcagttacgctacctgcctgggctctgcatttgctgcaggtgcatttgcatctgcttcaaagcacccatcaatctcttgtcagtctcattgtctattgcacctgtgggcataagagcgatagctgctcagtagtgcaatggtgagacattccagcttgtgaagacaagggactgggaccatgttctctgcaacttctca

SEQ ID NO: 328806 - DNA, 633 bp, Homo sapiens
acaaactgatagacttccttgggttctgcatataataaacatgttttcctattactgcattaattgtcactctggtttttgagagtctatctggtaccaccattctctcagtctcctggcctccacataaaaggtttccgagaacaactcttgactgtgtgctctgcctaggaccctgcaataaagtctcagtggtgactatgattgtgagaagcaaggctggggacaattgtttttgttatttagttcagacaaaactacatagggacattctatgtaaaaagtaggatttgctctttggggtggaagcgggacagagaggaaacagctcttcacaagacaatcttctgctgcagctcagtgcacagcacttgctcctcttaggcagatgtggcctctttagtttacataagtccccacctgagccacttgcctcagttacrctacctgcctgggctctgcatttgctgcaggtgcatttgcatctgcttcaaagcacccatcaatctcttgtcagtctcattgtctattgcacctgtgggcataagagcgatagctgctcagtagtgcaatggtgagacattccagcttgtgaagacaagggactgggaccatgttctctgcaacttctca

SEQ ID NO: 328807 - DNA, 563 bp, Homo sapiens
gtgagacattccagcttgtgaagacaagggactgggaccatgttctctgcaacttctcaatgaacagttggcatttactgagtacctactgttaggaaagcaggagcctagaagagccacagtaacatcattttaagttcagctccatcttgagactaacaaggcrcatcccttgccagtcacaaccaatggtcctaagatgtttatagttgaggaaacagcctaaagatacctacaagaaaggacacactcccacaacaacagagaatccagatgtcccaataccaataacaatatatgctttcaagatagcaacagttatgctttgatgtactcatacactaaaatgtcgggatagttttatttaagacaatagaataataaattttgtcatcctgttactttaagggagtaaaccctgaaggcaagcagcttaatttagcctttacgtagacaatacccctatttaagaaaatcttaaagatgttaaattcctccttttgcttttctgagggtgccctactctgtaacaaagcagcttcaataaactgtctctttcagtg

SEQ ID NO: 328808 - DNA, 579 bp, Homo sapiens
attccagcttgtgaagacaagggactgggaccatgttctctgcaacttctcaatgaacagttggcatttactgagtacctactgttaggaaagcaggagcctagaagagccacagtaacatcattttaagttcagctccatcttgagactaacaaggcgcatcccttgccagtcacaaccaatggtcctaagatgtttatagttgaggaaacagcctaaagatacctacaagaaaggayacactcccacaacaacagagaatccagatgtcccaataccaataacaatatatgctttcaagatagcaacagttatgctttgatgtactcatacactaaaatgtcgggatagttttatttaagacaatagaataataaattttgtcatcctgttactttaagggagtaaaccctgaaggcaagcagcttaatttagcctttacgtagacaatacccctatttaagaaaatcttaaagatgttaaattcctccttttgcttttctgagggtgccctactctgtaacaaagcagcttcaataaactgtctctttcagtgcactttgcaacttggcttgaatt

SEQ ID NO: 328809 - DNA, 563 bp, Homo sapiens
gtgagacattccagcttgtgaagacaagggactgggaccatgttctctgcaacttctcaatgaacagttggcatttactgagtacctactgttaggaaagcaggagcctagaagagccacagtaacatcattttaagttcagctccatcttgagactaacaaggcgcatcccttgccagtcacaaccaatggtcctaagatgtttatagttgaggaaacagcctaaagatacctacaagaaaggacacactcccacaacaacagagaatccagatgtcccaataccaataacaatatatgctttcaagatagcaacagttatgctttgatgtactcatacactaaaatgtcgggatagttttatttaagacaatagaataataaattttgtcatcctgttactttaagggagtaaaccctgaaggcaagcagcttaatttagcctttacgtagacaatacccctatttaagaaaatcttraagatgttaaattcctccttttgcttttctgagggtgccctactctgtaacaaagcagcttcaataaactgtctctttcagtg

SEQ ID NO: 328810 - DNA, 490 bp, Homo sapiens
tctaaaaataataataataatggattagtttaaaagaaactatggtaatagtaatacaattgaataatattcataaattgaaaggatatcaattagtattcatttaaatagaatgaacttcataacatattactgagtgaaaaagtaagttgcaaaatgacattatcaagaatttctgtttcttgaataataaagtagacatactttccccgttccttttacaaagtacaactaagaaccttgtacatgacaaatgaaagaaatgtaagaactctgaaagatgaaaagaagtcaggctggttggggacatcaggaccccaaaaatgatccagactttgacaattgatcattcagcaataaggaatccaccccaatcaaggagtcaccagagaccaccgggtagctacaattcctactcctgttcatcaggcagaagaggactacyatctattgggtatgaacagaggccaagtggggacctgaacttcta

SEQ ID NO: 328811 - DNA, 572 bp, Homo sapiens
caattcctgccaggaaagaaaatttcacaggagaggagagccagagaagtgacggggaagctacaggtcacagcagatttgtgaactcagccaagcacagtggtggcagagcctagctgctacaaagaagacatcttttagacaatactcatgagtctggggaaaacttgaggattgtatttatgactaattgtacaacagattattttagtttctgttttgtggaaagtgtaaagcattccaacaaagagttttaakgtacatatatatgtttttgcacccatgccattgattgctgaatgtaatagtctgatgatgcttaataaatgtgtcttcttaaataaataaataatatttataataacatttaaagaattaacaccaactggggaaaacctcttccagcaatagaaaaggaggaaccactttccaattcattttatgaagctaatattgccttgataccaaaataagaagaagacattttttaaaaacaaaaagaaaactgcagaccaatatttatcatcagtatagaggcaaaaatccttatcaaaatgttagcaaagagaagt

SEQ ID NO: 328812 - DNA, 572 bp, Homo sapiens
caattcctgccaggaaagaaaatttcacaggagaggagagccagagaagtgacggggaagctacaggtcacagcagatttgtgaactcagccaagcacagtggtggcagagcctagctgctacaaagaagacatcttttagacaatactcatgagtctggggaaaacttgaggattgtatttatgactaattgtacaacagattattttagtttctgttttgtggaaagtgtaaagcattccaacaaagagttttaatgtacatatatatgtttttgcacccatgccattgattgctraatgtaatagtctgatgatgcttaataaatgtgtcttcttaaataaataaataatatttataataacatttaaagaattaacaccaactggggaaaacctcttccagcaatagaaaaggaggaaccactttccaattcattttatgaagctaatattgccttgataccaaaataagaagaagacattttttaaaaacaaaaagaaaactgcagaccaatatttatcatcagtatagaggcaaaaatccttatcaaaatgttagcaaagagaagt

SEQ ID NO: 328813 - DNA, 572 bp, Homo sapiens
caattcctgccaggaaagaaaatttcacaggagaggagagccagagaagtgacggggaagctacaggtcacagcagatttgtgaactcagccaagcacagtggtggcagagcctagctgctacaaagaagacatcttttagacaatactcatgagtctggggaaaacttgaggattgtatttatgactaattgtacaacagattattttagtttctgttttgtggaaagtgtaaagcattccaacaaagagttttaatgtacatatatatgtttttgcacccatgccattgattgctgaatgtaatagtctgatratgcttaataaatgtgtcttcttaaataaataaataatatttataataacatttaaagaattaacaccaactggggaaaacctcttccagcaatagaaaaggaggaaccactttccaattcattttatgaagctaatattgccttgataccaaaataagaagaagacattttttaaaaacaaaaagaaaactgcagaccaatatttatcatcagtatagaggcaaaaatccttatcaaaatgttagcaaagagaagt

SEQ ID NO: 328814 - DNA, 544 bp, Homo sapiens
aaataaataaataatatttataataacatttaaagaattaacaccaactggggaaaacctcttccagcaatagaaaaggaggaaccactttccaattcattttatgaagctaatattgccttgataccaaaataagaagaagacattttttaaaaacaaaaagaaaactgcagaccaatatttatcatcagtatagaggcaaaaatccttatcaaaatgttagcaaagagaagtaagcaatatataaaatgattaaacaccatattcaaatgaagtttatttcagaaatgcaaggctggttaagtggttgagaatcaatcaatataatccaccatattagcagactgaagaagaaaaatcacatcaattaattcataagatgaatttaacaaagtttaacaccaatttataattttttaactgttataawaacagaaatacagggcaatttcctaaacttgattttttaaaatctacaaaactctatagctaacatgatatttaatggtgaaaaactgaattatttacctctagatcaagagca

SEQ ID NO: 328815 - DNA, 553 bp, Homo sapiens
agcagactgaagaagaaaaatcacatcaattaattcataagatgaatttaacaaagtttaacaccaatttataattttttaactgttataataacagaaatacagggcaatttcctaaacttgattttttaaaatctacaaaactctatagctaacatgatatttaatggtgaaaaactgaattatttacctctagaycaagagcaagataaggatttctgctctcagcactcctattcagtatagtgctggaagttctagtcagtgcactaaaacaagaaaaataaataaacagcatgtaaattggaggggagacataatgtaaaatagtacagtcactctggaaaatggcttgacagtttttaaaaaaactgaacttgcaaataccgtaagacctagcaactgcattccttggtatttaccctagagaaattgagatttatgcttataaaaacatctgtaaacaaatgtttgtggcaaaattattagcaccagccaagaactggaaacaacccagtccttcaaggagtgactcattaaagaaactgtggta

SEQ ID NO: 328816 - DNA, 566 bp, Homo sapiens
cagaattgaagtgatggagattcagtgttaaatcccagagaaattattgacagaggaggaggtaatgtaggtttacataaaaaatatttacgtactgaggctggawaatggtaaatgaaaaagacaatcctgggccgggcgtggtagctcatgcctgtaatcccagcactttgggaggccgaggcgggtggaccacctgaggtcaggagttcaagaccagcctggccaacatggtgaaaccccatctctactaaaaatacaaaaaattagccgggcttggtgatgggtgcctgtaatcccagctactcaggaggctgaggcaggagaatcccttgaacccgggaggcggaggttgtagtgagccgagattgtgccactgctctccagcctgggcaagaagaatgaaactccatctcaaaacaaacaaacaaacaaacaagcaaacaaaaaaaatctccaaacagcattttcgaaactgggtggtaaatttatttcccacagtttggaaagcatgactaaaacaattagaaccattcaaagaggaaattgacttggcaatgttccaa

SEQ ID NO: 328817 - DNA, 566 bp, Homo sapiens
cagaattgaagtgatggagattcagtgttaaatcccagagaaattattgacagaggaggaggtaatgtaggtttacataaaaaatatttacgtactgaggctggataatggtaaatgaaaaagacaatcctgggccgggcgtggtagctcatgcctgtaatcccagcactttgggaggccgaggcgggtggaccacctgaggtcaggagttcaagaccagcctggccaacatggtgaaaccccatctctactaaaaatacaaaaaattagccgggcttggtgatgggtgcctgtaatcccagctactcaggaggctgaggcaggagaatcccttgaacccgggaggcggaggttgtagtgagccgagattgtgccactgctctccagcctgggcaagaagaatgaaactccatctcaaaacaaacaaacaaacaaacaagcaaacaaaaaaaatctccaaacagcattttcgaaactgggtggtaaatttatttcccacagtttggaaagcatgactraaacaattagaaccattcaaagaggaaattgacttggcaatgttccaa

SEQ ID NO: 328818 - DNA, 496 bp, Homo sapiens
agttttatagttttgtgttttacatttaggtctgtgatccattttaggttaatttttatgaaggttgtaaggtctgtgtctagattctttttttttgcatgtggatgttcagttgtttcagcaccatttgttgaaaaactatcttttctccattgtattgcctttgcttctttgtcaaagatcagttgacrgtatttataaggatctatttctgggctgtctattctgtttcattaatctatttgtctattatgttgccaataacacactgtcttgattattttagctttataataagtcttgaagtcaggtggtgttagtcttttaactgtttttccccttcaatattatgttggctattgtgggccttttgcctctctatgtaaactctgaaatcatttaaacaatatttagaaaacaacttactgggattttgattggtattgcattgaatctatagaccaaattgggaaaaactgacatcttgacaatgttg

SEQ ID NO: 328819 - DNA, 591 bp, Homo sapiens
tggggcaagtcttctttgttctacaatttaagaaccccaaagggttgagtttccttctcttacacaggtgacaatgtggtggtgcattgtctcttacacagcagttagaaagtacattacattggagttagaaaataaagcactccctgacttttccatcatgatgctgtggcagggtgctccagaaatattagttccattcctcttccttccttccatctttaatatttgaacttaataatactgtctataaaggtgcgatgttatctatatgtagtcagatgaaagtaatacaatttattaaatataaaatattttaaaatatttttataatagygctaataagaaggcatactagtctttatgattcacattcattatttaatttcttaccaatagacgttccaatgacaaatattactgctactgccttgttagtaattaggaaaccaagattcaaaggtttccttaaacctttaaagaaattactcaaattatatatatatgaggtaatagaacagattcttgaagctagatctcctgattccaaatcctatgcatttttcagtataagtatactgtgacgttaca

SEQ ID NO: 328820 - DNA, 593 bp, Homo sapiens
attcatcaatcttattctagagttatttcattacatatatatcttctctcacattgtcttggaccagctttactcagtgggtgagatcagtctttactgatgttgaatatatgttcaatctatatttgcattagagtcatgtttctaagttttaaaaatatacttggaaataataaaacctgatcatgccaggaagaaataggaacattataaatcagtctcattcatgaacatagatttaaaaatcttaaaaaattatcgagtagtatctggtgatatataacatgaataatatatccaaattaggttattctagggatgcaagattaacttaacacatgaaaattagtcaattaccttaccatattaacagaataatacagacaaccacgcataatcatgtgcaatagataacaacaaacattatgcttcggtggaaaatgatggtaaagcttttcatttgagtttagagacaagataaagatgatgsaaatgactgcttgtattcaaccagtggaatgggcaagaaaaataaataaatgtataaattagggaaaggaagaaataaaactatcattatttgcggttatgac

SEQ ID NO: 328821 - DNA, 391 bp, Homo sapiens
tgtcatttggtcatttaactgaagatctaatgagagaatataaaatccttttggaatctagcattttttgtaacatccttttaagtctctcctgaatggtttcctaaaagaacaggggatggtaattgagtctttcctgagagctttttaaacacagcttgcacttaactggagacattccttattcaggtcatatacttaygtatattttgaattttttggttaagacttttgacccaagcctaattataaactaagggtcagttctattgtgtataatgaggctttcagcttggaacaaatatttttctaaaggcagagaacatttttaaatggatttaggatcagcaattcacatttcctctttgaacttaatgtatgtcctgccaat

SEQ ID NO: 328822 - DNA, 588 bp, Homo sapiens
gtggtaatcataaacttctgaaaaagaaagacattttttaataaaacatagacttgatgtttcaaacttatcttaattgactacttcaggtttaattacaagttgtttaacttgccttaaaaacacataactgttattaaacatgaagggtaatgaatgcttatccasagaaaacctagatcaatcagtttagtcccactgatgttagttgagtggcctcctttgtgcaaagcttcctgccttcctcatttttttcctagtaacatcatattttcacatgtgaaacaaatgttagatagtgctttaaatatcatatttccttatttttaattagatttacttgggccttgtttggcatatttttacagtttttctacaagactacattataaagttaatgagagattatttttctcttattgactgctaacagtacagtgtatacaatgtcaccaaatccaacgtttagtaggcactcaataaatatttgttaagttagcctttaaacttgttaaaggataaattatttatctaagaatcatcttctaaagtagtctattcattgccacatttataaagtagttacgg

SEQ ID NO: 328823 - DNA, 588 bp, Homo sapiens
gtggtaatcataaacttctgaaaaagaaagacattttttaataaaacatagacttgatgtttcaaacttatcttaattgactacttcaggtttaattacaagttgtttaacttgccttaaaaacacataactgttattaaacatgaagggtaatgaatgcttatccagagaaaacctagatcaatcagtttagtcccactgatgttagttgagtggcctcctttgtgcaaagcttcctgccttcctcatttttttcctagtaacatcatattttcacatgtgaaacaaatgttagatagtgctttaaatatcatatttccttatttttaattagatttacttgggccttgtttggcatatttttacagtttttctacaagactacattataaagttaatgagagattatttttctcttattgactgctaacagtacagtgtatacaatgtcaccaaatccaacgtttagtaggcactcaataaatatttgttaagttagcctttaaacttgttaaaggwtaaattatttatctaagaatcatcttctaaagtagtctattcattgccacatttataaagtagttacgg

SEQ ID NO: 328824 - DNA, 541 bp, Homo sapiens
tcctttgcagggacatggatggaattggaagccattatccagcaaactaacataggaacagaaaaccaaacacggatctaaatactcttaaggatctaatgggcaccaaacaggccacggatgtccatttttaatttttcaaagtcctytaaatttgtatttaaaaatggaagagggaaggatacttacataagattctgccaatttcaggtcaaaaagaaacattttttaaaaaaaggtaaaaatgatctaaagataccttaaagatcaacttgcatcaattaattctaatacccttgaatttctaattaagttcggtttaaaataggtacatacacaaaaatatagcttgaagataaacttgtatattatgatagcaaaataaagtatattttcttccagtttttcaaagtcatttctttttttcttttcttctacttttattttaagttcaggggtaaatgtgcaggatgtgcaggtttgtaacataggtaaatgtgtgccatggtggtttgctgcacagatcatcccatcacctagg

SEQ ID NO: 328825 - DNA, 545 bp, Homo sapiens
tgagtctagtgacaccctctctgcttctttccaatttgtcgtgttcaacatattacgggcagaaaatccagacaagaagctttgtgtgaccataactaaagtaaaataagttttcaggaaagcaactgagaaactgagattgtatgagctcaagcatgcagttcttttaggacttatattggctgctcagtagctttattttggagaggaaggtggggaggagcttacttccaggtccttgactgcattctgtgtagtaaacattgtgacatcacatatttctatatctcagttaacttgtttgaaattttcagtgtcgtcactatttcaaatataaaaasgaaatgtagaacatgttctagagctaatgctgtgaagctgtgctttataattgaaatcttattatctattttatattacttgcaataaatactgttagtaattacaggaatgcatacttttttatatgattaggtttgcgtgaaagcagctgctcccaggaggaagtatagtgtacatgcatagtcatacttgtagcaaaatct

SEQ ID NO: 328826 - DNA, 565 bp, Homo sapiens
attgaactttttcatatccacacataaaaacagcataaacatattatcatttttcttgaaaactgtcaaaactgatttctatttgtcaaatacaaaatataaccacctattaaagctcaattgtctttgcaaattttgtatatggaaatactaagttacatacataattaataaatcagtttttacttttagtttcttttaaaattagccaaataatcttttaaaatttaaaaagaattttttttttaagagacagggtctttctgttgcctgggctgggtgcagtggtgcaaatgtgatttactgcagcctcaacctcctaggttcaagcgatcctcctacctcagcatcctgagtagtagggactacagacatgcaccaccgtgcccagctaatttttaaaaaaattttttgtagagatagggtcttgctatattgcccaggctggtctcaaactcctgggttcaagcaaccctcccacctcagcygcccaaagttctgtgattacaggcatgagccaccatgcctggcatgtaagtagtcttataagtgacaaagtacttgt

SEQ ID NO: 328827 - DNA, 513 bp, Homo sapiens
caattttatatatgcataaatcatgtatatgtgtgcacatatgatgtgtgtgttattcaccattatggagtatatatcactgcttagttggacaaagatgaaaataaaactaatcctartagatagaatgtataatcttctaaggatcatattcattatttaggagtaactgctcccctccaactaataaactcattttgttatttaacaatgtgcagtcatttgcaaagtcaaaaaaaatttcaagacgacctttactaaaggctctatgagtaaactggtgcatccaaaattgtggcaacacgttagaatattccagaattaatccacaaagtttgagcaacttctagtggctggaggggtgatacctagctaatgatcaaagaaaaacatctgaaactaaagtaacatttatctcaggggggaaacagctttttgaagaaaaaaaaaccctctgtgttcattcttgaagaagtcatagaactatttgaaaggaatatctccatgctgata

SEQ ID NO: 328828 - DNA, 513 bp, Homo sapiens
caattttatatatgcataaatcatgtatatgtgtgcacatatgatgtgtgtgttattcaccattatggagtatatatcactgcttagttggacaaagatgaaaataaaactaatcctagtrgatagaatgtataatcttctaaggatcatattcattatttaggagtaactgctcccctccaactaataaactcattttgttatttaacaatgtgcagtcatttgcaaagtcaaaaaaaatttcaagacgacctttactaaaggctctatgagtaaactggtgcatccaaaattgtggcaacacgttagaatattccagaattaatccacaaagtttgagcaacttctagtggctggaggggtgatacctagctaatgatcaaagaaaaacatctgaaactaaagtaacatttatctcaggggggaaacagctttttgaagaaaaaaaaaccctctgtgttcattcttgaagaagtcatagaactatttgaaaggaatatctccatgctgata

SEQ ID NO: 328829 - DNA, 513 bp, Homo sapiens
caattttatatatgcataaatcatgtatatgtgtgcacatatgatgtgtgtgttattcaccattatggagtatatatcactgcttagttggacaaagatgaaaataaaactaatcctagtagatagaatgwataatcttctaaggatcatattcattatttaggagtaactgctcccctccaactaataaactcattttgttatttaacaatgtgcagtcatttgcaaagtcaaaaaaaatttcaagacgacctttactaaaggctctatgagtaaactggtgcatccaaaattgtggcaacacgttagaatattccagaattaatccacaaagtttgagcaacttctagtggctggaggggtgatacctagctaatgatcaaagaaaaacatctgaaactaaagtaacatttatctcaggggggaaacagctttttgaagaaaaaaaaaccctctgtgttcattcttgaagaagtcatagaactatttgaaaggaatatctccatgctgata

SEQ ID NO: 328830 - DNA, 513 bp, Homo sapiens
caattttatatatgcataaatcatgtatatgtgtgcacatatgatgtgtgtgttattcaccattatggagtatatatcactgcttagttggacaaagatgaaaataaaactaatcctagtagatagaatgtataatcttctaaggatcatattcattatttaggagtaactgctcccctccaactaataaactcattttgttatttaacartgtgcagtcatttgcaaagtcaaaaaaaatttcaagacgacctttactaaaggctctatgagtaaactggtgcatccaaaattgtggcaacacgttagaatattccagaattaatccacaaagtttgagcaacttctagtggctggaggggtgatacctagctaatgatcaaagaaaaacatctgaaactaaagtaacatttatctcaggggggaaacagctttttgaagaaaaaaaaaccctctgtgttcattcttgaagaagtcatagaactatttgaaaggaatatctccatgctgata

SEQ ID NO: 328831 - DNA, 434 bp, Homo sapiens
  misc_feature (1)...(434): n = A,T,C or G
nnnnnnnnnnnnnnnnnnnnnnnnnnnnnnnnnnnnnnnnctccagcctcctgcttaggtcaaaagtcatgtctccttttggtcattttcttcatgaaaaaaaattattattagcatatgttttctcaatttaaaaaaattattttgggtcaaaatatgtcaatatgtatttaaataacaatgttttaaagttttcaggcartgtttctcttgggtctttaattttgtgagctatttgggtgatataccataattatttttagaatggtttcattatgtttatagttttaaaaggaagcagtcataaaatttgcctttgaggtctcctaaaaataagagtttgcttgagggagcaagacttacatgaccttttgatttttacaggacagttcactcagaattgtgtgtgaagtggtagtaaaggacagatagac

SEQ ID NO: 328832 - DNA, 535 bp, Homo sapiens
ggggaaagctgtgcacccagccacagctgctgtgaacacagctgacaagaagcacccttctagttctgctcttgyagatgagaacacccacccctttcttcatttaacctaagccatcccccattcaaacgacatgatcaagagggcatgagggctctgggttggagctgtgcttggcagcgtaacctttcctttccaactccttgcttaaggatcccctgtacgtcaccatgtggcctcaccaagactcaccccatcagggtgaagaagacagcagggaccactgcaggaagctgagtttgctacttgggtagatgctcacagagtgtgagatgcaacttgtttcctaaggttcagggctatgagactccagaatgcattacagaaaacattacttggaattatcctctgttgattttaaagaaactggtgaggagatgactttctgggctgattgtgttaaatttaaacaggcacagatgtcagggaggaaggcccaggctgctccagtggagcctcacaggatggcaataca

SEQ ID NO: 328833 - DNA, 531 bp, Homo sapiens
ggttttttgtttctgtcaggatgggacccaggtactttgacaatgttgttaggatgtaagataatgtaaggtaaagaaccactgtattcaattatgttatttgttctagaaatttgcctgagtttataccaccttaaaaaacagttgttctctactgaatgttcaaaagatatatagctttgggtacttcttaaatgcagattscagcccccaccaacacttcctccctgcctacagcctgtgcgtgactgtgtgtgtgtgtgtgtcaaggtctcactctgccacccccagtagagcagtggcacaatcatggttcactgcagcctcaaactcctgggctcaagtggtcctgagtagctgggactacaggcacatgccagcatgcctggctaattttttaattttttgtagatacagggtcttactatgttgcttagactggtctcaaacttctgggttcaagcaatccttgtacataggcctcccatgctgagattacaggcatgagccactgtgcctggcccagaagcc

SEQ ID NO: 328834 - DNA, 531 bp, Homo sapiens
ggttttttgtttctgtcaggatgggacccaggtactttgacaatgttgttaggatgtaagataatgtaaggtaaagaaccactgtattcaattatgttatttgttctagaaatttgcctgagtttataccaccttaaaaaacagttgttctctactgaatgttcaaaagatatatagctttgggtacttcttaaatgcagattgcagcccccaccaacacttcctccctgcctacagcctgtgcgtgactgtgtgtgtgtgtgtgtcaaggtctcactctgccacccccagtagagcagtggcacaatcatggttcactgcagcctcaaactcctgggctcaagtggtcctgagtagctgggactacaggcacatgccagcatgcctggctaattttttaaktttttgtagatacagggtcttactatgttgcttagactggtctcaaacttctgggttcaagcaatccttgtacataggcctcccatgctgagattacaggcatgagccactgtgcctggcccagaagcc

SEQ ID NO: 328835 - DNA, 531 bp, Homo sapiens
ggttttttgtttctgtcaggatgggacccaggtactttgacaatgttgttaggatgtaagataatgtaaggtaaagaaccactgtattcaattatgttatttgttctagaaatttgcctgagtttataccaccttaaaaaacagttgttctctactgaatgttcaaaagatatatagctttgggtacttcttaaatgcagattgcagcccccaccaacacttcctccctgcctacagcctgtgcgtgactgtgtgtgtgtgtgtgtcaaggtctcactctgccacccccagtagagcagtggcacaatcatggttcactgcagcctcaaactcctgggctcaagtggtcctgagtagctgggactacaggcacatgccagcatgcctggctaattttttaattttttgtagatacagggtcttactatgttgcttagactggtctcaaacttctgrgttcaagcaatccttgtacataggcctcccatgctgagattacaggcatgagccactgtgcctggcccagaagcc

SEQ ID NO: 328836 - DNA, 549 bp, Homo sapiens
gtacctcattatatggaagtacttgatacgtacttcccacttcatctcatagaattttttttaagtatactgaggggtcaagactgaataaaacgaatgttttgctccttcatcagtgacatccttaagtgaaaccggcatttacttttcaactgtgtgtggccatgagcaatacaactataggtactagcatagtttgattcatgctaaggcaccatcagttttactcaccattgcttttgcactatcggtataaatgttgctaaagtgaaaaggcaatggtgtcttcgtattatgatgaaaatagtttcggccttacagacccaatcctggatagtctgaggaccagactttgagaagctctgagctatattgaagaaacctacagcatayggtgagggccaaaccagggcatctgcagtggcgatgggaaggaatataaaccagagacattgcacatatccatccttagtgactggtatgtgagtgaatgaggaaaagtgcagtatttcctaaggactagagagctgggaatgtcattagccagga

SEQ ID NO: 328837 - DNA, 599 bp, Homo sapiens
cattgtacaattagaaagcagtattttataaacatgatggttctgtgcttttgagattctttttgtttttcttcagtttttcctttaccttttgttgctagtgttgaaaaatcccttttgttgagctaaagaagaaatgtatttcttgtttttgctttttccacactgaaaccaaacttcaagaggaaaaacataccacacacaaactgtatgaactgctagacagcrgataggcagaaatacataccagtgatgtgccagggctcacgaattagtcagatcaacatgtgaagcccagctctggggtgcaaatggggcaaactaacctcctaagtctcattttcctcactggaaaagtcactcaacacatttttactaggcagtgcctggccctgttttagcattcccaggttagggtctatatgctcatgaagattaaattctagattagggtggtaaaaaaggggaagacagacaatgctaaaacatgcatataatttaatttgcaaaatcctcctcctcacaaatacatcagtatgcatttctcttttgcatttcttggtatcttattagccagagagccattgatctgcaagggt

SEQ ID NO: 328838 - DNA, 589 bp, Homo sapiens
catgaaacttgggtataggatgagtcttgccctgtagacctagttgaaaaatgtagtataagcagcaaataattgatctgcctctcatgtctcttttgcctatgatcgtatctttttaaaattagggctcgcacatgctacagaaatctgttggttttgtaggggctccacacgagtgagctaaggtgctgctgtctgctctctgaggattgtgtctgctaaggtcctccttgccttctatttactaaggtctctgacgtctttgtaggtttgtggagcctagtctgatctatgaagcaggggttttgcttacttaggccagtcagtaaggcccatctgtattttccagcattttttttttttagacaaggtctcgctctgttgcccaggctagagtgcagtggcatgaccacagctcgytgcagcctcctaggctcaaatgattctcccacctcagcctcccaagtaattgggactacaggagcaaaccaccatacctggctaattttttaaaaaaatgttttatagtgatggagtcttactgtgttgccaggctggtctcaaactcctgggctcaagttatcctccc

SEQ ID NO: 328839 - DNA, 550 bp, Homo sapiens
gttgaagttccttataaatgctggatattagacttttgtcagatacataattttcacgttttctcccattctctaggttgtctgtttacactgttgatagtttcttttgctgtgcagaagctcttaagttagttcccatttgttgatttagcattttttttcttgatcatgagcctgacactggtatgggtgctgggactgagacaataataacagttwaccctgacatagaatttactttgtgccagacatgtttctaagtcctgtaatacgtgaatttatttaatcctcacaaataccacattttacagatgaggacacgtagactcagtgaggtgaagtaagtttcccaaggtcaaaaggctgggaagtggcagagctggctttgcacccagaaggtttggctccaaatccttgaagtcaccagctggtgagaagagacacaacactcgctacattacaaggtggtaaaagatgaaagagaggtttggaacacgtggagctctagggaggaaggtcctttctccacctgggaatgatttccagaggc

SEQ ID NO: 328840 - DNA, 619 bp, Homo sapiens
atttagcattttttttcttgatcatgagcctgacactggtatgggtgctgggactgagacaataataacagtttaccctgacatagaatttactttgtgccagacatgtttctaagtcctgtaatacgtgaatttatttaatcctcacaaataccacattttacagatgaggacacgtagactcagtgaggtgaagtaagtttcccaaggtcaaaaggctgggaagtggcagagctggctttgcacccagaaggtttggctccaaatccttgaagtcaccagctggtgagaagagacacaacactcgctacattacaaggtggtaaaagatgaaagagaggtttggaacacgtggagctctagggaggaaggtcctttctccacctgggaatgatttccagaggcaatagccatttgggctaggatttgacatttctaacaaaggagtagaaacaatctcacaagagagaaatgcattgcaaattgcagaracaaggaagggtgtggccatcttgaggcacttcgagactttcatggtggctagaggataagcttgtgttgcttttgctgtgaggaaggagatggctcagaatgatgcaaagtcaccagcttggccatt

SEQ ID NO: 328841 - DNA, 535 bp, Homo sapiens
attcttgataaggaataaagaggcaaagtcatgaaggaggacacacttgcctaggttttggcagtggtcatttatcagcattacaggagcagtttagtaatttaatattagtgtgagctacctatcagctgaacatcagctttagtttagttaactctgtgaaaacactgaacacagtgtacagtcaaggctaggttaggaaatgctgaagtaacaaataaatccagatcttcaggtattaacaaaaattagtttattctagaatgatggatttagctkgggaacagagcctggagatttgtccatagctctaaagcacttctccctgaaggtggccccctttacttctgcacatattccattgaccaaagcaagtttcatggtcatcccatcattaaaagagtagagaagtactcagaagaggtgagttaggcatattgaagagccagggtaatgtctaaatatatgatgtctagctcattgttaagtgctccagttattattaaagtgtattctgattttttcatttctcagt

SEQ ID NO: 328842 - DNA, 584 bp, Homo sapiens
caacctcatacacagtcatactacttatgagaccagtgctttcatttgcatgcagtcaagctrtggaatgttgttcagtcactacacttcatgcttttgaactaatgtagtggggtgtactttaaaggaggcagacggcctggacaacagctgtgtataaggtaatctttgaatgtcatctgttaaatggaaaaaaaatgccactcttacttctcaatttgctctgaatatgcactgaaatactgcctgtagaagatgaaccaaagctgacacttattaatgttaggtctgattttctgagccattgattgtgacattatagtaagctcttgtctgtggatttggtttgtggtcttgattcaccttgcagaagggatgggtttctataactctgtgcccttcatgaatgatcagtcagatgccttctaatggggcactcattgagtactgtcttgtgtttgcagcctgaatgttcttgtgttgggaagagccataccagaatctttcagataaagcaatgggacacattgtcatgtatcacactgttatcaacacatctataagtggcccttttcctcagcata

SEQ ID NO: 328843 - DNA, 584 bp, Homo sapiens
caacctcatacacagtcatactacttatgagaccagtgctttcatttgcatgcagtcaagctgtggaatgttgttcagtcactacacttcatgcttttgaactaatgtagtggggtgtactttaaaggaggcagacggcctggacaacagctgtgtataaggtaatctttgaatgtcatctgttaaatggaaaaaaaatgccactcttacttctcartttgctctgaatatgcactgaaatactgcctgtagaagatgaaccaaagctgacacttattaatgttaggtctgattttctgagccattgattgtgacattatagtaagctcttgtctgtggatttggtttgtggtcttgattcaccttgcagaagggatgggtttctataactctgtgcccttcatgaatgatcagtcagatgccttctaatggggcactcattgagtactgtcttgtgtttgcagcctgaatgttcttgtgttgggaagagccataccagaatctttcagataaagcaatgggacacattgtcatgtatcacactgttatcaacacatctataagtggcccttttcctcagcata

SEQ ID NO: 328844 - DNA, 584 bp, Homo sapiens
caacctcatacacagtcatactacttatgagaccagtgctttcatttgcatgcagtcaagctgtggaatgttgttcagtcactacacttcatgcttttgaactaatgtagtggggtgtactttaaaggaggcagacggcctggacaacagctgtgtataaggtaatctttgaatgtcatctgttaaatggaaaaaaaatgccactcttacttctcaatttgctctgaatatgcactgaaatactgcctgtagaagatgaaccaaagctgacacttattaatgttaggtctgattttctgagccattgattgtgacattatagtaagctcttgtctgtggatttggtttgtggtcttgattcaccttgcagaagggaygggtttctataactctgtgcccttcatgaatgatcagtcagatgccttctaatggggcactcattgagtactgtcttgtgtttgcagcctgaatgttcttgtgttgggaagagccataccagaatctttcagataaagcaatgggacacattgtcatgtatcacactgttatcaacacatctataagtggcccttttcctcagcata

SEQ ID NO: 328845 - DNA, 398 bp, Homo sapiens
acccaagtatggatagagttaaaagaaccatcaagaaatgctactccattagaacggaaggaacaaggggcagaatggttatacccaaggtccagttgagaataggagtcatgaaagagagatataagatgaagtaggctaaggatattgagttctcttcccttttatctccgtatccttgatcctttctttttyctttctgctacttccctttcaccatttgccaccagaagctgccagagggcaaggaaatccaggcaatgcatcccattgagatcggctccttgggtacagagcagggtggaaaagaacagaaaataaataaagggtaaagacaggacagggacctaaacaggattgttcaatcttgaatgcctggcacttccaagaggcccagg

SEQ ID NO: 328846 - DNA, 622 bp, Homo sapiens
  misc_feature (1)...(622): n = A,T,C or G
aaccccattgtaagttaaggagcatttgtattatttttctagcccatcatctctgccagatattttttaatctttgagattcccaattttatttgactatttcacccagggtaccactaatcacaatggcaatgccaactgaattcaggcattctattgtttctctttgctctcttttagcaattaaagaaggatataaaacttgatactttgggacacttcgttttaaacttcgggagtaggacttaaggattctgaagctgaggtggtaacagctatatatcctgccagaattggtctctgagccccagcctgcttctccatcaagtcataaaagtgtgcgttctgtgtactattgccyttaagggtctgtctgaactacttctcccagaactacttagttcatttatctcttctccagtgtggactctgaatcagatttgctctctgccttgttcccaggatttcagatttttacttgcttctcatttattcatccatcccacactttggcattttctatgtgcccggcattctgacggacttcatggatagttacatggctcaacaagatagacatggacccagtcnnnnnnnnnnnnnnnnnnnnnnnnnnnnnnnn

SEQ ID NO: 328847 - DNA, 526 bp, Homo sapiens
ttccaattctactctggcccaacttctcatgctttaagcacaaagtggaacaacaggaatcacttgctatgcgaggctcctgaagcggctascgggtctttgtctctgactgattgtatgagactctctgggaagttagcaaaaggctccttttgcaagcaagcatgttcattatatttaggcctaggaaatgggatgccacatgtatttaaacatacatttaaaagtataatttgaataccactcattaattcatcaattcactcataggtttatttattaaatatttcatttccttctatgccagaaacaatcataaaattaatgaactgtattggcactattttctcatttgagcctctcaaccatttggaaacttaaggaacaaaaactgtccctagttggctagtctaatagcagttaaatgaattgcccaaaagcaaacaactagtgaactagaattcaagctgaacgaatatgactaaaagttccaatctattttttttttttgagacacagtctcact

SEQ ID NO: 328848 - DNA, 608 bp, Homo sapiens
cattacagccattattctagcaatccatcactctgagtttcttagttggaaaatcagttttccaakaagtatttttccactcagctctgatactttaaagcctcagaaaacaacctaaggataaatcaaatgtgtcctgagtctgacataaaacaaaaatcagttctagaataaaagtcatctagtcaaagaaagtctggcttttacacattcttaaaaaatattcttttaaaggtctaaaatgacttgtaaatgaaatgtctacaacttttataatagaatcatcagtactaaaaataaacaaagaactatatatatacacatatatattaaagaaatatatatgtattaaaacagacatatatgttcaatatatgtcagtatgtaatatttaatacctgatagttttatttacatggctaataaaaaacaaaaatgaaggtatttcttaaaagtaggtatctattttttccaaattattgatagtaataacagagatcataatggatcactatgctaagtgttttgtatatattatcacatttcattcttaaattaagcctgtgaagtaggtgttatttcaacatcttaacagaaaaaaaaaatga

SEQ ID NO: 328849 - DNA, 576 bp, Homo sapiens
atatgatacatgaaaaagtgaatcctgtggtagtgtgagtgcagaagataatattatctcagttacctgattcattgtattctaagcttgtggaactatgcatttacctcccctcaaagggagggaaaatcaaagcccctgtccacctacttaatgcatttttttttagactccgaggggtgtctttagtagaaagttcccttaacaagctatataaatattgaaatgaagcagaattgcccctcattaccagttttttagcaatgtgatctcacacctggaaggcttcccacctgatatttcaatagactcattatgagaatcaggactgttgaagtttctcyctagtagtgacactacatgcctgaaagaacatctggttgaaaatgcagctggagatgtctcaattctgaattgagtgatacaccttcaattaattagtgacatttcttcagggtttgggttggtattttgtttttcccaggtgcctgctttagcatccaaagaaagaggttctgtctaacctcataatgaatgccttgggttgtgctttcgttaccatttcttatctacatt

SEQ ID NO: 328850 - DNA, 573 bp, Homo sapiens
ttgaaaattaaaaatatttatgtattacttcattaaaatgtatagtactaacacatcatgtttatatgaatagcatatacttttataaaaatacattttcaaaaacaaaataaaattaacgagagtggtgttgttttacaatttaatgaatatccttaatgactattttaatggaagacagttgagttctcagatctgtgtctgcattcaacttttgtaatactayaggtcatgtaatcttggaaaaatatgatatacttgtgagacaatgagcatgaataaggcaaatcacatcttagtattattttgttaatagttttgaccttgtgaaccctctgaaataggcatggacacctgaggggttcctgggtcacattttgagaaacattgtcctaatgcaaagatttcagtatcatttaaaaaacatgaaaacatgaaaaacatgaaaaaacatgattttttagcatgaaaaaatcaacagatcacaattatccaatccatttcctcttcaaaatatctttttgattacattcaaaatcattaaaattgttaacaatatacataaattctaca

SEQ ID NO: 328851 - DNA, 492 bp, Homo sapiens
ttctctcttgccaatactctacttaacaattttaattttcaacagtgaaaaatgatgtgcctgcaggaagtgagttatttatggcattagtggagaaaattcacttgggatttagactgttactgaatcagtattatttttttaatagagcaagagctaaaggagaatgttctcatatcaccttactattgattgttttgtaaaactgagaagtacagatattttaggcatttacttctaatgttcaatcatgtgcttttcttcctcacctatttttgtcactattttttaatcctcttcccagtatttcttgaacacacccttttaaaacacaaattcccattaaamccattgaaacatttctttctccaaactgcctaaattcagaatttgatatgcagctcatatttcaattccttatctgtcatttgatttgctgaattctcagtctgctgtgctagatttaatagcctcttatctgtcctaggggag

SEQ ID NO: 328852 - DNA, 553 bp, Homo sapiens
cactccttggcttgcagaagtcctttcttctgcacatgtgtacccgccatctctctttgcgtgttcaaatttcctcttacaaggacatcagtcatattggattaggacacaccttaatgacctcacttaaccttaaaacatctttaaaggccttatctctaaagatagtcacatcctgaggtactgggggttagaacgtcaacatatctaatgtatctttcagtttaattgtgatttacactgataccttcaatctcaagccaaaattataactcttaytctaatgttttctatttccatatgctgtcaatcttttctccaatagtgagaaaactggcttccattatactccatatctttatatgttggattaatccctccatcacttttccatctcatcttgctggcaactgactacttccctctccgcccttccctgggtggatgtccccttactccacctgggctccaacactccaggctgcatactgtctgcctgccatccaacattcacaaactcacactcacaccctttcacacacacacacaaaca

SEQ ID NO: 328853 - DNA, 553 bp, Homo sapiens
cactccttggcttgcagaagtcctttcttctgcacatgtgtacccgccatctctctttgcgtgttcaaatttcctcttacaaggacatcagtcatattggattaggacacaccttaatgacctcacttaaccttaaaacatctttaaaggccttatctctaaagatagtcacatcctgaggtactgggggttagaacgtcaacatatctaatgtatctttcagtttaattgtgatttacactgataccttcaatctcaagccaaaattataactcttactctaatgttttctatttccatatgctgtcaatcttttctccaatagtgagaaaactggcttccattatactccatatctttatatrttggattaatccctccatcacttttccatctcatcttgctggcaactgactacttccctctccgcccttccctgggtggatgtccccttactccacctgggctccaacactccaggctgcatactgtctgcctgccatccaacattcacaaactcacactcacaccctttcacacacacacacaaaca

SEQ ID NO: 328854 - DNA, 632 bp, Homo sapiens
cttgtttatttattatttgcagttcttctattgaaggatatcttggttacttccaagtgctggcagttatgaataaagctgttagaaacatttgtatgtaagtttgtaagtttgtgtgtgtgtgtgtgtgtgtgtgtgtacataacttttcaactcatttgagtcagcacctaggagcttgattgctgacagtaagagtatatttagttttataagtaactcccaaactgtctctcaaagtggttgtaccatttacattcccaccacaatgaatgagagttcctgttgcactatatgcttgccagcctttgttgtctatgttttggattttgatcatctaataagtgtatagtggtatctcattttgcaattcactaatgacatgygatgttgggtatattttcataggcttatttgccatctgtatatctcctttggagaggtatttgtttagatcatttcccactttttaattaggttgtttctttacttattgttcagtttaaaaaattccttatatatttttcatacaagttctttctcagacagatacgtgttttgcaaatattttctcccagtgtgtggtttgtcatttagttttcttaatggtattcttcacagagcagaagttt

SEQ ID NO: 328855 - DNA, 418 bp, Homo sapiens
gacaaataccacatgctctctcttatatgtgggagctaaacaagtgattctcatggaggtagagtagaatgatggttaccaaaggctgggaagcatagggcagaaggaataaagagacttgtttaatgggtacaaacatacagttagatggaaagaataagttctagtgtttggtagcacagtaargtgactgcagttaacaatatagtgtatttttcaaaatagctagaagaaaagatttgaaatttgttcccaacacaaagaaattataaatgtttgaggtgacggatatcccaaatacacagattggatcataatgcattgtatacatgtatcaaaatatcacaagtacctcataaatgtttacaattatgtatcaattaaaaaagaaaatgtggtatacatacataatgcaata

SEQ ID NO: 328856 - DNA, 540 bp, Homo sapiens
caattatgcaatcactctactgcattaccacagcctgaaacttttaggggaaaaaacaaaaacaaaaacaaaaaacaacaacaaaaaaacaagttcctggagattatggattgactcatctatgagggagaatgtattcctttgttctaacctctaccctaattataaggacaactcatacccaaatacaaatcagcatcatgctaggtcaatatagcacctttagaagtgcaaatcacttttaactcatcatctcatgtattctttaaaccacctaatgaaattacaggccaggaagttgtgcccattttagggataaagcaactgggtctctgagtctcttaaatagtcacaagaaaaaataactgacaaaaccaaggcaaaaactctcattattaaatggctaacctaggtctacttccactgaaatttatggactcmcttgacaatttctcagaagtctttgcttagttgtcatatccctagcactgcaaaaaggctccagagaatcttactgcctgactgaagcttatcccccta

SEQ ID NO: 328857 - DNA, 418 bp, Homo sapiens
gacaaataccacatgctctctcttatatgtgggagctaaacaagtgattctcatggaggtagagtagaatgatggttaccaaaggctgggaagcatagggcagaaggaataaagagacttgtttaatgggtacaaacatacagttagatggaaagaataagttctagtgtttggtagcacagtaaggtgactgcagttaacaatatagtgtatttttcaaaatagctagaagaaaagatttgaaatttgttcccaacacaaagaaattataaatgtttgaggtgacggatatcccaaatacacagattggatcataatgcattgtatacatgtatcaaaatatcacaagtacctcataaatgtttayaattatgtatcaattaaaaaagaaaatgtggtatacatacataatgcaata

SEQ ID NO: 328858 - DNA, 574 bp, Homo sapiens
cagaggctgggccactgcagggaggcaaacacaaagtataacagcagacagcatgaggacggtgtgtgtaaaggaagaacccaactatcatacaaaccgtcctcataactgctcttttcacatagaaattcacatgtcgttcatgtcttaacatcaatatgtagaggtctctagcactgcttttagtggttacacaagatccaattaatatattacatctttagcttgatttcatcttgttaaattatgactagaattaaaacacttccttgcacattcatattggaagataatctcatcaagtatttctgaacatgcctgagctcccttaggggtcctcasattattccatttcatgaccataacagcctttgaaataaagggatatgcaaaaaatgtcgcagccttcaggaaaggccatctgctccaagagtgacatggttagtgagaacaggctccttgcccttttctagtttgagattctatcccagtttaaactatgaagtcattgcaaatgcttcagagtagctcatttgattttgtaaagttttactttatttttaattgacacata

SEQ ID NO: 328859 - DNA, 594 bp, Homo sapiens
gacatggttagtgagaacaggctccttgcccttttctagtttgagattctatcccagtttaaactatgaagtcattgcaaatgcttcagagtagctcatttgattttgtaaagttttactttatttttaattgacacataatcgttggatgtattcacggggtacagtgtgatgttttgatacaggtatatgctgtgtaatgatcatatcacattaattagcttatccattacctcaaacgttgataatttctttgagaacagtcaaaatcatctttcctacgtattttgaaatataaaatacaatacygtccgtgatagtcaccctactgtgctggggctagttttcattcccaaggcaattccacttaaaacatactgtgaaatcaagaagctcatctgcatcttaattttaattcaccttcctgtaaaaactaaagtccacattttgggaagcatagcattttggtgcatctgtttgttgtaaacccagtcttacagtatgccgtgtaataatgtactaacatataacagatgatcctgaatcctgaagagtttgaaatacaatctgtgttgttatttgaggcaattaaat

SEQ ID NO: 328860 - DNA, 562 bp, Homo sapiens
gaataagacacatgatcttggtatgttgggaattatatattgcatttcaaactagaggttgattcagagaagaaatttctaagaatgcagcatttagtcacaatctcttgaataactgcaaccaaaaaaagtagaaattagaggaacaaaataataaaacgttggaaaactattaaccaaagcatagaactggcaaataaaagtcactcattgctttgagatgaagagtccagaatcaattgaagatataggtgtcactagaaggaagctgatgatgagcaaattcctgagcagcagcttcagccttctgcaaaaataagccatcagcatgtgcctagagacatttgtttatttactaacaaacctattatgtctcaaacactgggctagggactggtgctgcaagagtttacaagataaaatcctcaggaaatttgtcccctttcctgggggttagaattttcarcaataacagtaaagaagtgaggacttcagatggtagattgaacacaaaaggcagttgtctagcacatcaagttcttcaaaacaatatcaaagaagt

SEQ ID NO: 328861 - DNA, 403 bp, Homo sapiens
atgaagtgaaggaatgagacttccaagactgggtcataaaggacaccacagctgttctttgctctctcaggtcattctgtctggggaaagccatctgccatgtcataaggacactcaagctgtcctgtggagaagcctacatgacaaggaactgaggactccttggcaatagccagtgacgagtttaggcctttagccagcagtcgtgagtgtgccattgtggaagcagagcctttggcccataattttcaaccaaaggtgattttatacccccatggacttgtcaatgtctagagacattttggttgtcacaactgggaggtgggggtaatactagcgtgtaatgggtggargccatggatgctggcctcatagatatatgaggtatatattcatccccaaa

SEQ ID NO: 328862 - DNA, 636 bp, Homo sapiens
aaaacctagaacaagtgctaaactagacaggatgcgaggcagaaggataaccagggctatcctaggtcatccaggtcatgtggtctccccctaaaaaagaggaaacatttagtcaaatatacatgatgatgatgagagagagtctttctatggatttttttctgcaactgrcaatactttttttttacactcactaatagaaaaaagccaatcttcttttctaaactaaatagcaattgcctggctcagaaatgctggaaaaatgaaaatgtatttttactcaacactgtttgaaggccacaagcaatcaaaaaagcaatgaaaaatccttaatagcaaactctgtctccgagacagcagagaaagacactggctttttacaagacactgtccctgataagtccaggagtcttttatttaaaggtcatcctcctgacagtagaggagaccttggaaaccagaactctgaattgtccaaatatccagggataatgtcttcaatattcctgaattaatgcagcttctgctagaatactaaccatgatgggagatccctaccttaatgtatttgcaaatcactttaatgattgggctttttaaaaatttcctgttgtcattcatctgatcaaaacttcc

SEQ ID NO: 328863 - DNA, 590 bp, Homo sapiens
gactcatgacagtcaagagcagaggcccgtacaaaccaatttcttggtacctctcttcttcctggttctgccaatactgagtttcctctatcagactcacagttgacctgttaacataggtcatgctagtttcctgtaatattttcctcctgctcaaatctggtactttccacacatttatttttctattatcagctaccttgagaaagacaggagatcatatatttagctatttagctatttttttttttaccatattgatgttcattgtagtttaaataactctacagtggttgcattttaataaggctgctcctgacaacagtcctgaccgattttggaaagataccaaaaataaaaataaggatctccagaagtcctgtggactctgtcgttggagctggagtgtgcctccatccgtagacttcctgccatggtttccttccagcacatyttcttcagggcatggaggctgaaaatgcctgacttctccatttaaatcactttaagcaaaacacagattatttaagcatatcttttgcatcctccatgcccagtagtaattttgcaaaattactgggaatctattt

SEQ ID NO: 328864 - DNA, 599 bp, Homo sapiens
taaaaactcacttctaggttatataaaggtaaccttagccacaaatgtcatctctctgtagcttgagaactcccacaatattctcatacagtcatatggcaaaacaagaacaccaacaccattcattgtttaccagttctaggcagtacaatctcagtgcttttccggaattgcctcatttaaccttcacagcagccagatgaggtgtgtgctactatagtgtcccattttacaggtaaggaaacaaagacgctttacaaagtgtaagtgtcttgcccaaggtcacagctagtaaatgggagaattgggtttgaactcacagtctttgcaccacacactacattatattgtgaggtggagagagtctctcaatatcatggaatatgttttacatattttcrtgtgatttgaattttaaagatagtgattggaagtgaactatgaataatttcattttatatatattttagttatcaaaacattgccgttaggctttttctgcagtaaatgattacattacaaagctgttcaggagacgttatttttttaatcattctctagcatatttttccttttgtccttttatactggtaagaaca

SEQ ID NO: 328865 - DNA, 584 bp, Homo sapiens
gattacattacaaagctgttcaggagacgttatttttttaatcattctctagcatatttttccttttgtccttttatactggtaagaacatccagattctcagatgggcttagctgcagccgtggagtataaacaggatggaaaaatagggtgttaaccattatttgagttggctctcaccatcccatggaactrgaagcaatttagaaacaggtggccacagagtttgctcaagaaagtcctgccaaaccaagatagggactttactgacttcttcttactctgctgatgccactgtacagagctcagatgaaccttggttgttgactttactgcaagaaaaaaaaaagcggttccacatacacactctttcaacagcttgttgaattccaggcacactctgggaagcccttagaagtgatgacctcatgcagagaggaggctggaagctctgtcatttcaggaacagttacggaagtaggagtgcaattgaaactttggggactttatttaccactgtattcaatgacttcaacagcttcaatatggaaggaggatttaatttcttttgtgcaggataaaca

SEQ ID NO: 328866 - DNA, 599 bp, Homo sapiens
ggatgaaatattttggagtttggttttgttttaaatgtaaatactcatraaaagtaaaacatactgcactgtgtccctgggaatatttttgttatctttaaaatactcagtattataggcatttattaacacagccttacatttgcccggtttgacctggaggccgaaatgaattgtgacttatgtcccagctggtgttcccaaattatggcaaggactggatgtcatttgttgctgtgaatgacttcttgccagaaacctgagatctaagcatccaaaatcacactccaagggattcctgaaatacactttttttttttttcttttgagacggagtcttgctctgtcaccaggctggagtgcagtggtgcgatctcagctaactgcagcttccacctcgcaggttcaagtgattctcctgccttagcctcccaagtagctgggactacaggcacgtgccaccatgcccagctaatttgtgtattttcagtagcgacagggtttcaccatgttggccaggatggtctcaatctcttgacctcgggatcctcccgcctcagcctcccaaagtgctgggattacaagtgtgagccactgtg

SEQ ID NO: 328867 - DNA, 536 bp, Homo sapiens
tgtttttaacttttatatttcacaatttttatcacaatgtttagttacataatcaaaatttattaaatgttaaaaattgacatgaagcctgatccagccacagcctatcattggcagagccaggaagccttccagatacagcagccctgcacctgcccccggtcacaccctgggcctgggcacatgctaggtcctctgtctggacaccctcaccccctggtggcctccatgtcagtacccaccagcacctcctgtgggcgagggccgcccctgcatccagccctgggtaccccctagcccagagggcacctcatggtgtgagagtccgcctgcctgtctctaaagagaggaaagctccttgggacatgtgttctgcttgacccatcacytctggcctggtacagaaaggtggacagtgggtatttggtgaataaatgaatgaatgattggaacgaaccccctaaatggtgatttcctgaggcccttctccagctggcccaggtggaaccagttccacgtttcacaggaaagccagg

SEQ ID NO: 328868 - DNA, 392 bp, Homo sapiens
tcttttcaatgaaatcccaggttgcaaatgttgacctttgccttttcccggacagcagcttgcttctcctggtaacacctgggaaagcctaaatacatctccttgccaggccttgtgagctgtctgaaggctgctggtgctgcccctgctgcctctgcacagctcactcaagccagggagcatgagagtaaaaactccaattccatttttaatcaytgagtccaataagggagattaaatttatctttttttttttttttttttttttttgagatggagtttcactcttgtcacccaggttggagtgcaatggctcaatctcagctcactgcaacctctgccttccaggttcaaactgttctcctgcctcagcctctcgagtagctggatta

SEQ ID NO: 328869 - DNA, 547 bp, Homo sapiens
cccgccctgctcgggtctccaggaaggctggagcggaaccctcggctcccgcgctgctctggtgccacctgcaggttatatgcgggaactgcttctctccacccyactaccctccacccagcctcccgaccccgaccctggatagccttggacttggccaaaagacattcagagcacacgaagccctggctggggagtgggctggaccctgcaatgaagcccgcgttacagaatcagacgagcccagcttaaaccaacaaggccgagctcctcctcttcctacccactcctgtcctgtctcattttgtagacgggaaactgaagcctaattcagatttttcgttggtaggattgtgaagcatacagctggagcctcccaggtgccattccccacatctgtctttccgctaccactttaggatagtgaggaagcaagagagcttaagcttactaagctcctactgtgtactgggcacagagtggacacttttctctccagcctcgcaattgatgggaaagaggtgattatacaactaggagacaggat

SEQ ID NO: 328870 - DNA, 569 bp, Homo sapiens
gatctcttcgacttcatcacggaaaggggagccctgcaagaggagctggcccgcagcttcttctggcaggtgctggaggccgtgcggcactgccacaactgcggggtgctccaccgcgacatcaaggacgaaaacatccttatcgacctcaatcgcggcgagctcaagctcatcgacttcgggtcgggggcgctgctcaaggacaccgtctacacggacttcgatggtgagccaggcccgggagggagctgcccaggtgactcggcccggcccggcccagyccggaggcctcggccagtctcccgcgccagccttttgtaaaggtcattgggccgcctggctcgatgctagccggggtgggacgcaggagagcctcccagcgtagtaaagccggggattttcagccagctgaacctgtaatgtttctggcatgattttattcttcaagtggaattcagttagttccaggctttcccgatgaataagaggttgtgggcaaccggcggtagcccagatttttctaaagtctgacccagtttccccgccagtaaaaggatgggggcggggga

SEQ ID NO: 328871 - DNA, 616 bp, Homo sapiens
ggaatgaatgttgtgaaataagatctgtcgctggtttgaaaattagttgggtgtctccgcagagaggatgaaaacctatcctagggaggggcttggagcgrgttctttcagaaaagaaggaatggagagcctgagatcaaagctgcggagggtgggtcatcatctgagcggcttaacctaacaaacgacagcctttcaaaacttgtgactcgggcttgtggtttatgtttatttgcccttggaggacgctgggttgggctgcattttttgtatttaacagttaatggctggccgggtcctcccatgttttttctttcaagtctttgctgccccctggtgagcaccagcggcatggcccctcctttttcttttactacccaaagtttgtaaacaggaatcacgtggtctgaaaccaaccctgcagctctgtctacctttccagtctagggaggaaagggtgtgggtgtctgctcctgcttgcatcgggtggggaggaaggcctcccaaagggcaccctgacttaggatgttgtgcaagcatccttgcttggatcctgtcggccatgagaatctcacccgggctcctgggcagtggtgaatgcaatttaaggatagtc

SEQ ID NO: 328872 - DNA, 554 bp, Homo sapiens
tttcccttcaccccccaaattctaaaactttctcttcctctctttattcctataacctcttactttttcagtctttttgcttatccccttgccttctctaatataactgatctctgccattggctctaacagtggttgtttagatactataaagctctcttgctgttaaatcccagcttgacctcactatctcttaggtggcccaacattgcacagtgcattgtgagggctgcttcttgctctcatttcttaacccttcccctcatcacagtgtctacttccttccttccactccactccttcactaargttaaagtctgccagggatctctctgtaagtccaaaggcttttttctctatttttatcttcccattggagctcctgtcctgaagtgactttcctcctatagttcttcaggcctttctctttccttttctctccctactcaaggattatctctttcataaaactttctctaagggttgggatatgcctacctcttttgagtccacagtcaacccaggcatatctcatcccttaactatactttgcc

SEQ ID NO: 328873 - DNA, 554 bp, Homo sapiens
tttcccttcaccccccaaattctaaaactttctcttcctctctttattcctataacctcttactttttcagtctttttgcttatccccttgccttctctaatataactgatctctgccattggctctaacagtggttgtttagatactataaagctctcttgctgttaaatcccagcttgacctcactatctcttaggtggcccaacattgcacagtgcattgtgagggctgcttcttgctctcatttcttaacccttcccctcatcacagtgtctacttccttccttccactccactccttcactaaggttaaagtctgccagggatctctctgtaagtccaaaggcttttttctctatttttatcttcccattggagctcctgtcctgaagtgactttcctcctatagttcttcargcctttctctttccttttctctccctactcaaggattatctctttcataaaactttctctaagggttgggatatgcctacctcttttgagtccacagtcaacccaggcatatctcatcccttaactatactttgcc

SEQ ID NO: 328874 - DNA, 579 bp, Homo sapiens
catctcagtctgtttctgactcatttgacttcaccatgaatggaaagtagcactttaggtagtggggggaaaaatagactcctagatgttcagaactcctagattcatgccttatctctgccactgattcaccagtgtcattttgagctggtctttgaccatcttgcctctcaatgtcttggaatctaatgaaagaataatatctgctaccaatggctgggaggacaaaatgaaattaaaactgtaatccattgtataaatacaattttgcatgcttattctatcactcattagtatgagtaaagtattatgatgttattgaaactaaattctraagatacaagacagagtaaaggtaaagggatttacgctatgacactttttcattagtaaatgcaattatatagtcaagccctaactagttcatatgactcatgttagaattaatagggaaaactctttctttaattctcttagtttattatgtggaggatatttttatttcatagtcttattaagttcaggcagaataaccacaacaccacatcactggctcatttactgcccaatttaaaatta

SEQ ID NO: 328875 - DNA, 496 bp, Homo sapiens
ttctatttgctttctactgctgcgtcataaattatcactaacttagcagcttaagaaatacctattaatctcagagtttctgtaggtcctaagtctggggaaagcgtaacaggctctttggttcagtttttcacccagctgctatccaggtgtcagctggggtgtggtcttatcagaggcctgactggggaaagattcactatcaattcattcagttttggcaggatttattttcttgtgggtatagaactgaggcccctgtttgctccctgttggccaagaagaagctctttgcatctagaagcctcccaaaggtctttgccacrcagtcatgtaagaagttacaacatgacagcttatttattcatagcccgtatgggagtctggttagcaaagtgggtactattgcatgtatagtaacataatcatgagagtaatactcatcacctttgccatagaacatacccttactatgggagtgacattcttgcaatgt

SEQ ID NO: 328876 - DNA, 622 bp, Homo sapiens
actactattaataccactgctactagcaaatacttgcatagtgctcactacatgttaatcactgttctggaccttttataaatgttaactcctttagttgttacaaagttaatgtaggtataatttttaggtaggtataaggtaggtatgctttttatccctattttgtggttggggaaaccaaggaaaaagtgccagtaacttacttgttgaaggtcacacaatatgttgcctaattgcctaatctgcctttagaatccacgtggctaaccacatgggtatcctgtctgttttcaatccatgtgtcaggattattaacccctcccatgttgtccttgagtctagtcaggcctggatgcatccatagcaaggaggyagcaagctccccttagacctatgatgtattctcaatgcacataaggttgtctactatatcctcaggcatgtcacagcagtaaacacagcggtcacttggtgtttatagtgctactgttgttcccccatagctttttagaatgctgaggggagaagagggaactggaaggagagggaaacatttctaggtctactggccatatcaccgcatggaaaggcatgcttgcatgcacacacacagaacttg

SEQ ID NO: 328877 - DNA, 564 bp, Homo sapiens
aagcatctttttgtggttgttggcagtttttttttttccttcagcactttgattatatcattctattctcttttggcttgcagggcttctgctgagacatctgccaatagtcacattgagacacctttataaatgctatgttccttatcatttactgctctgagaattttttctttgtctttgatttttaatagtttaattattagatgtctttctgaactcctcttggtgttwaattttattgagatttctgtacttccagtacctagatgttggcatttttgcccagattacaagtttccagctattatatgttaaaatatgctttctgttgttttctctttctttttttttcctgaaatacatattatgtgaaagttaggtctcttgatagtgtcccataattcctgtaggctttcttcattctttgtcattttttttctttctgtttctctaacttaataatctcaaatagtctgcctttgagctcattgattctttagcttgattaagcctgccctcaaagctttctattgcatttcttggctcatcattgtactcgtt

SEQ ID NO: 328878 - DNA, 626 bp, Homo sapiens
cagttcctctaacttttgaataataggtacggaaaaataagaaaatcatttttcttgaaagaaattgatattttgtactcagctaatatctccaaaccatcttagtaacatacaaaatcttcttaatcaatactttgtacttgaaacacataattagtttctatgtttaggaactatgtaacaagtttacctctggcattcaagagttttcacaacatgagacaatttcatatgtttttcatcttcacaactgtactctattatttaattgacaggccttamaacttctgcagacaaggatcctgagaaatgttgattggattgcttaagatgacatggggatccagtaacttggggatggtggctaacatttagctttgcttatttaacctcataaaactgttgtgtgaatcagctcaaataaagtattgaatgtggaagagcattgggaactgtaaagttctgtacctttttctctttccatcctcttatctcctcttcataagtaatatctatgggttatattgctatacatcttaaagctatgtagggccatatatcttttgccatacagaaacttttggaacaaattttctttttttctggttccataatgaaaacattat

SEQ ID NO: 328879 - DNA, 605 bp, Homo sapiens
gtaggccatggcaagaattggattattgtaagtgtagcagactttatcgaagaattttaagaaggggacacataagtcccgggtttgctaatctctctggtagctacaaggagaatagcttggatgagggtgagttagcacatattgtaatatttatatgaattcacgatctgactcagcaggtctggaataaggttcaagagtctgcgtttcaataggtgccaggtgataccaatgctgctggtccttgaaccacattttacataagtgatgcaggcagcagtagagaaatttccccgaagccttacccttcctgtctattgagacaaaagcagctatttatcccctaaatatcttttcagtaaccttgagtgagttgaccttctccatgtttttgtttccctattttaagagactgcttacattttatcaaaaatgaaagaaatataattttcttctaggcaatctttttttctttttttcttttttttggtgggatggagaaaaatgcacctctttttgtccgatttkgttctcactgaattctaattttagaattaatacttaatgtttttccttgttttctcctgtataaaaatattcac

SEQ ID NO: 328880 - DNA, 589 bp, Homo sapiens
cgtggttttcatgactgctaacaccacatccattctgtagcccatgagttcaggagtaattttgactttcaagtcttattatttaaaaaatatattttgtaaggctatagctgccatagatagcaatttctctaatggatctgggcaaagtaaattgaaaaccttctggatttgagaccagctagcctggtcagcatagtgagacctggtctctacmgaaaagaaaaataaaaaaacttggccaaacatagtggaaaggagttgccattccagatgctattaagaacatttgggattcacaggagaaggtcaaaatatcaacattaacaggagtttagaagaagttgactgcaaccctcatggatgactgaggaattcaagacttcagtgggagaagtcaccacagatgtggtgcaaataacaagagaactaggattagaagtagagcctgaagatgtgactgaattgctgcaatctcataataaaacttaaacagatgagttgtttcttatggataagcaaaaacaaaagtggtttcttgagatggaatctactcctggtgaagaagctgagaacattgttgaaatga

SEQ ID NO: 328881 - DNA, 610 bp, Homo sapiens
agctggtcttctctcagcttcttgtattccagttccactgaaaaaaagtttgacattgggtatatatgtagtagawtgaaaaatggtctcccgaaagatatcaggtcctaatccctggaaactatctgttaccttacttgagatacagggtctttgcagatgcgattaagctaaggatcttgagatggggcaagtgttctggattatcctagtgggtcctgaatgccatcacaagtgtccttataagagagaggcaggctagatttcatagacagatgagaaaaaggcaatgtgaagatagaggcagagattgggctgatgtggcaatgcaacaagacatagcaacagccacctgaagctggaagaagcaggcaacagattttcccctcagtcctcctcagagaccatgcagagacaaagcaagagacttgaagattggagtgatgtggtacagacgaaaagaatgctggaagtcaccagaactgaaagaaagcaaggggatggacagagcctctcctagacctctgaagagagtgaagccctgcagacacctggatttcagcccagtgatactgattccaacttcaagtcccagaatggtgagagaata

SEQ ID NO: 328882 - DNA, 610 bp, Homo sapiens
agctggtcttctctcagcttcttgtattccagttccactgaaaaaaagtttgacattgggtatatatgtagtagattgaaaaatggtctcccgaaagatatcaggtcctaatccctggaaactatctgttaccttacttgagatayagggtctttgcagatgcgattaagctaaggatcttgagatggggcaagtgttctggattatcctagtgggtcctgaatgccatcacaagtgtccttataagagagaggcaggctagatttcatagacagatgagaaaaaggcaatgtgaagatagaggcagagattgggctgatgtggcaatgcaacaagacatagcaacagccacctgaagctggaagaagcaggcaacagattttcccctcagtcctcctcagagaccatgcagagacaaagcaagagacttgaagattggagtgatgtggtacagacgaaaagaatgctggaagtcaccagaactgaaagaaagcaaggggatggacagagcctctcctagacctctgaagagagtgaagccctgcagacacctggatttcagcccagtgatactgattccaacttcaagtcccagaatggtgagagaata

SEQ ID NO: 328883 - DNA, 599 bp, Homo sapiens
gatggggcaagtgttctggattatcctagtgggtcctgaatgccatcacaagtgtccttataagagagaggcaggctagatttcatagacagatgagaaaaaggcaatgtgaagatagaggcagagattgggctgatgtggcaatgcaacaagacatagcaacagccacctgaagctggaagaagcaggcaacagattttcccctcagtcctcctcagagaccatgcagagacaaagcaagagacttgaagattggagtgatgtggtacagacgaaaagaatgctggaagtcaccagaactgaaagaaagcaaggggatggacagagcctctcctagacctctgaagagagtgaagccctgcagacacctggatttcagcccagtgatactgattccaacttcaagtcccagaatggtgagagaatwagtttctcttaaaaactaaattggtgattgtttgttacaaaagccgtgaaaaactaacactgtgtgtagagaaacaagtgattcaaaaggttagacagagggcagatgctgagacatggtggtatcccaagcaaattcccaatccctaactctatactagaaccgacagaac

SEQ ID NO: 328884 - DNA, 487 bp, Homo sapiens
ttcaactggtttgaaggttaaggaaggctttaacagagaaagaggtatttgaattgagatcagaagtatgggcaggtattaactaagtcaagagaggagggtaaatattgcagacatgggggatagcatattcaatgaccccgtgagggagaaatgtcaaaaaaaaaaaagcgggggtaagtgatgaagtaaataatgtgactgaatcagagagaacaaagttgcatgttttcagctaatgctaatgaggaaagtagggactagatcatgtggrggttcataggcaaagttaagacttttttgcatgccaaattgcactggaaagcctttgatagatttgaaaagaggtgtatcatcatcagatttatgttttgaaaagatgattctgattgaattgtggagtaaatttagttaggcattcaaactggttgtgtgtagacagtaaagaagctatttctagagttgaagccacggaacacagacattt

SEQ ID NO: 328885 - DNA, 538 bp, Homo sapiens
attaaaaaggaggcaccattatgcaactacaacttaatatgaaatacccaggaattaatttaacaaaatatgttgaagacctttcctgtggaaaattataaaagcattattgggagatacaaaaggattattgagaaaaagactaaataaattgagaggtaagcgatgtatatatatatatatatatatatatatatacatatatatatatatacatatatatatatacacatatatgtgtgtgtatatatatatatataaagactttaaattatagagatcctgtttctttttaaattgatctctggactcaatgcaatttgaaacaggatttgtcagggaatttaagaagataattgtagaatggcctagaagtaagagaggaagagagtrtgtgtggaagaattagaacagttaccatgacttttatgaagtggtggcaaatatgacagtgtggttttggctcacaataagcaaactctgcaccataatggattccagaaaatgaccaatgcatgtatgtattgagttgtattga

SEQ ID NO: 328886 - DNA, 588 bp, Homo sapiens
cacaaacgaccctaaatagtcaaagcaatctcaagcaaaaagaacaaagctggaagcatctcattacctgatctcaaaatctactacaaagccrtagtaatcaaaacagcattatactggcataaataaaaacagatgactaggccagtggaacaggatagagagcccagaaataaacccatgcatttatagtcaattttagtgtttacaagtaaacttgtattggcacacagtcatggccattcatttacttattttttatggctgcttcccaccactatggagtagttgcaacagagactctgtggcctgcaaaaccccaggtattactctcttgcctttttacagagaaaatttgcctatccttgattgaggggattcaaatttcagatattgtgcatagaaaagattacatttttaatcaagctttcttaggacaaaaatatgtcacttaaaagattgaaggtatcccattatttccttgtggaatgcccttttattccttaggttgctgagcttcaatatcagggtctcttggctactttatgtttcagacttgaaaattatgatggtgggtttgttcttata

SEQ ID NO: 328887 - DNA, 588 bp, Homo sapiens
cacaaacgaccctaaatagtcaaagcaatctcaagcaaaaagaacaaagctggaagcatctcattacctgatctcaaaatctactacaaagccatagtaatcaaaacagcattatactggcataaataaaaacagatgactaggccagtggaacaggatagagagcccagaaataaacccatgcatttatagtcaattttagtgtttacaagtaaacttstattggcacacagtcatggccattcatttacttattttttatggctgcttcccaccactatggagtagttgcaacagagactctgtggcctgcaaaaccccaggtattactctcttgcctttttacagagaaaatttgcctatccttgattgaggggattcaaatttcagatattgtgcatagaaaagattacatttttaatcaagctttcttaggacaaaaatatgtcacttaaaagattgaaggtatcccattatttccttgtggaatgcccttttattccttaggttgctgagcttcaatatcagggtctcttggctactttatgtttcagacttgaaaattatgatggtgggtttgttcttata

SEQ ID NO: 328888 - DNA, 588 bp, Homo sapiens
cacaaacgaccctaaatagtcaaagcaatctcaagcaaaaagaacaaagctggaagcatctcattacctgatctcaaaatctactacaaagccatagtaatcaaaacagcattatactggcataaataaaaacagatgactaggccagtggaacaggatagagagcccagaaataaacccatgcatttatagtcaattttagtgtttacaagtaaacttgtattggcacacagkcatggccattcatttacttattttttatggctgcttcccaccactatggagtagttgcaacagagactctgtggcctgcaaaaccccaggtattactctcttgcctttttacagagaaaatttgcctatccttgattgaggggattcaaatttcagatattgtgcatagaaaagattacatttttaatcaagctttcttaggacaaaaatatgtcacttaaaagattgaaggtatcccattatttccttgtggaatgcccttttattccttaggttgctgagcttcaatatcagggtctcttggctactttatgtttcagacttgaaaattatgatggtgggtttgttcttata

SEQ ID NO: 328889 - DNA, 588 bp, Homo sapiens
cacaaacgaccctaaatagtcaaagcaatctcaagcaaaaagaacaaagctggaagcatctcattacctgatctcaaaatctactacaaagccatagtaatcaaaacagcattatactggcataaataaaaacagatgactaggccagtggaacaggatagagagcccagaaataaacccatgcatttatagtcaattttagtgtttacaagtaaacttgtattggcacacagtcatggccattcatttacttattttttatggctgcttcccaccactatggagtagttgcaacagagactctgtggcctgcaaaaccccaggtattactctcttgcctttttacagagaaaatttgcctatccttgattgaggggattcaaatttcagatattgtgcatagaaaagattacatttttaatcaagctttcttaggacaaaaatatrtcacttaaaagattgaaggtatcccattatttccttgtggaatgcccttttattccttaggttgctgagcttcaatatcagggtctcttggctactttatgtttcagacttgaaaattatgatggtgggtttgttcttata

SEQ ID NO: 328890 - DNA, 594 bp, Homo sapiens
cttgcttgttcagccaggctggagtacagtgctataagcatagctcactgcaaccttgaactcttgggctcaagcgatcctcctgccttagcctctcaagtagaaattatgcaggatattttactccttagctcagctaggtgcaggttcttgtctcacaaccaggaaaaattaggcacacggrcaccggagagtgagtggagtagagtttatttattttattttatttctttatttattttgagacagagactcgctctgtcgctcaggctggagtgcagtggtgcaatctcggctcatggcaacctctgcctcccaggttcaatcgccttccaattctcctacctcagcctcctgagtagctggtactacaggcacccaccaccacacctggctaatattttgtatttttagtagagacggggtttcaccatgttagccaggatggtctcgatctcctgattttgtgatctgcccgcctcatcctcccaaagtggtgggattacaggcgtgagtcactgtacccggtcctggagttgagtttattaagtgaaagtaaagctgtcagcaaagagtggggacctgaaagcaggg

SEQ ID NO: 328891 - DNA, 594 bp, Homo sapiens
cttgcttgttcagccaggctggagtacagtgctataagcatagctcactgcaaccttgaactcttgggctcaagcgatcctcctgccttagcctctcaagtagaaattatgcaggatattttactccttagctcagctaggtgcaggttcttgtctcacaaccaggaaaaattaggcacacgggcaccggagagtgagtggagtagagtttatttattttattttatttctttatttattttgagacagagactcgctctgtcgctcaggctggagtgcagtggtgcaatctcggctcatggcaacctctgcctcccaggttcaatcgccttccaattctcctacctcagcctcctgagtagctggtactacaggcacccaccaccacacctggctaatattttgtatttttagtagagacggggtttcaccatgttagccaggatggtctcgatctcctgattttgtgatctgcccgcctcatcctcccaaagtggtgggattacaggcgtgagtcactgtacccggtcctggagtwgagtttattaagtgaaagtaaagctgtcagcaaagagtggggacctgaaagcaggg

SEQ ID NO: 328892 - DNA, 588 bp, Homo sapiens
cggcagacaagagaatgagaaccaagtgaaaggggtttccccttataaaaccatcagctctcctgagacttattcattaccatgagaacagtatgggggaaacctcccccatgattcagttttctcccactgggtgcctcccacaacatgtgggaattatgggagctacaattcaagatgagatttggatgtagacacagccaaaccatatcatatgtcttacaagtgggcttcaagtgtgaaaggttttgttgtagctctctctctctctctctctctctctctctstgtgtgtgtgtgtgtgtgtgtgtgtgttttgtatagtaaagaatttaatcttattcaaggagagatatggctttgtccttgtcttctggaaggtaatatctaagcccttggaacattgtttctgacaggagtgtaacaatgtgatttagggcagggggttggctatgccaggcattccaacaatgtgatttgatgtgggagccttgggtcaccgagtaacagcttgacctctagaggggctggacactggatgagccatgtgtgtagtcagctgtgcctgcagatggagtgccagcaagg

SEQ ID NO: 328893 - DNA, 503 bp, Homo sapiens
ataaatgcagctccctaaattaatagttttgtgatgctgggaaagttgcttaaactctttgacaggtagattcctccttttttaaatttggctgattcaaaatgtattgtgatgtttatattaaatatataagcacacacacacattaaatttgccaagwacatctcctgtcttctgaaaacaaaatctcctacattatgttttgggacccattcttctccctagtccaaccatgattcaggtggcccctgccaatcacagaagccattcctaactctacctctcccatccccaatcctggccacaaagacagcatattacccaagatgaaccagtctttccctggcattttttacattagaataatggaagagagtctcttcctttctgataacagagttagaaagatgaaccagtagctgccagcagccaaagtcccaacttcatggcaacagtcggtcagagatcgaagtccaagggagagagatggagagggcgtgagc

SEQ ID NO: 328894 - DNA, 561 bp, Homo sapiens
acagttatttccatgtgttaacatgttatgtgtgtttaaaaaatgtctgtttaaatttacttaaatttaaaatacagtaaatagcataggtataacccacataaacagaagctctttggtgtccccagtaatagcagtgtaaagatgttctgaagccacaaagtgtggtaaccacttacatagaacatcctttccttgtctggtcattcctttaatgtatgcctaatgcccacaaatgcattattgtccctccctmtgtttgttccttactgggataatattccttcacttttgtgcccaaatgaattattttgatctttaaatagtcaactaaaacttctttttccagatttcccctattttctgccataataatttgtacaagtgcttattataaaacttgctgcatgtaataatctgttcacatagctgatgcttcactggactgtgagatcttaaaggacagacactcttttagtcattaatgcatcaggacctggaaaaaggtccagatccccgtaagcactccactgaaattttgttcttgaaagactgagtttt

SEQ ID NO: 328895 - DNA, 577 bp, Homo sapiens
tggtctttaagtaagcttaggagaaaattcttcaaatccgtaaaaaattgtgtataatgacaaaagaaggcagtgtcagatgtaaaagacaataacttttgattatttagtgtagctcatgcctaataatcaactatagaaaacgtcctctttctttctttttgtttatttatatttagccaccattaatcaatatctttcatttgtgttttgtgtaaaatgaaagtgatcatcaataggcaaagctgatatatcctctcctccttttttacttgcattaatttgaasaatttggctacagtaaagcggtgaaccccacacctacttgagaacatgtagtagacaaaaactgcttaaaatggaccgaatgttcttttggatgttgtatttcctaataaccaattgtaataatatgatgtcatatgggcactgttgtgtaactcaggataagttgaaaataatctattgttttgctatcaggttgtggtctgggaaccagcaggcaggaccaccatacataccagcaaaataatgagactagatgggatatataaaaagagatgaagccaatgaaagg

SEQ ID NO: 328896 - DNA, 577 bp, Homo sapiens
tggtctttaagtaagcttaggagaaaattcttcaaatccgtaaaaaattgtgtataatgacaaaagaaggcagtgtcagatgtaaaagacaataacttttgattatttagtgtagctcatgcctaataatcaactatagaaaacgtcctctttctttctttttgtttatttatatttagccaccattaatcaatatctttcatttgtgttttgtgtaaaatgaaagtgatcatcaataggcaaagctgatatatcctctcctccttttttacttgcattaatttgaacaatttggctacartaaagcggtgaaccccacacctacttgagaacatgtagtagacaaaaactgcttaaaatggaccgaatgttcttttggatgttgtatttcctaataaccaattgtaataatatgatgtcatatgggcactgttgtgtaactcaggataagttgaaaataatctattgttttgctatcaggttgtggtctgggaaccagcaggcaggaccaccatacataccagcaaaataatgagactagatgggatatataaaaagagatgaagccaatgaaagg

SEQ ID NO: 328897 - DNA, 603 bp, Homo sapiens
caggacctggggcaagtgcttttgggtgccggcttgagccaactctgtagcagccctgcagcagcatctgggaggtacctgcgcctcctgaggccccagaggaagtgttacagtgctcttttagcttggccatccatggacaacttaactgacaacagctcagtggaccctctgccttttcatgtgaggcagctgccttccaccagcgagagcaaagggttagtgtgagagccttttgcatccacattcttggcccctgagttcttgtccaacatccaggaagaatgaggttgcacaaacgaattgaagrtggtaaatatgagggattttattgctgatgaaaatggctatcagcagaaagaggagctgaaaaggggacggagtaggaaggtaatcttcccctgaagtccggctgtccccagccagactcctctctgaagctatgccatcaaactgtccctctcaagtcaagctacttctctctggcatccaaccgtagcgtctgatgtccagtgacttctcttctctgccaactgagttctgggatttttatgggcacaagatgaggggtggggcaggccatggatggttttggaaaaggca

SEQ ID NO: 328898 - DNA, 442 bp, Homo sapiens
cttaactgacaacagctcagtggaccctctgccttttcatgtgaggcagctgccttccaccagcgagagcaaagggttagtgtgagagccttttgcatccacattcttggcccctgagttcttgtccaacatccaggaagaatgaggttgcacaaacgaattgaagatggtaaatatgagggattttattgctgatgaraatggctatcagcagaaagaggagctgaaaaggggacggagtaggaaggtaatcttcccctgaagtccggctgtccccagccagactcctctctgaagctatgccatcaaactgtccctctcaagtcaagctacttctctctggcatccaaccgtagcgtctgatgtccagtgacttctcttctctgccaactgagttctgggatttttatgggcacaagatgaggggtggggcaggccatgg

SEQ ID NO: 328899 - DNA, 574 bp, Homo sapiens
tcatgttgttttaagcttctaaatttgtagtaatttgatacaatagcaatagacaatgatatgccattcttaaaggcaaaaacaaaaacaaagaaatccaacaactccagggcagkcaaatcctatgtttctcttaagggtcatggtttctttgggaattatgctttaatttctaggcataagaacaatattattttcttattgggtaccattgcacacatttagaaaaagaagaaatgaatatggaatattgatgtggtcaatgatcttgtctgttattagatcacatttccagtgggcagtgtggaaggaggtattgtgagataataaaaccctgattagtatatgaatataatatttacacaaaagttatcattaaggtgcaatctcagtgtaaattggagactagactgtgccctaccacatgaaaatgggatatgggctgtaagcttttatatttctttgtggcagacaccataatcccattcagcttctgtatatgaaaagtttaagaagtagaattaggtatgaagacattaagtaagtaaagtgacaaagcattattaggatgctc

SEQ ID NO: 328900 - DNA, 574 bp, Homo sapiens
tcatgttgttttaagcttctaaatttgtagtaatttgatacaatagcaatagacaatgatatgccattcttaaaggcaaaaacaaaaacaaagaaatccaacaactccagggcaggcaaatcctatgtttctcttaagggtcatggtttctttgggaattatgctttaatttctaggcataagaacaatattattttcttattgggtaccattgcacacatttagaaaaagaagaaatgaatatggaatattgatgtggtcaatgatcttgtctgttattagatcacatttccagtgggcagtgtggaaggaggtattgtgagataataaaaccctgattagtatatgaatataatatttacacaaaagttatcattaaggtgcaatctcagtgtaaattkgagactagactgtgccctaccacatgaaaatgggatatgggctgtaagcttttatatttctttgtggcagacaccataatcccattcagcttctgtatatgaaaagtttaagaagtagaattaggtatgaagacattaagtaagtaaagtgacaaagcattattaggatgctc

SEQ ID NO: 328901 - DNA, 602 bp, Homo sapiens
gatctaactagtgagcccctagtggaagtaaaatgaaatcacaaaaattacccaattaatccaaaggaaggcaggaacagtgaaaaaataaaaattgggccaatagaaaacaaatggcgatacgatagatttaaattcaattgtattgataattaaattatatttaaatgatttaaatgcgctaattaaaagtagagattgtacgattagataagaaagaagttacaaatatatgttacctgcaagaaacccaatttataaagacaaaggtaggctaaaaaygaatgaaaggaaaacgaaacgtgcacacactaatgaaaatcggttagctatattattatcagacaaaactatttctgttgtattttcctctagtttgatcttgagttctttctggagagtggcagtaaactctagccctatgcagagcgtttagaatttagccatggaggagtgtacctttgtaggatacttctttattctggtgcatggcctaatgcccgtgtctgaccaatgaccaggcgtctctttcataggaagcttgtttaaactggcagaccctctggtggctcttgtcctagccactctctgaaagagtcctg

SEQ ID NO: 328902 - DNA, 559 bp, Homo sapiens
ccttcaccttctgccattataataagcttcctgagtccctcaccaggagcagatgcagaaccatgaaccaattaaccctcttttctttataaattatccagtctcaggcatttcttgatagcaacacaaaaatgtactaacacaaaaaattggtatcgaagcacagaacactgctacaaagaaacccgaaatgtagaagtggctttggaactgagtaagaggcagaggttggaaaagtttggcgggctyagaagactggagcataagggaaagtttagaacttcatagagacttgttaaatggttatgaccaaacgctaatagaaatatggacaagtgaaagctaggctgatgagatttcctatggaaattagaaagttattgggaagtagagcaaaggtctcggctgcgttatgtccatgccctagggatctgagaaagtttggacttaagagtaataacttacggtatctgttggaagaaatttctaagcagcaaagtgttcaagatgtggtgtggctgcttctaacaacctatgatcagatatggagcaaagaaat

SEQ ID NO: 328903 - DNA, 559 bp, Homo sapiens
ccttcaccttctgccattataataagcttcctgagtccctcaccaggagcagatgcagaaccatgaaccaattaaccctcttttctttataaattatccagtctcaggcatttcttgatagcaacacaaaaatgtactaacacaaaaaattggtatcgaagcacagaacactgctacaaagaaacccgaaatgtagaagtggctttggaactgagtaagaggcagaggttggaaaagtttggcgggcttagaagactggagcataagggaaagtttagaacttcatagagacttgttaaatggttatgaccaaaygctaatagaaatatggacaagtgaaagctaggctgatgagatttcctatggaaattagaaagttattgggaagtagagcaaaggtctcggctgcgttatgtccatgccctagggatctgagaaagtttggacttaagagtaataacttacggtatctgttggaagaaatttctaagcagcaaagtgttcaagatgtggtgtggctgcttctaacaacctatgatcagatatggagcaaagaaat

SEQ ID NO: 328904 - DNA, 559 bp, Homo sapiens
ccttcaccttctgccattataataagcttcctgagtccctcaccaggagcagatgcagaaccatgaaccaattaaccctcttttctttataaattatccagtctcaggcatttcttgatagcaacacaaaaatgtactaacacaaaaaattggtatcgaagcacagaacactgctacaaagaaacccgaaatgtagaagtggctttggaactgagtaagaggcagaggttggaaaagtttggcgggcttagaagactggagcataagggaaagtttagaacttcatagagacttgttaaatggttatgaccaaacgctaatagaaatatggacaagtgaaagctaggctgatgagatttcctatggaaattaraaagttattgggaagtagagcaaaggtctcggctgcgttatgtccatgccctagggatctgagaaagtttggacttaagagtaataacttacggtatctgttggaagaaatttctaagcagcaaagtgttcaagatgtggtgtggctgcttctaacaacctatgatcagatatggagcaaagaaat

SEQ ID NO: 328905 - DNA, 601 bp, Homo sapiens
catgctaacaaaatagggaagttggagtttccatggtggacacgcctggcccccaggtagcccttttctattggtgcagctgccgccattcccccatgcaagcttccagcttccttatctatgtttgcagctcaatctttcaggctgctctttgttagaaaagaaatgatttcttgggctggtttttgttagaagggaagttctgccaaggactcttttgccctcactatctgcctacctaatttctttctatyttctgtatcacaaccaccttttggttactgtttgtatggcatatcattttccatcctttgatttttcgaccagtttgaatctttgaaatgtaaatgtgactttgaaccttagatatccaacagcatatggttagatcttatttgtaaatcagcctgccttttaattggtgtgtttagactatttacatttaaaggaactattgatatagttggatttatatttgccgttttccttgtttcctatatgtcccttgtctcttttgtttctaagtccctcctttactgcgttcatttacattaaataaatgttatttggcataccattttaattcctctgttgataactt

SEQ ID NO: 328906 - DNA, 523 bp, Homo sapiens
cactggagcggaagcaagtatctttttgacatgaaaaatgctacttatgtatattcacttgtggatttttgcacatattccaattctatctgtataatcrccccatactaaaactactaaatgaagcctcaggtgacttaagactcatactacttatagttcgggtggccaaatttaataataataacataggacacacagttaaattcaaattccagataatgaatatattttagtataagtatgacctgtgcaatatctgttatagtaaaaaccattttttgttttttatctgaaattcaaatttacctgagtactttgtattttatctaacaagtttctttagagtagaacaaagcctctttcttatgtgtgttatgatagttatgatataatttactgcttcttgaatacaaaaatcaaaataatgtcaaggacagacatgaaaaggttacttgtagtggtgaagtgcagaagggaaggaaacaggtgtgcagcagctggcaatgagggctctgctatg

SEQ ID NO: 328907 - DNA, 497 bp, Homo sapiens
cattcccttctgtcccttctacatgtgaggacacagagtttgctccttcccgaggatgcagcaacaaggccccatcttggaagcagagatcatgccctcaccagatacctaacctgctggtgacttgattgtgaacctccaggctccagaactgtgaaaaataaggttttcttgtttataaattacccagtctcaggtattttgttacagcagcagaaataaactaagacattgaacataggtcaaaagatccttaatcataaaataaacrttcatttctgattttgctttaagaaaattagcaactgatagtagtgagctaggcatggtggtgtgcatcaatagttccagctactagggaggctaaggtgggaggatcattcaagcccaggagtctgaggccagcttgggcaacataccaagaccttgtctcttaaaaaattgctattggtctctctctttgtgacttatcacttattataagcaaatcattcaat

SEQ ID NO: 328908 - DNA, 523 bp, Homo sapiens
cactggagcggaagcaagtatctttttgacatgaaaaatgctacttatgtatattcacttgtggatttttgcacatattccaattctatctgtataatcgccccatactaaaactactaaatgaagcctcaggtgacttaagactcatactacttatagttcgggtggccaaatttaataataataacataggacacacagttaaattcaaattccagataatgaatatattttagtatamgtatgacctgtgcaatatctgttatagtaaaaaccattttttgttttttatctgaaattcaaatttacctgagtactttgtattttatctaacaagtttctttagagtagaacaaagcctctttcttatgtgtgttatgatagttatgatataatttactgcttcttgaatacaaaaatcaaaataatgtcaaggacagacatgaaaaggttacttgtagtggtgaagtgcagaagggaaggaaacaggtgtgcagcagctggcaatgagggctctgctatg

SEQ ID NO: 328909 - DNA, 601 bp, Homo sapiens
gtaaatatgaaaaacaataagaaaactttgtaacatggcaaactgtagttacattgaaaaccaatataaaataaagtactttgtattatatattgtatatgttaataaatttgctaatattttttattgtaaaataaaacaagatttatttttctggctaaaggacttgaccaggtttgattgtggtagtagtctgttaaaatatcctcaaacattacttttgtgattggtgatagtgataacaatacctaattaaagactggctttttttgagcaaatccatcaaaaatagattcctccaaatgattccatcaagtcaaaattgttacatgtaacatggcaggagaagtcactcgtttacttggcgtatattctaaacttaatgttctgattcagtaaccacagactttaagaatttcgaagaagaaamcatgccatttctatatgtctaatattccattttatgacttgaattaattaaaacacaaactgaaatctttcaagtgaagttgtttgagtttcttggaaaagccaaatacatagtatcttcatgagaaaaaaagaaaaaaaacaaacatactgtgtttacctgacaaaaagt

SEQ ID NO: 328910 - DNA, 541 bp, Homo sapiens
ctgtgtttacctgacaaaaagtcagcaaagcaattcatgagagtgtgaaagatttaattagtcagcaatgttgttttttacttcactaaatactgattttgcttttactcatttatttcgttttatgttggattgagttggctgaattggtgatgttgcgtagataaatgaatctacatttagaggttatcctttctcctggcattgggtatcctgtggatggttaatctttcctctttcttttcctcatttcctcctcatttgaggaagaaatcagcaggatcagctctgcccttttctccatcttttgttggatctgcctgcctgtaaagagggtgcaatctgactgtggtgtattgattgcaaattggcccaagcccctacttgccctgttttgatgcccttgcaatgttattttcagttccttccttcaagatgtgcagtctatttttgcacrccttggatatagactggttttgtgacttgcttaggttagcaggaggcaggagaaatgacagtatgtttgtgctttcctggctct

SEQ ID NO: 328911 - DNA, 518 bp, Homo sapiens
acatctctaacttgggattgttttctttcaatccaacaaatctcctttttgtcactgtaatatattgaccttgggttttggtttatttaggtgtgtccctgagaaattcttatcagtcacctttcttgaaaagatattattactaacccagagcctaccattgtatgtaaggcactgattaccagggtggagcaggcagaaatatagaagtggtctgaaggaatcccttagcaatgaygcatgaggatggaaaaagttaagcctcaaggtttctaatgacatttttattggtacacaatgaaagtttcagctgctgattctgccccagctcagttgcccagggttttgctgataagtggaaccaatgagggaaagaggagacaggaaaggagagagactctttaaatattacagtattttattgcctgagcaggtttgatgcacaaccagcatgcactggtatctgattgctcaatattttaatatcaccctgggtctaggtaccaaatataaagtgc

SEQ ID NO: 328912 - DNA, 620 bp, Homo sapiens
cttctaaaactcttgtaatttcccaggtgacaggagcatcttttattctaatgaggtgtcttggtgggctcctgcatgggggctggtcaccagaaagaccaaggcatgattaggagcttggaactttcaaccccactcccagccccttctccagagagggagggaagaggggctagaaattgagttagtaattgttcatacctacatgacaaagcctccataaaaattccaaaagtatgcggttctggagagcttccaggttggtgagcaaggacacattagcatgctgggagggtggctgcaccccaactctacagagacagaagctcctgtgctcaagrtctctctgaaccttgccctatgtatctcttcatctggctttccatttacattctttacaatatcctttgtaataaataagtaacagtaagtaaactcttttcctggagtctgtgaactgctcttgcaaatggaacctgaaaatggggtcatgcaaacctctgatttttaccaagtcagacagaagttgtaggtaacttgaaaacttactacctgtcattggcttctgaagttgggtgagggaagtcttatgggactgaacccttaacctgtgaggtctg

SEQ ID NO: 328913 - DNA, 620 bp, Homo sapiens
cttctaaaactcttgtaatttcccaggtgacaggagcatcttttattctaatgaggtgtcttggtgggctcctgcatgggggctggtcaccagaaagaccaaggcatgattaggagcttggaactttcaaccccactcccagccccttctccagagagggagggaagaggggctagaaattgagttagtaattgttcatacctacatgacaaagcctccataaaaattccaaaagtatgcggttctggagagcttccaggttggtgagcaaggacacattagcatgctgggagggtggctgcaccccaactctacagagacagaagctcctgtgctcaaggtctctctgaaccttgccctatgtatctcttcatctggctttccatttacattctttacaatatcctttgtaataaataagtaacagtaagtaaactcttttcctggagtctgtgaactgctcttgcaaatggaacctgaaaatggggtcatgcaaacctctgatttttaccaagtcagacagaagttgtaggtaacttgaaaacttactacctgtcattggyttctgaagttgggtgagggaagtcttatgggactgaacccttaacctgtgaggtctg

SEQ ID NO: 328914 - DNA, 577 bp, Homo sapiens
cctagctagtgtcagagaattgcttgctgtgggagaggcacccacatatttgttcacagaagtgttctgtgttgagttttgaaagtatagtaagagaaaaaaactgtgttttttttctattcaatgatctatgcagaaacatagaccaaagacctagaaatactattccccttttaggaaaaaaaagtaatttaccaagtttttcctctgctaaaaaatgtcattttgatggatatggctaaatagaacattgaaggaatgaaaagttctgtcatttttyggagtaaacttttagaagttcctttgtttccaaatgtagtcaaagtaatgtggttttaataaatatgaagctaataatatagcattattttgagcttatgaattgttaagcttattttttgtaatgattaatgatgaatcattttataaagcttgggtgattcatcaacagagcagcatgcctttaaaacaggtgttctgggaatttcacaaactctgaattacaaagtttttttattctctgtaatttgggaatttccaagtcacctgcaaataggaatagagacaaagtaggagg

SEQ ID NO: 328915 - DNA, 388 bp, Homo sapiens
ctggtctcgaactcctgacctcaggtgatccacctgccttggcctcccaaagtgctgggattacaggcgtgagccaccrcacccagccctcactgacattattatgacagaattgatctttctgcttctaccttcgtcctccttcagtctgttggcaacacagtagacaaagtgattacttaaaagtcatattttgtttactactttgctcaaatcttccaatgactttccatctcaccccaagcaaaatccaaactcctcatatgttctataaagccctacatgatttggcctcagcttacctctctggccactgacctacctctctcctcccacttactgtgttccagctacaatggcttccatgctgtttctacgtcaaaaactt

SEQ ID NO: 328916 - DNA, 542 bp, Homo sapiens
atgacatactcttataacttgcctttttcaccttatcatatggacctctttttatcaagtacatgtagatctatgtaatagtttagattgactgcatagtatcccaatgtttgtaggttccctgttttgtctaatcccatgatggacatattggttatttatgatattcattagtataaacaatgctgcaaagracatcagtgtatgatgatctagctttatacatttatccgataatgtgaggactggctttgtcccaatagatgtaaatgtcaggaatgattctttgagacatcttatatgagaagcaagttgctaggttagtagccatttttattcatgtataggctcagcctggcactcaggttgtgcatggattgtgttagacactagaaatataaaggaacttgtgccaattatgaatatggaatcaagaagctgtgttttaactgtgtcctaattgttcatatttaaaacaacttttgactggcttctaccttaagggacaatttgtattttaaaacaatggcaccgacagctgt

SEQ ID NO: 328917 - DNA, 566 bp, Homo sapiens
tataacaggtcctcactaatagcaaacttttgggtcagaatacacatacacacacaccttgaattatttgcaccttgtacttaaaacctgggagaaaatattctaatttccaacatcttattccttaatcttcgagtgctttagaatatgagaacacatggacacagggaggggaacatcacacacagggccctgtcagggagtggggggacagcggagggatagcattaggagaaatatctaatgtaggtgacgggttgatgggtgcagcaaaccactatggcacatgtatacctatgtaacaaacctgcacattctgcacatgtatcccagaacttaaaatataatttttttaaaaaagatattattcaaatgcaaccaaaaacagaatataccattcccaccaagcaatgagccatgcagtgtacagaccatatttggaatgtcacgtccaattttgacatgtgacaatttaaggagaacattaacaaataaccatttgtacagagtagggcaaacagracagtgagggtccagaaattatagtttataaaagctggatacaa

SEQ ID NO: 328918 - DNA, 490 bp, Homo sapiens
tgttatagcagcacaaaatggactaagacatgcaagtcattaaaaagtaacgtattagctctcaactgatgtatatcccttactgacaaatgactgactggcttgtgaaaaactgctccagttagtggcaaggaggcttggggattctcttttctagaaatgtacattttttaaattgtggtaaaatatrcacaacaaaatttaccattttaactctttttaaatgtacaactcattggcattaaatacatttacaatattgtgcaaccatcaccactatgcatttctagaactttttatcctctgaaatagaaactttgtacccattaaatagtagctctccatcctcccctacccacagctcctagtaatctctatgaatttgcctgttttaggtgcctcctgtaagtagaaccatgcaaaagttgtccttttgtgtctggcttatttcatttagcacaatggtttcaaggttcattcatgttttcag

SEQ ID NO: 328919 - DNA, 490 bp, Homo sapiens
tgttatagcagcacaaaatggactaagacatgcaagtcattaaaaagtaacgtattagctctcaactgatgtatatcccttactgacaaatgactgactggcttgtgaaaaactgctccagttagtggcaaggaggcttggggattctcttttctagaaatgtacattttttaaattgtggtaaaatatgcacaacaaaatttaccattttaactctttttaaatgtacaactcattggcattaaatacatttacaatattgtgcaaccatcaccactatgcatttctagaactttttatcctctgaaatagaaactttgtacccattaaatagtagctctccatcctcccctacccacagctcctagtaatctctatgaatttgcctgttttakgtgcctcctgtaagtagaaccatgcaaaagttgtccttttgtgtctggcttatttcatttagcacaatggtttcaaggttcattcatgttttcag

SEQ ID NO: 328920 - DNA, 546 bp, Homo sapiens
caactggaatctgcttccatatcccactcctgttctcaaatgctttcctacagccactgtgccctcagagcctggtgctctgaatgtcccatcccactcccctaccccacatcayagtgaagctcagatgggtagagagagaccaatcccaaggacattagtgttttaatgaggatgattgccttaaggcaaatgtgacaatgacagggaaaggtgtgtgcagagagggaaaggaatggtttgaggtataccttgacctgatcattccaatacatggaatagccagtcatttggccatatattaatatatatgtctgttcatatgtccattttatatgtatgtatatgcatgtatatatgtatgtatacatgcaagatcatatacatgtgagtgtttacgaatgtatatgtgtgtgcatgtgtgtgtgtaaagtcacatccacatgtataaattttaagtggctcccaattactgagcacattcatgattgctgacactctgctaagtactttacattcagaatttcacttggttttcacaacaac

SEQ ID NO: 328921 - DNA, 584 bp, Homo sapiens
cacagacaagggagctggagctttcacactctagctcccatcaggtaagaaccacgtcaggggaacatgaatctgcaggcagttccctctctctgcatgtgaaggaaaaagtaggggcaatcctcagagaatgggccataggtgctggtggctggaagttaaatatttaaaaratgtttttggatctggataaagcacggacattacccactacaggccatttttatgaatttgtcaaatgtacagataaatatttcaagctgcatttgagtgtgcaggtttgcaacatgttgtaaatgaattaacttaccaacaaggtccagcattccaatttcacatttcatacatgtcccaaagacaatttgaacattaagaatgctcactaggtaaatcatgcattgccaccttttagataattcagcatgaagacgatcaataaaatcactttgccagttacagatgttaaaatatacgatgaaaaacagtataaagttttttgcagggccacagataccaactttaccaggtacagtgttcgatcctctaaattcctaagtaaacttagggaagtattgtaacgttta

SEQ ID NO: 328922 - DNA, 584 bp, Homo sapiens
cacagacaagggagctggagctttcacactctagctcccatcaggtaagaaccacgtcaggggaacatgaatctgcaggcagttccctctctctgcatgtgaaggaaaaagtaggggcaatcctcagagaatgggccataggtgctggtggctggaagttaaatatttaaaaaatgtttttggatctggataaagcacggacattacccactacaggccatttttatgaatttgtcaaatgtacagataaatatttcaagctgcatttgagtgtgcaggtttgcaacatgttgtaaatgaattaacttaccaacaaggtccagcattccaatttcacatttcatacatgtcccaaagacaatttgaacattaagaatgctcactaggtaaatcatgcattgccaccttttagataattcagcatgaagacgatcaataaaatcactttgccagttacagatgttaaaatatacgatgaaaaacagtataaagytttttgcagggccacagataccaactttaccaggtacagtgttcgatcctctaaattcctaagtaaacttagggaagtattgtaacgttta

SEQ ID NO: 328923 - DNA, 430 bp, Homo sapiens
tattggggtctatgctcattaccttggtgacgggatgcataccccaaacctgaacatcaggcaatgtagccaggtgacaaacctgcacatatatttctgaatctaaaataaaagttgaaaaaacagtgtatttgcctgttttcatgctgctgataaagacatacccaacactgggcaatttacaaaagaaagaggtttattggacttacagttccacatggttggggaggcctcacaatcatgacagaaggcaaggaggagcaagtcacatcttacgtgaatggcaacagacaaagagagagcttgtgcagggaaactcccatttttaaaaccatcaratctcatgagacccattcactatcacgagaacagcacaggaaagacccacccccaggattcagtcatctcccaccaggtcccttccacaacg

SEQ ID NO: 328924 - DNA, 456 bp, Homo sapiens
gctaattgatttttcttttgtacttcacactatacagttcacaaaatattcaaagtgatgtacaaaaagaagggaaaaatggtatgtactgccacttatacgtgaacacacacagatacctgggggaaataattcattagtcaatgaacagctctatatatgccaacaaactagagttctgggaagaaaataatgaattaaaagatcactcgacaaaaatgcttaattatttcagtacttatttcccctgatgatatttagaagtgggaagaaaaagatacgcatgaaatgtstttgtgtataacagagagaaagaaagaaagagagattgtaactgactataagcagaacagttttgcttaattgtatttctagctactgttgttcattttaaattgcctaactggagttctagagcattgaaaatattgagaggctctagctgcacagtcacag

SEQ ID NO: 328925 - DNA, 550 bp, Homo sapiens
gtacctaacaactaaatcagttccacttatatttagaacccaaattttgacctccatgtatggttgcccaaattctgatatcctgactactaatcccccagtcccaatcccaattcatgtgtgggaccttaatcttcatgtctgcctctttaagcgccctccttttttcatcccattgagtccttgctagtagagttccaggtctttctgtctacctaaaatgatcatcgattaagactgtctacctgaaacttctatattatagttgctatgctttatgtatgttctttttttaattatacttgaagttttagggtacatgtgcacaatgtgcaggttagttacatatgtatacatgtgccatgctggtgtgctgcacccattaactcgtcatgtttatgtygtttcttgagattgtaattttcatcctttctccccgggtctctgatacatatatcttgatcttggctcattttgttctgtcttcttgctcatatccttgaaaatccatatcacaggctgtaatttcattaagtgggaaacaatttgt

SEQ ID NO: 328926 - DNA, 572 bp, Homo sapiens
agagcgagaagctccagaaatatttcctgtttctcaagagcttatataataccaatatctgctcartcaagacaatccttattaagtccactccagatactttcatcaatctttcatcttgattctggtagcgaaaagacctgaacagagtttctgtagttttctgcaattgctcaaaaacaatacaatataacacaaagcactcacctttacagaagaataaatatgacttcacaggcataacacagcctaaatccattctaagaaagaaatattttctgaggaaatacatacatagtatagaaaaacagaacactaccaaaacagatttaacattttattattacacaagttctttagctcctacacatcatagttcctcatccccttctcgttctaattattgtccctggttttcctttgcaaaactgagtggtacttttcttggtctttctgtcttcttcacagggattctaaaagcttcaccatacattatacagaaaattacttacagattctttcctatcccaggacctactgagatgttacagatgttcctcccatttttttcc

SEQ ID NO: 328927 - DNA, 572 bp, Homo sapiens
agagcgagaagctccagaaatatttcctgtttctcaagagcttatataataccaatatctgctcaatcaagacaatccttattaagtccactccagatactttcatcaatctttcatcttgattctggtagcgaaaagacctgaacagagtttctgtagtyttctgcaattgctcaaaaacaatacaatataacacaaagcactcacctttacagaagaataaatatgacttcacaggcataacacagcctaaatccattctaagaaagaaatattttctgaggaaatacatacatagtatagaaaaacagaacactaccaaaacagatttaacattttattattacacaagttctttagctcctacacatcatagttcctcatccccttctcgttctaattattgtccctggttttcctttgcaaaactgagtggtacttttcttggtctttctgtcttcttcacagggattctaaaagcttcaccatacattatacagaaaattacttacagattctttcctatcccaggacctactgagatgttacagatgttcctcccatttttttcc

SEQ ID NO: 328928 - DNA, 572 bp, Homo sapiens
agagcgagaagctccagaaatatttcctgtttctcaagagcttatataataccaatatctgctcaatcaagacaatccttattaagtccactccagatactttcatcaatctttcatcttgattctggtagcgaaaagacctgaacagagtttctgtagttttctgcaattgctcaaaaacaatacaatataacacaaagcactcacctttacagaagaataaatatgacttcacaggcataacacagcctaaatccattctaagaaagaaatattttctgaggaaatacatacatagtatagaaaaacagaacactaccaaaacagatttaacattttattattacacaagttctttagctcctacacatcatagttcctcatccccttctcgttctaattattrtccctggttttcctttgcaaaactgagtggtacttttcttggtctttctgtcttcttcacagggattctaaaagcttcaccatacattatacagaaaattacttacagattctttcctatcccaggacctactgagatgttacagatgttcctcccatttttttcc

SEQ ID NO: 328929 - DNA, 526 bp, Homo sapiens
ctctaaatacaaatatattgaaatcatagactaaaggtaaagatgtttaacccacaaatgaattaatataaaaaagaaaaggatgcctccaacttccataaatgaagagagatgtaagttagtggtaaatatatcaactaattatatggtgctcataaggatcaaataataacaataggaactagaagataatacccattagaagacaggaaaggtggaattaggcttatgtaagggagggtgttagaactaaagaccctttrctaaagtacttttaaaaggctgacattcacaaaaaatgtagacatttacaaaaaaggttggcttctcctttgtaaaggaatattataggacctactgacttaggaagtgtcaggaaaactctttataattcagaaattcatgtattttaaaaaaatgccttcagtgaaaaaatggcttcatgggtatggaatctcagtttatatttctgatgagtcaagagacctagatgaagaaaattggcttatgaattgtactggagata

SEQ ID NO: 328930 - DNA, 526 bp, Homo sapiens
ctctaaatacaaatatattgaaatcatagactaaaggtaaagatgtttaacccacaaatgaattaatataaaaaagaaaaggatgcctccaacttccataaatgaagagagatgtaagttagtggtaaatatatcaactaattatatggtgctcataaggatcaaataataacaataggaactagaagataatacccattagaagacaggaaaggtggaattaggcttatgtaagggagggtgttagaactaaagaccctttactaaagtacttttaaaaggctgacattcacaaaaaatgtagacatttacaaaaaaggttggcttctcctttgtaaaggaatattataggacctactgacttaggaagtgtcaggaaaactctttataattcagaaattcatgtattttaaaaaaatgccttcagtgaaaaaatggcttcatgggtatggaatctcartttatatttctgatgagtcaagagacctagatgaagaaaattggcttatgaattgtactggagata

SEQ ID NO: 328931 - DNA, 558 bp, Homo sapiens
ccacataacaaagtgacaggggagagagggaagccagtggattcttgctttccatatgaagctagcacctctggatcgctggactacgaytctcacaatggatttgaaacctaaattttctagagtagctgatattggtagaaaactaaaccaactggaggtgtttaatcaaagatactgcaaatcttatagagatcttactgtcctattcacagttggattttttctgctttaaaaaccacattttactggaaaacaaatggaatttattacgtaacatttttgatccatattcacagtaatgattcctaaaactttatttctgtttagctctaaattctaatctgaatataaacaggatctcaatttgtaaattccaaaacctggttattgatagaaaaaatgtgagaatcaccttcattaatttttttttaaataacaaagtaaatgataggcatttcaatacaagtgaagccctaaatttaaccaaaaaatgttttgttaacaggtttgactggaaggatgatatgctaaagaagaagaaatctgtccaggtgc

SEQ ID NO: 328932 - DNA, 558 bp, Homo sapiens
ccacataacaaagtgacaggggagagagggaagccagtggattcttgctttccatatgaagctagcacctctggatcgctggactacgattctcacaatggatttgaaacctaaattttctagagtagctgatattggtagaaaactaaaccaactggaggtgtttaatcaaagatactgcaaatcttatagagatcttactgtcctattcacagttggattttttctgctttaaaaaccacattttactggaaaacaaatggaatttattacgtaacatttttgatccatattcacagtaatgattcctaaaactttatttctgtttagctctaaattctaatctgaatataaacaggatctcaatttgtaaattccaaaacctggttattgatagaaaaaatgtgagaatcaccttcattaatttttttttaaataacaaagtaaatgataggcatttcaatacaagtgaagccctaaatttaaccaaaaaatgttttgttaacaggtttgaytggaaggatgatatgctaaagaagaagaaatctgtccaggtgc

SEQ ID NO: 328933 - DNA, 582 bp, Homo sapiens
gctttgatcactctgtgacccagtgagctacaggtttttcctgaaggcttgaatccaaacaaggccttgacaattcattcccaggcactgataaaagtatctaggttgttgcacaaacatcatcccagactcagccaaactccttaaaccttcatataaactccctaccctgaccccctcaccagggacataactaggtagagcaccccttttctctttcagtcctttgtgagcattgctacagcactcggtaagtttccctaacaaaagcttaggactgatccccctggcatttagtgcctcttgctttggaatctcaacgggctccatctgggcatggtttggggcaatcccgtgtggaaatccctgccgccacttttggagttactccagccacgtgttcagccagacgaaacagtttaattattaatttagattcgatgcaaaaataaaaaagcagaagaagcagcccatatagtggaatagttctamaggcttgaaacaattagagccatatacattaaacactgaaagttcagtctgtatctttcaatgggttccttataagactttgatgttaga

SEQ ID NO: 328934 - DNA, 539 bp, Homo sapiens
taaaagtaagtgctccacttctaagtttggttttagtctgtacctgtacactacaactctgatcatctaatggccctcttcacatctctctctctctctcctctcactggagtgcaaagagatgtctggatctcttaaacaccaaacagccatatctacaacgaactttycatcctctgctcttgctctcttgagaccgctcaccattattgtgtacaaatggggctcccttaagcaatggtaatcctcctcagggttccaaagcctccctcctttcgtttttccccctagtgtttctgtttcttgtactagattttggcttaaataagttggtatattcctgccttatttttgttgttccagttgttttctttcttttttttctactcttacgggaatagaaaaaaaaatatggactttctcctataactttggtttgaatgggacatctcataacattgactttttccccatcctaaagtttgtaaagaccgtgatttttcaactatggaggaataataagatggactcatactgaa

SEQ ID NO: 328935 - DNA, 539 bp, Homo sapiens
taaaagtaagtgctccacttctaagtttggttttagtctgtacctgtacactacaactctgatcatctaatggccctcttcacatctctctctctctctcctctcactggagtgcaaagagatgtctggatctcttaaacaccaaacagccatatctacaacgaactttccatcctctgctcttgctctcttgagaccrctcaccattattgtgtacaaatggggctcccttaagcaatggtaatcctcctcagggttccaaagcctccctcctttcgtttttccccctagtgtttctgtttcttgtactagattttggcttaaataagttggtatattcctgccttatttttgttgttccagttgttttctttcttttttttctactcttacgggaatagaaaaaaaaatatggactttctcctataactttggtttgaatgggacatctcataacattgactttttccccatcctaaagtttgtaaagaccgtgatttttcaactatggaggaataataagatggactcatactgaa

SEQ ID NO: 328936 - DNA, 622 bp, Homo sapiens
catttttgttctagcatatatcaaccttcctcctacagaattaaactcattaatcttacagcagaaaagacaaaagaaaaaattacagagtataaaaataaaatttatttcaaaaaatattgtctatatatatactcastgagtatttctattatatagcacttttccacaaattttcctttcagtttcttttcaaatttttcttatcttatgaatgaataaagttataaagcctcaaatatttcaaaaataaagtcattatatttctggtgttggaaatgagagtttatttagactcaacaggtatgaaaataaaatgaaatgaactaggctttaacttcaagttttagcattctactctaggctatattttaagagatgtggaaaatgttcttttaaaaatgaataacactaagccgatgcaatcaatggcaacaataacacataattggctgatcttcaaagtggaaaaacttttgattgcatatatgcaagatcagttgtagcaaatccatatgcctgcaaaccaagcaacaatttcaaaaaatgtgttgtctcatttcaaaatgaatgagatgtggctaagtgctacatcaatgtaaaagtttgtagcagaagtaag

SEQ ID NO: 328937 - DNA, 583 bp, Homo sapiens
aaccttcctcctacagaattaaactcattaatcttacagcagaaaagacaaaagaaaaaattacagagtataaaaataaaatttatttcaaaaaatattgtctatatatatactcactgagtatttctattatatagcacttttccacaaattttcctttcagtttcttttcaaatttttcttatcttatgaatgaataaagttataaagcctcaaatatttcaaaaataaagtcattatatttctggtgttggaaatgagagyttatttagactcaacaggtatgaaaataaaatgaaatgaactaggctttaacttcaagttttagcattctactctaggctatattttaagagatgtggaaaatgttcttttaaaaatgaataacactaagccgatgcaatcaatggcaacaataacacataattggctgatcttcaaagtggaaaaacttttgattgcatatatgcaagatcagttgtagcaaatccatatgcctgcaaaccaagcaacaatttcaaaaaatgtgttgtctcatttcaaaatgaatgagatgtggctaagtgctacatcaatgtaaaag

SEQ ID NO: 328938 - DNA, 595 bp, Homo sapiens
gctggatcaagggaacagaataggaatcgtagaaatacaatcactacgtatgtttaattgattatctttaaatgttccatgacaattaatggagaatgaaaatataagaataactggttacccatatgaataaaaatgaacttcaaacttcacctcacatatacacaaaaataatgcaaaatggatcatgcatctgaatataaaagctaaaattataaaacttctacaaaatatttatggctatgacatggccaaacatttctcagattacaatataaagcacgaaccataaaattaagaaaataaatgatgagttggagtttactatagttaaaattcatttggtttttgcaggacactatgaagaaaataaatagtacaacaattaatataataaaacattcttttaaatctaacagataatttgtatctagaatatgtaaagaacacataaagctcaatagtaagaaaagaacaaacagtagaaaaaatgataaatgattttataaagttattaacaaaatagcatgtacaaatatcttaaaagcrtacattctcaatattattaaccgtgagggaattacaaattagaacc

SEQ ID NO: 328939 - DNA, 516 bp, Homo sapiens
atttagttgttattttgcattatttttggggtctcaatctcatttagttttgcactgatatttgttgtttttttattctgttagctttgtgtttggttcatttttgtttctctagttccttgaggtgcaaagttaggttgttaatttgagaactttttctttttgaggtagacatttagcagtattagctttccatttaacactgcttatgatgtattccagaggttttggtatattgtgtctctattttcatttgtttccaaaaatatttttatttctgccttaattttgcctgcttacccaaaggtcaytcaagagcaagtttttgagtttccacgtacttgtgtagttttgagagttcctctctgttttgacttttaattttattccactgtggtcaaagaagatacttgatattatttcaaatttaaaaaaaaattgagacttgctttatgtccaagaatatggtctattttggagaatgttccatgcacaaattagaaaaatgactattct

SEQ ID NO: 328940 - DNA, 614 bp, Homo sapiens
acagagccatgtgacgtaggcacccagagtcatgctttgctgcaatgctcaactcatggaaggctttgaggctccacatgcgttcaagcagcgacttttcatggttaccaggtatctccatctaccaatccaaagatcttcaggtgtcagaaaccttcatagctagaatctcagaggtccacagtaggaatatgataccctggggttccttcactgactcctttctcrggtctggatctgggtcttgggcccagtcctagtatctggcaatgctgagcaggcagccctacttcttccctcttaaccacaatttcttccatcacctctcttttgaattttagtgctctctttcaaaagatctgttcaaagtgtgaagattgtcatgttttgtttcctccccacggaagaggtgcattctaactgcctctcaccagccatcttgaactcacatcccggtcttacctatttctaaataaaagcctgtatgtaggcaacagaataaacctgaaaaatatttaatctgtaagtgatttaaaatattttccaatattaaattattaaataattcaatattacaatattcgatattatattttaataatataaatagaaat

SEQ ID NO: 328941 - DNA, 599 bp, Homo sapiens
cttatttttcaacattttttatttcctaaccaggaccaaacaaaaaaatcgctcaatactcaacaaatggttaaataatccataattatcatatagttgaagattcaagtattaaaatttaattattccttaagacatcctactatgtgctccaactttcatgttaactttaaacggattattgcaaaatcaaaattaatcttagataatgtaattactaccctctcctggtataaaaataatcgtttattctgatgttccttagtaagtaaataatagagtagaatttttatttgattactttattaaattatttaactatatttcttaagcacttacatgccaacactaggggaaaaaaatgaacagtaaggcaggcattagccctcacaaatactacaaartttcagaattactattaaagaaaggacataattacagtaaatcattattggttaaaacagaaagttcgtgttgtcataggaatataataaaataaaatgtattatgatttgagatttaggcaggcctcattaaagaagataaaagattagaaggagtagctacaatgcagaggaaggaatgagggagggagatag

SEQ ID NO: 328942 - DNA, 593 bp, Homo sapiens
gcacctactccataaacagtaattaataaagcatatgaaattagtttaaggaaaaataaaatgtggaaacaaattttaaatgtgagatgatataccgaagctcaagttgcttacaaatccaaccagtcatgtaaatatctgaccttttatttataatctctgagttgggaataggaaacctcctggagcttttgggagtggccagctacatgattcatgtgacccataccctcatctctctaacatattgaatattctctcacttggggtgtatcttcaactgtatgtcctcttccctccattaacatactcaatcattttcttagagcatccctcagtcaaaaagtacccatagaggwattaaattactatgttctctctcccctttccctatcaccctccttcttaaggtctctgtaacacctcttttctgacaacacaggtacaaattaacgttttctcttcctctaggatacaggtcaatgaataccctcaattgtcaaaggttacacaagattgagtgaatgtgtgtatttgattaattcctatttttctttgttaaatctatatattactttgtttaaattttaagt

SEQ ID NO: 328943 - DNA, 593 bp, Homo sapiens
gcacctactccataaacagtaattaataaagcatatgaaattagtttaaggaaaaataaaatgtggaaacaaattttaaatgtgagatgatataccgaagctcaagttgcttacaaatccaaccagtcatgtaaatatctgaccttttatttataatctctgagttgggaataggaaacctcctggagcttttgggagtggccagctacatgattcatgtgacccataccctcatctctctaacatattgaatattctctcacttggggtgtatcttcaactgtatgtcctcttccctccattaacatactcaatcattttcttagagcatccctcagtcaaaaagtacccatagaggaattaaattactatgttctctctcccctttccctatcaccctccttcttaaggtctctgtaacacctcttttctgacaacacaggtacaaattaacgttttctcttcctctaggatacaggtcaatgaataycctcaattgtcaaaggttacacaagattgagtgaatgtgtgtatttgattaattcctatttttctttgttaaatctatatattactttgtttaaattttaagt

SEQ ID NO: 328944 - DNA, 536 bp, Homo sapiens
gtaataacagtacacaccaacaaaagtaatttaaaaaaataaatactaagtattgacaatgatgaatccctcatcattggtgatattgaacatttcttcatatacctgttggtcatttgtatgcgttcgttagagaaatgtctattcaagtccttagctcatttaaaaaatccgtttttgtttttttttgccactgaattgtaggagttttctgcacattttgggtagctccttagcagatakctgagatatatgatttgcaaatattttctcccattctgtaggttgcatttatactctgtggattgcttacttctctgtgcaggaacttttcagtttgacatgttcccatttgtctattttagcttttgtggcctgtgcttttgatttcatatccaggaaatcattgccaagaacaaggttatgatgttttccccttacattttcttccagaatttttatagttttagattttaaatttaaatcttcaagccattttgagttgattttgtatattatctaagattagggtccag

SEQ ID NO: 328945 - DNA, 568 bp, Homo sapiens
ctaggattggcctgggtctctggctccccagtggaatatatgtgtcctcaattttaggcaatactaacatatatttgcatataagatttcataacttgcatagtttatatatatatatgtggtagagaagttcaaaattgtatcttacaacatctctttataagcttgtatccctaaaaccttgccttctgctcaaactggattcatagaagggttataacttgaacatacccaaatgctcatgaaatagcaaggttcaaattactcatgtccttgctctcatattttatttctattacatacaattttatttctrtacatacataggccggatgtggtggctcaaacttataatcccagcactttgggaggctgagtaaggaggatcacttaagttgaggagttcaagaccaacttagacaacatggtgaaaccccatctctacaaaaaaatcaaaacattagctgagcatggtggcatgcgcctgtggtcccagctactctggaggctaaggtgggagtgtcacttgacctgagaccagggaggtctcagtggtcaaggctgcagt

SEQ ID NO: 328946 - DNA, 609 bp, Homo sapiens
tactgttttagtgtcagttttcaatatttttctaattgattaatttattatttaaggagtgcactacattttcaaacagatggatttttacagatattaatgtgtcttgcatccatttcacagccaatttcagccatagaaaatacacaaagcatcattaaaaagcaatcagtggaaatacacacacacaattatatatttatataaacgacatgtaaatatatattacacataaatatataatatgcaattcaacagggtaaataccatgtttatttactgaattggtattttccttataaatgttgactaaacgctcatactttgctgcatttaaagccagttctagttatttcttcacactgattgctggaaaattatgttagkcattatgagggcatgtgtattttatgtgtatggtactaggcatgatgtcaaatttgtaagtaagatttgaccatcagactctgcgttatttcaaattagagttgttaatgggattgtctttcagactcacaaatcataatgataaagacattttgagaagaaagaaaaggaggcaaaagacaaatatgataaaaataaaatgttaaggtggctgcaccccat

SEQ ID NO: 328947 - DNA, 603 bp, Homo sapiens
tatgacaggaagcaaattgctgtgtctgcctgtcagaagtttatttgctactttgagtatatggaacatgaatgtcaactgaatgtatttaaagaaagtgcaaattaaacatgaagatcttcaaaggggtcagtttggattttatttggtgtcctgatattaccaataatatttctctggagacacgcaagggaaaattatgtgatgcctgctatcatagccagatgaggatgtactgaaggatcaaatacacctaaatgacagtstcatggggtacataatatttttaggtgcgtacagtttccaaagttgtataaaaacaataaatattcaatggtattaatatattcagtgacttgatcagaactggccatgcagcacaagatattctgtgacagtttaagtagttggtcttggaatacttaccaagagcctttaacttactaacctagtaggaacactagatggacttcctatttcaggagaatgaccatggctggaatcagcctggaaggtttaacaaagatataagcaaatgaactagctgaataataattctcaaataaaaacatacattaccattaaccatactgggaaaaacat

SEQ ID NO: 328948 - DNA, 603 bp, Homo sapiens
tatgacaggaagcaaattgctgtgtctgcctgtcagaagtttatttgctactttgagtatatggaacatgaatgtcaactgaatgtatttaaagaaagtgcaaattaaacatgaagatcttcaaaggggtcagtttggattttatttggtgtcctgatattaccaataatatttctctggagacacgcaagggaaaattatgtgatgcctgctatcatagccagatgaggatgtactgaaggatcaaatacacctaaatgacagtgtcatggggtacataatayttttaggtgcgtacagtttccaaagttgtataaaaacaataaatattcaatggtattaatatattcagtgacttgatcagaactggccatgcagcacaagatattctgtgacagtttaagtagttggtcttggaatacttaccaagagcctttaacttactaacctagtaggaacactagatggacttcctatttcaggagaatgaccatggctggaatcagcctggaaggtttaacaaagatataagcaaatgaactagctgaataataattctcaaataaaaacatacattaccattaaccatactgggaaaaacat

SEQ ID NO: 328949 - DNA, 636 bp, Homo sapiens
taacttctgctggaaaggaagtaccatgctcttttttctgttgcatggtatgttaaatgytacttttatctccccaccatagatatatggtataacaaaagggttggtaaattcattgacagaacaaaatgaaaaccaaatttatgcagataatggcttaagagtaataacctatttcaggagatagatttgaatcacaatattgatgaaatagctatccattggacagaaaaaaaggtgacttcagtctttagaaaatcaaaaaagatacccaagtaaatgtttccttcaaaatatcttaaaaagttgatctcatagaattaaagagtagaatggtggttaccagaagctgaggttattaggggagaggaagagatgggagaatattggccaaaggatatatagttacagtcagatagaaggaataagttcaagaaatctatgttaaagcatggtgactgcagttaatgataatctatcgtagtcttgaagagtgcaaaaagggcagatgaggtgttttaccacaaaaatgataacacaaaaataccatgtgagataatgtatttgttaattagctagatttaaccattttacaatgcatatacacttcaatacatcatgttatagttatcaata

SEQ ID NO: 328950 - DNA, 636 bp, Homo sapiens
taacttctgctggaaaggaagtaccatgctcttttttctgttgcatggtatgttaaatgttacttttatctccccaccatagatatatggtataacaaaagggttggtaaattcattgacagaacaaaatgaaaaccaaatttatgcagataatggcttaagagtaataacmtatttcaggagatagatttgaatcacaatattgatgaaatagctatccattggacagaaaaaaaggtgacttcagtctttagaaaatcaaaaaagatacccaagtaaatgtttccttcaaaatatcttaaaaagttgatctcatagaattaaagagtagaatggtggttaccagaagctgaggttattaggggagaggaagagatgggagaatattggccaaaggatatatagttacagtcagatagaaggaataagttcaagaaatctatgttaaagcatggtgactgcagttaatgataatctatcgtagtcttgaagagtgcaaaaagggcagatgaggtgttttaccacaaaaatgataacacaaaaataccatgtgagataatgtatttgttaattagctagatttaaccattttacaatgcatatacacttcaatacatcatgttatagttatcaata

SEQ ID NO: 328951 - DNA, 443 bp, Homo sapiens
ataaaataacaactaaaatagtattaattcaaatctaaagtatataaaaagataaacatcatgtgtaggattggtttataactagaacattattatttaaacctaagaaagtcagtcaatacaagtcaccatactcatagcatataatgaaaattttaagtaaaattttaagatctgaatatatgcaaaaggagtagtttctgtaatataacattcattcataatttaaaaagtaaagcattgtagataaggaattaatctagcaaacaccatgttttctgttttttacctgccttgctatttattttatattatccttttgattaatttayaaactttatagtttgttttgtacacagtcatggtatcacagttaaaaagaaaacatggatgtgcttgattttatctggcatttgtttctaaaaaaaagtttataaaattat

SEQ ID NO: 328952 - DNA, 644 bp, Homo sapiens
tttgcaataatacattttaatccaaaaagagctgttatctaagaattttcccaatattctaagagcacaggtggaacatttcttcaggtttatttgcaaaagctatgtagcctcataaaaatccatattcagatgtaaaacaatttgcccgcgcagctgcctcaaactccaagcccactaatcagctaaggattgtatgagggcctcagaagaacactagctcttgttcaggtatgggcgcttttcaaaatgcaggagcagcgtaacattcagagtttctttaagacaattatattctgmtgctaattaaagtgtagtgttgttgaattttctctcattgctccacaggtataaggcatgtgccaagaatgaatgaacactaaaacataattgttctgaatttcatttttgtctttgaaacattttatagtacatatatagtttttactttttattcacgtatttattgaataatcattgaatatctattatgaactatgtatgataatagaataaacagacagttcctgtactcaaatagtttgtgattttggtaatgaggaaaaagcccatactcttcagaatcattagagagtggtaaatgatactgcataactatttattttgttcaattaatatttaat

SEQ ID NO: 328953 - DNA, 646 bp, Homo sapiens
acaggcatggattttcagagttcatccaacagacaaacaactgatctaaaataacatttattaagaacttactatttaccagaccctgtgctaggagctttgttatttaaataaacatgatgctcaaagagacctaaggaaacttctccatgacagcagagctggtaaacaacacaggacaggtgggatttgaaaccagagtgacagacttccaaagcctactcttgagcaaatgatattatgttctgattagaaaagactacatagaggccgggcatggtggctcacacctgtaatcccagcattttgggggggccraggcaggaggatcacctgaggtcaggagttcgagaccagcctggccaacatggtgaaatcctgtctccactaaaaatacaaaagattagccaggttgggtggcacatacttgtaatcccagctactcaggaggctgaggcatgagaatctcttgaacccaggaggtggaggttgcagtgagcagagatcacaccactgcaccccactctgggtgacagagcaagactccatctaaaaaaaaaaaaaagaaaaaaaaaagaaaaaagataaattctaattctaatttactaagttgtttcacttatactttctactacccaaatttaat

SEQ ID NO: 328954 - DNA, 646 bp, Homo sapiens
acaggcatggattttcagagttcatccaacagacaaacaactgatctaaaataacatttattaagaacttactatttaccagaccctgtgctaggagctttgttatttaaataaacatgatgctcaaagagacctaaggaaacttctccatgacagcagagctggtaaacaacacaggacaggtgggatttgaaaccagagtgacagacttccaaagcctactcttgagcaaatgatattatgttctgattagaaaagactacatagaggccgggcatggtggctcacacctgtaatcccagcattttgggggggccgaggcaggagratcacctgaggtcaggagttcgagaccagcctggccaacatggtgaaatcctgtctccactaaaaatacaaaagattagccaggttgggtggcacatacttgtaatcccagctactcaggaggctgaggcatgagaatctcttgaacccaggaggtggaggttgcagtgagcagagatcacaccactgcaccccactctgggtgacagagcaagactccatctaaaaaaaaaaaaaagaaaaaaaaaagaaaaaagataaattctaattctaatttactaagttgtttcacttatactttctactacccaaatttaat

SEQ ID NO: 328955 - DNA, 587 bp, Homo sapiens
aaggtctcccagatggtctaaggtaatgtgtggactcctgactgggaagattcatttgggtaaagggtttttgagatggtcttgtgtagctggtctttctttttggctctgatggcactgcactagctttttaaaggtacaggactgtctgatctatctttgtatttctggtatccaacacagcacctgatactcagcaggcatgctaaatgtttggggaataaatagaatagaatacatggggtcaaactcattaaaaaatgcaaacattttccagccctttcctacgtggactgtatgttcatttaaccatatgtttatatgttatatatgagaaatgttatatcagtatgtgtacatggatatctaaatatgtatacatacagatacacaattacccaaacttatatctcatagtagctaatatgatacattgttatgtacagtgttgaactaaattagctatatagtcatcccacagtatatgctggagattggktccaggacccctactgaggataccaaaatctataaatgctcaagtcccttacataaaatggtgtagtattttatctgggataggcata

SEQ ID NO: 328956 - DNA, 541 bp, Homo sapiens
aaaataataaactcaatttatggaaatccttaatcctaggtaatattgtcgaagttatacggcccgcaagggacattctattttacttcacattcacctggtgaacacaccatttgcttagaatctaattctacaaggcttgtgtaatttggagggagtaggctggtgagtatatgcttcccatgtccttgttgatgaacacagcatcagcactattcaagcatgacattggtatgcagaaccattacactcaaactggctagaaacttattaaagtcctatgcccagatctcagcgcagcaaccaaagagggagctggagagcttggaaggggttcaaaggagagccatgaagttgattaaaggrtttgaaaaataagagctgtgagggaaggttaaaagagctgtgattattgaggcttgaaaacaagtgaaggctgaagggtgaattaataatggaattctaataaataaaactcttacacggtagatggtgactggctattttctaaatgtgttcggaactgatggaaacaatttgt

SEQ ID NO: 328957 - DNA, 222 bp, Homo sapiens
agcgaggagcagggaagagggggaaatgggggaaaatctaagtgagtattarctgtccatggcagcactgtatggtggggcctcctgcagtgagagccagtgtggctccaggagcggggcggggaaggccaggagaagggggatcggtgagagctgaggccctcgcatcatcaagaaaactgaatttttgttagacttttaaaagtcaagattgctcgcaca

SEQ ID NO: 328958 - DNA, 222 bp, Homo sapiens
agcgaggagcagggaagagggggaaatgggggaaaatctaagtgagtattaactgtccatggcagcactgtatggtggggcctcstgcagtgagagccagtgtggctccaggagcggggcggggaaggccaggagaagggggatcggtgagagctgaggccctcgcatcatcaagaaaactgaatttttgttagacttttaaaagtcaagattgctcgcaca

SEQ ID NO: 328959 - DNA, 627 bp, Homo sapiens
gccagatgctggtgtcatgctcttggactctcctgcctccagaactgtgagccaaataaactttataaattgccaaggctgtggtactctgtcagagcagcagaaaacagaataagacaccatsttttcaccagcaaatgtcctaacccccccacgtttaccctttctggctcccgcttgttgggatgggtggggttccctattctgtcagtggccaccccctcttattttataggattttgctcttgttgctgcccccacttgcccatatggagctaatcttgtcagcatacccgcatgttctggtggccccccttgtctgtattccgtaaggtactagagggcaggaaatgtattttattcctgtttctttggctgtctagagcctggcagtaaacctagggtggtgtttggctccttggtaggggctcaatacatctttgtggaacgaatgaaagtgtgtcctacagtacatgctcagcaaatgattttgaatgagtgagtgccagttgccccccctcctcccattaaaatgccagtattcctggcatactactttgagttatcagaatggaggaagagaatttctgcttgattttgccaagatcctccagccttaagcacacg

SEQ ID NO: 328960 - DNA, 532 bp, Homo sapiens
ccctggaaagtgggcctcacaactatgccctgtgtcctttcctactgtggctcagctggtatctatgatgcaagacaaagtcctctttactctttgctcttctctccttaagcagaatgaagcagttgcttttgttgctatgagctgcactgctcaggattgggagaaggatggaacatgctatcccttagctgtggcagctggtgtcacatgtcaccctagttcctagttcacgggctctaagtcaaacttaacactagtagttgcctgggaattacattcctagtgccctagaccgcttttcatgyttccctagcaacctagagcacctcagcccatgatagcgaggcttgctgagaaactcaatttctgactgctgggatgggtgattcccctttcgctagggctggtccaaatgttccctccatgtgtggtaactctgtgaggccaacatggctttattgtccactatgaaaaggcagcaatgagttcaatgtaaagtcccccagttgctgtgctttccttccccaaa

SEQ ID NO: 328961 - DNA, 532 bp, Homo sapiens
ccctggaaagtgggcctcacaactatgccctgtgtcctttcctactgtggctcagctggtatctatgatgcaagacaaagtcctctttactctttgctcttctctccttaagcagaatgaagcagttgcttttgttgctatgagctgcactgctcaggattgggagaaggatggaacatgctatcccttagctgtggcagctggtgtcacatgtcaccctagttcctagttcacgggctctaagtcaaacttaacactagtagttgcctgggaattacattcctagtgccctagaccgcttttcatgcttccctagcaacctagagcacctcagcccatgatagygaggcttgctgagaaactcaatttctgactgctgggatgggtgattcccctttcgctagggctggtccaaatgttccctccatgtgtggtaactctgtgaggccaacatggctttattgtccactatgaaaaggcagcaatgagttcaatgtaaagtcccccagttgctgtgctttccttccccaaa

SEQ ID NO: 328962 - DNA, 538 bp, Homo sapiens
gcttctggcccagattgtatctagaaatgttatctgggagacaggccctggaaagtgggcctcacaactatgccctgtgtcctttcctactgtggctcagctggtatctatgatgcaagacaaagtcctctttactctttgctcttctctccttaagcagaatgaagcagttgcttttgttgctatgagctgcactgctcaggattgggagaaggatggaacatgctatcccttagctgtggcagctggtgtcacatgtcaccctagttcctagttcacgggctctaagtcaaacttaacactagtagttgcctgggaattacattcctagtgccctagaccgcttttcatgcttccctagcaacctagagcacctcagcccatgatagcgaggcttgctgagaaactcaatttctgaytgctgggatgggtgattcccctttcgctagggctggtccaaatgttccctccatgtgtggtaactctgtgaggccaacatggctttattgtccactatgaaaaggcagcaatgagttca

SEQ ID NO: 328963 - DNA, 572 bp, Homo sapiens
ttgaaccatccttgcgtcccatagataaattccacttagccatggagtatgatcctttcaacatattgttcaattcaacttgctaatgttttattgagaatttctgcacgtatattcaccagggatattggcctgtagctttcttttcttgtatctttgtctagctttagtatcagggtaatactggcctcataatatgagtttggaagtgttcagtttttgtcaatttttgaaagagtttaagaaatattrtttttaattcttctttaaatatttaacagaattcatcagtaaagccatctggtcccaaactttcctttgttgggagatttttgattgttgtttcaatattcttactagttatacttgtatttgaactttgtattacttcatgattcattcttggtaagtttaatgtttctaacaatttatccatttatctaacaggttcaaaaatgtagtgcactttcctttttgacatgggtcagctaaacagagacaaatcattagaattgtttgcccagagaaagacaatcctcattgcaaaagcctcagaatattgctttacagag

SEQ ID NO: 328964 - DNA, 544 bp, Homo sapiens
atttgtaacaacatggatgaaactggaagtcgttatttaaagagaaatatgctaggcacacaaagacaaacatcacatgttcccacttatttgtgggatctaacamtaaaaacaattgaattccaggaattaaatcatgaccctgtagttccataattgatgtttgtgtttggtttgttgtaaatataaattaactccattttgagatatatcaattttacagtttcttttaaaagccaataaaagtatccataaatatttattataaaaatgaattaatggacatagagaatagaagaatgttacaaaagctgggaagggtagtgtggaggggacatggagattgttaatggttacaaaataatggtttgaaagaataaataagacctagtatttgatagcacaatagggtgattatagtcaataataagttaactgtgcatttcaaaatgttataaggtataattggactgtttttacctcacaggataaatgatttatgtaaaggatcccccatttccatgatgtaattattttatattgc

SEQ ID NO: 328965 - DNA, 544 bp, Homo sapiens
atttgtaacaacatggatgaaactggaagtcgttatttaaagagaaatatgctaggcacacaaagacaaacatcacatgttcccacttatttgtgggatctaacactaaaaacaattgaattccaggaattaaatcrtgaccctgtagttccataattgatgtttgtgtttggtttgttgtaaatataaattaactccattttgagatatatcaattttacagtttcttttaaaagccaataaaagtatccataaatatttattataaaaatgaattaatggacatagagaatagaagaatgttacaaaagctgggaagggtagtgtggaggggacatggagattgttaatggttacaaaataatggtttgaaagaataaataagacctagtatttgatagcacaatagggtgattatagtcaataataagttaactgtgcatttcaaaatgttataaggtataattggactgtttttacctcacaggataaatgatttatgtaaaggatcccccatttccatgatgtaattattttatattgc

SEQ ID NO: 328966 - DNA, 544 bp, Homo sapiens
atttgtaacaacatggatgaaactggaagtcgttatttaaagagaaatatgctaggcacacaaagacaaacatcacatgttcccacttatttgtgggatctaacactaaaaacaattgaattccaggaattaaatcatgaccctgtagttccataattgatgtttgtgtttggtttgttgtaaatataaattaactccattttgagatatatcaattttacagtttcttttaaaagccaataaaagtatccataaatatttattataaaaatgaattaatggacatagagaatagaagaatgttacaaaagctgggaagggtagtgtggaggggacatggagattgttaatggttacaaaataatggtttgaaagaataaataagacctagtatttgatagcacaatagggtgattatagtcaataataagttaactgtgcatttcaaaatgttataaggtataattggactgtttttacctcayaggataaatgatttatgtaaaggatcccccatttccatgatgtaattattttatattgc

SEQ ID NO: 328967 - DNA, 580 bp, Homo sapiens
tggcttgccagttattctattacagtaccatttattgagtaggaaattctttctccattgcttgtttttgtcaggtytgtcaaagatcagataactgtaggtgtatggtcttatttttgggttttctgctctgttccattggtctgtgtacctgttttttgcaccagtaccatgctattttggttactgtagccctgcggtatagtttaaggtcaggtagcataatgcctccagctttgttattcttgcttataattgatttgaatgttttggttctttttgggttcatgtgaattttacaatagtttttttttctatcctgtgaagaatgtcaattgtggtttaacagaaatagcattaaatcaataattgctttgggcagtctggccactttaatgatattgatttttcttatccatgagcatggaatgtgttttcatttgtttgtgtcatctctgatttctctgggcaaaatggtttgtggttctttttgtagacatctttcacctccccacttagctgtgttcctagggtattttattctttttgtggcaattgtgaaggagtgtgttcctgattt

SEQ ID NO: 328968 - DNA, 580 bp, Homo sapiens
tggcttgccagttattctattacagtaccatttattgagtaggaaattctttctccattgcttgtttttgtcaggtttgtcaaagatcagataactgtaggtgtatggtcttatttttgggttttctgctctgttccattggtctgtgtrcctgttttttgcaccagtaccatgctattttggttactgtagccctgcggtatagtttaaggtcaggtagcataatgcctccagctttgttattcttgcttataattgatttgaatgttttggttctttttgggttcatgtgaattttacaatagtttttttttctatcctgtgaagaatgtcaattgtggtttaacagaaatagcattaaatcaataattgctttgggcagtctggccactttaatgatattgatttttcttatccatgagcatggaatgtgttttcatttgtttgtgtcatctctgatttctctgggcaaaatggtttgtggttctttttgtagacatctttcacctccccacttagctgtgttcctagggtattttattctttttgtggcaattgtgaaggagtgtgttcctgattt

SEQ ID NO: 328969 - DNA, 546 bp, Homo sapiens
gtttaaattctgctttgtcaaaaactaggcttgcaatccctccttttttcctgttttatatttgcttggtagatttttattcattcctttattttgagcctatgtgtgtcattgcaagtgagatrggtcccttgaagttagaatacttaatgactcttagttctctatccagcttgccactctgtttctttctgtgtcttctaattggggcattttgcccacttacatttaaggttagtattgatatgtgtggatttgatcctgtcactatgatattagctggttattctgcagacttgttcatgtggttgctctatagtgtcacctgtttatgtacttcagtgtgttttcgtagtggctggtaacaatagttcctttccatatttagtgtttcctttgggagctcttgtaaggcaggtctgatggtaacaaattccctcagcatttgcttatttgaagaggattttatttattttttgcttatgaagccattttggccacctataaaattctaggttggaattgcttttatttaagaatgttgaa

SEQ ID NO: 328970 - DNA, 492 bp, Homo sapiens
tatataagcaacataggtacttattctcctattacactgcttcagatcattctcttttctgcatgatacaaatctttagcaggtccatgtgcttcatttcatggcattaatactggcttctactatcttaaaagttttcatgtgtcagcttcactggcttagaattttggcttacaatttttgtcttatattgggtaacttactcccagcctatttatctttccattcctaacaaagcagccctagtaattctctccaaagcstcacagaatgaataaaataatgtacgcagtacttccttgcaaaagattaactgcgttctccatctcccatctattaatccaaggaagaggccaaataaattaaagagagttggtgcatagaggttggtgacataattagagaacagttattcaaaggcagccattaccagtactgtgctggtaaaccagttctgtgggggcagggggaaagagccctgagttgtagcat

SEQ ID NO: 328971 - DNA, 567 bp, Homo sapiens
ccatgcatgctatatttgttaatgtagacacaaatgttcgatggtttaataaactttttaaatgagaatagtcttcctataaaacattgtcttgaaaacaggaatgtaaaatggatattctcttttgttggcatgcaagtctccctggaaattaggcataccttctctctgacaatctgagtgtggacttggagsctcatatggtgcttacccactggcttctcttttttatttatataaatgatatgtcaccaattacttgctttcaaactatatagaaagtgtttgatattttagtgctagaggtcagtgtgaattcaataataatgaagaacaagactggaaaattttctaaataaatatgtgagtcaaataataacagcattttacaaatgtgtggaagaaaacaaagatgctttataacagaataaaggggggtattatttaaaatgaaagggctccttgtacaggtagcatatacactgaggcaggaataacaagaagaagcagttatacaagttccttggtaaaaaaaaaaaaaaatcttgaaggaagattgtagaacaa

SEQ ID NO: 328972 - DNA, 567 bp, Homo sapiens
ccatgcatgctatatttgttaatgtagacacaaatgttcgatggtttaataaactttttaaatgagaatagtcttcctataaaacattgtcttgaaaacaggaatgtaaaatggatattctcttttgttggcatgcaagtctccctggaaattaggcataccttctctctgacaatctgagtgtggacttggaggctcatatggtgcttacccactggcttctcttttttatttatataaatgatatgtcaccaattacttgctttcaaactatatagaaagtgtttgatattttagtgctagaggtcagtgtgaattcaataataatgaagaacaagactggaaaattttytaaataaatatgtgagtcaaataataacagcattttacaaatgtgtggaagaaaacaaagatgctttataacagaataaaggggggtattatttaaaatgaaagggctccttgtacaggtagcatatacactgaggcaggaataacaagaagaagcagttatacaagttccttggtaaaaaaaaaaaaaaatcttgaaggaagattgtagaacaa

SEQ ID NO: 328973 - DNA, 541 bp, Homo sapiens
tgaggtggtctccaatggagatgagaaacttatcaggaactggagcaaaggtcacacttgttatattttagcaaagagattggtggcattttgccccttccctagagatctttggaactttaaacttgagggaaaagatttatggtatttggcakaagaaatttctaagtagcaaagcattcaagatgtgacctggctttttctgaaagtgtacagtcatatgtgctcacaaggagatgatctgaaattggaacttatgtttaaaagggaagaagagcctaaaagtttgaaaaatttgcagcctgaccatgtggtggaaaagaaaaaccaattttctggggagaaattcaagctgtcagctgcagaaatttgcataagtaaagagaagccaaatgttaatgttactgagggaaggtatctgagttaccagtggcgaatccttatgggtctacagcagcctcaattcttgcgtcctcaaaagaaataattctactgaggggcataaagcagaaaaagagactgagacaagtttcagagcagg

SEQ ID NO: 328974 - DNA, 627 bp, Homo sapiens
ctcctctctctctcctgctgccatatgaagaaggtccttgctccccctttgcattctaccatgattacaagttttatgaggcctccccagrcatgtggaactgtgagtaaattatttttttccttataaattagccagtctctgatagttctttatagcagtgtggaaaatggactaatacaggaccatgacttactcacatctgtactctccagctcttcacacataaatatacaatagctgcccaacaaatatttgtttgatgttgaatgaagaaataaatgagtgaatggtaaagcactcatggtgattatttgaaatcacaagcttgacacacaaattttgtatactatgcagtaaggcaagagacttagtaatagaagatccatccagaattgaacaatgtattttaaggctatgtgagaaaaaaatcaaaatcgctgatatggtttgggtggggacacagctcctgtaaccccatgtgtcattggtgaaaggtaattaaataatggatgtgggttttctcatgctgttctcatgacagtcagtaagtctcacaagatctgatggtttcataaacagcagttccactgcacgtgctctcttgcctgctgccatgtaagatgt

SEQ ID NO: 328975 - DNA, 627 bp, Homo sapiens
ctcctctctctctcctgctgccatatgaagaaggtccttgctccccctttgcattctaccatgattacaagttttatgaggcctccccagacatgtggaactgtgagtaaattatttttttccttataaattagccagtctctgatagttctttatagcagtgtggaaaatggactaatacaggaccatgacttactcacatctgtactctccagctcttcacacataaatatacaatagctgcccaacaaatatttgtttgatgttgaatgaagaaataaatgagtgaatggtaaagcactcatggtgattatttgaaatcacaagcttgacacacaaattttgtatactatgcagtaaggcaagagacttagtaatagaagatccatccagaattgaacaatgtattttaaggctatgtgagaaaaaaatcaaaatcgctgatatggtttgggtggggacacagctcctgtaaccccatgtgtcattggtgaaaggtaattaaataatggatgtgggttttctcatgctgttctcatgacagtcartaagtctcacaagatctgatggtttcataaacagcagttccactgcacgtgctctcttgcctgctgccatgtaagatgt

SEQ ID NO: 328976 - DNA, 638 bp, Homo sapiens
tatgcaaaaaatttcctttagaattttgattggaattatgataaatcagtagatcactttgggccagacgcccagtggctcacacctgtagtcaaagcactttgggaggctaagacgggaagatcacaaggtcaggagtttgacaccagcctgaccaacattgtgaaacccagtctccactaaaaatgcaaaaaaaattagccgggcctggtggtgcatgcctgtaatcccagctactctggaggctgaggcaggagaatcgcttgaacccagaaggcggaggatgcagtgagtcgagatcrcgccactgcactccagcctgggcaacagagtgagactccatctcaaaaaaaaaagaaaaaatcactttgaagaaaattagcatgttaacaattttgagtctttcaaaaccgtaaacaaggtgtgtgtcttcactaactttggcattatttaatttatctcagcaatgttttccacttttcagtgtacaaatatttcactccttttgtcagattcattactaaatattttttgatgcaaaatttcagtaaccaatttttcatgttaatatatagacaaatgacttctgtatttgaccttttattctttaaaattgttgaaattacttattagttcta

SEQ ID NO: 328977 - DNA, 638 bp, Homo sapiens
tatgcaaaaaatttcctttagaattttgattggaattatgataaatcagtagatcactttgggccagacgcccagtggctcacacctgtagtcaaagcactttgggaggctaagacgggaagatcacaaggtcaggagtttgacaccagcctgaccaacattgtgaaacccagtctccactaaaaatgcaaaaaaaattagccgggcctggtggtgcatgcctgtaatcccagctactctggaggctgaggcaggagaatcgcttgaacccagaaggcggaggatgcagtgagtcgagatcgcgccactgcactccagcctgggcaacagagtgagactccatctcaaaaaaaaaagaaaaaatcactttgaagaaaattagcatgttaacaattttgagtctttcaaaaccgtaaacaaggtgtgtrtcttcactaactttggcattatttaatttatctcagcaatgttttccacttttcagtgtacaaatatttcactccttttgtcagattcattactaaatattttttgatgcaaaatttcagtaaccaatttttcatgttaatatatagacaaatgacttctgtatttgaccttttattctttaaaattgttgaaattacttattagttcta

SEQ ID NO: 328978 - DNA, 577 bp, Homo sapiens
ttctttctaatcatagtacttcttatttattttcattgtcaaattgctatggctagaacccctagaaaaatattgaatataattggtgwaagcagatatacgtgacttctttctgatcatagggataagtattaagtatgaagctaactgagaagcttttgtagatggactttattaggttaagttctttttttatttctaattgaataagtgcttttcttttttatcataaaatgattttggatttttgtcaaatgctttttctgtgtctattaggatgatcatgtgttttttgccttttgctctgttaatgtggtcgatatggtgtacattaagtgatgttactcacatttcatttctgggataaatcccactcagtcatgatgtataatactttttatatgtggttgcatttggttttctggttgctttattgagaattttagctttttcattcattaagaatattgatttgtattttttttcttttgaagtcactatctgattttactttcagggtaatcatagcttattagaatgagttgaaatttttttcatcctcttttattttctggaa

SEQ ID NO: 328979 - DNA, 534 bp, Homo sapiens
caaacataggtttggtcttttcacatagtgtcatatttcttggaggctttgttcattccttttcattcatttttctctaatcttgtcttcatgctttatttcattaagttgatcttcaatgtctgatatcctttcttctgcttgatcaatttggccattgatacttatgtatgcttcacgaagttcttgtgctatgtttttcagctccatygggtcatttatgttcttctgtcaactggttattctagttagcaattcctctcactttttttcaagttcttaacttccttgcattgggttagaacatgctcctttagctcaaaggagtttgttattatccactttctgaagcctacttctgtcaatttgtcaaactcattctccgtccagttttgttctcttgctggttaggagttgtgatcctttggaggagaagaggtatgttgggttttggaattttcagcctttttccgcttttttttttttttttccatcttcgttgatttagctatcttttgtctttgatgttggtga

SEQ ID NO: 328980 - DNA, 556 bp, Homo sapiens
gttcaatcacattatttcacccaatcctggaaacaggcaatcccactcaaataagccttcattatatcacggtgcagagagttttcrtcatcagcctaatatgttaaggactttctgtagacaaatatatttcttaggatatgtatcattttctttgtttaaaggacaagtatttttatttttttatttgttttactattttttctgttcaacaaggctgactagggacatctgatgccagttcacagaaagagtaacaaagataccagtgaacagacaacatctgaacagaaaattgaggaaagagagtaaagaccgtttggattgcccatggaaagaagctggaacgcagaaacaaaaatcagcaagagtctgaaagaaatcaactctaaggaactcagagccctatggaaagaataggtaggagtgcttctctgctcctctcacccttcagacaatctgccaaccactaaactgttggagaacccctcttttcttgatgacccagggcaacattattggttacaatctgagaacttccaggggacagagaacc

SEQ ID NO: 328981 - DNA, 472 bp, Homo sapiens
atcaaatcaagaaccaattaattttttttatcccatttgtgtattctttcaatccagaagactgaaggtggtatgcacaatgaaaatgttgaaaatattggctggatgttttaaatggactgaattatttgacatgtgaaatgggttgcttggttaccgtgaagctcagaagaaactccacaaggaataggacaagagttaaaatggccawggttaaagatgcaattcataaattctaatttgaagctaacaggtattggtcacaaataaaaagacaagtccaaattacaatcaatagaaggcagctgcaattttaaaagcatgctatctaatttaatgtcaaaagaagtgaaaccatcagtgctagactgccaatacccggacttcctgctgtgagacaggtggagaaggcagaaattatctgtagagttatttgcctgaccataacccaaacattctgtcctgaagcaga

SEQ ID NO: 328982 - DNA, 453 bp, Homo sapiens
agagtctgaaagaaatcaactctaaggaactcagagccctatggaaagaataggtaggagtgcttctctgctcctytcacccttcagacaatctgccaaccactaaactgttggagaacccctcttttcttgatgacccagggcaacattattggttacaatctgagaacttccaggggacagagaaccaggtgaccagcttgtgcaggtgtgccttttctcccttcagacctgaactgaaacagcaggaactatattgattgtgcacccatggtgacactcagctctccctggggattctctgtccttgagccaccacaacatcatatcccctgtaaacataccccactacctgctctgactttggcaagaacaggggactggtgggtcccctgggaactgtgggacttgtggagatctaaccctcagtgtggggtgccattaagggaggga

SEQ ID NO: 328983 - DNA, 500 bp, Homo sapiens
aagcaatgtatagacacttaaaaatctccctgcttatttattaatattaaaactgactttggaaacttagacaacatagctctcaggcatgtraaacaccttccttaagtgaagaatgtgttacattgctggaggtataagccctatgggaaataaatcaagctaatcatagctatctgttttagctgttctcgaccttggctgcatactggaaagcagttcggaagctttaaaaagtattgatgactagaatctctcctccagagattctaaagtaatttgtcggatgtgcattctgagcattggaattttttaaaaatgtcttacgtgattctaacgtgcagctaaagttgagaaactccagtctataacaatatagtctttaacgttctctgaaatatctattgtttttgtaactggaattgtttctccataaacaaaactctagtatagaggaaatattatttgctgctatatattttctgtgataaacacaatga

SEQ ID NO: 328984 - DNA, 573 bp, Homo sapiens
ctatactgagggatattccagagccttcacacttgtgttttctgcttttgrtgtagatattctatagaagcctactcttttttattcctactgaaatttttaaaatatatcttttatctgacagaagaaagttctttaatggaaatttacatggtgttttcatatctttttcctttaatgtgatattcatactctaaatttatattaaggcagtattcacttaatgggagtagacccataagatgctagatgtttagattttactatcctattttttagaaaatttacctgccagggcattctcccgtttaggaatatactaaatgtttatcaagaatacctggaaattccatagccatattggcaaaatgctattggagttttgcatttttaaattatattataacataaataatatcctggccagccgtgcataatttgggtgtaggaaaagtacccaaatttattaaatagcccctaggcagcctggcatattggaagaaatgtaagatttgcagttagatagacttacatattggctccaccccttactagatgagtactagaaaataa

SEQ ID NO: 328985 - DNA, 573 bp, Homo sapiens
ctatactgagggatattccagagccttcacacttgtgttttctgcttttgatgtagatattctatagaagcctactcttttttattcctactgaaatttttaaaatatatcttttatctgacagaagaaagttctttaatggaaatttacatggtgttttcatatctttttcctttaatgtgatattcatactctaaatttatattaaggcagtattcacttaatgggagtagacccataagatgctagatgtttagattttactatcctattttttagaaaatttacctgccagggcattctcccgtttaggaatatactaaatgtttatcaagaatacctggaaattccatagccatattggcaaaatgctattggagttttgcatttttaaattatattataacataaataatatcctggccagccgtgcataatttgggtgtaggaaaagtrcccaaatttattaaatagcccctaggcagcctggcatattggaagaaatgtaagatttgcagttagatagacttacatattggctccaccccttactagatgagtactagaaaataa

SEQ ID NO: 328986 - DNA, 596 bp, Homo sapiens
ctaccaaacatttaaaaaagaactaatactaatccaacacaaactattcaaaaaaatagagagggaggccatgctttcaaattaattctatgaggccagtrttaccctgatagcaaaaacaaagacacatccaaaatagaaaactacagaccaatatctctgatgcatattgatgcaaaaatcctcaacaaaacactggaaagccaaataaaacaatgcattagaaagatttttcatcttgaccaagtgagatttatcccagggatgcaagtatggttcagcatatgcaaattaatcaatcaatatgatacatcatatcaatggaaagaataataaaaaccatataatcatttcaattgatactgaaaaaacatttgataaaattcaacatcgcttcatgatataaaccctcataaaactagggatagaaagagcatacctcaacatgataaaagtcatatacaacagacacactagtgtcatactcaatggggaaaaactcaaagcctttcctccaagatctggaaaatggcaaggattcccattgtcatcaccactattcaacgtagtactgggattcctagctagagcaagca

SEQ ID NO: 328987 - DNA, 580 bp, Homo sapiens
tagtatttctacacacgaacaatgttgaagctgagaacaaatcaagaatgcaatcccaattacatttggcagagaaaatggaataccttgcaatacatttacctcatcttggagagatgaaatatctctacaaggagaaatamaaaggactgataaaagaaatcatgagtgtcacaaaaaaatgggaaaatattctatgttcattgatttcaagaatgcataattcttaaaaatggtcatatttatacctttacattattgaagagaaaataaaaatactttaaaaaatgatatttcccaaagcaatctacagattcaacaaaattcctcttaaataccaatgtcattttcacagaattacttttaagaagtcaattataaggttcatatggaacccaagaagagactgaatagccaaatcaatcctaaacaaaatgaacaaagcctgagacatcatattacccatcttcaagctatactacaaggctatagtaaccaaagccacatgctactggtagaaaaatacacacatagttcagtaaaacagaatagagaatgtagaaataaatccacataccta

SEQ ID NO: 328988 - DNA, 580 bp, Homo sapiens
tagtatttctacacacgaacaatgttgaagctgagaacaaatcaagaatgcaatcccaattacatttggcagagaaaatggaataccttgcaatacatttacctcatcttggagagatgaaatatctctacaaggagaaatacaaaggactgataaaagaaatcatgagtgtcacaaaaaaatgggaaaatattctatgttcattgatttcaagaatgcataattcttaaaaatggtcatatttatacctttacattattgaagagaaaataaaaatamtttaaaaaatgatatttcccaaagcaatctacagattcaacaaaattcctcttaaataccaatgtcattttcacagaattacttttaagaagtcaattataaggttcatatggaacccaagaagagactgaatagccaaatcaatcctaaacaaaatgaacaaagcctgagacatcatattacccatcttcaagctatactacaaggctatagtaaccaaagccacatgctactggtagaaaaatacacacatagttcagtaaaacagaatagagaatgtagaaataaatccacataccta

SEQ ID NO: 328989 - DNA, 409 bp, Homo sapiens
cagttccattaatctccgttccattccattctactccaactgattccattccattctattcctttccattccatttcattccattccattccatttcattccattccattccattcgcttccattccgttcgtgtccattccactccagtccattccattcgtgtccattccattccagtccattccayttgtgtccactgcattccattccactccattccatattattccattacactccattccattctattactttcatttccattcaattccattccatttgattccattccactcggtttcattccatttgagtccattccattccattccattccattccattccattccattccattccattcagttccattccattctgttccattccattccattcagt

SEQ ID NO: 328990 - DNA, 409 bp, Homo sapiens
cagttccattaatctccgttccattccattctactccaactgattccattccattctattcctttccattccatttcattccattccattccatttcattccattccattccattcgcttccattccgttcgtgtccattccactccagtccattccattcgtgtccattccattccagtccattccatttgtgtccactgcattccattccactccattccatattattccattacactccattccattctattactttcatttccattcarttccattccatttgattccattccactcggtttcattccatttgagtccattccattccattccattccattccattccattccattccattccattcagttccattccattctgttccattccattccattcagt

SEQ ID NO: 328991 - DNA, 409 bp, Homo sapiens
cagttccattaatctccgttccattccattctactccaactgattccattccattctattcctttccattccatttcattccattccattccatttcattccattccattccattcgcttccattccgttcgtgtccattccactccagtccattccattcgtgtccattccattccagtccattccatttgtgtccactgcattccattccactccattccatattattccattacactccattccattctattactttcatttccattcaattccattccatttgattccattccactcggtttcaytccatttgagtccattccattccattccattccattccattccattccattccattccattcagttccattccattctgttccattccattccattcagt

SEQ ID NO: 328992 - DNA, 385 bp, Homo sapiens
gaaaatttctttcgaatgagcagttttgaaacattgtttttgtagtatctgcaaatggatatttggagagctctgagaccttctgcggaaaaggaaatatcttcacataaaaactayacacaaccattctgagaaacttctttgtgatgtgtgcaatcatctcacagatttgaatttttctttttattgaggagatttgaaacacacttttgtagaatctgcaagtggttatttggagtgctttgaggcctactgtggaaaagcataaacctcacataaaaattacatggacgcattctgagtaacttctttgtgatgaatgcattcaccacacagagttgaaactttattttgattgactagttttgaaatactgtttttgttg

SEQ ID NO: 328993 - DNA, 385 bp, Homo sapiens
gaaaatttctttcgaatgagcagttttgaaacattgtttttgtagtatctgcaaatggatatttggagagctctgagaccttctgcggaaaaggaaatatcttcacataaaaactatacacaaccattctgagaaacttctttgtgatgtgtgcaatcatctcacagatttgaatttttctttttattgaggagatttgaaacacacttttgtagaatctgcaagtggttatttggagtgctttgaggcctactgtggaaaagcataawcctcacataaaaattacatggacgcattctgagtaacttctttgtgatgaatgcattcaccacacagagttgaaactttattttgattgactagttttgaaatactgtttttgttg

SEQ ID NO: 328994 - DNA, 352 bp, Homo sapiens
tgcttttgagtccattctatatgattccattccattcaagtccattacatttggttcaattccattccattccattcccttccattycattccatttgatatcaatccattcgattccattccattcgagcacattccattcgagtccattccattcgatgccattccatttgattctattccattagtctcctttcaattccattaatctccattccattccattctactccaactgattccattccattctattcctttccattccatttaattccattccattccatttcattccattccattccattcgcttccattccgttcgtgtccattccactccagtccattc

SEQ ID NO: 328995 - DNA, 352 bp, Homo sapiens
tgcttttgagtccattctatatgattccattccattcaagtccattacatttggttcaattccattccattccattcccttccatttcattccakttgatatcaatccattcgattccattccattcgagcacattccattcgagtccattccattcgatgccattccatttgattctattccattagtctcctttcaattccattaatctccattccattccattctactccaactgattccattccattctattcctttccattccatttaattccattccattccatttcattccattccattccattcgcttccattccgttcgtgtccattccactccagtccattc

SEQ ID NO: 328996 - DNA, 352 bp, Homo sapiens
tgcttttgagtccattctatatgattccattccattcaagtccattacatttggttcaattccattccattccattcccttccatttcattccatttgatatcaatccattcgattccattccattcgagcacattccattcgagtccattccattcgatgccattccatttgattctattccattagtctccwttcaattccattaatctccattccattccattctactccaactgattccattccattctattcctttccattccatttaattccattccattccatttcattccattccattccattcgcttccattccgttcgtgtccattccactccagtccattc

SEQ ID NO: 328997 - DNA, 352 bp, Homo sapiens
tgcttttgagtccattctatatgattccattccattcaagtccattacatttggttcaattccattccattccattcccttccatttcattccatttgatatcaatccattcgattccattccattcgagcacattccattcgagtccattccattcgatgccattccatttgattctattccattagtctcctttcaattccattaatctccattccattccattctactccaactgattccattccattctattcctttccattccatttmattccattccattccatttcattccattccattccattcgcttccattccgttcgtgtccattccactccagtccattc

SEQ ID NO: 328998 - DNA, 578 bp, Homo sapiens
ccttattttcaagagtcatcaatcttttgatttatacatcttcaggttatcccaagctctacttgttctttgtttttctctcttttttttcagacaccctggaaagccttccttcttttccctgtttctagactcagtgtccctcagggtctgttttaggccttctgctctcagaccccatgtattcttctcaaggagtatcaccaacttcaaagtccatgtcaccagctcaaccctgggcctcaagttccaatcatgtctacttgggcttctcattctcacaggggcacatcaaactacattcttcaaaactgaaaatcccattcccctcaatgctctgccttaatcaaataaacttctcttmgttatcaactttagtaaaagataccattctatctagacctgaaacttcttcttacctcccacatctatatccttaaccaattcaacttcatgacttaaagagaaaatagaaaggagtggaaacagataataatgtgctcattcttttcaggtggaagctgcaaccatgccacacaataaagcattgaattattctttttctattattaaaatag

SEQ ID NO: 328999 - DNA, 581 bp, Homo sapiens
gcgctgccattgactctcctcagtcaaactatgccattgtgatagccaaggttggtcactgccactttaaattagtggtttatcttgagtcctggagaatggaagtcgtttcagggggaaaggatgatgaatcacacggcagggaacaaatgtaactgtgattaatgggacattacacaacaacaaaaaattgagccaactgtgtgcagagataactggaaccacgaagaccaacttattgtctaaggtaatgtaattaacttccagcccctccatagcttggatggctgattctagcgtgcctggttccattgtactaataataatgacaaggtcgtggcttcttattttaaatactaccctattaaggagcatttttctccaatgcatgrcaatgataaaatgtcaaagactaagatttggcaatttgaagtagcacaattgtaagcaactgctcagattcattcaactttctctttttcccaaggaagacaatggaagaaaagaccaaacgttagacttatgatatatgagcttcttcaaatgtgtaagaagggctcaatgattatcatttttcggtg

SEQ ID NO: 329000 - DNA, 545 bp, Homo sapiens
atgtaattttacttctgctcctctatggtctcatgatctcatggtacttagaaaaatcacacaaaaactgtattaggtagcttggagtaaagatgacttgattgaaacagaggggaaaagggacatttccacgtacttagaaaaatcacacaaaaactgtattaggtagcttggagtaaagatgacttgattgaaacagagggaaaaagggacatttccacaggttgtaattaatggcccaggrcagaggacctatataagctattagctaatgcattttgatttttttttttcatttttctcttttccctctttgtgggaggttgctgtcttcctttgagggaagtaaatatgacacctcagaaatgtatttaaaataaaagactctcaagtgacaaaaaacatattgactttattagaggtgttcaaatttcttcaagaaaaggcacattacatattggtaatgcaaacagttctttcacatggaatctgtgtccttcatatttttgaaaaacattttggcaaaggcttattggctgaggctc

SEQ ID NO: 329001 - DNA, 545 bp, Homo sapiens
atgtaattttacttctgctcctctatggtctcatgatctcatggtacttagaaaaatcacacaaaaactgtattaggtagcttggagtaaagatgacttgattgaaacagaggggaaaagggacatttccacgtacttagaaaaatcacacaaaaactgtattaggtagcttggagtaaagatgacttgattgaaacagagggaaaaagggacatttccacaggttgtaattaatggcccagggcagaggacctatataagctattagctaatgcattttgatttttttttttcatttttctcttttccctctttgtgggaggttgctrtcttcctttgagggaagtaaatatgacacctcagaaatgtatttaaaataaaagactctcaagtgacaaaaaacatattgactttattagaggtgttcaaatttcttcaagaaaaggcacattacatattggtaatgcaaacagttctttcacatggaatctgtgtccttcatatttttgaaaaacattttggcaaaggcttattggctgaggctc

SEQ ID NO: 329002 - DNA, 545 bp, Homo sapiens
atgtaattttacttctgctcctctatggtctcatgatctcatggtacttagaaaaatcacacaaaaactgtattaggtagcttggagtaaagatgacttgattgaaacagaggggaaaagggacatttccacgtacttagaaaaatcacacaaaaactgtattaggtagcttggagtaaagatgacttgattgaaacagagggaaaaagggacatttccacaggttgtaattaatggcccagggcagaggacctatataagctattagctaatgcattttgatttttttttttcatttttctcttttccctctttgtgggaggttgctgtcttcctttgagggaagtaaataygacacctcagaaatgtatttaaaataaaagactctcaagtgacaaaaaacatattgactttattagaggtgttcaaatttcttcaagaaaaggcacattacatattggtaatgcaaacagttctttcacatggaatctgtgtccttcatatttttgaaaaacattttggcaaaggcttattggctgaggctc

SEQ ID NO: 329003 - DNA, 554 bp, Homo sapiens
tttcccataggggaatgacatgctctgcatttgaccctttcaatctatttgcaaatagtagccaagttgagtcagatcacttaacacttttgcaaaatctgtaatgacttccattttactcaaaataaaatccaactaacagtgaattataagacagtgcatgcttgcccctcctccctctcatctcttattgagctactctcttatccactgtaacccaaccacaatgacctcataactgttcctcaaacactccagagtcttcagctcttgaactccaggattctcaccagtggccaacagtttctcagaccttaggttttgaattgagttacrtcatcagctttcctggttttaaggctttcaaacatggattggcttctctgattctccagtttgctgacaacctatcctgggactttcctgccatcataagtgagtaagtcaattcccctaataaatcccatctctcacttctctctctctctcaatgtacatgtttccctctggataaccctggctaaaactaagatccaaacgaactctaggtactt

SEQ ID NO: 329004 - DNA, 573 bp, Homo sapiens
aagtatttcttagttttgctttctagtgtgagaagcaagaatctccccaacaaactggcatcactaacgacggacccttcttcggagatctgtccctaacctcaagtaaaatggcatcttctctcctgaaagcccggtagcatacaatagagtattcatgaaatttataacaggaatcagatagaagcagtgactattccctcaaagagtatcagggagggaaactcctaaagacggaaactcttggcaacctaaacttataaaacagtcttctgaaaaactatgtaaaactctcatatcaggtaccaccttaaatagaaagagtgattttctaacactgaytccaaataattacattaacatgcaagcttcatctcacccacttttaacatcctgtattccttaaaatcaggcattgagggcacattctgaggttggcactaatacaaaagaagcaaattcatagttccattgagattaatgtgtttatttgtataagtaaaggtgtgtggccaaatgtcacaaccttcaacttggaaagccagttttctaaagtaaaatgtaaattttatt

SEQ ID NO: 329005 - DNA, 581 bp, Homo sapiens
tctttggctctgtttatatgctggattacatttattgatttagcttttggcaaattttaacacctatttttgacaaaaagcttccagcaaactggaaacaaaagaaatttctcagccttacaaagaataactgcaaaaacacatatcaacatttaaaaaagaaactgtttttagagtagtttcatgttcataacaaaattgagcagaaggtacagaggtttcatatatattcctggccstcacatatgcccagtcttccccactatcaacaatcccaaccaaagtggtacatttgttacaactgaacttacatattattcttaaccagagtctacagtttacattagggtttatactttgtattgtacattctgtgggtttggacaaatctataatgatatacgttcatcattacagcaccatgaaggataattttactgctctaaaattcctctgttctccatctattgaatcctccctctcctttaatgtctatcaatctctgatccttttactgtctctgtagttttcctttttgaaaatattatacagatgcaaagatactgtatgtagccttttca

SEQ ID NO: 329006 - DNA, 510 bp, Homo sapiens
gtctatttatccattcacttacggaaggacattttagatgctttcaaattatgtcaattagcaataaatctgcgataaataaccatgtgcaggcttttgtgtggttatgttttcaattcattcccataaataccaaggagcacaattgctggatgctwtagtaagagtatatttagtcttacaggaaactgccaaactgtcttccacagtggatgcatcattttacattcacatcattaataaatgagagtttctactgctctacctccttgccagaatttggtattgtcagtattttaagttttaaccatcttaatatgtgtgtagtggtatcattgctttattaatttgcaaatttctactgacatatgatattcagaatttttaaatatttttatttgccatttatgtattttttgtgagctgtctcttcaggtccttgaccactttgatgctagggtatttctttccctgctgttgaattttgagttacttttatgttctgaataa

SEQ ID NO: 329007 - DNA, 657 bp, Homo sapiens
aaatgtaaaaaggacatgagatttgggaagcaccatgggctgaataacatggttttgctctgtgtctccacccaaatctcatttctaattgtaatccccaggtgttgagtgagagacttggtgggaggtgattagatcttcggggtggattttcctctgctattctcctgacagtgagtgagttctcatgagatctggttgtttgttaagtgtctaatgcttcccccttctctctctctctctctctctctctcctgctgtcatgtaagatgtgccttgcttccccttctgctgtgattgtaagtttcctgaggccaccctggccatgcagatctgggagtcaattaaaccctctttcctttataaattacacagtctctggtattcctttataacattgtgaaaacggatgttttcacagttgtttttggcattgcctctattacgtaacaggccttcactacaattagtttctagagataaagctcacatttactgtgaaaacataagatggagttcaagtggaaatagaataagggaaggtgaattagcagcattattcccagcawtttttgctgtttctattaaaggcttttctatatacacgagtttatttttaagtgaaaataaactcttttcattatcatttaaagctat

SEQ ID NO: 329008 - DNA, 445 bp, Homo sapiens
tgctgaaccctctttaggcttcatgctggtctgggatgcttccaggaatgtttcttccctctcatcttcactagcatygggcttgtttcccagcctatccagcttcatattttctttctcatgcttctcccctattacatatttggacatttattgcagtcttggcatttgtatcttggagaacatgaactaatacaaatgcttagaataagtctgtgaggcaagtgctgttttccttatatttagatgaggaaaaactaaaccctaagaacctcctgaggtcctactggcctgttactagaggatagcagatctgtagttaaaacccaggtcaggatgactccaaaccccacagtttgaatgaccactctgttttcttagcatacctagaggtgaacggcactcaaaaacaagcagaacaaaacttcgtagatgggctaaaagt

SEQ ID NO: 329009 - DNA, 445 bp, Homo sapiens
tgctgaaccctctttaggcttcatgctggtctgggatgcttccaggaatgtttcttccctctcatcttcactagcatcgggcttgtttcccagcctatccagcttcatattttctttctcatgcttctcccctattacatatttggacatttattgcagtcttggcatttgtatcttggagaacatgaactaatacaaatgcttagaataagtctgtgaggcaagtgctgttttccttatatttagatgaggaaaaactaaaccctaagaacctcctgaggtcctastggcctgttactagaggatagcagatctgtagttaaaacccaggtcaggatgactccaaaccccacagtttgaatgaccactctgttttcttagcatacctagaggtgaacggcactcaaaaacaagcagaacaaaacttcgtagatgggctaaaagt

SEQ ID NO: 329010 - DNA, 445 bp, Homo sapiens
tgctgaaccctctttaggcttcatgctggtctgggatgcttccaggaatgtttcttccctctcatcttcactagcatcgggcttgtttcccagcctatccagcttcatattttctttctcatgcttctcccctattacatatttggacatttattgcagtcttggcatttgtatcttggagaacatgaactaatacaaatgcttagaataagtctgtgaggcaagtgctgttttccttatatttagatgaggaaaaactaaaccctaagaacctcctgaggtcctactggcctgttactagaggatagcagatctgtarttaaaacccaggtcaggatgactccaaaccccacagtttgaatgaccactctgttttcttagcatacctagaggtgaacggcactcaaaaacaagcagaacaaaacttcgtagatgggctaaaagt

SEQ ID NO: 329011 - DNA, 614 bp, Homo sapiens
tttggaaaacaataaatatagagataaggaaatgattgtcttgtatgagctacaaaggacagctgtctgacaataaaatcaagtgtgtttaccataaaacacaactaaagaattttggcaggaaggtaaattttttagaattcctttggacattctacagtgaaaataatttcattcaaaattctctgaattggaatatagaaagccctgcaattgaattgctggtaaaatattaagactgtcagattccgggtccatgttaggatcaccagcctggacattttgtattaaggttaatctaactccttgttcaagtatgtccatcttacagttaactctgggtccctgaatgacacgcagaatgcattattcatcttctgtttrtgctacattgttgaccaaacagaaggcactcaaccaatgttagttaaagttagaaataagggcgggaagagggagaaagagaatgtcataaaataaaacataaaatggtccactcagtgatggatcttgagaatgttctgtcattgatgtataaatattcactgaacatttacagtttcagaacctaggtaacaaagagaacattccctagtcccagccttaagtagttt

SEQ ID NO: 329012 - DNA, 552 bp, Homo sapiens
gcatctcagaactgggaaactagttttgattcttttctttgctgattttacatatacatttgttgctcaaatgatagtggttttattttctaaatatatataaaatgtgtcccctctgccccattcctgcaaaactgaattccatcaggcccttatcattatttgtctgtggccacctaataagacttcttcccaaatctgttatcgatacccttgccagaattacctttttttaaaacaagctgattctcacttttgtggttaaatccttgaatctttcacacattatgccaaatccttactactgtcygtcaggtcaccttatagcctggccattaagggccaggattctagaatcaggttgccagtgttccagtcctggctctgacacttctagctgtgtgaccttggacaacttatttacccttttagagtctgttttctcatcttggaaatgctgataatgttatgtatctgacagaatagttgtatggattgaatgagttgatacaggtaaaatgcttacatcagtgtcagtaatcactattaggt

SEQ ID NO: 329013 - DNA, 548 bp, Homo sapiens
actccacttctttctataggaagatgcagggtggtgggcacctctccttaggggagaaagccttccttgcagggagaagtttctacttccttttgttccacagatagttttcgggaaggccagtccataactttccagtcttstaaggaagagtctttataggagaaattcactttacactattttttagagagaggggcaaactgaaagatctatggtgacctgcagggagggcacaacaaccaggggaggggagaaaagagaaagaagctgctgctcagggagcatcttcgggtcgcgggagacatttctttttccacaacccctctgctttggaagccacccctccttcaaaaatggttatggtcaaacaggccaagaccaagactgctctggacaaggtccctacctttgcagaggcttggttcaaaatggcccaggaggttggattccctttgaaattcaaggactgggaggttggcagcctgcttctctggatgtgaatactgttctttgtcaaaaatgcattattttagccaggcatggta

SEQ ID NO: 329014 - DNA, 580 bp, Homo sapiens
tgtgaggcttccccagccatgtggaactctaagtccattaaacccttttacctgtgtgaattacccaatctcaggtatgtctttatcagcagcatgaaaacagactaatacataccccaaacttaaaataaaagttttacaaaaggaaaaggtytaatgatgccttccctatatggtggctctgagaattaaaccaggcgagctctgtgatgtgtcatccacgcagtaggctcatcaccagtggatctattcctatatgcctagtaaagtgtcttctgagtaatgcaagttaaggtcaatacagtcatacttaactgagtatagcacaactgaaaaagacatttttcaaagggattttacaaaataccacaaatgcatgtttctgaaattaaaaaatattttgtatagtgtgccacatgaccccatccctgggtatacacctgaggaattcagtggaatcttcaaaaaaagagcatgtcagtgtattccagttccatagaggtacactgagtcttgaaaaacttaggcaaactgattattggtgacaaggctgatatggcagcaatagcactgaaaatta

SEQ ID NO: 329015 - DNA, 571 bp, Homo sapiens
taacttgtccacagtcacatggttaggaagtggtgggcccagaactcaaaccccagccctcttgctaggtaccttgctgtcctgtctctcctgctttgtgtcctgtctccctacccaagaagggatgttcccaaggacagaaacctctcctgatttcactattgcatctctagcacgtggaacagtgtgcggcacatactctgtgctcatatatttgttgaaaaattgaattgaagaaaaagggaacatttcagaagaagaaacatgaggggttaggtctgcaaacacacacacatgaaaaracaaaaacaaacaaacaaaaacctacaaaagactcatataacagatacgagggataaaacctttcttctatattcctggttgtaattctgggctttgtgcttacctgactcatgctttatttttctcagtgttataaatattgtagttcatggcaaacacctagcaggatacagcagaacttcagtatatggcagtaactgtgatgaagaaggagaggaagagggaagaatgacaaaaaaaaaaatacagagagaaatacaaagctggt

SEQ ID NO: 329016 - DNA, 562 bp, Homo sapiens
ctttcattactatcgtaaataattccccattattctttatctcagtcactaatttcatgccttcatcaaacttactgagcaaaaatgtttatcgtgtctgtcagtttaattgtttttgactgatatccacttggaccacactcatccctcagaatgcaggcaccagaagtatagaagatacagaagacttgatggcacatgtatttcaggggaaaacctggcatataatgggtaatttataaaggaaataggtttaattgactcacagttctgcatggctagcaaggcctccrgaaacttacaattatggcggaaggggaagcaaacacatcgttcttcacgtggtggcagcaataagaaatgccaaacaaaagagggaaaagccccttaaaagtatcatatcttgtgagaactcactcactatcacaagaacagcatgagggtaactgccccttgattaaactacctcccacaggttccctcccatgacatgtggggattatgggaattacaattcaagataagatttgggtggggacacgacaaaaccgtatcaaccttc

SEQ ID NO: 329017 - DNA, 473 bp, Homo sapiens
gcagtcacttggatagataatcctattraagtatatgttaataacagtgaatgggtaccaggccccacagatgaccgtggccctgcccaacctgaagaagaaggaatgatgataaacatttccattgggtatcattatcctcctatttgcctgggaaaagcaccaggatgcttaatgcctacaatccaaaattggttgatagaagtacctactgtcagtgccaccagtaaatttacttatcatatgataagtggaatgtcactcgggtcacaaatgaatcatttacagaattcttcctatcaaagatcattaaaatttaggcctaaaggaaaccatgccccaaggaaattccaaaagaatcaaaagacccagaagtcttagtttgggaagaatgtgtggctgatactgcagtggtactacaaaacaataaatttggaactattatagactaggcccctcgaggccaattatat

SEQ ID NO: 329018 - DNA, 593 bp, Homo sapiens
attggcatttgagattgtgacatcaaaggcatctgaaccgcgggagaaggagttggtggccatcgtggtctaaactctgatggcccaaataattctggacctccttctcccaattttgatgattcaggatatattacctcctgtaattgattatagtcaacattctgcattgaccaagccagtacaggctctactgcatttttacaatgtgtactttccattcctttcttaaactctgttcctgcctcttcttcacaatctattacacagctttcagaggcatcaaagactgaaacgctatcttcttctatttgaaatggttctaaagttgctttaataatggcccaatcattccatgctgtaagtgggatgattttaccttccctaattgcttgttttagttctttgccaattttttcccaatcttttaaatmttaagttccctgttctggaaaccatgggcagaattgttctattgtttgaaacagcgtaactagattttctgtagaagctttaactccccctcttcttaagataattttaatgaagctgagataagaagcatatttactttcagtttgccccattgttac

SEQ ID NO: 329019 - DNA, 593 bp, Homo sapiens
attggcatttgagattgtgacatcaaaggcatctgaaccgcgggagaaggagttggtggccatcgtggtctaaactctgatggcccaaataattctggacctccttctcccaattttgatgattcaggatatattacctcctgtaattgattatagtcaacattctgcattgaccaagccagtacaggctctactgcatttttacaatgtgtactttccattcctttcttaaactctgttcctgcctcttcttcacaatctattacacagctttcagaggcatcaaagactgaaacgctatcttcttctatttgaaatggttctaaagttgctttaataatggcccaatcattccatgctgtaagtgggatgattttaccttccctaattgcttgttttagttctttgccaattttttcccaatcttttaaatattaagttccctgttctggaaaccatgggcagaattgttctattgtttgaaayagcgtaactagattttctgtagaagctttaactccccctcttcttaagataattttaatgaagctgagataagaagcatatttactttcagtttgccccattgttac

SEQ ID NO: 329020 - DNA, 560 bp, Homo sapiens
cctttcccacagggtgtaagaaggccaccaaggtcatttcttcccttctgtcagacataattcctcagtttagccttcccacctctatacagtgtgatagcagaccggcctttattaatcaagtcagccaagcattttttcaggcttctagtattcagtgaaacctttatatcccttacagtcctcagtcctcaggaaagtagaacakactaatggtcttttaaaaacacatcttaccaagctcagccaccaacgtaaaaaggactggacaatacttttaccactttcccttctcagaattcaggcctgtccttggaatgctacaaggtacagcccatttgagctcccatatagacgctcctttttattaggccccagtctcattccagacaccagaccaacttggactgtgccccaaaaaacttgtcatccctactgtcttctgtctagtcatactcctattcaccgttctcaactactcatatatgtcctgctcttgtttacactggtggtttacactgtttctccaagccatcacaggtgatatctcctggtgctat

SEQ ID NO: 329021 - DNA, 404 bp, Homo sapiens
ccttatgaaaaaacaactttcaaaccaattatgagcctgtgttacatagtcaaactactttttcctctcttatcctatgacaatgattctttgcttggtcaaactttagtcaggctcctgaaccttctaagccctccgtgtacttccttgtaaaatccagttttagcaacgaaccctgccaagtcggtttagcaagaaccttcacccttgatatctgatcacccttgatatttgatatctaactgggttcctcatcctctaccatcccccagttgatgtctgattatcccacagttgatgtctgrtcaccttggcctgtcttcagcaaaattcttgttaggtcagtttaaccaaaattcccctggcccctggtgtttcctcttaagtaattttccattcactca

SEQ ID NO: 329022 - DNA, 612 bp, Homo sapiens
atactcaatctgctcctttgttataaattcctacttgcccatgctatatttggtgttgagtccaatctctcttccccattgcaaaatcccattgcagtggtcgctatacctattgtaatagtcatgaacaaagtcttccttaccatgctttaacaattatcatttaataattttttctttaatgctttctacaacaattatataggtttgactgattttttttaccttataatactagttttaaggtttgctggtatttctgtttgaaacctcaagaacatactattaatttgagacaactgaggcaattttcacaaagctagaataggcttctggaaaagaaaaatttggataatagtcaaaacaaatgactcaatcaataattttgtattagcacaattattgaaaaacaccctayttagaggcccatagtgatccatattctacagtgataaatgataatttgaattacaataaatagtaactccttgtgctcctgctttctaaaattgctaacaatacatctcaaattgccttaaataatttcaacttacttcagatcctctctctccttttagtccttgttcaccctggtcacctggttcgcccttt

SEQ ID NO: 329023 - DNA, 580 bp, Homo sapiens
atccatattctacagtgataaatgataatttgaattacaataaatagtaactccttgtgctcctgctttctaaaattgctaacaatacatctcaaattgccttaaataatttcaacttacttcagatcctctctctccttttagtccttgttcaccctggtcacctggttcgccctttagtagaaaccaaaataaaaatcacatatgaagcagagaccaaataagttatrttaatgttaatttttagaaataatgctttcaaaacatactgggggtccttgttgtccagtggcacctcttagtcctggtacacccacatggccctagaaatagaaaagattacattattagagtaagtagagacatgtgacttaagagaataggatactatcacttaaaatggtagcaaagtgttgcaaagctcaacttaaatgtcgtagagattatgattcttcttggaaatagaaaagaacataatagctgttggatattatggtagctgaaaacaagttagggttttctttctttctttctttctttttttttaatgtgaattaatgtagcaggctgaatggtggcc

SEQ ID NO: 329024 - DNA, 644 bp, Homo sapiens
tatgatttgtttagttccattaaataatttcaaaatattgaatttcaatgataccaagaacaacatcaaaatacaccaaccagtgaattatataaagagaatctcataatgattctactaggaaaaatattgaaaactgaagcccaattaaaaatatgaatattttcaccaagtgtggtggctcacacctgtagtcccagcackttgggaggctgaggcaggaggatcccttgagcccaggagttcgagaccagcctgggcaataacgtgagaccctgtctctacaaataatgtaaaaattagccaggcatggtggtatgtgactatagtcccagctacttgggagctgaagcagggggaacacttgagcccaggaggtcgaggttgcagtgagtcatgtttgcaccactgctctccagcctgggcaacagagtgagaccctgtttcaaacaacaacagcagcaacagcaacaacaaaacaacaaaatgtttcaattagtacagtatgttataaatgatgcccaaataacttacttttttactaaatattaaaatgattgaaaaagatttaagcaggacagttcagtacataattccattaattacaaaagattatatttaagtgatcttttaaaagggattta

SEQ ID NO: 329025 - DNA, 583 bp, Homo sapiens
actggaaaataagtaaacatcatcagtggaccaaaattttgtaatttgagacagaaaattagggctgaaaatatgcaaagaaaaaaatcattgcagatgtgcaagtagtctcaaggaaatttcaaatgctgaaatcaagacattgaaggggcaggataggttcaggtgactaactggggaaaggagtcaggtattcctattctacttgtgctgggtaactgatgattgcatttgcctagaagataagtgaatgcgtgtggaaactgttgccccaaaagcaggcaatgctaaaggctgctgctgactcaagtgactctagagccaacataacaagaaataaaatatgcaattcataaaagaaaaaatgaaccttaatgtacctaaaatatatatgcaaaatatgtaacctcycaaaaataagtggggagaaaatgtgatgaacagatctcaaaatctgttttcagaaatcaatgactcaaatagcaagaaaaaaaacagtaagaaagctataaggatttaagtagcttagctaacaacttgatttaacagaaatacttaggactgtttattagccccaaaaaag

SEQ ID NO: 329026 - DNA, 613 bp, Homo sapiens
ggtcttatagatataaatcttacttaagtcactgtgcttgggattcatgtactctcactcagttctcagactcaagccagttcctagatcagaatcccttgattgagaaggaggtaggttctctttgagaaaaaacactgcaatgtggtcagagatgtatactacwactcctcccctaagtattcttgagagagacctatggtcatttactaggtgactgaacactgggaaaagacaaattccaagtctttctagagctgttaagatactagttataacctgatgataatccctggaaataaacactgtggtcagagtggaagcttacgagggtcaagtgataaatggagttttcatccaattccatttccaagtgggtccaataaagactgtgagctcagtttttattttctcccctccaatctcagagcatagtgaaacttcctaactataaaggctactactatggtaagatgggaagacacaaatgaatgttcctacaactatcccttcctgtcccctcctcaccaatataaatctaatgtaataacacatccttgtgaaaaactgtacatattactcccatccctgtggaaaattgtacatattattg

SEQ ID NO: 329027 - DNA, 576 bp, Homo sapiens
tatagagtaggttctcaataatcaggtaaacaagatggacctttagtggatatcagtcaacatttttccatactaatcatagtggttgctcaatgggcccactaacacaaatccaacaatatggacttttcttcaccaaggttgatctggctaccacccctggtgactgccaaacctgccaaacgtagaggccaacattgagctcccaacaaggcaatgctccctgggagataagttggagctataatagctgcaattgttctcacaggggtagatacctattctagacatagatttgctattctaccaaaagttcttctggtagttaaaatgtagttgatacacagcacgaattatatrtcagaagagagagagctgatatacctatagcaatatgaatgtatctttaaatcccagtgctaagtgaaaaaaaaaagatgcatggtctaatatcatttccataattaaagatatgcataaaaacctgtagtatatttttgggacagcatacagataagaatatacattaaaacatataaaatagtggctattttagggggaggggaatgagagtgg

SEQ ID NO: 329028 - DNA, 580 bp, Homo sapiens
tggtgtttcttattgtgtcaaccaatattttatataattgtggagaaaagatcagctatatgcacctgtcagcttaggatagaggttatcatttcccatctgccaaaccttgtattgtgttattttcccaagaaataaattatggctattcagctgccactttgaatcagataattatatgactgaagtaaggtctgaacattttgtttctacacttgggcaactraatttcatatgcaaggatctctgatctgaatgtgcttataatttacattcattttctctatttttttttcaagccaatacaagtcacccaaagcaggcatctaatccttggctaggggacaccagtaaagtctttgctaaagagccagtcaacacttatctgcctggccaggagaggaaactgatggtgaggtaaaagttaatctttgtgatgaaaagattaaattttttttcctaagactttttatttgtctagagaatgagaggctgagtcctctaaaatctagctcatgtcattttaattatgcttgaatatctctggcctttgtcaccattcattttgttacgattctaa

SEQ ID NO: 329029 - DNA, 606 bp, Homo sapiens
ttctgtcataaagcatttataaaggaatgttttatgttgtctcaaactgagtttgattaaatattttggatctttattcctataactgacattattgttgtagagtaatatcgcagctccaggatgaaacaagaaattctttgcaagcataatatgagctatcagatctgatcctgaattttgttattacttcaaaggaagttctaaacatcattttgaacaaattctctcacctcaagacaagtggaagatgtgaataaataataagagtaatggccaggcctgtaatcccagcactttgggaagcygaagtgggtggatcacctgaggtcaggagttagagaccagcctggccaacatggtgaaaccccttctccaccaaaaatacaaaaattagctgggcaccatggtgcgtgcttgtaatcccagctactcaggaggctgaggcaggagaatcgcttgaacccaggaggcagaggttacagtgagccaagatcgtgtcactacactccagcctgggagacagagtgagactccatctcaaaaagagagagagagacagactgagagagagaaaatagcatcttttttgcttaaatgcttaat

SEQ ID NO: 329030 - DNA, 606 bp, Homo sapiens
ttctgtcataaagcatttataaaggaatgttttatgttgtctcaaactgagtttgattaaatattttggatctttattcctataactgacattattgttgtagagtaatatcgcagctccaggatgaaacaagaaattctttgcaagcataatatgagctatcagatctgatcctgaattttgttattacttcaaaggaagttctaaacatcattttgaacaaattctctcacctcaagacaagtggaagatgtgaataaataataagagtaatggccaggcctgtaatcccagcactttgggaagctgaagtgggtggatcacctgaggtcaggagttagagaccagcctggccaacatggtgaaacccctyctccaccaaaaatacaaaaattagctgggcaccatggtgcgtgcttgtaatcccagctactcaggaggctgaggcaggagaatcgcttgaacccaggaggcagaggttacagtgagccaagatcgtgtcactacactccagcctgggagacagagtgagactccatctcaaaaagagagagagagacagactgagagagagaaaatagcatcttttttgcttaaatgcttaat

SEQ ID NO: 329031 - DNA, 606 bp, Homo sapiens
ttctgtcataaagcatttataaaggaatgttttatgttgtctcaaactgagtttgattaaatattttggatctttattcctataactgacattattgttgtagagtaatatcgcagctccaggatgaaacaagaaattctttgcaagcataatatgagctatcagatctgatcctgaattttgttattacttcaaaggaagttctaaacatcattttgaacaaattctctcacctcaagacaagtggaagatgtgaataaataataagagtaatggccaggcctgtaatcccagcactttgggaagctgaagtgggtggatcacctgaggtcaggagttagagaccagcctggccaacatggtgaaaccccttctccaccaaaaatacaaaaattagctgggcaccatggtgcgtgcttgtaatcccagctactcaggaggctgaggcaggagaatcgcttgaacccaggaggcagaggttacagtgagccaagatcgtgtcactrcactccagcctgggagacagagtgagactccatctcaaaaagagagagagagacagactgagagagagaaaatagcatcttttttgcttaaatgcttaat

SEQ ID NO: 329032 - DNA, 605 bp, Homo sapiens
tccccaagagaaaacatagctcttcaaaaccagatgctctgtctttactccttcccataaaccacagtgcttctgtgctccagtatttccacattggggctcagtaaagactgaggaactaattatgagtaaactgatcatgcaggcaggctggaagacaaagtagtggtttacagtgtttataattttcagcttttttttctgtccttctcttttcctctggtttctaacctgcagatcattgaatgsgccctgccccaatcagctcaattaggtttgcaggactaagaggaaagctctatctggaagaaaacaacaaatatcttaaatgaaacacaaactagctgtcttaccattcatttttatcaatgactataattcctttagcagcaattaaaataatattataacacatctacccccaaataatagcatatttcaaagtaacatttgaagaatgaagataaaccagaagtataagattatttttgagcactggcaaatggcaacttttttcttttcagttttacagcagtggtaagtgcccatttcttctctgtccttccctcagacctggagaactgtgatgggtgttccagcacagc

SEQ ID NO: 329033 - DNA, 598 bp, Homo sapiens
aatatttgaaaatcatatatgataagggactcgtatccagaatatattaacaatctgataataagataattaacataagtgaaaaatggacagacttaaatatctccaaagaagatatacaaatgactaataagtgcatgaaaagatgctcaatatcattacaaatatcaggaaaatgcaaatcaaaaccacaatgagataccacttcatacctactaggatggttagtgttaatgaggatatagagaaattggaacccttatacattgctgatgagatataaaatctgcagtttcttygtaaaccagtttggcggttctgcaaaatgttaaacatggacttaccatatgacccagcaattccacttctaggtacgtatgtccaagagaattgcatttaaacaaaagcttgtacatgaattttcacagcacatgatttataagagcgaaaaagtagaaacaacccaaatgggcatcacctgatgaattaataaataacatgcgaaatattatttgacaataaaaaggaatggtgtacgagtacatggtgcagcatggattaacctcgaaaacattatgctaaatgaaagaagcaattc

SEQ ID NO: 329034 - DNA, 598 bp, Homo sapiens
aatatttgaaaatcatatatgataagggactcgtatccagaatatattaacaatctgataataagataattaacataagtgaaaaatggacagacttaaatatctccaaagaagatatacaaatgactaataagtgcatgaaaagatgctcaatatcattacaaatatcaggaaaatgcaaatcaaaaccacaatgagataccacttcatacctactaggatggttagtgttaatgaggatatagagaaattggaacccttatacattgctgatgagatataaaatctgcagtttcttcgtaaaccagtttggcggttctgcaaaatgttaaacatggacttaccatatgacccagcaattccacttctaggtacgtatgtccaagagaattgcatttaaacaaaagcttgtacatgaattttcacagcacatgatttataagagcgaaaaagtagaaacaacccaaatgggcatcacctgatgaattaataaataacatgygaaatattatttgacaataaaaaggaatggtgtacgagtacatggtgcagcatggattaacctcgaaaacattatgctaaatgaaagaagcaattc

SEQ ID NO: 329035 - DNA, 617 bp, Homo sapiens
catcaatttatcttaataggcattcaccattattacccctgaaatagaagagggaaggatccttccattcctagggaatcatgaacctctaataaagagcagcatgatagtcctacttccaaaatatccacatcatcatcctcattccagtggaagttggcataggattatcatagaaggaaagaagatggggctgtgtgaactgtgcagaggaaataggagcagtggggaagcggactctagttrtttccatgaccaaatcacttctctaatttctttgattcataaactcaacccaaggaagaccagagaagtactgggatgaacagtagacttggaatcagggactggggttctagtctctattctatgaacctagggaataaaactgtgatccaccagagggcctgctctgtgccaggaacaatgctaggtaaattacatttgtcatttttaatcctcataacaaccatgccagattagtgttatacccgaatttactgacaaggaaattaaggctcagaaagcttaaatattgtttgcaagtttctgactctaatctgtaaaatgaaggaattgaattacttaaattctaatgttccttattatctttccat

SEQ ID NO: 329036 - DNA, 394 bp, Homo sapiens
ttttcagtcctcaccctcctcccacccttcactctcaagtaggtcctgatgttaattgttcctttctttgtgtccatgtgtactcaaggtttagctccaacttaargagaacatgtggtatttggttttctgttcccacattaatttgcttaggataatggcctccagctgcatccatgttgctggttaaggacatgatcttgttctttttctatggctgcataggattccatggtgtatacataccacttttttttttatccagtccactgttgatggagatctaggctgattccatgtctttgctattgtgaatggtgctgcgctgaagataaatgcgcatgcatctttatggtagaacagtttatattcctttgggtatatacccagtaat

SEQ ID NO: 329037 - DNA, 535 bp, Homo sapiens
gtgtgacctgaaatgagttcctatttggtcagcattttcaccatccagtgatcttgaaactttagacatatgaaaaaataacgcttctcttcaaaatactgaggtgcctagactagatctgctcttcactcgaatgatttggagagaattatgaagattacattctcccaaagtataatgaatcctgctgtctaattcccctcattatttcacactcactagtcacaacatataatcaatctttattctctgttttctattttacatgcatgtttttgtaaatattgagtgatttccatgtaagaatatgttctctctaactagagtgcctggaagaagttatttttccttatttgatcccctcactgcacytaatgagagatttatacttcgatgtgggcacttagatgtgactgaatgacttcccaggcaaatcctcttaatacaatttctctgaccctgcctttcttaaagtctgcctgtggggaaaaagtcaataaattcaacaaattgattgactgctatgtgccagtca

SEQ ID NO: 329038 - DNA, 578 bp, Homo sapiens
gggtcagaaatctgaaaattctttagaagtggaactgggaaaatcaggttaagaggtaataatggtaagggtgccaatgtcttagtcttaggcttttatgaaagagctttagatgttggactaatttctaagttgtctgggtcaatcctgtatgagatatttctaaaagaggttttgtctggaaagtctattgacatgtgacagactccacacaataaatgcaatataagacttagttactgtcacattaactctaagaaacagtctgtacggttatcagattaattaattggttggttaggttcagagtcagaagaaaaggaattgtatttgagaaagtatttatctggaagtaaataagatttccctgttttggaggagaagacagatgacagagaaggaaaaagaacaaaaatgagtcaaagacatagcattttttaaagcatcactagtcctgggtcaaagagttgttaygacaaattacaggcactgtggctatcatgggagatggatatgtcaaaactacatactttctcttttcctaacgtgcttttactattagccaaattctattaaaa

SEQ ID NO: 329039 - DNA, 608 bp, Homo sapiens
  misc_feature (1)...(608): n = A,T,C or G
agaatgcaataaaagcaagtcgttccagagatggaattgcctgggctggaatttaactgagtaaaaaatgttaaatttcccatagaattttatttttaaatggtttatctcccagaatgctatgtgatactaaggtactcaaaagcatgtaaatgagatggcttagtcaaatgattctagttttaggaaaggaatttgaccaccacaatttgctaaaaaagataaagaagaaaattcaattagaattctacatactgtgatttctcttcggattgtataaatctttcaccttttaaaattagagttctacttattcttctacagcctattgttgatatgacacatatcagcactgccattcttccatgagtttgtggtcatgatgtagttttttgacatatgagagcttagaatccagaattcatcttattctcttacacttttaatataggaaatagctgacaaattttatatttgggttrcatctttttaacttactaaatagttttctaagtatggcaggaactggagtgaataattattatcaataaaaggatattccatacagaaaatgccttgtaatggatctggtggcacataanactgtc

SEQ ID NO: 329040 - DNA, 551 bp, Homo sapiens
atttggatatgtgggctttaaggattctgtgttatgccttgaccttactttgatttaagttttagagcttatgaagaaaatattttaaaattctaaaaatatcctctacctaaccatggtaaaaaaaaaaaaagaccttgcagttttccagttggcaaatgggagaaaattgttaatgaattcccagtttgaagtaatgacttyaaagtcatatcctgtgttttcggtgaagcttgaagaaagagagcagatttgcctttattaatgtttcctttctgaaaaactattttccttcctgggttacagatttatactctatggtcacatctctaatatattagcccaaatgagatttaaaataaaataaaaaatgatgatagatgatttgtacccaaactgccatttagtggttagtaccctgccagcattcaatatttagttaggtcaaatgtgtttattcaactttgtataagtcataatgggaaagttcaaccaatttgtgacagatgaaaaaaagaagaaatacttacttgttccttttgttaattaag

SEQ ID NO: 329041 - DNA, 629 bp, Homo sapiens
tcttctttttcagatgagttcatgttctttgcagggacatggatggagttggaaaccatcattctcagcaaactatcacaaggtcagaaaaccaaacaccgcatgttgtcactcataagtgggagttgaacaatgagaacacatggacacagggaggggaacatcacatgccggggcctgtcaggggatgtgggggtagtggaaggataacattaggagaaatacctactgtaggtgactggttgattggtgcagcaaaccaccatggcacgtgtatacttayataacaaagctacatgttctgcacatgtaacccagaacttaaagtataataaaacaaaacaaaacaaaacaaaacaaaaaaagctaaaaacagaaaaaaaaaagaatattcttccttttctacatgaaaaatcccaacttaattatatggtgattattcttacattagtatattcagatttacttccaagatttcaattagcctgtctatacaggataacagatattgaaataattacttaatatatttatttagttttaatataattatgttattctcactcactcctctttttctcccaaaatgttcatagatatcaatattttaaattatttgaaaagtacta

SEQ ID NO: 329042 - DNA, 629 bp, Homo sapiens
tcttctttttcagatgagttcatgttctttgcagggacatggatggagttggaaaccatcattctcagcaaactatcacaaggtcagaaaaccaaacaccgcatgttgtcactcataagtgggagttgaacaatgagaacacatggacacagggaggggaacatcacatgccggggcctgtcaggggatgtgggggtagtggaaggataacattaggagaaatacctactgtaggtgactggttgattggtgcagcaaaccaccatggcacgtgtatacttacrtaacaaagctacatgttctgcacatgtaacccagaacttaaagtataataaaacaaaacaaaacaaaacaaaacaaaaaaagctaaaaacagaaaaaaaaaagaatattcttccttttctacatgaaaaatcccaacttaattatatggtgattattcttacattagtatattcagatttacttccaagatttcaattagcctgtctatacaggataacagatattgaaataattacttaatatatttatttagttttaatataattatgttattctcactcactcctctttttctcccaaaatgttcatagatatcaatattttaaattatttgaaaagtacta

SEQ ID NO: 329043 - DNA, 484 bp, Homo sapiens
gtgtctcccttagtgctgtcatctactattttgacttataaaaccacttccatgaaaagggctctgactcatccactgagatccaaatttatatacgcagtaagtaggattgcttaaaattccatcttagagtcacaatgacaaacacgagcttatgatttctccccttctactgaccactaatgtattctccttctagtcttccctaatgcaacaaataaaaccatctagtagctctattcaaaacccccaaaatctaggacttcaataatcacacagctattgaattacctcacttctttcgagcctcacagctactgtcctggcccagacttctttatttctttccttaatactacaacactcactttagaagttgcactgttwtatctctagctccctgaactgtctgttttccatacagaaacaagaatgatctgtaaaacgtaaacaaatccagattactcttcttggtgaaagtcct

SEQ ID NO: 329044 - DNA, 484 bp, Homo sapiens
gtgtctcccttagtgctgtcatctactattttgacttataaaaccacttccatgaaaagggctctgactcatccactgagatccaaatttatatacgcagtaagtaggattgcttaaaattccatcttagagtcacaatgacaaacacgagcttatgatttctccccttctactgaccactaatgtattctccttctagtcttccctaatgcaacaaataaaaccatctagtagctctattcaaaacccccaaaatctaggacttcaataatcacacagctattgaattacctcacttctttcgagcctcacagctactgtcctggcccagacttctttatttctttccttaatactacaacactcactttagaagttgcactgttatatctctagctccctgaactgtctgttttccatacagaaacaagaatgatctgtaaaacrtaaacaaatccagattactcttcttggtgaaagtcct

SEQ ID NO: 329045 - DNA, 534 bp, Homo sapiens
aatttcaacagcaaatatctcaatatgtatctttaaaaggtaaggacggaatatatcctaattaacaatttccaaagttacaacaagtcatttttgcccccttgattctgttacaccatctatatgatttgatttggtcaatgaggcattactcgatgggatacagagatgcttgaacaagttagtgtgtatttcctctacttaccctttctctgtgccattactgtgagaacattcccagtatagcccactagaggatgagaaacatgtggaatgagccaagtcaccccagtcatcaaagctaaagrcatcctagctcagcttcctgacagtgactctaggcttgtgagtgagcctagatgaaatcactcccctatagacctgagctaaacaaatgctcattgttctatgtcactgagttttgagggttattagcatgaaaatggcaatagataagtcatataagcgttctacgttataaattagtgatcggtttagcagagatctttaatctcatttttccccccgggataa

SEQ ID NO: 329046 - DNA, 534 bp, Homo sapiens
aatttcaacagcaaatatctcaatatgtatctttaaaaggtaaggacggaatatatcctaattaacaatttccaaagttacaacaagtcatttttgcccccttgattctgttacaccatctatatgatttgatttggtcaatgaggcattactcgatgggatacagagatgcttgaacaagttagtgtgtatttcctctacttaccctttctctgtgccattactgtgagaacattcccagtatagcccactagaggatgagaaacatgtggaatgagccaagtcaccccagtcatcaaagctaaaggcatcctagctcagcttcctgacagtgactctaggcttgtgagtgagcctagatgaaatcactcccctatagacctgagctaaacaaatgctcattgttctatgtcactgagttttgagggttattagcatgaaaatggcaatagataagtcatataagcgttctacgttataaattagtgatyggtttagcagagatctttaatctcatttttccccccgggataa

SEQ ID NO: 329047 - DNA, 589 bp, Homo sapiens
ttatatgtgtaaactgtactaaaagaacaaaaatattgagtttgatacgtactagttaacttaatttacatatttatttaatgatatagaagaggtggattctactttagaatgcccacttttaaaataggatctaacatcaatattattttttctgttttaatccatacctacctgtccctagtaaaaaggtataatatactgaaaagctgaggggcctgtgctatgttctgtattttacaaattgaaattctaagcatgttttgaatttaagattagttatttaaatgtattacgcatttgaaaactagtgctctaggaagaaacactataaaatgtaattaataactatgtaataggtaacatgtaataaataaataataaagttacatatatcrtgtatatgtatataatttataaaccctttgcatgtcctaaaaattaagtaataaaggaaaaataagcaatgagtgaatgtttattaaattacaaactctgtatgaacaccagaaatcagaatagcaaaaatatatttaaaacattaaaaaaagaaaaatcataaatattttatcttgttatttgttccaca

SEQ ID NO: 329048 - DNA, 328 bp, Homo sapiens
cattagcaaacaacaaactctagttattataggcagaaagggaacctactggtagaatatggagtagctcagacaattaacagggaggacagagaagcagraaaataccaagaaaagctggctgtccagcacagggcagggcaccgcacagtggatacaggctgattagggtggctgccatcactactgctgcatgggtgccactggaccctgaatgctgtcggtggtgccactaggataggttctaaattatctctgctcctaggattccctgctccagactcaaagttctaggcaagagtggttcctggcgatatcctggtggcaa

SEQ ID NO: 329049 - DNA, 328 bp, Homo sapiens
cattagcaaacaacaaactctagttattataggcagaaagggaacctactggtagaatatggagtagctcagacaattaacagggaggacagagaagcaggmaaataccaagaaaagctggctgtccagcacagggcagggcaccgcacagtggatacaggctgattagggtggctgccatcactactgctgcatgggtgccactggaccctgaatgctgtcggtggtgccactaggataggttctaaattatctctgctcctaggattccctgctccagactcaaagttctaggcaagagtggttcctggcgatatcctggtggcaa

SEQ ID NO: 329050 - DNA, 578 bp, Homo sapiens
agcagtgacgggtgacactgtgcatttcttacatttttaatacacctcagagctgcaaagtggagctggtggaagtcatccctgctgtattcgttttctcctacagagagagaaaatcattagatttttgctggggcaggacatcccatctttctgtttagacctttagacgctgtgcatgtgcctggactcccaastaggcgaggtgacgcgccctcgcggatccagcctcccaggctcagcctctgtgcttccccccaggtgaaatatgcaaagatgcatgagaagtactcatggaaatgccatttgcaccaacttctaaattttcttgtaggtaaggaagcaaaatggaaatgggtggatttaaacatcaacttggaaccccttctcttaccaacgctaaacttctccagtagaaaagctgtttggtcatatgcatatatgactggttcccacctcccacagccagagactgcctgctgcctgatcaaaaaaagtgtctaaaatggaacctttttgtcgttgttgttaaatctaagacaccgagatagggcactctttcccagaaggtcttgcac

SEQ ID NO: 329051 - DNA, 575 bp, Homo sapiens
cttcaggcaagatacctgcctgtctcctgcccctctctcccattctgtcccggatattgtgaagctacttcttcagtttcatgaacctggattttggccaaacccttgatcattcatcttagaagctagatttccttttcgaagccacaactctgggaaaggtcttcacagccagttcctgatgttgctgagctgatcttgtccattctsagtcaaggtaggatgacagctccccgtgagaaaaaaaaataggtgttgcataagagaacatcttggctatttatgaaagattttctatgcttctgttttaagtttgtttttcaattacaaaagggactcattcttttgtataaaatttggaaagctaagttaagtttagagaagagggtaaaatcattcttaatcccataattctaccatggagaaattttgttagtattttggtgtattctcaatttcctctgcagttttttacattgttgaaatcatgctatttatactatttcatcctttcttcccactgaaaattgtatgataagcatttcctcatgtcactgaagtcactgataagtaat

SEQ ID NO: 329052 - DNA, 603 bp, Homo sapiens
gggtgaagggtttcctctgaatattgaagttgttttggatttaggaagttcacacataacaccaattttctccacctgaattcccaatccagagagaggaaggtgcaggcggtccactgttggagatcagcaggtcagctgtgttactaacacgctggtgagcaggtgtggtcttatacctgcagcctaagcattgtgccagcactttatccctatggaccytcccagttccaggtgaggccagagcttaccaggccttccccacagagctgggtccctctgcaaggatggaggcaccaggatggatcggtgttgcctgcagacagatctggagcaagaatgaacgaagaaaagctgtgtcacccaggcccagattcttctcccagtcaccatcctgatgactttctctctcctgagagtgtgggggtgaatggaggctaaggtaggggaaagtacgttaaaagaggttcctcctcatggaagcacacacccatggggaagaagttctcctaacccttaagaagttctatgccaacatgaaggaacaactagaatctatattgcactataaggttttcctcatttgtgattgatgtaaactga

SEQ ID NO: 329053 - DNA, 611 bp, Homo sapiens
aaaataagatagatcctttactctgccagtgccatcttcagtggcaggtgtcaactgacagatttgaatagacaatttatatgtstattatttgaaacctagagcatttcctgtagttagctctctcctctacaatgttttgcaaacattacaagaagaacggacccatctcaaaaggtaaccggaaggtaacttgaagctgttatttgcttgtggggagatggggctgtggtcaggcaatggaagtggtggatagctggatagatggatagctggatgctcagggctttctgcagcagcactgggagaagctctagcattgaggacggagtggagcccaagagggacattggaaagccctccatcaaaggtagatgagacctccatgataacaggacattagtatagagactggtttggtggaagaagttgccactgctgaggtgccaattaaaagaggctgttgtgtcctggagaaaggacgaacaagggtacgcttgtgcccactgttgattttctgtggcaccccagcacagagaacagctgagcttaatgccagatttccctcctgctgaattcagccagctttgaaaatgagcaggggagacaaa

SEQ ID NO: 329054 - DNA, 611 bp, Homo sapiens
aaaataagatagatcctttactctgccagtgccatcttcagtggcaggtgtcaactgacagatttgaatagacaatttatatgtgtattatttgaaacctagagcatttcctgtagttagctctctcctctacaatgttttgcaaacattacaagaagaacggacccatctcaaaaggtaaccggaaggtaacttgaagctgttatttgcttgtggggagatggggctgtggtcaggcaatggaagtggtggatagctggatagatggatagctggatgctcagggctttctgcagcagcactgggagaagctctagcattgaggasggagtggagcccaagagggacattggaaagccctccatcaaaggtagatgagacctccatgataacaggacattagtatagagactggtttggtggaagaagttgccactgctgaggtgccaattaaaagaggctgttgtgtcctggagaaaggacgaacaagggtacgcttgtgcccactgttgattttctgtggcaccccagcacagagaacagctgagcttaatgccagatttccctcctgctgaattcagccagctttgaaaatgagcaggggagacaaa

SEQ ID NO: 329055 - DNA, 611 bp, Homo sapiens
aaaataagatagatcctttactctgccagtgccatcttcagtggcaggtgtcaactgacagatttgaatagacaatttatatgtgtattatttgaaacctagagcatttcctgtagttagctctctcctctacaatgttttgcaaacattacaagaagaacggacccatctcaaaaggtaaccggaaggtaacttgaagctgttatttgcttgtggggagatggggctgtggtcaggcaatggaagtggtggatagctggatagatggatagctggatgctcagggctttctgcagcagcactgggagaagctctagcattgaggacggagtggagcccaagaggkacattggaaagccctccatcaaaggtagatgagacctccatgataacaggacattagtatagagactggtttggtggaagaagttgccactgctgaggtgccaattaaaagaggctgttgtgtcctggagaaaggacgaacaagggtacgcttgtgcccactgttgattttctgtggcaccccagcacagagaacagctgagcttaatgccagatttccctcctgctgaattcagccagctttgaaaatgagcaggggagacaaa

SEQ ID NO: 329056 - DNA, 570 bp, Homo sapiens
gtcctgcccagcccgcaggcagccagactttaaggttatctcccttgttcctgaacatcggtgtcatcctgttcttttttcaaggtgcccacatttcatattgtttaaacaatttgtgcagttgactcaatcatcacagggtcctgaggcaacatacatcctcagcttatgaagatgacgggattaagagattaaagacaggcgtaggaaatcacaagagtattgattggggaagtgataaatgtccatgaaatcttcacaatttatgttcagacactgcagtaaagacaggcataagaaattataaaaacattaatttggggaactaataaatgtccatgaagtcttcacagtttatgttcttctgccayggcttcagctggtccctccgttcggtgtccgtgacttcccgcaacaagtgatgagaagacaagattgatgagggcatggcaggaaataatgatatttatgtgtttaattccatgagggatgttgtgttgttattactgttttacagttgagagaactgaggcacacgaagggttgaactcggctgggactggaagccag

SEQ ID NO: 329057 - DNA, 601 bp, Homo sapiens
catgcctgtaatcccaacactttggaaggccaaagtagaaagatcgcttgaggctgggagtttgagaccagtctgggcaacatagcaagaccccatctctacaaaaaataaaaaacaaataagccaggcatgatgccatgtgcctgtagttccagctacttgggaggctgaggaagaaggatccttgggcctaaaagttcaaggttatggtgaaccataatcatgccactgtactccgacctgggtgacagagcaagaccccatctctattaaatgaatgaatgaataaataaataaaagtactctaaaactaaattctattttaaaagggatctcccagtggttatacaaatgttctctgtataactgtrtgttcaactttaataatttttctctgtgtggattacacacacacctacacacttgaagtatctctccttctttcttgccctatctccttcaaaagaaaacttttctgaaaggggccacagttttcaaaattaatgattcaaagctgagtatacagaccatttttgcggggttcagagtcagtctaaagccagaacttcattgtagccagcagaactcttctaccaagctt

SEQ ID NO: 329058 - DNA, 554 bp, Homo sapiens
ttggacaatgatttattaatattcattcacagtacagcttattctctttgggtatgagtttttaatcgcttaggaattttccaaaccgtatttcattcaacttgtgtatttctacctgtttttaaggaactttttcaaatttgttttgttccgtgaattcccttaacatgctaggatactaacactatgaagaaaatgagattagtattgcacccataaaaaaatgaatatttgtttttgtggactctcagattcttttcttttgtttttttttttaattttagagatggggtctttctctgttgcccaggctacggtgccatggcacattcatggctcacggcagtctccaacttctgaggttaaccatcctcctgcctcagcctcccaaagagttgagattacaggtctgagccaccacccccagcytagatgttttcttactattttttttaaccatctgaagtggtattttctttctaagcatctttcttttacccctttcattatggacactttttttctcattaggggagaacatggaagaaaaattg

SEQ ID NO: 329059 - DNA, 484 bp, Homo sapiens
gtctttttaattgcaactattctattagctgtgtactggtatcctataatagctatactttatagtccctagtaaacaatgatattgagtatcaattatgtatataacaacatatgcattatttcacctacaaagttagtgatatggtttggctctgtgtccccacccaaatctcatctcgaattgtaatcccaacatgtcrggagaggggcttggtgggaggtaactgaatcatgggggtggactatccccttgctgtgctcgtgatagtgagtgagttagcacaagatctggttgtttgaaagtgtctggcacttctccctctactctctctctttcctgatctgccatggtaaagacatgcttgcttctccttcttctgccttgattgtaagtttcctgaggctctccagtcatgcagaactacgagtcaattaaatctcttttctttataaattacccagtctcagatagttcttaataa

SEQ ID NO: 329060 - DNA, 605 bp, Homo sapiens
aatgaaattatattaaacaaaagaacttttgcacatcaaaaacaaacaaacaataaacaatgaagagacaacccaccaaatgggaaaaatattgcaaaatacccccctcacaagggattaataaccaaaatatagaaggagatcaaataacttaataggaaaaaatgcaaattatccaattttttgaatcaacaaaaaatatgaatagacatttttcaaaagatatacaaatgactaacatgtttatgaaaatatcctcaacatcacaaattatcagagaaatataaatcaaaccacaatgagatattatcccattccagttaaaacggctttcatcaaaaagataagcaattcagtaaatgaatgaacaaaaaaacaaatactgcatattctcacttattagtgggagctaaatattggatacacatggacataaagatggcaacaatagacaatggggaatactagagaggggagggagggagggggacaaaactagaaaaactcactattgggtactatgctcagtacctgggtgacaggatcaatyataccccaaacctcagcatcacacagtatatccatgtaacaaacttgcacatgta

SEQ ID NO: 329061 - DNA, 657 bp, Homo sapiens
ttttatcttgggtggttaatgatcctgaatccaacatccaccaaggttatagctcagggaactctttcaaagcacccgttagagagggatttttttcctgcctctcagaagcaagttctatgtgaactactgctttctgactcatctgccaagtccagcacattgcattatgtcctaaaggcaatagaggagtaagccaacccatcaaattcctgccatcaatttggtttaagccaggagattatttctcctgggaaggatgtttcacacccttcaagcaatccctcrgacatgttaaatatgtttctccttgtatgagcactttctatttaataccaagcaaaaaaatatattttctgaaccagatattttccttatagttgtgcatttgctgttagtaagaagcagaggaaatttagttgtgtgggtatacgtgtgtgtgtaagagagatgggatgggaggaaaagagagagaaacaaagagggagacgggggaggtggagagggagaggaagagaaagaagagagggtattaaaaatacatgtctattatttatacattctggaagtaatttctgtaccaattaagaatgctttcagggtgttctttatgacacgatattgggaaaatttaaaaagtaatttactttaaaaaat

SEQ ID NO: 329062 - DNA, 549 bp, Homo sapiens
tgacaattgtatgcaccatgtaaccaccatccaaaacaaaatatggaacatttttatcatcccagaaatttccctctttctcattacaggtaaacaagaacctgccccagagttaaccacttgctgatttctattgccctcaaataattctttgttcttagacttcaaataaatagaatcatgtaaatgtattcttttgtgttwggcttattttgtgcaaattaatgtttatgagagtcatctagttgttgagtgtatcaatgactcacttttttattggtggagcaatattccgttctatgaatatagtaataaaatttgtttttcggttgcttcttgaaagtaatggcaaaaaccacaattacttttgcaccaacctaacagtaatttgatttgcttccattgtgggaccataatgaataaggttgctacgaaatttcttgttaaatattctatgttgatatggattttcacttctcttcagtaaatgcctgattcaagataggtcataggtccaaatgcagaagctaaaactataaggcttctaaa

SEQ ID NO: 329063 - DNA, 549 bp, Homo sapiens
tgacaattgtatgcaccatgtaaccaccatccaaaacaaaatatggaacatttttatcatcccagaaatttccctctttctcattacaggtaaacaagaacctgccccagagttaaccacttgctgatttctattgccctcaaataattctttgttcttagacttcaaataaatagaatcatgtaaatgtattcttttgtgtttggcttattttgtgcaaattaatgtttatgagagtcatctagttgttgagtgtatcaatgactcacttttttattggtggagcaatattccrttctatgaatatagtaataaaatttgtttttcggttgcttcttgaaagtaatggcaaaaaccacaattacttttgcaccaacctaacagtaatttgatttgcttccattgtgggaccataatgaataaggttgctacgaaatttcttgttaaatattctatgttgatatggattttcacttctcttcagtaaatgcctgattcaagataggtcataggtccaaatgcagaagctaaaactataaggcttctaaa

SEQ ID NO: 329064 - DNA, 549 bp, Homo sapiens
tgacaattgtatgcaccatgtaaccaccatccaaaacaaaatatggaacatttttatcatcccagaaatttccctctttctcattacaggtaaacaagaacctgccccagagttaaccacttgctgatttctattgccctcaaataattctttgttcttagacttcaaataaatagaatcatgtaaatgtattcttttgtgtttggcttattttgtgcaaattaatgtttatgagagtcatctagttgttgagtgtatcaatgactcacttttttattggtggagcaatattccgttctatgaatatagtaataaaatttgtttttcggttgcttcttgaaagtaatggcaaaaaccacaattacttttgcamcaacctaacagtaatttgatttgcttccattgtgggaccataatgaataaggttgctacgaaatttcttgttaaatattctatgttgatatggattttcacttctcttcagtaaatgcctgattcaagataggtcataggtccaaatgcagaagctaaaactataaggcttctaaa

SEQ ID NO: 329065 - DNA, 572 bp, Homo sapiens
agtattaaaaaatattgttaaagtttaataggtttactcccaatgttagctaccttagtcactcaagtgtttttctatataatcattcattcttaaaatatgaattaacctaccacaaaaaaccaaaccccatgtttaagataataccaccataaattgatgaggaagtaggggtgcgtattccatgtttaaatttyctttaggtagattaacaataaagaaaaaaatgtacgacaagagataaaacattaaggactgatttcaaaaactaatgagatgatattcaaaaaataataggatatgtttaaaaaaagctacaattaatttttgaaaattataaaagtagaccaatctctaggacacatagtaaaaatgtaaacaagatgaaaaaaattggaaatgagaaaagaactataacaatacagagatttttataagaaaatcacgtttataattatagttaatacatataaaattctatatttttgtgataaatcaattacccaaaccaaagctttgaaaactaaagtctaataactacataagatatagagtaagttatcaataatttg

SEQ ID NO: 329066 - DNA, 629 bp, Homo sapiens
tgtgccggtgccatgaagagggtgaagacattgtcctcatatttgcacatgatctaatattgggcacaaaaatgatagaacaatccagattcaagcttatttcactaggctggactgattggacaccaaattaatcaggaatgaacattatgtcacacataatgccacactaataacaagataggatatgatttgataggaaaacttctgaaaatcttcagagagttttagtctatgccatgttttcacttttaaaagactatctaaaatggttctcgtgaaaatctgcaatggctcctcagtaacctatttctctttaaataactgaaacagggaaagagtatgttactttatatttccagagtgttggaggtagtggactcaaagcatttgctttcytaagaggtttaatatgtgtcttataataattagagagaattgagcagagagctgttcttcacactctctctaattaccactacttgaagcaaattagaatgaatccaactgtttcttactttgtcaaaggctatattgaggacaggaataattaattttcaaatggaatggatttctaaagcttttgtgtgggttgaatgcaaattatatcttaaaatataatgtgctat

SEQ ID NO: 329067 - DNA, 609 bp, Homo sapiens
gattatttttaagaatgtatattcatatttaactgcagaagcaattaaagatcattcaaaaattgggatttttttttctggaaacgtggttgagctaaactattgataaactatgcttcacttacatttggtgaagtctcctgttttttcctgtcaatggctattttaaaatactgctatttctttaagtccctaagcaccccacttccaacctatgtatttctccttattagttttacctgatacctacacattgagctctaataacaatggtgtatgtgagcattccaggttccagaaatggataactctctctatctattttcataccgggctcattatcattaattgtagagataaacaccagtttctggacataaaagaccacaattttagactttgataaactcatcaaaatcacattgttcagtcaattctctataaaaccaactgaagttttcttggaaataacctcagtctcactrgatacatatgatcttcaacctaaagtgaccaaacacatccatttagccttatgcttaaaatattcccactgtgcctggcccctgtggcttccagtccctgaagaatgtttttactccaatctgt

SEQ ID NO: 329068 - DNA, 574 bp, Homo sapiens
ttgatcagatcaaatataatacctatcttcagatttccagtcactttagcttattgctttctttcttttcttactgcatttgttttcttctgtgttggttgtcatgacgtccctccaggtaagctaacacttccattcctttcatatggcacccctgctgaaactacatccaggttttctatgcctcagaaagcctagaaactgattgttctcccccttttctatttctcatttcccttctttatccgcctccccccagctgtctcaatgaatatttaatggtggtgctttacraagacaatatcaagaacaatcttgcaatggatgaataaaaaacggatgaataaaaaatggcaacaaggagcttatataaccaaaatacttgctggctttctcttgcttacaaataacatgtgatcctccacttcattcccccaaccatctgccaaagttatagtcccaggtttgctgatttaagagttcactcttttgtaatttcccctaataattcatggtaaaaacaatgttctatattcaaaatcatgcttttactacagtgaatgccatattatat

SEQ ID NO: 329069 - DNA, 488 bp, Homo sapiens
agcctgtttatttgtaattggtccctataggaacctgctgctgcttttcatccaatttgagttattttctgttattctctggagatgtcatttgaaataaaatatatgaagttgcttgtgatcttggagaaagatgtttcatatcagtcattttgaaaatgatagataaataaccatatcctaatcttgccttcaaggtttcrcaattgctatttcccacactgctgatctcatacttaactggccaccttcagtctatttcccaaaacaaaagaggcagtgtgaggatccaagtcaagaacatctcttattatctttcacctcaacttcctcaacactggatcttgggaaggtcagtcttgctgcacctcagttcagttatctgttaaacgggaaaaaaaaatagaccttccaacctcatgtgatgattgtgagggtgcaatgagataagtaaaaaggggtaacagagctttttattttagaaattg

SEQ ID NO: 329070 - DNA, 488 bp, Homo sapiens
agcctgtttatttgtaattggtccctataggaacctgctgctgcttttcatccaatttgagttattttctgttattctctggagatgtcatttgaaataaaatatatgaagttgcttgtgatcttggagaaagatgtttcatatcagtcattttgaaaatgatagataaataaccatatcctaatcttgccttcaaggtttcgcaattgctatttcccacactgctgatctcatacttaactggccaccttcagtctatttcccaaaacaaaagaggcagtgtgaggatccaagtcaagaacatctcttattatctttcacctcaacttcctcaacactggatcttgggaaggtcagtcttgctgcacctcagttcagttatctgttaaacgggraaaaaaaatagaccttccaacctcatgtgatgattgtgagggtgcaatgagataagtaaaaaggggtaacagagctttttattttagaaattg

SEQ ID NO: 329071 - DNA, 557 bp, Homo sapiens
ggcagtttcccctgcactatctctctctctctctcctgtcaccatgtaagacttgccttgcttccccttcacctcctgccatgattttaagtttcctgaagcctccccagccatgtggaactgtgactcaattaaacctcttttctttataaatcacccagtctcaggtagttctttatagcagtgtgaaaatggactgatacacaagatcttccctcagagaaagtatttgatagttaattatttgaaaaaacctgctggggttttatcaaagcctaackgacctggaagaagggaaatacccaacttcagcccactccagttctcctgtcccacctaaggggagaaaacactgagaagcacttgtgaagttcataatccagaggcagaggctcactgaaagactgagacttactcacaagactatagataaaacatttccccacctccctcaccttaccaccatgttactaaaggacaatgaatgtcagttacttttaaccaatacatcatgtccagctaccaagaaaaaattgtcatcagggaaagtagaatta

SEQ ID NO: 329072 - DNA, 627 bp, Homo sapiens
tagaagttgaattttttacaaaatatctgctagatagtatactactaacagcaactttttatcaccaaacattgagtatatttggaacacttatctttttaaaataaaaatgcttaccttatcttttakcttgacaactcttttaagtactttgcaatgagataaaaagtgaacctcttggatgttacaaaataaggcatggtcaagtcccttctcatgtcatgttctgtaaaaactctagcctttagcttagcatttaaaccaatctaacaaggcacacatagactattatattttaactttttctaaaagcaaataaagaagggggaataccactgtcaacctcttcatcttataaagctcccactctgctcctagagtcccatgtaaatagaggatacttcgcctgctgacctgccaactgagtgagggcaccaatgttaatctgaatattaaatatgaatgtagcttgatttttaaatcattttgatacgaaataaatatttcatttttttttttcacacacgtcttgtgcatcctctgtggcttacaacctactttgcggaccattgctttaaatatgtggattgaggcatggtgtttttccaaggcaaagagatgttgact

SEQ ID NO: 329073 - DNA, 465 bp, Homo sapiens
catacttctttatccataaagtgagtgccttggtcagatccaatgctgtgtggaataacatgatggtggataagtcatttygtgagtccatgatggtagtcttggcagaagcattgtgtgcaggagaggaaaatgcatatccagagtaagtgtttattccagtgaggataaacctctgccctttccatgataaaataggtcccatataatcaacctgccaccaggtagctggctcaacaccctgaggaatactgccgtatcaagggctcaatgttggtctctgctgttggcaaactgggtactcagcagtggccatagccaggtcagccttggtgagtggaagtccatgttgctgagcccgtgcataacctccatccctgccaccatggccacttgtttacgggcccattgggtgatgacagggtggctagagaaagaggctgagtggtgtccacagaatgggtc

SEQ ID NO: 329074 - DNA, 611 bp, Homo sapiens
ggttctgtttctctgaagaaccctgacccataaagaggttgcatcattcaaatagagccaaagtgattcctcagtgatagggcattactttagaatttgaatattctgatttaacacaatccagccccaaaaatgcagttacaggctctgctgtactcatcacagtgccttgcataataaacatcacaataaatgtaattgaaatgcatatttaaaaaatttactctattaatacataatactttctatgcatatttaagcagaattatatagcctatccactatttaataaatcatttgctcaagcaactgtttatatgagaaaaaaattacatccaaataaaacatatatacaagaattggatccagctcagtcacagtttaaaacaaaaaagcacaatcttaaaaaaattatataaaaaatgtttaaatgtgtttaygagtccacagttagactgcatttttaagaagacacaaatcatctgaaaggaaaagataagaaaaattaaccacactgcaatttaaaacatttacacagacagggtcttccataattcagagataatagaatggctggtatcaaaataactttcttgtcaaaaacaattatt

SEQ ID NO: 329075 - DNA, 583 bp, Homo sapiens
atttaggcctggctaagtcttcaacccttgataattttctgttggtgccagaaaacacagggcatcattttcaagtatatgtatagtcaattacatggaattaccatgaagaaagcatagtttaattaaatttaaaaagaaataaacagagtatttccacatataataatcagtatcagtatcatccctctatatcatatctgctgcagttcttaaagaacaacctcattcccattatcatgagttcaagaaagcctttcccatatttttagttcactttctggaatttcatatatatatatatatatatatatatataattagttacatatataattagttacatatataattagttatatatagttatatatgtatatatataagttatatatatatacgcacacacacacagacgacagagytcaccatgttgcccaggctggtctcaaactcttggggtcaagccatttgcccgcctctgcctctcagagtgctgggattacagacatgagccaccatgccaggcttagcttatgtttgagctaaacagagcatcacagcatctatttaaaatgagcca

SEQ ID NO: 329076 - DNA, 561 bp, Homo sapiens
gggaaaaataaaattggagttctttagtctaagaaccaaaaaaccaattggtgattaaaacaactttacattaactattttaacattgatcccagaatgctgaaaaactttcataagatattatcatataatatatattmtataattgtattttatatagatctttaattagactataaaaataatattttttaaatgaaagttaaaacaatgttgaagagctgtatatatgctcatatcagtaactttttcatatgcttttagtattcaagtcagactcatgaaggtgataatactaatgatgctggtcgctattaacaattgagtgcattctatgtgccaggcattgttaggcaaggtaatatacacatgaagccttctacatgcattgtctcatctaattctcacaacaatacgtaatgtatgcttttactccactttacaaatgagaacatctaagcccaaagtcacatagctagaaaaactgcagagcaggacttaaacccagttctatctaaatacaaagaatgtgccctttaacacaatggtaaataagaaata

SEQ ID NO: 329077 - DNA, 542 bp, Homo sapiens
gcacctcaatatgaatgttcacacaattcttgttctctatttttactctattttttagactcacattcacatatgaccagatctgattcactgatacaatatatgcagctttaacccgggtgcttcaaattacgagagggaaaccggagtttacttctaagcatgtctcatgttcatggagactttatcataattagggagttggtaacaagaacctggacctcagggacacggcaaaactggagacataaatagataggaattattcacaaatttatacatgggcatgtgtgttaacactatagtgagtatgyataaggttgcaatgtctaatgtaactctagtgatgactgccatttactgatcatctattagcacatatattcctacatctggaaaccagttttccaggtagagactatccccatcgaataaataataactgaggtcaagggagaaaagataacctgcccaaagcaacacaatttgtcaattagtaatggaactgagatatgaatataggtctcatcaaaaaaccctat

SEQ ID NO: 329078 - DNA, 594 bp, Homo sapiens
ctagtaagcactgacatttctatttagaagagtgtaatgagtgaaagctgattcagtgatacaaacaactcaccatggatatgagtcttttagtttcatgactataagcttaatttttatgctttatcttccaaatcaagcctttatatattaactrtaacattctcctatatggccttttccttcctatctctcccacatatttactagattaatctatcataaactccactgtcatcatatcactctcctgttcaaacaatcaattgtggttttctactatatccaattgctctgtctatatattttgtttattaaaataaaaaggactgtgattcagaaagtttgggaacctctgagtttccctattgccatagggaatatcaatagagaaggagtctctatttacatgcatggagcagtagtgttctacacaaaaatcagtttgggaaatgtcgacataatgcaggcatagacacatactcactttatggagcatttcctgattacaaacaacctgataagaaatagaattgcataggttgataacaaaaatacaatagagaataaatactctggaataatgctgtacat

SEQ ID NO: 329079 - DNA, 594 bp, Homo sapiens
tcccctatttatcaattttgctcagatatgagagttgggcttaggataagatctttattatatacttaagagacaataattgatgctatactttattatagttagacatttacgtaagttatcctagatttcccctgaaaagattgttttattctcccctgagaagcaacttcattctaagggttagctaaaaggaaatagaaattttatggtttacgacaatgaataagattctaataaagacagttgactgataagcaaaaaactgaaatcaccaaatctttccatctaggccagtgtaaaactcagtctttggcttctgatgagtctaccatgatactgacaacctaccagctgaagagaagtctctacatggactgtgcraaagagattcagaggcgtctactgaatttcaaccataaattgtctagtataaaggaagataagtgtccctgctgaagaagaatggaaacataatggaatcaattcggtgtgtctgtggaaagaacttatttctccattcccccaggatccaggcaagtggcaattctcttatctatgctaaatagtcgaaggcatcctcaccacttactc

SEQ ID NO: 329080 - DNA, 635 bp, Homo sapiens
tacttaaatgtattgaaacttgttttgtggcctatcataaggtctatttttgagaatgttctatgtgctcaggtaaaaaaatgtaccttttgaagatcttgagtagaatattctgtaaatatctattaggtccatttgttctagagtatagtttaagtccattgtttctttgttgactttcttatttggtgatctgcctagtgctgtcagtggagtgttaaagtccctaaktattatcgtgtgggtatctcttttcttagatctagtagtaaatgttttatgaatctgggaacttaagtgttaggtgcatataaattgaggatagtaatataatagcttcttgttggattgattcttttttattttttttttttgagatggagtctcgctccgtcacccaggctggagtgcagtggtgcttggctctctgcaacctccgcctcctgggtttaagcaattctcctgcctcagcctcctgagtagctgggattacaggcacacacaatcacgcctggctaatgtttgtagttttagtagagacagagtttaaccatcttgttcaggctggtcttgaactcctgacctcatgaaccgcctgcctcaggctcccaaagtgctggcattacaggtataag

SEQ ID NO: 329081 - DNA, 607 bp, Homo sapiens
cttctggctactaaggtttctggtgagaaatctgctattagtcgttacctggttcttttgtctcactgctctcagaattcttgtattcacattgactttagaaaacctgatgactgtgtgcttargtgaagtcctttttgtgataaactgtccagttctttgaacttcttgtatttgaatatctaattatctagcaaggacaggaaagttttcctcaattattccatcaagtaagttttccaaaattcttactttttcttctccctcaggagcaccagttattcttaggtttggctgttttacatgatcccatatttcttggagactatttattttgattcttttttctttatcttgactgatggggttatttcaattttgtctgtgatctctgaaattctttcttctgtttcttctagtctattgttaaaacttcccactgcattttgtaattctctaaatgtgactttcatttctagaatttctgattggtttgcatttaaaaccaatctatctctttagaaaatttttcattcatatcctgaattgtttttcagatttctttattttggttttcatcattctctggtatctcctcaagtagctt

SEQ ID NO: 329082 - DNA, 607 bp, Homo sapiens
cttctggctactaaggtttctggtgagaaatctgctattagtcgttacctggttcttttgtctcactgctctcagaattcttgtattcacattgactttagaaaacctgatgactgtgtgcttaggtgaagtcctttttgtgataaactgtccagttctttgaacttcttgtatttgaatatctaattatctagcaaggacaggaaagttttcctcaattattccatcaagtaagttttccaaaattcttactttttcttctccctcaggagcaccagttattcttargtttggctgttttacatgatcccatatttcttggagactatttattttgattcttttttctttatcttgactgatggggttatttcaattttgtctgtgatctctgaaattctttcttctgtttcttctagtctattgttaaaacttcccactgcattttgtaattctctaaatgtgactttcatttctagaatttctgattggtttgcatttaaaaccaatctatctctttagaaaatttttcattcatatcctgaattgtttttcagatttctttattttggttttcatcattctctggtatctcctcaagtagctt

SEQ ID NO: 329083 - DNA, 583 bp, Homo sapiens
taatatcaagtaaagagtaaagaatgttggaagtattttaagaaaaataaaggaaagcagtaagctcgtcagatatgtttcaaatcacaataacacattcatttatttttttttaaacaaaagtttttgaaacttttggtataaccctattacagcaaaagtgatttatatttatagttatggtaattcattactattacataaagaaaatgtgatgaaaaatgcacagcaacatgattctgaatattcttgtgaacttgggggaattcaaattttaaattctcagattctaaagatragtgtctattggaaatttggaaattttaatctattctcacagtaaattgaagtgaaggagtacatctaaactcggcagatagattgaacaattgtatctctgtggtgcagtttgagtattttctttcttttttggtgttttttttaagacagcgtctcgctctgttgcctaggctggagtgcagtggcgtgacctcagctcactgcaaccttccacctcctgggttcaagtgattctctggctcagcctcctgagtagctaggaccacaggcgcctgccaccacg

SEQ ID NO: 329084 - DNA, 529 bp, Homo sapiens
cattttttatcacattgtcctagatcctgctatatatttatttttctcttttatacacccttaaatacaaatcactacataaaaatagctaaggatttatgaaaacaaaaagggtatgaatttataaaacagttatgaaaaactaatctaataaaatatatgccaccatgtaaatatgatctatccaaatcttccactccttacattgaaaagcctcagaacccttgaattattacattttctaccaaatgaaagggtgaaaagctggaaaaaaattgaaccaagaawgctaaacaacttctgcagtaatttcattcttactcaaaataaaactagtgtttacaacacaagagttttccagatggccatgcaaatgaaggctcaggaacacactacataccatattattgttgtttagtatttattgagcactcacagcatgcaaggcgctgaaaaaataaactatttccccagttattcaaattataacctaaaagcatataaagtcatattatctatgtcttcagtg

SEQ ID NO: 329085 - DNA, 573 bp, Homo sapiens
aatataaatagaagtaaatgatggcattattatatggataaatgaattagtcaatcactgacaaagcatactctgtaatcaaaatatttttcatgttaagattaatttcttgtaatacaagtctaaatgttacataaacctctttgacattgagttatacttcataagacaraaagggcacttccagcaggcaaagaatagcagattgtcgggaacaatttgcttggatttcaggatgtgggtggccactagccaaaaatctgggaatgatttgaatgtcaaagtatagatctatagtgtctaatatggtagccactagccacacgtggttacttaacaaagctgatagttgacaatgctggtaaaagccagaattaaatgaaaggaccaaattccctggaaataaaacagttaacatggtgtaagcatgaaacatataccaggtaggtagtatgagttaggtgttagaagcattgaatattgaacagatatttctcctcctagacatataaataataatagcacatattgaatgtgtatgcattgtttctaggcttttgtattcaactagaa

SEQ ID NO: 329086 - DNA, 501 bp, Homo sapiens
ttacctagtttgtgctatataaaaccttaattcaatgtatttcattaaattcawctttaaataaaaatgattagtatgttatttctctgatatctttgggctaatcatattaatgcctttggtttaagaagtgaaacatttgaattacagttgctggtggatggcaccagcaaccatgtggttttataatgcagaattatgtaatgataaaacatagtctgttcaaaagagtacaaagttaaaaagaaacttttattgaaggcttttaaattgtattacatgcatctccatttagcagattaaaaatgaaggtttaaaaaaggtatgcaattgctcattattgaaaataaaatgatattatcaaaggggaaaaatagacgtctctcttaccttctgatgctgttgtctttgtagtcttgcaataataggaccacttgaatcattgataactcagaatatatgcataattagacttgaaatcatgtggattctgttagaatt

SEQ ID NO: 329087 - DNA, 581 bp, Homo sapiens
ttttgttatccaaaatttgcagaagagaaaagtgactgagaggggttaagcaacttgcacaagttcaggcaattgcaaggctaggtggaaccgggtcttcaaattcagtatctttcccagaataactgcctttaatagtggggtctgtttaagattttaattggaaaccaaaaagttctgctgctgctgaagaaaatgtttcaaagctactgcactaaatgaatacggccagcatgattttccagaatggaagttagaagtcaagctgaggtgtttcttcccagaattcattatgtagaagaaaaacctttcctttgtgcaatcataattctgaaatggaaatgtraatgagtaaacacgctgagttcctactatgagctgagctttttgctagacttcatttcattaaatccttttgaaaaccatttgaagtagtattatgtccattttactgatgaggaaacaaaggctcagaaaggttatgtaacttgccttggctacctattttgtgaagagcaatgcaatgatttgtacctagatggggctaacttcagattctgtcctcttatttactactcaca

SEQ ID NO: 329088 - DNA, 596 bp, Homo sapiens
atgtttcattaatatgtgcctcatataagcagtcagcatgtaaaaatagatggcaaaatctgaccaggagtttaaaattacaaattatacatagaatgtgcaccaaattaattagataattaattgagaagcataaatttaaaaaatctaattgatgttgtacatttgataatcagagtcatttttctacaattgttaaatataatttgtctcataatgctaccctttggtaaattgttataacagtgtatgatatatgtagcttattaacagtttcattaattgctattagaggaaagaagctatgaaagctggtacacataggaacaaatgttgaggcagatggttgaaattagtgaaacatgatcagttgctgaaccagtttacttaattagctttctgcatcagaatagttaaaataaatttgtcatattgtcttcaggaaattgaaattcaggagatgatcatcacatatatttttaaaaattaataagacaaagagcaaagaactgtgggctstgacccatgaccaatagtttattctgtactgagagtctgctcaactgtttagaatgggaggggaattttactgttag

SEQ ID NO: 329089 - DNA, 559 bp, Homo sapiens
caatctactcaatatttgttttaagtgtctcagttaatcaagtaatagctagaccactgcattctgtgtgctaatttctaaacttcagacagtagacagatgatagaggatgacatattggaagccagaatttatagagccagagaagaactcctggaaaaagtaaagttaagccctgtggccaattcacaatcaaggatgataaaggagttcttggtcacagagtaagcagaaaggcaaagtcaaccattgagacagagttgacctctccttcctcagcaattcccctgagccctttcatgctcatttttcttgatatttatttaactgtatttatatgtctgctttccctgctattcaagaacttctggatagccaggacattaacttattccattttgatattcccagcatttgccatggtaccaggtacatagatacygtgaatggatgaatggaaaaagagaaaaaggaagaaaaatacttcagatacttagggatcatgaaataatcttctactgtaaaattattctcttctttagtggtagaatacacaggg

SEQ ID NO: 329090 - DNA, 563 bp, Homo sapiens
acgccaaacaagagctcgggatatggagggctgtcactctgagctattaaacacttaagccatccatgggtggcaaatctaaaagagcacactgtaacacaagccctctgttgctccggggatcaaggatacccccctagatgctgctgtggggtggcacaaaattctactcctgccagtgcccagaagcactcatcctggcccctgcactcactcacctgcatgctccccctcccatgagggtctaagaacagtgggctgaataaatgagctaaccccttcacaagtcccatgaaaggtcaagggaactatctctttcaaaatcatggtcaagacagtaaatgttacatctaaaaggaaaaagagtaagaagagtgacaaaatcaaragttcaataaatgcagttgatattgtagacatattggaacattgttacactgcagtagcgattgctggtttgtccagtgttatagtggctctgataactctttaaagcaaacccttaaaatttctagcaaactctaaaattaaaaagggtgagaacaattgaattttagcaaaga

SEQ ID NO: 329091 - DNA, 574 bp, Homo sapiens
gagatatttcaatgcaaagttgtcttagggtaaacgctgcagccacaagctcgccagcaagtattcttggggcaaacggaaaaagggtaaataagttrtatctccttcttctccatgggacttttcagtgctaattctagttccctaaaaacttattaagacatatagaaactctgagatactcaacatgtaatatgaatcccaatatcccattcccagtcatttcaggaaaatcaaaatcatagctgacatttgctgaatatgccttatgcatctgagcttttctaagcacttgacccatatgaagtactttaatccttagaacaaatagtgaaaaatgcatgagtatacatattttaaaaaactgtgagatgtctcctgcctttccatgtaatttatggcatccagcatatgcaggttacatgagccagatgttcatcaacgaatgtatccacgaatggcaggaaaaggtttaacacttctcaatatgtattagtagaaaaatttaataatcatatcatgggggaatcatatggttctgtccacatgttgcatatgtacttgcatttccctc

SEQ ID NO: 329092 - DNA, 574 bp, Homo sapiens
gagatatttcaatgcaaagttgtcttagggtaaacgctgcagccacaagctcgccagcaagtattcttggggcaaacggaaaaagggtaaataagttatatctccttcttctccatgggacttttcagtgctaattctagttccctaaaaacttattaagacayatagaaactctgagatactcaacatgtaatatgaatcccaatatcccattcccagtcatttcaggaaaatcaaaatcatagctgacatttgctgaatatgccttatgcatctgagcttttctaagcacttgacccatatgaagtactttaatccttagaacaaatagtgaaaaatgcatgagtatacatattttaaaaaactgtgagatgtctcctgcctttccatgtaatttatggcatccagcatatgcaggttacatgagccagatgttcatcaacgaatgtatccacgaatggcaggaaaaggtttaacacttctcaatatgtattagtagaaaaatttaataatcatatcatgggggaatcatatggttctgtccacatgttgcatatgtacttgcatttccctc

SEQ ID NO: 329093 - DNA, 579 bp, Homo sapiens
tgtttctgaagctcttgcaaagcacagtcccatccaagtgagagttgaaaaacatctcagtttttctaagaaaaatcccataggcccgacagattcagtgtcattcgaatattccacatgcaatttcacttytttgctcatgtctatttaagcgatttttgaaagctgtaattacataaaccgagagcctcccacactctgacaagtagaaaaatacatattaactccagacaaaatgtgggtggcagtattttttttttctttaagcgagctttatactgtcagaaactatgaaacaccacggcaaacagcaataagtcactaaacgtctatcatattagaaactgccatgcagtttcctgggatgttattttactttattattccttttaggtaatgtgagaagtaaaacaacaaagctcttaaatataattcttccttctttgtcagatggtatcaatccatcccttttccaaatactctgtttttaagacttggctaattagggaaatggttgctgtgtttcgatttgagacgttttaatatgggttcctcctgacattgtgatttcttgtcatt

SEQ ID NO: 329094 - DNA, 605 bp, Homo sapiens
tggaggtgaggtcactctaagtagtagttgaactcagttggatgtggttgtgactctaattacctttgattcaccatagacttcaaattcctccagtcatagactactactaccttgtgcttaggttgaggcacctaggstgctggagggttttaacagtatttctgctccatcccaccttttagcagacctttcatccccatgccacagagtgggtctccgttcagtatctttcccctttcccagagaatatactgcctgcattagcttttttctaggtacaaggcttttgcaggtgccaggggatttttagtttcttgttttagcattctcatccttccttcctctctcatcatgacagccaagatctgccttgctttttcatcagtgcaagatcatgtgcttaagtaacttttctattccattcttagtgatatacagcatttctcatctactcctactccaaactggtatcaggggtgtatggaggttgcctgcttctctcttagtggcaacacctcctttattttcacgtgaggaaaggattcagaacagggctagacattgcacctttccctcaacagcaaccaatcatatctacattc

SEQ ID NO: 329095 - DNA, 528 bp, Homo sapiens
gctaatcaagcccttttctatacatgatctcatttggtagacaattgctggtgaacaaaacccactaattgatggaaatattccttctagattgatcttgtcaagctttatcatcataagaaaaccattgctgctgatgtcaaatatatacattctccaaaataattgatactgtcttattgtttttaggaattgactgcaccctaatattattctacactttgatttgcaggcttagttacagacttctggtattctttcttttagcattttttttwaataaagtgtatagtatatacaggaaacatacaattcatggtaacatcaaccctggttgaaattttggttgcttccatacaatcttttttcctttatctatatttatacaattttgataacaattcttatataatattttatctagatgtttttactttataatattttaaagataataataagataccttttgtaataattgtaagacctgtatattagtccgttctcacattgctatgaagatactac

SEQ ID NO: 329096 - DNA, 617 bp, Homo sapiens
catcaaccctggttgaaattttggttgcttccatacaatcttttttcctttatctatatttatacaattttgataacaattcttatataatattttatctagatgtttttactttataatattttaaagataataataagataccttttgtaataattgtaagacctgtatattagtccgttctcacattgctatgaagatactaccagagactaaatgatttttacaggaaagaggtttaattgattcacagttttgcatggctgtggaggccttaggaaacttacaatcatggcagaaggcaaaggggaagcaaggcaccccttacatggcagyaggaaagggagagagaagaggggaaactcatttataaaaccatcagatcttgtgagaattcactcactgtcacaagaacagcatgaggaaaaccacccatgatccaatcacctcccaccaggtccctaccttgacacctggagattacaattccaattacaattcaagatgaggtttgggtggggacaccatcaaaccatatcattctgctcctgactcctcccaaatctcggtactcacatttcaaaacacaatcatgccctcccaatagttctccaaag

SEQ ID NO: 329097 - DNA, 560 bp, Homo sapiens
tatccaatggatgtataataatctacatgaccatttccatatgtgatgattaatrtctttatataaagacagatttcctattttgtattattttctcagcctaaattttcagaaatagatcatagaattaagatgaataaacatgttttgactagtggtacataattccaaacacttttctaaaatactgtaatatgttaccgttgctcaagcagagtaggattgggcatgtgttatcatattttcatcagctttgcgtattaacattttaagtcaatatttcttttacaaatacacatgatatattatgattgtttagatttacatttattccattcccacgaataagcattttattttctgtttatttactaattatgtttccatatttctgaattgtctgttctcatatttcatctacaaatgggatagagtctagtgtatagaaagaacacagacttgcatatacttaataccccattggctatggggcctttaataaaaagctttgcctcttaggttatctatttgttatctgctggatggagataataatatcc

SEQ ID NO: 329098 - DNA, 560 bp, Homo sapiens
tatccaatggatgtataataatctacatgaccatttccatatgtgatgattaatatctttatataaagacagatttcctattttgtattattttctcagcctaaattttcagaaatagatcatagaattaagatgaataaacatgttttgactagtggtacataattccaaacacttttctaaaatactgtaatatgttaccgttgctcaagcagagtaggattgggcatgtgttatcatattttcatcagctttgcgtattaacattttaagtcaatatttcttttacaaatacacatgatatattatgattgtttagatttacatttattccattcccacgaataagcattttattttctgtttatttactaattatgtttccatatttctgaattgtctgttctcatatttcatctacaaatgggatagagtctagtgtatagaaagaacacagacttgcatatacttaataccccattggctatggggcctttaataaaaagctttgcctcttagrttatctatttgttatctgctggatggagataataatatcc

SEQ ID NO: 329099 - DNA, 612 bp, Homo sapiens
gaggaatgaaaacaccttccccatatcttttaagggaattctcttccctcaatttggcttttcatctgtcaggtgggaattggccatgcagaggaagtgaaaaggctatgctatcttgagattctttaaggctgtctacccatagagttttagtatgattgcagagaacaatatagaaatgagaaaagaagaatttattaatttgtaattttttaaaatggtaaatggcagtttcccatcatcaaagtgatggttgagttaattttcctacataaatcaatgtatttatatatgctgtaggcctatattttactctattgtgtaaatatggcctcctacaatggaagatttacaataagaattttcagaagaatgtcagcgtaatatcatttcatctaaacaatagtcttgtgtcatagatcctaattagggtattttaatgggattccaatatatacattttggtagagttrgaaggctttttatatccaagaaagtatacacatattattttattttcttcaaaagtagatatctgaagtctactgggaaaatataaaaaataataggaaaatagtttattttcccaatagacttcagacaacacatgtc

SEQ ID NO: 329100 - DNA, 313 bp, Homo sapiens
ggaaagaaagcaattcaaccactagggaaactgttcttggacagagaaactccctgtcatggcaactacaacttaaggaccatgatgaaaatttaaccacaaaaaaaaaacccatgcacttccatttgttataataaatggccagacatacacacacacacgcgcgcacacacacacacacacaccaaccaaacaagaaaaccctcctaaactaacaatgaaaaatccctttttaaaatgtccacaaactgcttgtttgtctcgtctcctgcaascattcaagggctaccaaatgtatttggaaaccagcaag

SEQ ID NO: 329101 - DNA, 427 bp, Homo sapiens
ggtccgcggcttcattcttgaagtcagtgagaccaagaactcaccaattctggacacaataggagtaaggtttaaaagataataaataatcttagttgggtgaaccttaaagtacaaattattaacttatttacactagtaagaaayatggtaggtggaatctagcttacctgtttatgtgcagctcaggaaggcaatagaaaagaaagatttccaattccccttgtaccttatcagtcaagcaaccactaaagattgcatcttcaggctagcgcggtggctcaagcctgtaatccccgcactttgggaggcagaggtgggtggatcacgaagtcaggagatcgagaccatcctggctaacgcggtgaaaccctgtccccactaaaaatacaaaaagttagcctggtatggtggcgggcacctgtag

SEQ ID NO: 329102 - DNA, 427 bp, Homo sapiens
ggtccgcggcttcattcttgaagtcagtgagaccaagaactcaccaattctggacacaataggagtaaggtttaaaagataataaataatcttagttgggtgaaccttaaagtacaaattattaacttatttacactagtaagaaatatggtaggtggaatctagcttacctgtttatgtgcagctcaggaaggcaatagaaaagaaagatttccaattccccttgtaccttatcagtcaagcaaccactaaagattgcatcttcaggctagcgcggtggctcaagcctgtaatccccgcacyttgggaggcagaggtgggtggatcacgaagtcaggagatcgagaccatcctggctaacgcggtgaaaccctgtccccactaaaaatacaaaaagttagcctggtatggtggcgggcacctgtag

SEQ ID NO: 329103 - DNA, 567 bp, Homo sapiens
ggtgtttttggttccagattgtttggtcctcctgtcagggaagggtggcactcacaaactcrccgcagtttcatcggctttgcccttaccggtccctgctttccagtgagctccactgatgattttaactttctcctgctctcagtccccgaagaccccaccctgttgctttcttcctcttcctcctgcagatatagagatatcatgcattttaaagtctattggccctttgtctgcaccccacgtattctggggttcatgagttaactatccatctagtttgttttaaatgctgaccctggtttattggttttgttatttaaatgctcttttttatgtggggatttggagaaataaataactacaccacctcccctgccatcttcccagaatcctctctcctctgtagttcttaatatgtgctgttgatattgatgacccagcaaactctctttaatataaaatgggtcccatgacacatacatagatgttaatattctaaagtgaaaattacctaagtgttacctaaaattaccactaacagtttcaggcacctaacctgaaacc

SEQ ID NO: 329104 - DNA, 567 bp, Homo sapiens
ggtgtttttggttccagattgtttggtcctcctgtcagggaagggtggcactcacaaactcgccgcagtttcatcggctttgcccttaccggtccctgctttccagtgagctccactgatgattttaactttctcctgctctcagtccccgaagaccccaccctgttgctttcttcytcttcctcctgcagatatagagatatcatgcattttaaagtctattggccctttgtctgcaccccacgtattctggggttcatgagttaactatccatctagtttgttttaaatgctgaccctggtttattggttttgttatttaaatgctcttttttatgtggggatttggagaaataaataactacaccacctcccctgccatcttcccagaatcctctctcctctgtagttcttaatatgtgctgttgatattgatgacccagcaaactctctttaatataaaatgggtcccatgacacatacatagatgttaatattctaaagtgaaaattacctaagtgttacctaaaattaccactaacagtttcaggcacctaacctgaaacc

SEQ ID NO: 329105 - DNA, 567 bp, Homo sapiens
ggtgtttttggttccagattgtttggtcctcctgtcagggaagggtggcactcacaaactcgccgcagtttcatcggctttgcccttaccggtccctgctttccagtgagctccactgatgattttaactttctcctgctctcagtccccgaagaccccaccctgttgctttcttcctcttcctcctgcagatatagagatatcatgcattttaaagtctattggccctttgtctgcaccccacgtattctggggttcatgarttaactatccatctagtttgttttaaatgctgaccctggtttattggttttgttatttaaatgctcttttttatgtggggatttggagaaataaataactacaccacctcccctgccatcttcccagaatcctctctcctctgtagttcttaatatgtgctgttgatattgatgacccagcaaactctctttaatataaaatgggtcccatgacacatacatagatgttaatattctaaagtgaaaattacctaagtgttacctaaaattaccactaacagtttcaggcacctaacctgaaacc

SEQ ID NO: 329106 - DNA, 585 bp, Homo sapiens
tgatgagttttgcctttcagtaagtagcaawttattttcttttgctagtaatataatgataaaagtttcacagtaataaatttccacgatgaaagataattttatttggaaaaagctgtgtagaacaattgcaggctcagattttccttcaaacagtcaagttcaaggtattttaaaggccagtttttctcagatggtggaaatataaaaagaataaaaatgaaaacattgcactaatttgggggtaattcatttccttagaggtggggtgtttgttgtaggctataggagactattggcctattcatgacattagtggcaaccatttctagataagggaaggcttacacaggtaactctttgagtgctgtgaaatgatccaaattagaaggcaaagaagtgaaaacgggtgcttgcttaaaagaccgtgtatgctcataaaaatgagctgttacagtggtctttcatcccaatccctgcagataaaaagcaatctccacatgatttgctaaagctctcttacctcactttcacagagcaaaaaaatcatgattgaaaacagggcaggtgttttgtcaagttgct

SEQ ID NO: 329107 - DNA, 585 bp, Homo sapiens
tgatgagttttgcctttcagtaagtagcaaattattttcttttgctagtaatataatgataaaagtttcacagtaataaatttccacgatgaaagataatttyatttggaaaaagctgtgtagaacaattgcaggctcagattttccttcaaacagtcaagttcaaggtattttaaaggccagtttttctcagatggtggaaatataaaaagaataaaaatgaaaacattgcactaatttgggggtaattcatttccttagaggtggggtgtttgttgtaggctataggagactattggcctattcatgacattagtggcaaccatttctagataagggaaggcttacacaggtaactctttgagtgctgtgaaatgatccaaattagaaggcaaagaagtgaaaacgggtgcttgcttaaaagaccgtgtatgctcataaaaatgagctgttacagtggtctttcatcccaatccctgcagataaaaagcaatctccacatgatttgctaaagctctcttacctcactttcacagagcaaaaaaatcatgattgaaaacagggcaggtgttttgtcaagttgct

SEQ ID NO: 329108 - DNA, 585 bp, Homo sapiens
tgatgagttttgcctttcagtaagtagcaaattattttcttttgctagtaatataatgataaaagtttcacagtaataaatttccacgatgaaagataattttatttggaaaaagctgtgtagamcaattgcaggctcagattttccttcaaacagtcaagttcaaggtattttaaaggccagtttttctcagatggtggaaatataaaaagaataaaaatgaaaacattgcactaatttgggggtaattcatttccttagaggtggggtgtttgttgtaggctataggagactattggcctattcatgacattagtggcaaccatttctagataagggaaggcttacacaggtaactctttgagtgctgtgaaatgatccaaattagaaggcaaagaagtgaaaacgggtgcttgcttaaaagaccgtgtatgctcataaaaatgagctgttacagtggtctttcatcccaatccctgcagataaaaagcaatctccacatgatttgctaaagctctcttacctcactttcacagagcaaaaaaatcatgattgaaaacagggcaggtgttttgtcaagttgct

SEQ ID NO: 329109 - DNA, 585 bp, Homo sapiens
tgatgagttttgcctttcagtaagtagcaaattattttcttttgctagtaatataatgataaaagtttcacagtaataaatttccacgatgaaagataattttatttggaaaaagctgtgtagaacaattgcaggctcagattttccttcaaacagtcaagttcaaggtattttaaaggccagtttttctcagatggtggaaatataaaaagaataaaaatgaaaacattgcactaatttgggggtaattcatttccttagaggtggggtgtttgttgtaggctataggagactattggcctattcatgacattagtggcaaccatttctagataagggaaggcttacacaggtaactctttgagtgctgtgaaatgatccaaattagaaggcaaagaagtgaaaacgggygcttgcttaaaagaccgtgtatgctcataaaaatgagctgttacagtggtctttcatcccaatccctgcagataaaaagcaatctccacatgatttgctaaagctctcttacctcactttcacagagcaaaaaaatcatgattgaaaacagggcaggtgttttgtcaagttgct

SEQ ID NO: 329110 - DNA, 621 bp, Homo sapiens
ggtgttgctgaccaaccatttgatagggagattagcatgggtgtgaaccacatacccaatcagccatctcaataacacaagccagaaatagagatgagattataccatcagaaacactgccagctggaattgaaaaaataaagaaataagcagaataaggtctagtgttctgtagcactctggagtgactataattaacaatgatttaatgtatgtttttaaatagctaggagagcagattttgaatattcccaacacaaataattgatcaatattttaagtgagggatatgccaattaccctgatttgatcattacacrttgtatacatgcacagaaatatcacactgtaccccatacatatgtatcattattaagggtcaattaaaaataataaaagaaatagagaaaataagacagaacaaaggcagaccgtgaacatgtgttaaaggaaagaaggagcccagaagtgatttacagattatcaggactactattgctaccacaggtccagagtgcctgggctagggggaaaagctgctttcacgttgtttcaaagggtggaactgccacccagcagacccacctgagggtgagggggaccgtctcagagagccagaca

SEQ ID NO: 329111 - DNA, 595 bp, Homo sapiens
ttctcacaaacctctgatagacaggaatccaaagtacaaaagcagcagagtactcatagtcttccaccagaggcatgggggggggaaaaacgaaattttactctctcatggctcaaggtgaaactgctcaaatctgaaggtaacatgaaaaatggttgagggaagggttagcaaagaagagtagcctgagcatcattttctcctgaagccttctctttttcacaatgacatctcgtccagaataaaactggcaaacctaatagccactgacacaagccacatttgctgaacaaataattttttttaattctttccaatgtattctaagacaccagccattttaaacaaagaagaattcgcataactctttaaaatgtaatagtctagtatgtatagtctaaatctaagtctaaaacatatattgcaccattatacttgtttaacatttcctgggaagagcacatgatatgctcggtgaaaggaaatcttttactgttttcaataataaatccataygcacataaaaggaagctacagatgatgagcttcacaattcagaggaacgaggaacaagaagaggaaggtattctatttg

SEQ ID NO: 329112 - DNA, 547 bp, Homo sapiens
aatgagcatgctgagggcaaaaatatgtaaaagggatttaaatgagagtatcatgaatggtaagtagaaacaaataccaaatttaaagattattacaaatgtaatatacgtattttcctcctcttttctcatttttcttctttgaatgaacaattcccaatagtaaataaagaaaaccaagagctctttaaccactatattttccaatagctattacttgtatagagtttccttgatatacaaggaaaaatgttgctattaaactaaattttaagtaaaagcacattatggtagaaataaggccctccagagaataattttatgagactattattgcacggtagcttgggcagttgaactcacgtgaaacaaatggctctataaaacaagtcccaaagtggcctattgcttaattaaattcatrtacaaaacgtccctctgccttgacatgtgtacatacatatattaaatacattttaaaattcagtctgaaaaaatatgacctcataaagatgcaaaagtctagactccacttcaaagccaaaga

SEQ ID NO: 329113 - DNA, 526 bp, Homo sapiens
aggcactatatcaagcattttacactcattatctcatttaactctcatggcacctctatggatgcattcttagtttaaaaatgaactgagacactgaaacattatgcaaattgtttcaaacgacacatttaggtattaaatggcagcatgaaatgcaactcatttttctctgacataaaagcctatttttgggcccctacatccttgctgccaactttgacaacgaatcatgtcttttgacctggggagaatctttgtagtacacgtcttagaatctcacagagataactctaaatttaggccactgacaagaacaacaacaggttagagtcacagcctgaacattcacctcaccaaaggcagactgcacaatctgaccagtgtctaamcctgcatttgaaaaaaaaaattatgttaaaaaaagacgtttacacctggcaacacagtgtctgcctcagtcatttatattcacagatcattggatcctttaaaggaatttgttttaccaccattctgtaatattgag

SEQ ID NO: 329114 - DNA, 581 bp, Homo sapiens
tgctagcaatatttgttttttaataactaacacaaaaattctaacataacccaataacatgaagaaaagtaaacaaaaatcagaattaggtaaataatacctaaaatggcagctcaagaccaggttgaaagtgaggatgtagtcatgcaaatcataagtttctatgtaattataagatctgagccacaaatttcactctaaacttcctggtggccaaagaaaatctagtcaaatgcataatttgtattatacatatacaaatgcaaactgatttatcaggtaaataacttttcttgatatataagttttattttgcaaataggtaatactggaatgatgtattaaataatgttttcaataaatctttaaaataaattaaatgttacgctttgttgaagtgcttaaggcattcaatgtaagttgtgactaaaacaaatttagtcaactgagtgaaagaaactgagaggctgatacaattcagcacacattagcagcatggctgaagaataaagcctargataaatagagcagttaatggtttgcatatgctataaaatacctcctaccaacataattctctc

SEQ ID NO: 329115 - DNA, 572 bp, Homo sapiens
gtttactgacaaaagacgaaattctttccatttaatttataaagtcctttggcaaattaccacagttaaaacatggcttacaaatcacctggtctaccaactttaaaataatgaaaagttgaagataattttctgtccagttcacaatgcttcacattctgtgcattaaatgagactatttatttatttatttttgagacrgggtcttattctgtcgcccaggctgaaatgcagttgcatgatcactgctcactgcagccttgaccttccgggctcaagcaattctcccacttcagcctcgctagtagctgggactagagggacatgccaccaggcctggctaatctttttttgtatttttggtagagattgtgtttcgccatgttaccccggttggtctcgaactcctggacttaagcaattcacctgccttggcctcgcaaactgctgggattacagtgagccaccatgcctggctgagatttgattaatatttgctatcataatatttcaatattatatgactcaaaaatacagaaaatacaattaacaagaatttttactttcaatgt

SEQ ID NO: 329116 - DNA, 621 bp, Homo sapiens
gtgacaatacacccccgccacccttgagaatgtactttgtaacattcctcttctctcttgtgacaatacacaccccccyaccaactcttgtgaatgtactttgtaacatccatccactgcacgaaaaatctgctcctaattccaccgcctatcccaaacctgtaagaaccaatgataatcccaccactctttgctgactcctttctcggactcagcccacttgcatccaagtgaatagacagccttgttgctcacactaagcctgctcaggtggtctctcatacggatgtgcttaacagtcctgaaaatggaaataaagatataaatttaggaaagactcctaaaacatataacaaatatgagttctagatgagctgagccaattttacttttgtggacaatacagccatacctcagagacatcgtgggtttgatttcagaccaccaaataaagtgaatatctcagtaaagcaaaccacacagtttttttttttttgctttccaaatgcgtatataaaagttacatttacactatactgtagtatattaagtgtgcaatagaatgatgtcaaaaaaatgtagtctattaagtgtgcaataggatgatgtctgaatttaaaa

SEQ ID NO: 329117 - DNA, 621 bp, Homo sapiens
gtgacaatacacccccgccacccttgagaatgtactttgtaacattcctcttctctcttgtgacaatacacacccccctaccaactcttgtgaatgtactttgtaacatccatccactgcacgaaaaatctgctcctaattccaccgcctatcccaaacctgtaagaaccaatgataatcccaccactctttgctgactcctttctcggactcagcccacttgcatccaagtgaatagacagccttgttgctcacactaagcctgctcaggtggtctctcatayggatgtgcttaacagtcctgaaaatggaaataaagatataaatttaggaaagactcctaaaacatataacaaatatgagttctagatgagctgagccaattttacttttgtggacaatacagccatacctcagagacatcgtgggtttgatttcagaccaccaaataaagtgaatatctcagtaaagcaaaccacacagtttttttttttttgctttccaaatgcgtatataaaagttacatttacactatactgtagtatattaagtgtgcaatagaatgatgtcaaaaaaatgtagtctattaagtgtgcaataggatgatgtctgaatttaaaa

SEQ ID NO: 329118 - DNA, 601 bp, Homo sapiens
gcttactgccactccacatcagcacttgctgcttcacctcgcactggtgacagcttctttccttaaacctcatgaataaacctatgctggcatsaaactattcttttgcagcttcctcatatctctcagccttcatgaaactgaagaaagttaaagcctaactttgaattatactttggcttcagggaatgttgaggttggtttaatctatccagaccactagaactttctccataccagcaataaggctgtttcacttttttatcatttgtgtgttcactggagtagcacttttaatttccttcaagaacttttcctttgcattcgcaatttggccaaccatttgacacaaaaggcctagatttcagcctatttctgcttttgacatgcctttctcacttagcttaatcatttctaggttatgatttaaattgagagacattcaactcttccttttacttgaagacttggaggccactatggggttattaattggcctgattttaatattgttgtgtctcagggaatagagaggcctgaggagagggagagaaatgagaaaaggctggttgatagagcagtcggaacacatataacattt

SEQ ID NO: 329119 - DNA, 601 bp, Homo sapiens
gcttactgccactccacatcagcacttgctgcttcacctcgcactggtgacagcttctttccttaaacctcatgaataaacctatgctggcatcaaactattcttttgcagcttcctcatatctctcagccttcatgaaactgaagaaagttaaagcctaactttgaattatactttggcttcagggaatgttgaggytggtttaatctatccagaccactagaactttctccataccagcaataaggctgtttcacttttttatcatttgtgtgttcactggagtagcacttttaatttccttcaagaacttttcctttgcattcgcaatttggccaaccatttgacacaaaaggcctagatttcagcctatttctgcttttgacatgcctttctcacttagcttaatcatttctaggttatgatttaaattgagagacattcaactcttccttttacttgaagacttggaggccactatggggttattaattggcctgattttaatattgttgtgtctcagggaatagagaggcctgaggagagggagagaaatgagaaaaggctggttgatagagcagtcggaacacatataacattt

SEQ ID NO: 329120 - DNA, 384 bp, Homo sapiens
agggttgtcacaaactttcaatctgtaaaaaatgtgtctacaaagcacaataaaatgaggtatgcctgtatataagaatacccaattaatcacacttctgctaaagtwtttttcatcagtttaataatatatagctgtataatttccttcatcatcatcgttgttcaacagcaaattctaggcttataaaattatactaaatgtgtcaattattttgtcagccagtcaagccctgatatttgaggccattgtcaaccaccatgtgactcaacactatattgcagaagatatgacctggcatggacatcttatggacaagctgagcagatcagtgaggtgatctagcataaaagaatttagtccaaagcttggtcaattatttag

SEQ ID NO: 329121 - DNA, 619 bp, Homo sapiens
agatatctatttctaaacctacaaataaactctacttgtctgatttgagaattgctggttacaaaagagcagagaaaactcaatagttctttagaaagaggtaaaacacacacatacacaaacacaaacacaattctcctgtaaaaactatatttgatggcaaaaatcagattcttcctaaattctaaaaataaaacatatgcctgccagaaggccaagtattatatcaacctgatctatggaggttatagttatgaaggcaaccataaaataagtgcacactgtttccactttttcctttaaaagaagttatgtctactcacagagtatgttcagctataatggaatacatgtgcagtccaatgttagttcactgggcaatgggcatttactatcttctagctawatttatccattcattacatattttacttctcaattgctatatgccaaacactttgataggcattaggagagtaaatatgaataaaatgtgctcctactatgaaggagcctacatgccaacaagtcagataaagcaatgataaagtgttacggcagaaatttgtgctgaaattgtagaaacccaaggaataagtaactggtgggaaatagatat

SEQ ID NO: 329122 - DNA, 647 bp, Homo sapiens
tacatgtgcacaacgtgcaggttacataggyatacatgtaccatgttggtgtgctgcacccatcaactcgtcatttccattaggtatttctcctaatgctatccctcccccagtcctccaccccctgacaggccctggtgtgtgatgttccccaccctgtatccatgtgttctcattgtttcaacttccacctatgagtgagaacatgcggtatttggttttatgtccttgcgatagtttgctcagaaatgatggtttccagcttcatccatgtccctgcaaaggacatgaactcatcattttttatggctgcatagtattccatggtctatatgtgaacgtggcaaactttaaaaatgtactatttagtagggggaaatatcaggcatgctgagtcttttattagctaattttaatacaaagttaaaaattataagagccatgctagcttaaagacagatatacaggccaatgaaacaacatacagaggctgataataaacccaggcatatctagtcaaatggtctatgacaagggtgtcaagattatacaatggagaaggtgcaaaaactccacaatgggaaaggacagtctctccaataaatgattttgggaaagctggatatttacatgcaaaataatgaaat

SEQ ID NO: 329123 - DNA, 647 bp, Homo sapiens
tacatgtgcacaacgtgcaggttacataggcatacatgtaccatgttggtgtgctgcacccatcaactcgtcatttccattaggtatttctcctaatgctatccctcccccagtcctccaccccctgacaggccctggtgtgtgatgttccccaccctgtatccatgtgttctcattgtttcaacttccacctatgagtgagaacatgcggtatttggttttatgtccttgcgatagtttgctcaraaatgatggtttccagcttcatccatgtccctgcaaaggacatgaactcatcattttttatggctgcatagtattccatggtctatatgtgaacgtggcaaactttaaaaatgtactatttagtagggggaaatatcaggcatgctgagtcttttattagctaattttaatacaaagttaaaaattataagagccatgctagcttaaagacagatatacaggccaatgaaacaacatacagaggctgataataaacccaggcatatctagtcaaatggtctatgacaagggtgtcaagattatacaatggagaaggtgcaaaaactccacaatgggaaaggacagtctctccaataaatgattttgggaaagctggatatttacatgcaaaataatgaaat

SEQ ID NO: 329124 - DNA, 647 bp, Homo sapiens
tacatgtgcacaacgtgcaggttacataggcatacatgtaccatgttggtgtgctgcacccatcaactcgtcatttccattaggtatttctcctaatgctatccctcccccagtcctccaccccctgacaggccctggtgtgtgatgttccccaccctgtatccatgtgttctcattgtttcaacttccacctatgagtgagaacatgcggtatttggttttatgtccttgcgatagtttgctcagaaatgatggtttccagcttcatccatgtccctgcaaaggacatgaactcatcattttttatggctgcatagtattccatggtctatatgtgaacgtggcaaactttaaaaatgtactatttagtagggggaaatatcaggcatgctgagtcttttattagctaattttaatacaaagttaaaaattataagagccatrctagcttaaagacagatatacaggccaatgaaacaacatacagaggctgataataaacccaggcatatctagtcaaatggtctatgacaagggtgtcaagattatacaatggagaaggtgcaaaaactccacaatgggaaaggacagtctctccaataaatgattttgggaaagctggatatttacatgcaaaataatgaaat

SEQ ID NO: 329125 - DNA, 631 bp, Homo sapiens
taatgaatgtactggtcaaattaacatgtagcttcaatgaagggaaaaatcggggagggctggcttaatcaagaaaggttagtcagcatcagtgtagattagtgcttaagaaaacaggctctggaattagaatgaattatgtttaaatccctgctgtgtaattagctgtgcaatcttgggtaagtaacttaactgtttgggatgtttcttactctatataattgggaggattctatgaaaatttatgtagatgtaaaattatactgcgcagcagaaacttaacatggagtagttattttctcttctctcttactgtgcctaaggaygaatcagaaaaatcaaagaaaatatcagaaaatatactgtatatttctggctaaaaataatacatgtacttttatgaatttttgaaaagaacacaaaaaagaagataatggaaaagatcacctgtaattttattccatgaaataaatatacttaagattttgtttattcttttctcagaggaagagagacagagcactcctaccttatctgttgataatatgagtcctcttttttatgatatcaaacattttaggattgcattatctttaatgactgaccagttgtccataataaagattcacat

SEQ ID NO: 329126 - DNA, 498 bp, Homo sapiens
aaccaataaaaaataacccccaccaaggcacatttccacgaagtttcagagcttgggagttaaagatactaccctaagctscagggatggtgctgatgttgataaataagttttcaaacaattataaaggaataaagaggaacagttcaggtctgcaggtcccagcgagaccaatgcagaaggtgggtgatttctgcatttccaactgaggtaccaagttcatctcattgggactggttagacagtgggtgcaacccacggatggcaagtagaaacagggtgaggcatcaccgcacccgggaaatgcaaggggtcggggatcacctttccctagccaaaggaagccatgagggaccttgccttgagagacagtgctatctggcccagatactacacttttcccatggtctttgcaacccacagaccaggagattccctcgggtgcctacaccacaagggccctgggtttcaagcacaaaactgggaggctgtttgggc

SEQ ID NO: 329127 - DNA, 618 bp, Homo sapiens
gctctgaagagagcagcggatctcccagcacagtgctcgagctcttctaagggacagactgcctccttaagtgggtccctgacccccgtgcctcctgactgggagacacctcatacaggagagcactggctggcttctggtgggtccccctctgggacaaagcttccagaggaaggagcaggtagcaatcactgctgttctgcagcctccrctgatgatacccaggaaacagggtctggagtggacccctagcaaactccagcagacctgcaacagaggggcctgactgttagaaggaaaacgaacaaacagaatgcaacagcatcaacatcaaaaaacaaaaaacaaaacaaacaaacaaacaaaaagaccacacaaaaactccatccaaagttcaccaacagcaaagaccaaaggtataaatacatgaagatgaggaaaacccagtgcaaaatgctgaaaattccaaaaaccagaatgcctcttctcctccaaaggatcacaactccttgccagcaagggaacaaaactgaatagacaatgagtttgacaaattaacagaagtaggcttcagaaggtgggtaataacaaactcctccaagctaaaggagcatgttc

SEQ ID NO: 329128 - DNA, 618 bp, Homo sapiens
gctctgaagagagcagcggatctcccagcacagtgctcgagctcttctaagggacagactgcctccttaagtgggtccctgacccccgtgcctcctgactgggagacacctcatacaggagagcactggctggcttctggtgggtccccctctgggacaaagcttccagaggaaggagcaggtagcaatcactgctgttctgcagcctccactgatgatacccaggaaacagggtctggagtggacccctagcaaactccagcagacctgcaacagaggggcctgactgttagaaggaaaacgaacaaacagaatgcaacagcatcaacatcaaaaaacaaaaaacaaaacaaacaaacaaacaaaaagaccacacaaaaactccatccaaagttcaccaacagcaaagaccaaaggtataaatacatgaagatgaggaaaacccagtgcaaaatgctgaaaattccaaaaaccagaatgcctcttctcctccaaaggatcacaactccttgccagcaagggaacaaaaytgaatagacaatgagtttgacaaattaacagaagtaggcttcagaaggtgggtaataacaaactcctccaagctaaaggagcatgttc

SEQ ID NO: 329129 - DNA, 683 bp, Homo sapiens
gtcattaaaatatccttctgctttttccagaataaataatcatcacaattaatttttcttttctaccatttttatacatcgccttctaaatgaaccattctgtctgaaaggttcattaacaacatctaaaagctctactgatcattaaatggcaaggtagaattaccaacaaggaggccctggaatagagccagccaaactgcattgaaacttgataaaatacagccacctttctatgccttgcacataattggagcccaacaaatatgggctgatttgttgatccactgagttggatcggtggggagcatggatgtgcacaggatattcaagcagttcatggatgatgagtgaagtagggtacctacaaatggggagattagaaacaaaatgtttttaaagatatcctgaagcaaaacttcaaacactctgtcatggctatggaccactgagaaacccacacagcagatggctcaatctaatgcccggctaaaatgaaatggctgctttcacaaaagtaccarcttccctccaatgggaagaaacagcttcaaatgtagggcagtctgcatttgtatagggtagggaaagggctgcaacacacaaaagaaacattttcaactcaaatgtcattaaaataagcagtttctctaaatttctctctgcctcttttactaaactta

SEQ ID NO: 329130 - DNA, 615 bp, Homo sapiens
gatccgtttggtgtagaagtctgggttgatttctggggatttctaggttatctctgggtaggtattaaaataattaaagaaaagaaaggaacatacagataaagaaaaaaagaatataaatataccttttgtttatgccggtgttaatgagtttttgttcattttaactctgagagcttagaaaayagggtatgacttatacattctggcatctcaaatgtaagaaatgatacaatctatggctctctgcattttccaagttacttggaacatgtttctttgattttccaaaacacatatttcttagttgcttacagaatgccaggcactgtgctaagcattcagggtgtatattcacttaatacttagagactttgtagcaatttgcaggtgaggaaactgaagcatgcctaaatttacagtgttagtgatatttaggattcaaatcaggcatacttaattccagagctttaactcttaaacactaattaatcatgaatcttataactatatgtggaaatatgtaaatcaagaatttttaattctattttgtagatgaggaaacagatgctttaaatcagcagtccccaacatttttggcacagggaccagttt

SEQ ID NO: 329131 - DNA, 615 bp, Homo sapiens
gatccgtttggtgtagaagtctgggttgatttctggggatttctaggttatctctgggtaggtattaaaataattaaagaaaagaaaggaacatacagataaagaaaaaaagaatataaatataccttttgtttatgccggtgttaatgagtttttgttcattttaactctgagagcttagaaaatagggtatgacttatacattctggcatctcaaatgtaagaaatgatacaatctatggctctctgcattttccaagttacttggaacatgtttctttgattttccaaaacacatatttcttagttgcttacagaatgccaggcactgtgctaagcattcagggtgtatattcacttaatacttagagactttgtagcaatttgcaggtgaggaaactgaagcatgcctraatttacagtgttagtgatatttaggattcaaatcaggcatacttaattccagagctttaactcttaaacactaattaatcatgaatcttataactatatgtggaaatatgtaaatcaagaatttttaattctattttgtagatgaggaaacagatgctttaaatcagcagtccccaacatttttggcacagggaccagttt

SEQ ID NO: 329132 - DNA, 592 bp, Homo sapiens
acaatataaaaatggcaaagtttttaatagtctagttttatcaaattataaacatgcattattctcctagaaggtgtcacaaatacgtatgtgtagttgcatttctagtcaatatctctgtgtgtrtattagatattagatgctgcaatactagctggggatacaaaggtgaataagatatctttcctgacctcagggagcacatattctagactatcaaatgacatatcttgagtaaaaatatatagtaaatgggttccaacttggatgaagccaggagctggaaagcaatatcacatttatagtcccattaaaggtataaacatagaatgttaattactacattttccttttctaatataaaattttaggaactttcatgctatggccttgggtgggtacatcaggaggatcagagaagacataatccctgccatctacactttcatgcctaactctccaggatacttagcaatacatacatacctttcctttatctttccattgcatacagcacagcaattccaaacaattatttaatccatcaaatttatattcatttcctacattgtgataggcattattaatcagt

SEQ ID NO: 329133 - DNA, 592 bp, Homo sapiens
acaatataaaaatggcaaagtttttaatagtctagttttatcaaattataaacatgcattattctcctagaaggtgtcacaaatacgtatgtgtagttgcatttctagtcaatatctctgtgtgtgtattagatattagatgctgcaatactagctggggatacaaaggtgaataagatatctttcctgacctcagggagcacatattctagactatcaaatgacatatcttgagtaaaaatatatagtaaatgggttccaacttggatgaagccaggagctggaaagcaatatcacatttatagtcccattaaaggtataaasatagaatgttaattactacattttccttttctaatataaaattttaggaactttcatgctatggccttgggtgggtacatcaggaggatcagagaagacataatccctgccatctacactttcatgcctaactctccaggatacttagcaatacatacatacctttcctttatctttccattgcatacagcacagcaattccaaacaattatttaatccatcaaatttatattcatttcctacattgtgataggcattattaatcagt

SEQ ID NO: 329134 - DNA, 589 bp, Homo sapiens
tctcactatcttcactgctgccatcttagcaaattaatgttaakctgacattaatttattggattagacaataaattttgttcatcttcttttgccctataataaaagtttttaaactttgttaatattaaaacgcatgttttgctcataattcttcattggcttctcaatgcactgagaataaaaaaagtgtccttattataaaccatgtttgttcctgcatgagctgctccctgtctacctttccacctgcattttttgtttctctcacaccagcttatactggcttatatttctagttccagtggccttcttgctgtcctttgacctaggcaaacaaaaatctttcctctggatttttaaacaatgtttcttcctctttgagcatctgtacccattttcagccttcttctgtagtcagtctgcaggctagcgtttggaagccactaataaaagcctatagtgtcctcttctgatagggccacatatcccagttttaatttcctctgatcgttgttctccttatacttcccattccaacaaatgttttccttgaagataaaaaaggcaatgaaataggagatgacac

SEQ ID NO: 329135 - DNA, 596 bp, Homo sapiens
ttcgcttagatagatatatagagagaggtagattttttttcaytttatgtatatatttttatggcctgagggggccaggagaataaaaatcatctcactttcccacacaggcctgcatggtcaggcatgtacaaagggcatgtagccatgctttccagtttgcaaagggcagctctggttctaaacacttaggaatagtgtacctttcactctcaaactgtcctgaattgaacaataaattgttcccttaggaccaatcaaggcaaatctacctctgcatatgctgaggataagcgaaggcattttcctccctttgcaaatccatcaaaggaccttcctttacaaggttctatcagcctcccatcataaagatgtttgctcattattcagaagctggtgcactgataaactggaatatgttttttttttttaagagagtatctccctcagtcgcccaggctggagtgcagtggtgtgatcatggttcactgcagtcttgacattttgggctcaagcaatcctcccacatcagactcttaagtaactggaaccacaggtgtgcaccaccatgcctggctaattttttatttgttgta

SEQ ID NO: 329136 - DNA, 535 bp, Homo sapiens
aagtctcttattatattaccccttcattcaagaacttcctctggctaccttttgaccatgagaccaatctaattttttctttctttgttttgttttttttttttttttcagatggagtttcactcttgttgcccaggctggagtgcaatggcgcgatctcggctcactgcaacctccacctcccaagttcaagggattctcctgtctcagcctcccaagtagcttgggttacaggcatgtgccactactcccagytaatttttttgtatttagtagaaacaggggttcaccatgttagtcaggctggtggcaaactcttgacctcaggtgatccacctgccgcggcctctaaaagtgctgggtttacaggcctgcgccaccgcgcccagcccaaatctaaatttttgaccctccaacctaacaactgttctttccttgcttatctaaccacttccttatttatctgtaacatgattcctcttgggttgaaataattagaaaaggaaggctataggtgggagtgagcaaagagaga

SEQ ID NO: 329137 - DNA, 535 bp, Homo sapiens
aagtctcttattatattaccccttcattcaagaacttcctctggctaccttttgaccatgagaccaatctaattttttctttctttgttttgttttttttttttttttcagatggagtttcactcttgttgcccaggctggagtgcaatggcgcgatctcggctcactgcaacctccacctcccaagttcaagggattctcctgtctcagcctcccaagtagcttgggttacaggcatgtgccactactcccagctaatttttttgtatttagtagaaacaggggttcaccatgttagtcaggctggtggcaaactcttgacctcaggtgatccacctgccgcggcctcyaaaagtgctgggtttacaggcctgcgccaccgcgcccagcccaaatctaaatttttgaccctccaacctaacaactgttctttccttgcttatctaaccacttccttatttatctgtaacatgattcctcttgggttgaaataattagaaaaggaaggctataggtgggagtgagcaaagagaga

SEQ ID NO: 329138 - DNA, 564 bp, Homo sapiens
ttgcttgaaccccaggagatggaggttgcagtgagccaacacaatgccactgtactccrgcctgggcaacagaatgagactctgtctcaaagaagttattttcttggctacccttgtctgttgctgggtactttgagcgatggcagactgagctggtgaagccccttacaataaagttgagggtgactgcccagaagtggttgccaagatatttcatgctcttgctgacatatattttcttatttcaggctgagttttaaagttctgaacatacacaaagaaaatgggaagtttaaatttcaatgttacctgcagattaaacgtgttttgtgttttctgttttaacaaccaccttggttgaattgctatgaatgcctacaatatgatggtggctgtggagttcatgagtgaaacatgattgttccattaaacacctctttccagtagtttggggagggaataaagaaccattttctaaagctagtcacctggcttcagtgaaatcattattgatagttttgaatatgagaagttgacgcttaatacctactgatccattcaagg

SEQ ID NO: 329139 - DNA, 544 bp, Homo sapiens
gggatattgaatttgggattcactgggtttgacatatatgatattagaaggcctgggagtgtttgcaatcacctggagagagagtatagaggcgagatggcacccttgaacaaggcttagataagtttcaacacagtcaaaatttattattagttatttccaatacatttcttttgatattaacaatcacttaaaaaagcctgaaacttctattttataggattcgcagtctcagagagttcaaaagaattacgcattccatataatttagtgctgcttattttgccaaaaaaaatttccgttaaggtgtgcagttattccttgccattgctttatgagaagccttaacttcttaagagacctgtaattttccttttaatttctgatgtgaagagtctgtcgatagatcttaatctgttaattactgaagctttatactggtttcaacttgctagaaaacatttaaatttrataccattaggggaaatgctttgtatgtttttatacttctctgttctcgaagcattttataaacggcagctaa

SEQ ID NO: 329140 - DNA, 581 bp, Homo sapiens
aagagtctgtcgatagatcttaatctgttaattactgaagctttatactggtttcaacttgctagaaaacatttaaatttgataccattaggggaaatgctttgtatgtttttatacttctctgttctcgaagcattttataaacggcagctaacatttcttatccaaggaatagcacagattttattaaacggggtacaatttggatttccaatccactgctggcctctctccaacagccgacatggcatggtctggcaaaccccaaccttcccaacttcatactatctgcttcttgagacatgaaaatgcagtttataaaarctgcaaaatcctgcaatgcttttaggcacgcttatttgacagagaccctctgaggaaagcatacacatacacaaaacaaaaacaacacatgtacaataggttaagtgttctctgtttcttatgcctatttttttcctaggaccatgtaataagtccatttacaggacatctatacaaatgggcataaacactgcctcaatcaatctccttgacagttgtgcctactttaaaattctactctattctcactgacacca

SEQ ID NO: 329141 - DNA, 581 bp, Homo sapiens
aagagtctgtcgatagatcttaatctgttaattactgaagctttatactggtttcaacttgctagaaaacatttaaatttgataccattaggggaaatgctttgtatgtttttatacttctctgttctcgaagcattttataaacggcagctaacatttcttatccaaggaatagcacagattttattaaacggggtacaatttggatttccaatccactgctggcctctctccaacagccgacatggcatggtctggcaaaccccaaccttcccaacttcatactatctgcttcttgagacatgaaaatgcagtttataaaaactgcaaaatcctgcaatgcttttaggcacgcttatttgacagagaccctctgaggaaagcatacacatacacaaaacaaaaacaacacatgtacaataggttaagtgttctctgtttcttatgcctatttttttccwaggaccatgtaataagtccatttacaggacatctatacaaatgggcataaacactgcctcaatcaatctccttgacagttgtgcctactttaaaattctactctattctcactgacacca

SEQ ID NO: 329142 - DNA, 603 bp, Homo sapiens
cattctcttaatccgtaaatcacttctggagctcatcctagaatccaccctctcatattgtgggttctcagccccttgtgtgactttctgcctagatgcctggaggggtcactgccctggctgccctacccagcatgatgctgcccccaccaaggtgacctgctgtcccaggtggatttctttacccattcccttcatccccattttccatgtccytcactctcacctctctggccctagaaaatgttcggatgtgatttatgggcatctctatctggggcgtggacaagtgcaagtgtgcacatctgttattctcgtttatattagtcatactcttcttttaggtgccattccatttaccattatttttaaattttgtaggtgttgctttattcctgagtgttgagtggatgcttctagggtggcactgaaactctctctgtgcacaccctggtgacaaatgcaggtgggcttcaagaccccatctccacccatagggtgggtacgaccactctgatgcagggtctcttatgagaacaagtaattgttctcatcagatggttttaaaccagcaagaaaggctttattcaagatctttgcagt

SEQ ID NO: 329143 - DNA, 603 bp, Homo sapiens
cattctcttaatccgtaaatcacttctggagctcatcctagaatccaccctctcatattgtgggttctcagccccttgtgtgactttctgcctagatgcctggaggggtcactgccctggctgccctacccagcatgatgctgcccccaccaaggtgacctgctgtcccaggtggatttctttacccattcccttcatccccattttccatgtccctcactctcacctctctggccctagaaaatgttcggatgtgatttatgggcatctctatctggggcgtggacaagtgcaagtgtgcacatctgttattctcgtttatattagtcatactcttcttttaggtgccattccatttaccattatttttaaattttgtaggtgttgctttattcctgagtgttgagtggatgcttctagggyggcactgaaactctctctgtgcacaccctggtgacaaatgcaggtgggcttcaagaccccatctccacccatagggtgggtacgaccactctgatgcagggtctcttatgagaacaagtaattgttctcatcagatggttttaaaccagcaagaaaggctttattcaagatctttgcagt

SEQ ID NO: 329144 - DNA, 603 bp, Homo sapiens
cattctcttaatccgtaaatcacttctggagctcatcctagaatccaccctctcatattgtgggttctcagccccttgtgtgactttctgcctagatgcctggaggggtcactgccctggctgccctacccagcatgatgctgcccccaccaaggtgacctgctgtcccaggtggatttctttacccattcccttcatccccattttccatgtccctcactctcacctctctggccctagaaaatgttcggatgtgatttatgggcatctctatctggggcgtggacaagtgcaagtgtgcacatctgttattctcgtttatattagtcatactcttcttttaggtgccattccatttaccattatttttaaattttgtaggtgttgctttattcctgagtgttgagtggatgcttctagggtggcactgaaactctctctgtgcacaccctggtgacaaatgcaggtgggcttcaagaccccatctccacccatagggtgggtacgaccactcygatgcagggtctcttatgagaacaagtaattgttctcatcagatggttttaaaccagcaagaaaggctttattcaagatctttgcagt

SEQ ID NO: 329145 - DNA, 562 bp, Homo sapiens
ggtcataaagaaattaagaccctcattccagaggtatcctaccctataaccgggaggaagaaatgctgcccaaagtcaacaggaataaggacaggcctcastggtttccccacgcagtctactggcatacagatcataacctttttgtccagtcacatttctacatggctgtccattctttgttgaacctaagcataaaaatggatagttttccctgtatctttgggtcttcactttgaaggctcctgtgtttcataaaacaatgatcaaataaatttgttatgttttcctcattaatctttgttatagaaggttgggccatgacctttatgatagggaggaaggagatcactactgttctgcttctacaccttctacctgggtataggacaagatcgctctggaatgagggtattcaagggagaagggaggaggtgacctttttaggttttatggcatgctttgggtgagaggaattccagtttccatggatcaccctggggaagaggaattccggtttctatggctccctttagaggggaaagagggtcaggagacagga

SEQ ID NO: 329146 - DNA, 589 bp, Homo sapiens
ctaatctatatgctaaaaaataaaaaaaacctgttttctttgttccaatttttatactgcttctctgccagacagccaataaagctaaaacagaattgtttgtttttttaaaaagcctataatgcacagaaaaaaattttgtgcctaggctgaagaaatctatgcatttttagtttcaggataataaaagtttattattatttttaaaattactaatattattaccacacattgcaacaactctaggcccaacaaccattaaaaaaaatgcaagtagtagttaagaatttgaaaactttttaaatccactttttagatatggctttatctgcattagattacttaaaaatgcgacctcactaactgagataatatttcatattgcatctggtatyagatatgccaggatcattgtctatttaaaagcatggtctctgatgattactccaaactcttgctacagagaataaatgagagacaagaagtctgtttcttaaaaatgagaaatatagagtgtatttgcttacacttctgcactcataatttttggaaaaaattgtaatgacttgtaagagaggacagaaaagat

SEQ ID NO: 329147 - DNA, 569 bp, Homo sapiens
aacgggcaaaaacaggcctcttttttcatgttcagagagaggaagagaaaaatctcctgatcagggaatagaaatcttttttgtcagtctaattgggccaaaatgacatgcccacttctcacccaataagagctcctagggtaattccatgtgtactgattggcttagatttatgaggatctagcccgggatctgggaatggggttgacttygctttgttttagttagcaggggaaaggggaaaaaaactaaatttggggttttaggcagaaaaagaggattggaaaccagcagttttactatgtggcaagcacatagtagatgctaaacaaatgaacacttttttctctaccattcaccaaatcctgattagctttattattcatcagagtttgcttttaatggtcttgtcatttctgaacttattcttgaagaataaatatttatcaccatttttgatgttaaaaatatcacatggtctctgaggcaatccattcatctgttcattcattcatgtttcagcatttagcatataatgaacaatgaatacacataaagcaatagctaca

SEQ ID NO: 329148 - DNA, 725 bp, Homo sapiens
gtgatacgtgaaaagatgtcagaagactcttcgtggccacctcagtttcacaggcacctgcagacatggatccctctcctttccccctcctccaccatttttcactctcaggaacttcaatcttttaagagtttaaaacagattttgcactgcgactctaaagtcaaamaatttcaataggattctgacaaatgtttgagatttatcatggatacatttttaccccctttggattattaatgttttagttttttattatagtttctgcaagccaatgaaatttttatgagaacataaaagttaaaagaaaaatttgggtttttaaaatctgtttcctccaagagtttgatcaaatgctatattcccaacaaagatgttattgatgacccaagaggaattgatgtctcatatatttttctcctatcatgttttttttcgtattattacgtttcttacatttctctattttctctttctcttacagttatctctacaaaaataattcaatagatattttctgagtgaatatatgttgaatgaattttagggaaagaaacagtaggtgcccataagtaaagctaatgtaaaagtagctgatattatgtgtgacataaaattagtttcaaacatttattgaaaggcacttcactttttaaaaagatcatatagctcttaataaatattaatgtgtggtttaaagcaggtcaacattcataaagattagg

SEQ ID NO: 329149 - DNA, 725 bp, Homo sapiens
gtgatacgtgaaaagatgtcagaagactcttcgtggccacctcagtttcacaggcacctgcagacatggatccctctcctttccccctcctccaccatttttcactctcaggaacttcaatcttttaagagtttaaaacagattttgcactgcgactctaaagtcaaacaatttcaataggattctgacaaatgtttgagatttatcatggatacatttttaccccctttggattattaatgttttagttttttattatagtttctgcaagccaatgaaatttttatgagaacataaaagttaaaagaaaaatttgggtttttaaaatctgtttcctccaagagtttgatcaaatgctatattcccaacaaagatgttattgatgacccaagaggaattgatgtctcatatatttttctcctatcatgttytttttcgtattattacgtttcttacatttctctattttctctttctcttacagttatctctacaaaaataattcaatagatattttctgagtgaatatatgttgaatgaattttagggaaagaaacagtaggtgcccataagtaaagctaatgtaaaagtagctgatattatgtgtgacataaaattagtttcaaacatttattgaaaggcacttcactttttaaaaagatcatatagctcttaataaatattaatgtgtggtttaaagcaggtcaacattcataaagattagg

SEQ ID NO: 329150 - DNA, 498 bp, Homo sapiens
ttcatgcagctggagacctggggaagagagagtgttttttaatatgagggtcgtccagctgtagaattcrgaaagggctggcatttttctagtatgagtttcctgcaactggagactcggagaggagctgatgttctagtttgagggtcgtgcatctgaagactcggggagaagctgatgtttttgtttgagggccctgcagctggagacccaaagaggagctggtgttgttctagtttgtggttcatgcagctggagacctggggaggagcaggtgttttttagttctacagtcctgtagctctagaacccgggaggagctggcatttttctagtatgagtgtcgtgcagctggagacctggagaggagctgatgttctagtttgagggtcgtgctgctgaaggcgcagggaggagctgatgttctagtttgagggtcgtgctgctgaagatgcagggaggagctgatgttctagattgagggttgtgctgctgaag

SEQ ID NO: 329151 - DNA, 515 bp, Homo sapiens
ttgtgcagctggagacctggggaggagtgggtgttttttagtttgaaggtcgtgcagctgtagaaccttggaggagctggcatttttctagtatgagtgtcctgcatctggcgagccagagaggagctgatgttttagtttgaagatcgcacagctgaagactcgaggaggagctgatgttgctctaatttgaggttcatgcagctggagacctggggaagagagagtgttttttaatatgagggtcgtccagctgtagaattcggaaagggctggcatttttctagtrtgagtttcctgcaactggagactcggagaggagctgatgttctagtttgagggtcgtgcatctgaagactcggggagaagctgatgtttttgtttgagggccctgcagctggagacccaaagaggagctggtgttgttctagtttgtggttcatgcagctggagacctggggaggagcaggtgttttttagttctacagtcctgtagctctagaacccgggaggag

SEQ ID NO: 329152 - DNA, 529 bp, Homo sapiens
aaaaagcaagaaaaactttccactttctctgcatctttaggataaaaacaccataacagagcaatgctgtggtccccagcctagctgctccagggtctagttggttcctaaagaaactgattttaagtttttctttgatatatactttaaggcaataattaggagctctctggggttgaattttctcgtgttttaaacccaatagaaacacagactgacctgtagcatttgtgaatatgctagtataattaattccccaaatcgagtctctgcctttctccaggagtcctgtgaggtttacagattaattcagttgcagacttaggatccttactgtgatcctcttcagggaaataaaaaaggcaggagccttttggcttagactgccagagtaagaacaatargccttaacgaagttctttttctttgccccctttttgaatgatgactttttacttcaatgcaggaaggtttcatgaaggataaggaaaaagatcccctgttctgtttgtgtacaagtgcgtattta

SEQ ID NO: 329153 - DNA, 631 bp, Homo sapiens
caaggagaattatttcagtttctagcaacattgatttgactagcttgtgtttttccagaatttttgtgtgtggtattatattaagatacttaaaaattattctgggtgcaattttctgatgtacaaaattagaaaactaatttttctgcagtgcatttttttcttataattgagttataaagaagaaggagggaagaaaaagaatcagaagttaaagtcctgattcatttgctcaattgcttctcagaagtgattatgaggtgtctgtttcacaatatattgtgtattcactaaactactcctaatcagctaagtccagatacataatcaacacaaacattttcaacaatggcaagtggcacaacggggctctaacttcccttgggcatcataaaatttttaatagtgccaattattgtaaggtatttttttttcctgttttggcgggaggggggttaatccaaccagacccatgtctggaaatctggattacctcaactgcatagattttgaagaccccagagacattattaaggtagttcgcattctcttaaactgtaaattgagttacaaaagtaaaacctaagaaactgtacagatgcggaatcaagaagytttatcaaccctgtgc

SEQ ID NO: 329154 - DNA, 620 bp, Homo sapiens
acttacccttgagatccctacattggggccttggttgcctttcatttctctaagcctctacatgttttgcagggcctactagctacatgtatttgatttttaaaaatacggcaaatatccccatggcagtcttaatcatttctgactcctttaattaatcccaagggaatttaagttggcctccattactttctcaggacaatatcatgagttctaatacctaaaatatgtttgatatctgtttaaaccactgtgaactcaattatgggattagaaattagatttaaaagtagccaaaaggggmcgggcttggtggctcacgcctgtaatcccagcactttcggaggccccggcgggcggatcacgaggtcaggagatggagaccatcctggctaacacggtgaaaccccttctctactaaaaatacaaaaaattagccgggcgtggtggcgggcacctgtagtcccagctactcgggaggctgaggcaggagaatggtgtgaacccgggaggctctgggcgacagatcgagactccgtctcaaaaaacaaaacaaaacaaacaaacaaaaaaacagtagccaaagggtaaatataaatggttacagcatttttaaaaaa

SEQ ID NO: 329155 - DNA, 620 bp, Homo sapiens
acttacccttgagatccctacattggggccttggttgcctttcatttctctaagcctctacatgttttgcagggcctactagctacatgtatttgatttttaaaaatacggcaaatatccccatggcagtcttaatcatttctgactcctttaattaatcccaagggaatttaagttggcctccattactttctcaggacaatatcatgagttctaatacctaaaatatgtttgatatctgtttaaaccactgtgaactcaattatgggattagaaattagatttaaaagtagccaaaaggggacgggcttggtggctcacgcctgtaatcccagcactttcggaggccccggcgggcggatcacgaggtcaggagatggagaccatcctggctaacacggtgaaaccccttctstactaaaaatacaaaaaattagccgggcgtggtggcgggcacctgtagtcccagctactcgggaggctgaggcaggagaatggtgtgaacccgggaggctctgggcgacagatcgagactccgtctcaaaaaacaaaacaaaacaaacaaacaaaaaaacagtagccaaagggtaaatataaatggttacagcatttttaaaaaa

SEQ ID NO: 329156 - DNA, 620 bp, Homo sapiens
gcttctggctattcccctgtttttccatgtgcactgrcaaattttacagggtactagctacataattgcccgctgcttttatgagctcagacatagcattgttggggccaggtgcttttcccaagtaacttttttttttgctgtgggtttcagatgtggtttcaatttcttccctaaggcttcagaagcaggtttttcttcagtgtctttaactgcctcattattgatcattttctctggaatatttaatatccttttctaatgtctatgagcttgaagtattctttcaggtttttttttcttttttatatataaacatccctttgccttcagacagaattaaaatttatagcgtctgaaactctgcatgtcttagaaaagatgactatccacccctagatgctctttctctgaattccatctgtaatttgagaagcacattgaatgaggatattggaacaaacctagaaatgtctttttattgcacctcagtggttatatttttttataattggtatatatgagtacagaccttccacatggactgtgacttgaaaagagggaaagaagttttgctttgaataattacttcttttgaagatcaaatattacaacccctt

SEQ ID NO: 329157 - DNA, 620 bp, Homo sapiens
gcttctggctattcccctgtttttccatgtgcactgacaaattttacagggtactagctacataattgcccgctgcttttatgagctcagacatagcattgttggggccaggtgcttttcccaagtaacttttttttttgctgtgggtttcagatgtggtttcaatttcttccctaaggcttcagaagcaggtttttcttcagtgtctttaactgcctcattattgatcattttctctggaatatttaatatccttttctaatgtctatgagcttgaagtattctttcaggtttttttttcttttttatatataaacatccctttgccttcagacagaattaaaatttatagcgtctgaaactctgcatgtcttagaaaagatgactatccacccctagatgctctttctctgaattccatctgtaatttgagaagcacattgaatgaggatattggaacaaacctagaaatgtctttttattgcacctcagtggttatatttttttataattggtatatatgagtayagaccttccacatggactgtgacttgaaaagagggaaagaagttttgctttgaataattacttcttttgaagatcaaatattacaacccctt

SEQ ID NO: 329158 - DNA, 663 bp, Homo sapiens
tgatgtgaaactcaaaagaggtgctcgctggagcatttcagatttcagattttcggattaggaatgctgaaccagtaaggataattcaaatattcccagatccaaaaaatcaaaaaggatgcaagcatttcagataagggatagtcaacttgtattttctaatttatctaattcattttttctccaaaaaatccattattaaaagaggatatgtttatgcagaagatggagagcctggaaatgttttatgtaaaatttcataaagctatttacatagttccacaggaaagcctattttaaagcaattatatttggatcatgaaaaatttttatgaataaagatctagtttsaagacaacaaacaaaagataggtagaaaatagcaattctctaaatgggaaatgttaacaatcagatctgaagacagatttgggagctttcttatttatcttttttataagtgatttttgaaaggcaaatttacagtaagacctataagattggagaaaacactaacatcttctagatcaaagccatcttgttaatttgcaggttctgactcattgggtctggggtgggacccaggattctgcatttctaacaagctcctgggtgatgcagaggctttatcccgagaccacacactgagaagaaagacaccaa

SEQ ID NO: 329159 - DNA, 499 bp, Homo sapiens
atctttgctttttagtgagctttggctggtcattttgactagactgtaaataaggcaggtggtaggcctcctgctagtcaaacccccagggctctttctttataagaggctgggactctcttcctgctcccattgacctcctgggattcagccagtttcttccacctttcaatctcccctccccctagactggcacatagctgacactcaaatatttgttgaattaattaattaaggagtgatcgaagagaacaatctctccagcctcacatttctttgcagtctccaaaattgaacacactaagtgatcagtgccycttgccgttataacaaatataagaaaaggacaaggttctagactcttaataagttggctccatcattgaccctattctctagtttctgaaacttcatgtgttagctgatacccaggaaccctctcagccagaggctcctgtcaattgactgtggcttttaggctaagctgcttagactcatg

SEQ ID NO: 329160 - DNA, 275 bp, Homo sapiens
tgcaccttccttttgatggagcagttttgaaacactctttttgaaggatctgcaaatggatatttggagcgctttaaggccttctgtggaaacgggaatatcttcaaataaaaactggacagaagcattatcaaaagtttttttgtgatgtgtgcattcatctaacagagttgaaccattttttttgatagagcagttctgaaacactctttttgtagartctgcaagtggatacttggaacgctgtgattcctatggtggaaaggggaatatct

SEQ ID NO: 329161 - DNA, 587 bp, Homo sapiens
aaggacaaaagtaggtccttgcaggtaccttgcttgttcactcagcactcttggggattgttaaggctctacttcagatcccacttctgacaccatctgttaaaagaaaaacttcagctgaattaaatttaaagaaattcaattcagygatcaacaattcatgaatagggcagtccctggaatcacagcagattcagagagatttcagcacagccacgtggtgaaagatttatagacataaaaagggaaatgaggtacagaaattggaggtgaggttcagaaacaactgaattggttacagcttagcatttgccttagttgaacacagtttgaacactcagtagtgtaagagtggtagaagtatggctgctgggattggccaacactcagctattgttacaagtgcatactcctaagttagatttttcaatcttgcctacctagtaagttaggttgcagtttgtacacaaagattcaaatatagaagtatggagtccttctcaggccatatttagtgtgttttaacactctaaaatgtataaaatcaacctgaaccccaaccaccttgggaatattttctcagggtc

SEQ ID NO: 329162 - DNA, 598 bp, Homo sapiens
acaaattaccacattatgttaacatatatggatttaccataatcaacataaccatagcccagttattatttacaattatttagatttatgaatagtgctccaaggagatttttagcttacatttttcatatagctttaacaatctccttaggatatatatatttttgattgyctccagttatatttttaatctttatttacaatttattctaattttcaggctttaagtttaccttttgggggaatttattctttaatcttgttagaacttgttttggtgactggtagatgggaacaattatgaatggtgtcattacttgtcttagtctgcttgaactgccatcacaaaataccacagactgtttggtttaaacagaaatgtattttcttacacatctggaggctggaaagtccaagatcaggatctgtgaatgtttgctatctggtgagcgttctcttgcagacagtcaagttctctcactctgtcctcacattgcagggaaagagagcaagctctctggtgtctatgttataagggaactaattccatcatgagaaccctgcccttatgacatcatctaaaacttgttacttccca

SEQ ID NO: 329163 - DNA, 564 bp, Homo sapiens
ctggccttgggaaatgtgaccacagaatcagatatacacatgagattaaataatacatgtgtatgtcatttaaatatctagaaaagttatgacttcaccaggtatgaakaatataaaaagaactttgtcaagaatcatacagtaaatatatttttgaatttaatctagtacctaaacaatcagagtagggaggttagatattaaaatcaagctaaagatgtaggcaacacggatctagaaaacatggattgcatggccatttcacttagagttcatgggcttggaaactctattaacataaattttacaacgttagaatttgttcccatattaatgagggaaaaataaacaattaccctgaatatctgaagctccagatctcattttccagtcaaaatctctgataggtaaacaatctgaaaaagtagccacaactcactgatatgataaccccatttgcttaagagaatgtaattgtttttatgatttttttatcccaggaaaacattgaaaaaaagtttagagatgatgaagtatatgaaaactataatatgtatacttaag

SEQ ID NO: 329164 - DNA, 588 bp, Homo sapiens
agggtaccctagcttccgcattcctgagcaagttgggaagccatagtgtccaactctctcaatatgtactaatgaaacagagatacttttgccaaaggatattcttcttgatggtaaaaatattagctgacatttgttagctgacaaaaatgaagtatattaaatatgctaagggaaactgtggttcaagtgatagagatttttaattctttttgagatcatgtaattatacccatgacaaggtaagtttgattcagaataatttctgtcaaaataaaggatgctgttgatggcctgtttgtcccctgcctattgactattattctcaaactcaagcaaaattaatttttaaataacaggataagaaatacgagtaagtgctgccttttgtggggcaggttgaaagtatggaaaaaattcagaaaggacctagtcaggaatagatgasaaaagaaatatatatattattttggccattgatatggtttggctctgtgtccccacccaaatctcatcttgaattgtaatccccacgtgtaaaggaaggaacctggtgggaggtgattggatcataggagcagcttcccc

SEQ ID NO: 329165 - DNA, 371 bp, Homo sapiens
caggaagctgacaatcatggcggcaggtgaaggggaagcaggcactttcttcacaaggtggcagaagagagggaagtaggagcacaggaaaaaactgcctgttttaaaaccaaaagatttcgtgagattcgctatcacgagaacagsatgggagaaaccaccccccccataatcctatcacttccctccctcaacacgtgggaatgggtggggacacagaaccaaagcatagcagcatttatgttaattctgctacatcattcctgttagaccatctctctccgttttgttttcctagaatagcccattgcttgtattaaaatcatttctaggtataaactttattctcagtaaaaccttgaaaatgtgaa

SEQ ID NO: 329166 - DNA, 567 bp, Homo sapiens
aatataaatattttatatgaaaactaaaatcttctgatatggcctcaaggcatgttggtcagcctcatccctttcacaaactggcgtcagtgactgttactctcggtttccttccttgtttcctcacatatactctccctattcctcccccaaaatcattactgctagttaaaatagatctttctttccattttttattcttgtcaccattttcaggaaataactattgaccctttctttgatcaaaagcaactcaccaagtacaatgtttttttcttacctgaggaaggttattttttcatgttggaaataaatgaaagattagaaaccaaaccacacacaatcttgcatactgcagtcaccaaggaggtaactttccaccattacttgagacaaatgcgtgtgtgcgtttttaatctagtctgacctcagagcctctaaatagatgaagaaatacttgtgtaattgaaaaaaaaytgttctctcagccattattcaaaggacactaactcaaataacaaatcttaaagctctttaaaatgtaaaaacattttcttggtggaacat

SEQ ID NO: 329167 - DNA, 639 bp, Homo sapiens
caagtaaaataactcattcaaggttacataagtgggttttcaatccttattcgtctagttccagtgcccatgacctggctctctggaagggaaacaaactgaggaagagaaaaagtaaaataagcagtgaaggcagaaattgctaaactctgtagtgctatcaggggcacatgggcatcttcctggaactagcactacaagagtgtagacctctccctacatcaacaccatttctttgtagtgagctatagagaaacttagaaggcaagacctcaactgcctaagtggacataaatgtaaaatttttaggtcttgtgcaggtcctgactcagagtgaagaacctgaagcccttgctgcctcaggtgaggaacctaaatggatgtcaaayaaactcagtaatcaatgtaaacggtaatgtaatattttattaaatcaaaattaatgcaggaaatccatgatgaacaatatattaacattttaaataaagacaaaatcaatattactgaggttttcttttgcttcatgcttccatgtggcttggcaatagtgctgtgttgttactgatcctatcagaccactgagcatctgctagagatgataacaatagagtcaaagggtgagtcaaagagtgcatgcat

SEQ ID NO: 329168 - DNA, 555 bp, Homo sapiens
gctattagaacagctacaattgtttatgcttcttctaagtttgatatttgtatggtatttttaaaattatatattatgaactttttgtacatatttgagtattttgatattttacctataaaaaagtacaatgtttactgaaaaaataatagaataattatttttaaaaatgtagaaattaacaattgcaggcaatatcacttcccagaaataatttccagttttattacattgtcatcacggactaaattatacactatttttcctttttggaatatgctaaggttttcattgaggcccaatacttttgtccactttggctattattccatgagtatttgaataaatatacacatattagttatcctccattaattgtttatgtctcctaaatctcacttatgttttttcacttgatcttccatcagctgaaaaaatggcattataaattgtattttaaaaaatgcttctgaagtttttgctttctgaattttgcmtacatatttaataaatatttatgacagttacttatttatagtgacctttttattgata

SEQ ID NO: 329169 - DNA, 634 bp, Homo sapiens
tttacaccttctttctgtatcagggtaagtgggggtcttccccaggagggttcttaccaccctgtttccctcagcaaaatgagactgtcccttttgcctctgtaggcaatcttctgaacaaggcattcctgatattcttatctcatcttattttatcttatcctcttctctgtaccttgtttacatgcttctggaacacttgtgtgtcttgcacccatctcctgccttatttaggcaatcctaaaagaagamctctaggatggattggcagagaactgctggcatattgagccctctctctttgtatctggaactttcataattaccttcattctccaggccaattttgcacttatctttgttctccacttcaaaatacatttacctctgacagaagctgagttcataaaagggaccttgtccagtggtacttatgaggcaggagacatgatatagttaaaattataaactgcaatcaatatatagttatatactatatgtaatcactatatcactcccgggttcaagtgatactcctgcctcagcctcccgagtagctgggattacactcatgtgccaccacactcgaaaaatcgtatatgttttaaaataggaatagattttctaagctaaa

SEQ ID NO: 329170 - DNA, 542 bp, Homo sapiens
aatcccagctacttgggtggctgaggtaggaaaatcacttgaacttgggaggcggaggttccagtgagctgagagagtaccattgcactcccagcctgggcaacaagagtgaatctctgtctcaaaaaaaaccccaaaaaaacaaaaatcactgccccaccaactttttcacataggatgattaaggattccagagcccatgctacctctaagggytcctacccctgccacaccacacatatcttgacagggcctgttatggagaagaaaatgcccagtaaattaatatcacaatcattgccacatacccaccaaaagactcaaattaaaattttgacaaaattaagtgccaagaagaatgcgaagagttgggagttatcagacattgtaagactgtcagttggtgtgttaacattgagatgaaaccaataatacctggtaaaactgaagatatgtttgccctgtaacctatggtttcacctcttggtttatactgtacataaatacacactaattgtaaccaaatagaaatacaaacatat

SEQ ID NO: 329171 - DNA, 550 bp, Homo sapiens
agagagcattacataagatgacaaaactcaaactaaacatatcttcactgttatatgtaatgaaataaaattaataattaaagcgaaagacttatattggacaagaaaaaatgtgttgatgattctgttagctccacccaaatcctttatctgactttcagtattctgttctgtgctccaggagatgaacccctaagactttatcattcaggttcctctgccagctagctcstagttgaattggattaatgtaaggcactggcagtgggtcagatggcaggagagagagaaatcctgatatctattccctgctttcttcctaattcttcatgaatgtagtttctaccagataactcttctccacagcaccagctcatcctaggcttcaataatgcaaattatacaccttgtcccttcaggtctagggacggtaacagcgtttcactgtttctggtgtctgagtattacagcaacctttgctggggttttaaatcctgctctaactgaggtaagtagtccattcaccaaagtctctattgtggaccattga

SEQ ID NO: 329172 - DNA, 515 bp, Homo sapiens
attgtttgaaattgtggtgctggcctaacagattaaactattagccaatacataagccatatttccaaaagccagaacacgtaggatcaggaaataagaagtagaattattttacctaatattctatttacagaattttatttcccttcctggaaactcgtatttagtagctttgraggttctcttttccaaggaaggaacatttatttctagaaatatggctatgtttccattaaatttggacctgaaattgcacccttgctatttttagctcttaatgccattgacataactggcaataaagagtttaactatactgaatggattgattaattctgattaacaaaggaaaattaggcaagtaggcctagttggaatccaggagatctgctgtggagccttttagcacttatatgtcccataaagagccaccaaataaagacagtatcactagggactttgatcctatgaaatgaagatttgggtcatcccatgagacaataattcctgtacta

SEQ ID NO: 329173 - DNA, 515 bp, Homo sapiens
attgtttgaaattgtggtgctggcctaacagattaaactattagccaatacataagccatatttccaaaagccagaacacgtaggatcaggaaataagaagtagaattattttacctaatattctatttacagaattttatttcccttcctggaaactcgtatttagtagctttggaggttctcttttccaaggaaggaacatttatttctagaaatatggctatgtttccattaaatttggacctgaaattgcacccttgctatttttagctcytaatgccattgacataactggcaataaagagtttaactatactgaatggattgattaattctgattaacaaaggaaaattaggcaagtaggcctagttggaatccaggagatctgctgtggagccttttagcacttatatgtcccataaagagccaccaaataaagacagtatcactagggactttgatcctatgaaatgaagatttgggtcatcccatgagacaataattcctgtacta

SEQ ID NO: 329174 - DNA, 614 bp, Homo sapiens
tattctttgacatatgaccaaaaacatacagccaaagatcagttttgcttcggcaaatccagtccaagaaaataagttatctaaaggctcagaagtgctttgtcctagttctttctcaggattcttaatcaataatcacaactctgtaccaattattggtaagtaatatatatagattatcagagactgcagtttctgagagtgtgtctgaattaaccctttcagtgttttgtgaacttcagttgtaaaatattagcagaatataaaataattttaaatctttaaaattttaaagtagggaaacattgagcaaacacttcaccaaagaagatatgcaagtggccagtaagcatatgaaatgatcaacattgttattcactggaaaaatgtaaattaaatccacaatgagatgcccctacmcatataactaaattggctaaaatttaaaaattatagacaactgaatgtatcaagtgatagtgaggatgtggaccacaaaactctcagtttgctagtggggatgcaaaatgatacagcaactttggaaaacagtttggcagtttcttatcattttaaatattctcttacatacaacccagaaagtcctctgttaa

SEQ ID NO: 329175 - DNA, 282 bp, Homo sapiens
ttctatatagagataggaggttaatattagcaatttaaaaagaagaaacaaaatcaatgaaagaacataattttgcaaaagacatgaaaggcaatacaytgtttaattccatttatgtgatattctggtaaaggcaaaagtatagagacaaatcagatcagtggttgccagggtatataagtaggggttggagacttaatacaaaggaaatggaatttatgggggtgatgggagtattctgtatatcgattgcagtggtagttgtatgattatatacattaa

SEQ ID NO: 329176 - DNA, 282 bp, Homo sapiens
ttctatatagagataggaggttaatattagcaatttaaaaagaagaaacaaaatcaatgaaagaacataattttgcaaaagacatgaaaggcaatacactgtttwattccatttatgtgatattctggtaaaggcaaaagtatagagacaaatcagatcagtggttgccagggtatataagtaggggttggagacttaatacaaaggaaatggaatttatgggggtgatgggagtattctgtatatcgattgcagtggtagttgtatgattatatacattaa

SEQ ID NO: 329177 - DNA, 282 bp, Homo sapiens
ttctatatagagataggaggttaatattagcaatttaaaaagaagaaacaaaatcaatgaaagaacataattttgcaaaagacatgaaaggcaatacactgtttaattccatttatgtgatattctggtaaaggcaaaagtatagagacaaatcagatcagtggttgccagggtatataagtaggggttggagacttaatacaaaggaaatggaatttatgggggtgatgggagtattctgtatatygattgcagtggtagttgtatgattatatacattaa

SEQ ID NO: 329178 - DNA, 454 bp, Homo sapiens
ttatgaacaaattttggcaacaatttgaaaatttagaaaaaaatggacagattctaagaaaaatactacttactaaagcagacactggaaaaaaacaaaatatgagtaatctgattaacattaataaaattaaatatttaacatattcagttttggaatagtccatgccaggatttgcctgcaagttcttctaaaggtttaataatggaatagtaattcttttataacacttagagttctataacatttagtttctgtaattgcagaaacccttyccaacacattttatgacggccacattatcttgataagaaatcttacagggcagtacatgaaagaaaaacacaatccaggttccatacacaaattgaagtaaaaatcttatgcaaatattttttaaacaaattcagtagcatattttaaaagtttaatgtagactaacaaacttccttta

SEQ ID NO: 329179 - DNA, 454 bp, Homo sapiens
ttatgaacaaattttggcaacaatttgaaaatttagaaaaaaatggacagattctaagaaaaatactacttactaaagcagacactggaaaaaaacaaaatatgagtaatctgattaacattaataaaattaaatatttaacatattcagttttggaatagtccatgccaggatttgcctgcaagttcttctaaaggtttaataatggaatagtaattcttttataacacttagagttctataacatttagtttctgtaattgcagaaacccttcccaacacattttatgacggccacattatcttgataagaaatcttacagggcagtacatgaaagaaaaacacaatccaggttccatayacaaattgaagtaaaaatcttatgcaaatattttttaaacaaattcagtagcatattttaaaagtttaatgtagactaacaaacttccttta

SEQ ID NO: 329180 - DNA, 453 bp, Homo sapiens
cattttaattgataaacataatcttcaaaaaaaaaagaaaaaaatctgcagcaaaatccttcataatgtgaaatgttaaacatcttgtctgcaagataaaatatgaggatagattacttattctcattactccatcccactttattctaatccattcatagccagtgcgagacggcatggagtaaagactaaagaccagaaaggtaaaatgccactcccattttcacactatacatttgtgtttatgaaatgtcaaagataattttctacttaattattagaattaatatcacagttttgtgtggtttctaagatcaatattttaaaaagtgyatttctttgtacaataaatagaagattaaaatataaaaaagacacccctttgaacagcatcaaaacatcaaatacttgagataaatttaatcaaatatatgcaaaatctctacagaacta

SEQ ID NO: 329181 - DNA, 418 bp, Homo sapiens
ggttacattttgggagaagagagagggaaataatatggttagggcatgaggagcctcctatgtgtcctttgagtgtttcttgaaccaggttgatagtttcatgggtgtgttcactctgaactaattccttgagctatacagttatgatttgcacaattcaattatattatatttcagtggaagctwatgaaagagaaacattgctgctaaaattcattaagtgaaggcttatggggaagtagaccttcatagcatcctatacttgcaaaagtggcaatctaactgaaggatgacatcagtatcagatatcagatatcacacaaaccaatgctcactcttactgtctcaactgtgggtcaacctgacattacaaattttctgatgtagtacaacatgaggtacaaaatttcacctgtga

SEQ ID NO: 329182 - DNA, 418 bp, Homo sapiens
ggttacattttgggagaagagagagggaaataatatggttagggcatgaggagcctcctatgtgtcctttgagtgtttcttgaaccaggttgatagtttcatgggtgtgttcactctgaactaattccttgagctatacagttatgatttgcacaattcaattatattatatttcagtggaagctaatgaaagagaaacattgctgctaaaattcattaagtgaaggcttatggggaagtagaccttcatagcatccyatacttgcaaaagtggcaatctaactgaaggatgacatcagtatcagatatcagatatcacacaaaccaatgctcactcttactgtctcaactgtgggtcaacctgacattacaaattttctgatgtagtacaacatgaggtacaaaatttcacctgtga

SEQ ID NO: 329183 - DNA, 418 bp, Homo sapiens
ggttacattttgggagaagagagagggaaataatatggttagggcatgaggagcctcctatgtgtcctttgagtgtttcttgaaccaggttgatagtttcatgggtgtgttcactctgaactaattccttgagctatacagttatgatttgcacaattcaattatattatatttcagtggaagctaatgaaagagaaacattgctgctaaaattcattaagtgaaggcttatggggaagtagaccttcatagcatcctatacttgcaaaagtggcaatctaactgaaggatgacatcagtatcagatatcagatatcacacaaaccaatgctcactcttactgtctcaactgtgggtcaayctgacattacaaattttctgatgtagtacaacatgaggtacaaaatttcacctgtga

SEQ ID NO: 329184 - DNA, 508 bp, Homo sapiens
gtgatgccacatagaacatgcacgaaacttctctccagcaattgagttgttaggataaaggctcttgtcttcgccttctttctctcacagccaagaatattaaggaacgtggacacaaaggatgaggttggaacagaagtttaataagcaaaagaataaagctctccccagcggagaggggacccgaaagagggttgcaaactaggaggctgaatctgggggttttgtgaactgggaaggggaagaatgtgctcactggtctgtgagctgtcttggcgaaagcactacttcgcttggcctgggaccttagcctgggaccaatcagaggctgaagtgaaattttggcccaagaccaatcaggggctgaagtgraagtttggcccaggaccaatcaggggctgaagtgatgattcatagagcctcggctcacagtccaaagcatgtccagaaaaggaaagtggccgccggagcctgttggtccaagctgcaccgatttgtaagcccccac

SEQ ID NO: 329185 - DNA, 636 bp, Homo sapiens
gaatcaaaacaaacgtgtaactctttgagaggaatccacacatcacaaagcatattttcagatcacttgtttctagtttttaaagcatgatattcrgtttttcactatatgcctcatcgggctcagtaatgtctcatagtagattttacaaaaatagtgtttcctacctgctgaatcaaaacaacagtttaaatctgtgagatgactccaaacctcacaaagcattttcacagatagttttttcctagtttttaccgcaggatattcagtttttcaatataggcctcaatgaactctgaaatgtccattcataggttctataaaagtgtattcccaactcccagtataaaagcaaaggtttaactctgtgaaatgaatctacgcattggaaagcacacaaatagtttgtttttagcttttatggtgagacatttgattttttacgattggcctcaatgggctcagaaatgtctctttgcagattctccaaaaattttttttcatttttctgaacaaaaataaaggtttaactctttgatatgaaatcacacatcacaaagaattttcacagatagcttgtttctagggttcatcactggatatcgggtttttcactataagcttcaatggagtgtt

SEQ ID NO: 329186 - DNA, 542 bp, Homo sapiens
aggcaccgggctaaggggtgagtgtcagccaagtcatcagctatcagaacaggaagccatcaggtaatatatcaagttgatatattgagaaggagcaggatctacctattatataatatagarataagcactcagatatatagattaaaaatagtttagaaaatttaaacatttgattattcaggaagtagacctgggagcattggagaaacagggtgggggagtagactgcatgaaaaactcttagtttgtgatttttcaattatgcacataggtttcttacataacatggaaaattcaattaaaaagagacaacattgtgttctgatgtcccaaatgtttagtgattaattagaaagactcacaaaaccgagtgaagctgttatactcttagtttattacaacaaaaagatacagataaaatcagcagcagaaaaaggtgcacaggacagagtccaggagagacaaagcacaagcttccagttgtcctctcccagtgacatcgtgtggacagtgcttaattcacccagcgatatgtggca

SEQ ID NO: 329187 - DNA, 496 bp, Homo sapiens
tggatcccatggcaacgcctcagcgtctggcagtaacaggcttctgtgcccagaatctctaggtctggaggtcctgccttcaccagcctctcacaaaccagaggtacctcccattggcgcctgatggattagggaggctgttcttccagctgtgacagatccagcctaggagcgctcctgggtcwtcttagttgtttcttcccgcacacctgccactcaaagccacaacccacttgcacgccaccttgaggacaccttaaaatgaccgtctagatctgaaccgcgctgagggaatggtcagctttattcccactagatggcttggcccgaaggacctagtgaccatccagacaaaaatttcttcctaaaagctgcatgtgtctgtggtctctaagaggcaaaactaaaccctaaagaaaaagccaacccacccccacctccaccacaaaacaaaaacaaaaacaaaacccaccgccaacccacctttcatgtgagg

SEQ ID NO: 329188 - DNA, 574 bp, Homo sapiens
gattatggaaatactacataatggtgtgccactgccacctcttcccaactccacgttcagtgacatcatgttgtagcttaaaatcggccatggtagaagtatctgtaacaacaacaacaaaaaaaatcagcaaatgctacaaatcaaagtttgtcatagtataagtcacttatgacattgacagagtgaagttctgacatgtatttttattgtttcattttcatcttataagcaaaaatatcaaccaacattcatggtaacactgcacttgctcattcatgatatgtgacttctttgctgaatcagatagtatgcaaccatttatttgtagtctgattctgtcaaatcttggtagaactgcaaccatagwtggttatggacacagaagtttgacaaacagcagtgaaaacattctgtgagaataaattggctatatagaatttacagtgaagatggttgtatatttgtaaactgtgtgctgcacatcctttatatcagtaaaatttaataatgtatgtgcctatataaaatgcatacttttttggcaagccacctgttaagcatttaccagcac

SEQ ID NO: 329189 - DNA, 567 bp, Homo sapiens
ggttatttgttgtttcttatattgatcaatgcaatttctaggtactaagtcactaaataatagacaataaaaaattgtggaagcatgaggggttttgctgcaaggaaccaaaaacataaaggtgttatttggtgctattcaatgtacataccagtgtttgcaacatgtaatattccagaaattatttttggcatctcctgggaaggggagctctctgccaacccatcatgggtattttttcttttccaattcttatgagcataaggacttttaggtttgccttccaatatacaagtaactgcagagcagccactccattgaaccctggacacttcttttcttccaagacctaaaagcctatccattctccaaaatgcttttgcaaaggctttgtgtgtgtcctcatactcacacctcactgcttctgttttgtttatggcagaaaagaggtcttctattgctgygtattcttctctaaacacagtgtaaaaggaattgattatttgttgctcatcagttgtcatttggtaagaaggatcaaatttggaaagctgatggagaagtaaa

SEQ ID NO: 329190 - DNA, 612 bp, Homo sapiens
atctgaggtcctttgggatatcatttcatgaataactagatggcagmtgaatataagtttgggtttaacagagagattgggactacaatacagatttgggagtcatgagagcacacttaaatccatgagaacatatgcaatcatccaacaagaataaacagggagagtagagaaagactgaagaatagaacactgggaaacactaacatttaacaggtacacagagcaggctgggcatggtggctcacacctgaaatcccagtactttgggaggccgaggctggtggatcacctgaggtcggagtttgagaccagcctgaccaacatggagaaaccccttctttactaaaatacaaaaaattagccgggtatggggatgcgcacctgtagtcccagctactcaggaggctgagacaggagaatcgcttgaacccgggaggcggaggttgcagtgagccgacatagcaccactgcactccagcctggtgacagagcaagactctgtctcaaaaaaaaaaaaaaaggaaagaaaaaaaagaggtacacagagcaaaaatggtggaggaggacacagagaagaaagacagaatagtaccaaggaagctgagaagg

SEQ ID NO: 329191 - DNA, 612 bp, Homo sapiens
atctgaggtcctttgggatatcatttcatgaataactagatggcagctgaatataagtttgggtttaacagagagattgggactacaatacagatttgggagtcatgagagcacacttaaatccatgagaacatatgcaatcatccaacaagaataaacagggagagtagagaaagactgaagaatagaacactgggaaacactaacatttaacaggtacacagagcaggctgggcatggtggctcacacctgaaatcccagtactttgggaggccgaggctggtggatcacctgaggtcggagtttgagaccagcctgaccaacatggagaaaccccttctttackaaaatacaaaaaattagccgggtatggggatgcgcacctgtagtcccagctactcaggaggctgagacaggagaatcgcttgaacccgggaggcggaggttgcagtgagccgacatagcaccactgcactccagcctggtgacagagcaagactctgtctcaaaaaaaaaaaaaaaggaaagaaaaaaaagaggtacacagagcaaaaatggtggaggaggacacagagaagaaagacagaatagtaccaaggaagctgagaagg

SEQ ID NO: 329192 - DNA, 534 bp, Homo sapiens
accaaaagaccttgctaaattcccacccatttattatcattagatcctacccttttgtcttccaatcatgaatgtccataaaaatactcatttttctatgtttctttgggtctttctttctgaaggatcccgtattatgtaaaatatatattaaaacaatttgtgtgttgttttcttattaatttgtcgtttgacatagaggttgcagccataaacttcgtgatggatgrggaaaaagatattacctttctcctctacaatagtaaaccagagcaacaattctaatttatttatttatttagagacagagtctcgctctgtcaccctggctggagtgcagtggcacgatcttggcacactgcaacttccacctcccaggctcaagtgattctcctgcctcagcctcccgagtagttgggattatagatgtctgccactacacctgtctaatttttgttaaaaacagagacactgacctcaaatgatcctccctcctcggcctcccaaagtgttggtattacaggcataagtcac

SEQ ID NO: 329193 - DNA, 669 bp, Homo sapiens
tacctttctcctctacaatagtaaaccagagcaacaattctaatttatttatttatttagagacagagtctcgctctgtcaccctggctggagtgcagtggcacgatcttggcacactgcaacttccacctcccaggctcaagtgattctcctgcctcagcctcccgagtagttgggattatagatgtctgccactacacctgtctaatttttgttaaaaacagagacactgacctcaaatgatcctccctcctcggcctcccaaagtgttggtattacaggcataagtcactgcacccagactcaattcttaaaatcttatttctcaatccctggtctgccatagtccatggttgctccagagattctctcacaacaaaatgcatctagtgtaacctgcctgactttcctctttctttatccccctatgacgtgctgcagctgtgctatgtccctaataggattgtctacaastattcccacccctgcctaaggatactgcctggcttctccaggatgaccctctacttcctggtcttcctgtgttcctcatggatagttgtgcacacaacctcgtgagaaggaattttttctactcatctgactcatgggtttctatactgcatggcaaatcctctcctgtttatttctttgtactactgggataag

SEQ ID NO: 329194 - DNA, 568 bp, Homo sapiens
tttgtcatagaaaaattgaagtaagttaaatatttgattatatgaatattttttctctcttttgcagtagatcgtttttttattttaaaaacttattatagaaaactatataaacagtcaatgagattttatattttatggggttatctaatccaatttcacatccccaacactatttctttgccatttcccttaccaatctaacttgccacaataggcattttaacaaaagcttcaacagattgtttgtttcactttggaattccacatagccttaaatatcttaatttttgtcgtgactacttaacattaatgtatttttatgcagagtctccacattaaccctctcagcaaccgtctaaagtaagcatcatcattcatatccatttatgtgtaaatttggcatatataagaatacagagggtagataactttscaaggctaaatagccaaggctaaattcttacacagacaatctggtctcatagcccacacatctcagcttcatgtcatactctatagtatttacacaatgaacactgattttttaaaatatttttattgtgaa

SEQ ID NO: 329195 - DNA, 546 bp, Homo sapiens
catatttcatataaagtcagttaacaaatctggtatgttataatggacaaaccaagtacctatacaatgatatggcatgtactattcacagcagtgtttaaatccagtcttttttcatgggattgggggttatgggcttgaggttacgcaaaacatcaaagtggaggtagcttcattctgggcaataattgttaagtaaattaattttttgaacctgacttttttcatttattaaatgtagattataatattctagtgggcatttcttatctactaatmtatcagctattttataattctcctcaactaatagtacctgaattttgtttaggtaacatcccattcttcaaaccgcctaatctaagcccttattgacttaaccaattatcatattccattcttttgggtaaaatgatggtgttagggttgggaccccatcaaaccaattcaaatagaataaatgtaaaaacaattggaatgttggaaaaaatttctttctctgtacacaaacaaagtatgcagcactaggagttgttatcaaaagtt

SEQ ID NO: 329196 - DNA, 545 bp, Homo sapiens
atggttgcttcatacattgaaagctgttgtgaaaatactaattaattatatccttaaaaaatgaaagaccaaatatttcacttaatctttttatcctacatttctatttatttaatacaaccttatgattaaaaaatgtagactttaggctgcttggactatttgataaattatagctatctgactaaatttttaaatatctttgtatcttatttatttgtcttgaaacttgggataataattgaaactagaatcattttgatgattcagatacattattgcatacgcaacacttaaaataatacaaggtaattatgagtaatcaattcatgtaataaatattcctagaaaktacaataggaataagaatccatactttgaaaatttctatgggctgtgtgtgtgtgtgtgtgtgtacatgctgagcatgctgtaaaattgtaatgaaataataaatatagtaactgtaaggttaagaagttttgagacttgatagtgggaattgagaaggagggtggccattcaaacagaacactaggagcaaa

SEQ ID NO: 329197 - DNA, 548 bp, Homo sapiens
gattacagtattctatttatattctcagcactgaattaatttcttttttaatgctaaccttgctgaggatccttttaaaatactttaatgagttgagtacataaatcatctcagtgaacacaaacacttgtatgtaaaaactctggagggagctttctaaagattttagagtagaaaatgagtcacttgaaggctttgtgccccctcttttcacttaccaaaatgaaaataaataacaattgttatttttcatagacttagcaatggtaaaatctttaataaaaaattgttcaaaagaaaacatacagcattgcatatagagagctttacaatacattgcatacaaagactaccaagtacaggagtacaggcttagcatttgttctcaggtttgtgaattttgagctggaatgaatattgcattataatggagatcatatgcatataggcaaatgtccacagtaaaaaggagagtttttgaaagctatrcagtaatcaatacagattaaaattagagaattaacagctaaatattaaaactagaatag

SEQ ID NO: 329198 - DNA, 582 bp, Homo sapiens
agcatatttctataatttgctttattctcaccatttataatagggatataagctttagaaaacaaagattccatcaatacagaaggaagtcagagaccaatactatgtagtaaaacaaaaatcaaaccaaaacccatgattctgatataagatctataacaataatttgttttttgtkgaatttaatttctatatgtctgagtgttttaattttgtggaaaaaaaaggtaacaataacttttaagccctcaagggatgaaactgtttagctgaaggacatagtgaaccattaagtttgaggtgaactacccaacagaatagctccttaggaataaatcagaaagtggcatattaaaaagctacttgcaagttctgtctgtatatcttaactcccccggagaatgccttgctcttactctataaaacattctttttccttaataactgacattattaggaaaatggggaggtggagcaatatagccaaatagaaacctccaccaatagttctcctacaggaataccaaattgaaaaactatttatacaaaaaacaccttcataagaacaaaaaatcaggtgaa

SEQ ID NO: 329199 - DNA, 582 bp, Homo sapiens
agcatatttctataatttgctttattctcaccatttataatagggatataagctttagaaaacaaagattccatcaatacagaaggaagtcagagaccaatactatgtagtaaaacaaaaatcaaaccaaaacccatgattctgatataagatctataacaataatttgttttttgttgaatttaatttctatatgtctsagtgttttaattttgtggaaaaaaaaggtaacaataacttttaagccctcaagggatgaaactgtttagctgaaggacatagtgaaccattaagtttgaggtgaactacccaacagaatagctccttaggaataaatcagaaagtggcatattaaaaagctacttgcaagttctgtctgtatatcttaactcccccggagaatgccttgctcttactctataaaacattctttttccttaataactgacattattaggaaaatggggaggtggagcaatatagccaaatagaaacctccaccaatagttctcctacaggaataccaaattgaaaaactatttatacaaaaaacaccttcataagaacaaaaaatcaggtgaa

SEQ ID NO: 329200 - DNA, 582 bp, Homo sapiens
agcatatttctataatttgctttattctcaccatttataatagggatataagctttagaaaacaaagattccatcaatacagaaggaagtcagagaccaatactatgtagtaaaacaaaaatcaaaccaaaacccatgattctgatataagatctataacaataatttgttttttgttgaatttaatttctatatgtctgagtgttttaattttgtggaaaaaaaaggtaacaataacttttaagccctcaagggatgaaactgtttagctgaaggacatagtgaaccattaagtttgaggtgaactacccaacagaatagctccttaggaataaatcagaaagtggcatattaaaaagctacttgcaagttctgtctgtayatcttaactcccccggagaatgccttgctcttactctataaaacattctttttccttaataactgacattattaggaaaatggggaggtggagcaatatagccaaatagaaacctccaccaatagttctcctacaggaataccaaattgaaaaactatttatacaaaaaacaccttcataagaacaaaaaatcaggtgaa

SEQ ID NO: 329201 - DNA, 534 bp, Homo sapiens
tgtctgtatatcttaactcccccggagaatgccttgctcttactctataaaacattctttttccttaataactgacattattaggaaaatggggaggtggagcaatatagccaaatagaaacctccaccaatagttctcctacaggaataccaaattgaaaaactatttatacaaaaaacaccttcataagaacaaaaaatcaggtgaacaatcacagtacctggttttaacttcatattactgaaagaggcaccaagagggtaggaaagaccatctttaatgtcaacaccacccctccccaatctcctggcagtggcaccataaggcagagagagaatctgtgcacttggtggaaggagaacaaagcaaaygtggtgctttgcattggaactcagtgctgctgtatcaatgtggaaaggaacaccaggcagaactccgttgacatccacagagggagcatttagaccagccctagccagaagggatctgttgaccccaggaattggaacttgaggtctggcaagcctcgctac

SEQ ID NO: 329202 - DNA, 614 bp, Homo sapiens
tatcaataataaccttgaatgtaaatggactgcaccctcctatcaaaagagatggagtggctgaatggataaaaagaaaaaaaataagatctaaaaatctgataaccataagaaacacacttcacctataaagacacaaaaatatgcaaaatatagggatagaaaaaagatattcttatgcaaatggaaatcaaaaaagaggaagagtagctatacttatatcaggcaaaatatattttaacacaaaaatcataaaaagagacaaagaaggttattatataatgataaagttgttaattcagcaagtagttataataatagtaaacatatatgcactcagcactggagcaaccaaatatataaagcaaatattattagtgctaaagagagagatagaatccaatacaataatagctggagratttaacacttcactttcatcattagacagatcatccagacaggaaaagaacaaagaaacatcagactttatctgcactacggaccaaatgaacataatacacatttacagaacatttcacccatcagctgtggaataaaagttattttcctcagcacataaattattctcaaggttagaccatatgttaggc

SEQ ID NO: 329203 - DNA, 543 bp, Homo sapiens
catgataaacattgatgcaacaatcctctactaaatactagcaaaccaaatcaataacacattaaaaagatcatttgtcatgatgaagttggatttactctagggatgcaaagatggttcaacatatgcaaatcaatcaatataatacatcatatcaacagaatgaaggaaaaaatcatttaaattgatgctgaaaatgcattttttgaaatcccacatcctttcatgataaatgtcctgataaatgaaattcatgataaataaatgaaagtaaacaatcaacaaagtaaagagaaaacacacagaatgggagaaaatatgtgcaaactattcatctgacaagggattaataacmggaaaaaactggatacagaaggaacataccttaacataataaaagttatatatgacagactcacagctagtatactgcatggggaacaattgaaaaccttttctctaatatctgtaagatgacaaggatgctcactttcaccactgttattcaacatagtactgaaagtcctggctacaacaatcaga

SEQ ID NO: 329204 - DNA, 521 bp, Homo sapiens
tactcaaaccagagtactagataagtataaaccaaactagaatcagctcaatttaatgtgagcagtaatgagaaaggatagctttaattaaaatttaatcaagagaaaaatttacaatgccataaataatattttcctaatattaagtcaaataaactcataagaaacacatgaattaattcaagccattttatatagagaaattatatagaacataatttaaaatagggcaactattaatattattaaaaatccttataaaatcattttgtagtgagataagatgtgtcagtgcaatccaacttaatctaaacactttaacataaaagccaaaaagacaagacttagtgagttttaattcatactagaaacttacacttttaaaattcatttaaacaaaatttcatacaaagaaccataatccagaaatgtatatctattgaaataataaaatcaatttaacttaatmttccataaaaattacgtataactcagattcactctattcacatacattaact

SEQ ID NO: 329205 - DNA, 624 bp, Homo sapiens
ggatttttacttgctaaagtagaaagaagatcccaacatttgatgagaaaatatacagaaggtaatttctacaaaatgttaaatgtttttattcaatgctctatcctgatttttyaaaaaagtcctggctcacgcctgtaatcccaacactttgggaggccgaggcgggtggatcacaaagtcaggagttcgagaccagcctggccaacatagtgaaacccatctctactaaaaatacaaaaaattagccaggcatggtggcatgcacctgtaatgccagctactcgagaggctgaggcaggagaatcacttgaacctgggtggcagaggttgcagtgagccgagatcacaccactgaactccagccctggcaacagtgtgagactttttcaccaatgtaatgaaattatttttgacaccagtgatgtttcctttgaggaagttcccgcttttacaataacaataactagaaccataataatgagtagacagactggacattatttatttggtctgggaaagcactgcttaacataactcctctgtatatgcctgaaatgtaaccatgaaacatacagttgctttttacatcaaggatcaaactcttgaaattttttcccttat

SEQ ID NO: 329206 - DNA, 571 bp, Homo sapiens
ttggtgagtggaagtccatgttgctgagcctatgtgtaacctccatccctgccaccgtggccactttgttcatgggcccattgggtgatgacaggggtggatggaaaaagaggctgagtggtgtccacagaacaggtcgtcctatccacttgattattaaaatcctcctctgctgaggtcacctattggtaagcactcacataggatacaaatatcttcacagttttagaccactcagagaggtccatccacataactcatccccaaatttatttgtcaccaattttccaatcatgcttcttccragttcctgaccatccagccaaaccattggctacagccaatgaatcagtatataatcacacatctggccatttgtccttccatgcaaagtgcacaaccaggtgcactgctcgaagttctgcccaatgggaagatttcccttaactactgtccttcagggatgtcctaggaaggggctgtggtgctgcatctgtccactttgggatgctgcctgcctatcatgcagaaccatctgtgaaccaggcccttgttttctttttctctctca

SEQ ID NO: 329207 - DNA, 593 bp, Homo sapiens
gctttgtatcaatttcacttctaggaagactgtgattaatcagccgatgccaaagctctataagagtaagactattctgattgcygctttggctctgctgttcattacagtagcaacactaactttgccttggatgattgagtgccactactttgcccctgccaccttgggatccaattattccccaattattcccattgaatttaaattttgtagttgagtgactgaggttcccactattagatctgacatacagagaagagcaattacagggctcttcaaagatgcaggtgctgccctcacaaatctgtttcacaaggcattggtcaagggactctaccagctgggatgagtaggtctaaagtgactaatccactccactatcccaatatccctaagcctttggatcccttcctttatattaaaccaagagagatcaggtgtttccagcttgctcacagtgggccatcctttaatccatatttcagctaacccaaccaataaactattagaaccttttttaattctccaagatgcaacattaaaagcagagtccctatttagtgggcccaaataaataaattcagcctgat

SEQ ID NO: 329208 - DNA, 593 bp, Homo sapiens
gctttgtatcaatttcacttctaggaagactgtgattaatcagccgatgccaaagctctataagagtaagactattctgattgccgctttggctctgctgttcattacagtagcaacactaactttgccttggatgaytgagtgccactactttgcccctgccaccttgggatccaattattccccaattattcccattgaatttaaattttgtagttgagtgactgaggttcccactattagatctgacatacagagaagagcaattacagggctcttcaaagatgcaggtgctgccctcacaaatctgtttcacaaggcattggtcaagggactctaccagctgggatgagtaggtctaaagtgactaatccactccactatcccaatatccctaagcctttggatcccttcctttatattaaaccaagagagatcaggtgtttccagcttgctcacagtgggccatcctttaatccatatttcagctaacccaaccaataaactattagaaccttttttaattctccaagatgcaacattaaaagcagagtccctatttagtgggcccaaataaataaattcagcctgat

SEQ ID NO: 329209 - DNA, 543 bp, Homo sapiens
aaggttcacataacagaagcagaatcaacattgctgtcagagaggtaaaggaaattagcgaaacaaaggcagatccctccctagggggaaaatgttagaaaaatctaagaatatgaatattctatggttgctcaatatttgtactgaaggtgaacttgtgtgttcttctgcatatgtgtgtgtgtgtgtatcacacgttacacgtatggttctttatatttgtgtgtttttatatatttttcttagtttactgaacaatacgtatttttctctctgacttaaagttgacgttatcatgtgtcgttaaaatgattttgatattgctcccstggatacaatgcctatgggaactaaataattaagtatgcataatcaatttgcttaaagttaggtcttaatgagcctcccaaaggaatatttcttttaaggacattttaataagtgaaaccaatcaggaggaagaaacatttcaacttaatcagaaatttcctctaactgttaaatcatttttgaaagactctcataatactcataatactacat

SEQ ID NO: 329210 - DNA, 570 bp, Homo sapiens
attctgtttcacatcacctaattttattttgtttttcaatttattattttattaggtaatataccatcatgattgcaggatttaatcaagtatttagattgcaataattattttctatcattgtttaatgaaatccccatgaacgctcactcctttccttctactacttcttgatttctgccttattttgattcataaaatgaaacaatagatggatagacagatagatacatagatacatagatgttcatggaggtataacataaacaataataccccaatagcaatgaatgtgttcctcatcaagatcttggtttataaatacctttcttcaacaaaagtgtgtagcatccttggaaaaatgaatcggaaaaatatgagwcaggactggagcatttggttgcagaaagtacagtagtcctccaaacaagatggaaatgtcaaaatagaaaaggagaaaattccacttccatcagggacaagtacctttcccatagataacaattatgaactgatcagaatacaaaagcaaactatctcaagacaaatttcagatgcaatttgatacag

SEQ ID NO: 329211 - DNA, 582 bp, Homo sapiens
ttttttctttttaggtttcaacttaaatgccacctccacagagtggctttcctattaacattaactaaagttttcatctcaaaaattacatccatgttatgtctatctgacagctatctttgtttcctttataacactttattccacataccatcatttccttgtttatgtgtctgttttgtttactagaatggaatatctaagagggcagaacatacaattatgtatacggttgaatcccaaataatcataactaaataagtgtttctagaataaatttatcaatgtgattaaaaaggaagtccttgtattgctctgtttgtgatactataaaggaatacctgagactggctaatatacaaagaaaataagtttacttgactcatggttctgcagtctttacaggaagcatggtaccagcatgtgcttctggtgacacctcacaaagattacactctttatgaaaggtgacagggagcmagaatgtcacatggcaagagcaggagcaaggttgggggatgtactacacagttttcaacaaccaggtctcatgagaatttactcactatcataagaacagca

SEQ ID NO: 329212 - DNA, 508 bp, Homo sapiens
gataagctgccaagcctccttcattcttacatctaaacacctgcaagattaacatcacattgaagccaccaatgcttacagcttctacccttttaagcagcagctcaaaacgtatttaagcctctttgagctgaggttggagagacctggatacaagtagcatcctcctgcagtggtgctgggaagcaaggcctgcccyctaaaccattcttttctcctatacctctgggtctgttttaggagagattggtttgtagatctgtaaaatgccttttctcattgtcctgtctatcagcgtctgtctctctatgaaacatatgaatctctctggcaagtggttgctctgcagcctgcttggattcctctcccaaagaagttttttctttctttgccacatggtgtattagtttgctttcactctgctataaggaactagatgagactggataatttatgaagaaagaaggtttaattgactaacagttccacaggcttaacaggaagcatg

SEQ ID NO: 329213 - DNA, 355 bp, Homo sapiens
cttctaatatccttgacctaactggctgttcttgggatataattacatataatatattttaaaaatctattcatgtacttatgctcaatgcataaaattcaatgaaacatttcataatgctactaacaggtatatacattaccccagaaagtgttactagataattwaaaagatgatattgttagaaagtaaaatgtatgaaattaccttagaaccactcaaacttagagaatggaataaagaaccaacataaaggtcactgatttttcctaatattcttagagtatttttcaagaaattatctaatttgtataatagtcaaagagatggagaaataacaatatcaaaaaagctc

SEQ ID NO: 329214 - DNA, 622 bp, Homo sapiens
cttactcatagacaaggacttacaatttatatgaacactgaatgtttttagacactgaaaaatatgttctcccagaaactatgaattcttgtggtggggaaaaatagtgtttatctactctatctcccttgaaagtaatccaaaaaaataatcctacttggcagcaaaagggctttatgagatctgtgctttaaaccaataaggcaaattcccccagagcatccttcaattccacctccaatcctacagtggggattaatgtccttatcctctgatagacagatatacctttcrggatgtggagacaacatttaataaacaggatccgtgcaattggctggagctaacatatactgtcaatttctatagtgaagaagaaccgtatgtttgtaatttccttataataagaggtttgttaagcatattatagtggatttactctctctgtttatattttatgcacccaggggctggattgtatacagtacccatagtttcactagaatgatcttcatttagagaaacacaagtttaaataaaaagtagtgtgatattagagctatgtatatttctgcactatggaggtggtagacactgagtaccttctgggacagtcagagtg

SEQ ID NO: 329215 - DNA, 622 bp, Homo sapiens
cttactcatagacaaggacttacaatttatatgaacactgaatgtttttagacactgaaaaatatgttctcccagaaactatgaattcttgtggtggggaaaaatagtgtttatctactctatctcccttgaaagtaatccaaaaaaataatcctacttggcagcaaaagggctttatgagatctgtgctttaaaccaataaggcaaattcccccagagcatccttcaattccacctccaatcctacagtggggattaatgtccttatcctctgatagacagatatacctttcaggatgtggagacaacatttaataaacaggatccgtgcaattggctggagctaacatatactgtcaatttctatagtgaagaaraaccgtatgtttgtaatttccttataataagaggtttgttaagcatattatagtggatttactctctctgtttatattttatgcacccaggggctggattgtatacagtacccatagtttcactagaatgatcttcatttagagaaacacaagtttaaataaaaagtagtgtgatattagagctatgtatatttctgcactatggaggtggtagacactgagtaccttctgggacagtcagagtg

SEQ ID NO: 329216 - DNA, 622 bp, Homo sapiens
cttactcatagacaaggacttacaatttatatgaacactgaatgtttttagacactgaaaaatatgttctcccagaaactatgaattcttgtggtggggaaaaatagtgtttatctactctatctcccttgaaagtaatccaaaaaaataatcctacttggcagcaaaagggctttatgagatctgtgctttaaaccaataaggcaaattcccccagagcatccttcaattccacctccaatcctacagtggggattaatgtccttatcctctgatagacagatatacctttcaggatgtggagacaacatttaataaacaggatccgtgcaattggctggagctaacatatactgtcaatttctatagtgaagaagaaccgtatgtttgtaatttccttataataagaggtttgttaagcatattatagtggatttactctctctgtttatattttatgcacccaggkgctggattgtatacagtacccatagtttcactagaatgatcttcatttagagaaacacaagtttaaataaaaagtagtgtgatattagagctatgtatatttctgcactatggaggtggtagacactgagtaccttctgggacagtcagagtg

SEQ ID NO: 329217 - DNA, 664 bp, Homo sapiens
tattaggtgatgcttgtatcacaatgggcatttagtctacgtccattctgacttctaactaatctagaatctattgtttaacatatataggagtttcctgccttggaaatgtggggaagtatgactagatgatttgagttttttggtttggtaatttttttttagtaatattaagttccttatgattggttgagtatattcttgaatcaagtttttgaaaaggtgtattctcttgtaayctgcttttgctccatccctgacttggtgtctactaccttatgaattgcactgacctagtgcatcacaggtttgtcctctgctactgtttatggggagctgcctgttcctttggcagaacctcctgatgtctttcggccactatacctgtactgagcaggtatacctgtactgagcaggtatacctgtactcctgaaattctctggcagcaccaccccgctgggaacactaagaaacccttaatattctaaaaggagttaatagattgctgtaggcacctcatgtcagcccgttgttcttatttatacaaactggccacttgcagatgatttgtgaatggtacaaaattatgcagtgtttgggggcaaataagtaaacatctttactatctgagagtcagggacattttctacttttatctcaaca

SEQ ID NO: 329218 - DNA, 664 bp, Homo sapiens
tattaggtgatgcttgtatcacaatgggcatttagtctacgtccattctgacttctaactaatctagaatctattgtttaacatatataggagtttcctgccttggaaatgtggggaagtatgactagatgatttgagttttttggtttggtaatttttttttagtaatattaagttccttatgattggttgagtatattcttgaatcaagtttttgaaaaggtgtattctcttgtaacctgcttttgctccatccctgacttggtgtctactaccttatgaattgcactgacctagtgcatcacaggtttgtcctctgctactgtttatggggagctgcctgttcctttggcagaacctcctgatgtctttcggccactatacctgtactgagcaggtatacctgtactgagcaggtatacctgtactcctgaaattctctggcagcaccaycccgctgggaacactaagaaacccttaatattctaaaaggagttaatagattgctgtaggcacctcatgtcagcccgttgttcttatttatacaaactggccacttgcagatgatttgtgaatggtacaaaattatgcagtgtttgggggcaaataagtaaacatctttactatctgagagtcagggacattttctacttttatctcaaca

SEQ ID NO: 329219 - DNA, 664 bp, Homo sapiens
tattaggtgatgcttgtatcacaatgggcatttagtctacgtccattctgacttctaactaatctagaatctattgtttaacatatataggagtttcctgccttggaaatgtggggaagtatgactagatgatttgagttttttggtttggtaatttttttttagtaatattaagttccttatgattggttgagtatattcttgaatcaagtttttgaaaaggtgtattctcttgtaacctgcttttgctccatccctgacttggtgtctactaccttatgaattgcactgacctagtgcatcacaggtttgtcctctgctactgtttatggggagctgcctgttcctttggcagaacctcctgatgtctttcggccactatacctgtactgagcaggtatacctgtactgagcaggtatacctgtactcctgaaattctctggcagcaccaccccrctgggaacactaagaaacccttaatattctaaaaggagttaatagattgctgtaggcacctcatgtcagcccgttgttcttatttatacaaactggccacttgcagatgatttgtgaatggtacaaaattatgcagtgtttgggggcaaataagtaaacatctttactatctgagagtcagggacattttctacttttatctcaaca

SEQ ID NO: 329220 - DNA, 589 bp, Homo sapiens
tgacctagtgcatcacaggtttgtcctctgctactgtttatggggagctgcctgttcctttggcagaacctcctgatgtctttcggccactatacctgtactgagcaggtatacctgtactgagcaggtatacctgtactcctgaaattctctggcagcaccaccccgctgggaacactaagaaacccttaatattctaaaaggagttaatagattgctgtaggcacctcatgtcagcccgttgttcttatttatacaaactggccacttgcagatgatttgtgaatggtacaaaattatgcagtgtttgggggcaaataagtaaacatctttactatctgagagtcagggacattttctacttttatctcaacaacttcaatgacttgcactgaggttgggacaacaattgaaataaatttggataataagtgaatgcatgaaagttagtaatgaaagcatcttgaatgacttttctacttatgaattcatttctyatataaaacaattccattgcattagtaaatttattaatcaaaatctaagaaggatgtaaatgacatgtgatctgtattagctatgagatgtt

SEQ ID NO: 329221 - DNA, 518 bp, Homo sapiens
gacatgtgatctgtattagctatgagatgttatgtgtataagaatgaattctagagccagactggtttttaatccagtgcttacaaattatgtgacttttgacaagtgacttagttatccctgtctctcagttaactcatatatcctcataataaagaatttaaagttctaaaaatgtacttggcagagagtaagcattactgtatatactttttaactactaatgtcagagaaaaatagcagtaggtataatcatttttttcttataaatctagcttgaaaacctggagacaagggaaatatctccagactgtaagtgaaatattaacttgaatagctgctktgcaaaatatgtgtttgttaactgactgaagtataaagtaacatttaatcacataaaaataaataaattattattattattgttattgttattattacttgcctatactttgttagaaattctaagtttgcaacaggcatcatgaatccctttctatcaacttgagctttaattc

SEQ ID NO: 329222 - DNA, 518 bp, Homo sapiens
gacatgtgatctgtattagctatgagatgttatgtgtataagaatgaattctagagccagactggtttttaatccagtgcttacaaattatgtgacttttgacaagtgacttagttatccctgtctctcagttaactcatatatcctcataataaagaatttaaagttctaaaaatgtacttggcagagagtaagcattactgtatatactttttaactactaatgtcagagaaaaatagcagtaggtataatcatttttttcttataaatctagcttgaaaacctggagacaagggaaatatctccagactgtaagtgaaatattaacttgaatagctgctttgcaaaatatgtgtttgttaactgactgaagtataaagtaacatttaatcacataaaaataaataaattattattattattgttattgttattattacttgcctatactytgttagaaattctaagtttgcaacaggcatcatgaatccctttctatcaacttgagctttaattc

SEQ ID NO: 329223 - DNA, 438 bp, Homo sapiens
tttagaggaaacctcattgtgagcacacctcaccagttcagaacaatcctaagtcaaaaaaaaaaaaaagtaacttactaactcaaaaatcttaaagtatggggctattccattwgaaaaatgtgatttaacattaaccactgaaaattcccttaacccagcaggtttcctaacgagggatttagatcttaattaccatacaaagttttgaccagacctaggaggaactcccttcaggacaggagatagatggtgtcttccaggtgattgagggaaaaaaaccacgatgggtattcagtaattgatagggagactcttgtggaagcagagttaggagaattgcctaataattggtctgctcaaacatgcgagctgtttgcactcagccaagccttaaagcacttacagaatcaaaaaaactctatgtcaatcctgact

SEQ ID NO: 329224 - DNA, 607 bp, Homo sapiens
gatgaggacttttcaaaactatcaagtagatagtcagggcctgtgaaatgtggcaaagaaatattcaccgtcacttcaggccatacatatcaatccctgtatctttaacctccttgttaagtttgtctcttccagaatcaaagctgtaaaactacaaatcattcttcaaatggagccccagatgcagtccatgaccaagatctcccgccgacccctggactggccaactagcccgtgctccaatgttaatgacatcaaaggcacccttcctgaggaaatttcaastgcatgacccctactacgccccagttcagcaggaagcagttaagaactgtcatcggccaacctcctcaatagcacttgggttttcctgttgagagggcgtactaagagacaggactagttggatttcctaggccgactaagaattcctaagtctagctggggaaggtgacctcacccacctttaaacatggggcttgtaactcagctcacacccgaccaatcaggtagtaaagagggctcactaaaatacaaattaggccaagagcaggagataaagaaatagtcaaataatatatcacctgagagcacagggggagggaca

SEQ ID NO: 329225 - DNA, 565 bp, Homo sapiens
ggtggtcacttagcgcaggggagggtccagcattttctgccctagttttactcccatggcagttttggtgcagaggccagcactggtgggggtggggctggctggctctgtgtttgccaaggttctgactgcaatggcagtatggcaggccaagagagggcagagtggctcccccttcagcagtgactgggcatggtgaacatatacacatgcattggctgtgcaaggaaggcaaaacctgcctggcccacaaaccagcaaagtgatatctggagtggccattgtccctggggaagttgcagtaacaggagggagctagtgggctggtgcatggccagggggttcagcctactggagctytccaccagtcatgcacagtccaccagtactggaactatgatgcgggccccaagggcagctgaggctaccctgcaagcaggtgcagccaggctggaaccctgtgagaagccagcagaccaagcagtactcaggtcagaacagccccatctggtcaaggggaagatcaccttgcagagttcaggtctgacagttcccctagggccag

SEQ ID NO: 329226 - DNA, 455 bp, Homo sapiens
ctctctcaggaaatggagttgtacactgatttctgtcacttttcatacgaagttctcactatctggcagaaattcctttacatatataaactatttggcatggtttcttaatttttagaccaatgaattttttgccctaccttctaacttctaatttctcctcaaccatttcaatcagattctggaagggatctttgtgggcccttttgctactacacttcctagaaatatgtgtaactgataaaaaaaaattaaaamccaaaaaaaaaaaaaaaactaatgccaggaagaaaataacagaaagattgtgatctcctttgaaaagcttagaatctgtggtcattgaaataattaaaattaatatctctttttgtagtttgactttaattttgaaattttacatatttatttattattttgttaatgttgaaatagaatatattatatataattta

SEQ ID NO: 329227 - DNA, 607 bp, Homo sapiens
cattgaaataattaaaattaatatctctttttgtagtttgactttaattttgaaattttacatatttatttattattttgttaatgttgaaatagaatatattatatataatttataatatactttttgaaacttttattttacattcaggggtacatgcgcaggtttgttatgtaggtaagttttatgtcactggagtttgatgtatagattatttcattgcccaggtcatagcatagtacctgatagtatctacataagtaggtcctgttgtcagttgttctcttctttgtgtccatatgtcctcaatgtgtagctcccacttataagtgagaacatgtagtatttggttttcagttcctgcgttagtttgcttagggttatggcctccagatccatccatgttgctgaaaaggacatgatcttgttctttttaatggctgcatagtattccatggtgtatatgtaccacattttctttattcagtttaccattgatggacatttrggatgattccatgactttcctattctgaatagtgctgcaatgaatatatgaatgcatgtgtctttattgtacaatgatgtaatttctttgggtacattt

SEQ ID NO: 329228 - DNA, 608 bp, Homo sapiens
tcactgcccccccaatttcctgctgagcaaccccaacaaatgcagtccgtttgcagcayctgctcttaactacaaagaagaaaaatacaattcagaacaaacctcattatttgtaagcagagatgtaagaggaaaagtattctattgtttttatattctcgggtactctgtatctgacacagaagcagcttttatatcccttaaacaaagggagactaacaggaaatagttctaaccaggtatagaatgaccaacttctgcccactgtggtagttacacagagagtactcacattgctgaaaaattattttcccagagttttttgataatgaaatacatttcatcctttctattgcaacctccaccattaaattccaaaaacttcatgaaaatgattaggcagagggtaggtagatccactttctcttgacatatcaaagaaaagttcattttttttctgtttaatttttttccttcttttcctctgccttcacatcactggatctcagagaggttaagttacctcaagtacttttggaaaaatgacaaatagataaacacatggaaacgtgacaaataaacaaacacatggaaaagtgacaaataaa

SEQ ID NO: 329229 - DNA, 565 bp, Homo sapiens
tgttacttcataaaaaattctgagacatttttgtttcctccaataaaagcattatatgacaagaagtataaacaagcaaatgctttaacaatgacttgtattttattttagtgactgatgaattttgagcaaataatcagaacttcagttttttcagttgtttcaatatgtatgtagatgagtcatgcaataatttccctgaaaattctggaccaccctaactgtcatgtcscttccacatcagctacagtcccaagggaaaatccatgaacttagccatcaccaggaaacactctaccttgaaaaccacaaatgtaactttacactctgagtataatcttccatgcttcagtcttactccagcttccctcacatatctgcttttcaatctaaaagagatccttattccctgttactttcttttatcccagcttattaatgcttaattctgtgtgtgtgtgtgtgtgtgtgtgtgtgtgtgtgcgtctgtcctacccaccagtaaatctcaacacttcttcagcttacttagacagagagttaaaaatgactcaaccatatagac

SEQ ID NO: 329230 - DNA, 640 bp, Homo sapiens
tatgcatatacaatgagatttattataaagaattggctcatgtgattatggaggatagtaaattcaaaatccacagaccggatgtcatatacaagcttgaacccaaaggtcagccagctgctgtagagccaagaagacctatgttgcagtttgaaggtcttcaggccctcaggtgagacatttctctcttactgggggtgaagagtagggtcagcctttggttctatgcaggccttcaactgattagatgagrccagctctgttaaggaggagcaatctgctttatttagtctatcaatttaaatgttaatctcatccaaaaacatcctcatataaacactcaggaaaatttttgactaaatatctataggggaaacacatggcctagtcaaggtgatacatataattagcaatcacactacctaatattaatttaatgtattttatgtttaaaatcttttttttttttttgaaatgaaatgttgctttgtctctcagctggagcgcagtggcatgatctcggctcactgcaaccttcacctcctgggttcaagcgattctcctgcctcagcctcccgagtaattgggattacaggcatgtgccaccacacccaactaattttggtatttttagtagaga

SEQ ID NO: 329231 - DNA, 640 bp, Homo sapiens
tatgcatatacaatgagatttattataaagaattggctcatgtgattatggaggatagtaaattcaaaatccacagaccggatgtcatatacaagcttgaacccaaaggtcagccagctgctgtagagccaagaagacctatgttgcagtttgaaggtcttcaggccctcaggtgagacatttctctcttactgggggtgaagagtagggtcagcctttggttctatgcaggccttcaactgattagatgaggccagctctgttaaggrggagcaatctgctttatttagtctatcaatttaaatgttaatctcatccaaaaacatcctcatataaacactcaggaaaatttttgactaaatatctataggggaaacacatggcctagtcaaggtgatacatataattagcaatcacactacctaatattaatttaatgtattttatgtttaaaatcttttttttttttttgaaatgaaatgttgctttgtctctcagctggagcgcagtggcatgatctcggctcactgcaaccttcacctcctgggttcaagcgattctcctgcctcagcctcccgagtaattgggattacaggcatgtgccaccacacccaactaattttggtatttttagtagaga

SEQ ID NO: 329232 - DNA, 640 bp, Homo sapiens
tatgcatatacaatgagatttattataaagaattggctcatgtgattatggaggatagtaaattcaaaatccacagaccggatgtcatatacaagcttgaacccaaaggtcagccagctgctgtagagccaagaagacctatgttgcagtttgaaggtcttcaggccctcaggtgagacatttctctcttactgggggtgaagagtagggtcagcctttggttctatgcaggccttcaactgattagatgaggccagctctgttaaggaggagcaatctgctttatttagtctatcaatttaaatgttaatctcatccaaaaacatcctcatataaacactcaggaaaatttttgactaaatatctataggggaaacacatggcctagtcaaggtgatacatataattagcaatcacactacctaatattaatttaatgtattttatgtttaaaatcttttttttttttttgaaatgaaatgttgctytgtctctcagctggagcgcagtggcatgatctcggctcactgcaaccttcacctcctgggttcaagcgattctcctgcctcagcctcccgagtaattgggattacaggcatgtgccaccacacccaactaattttggtatttttagtagaga

SEQ ID NO: 329233 - DNA, 597 bp, Homo sapiens
attgggaaaaaaaaaaggggagcaattttacaccagtcactattagagactctcgggtcagggaaagtctaagccttcttttaaaagtccttccaacagattaagccctgcccatttaaaataatctctcttttgattaaagttaccccatggaattttaattatattcataaaatcatttcacatcagcatttagattagcgttagaataacckggagagtatgtgctcctgatgcaaaatggtggctgtctctctgccatcttccataagacactatcccgtgtagctcatcctatctggaaacacataagaaacacataagacttctgtctgggaaaggtagtttggcctaactatacggacatgtcagaaggccatcatatcctcctagtactttgataaaattaagcagaaaattccatatgtatttgaaagtagtaattaaatgaactctttgcttcctaatttttggatcaaataatgtcatcaaattcaaaaatgagcttcttttctcttctcatctgtcttggcctggaataaagttttacgagtctgcaatcacagccctagtagcaggaataagggcaaaacagga

SEQ ID NO: 329234 - DNA, 597 bp, Homo sapiens
attgggaaaaaaaaaaggggagcaattttacaccagtcactattagagactctcgggtcagggaaagtctaagccttcttttaaaagtccttccaacagattaagccctgcccatttaaaataatctctcttttgattaaagttaccccatggaattttaattatattcataaaatcatttcacatcagcatttagattagcgttagaataacctggagartatgtgctcctgatgcaaaatggtggctgtctctctgccatcttccataagacactatcccgtgtagctcatcctatctggaaacacataagaaacacataagacttctgtctgggaaaggtagtttggcctaactatacggacatgtcagaaggccatcatatcctcctagtactttgataaaattaagcagaaaattccatatgtatttgaaagtagtaattaaatgaactctttgcttcctaatttttggatcaaataatgtcatcaaattcaaaaatgagcttcttttctcttctcatctgtcttggcctggaataaagttttacgagtctgcaatcacagccctagtagcaggaataagggcaaaacagga

SEQ ID NO: 329235 - DNA, 597 bp, Homo sapiens
attgggaaaaaaaaaaggggagcaattttacaccagtcactattagagactctcgggtcagggaaagtctaagccttcttttaaaagtccttccaacagattaagccctgcccatttaaaataatctctcttttgattaaagttaccccatggaattttaattatattcataaaatcatttcacatcagcatttagattagcgttagaataacctggagagtatgtgctcctgatgcaaaatggtggctgtctctctgccatcttccataagacactatcccgtgtagctcatcctatctggaaacacataagaaacacataagacttctgtctsggaaaggtagtttggcctaactatacggacatgtcagaaggccatcatatcctcctagtactttgataaaattaagcagaaaattccatatgtatttgaaagtagtaattaaatgaactctttgcttcctaatttttggatcaaataatgtcatcaaattcaaaaatgagcttcttttctcttctcatctgtcttggcctggaataaagttttacgagtctgcaatcacagccctagtagcaggaataagggcaaaacagga

SEQ ID NO: 329236 - DNA, 504 bp, Homo sapiens
  misc_feature (1)...(504): n = A,T,C or G
nnnnnnnnnnnnnctctcacttaacttgtaatttgatttttatatcactaaattaatctgcataaatttatgatacagacaatttcctagctcaaaagggatatatgtctccctattacccactatatcctgtctaatgcttctttcactcatttaatatttattcatcatctactgtatatcaaggactgygctaggcaatggaaatacaaaaacaaacaaaataaacttggtcctgaccacactcaggatgcagtagagatgctaataggtaaagatgataagtactgtgtaatcataaagaaaaagaatagagtgttagggagaaagtaggagacagagaaagtaggaaatgggagaaagcaggagaaataagtattggggagaaagtaggggaaggaggaaggtatttgccaacttcaaataggggagactacatttaagcaaatacataagaaagagaaggaatcgacattcacaaaggaggaagaagagtgttctagg

SEQ ID NO: 329237 - DNA, 504 bp, Homo sapiens
  misc_feature (1)...(504): n = A,T,C or G
nnnnnnnnnnnnnctctcacttaacttgtaatttgatttttatatcactaaattaatctgcataaatttatgatacagacaatttcctagctcaaaagggatatatgtctccctattacccactatatcctgtctaatgcttctttcactcatttaatatttattcatcatctactgtatatcaaggactgtgctaggcaatggaaatacaaaaacaaacaaaataaacttggtcctgaccacactcaggatgcagtagagatgctaataggtaaagatgataagtactgtgtaatcataaagaaaaagaatagagtgttagggagaaagtaggagacagagaaagtaggaaakgggagaaagcaggagaaataagtattggggagaaagtaggggaaggaggaaggtatttgccaacttcaaataggggagactacatttaagcaaatacataagaaagagaaggaatcgacattcacaaaggaggaagaagagtgttctagg

SEQ ID NO: 329238 - DNA, 484 bp, Homo sapiens
acattaacaacttggagaaattccagatactatcaatccagacacttttgttgtagaacaatccttcgacatcatttataattcatgggagagttgttttcacataagggaagttatcttccaaggtcatacagaagagagcatacaatatctgacacaacagaaactgacagaaggagtgttcttggggttttaaatttgtcattttatctgtaaaaacacaaatatgttttttataaaatagcccatttatgatatggcatttctgttgtcaatactttacagaaggtgagaacagtagttggtgtatttcagggaaatttttgaatcttttctgaygataccagaactagaaaactaagttgaaaatcctaccatccccaaagtgcatctcttaggagcagaagctgaggtgcataagtttttccttggtaatcttgtaaacaataactcttaaccactggtggcaaggggatgtgtccat

SEQ ID NO: 329239 - DNA, 478 bp, Homo sapiens
aggtagaaaggagaggaagatgcagagggacagggagagggagggaaagggaggaagagagagagagagagagagagagagagagagagagagagagagagattaggagatggcaatgcgcagtgcagctaacattcttgtagaatattgaatatttagcatccttcacactttctgaacaccaaacaagatttctggggtcaagattattccaagtacagacttccctttgtttcattctaaggcttaaaaaatggcctttttttcytaggacagcagcattcctgaaggctacaaacacaagagaagggaaaatgttcatgaatcaaatcaaccaagttgtgtttgtgtgtattctatgaactgtagacaatgtggaagaaacaagaagtgtataagggactattttgaaaactgaaagaactgagctttcagatgccaagaacaccaaaacatacaaggcaactagggatcagcc

SEQ ID NO: 329240 - DNA, 523 bp, Homo sapiens
taaaaaccacaaaaatgaaaagcaatgtcatgagcagaaagatgttaaggctgctcatgttgtgagctatgagaaattagatctgctaagtgtagggaagatattgaaattgaccagcttttatcctttgaaggttctttgaattgttcctatgcaactgacgtaggagtgttacaaaagcattcaacctaaattttaagtgactgaataaataagttttaaatacttatagaaaaaaaatcagtcttttgatctgaccaacagagawgcccttactctagtaggaaatgctggtaactagaaattctgctcttcttgtttagatcctagaaggaaatataaattgcttctgaaaatgttttcctatgaaaccagtgtaagaattccacaaccagtgaaacataatttaacttagtgctaatgttagagaaaacccataccataagggttctttctttttttataacaatgttgaaaccactggggcagaaaatgaaattattttatacatcattatgtcacc

SEQ ID NO: 329241 - DNA, 588 bp, Homo sapiens
gcagttggtcagtaggtccagaatagcttgtccacattgaagcaagatctattaacacttctatgcagatgaatttagcttttaatctgttcaatgtaggagttattatgcctatattccacatacaaaaatatgaacaaaaatgaatctacttcatgcccatattcataactgtataaaataagaatgacagctgatattttactttaaacacatagcccagatgaaatttttaagcaaaactccaacaggcagatttactgagctgttatgaatgtttcattatctcctaattaaagtagtctactygcctcaattgccatatgcaaatggaaacttagaacaaattgataaaggggttttcacttgtaattgctgcaattaagaagtatacaaactgtttgactaaacatttcacctctaataacttattataagataattgaacaaatgtccaaaatttaatttaaagaatcttaattgtagcattcagtgtatttattcaacaaatacacgaggcattggacacttatcatttataaacattaaaagaaaggaagcagcctacatgcgtaaaaataagttata

SEQ ID NO: 329242 - DNA, 568 bp, Homo sapiens
aaaagaaagagagaaagatagccaatggaaaaagagaaaaagaaaaaaatgtcttctctgtatggttataatagatccagaatgtgattctgaaaaaagagtcaccaagaacattttgagtggtattaaattgcattcmctgtaatatgtgcgtaacctccacagatgataatgtctagaaagtaaaaagcaatttgctaaagctctgagaaaaaatactctcaattttatcttattttacctttttttttttttttttacaggcactaagtaaaaactcctatgtctttgaatctccatagaagatcgtgaaatagtgaagaaaaggagtttgttggaatgtggacttgtattcaaacctgtttgtgtgcccccctcttgatttcttaagcagccaaatgcctcatttctgcatactgttattcttccttgggcctgctgctctggaatttttgactctaatccaactgcaactgtggaaagagagtagttttaataatagtggaaacttactgttattattcaaactttacatcatcctgaagcaaaaatatttgtttgtaagata

SEQ ID NO: 329243 - DNA, 568 bp, Homo sapiens
aaaagaaagagagaaagatagccaatggaaaaagagaaaaagaaaaaaatgtcttctctgtatggttataatagatccagaatgtgattctgaaaaaagagtcaccaagaacattttgagtggtattaaattgcattccctgtaatatgtgcgtaacctccacagatgataatgtctagaaagtaaaaagcaatttgctaaagctctgagaaaaaatactctcaattttatcttattttacctttttttttttttttttacaggcactaagtaaaaactcctatgtctttgaatctccatagaagatcgtgaaatagtgaagaaaaggagtttgttggaatgtggacttgtattcaaacctgtttgtgtgcccccctcttgatttcttaagcagccaaatgcctcatttctgcatactgttattcttccttgggcctgctgctctggaatttttgactctaatccaactgcaactgtgsaaagagagtagttttaataatagtggaaacttactgttattattcaaactttacatcatcctgaagcaaaaatatttgtttgtaagata

SEQ ID NO: 329244 - DNA, 590 bp, Homo sapiens
catcttcttgctaaggcttttcagggttgtaggatattttctcagatatatttaatagcaaatttccacagaatttatgaatcattaaattagatgttttcttgctaggcagaagtaatgtggggaatcattctgagtaaaatccaacattaaaaaawttattatgtgtattttcacaaacatttataccagatggcagttactaaaggcgatgtagttttatttatcataagtactagataggctaaagtttttcaggtagtcaccactatctgaaatttgagataaacttaagctctgtgaggttcacttttatcctgaaaagaggaaagtctttgcagacggcttcaagacatgcacctgggatccatgaaccgcaatagtcgtatactttccattaattggctctacctagaaattacccgatggtgctcaaaagattggctgggattacttaataatctatagatggaggtgagaccaagtttgataggaaccagtgaaacttgctcagattattcaagaatgttatagaatgtgaaattccattcaaacctacttttcaatagaataacaggctccattgagta

SEQ ID NO: 329245 - DNA, 539 bp, Homo sapiens
tatatttgttttgcttgccctcccaaccccccacccccactccctttttgtattttaaggraacaggaaaatggaatgggactaaattccattttaacttcagctttaccataaacaataccaaaaattccagtaaagtctggtggatttgctcatcaggctctcctccacctcagtgataccctatctccttctccacgtgaatataaaccatctgctccagccagactcctccccctactgactcctgagaaccatcatgggcattcccattagagcagcaacttgtcgtttttgtaatctacttttaaaaattagaaatcgttggctaagctcttgtaggaactaccaaacaagttatcaataattgctacataatcagtctggcctcacaggatcttcagaaagatccaatgatttctccttcaactcagttgtcttgtgcactgccaccatttgaatggaaacatttacctccctgaccattctctcttctactttcagaaagcaaagttctcacaagtccgagaaacaaaaaa

SEQ ID NO: 329246 - DNA, 587 bp, Homo sapiens
aacataggccactgctttcccttaaaggaatattatcagtccaattagcccaaacttttcatttttcttctttagatgcacatatttgctttctgtctccgtctctgtctctgtctttcagagacagacaaagaggcagataaacatatttttaacagttacgatgataacaaaagatttaattttaggcccccttttctaaattataggtctatctatacctataatttagaaaagaagaaatctttacrtcagacaaccagtgctgggaaaatgaaaagaagtgaaagaaaaagaagttccacaactaccctctataattatctcttatgatcattagccttgtttgggaacccgttgcatagtgccatcaaccactgtctaacactatgaaagaattatgtgaggttcttaaagcccaggatatctgtcattgcagaccctgaattgtgtggtgcactgccacatcatctcacttcaataaatatactcttaccttcctgtatgtcaagattgaatgaaaggtgagactaattgcagtgggtcttagtcatttaaaactagatatggaaaaaatatacaggaga

SEQ ID NO: 329247 - DNA, 590 bp, Homo sapiens
aatccctggagttaagggatactttatgcccaaagaactaaagaaaatatacatatagacacttactgtaacatgagtagcattcagttattatcacttacagttacagccggaagatgaaaaagaagcactttatcattttggatttagacctctgctgtcaaagcaaatgacagagtcagaatctgactgtgctggtaagtttgttgtagtttatctttaaacaaaattggacactttctcaacattgacagtttactactgggagaaagaaaaacatgaaatttaaaagtttaaatcgctatcttttttttgttatatttttacattaaaagattgacaacacaaaagccaaacctggcatcactctctcgcatccatgtgtttttatgtgttttctatggttatgttcaaacagtggtacatagtttggaagacattatgatcattcctcagcatagtactttgcagtaatatataattaactacatatttttgagatccctaatgttcacttgctttgccaaaagccacrgtaaagctagaattaaacccatttaggagagtcttgaaagggaggggtgtacagc

SEQ ID NO: 329248 - DNA, 439 bp, Homo sapiens
gtgcttagacatggcagttaatgcttgagggtcacagagtttcttgaatctgcagcttgaaatttgagaaaattcttatgcagattatcttcaaatattcctttcctatattttctgcattctcttcttttgcttctattaatgtatttgtatttatcttttcactctaactgtatttcacatgtttttggcttacatttatttttcattctttcttgtcttcatccgttggtctcgatgtttcctagtaacctatcttccagtttactaatcctttctttttctgtgtctagcatgctgttagtctatctattgattttatagtttcagatacagatttttttttcagttttaaaattttcatttgatttatwtatatgtatatattcaatttggggttaaattatacatctttttttttacttattagttatttaaa

SEQ ID NO: 329249 - DNA, 564 bp, Homo sapiens
tcatcaaattctattttacaaatagcttcgccaataggcctaaaatatttgctgagtatacaaatggtagtagttagttctaagctctttctttttatgatttaattaattttaggtagaaatcctctccttgctctgtatgagtaactctcatagcccattttgtttaaaatagagacacaacagacataattgcttgtactgatattatatcttttaatacagataggtaaaactttataagttgcttaactgatgctctcaagaaaagtgaaaaatttggggctcagcagggtggctcatgcctgtaatcctagcactttgaggggtggaggcaggaggatcacttgagcctaggagtttgagaccaggttgggcaacatagtgagacctcttctctaccaaaaaaaaaaaaaaaaaatttagtcaggcatggtcgggctcacttgtgctcccagctactcaggaggctgaggtaggaggatygcttggggccaggaggtcaaggctgcagtgagctatgatcacaccactgcactccctcctgcaccacagtgagaccct

SEQ ID NO: 329250 - DNA, 564 bp, Homo sapiens
tcatcaaattctattttacaaatagcttcgccaataggcctaaaatatttgctgagtatacaaatggtagtagttagttctaagctctttctttttatgatttaattaattttaggtagaaatcctctccttgctctgtatgagtaactctcatagcccattttgtttaaaatagagacacaacagacataattgcttgtactgatattatatcttttaatacagataggtaaaactttataagttgcttaactgatgctctcaagaaaagtgaaaaatttggggctcagcagggtggctcatgcctgtaatcctagcactttgaggggtggaggcaggaggatcacttgagcctaggagtttgagaccaggttgggcaacatagtgagacctcttctctaccaaaaaaaaaaaaaaaaaatttagtcaggcatggtcgggctcacttgtgctcccagctactcaggaggctgaggtaggaggatcgcttggggccaggaggtcaaggctgcagtgarctatgatcacaccactgcactccctcctgcaccacagtgagaccct

SEQ ID NO: 329251 - DNA, 622 bp, Homo sapiens
ctgtgctgaacccatcagaaaatacatcttaaaatacacatctctaatgctaagaatgacttggagaaatttttgttttatttttaattgtaactttttaaaaacactcaatttatcaagttgattatrttataattactaataatagtatttctaatctgtgtctaatctgtatctagttatggaagaaaaattttctctttttttcttccacattagtcattgagttttttcaccaagctgcttggtaggatgacagcaatgtaagaaaattaacaatggttttaccaccttttgtaaatgaaatatttaaagcagctaaaagaaagtagcgattacttaagaagtaagaggaaaaatattaatccaggttgaggatgtcacatcccaaatgccagaaatgttttggattttgaattttttcagattttggaatatttgcctatatataagctatcttggggatggaacccaagtctaaacacaacattcatttatgcttcatatacaccttatacacgtagcccaaaggtaattttctatagtatttttaataatttagtgcatgaaacaaagtatgtgtaccttgaaccatcagagggtactggtgtcaccatctcag

SEQ ID NO: 329252 - DNA, 622 bp, Homo sapiens
ctgtgctgaacccatcagaaaatacatcttaaaatacacatctctaatgctaagaatgacttggagaaatttttgttttatttttaattgtaactttttaaaaacactcaatttatcaagttgattatattataattactaataatagtatttctaatctgtgtctaatctgtatctagttatggaagaaaaattttctctttttttcttccacattagtcattgagttttttcaccaagctgcttggtaggatgacagcaatgtaagaaaattaacaatggttttaccaccttttgtaaatgaaatatttaaagcagctaaaagaaagtagcgattacttaaraagtaagaggaaaaatattaatccaggttgaggatgtcacatcccaaatgccagaaatgttttggattttgaattttttcagattttggaatatttgcctatatataagctatcttggggatggaacccaagtctaaacacaacattcatttatgcttcatatacaccttatacacgtagcccaaaggtaattttctatagtatttttaataatttagtgcatgaaacaaagtatgtgtaccttgaaccatcagagggtactggtgtcaccatctcag

SEQ ID NO: 329253 - DNA, 469 bp, Homo sapiens
aattaacaatggttttaccaccttttgtaaatgaaatatttaaagcagctaaaagaaagtagcgattacttaagaagtaagaggaaaaatattaatccaggttgaggatgtcacatcccaaatgccagaartgttttggattttgaattttttcagattttggaatatttgcctatatataagctatcttggggatggaacccaagtctaaacacaacattcatttatgcttcatatacaccttatacacgtagcccaaaggtaattttctatagtatttttaataatttagtgcatgaaacaaagtatgtgtaccttgaaccatcagagggtactggtgtcaccatctcagccacccatgttgacaatctgtggttgtttggcatcacatctttcctgacactgaatttgtatgccactgataatcattttctcatccttattcacatataagtacttaacaataaaa

SEQ ID NO: 329254 - DNA, 527 bp, Homo sapiens
gatgagtcctcctctttgctcgtctttctcagaaacttctatgataaaaaaaagtttattggacacattttttaatataaaatttcctatgcttgaaccacaccaaaatgcaagcatataaaataattacattaactgactcattgaatgccaatgcagaatcagactctgctagaaccacgaacacccactaacaagtggtcttaggatatgttagagaaatgagaattggtgccagtattctaacatttcattcagaaattaagatatgtgtcttgaagttcagccagcgatgtacacctcaatagcctctatgttatccatcactactgaaaacatcatgtgagatagagtttattaactcactgccmaaaatcttttttaaaaattagactttatatttttcagaacagttctagtttcacatcaaaattgagtagaaaatactaagatttcccatacagactctgccccacacaggcatagccatccctattatcaacatcccccacagagtggtacattta

SEQ ID NO: 329255 - DNA, 529 bp, Homo sapiens
ggttttcatttttttcccaagctcatcttggagtggttttcatgttctcagtctaggtatgaatgtgcaatcacttagaaactacttaaaaactacactcagctgaatgttgggaaaacagtgttctatgttgagagataaaggaaaaagaagacaagtgtcatttctccattgtttattcagtgccagccacagagttagacattgtttgtggtttcatttaattatttaaaatcttatgaggcattactattaatttttctattttgaagataagrcaactgagtcttaaaaatgttatgtggcttacttcaaaattccctaaccaattaatggcataacagggactcgttcacagactaactttggagctgactctgtaaagtaataagccagctaggctgtctctcactgaccttcagagcataaagcccagggcagcagcagttaaaggaaccattgttatgagcaaaactcttacagagctgcatgggagcgagaggttgggggtaggcagaataaggggtgg

SEQ ID NO: 329256 - DNA, 662 bp, Homo sapiens
cacaactcttaaccatctgccgtgtgccaagactaaaatatgctgctcaattatgtttgttttaaataagccaggtttgtttatataaaatgtcaagatgataaaatttctagtatctcttgaaaatttttgggtagtagagacaaaggacacaatttctatattcacagatagcaatatgtaattccatatactaaagcaatctcaatcattgtcacactatcacacacacacaracatgaacacccaaggcaaagaaagaaaattgctcaaatgcataaggtaaaatctttctcaaaatattataccatattttggtatatcagtcctagccagttaacaagtgggactctcaaactagaaaaggttaccatatgcgcagcaaaagacatttgtatgtttttatttttcatgttagtggatttcaatgtgaaaatgatcacttatgaccaaataagttaaagtgcctaaattcttaaaataataagagccaaattagaaacaagtattttaaaattatgtgtaaaactgttcaactttatgaaaataatatagtaggttaatttttgaatgtggcaaacatttatttgagtaaaataagaggaaccctaaggaattagaatgtaaatatgcccagaaataatactttagtaaaaaaggga

SEQ ID NO: 329257 - DNA, 579 bp, Homo sapiens
tcacttaacaatggggatacattcgggaaatgcatcattaggcgattttgtccttgtgtgaatattatagagtgtatttacataaacctagataatgtagcctactacacacagaggctgtatggtatagcctattgttcctaagctatgaacctgtacagcatgttattgtactgaatactgcaggcaacagaagcacaatgctaagtatttgtgtatgtaaacatagaaaaggtaaagtaaaaatattgtataatcttataggaccactttgwcatatgtggtctgtaactgactgaaatattttgcagtgcatgactgtatttaaggctcatctggagctaataaggtattaatttctcatcctaatggacaaagttaatggtgcactaatttgagatcaattagaatgtatgatgtaatactcttctgtaaaaatgttttcctaaaatatgttttgtgagtttaggataaattagaaattcctttattaattaattcttaattatctaatagttattgaaaacccacttcttaattatagtgctgtggatgataaagatgagtcagaggttttat

SEQ ID NO: 329258 - DNA, 537 bp, Homo sapiens
catcttggctcttccccccactccaatatacatattaatagaagttaccaatgtagcataggaaagggacaatatttgaaattataataattgaaagcttttccagattgatgaaaaataacaattcttayagcctataagcaaaataatttccaatcaagataattaaaaataaatttataccaatcatatttaattaaaactgacaacaggtttttttgtttatcttaaagacaaataagagggagaatttagccaggagaaagggaaaaaggaggagagagaaagggagtgagaaagggatagaaggaggaaaaggcagagagagaaggagaagtggagagagagagagattaactacagagaaataatatttggactgcagcagatatctcaaaatcaacaagaaaagtcagaaaataaagaataaattatacactcaaaatgcttagagaaagtaggagatcaagagttctatacactgttaaataattcttcaagagtgagggggaagagaagatatattcaaatagggct

SEQ ID NO: 329259 - DNA, 537 bp, Homo sapiens
catcttggctcttccccccactccaatatacatattaatagaagttaccaatgtagcataggaaagggacaatatttgaaattataataattgaaagcttttccagattgatgaaaaataacaattcttatagcctataagcaaaataatttccaatcaagataattaaaaataaatttataccaatcatatttaattaaaactgacaacaggtttttttgtttatyttaaagacaaataagagggagaatttagccaggagaaagggaaaaaggaggagagagaaagggagtgagaaagggatagaaggaggaaaaggcagagagagaaggagaagtggagagagagagagattaactacagagaaataatatttggactgcagcagatatctcaaaatcaacaagaaaagtcagaaaataaagaataaattatacactcaaaatgcttagagaaagtaggagatcaagagttctatacactgttaaataattcttcaagagtgagggggaagagaagatatattcaaatagggct

SEQ ID NO: 329260 - DNA, 537 bp, Homo sapiens
catcttggctcttccccccactccaatatacatattaatagaagttaccaatgtagcataggaaagggacaatatttgaaattataataattgaaagcttttccagattgatgaaaaataacaattcttatagcctataagcaaaataatttccaatcaagataattaaaaataaatttataccaatcatatttaattaaaactgacaacaggtttttttgtttatcttaaagacaaataagagggagaatttagccaggagaaagggaaaaaggaggagagagaaagggagtgagaaagggatagaaggaggaaaaggcagagagagaaggagaagtggagagagagagagattaactacagagaaataatatttggactgcagcagatatctcaaaatcaacaagaaaagtcagaaaataaagaataaattatacactcaaaatgcttagagaaartaggagatcaagagttctatacactgttaaataattcttcaagagtgagggggaagagaagatatattcaaatagggct

SEQ ID NO: 329261 - DNA, 625 bp, Homo sapiens
atcatagctttgcattttctatatttaacggctaatttttagccaatgaagtggttaaaatagactatggaatgtacaggtgaagagaacatgcatatttaaattataatctatttccataagcaaattataaaaacctttctgctctctgaattataaagaagtgtatttttcatatttaataacttgtgaaatataaattttctcatttgctcaagatgattttgggaggctaatcatgctttctcaaaatgttcatccattcacagaactgtatactaagtggtctgcatttccaaagaggaataagacatgacccaaccttcaaggggctcatgttctgttagacgtgaaaagaaaacaaatgagtttattaatgtagaataaaatacaattgtatatagaaggtgccattattataatgagaaagaaattaargtataaaacaaacacttgacaaaagatatggtgcttgaattatatattgaattcattcagttttttgctatgtaccatgctcagtactagccataagttgtaaaaatcagaggctcctagcatcatgtagaatacattctattaagaaaaaaagacaataaacatgtcacaaataaataaaatacag

SEQ ID NO: 329262 - DNA, 625 bp, Homo sapiens
atcatagctttgcattttctatatttaacggctaatttttagccaatgaagtggttaaaatagactatggaatgtacaggtgaagagaacatgcatatttaaattataatctatttccataagcaaattataaaaacctttctgctctctgaattataaagaagtgtatttttcatatttaataacttgtgaaatataaattttctcatttgctcaagatgattttgggaggctaatcatgctttctcaaaatgttcatccattcacagaactgtatactaagtggtctgcatttccaaagaggaataagacatgacccaaccttcaaggggctcatgttctgttagacgtgaaaagaaaacaaatgagtttattaatgtagaataaaatacaattgtatatagaaggtgccattattataatgagaaagaaattaaggtataaaacaaacacttgacaaaakatatggtgcttgaattatatattgaattcattcagttttttgctatgtaccatgctcagtactagccataagttgtaaaaatcagaggctcctagcatcatgtagaatacattctattaagaaaaaaagacaataaacatgtcacaaataaataaaatacag

SEQ ID NO: 329263 - DNA, 600 bp, Homo sapiens
cacaattatttagaaaatgtttaaagtatatttaatgaaggaatcaagttataaaagagtaatctatagatacattataaatatattatgtaggtgacctgaygatgtgccacacacattccctcttcaaggattagacttgctgcccagctatagcaagtatggtgagcagacagcttccagctgtcattttcttcatggtctgcctcggctgcagagagagctgctttgcctgactttactccctggatcactcaatgattgacacaggtcagggtataaatgtttagctatttgggactgacctaggatactctgaagggtagcaatcactgtagagctccttgttgggctggctgagactttgttaggcctgacaaagtttgacttctttctctacccaaacgtgtattttctttcccttccacagattaagccccgaaaaacatcttgtatcccaaactccatctgagcatctacttctagagaacctatttgtggtacacagaataatggcccctcaaagttgtccacatctgaatttcagaaacctgtaaatatgttacctgacatggcaaaaaggatttttcagatgtgact

SEQ ID NO: 329264 - DNA, 600 bp, Homo sapiens
cacaattatttagaaaatgtttaaagtatatttaatgaaggaatcaagttataaaagagtaatctatagatacattataaatatattatgtaggtgacctgatgatgtgccacacacattccctcttcaaggattagacttgctgcccagctatagcaagtatggtgagcagacagcttccagctgtcattttcttcatggtctgcctcggctgcagagagagctgctttgcctgactttactccctggatcactcaatgattgacacaggtcagggtataaatgtttagctatttgggactgacctaggatactctgaagggtagcaatcactgtagagctccttgttgggctggctgagactttgttaggcctgacaaagtttgacttctttctctacccaaacgtgtrttttctttcccttccacagattaagccccgaaaaacatcttgtatcccaaactccatctgagcatctacttctagagaacctatttgtggtacacagaataatggcccctcaaagttgtccacatctgaatttcagaaacctgtaaatatgttacctgacatggcaaaaaggatttttcagatgtgact

SEQ ID NO: 329265 - DNA, 600 bp, Homo sapiens
cacaattatttagaaaatgtttaaagtatatttaatgaaggaatcaagttataaaagagtaatctatagatacattataaatatattatgtaggtgacctgatgatgtgccacacacattccctcttcaaggattagacttgctgcccagctatagcaagtatggtgagcagacagcttccagctgtcattttcttcatggtctgcctcggctgcagagagagctgctttgcctgactttactccctggatcactcaatgattgacacaggtcagggtataaatgtttagctatttgggactgacctaggatactctgaagggtagcaatcactgtagagctccttgttgggctggctgagactttgttaggcctgacaaagtttgacttctttctctacccaaacgtgtattttctttcccttccacagattaagcccygaaaaacatcttgtatcccaaactccatctgagcatctacttctagagaacctatttgtggtacacagaataatggcccctcaaagttgtccacatctgaatttcagaaacctgtaaatatgttacctgacatggcaaaaaggatttttcagatgtgact

SEQ ID NO: 329266 - DNA, 494 bp, Homo sapiens
aaacaggctgaaatccctactactgtggagcttaccttttagtgtggaacacaattaaaagggtcagttttacagtatgttagaagatgactagtgctctagggaaaaagaaaagggtagcaaaactctggagggatgtgtgtgcaaatttaaatacagtggtcagtttggctgctttgacaaggttatatttgaggaaaattcctgacgtaactgggggaattagtaagggaagagtattctagcattccactctaagactccagaaaaagagcaaggaagccagtctgtctcaagtgagtgaacataaggggtaaattcagaaggatagcagaggsattagatcacttaaaggactttgactttgaccctgacagtcctgcagaacccttgtagtgttctgagcagaggagcaaatgatctgacctgctgttcttgatgagaatggagcaataattgtgtgtgggcaggaagtgaagagtaaggaatcaggg

SEQ ID NO: 329267 - DNA, 494 bp, Homo sapiens
aaacaggctgaaatccctactactgtggagcttaccttttagtgtggaacacaattaaaagggtcagttttacagtatgttagaagatgactagtgctctagggaaaaagaaaagggtagcaaaactctggagggatgtgtgtgcaaatttaaatacagtggtcagtttggctgctttgacaaggttatatttgaggaaaattcctgacgtaactgggggaattagtaagggaagagtattctagcattccactctaagactccagaaaaagagcaaggaagccagtctgtctcaagtgagtgaacataaggggtaaattcagaaggatagcagagggattagatcacttaaaggactttgactttgaccctgacagtcctgcagaacccttgtagtgttmtgagcagaggagcaaatgatctgacctgctgttcttgatgagaatggagcaataattgtgtgtgggcaggaagtgaagagtaaggaatcaggg

SEQ ID NO: 329268 - DNA, 630 bp, Homo sapiens
tttatggcagaatgtgatgagtcaattatagattcaaagcaagatatgtatgtacagataagagcataattctctgtaagtaatcagaggaattttcttggaagagaagggatttgawtaattgaactgagccttacaatttaggtaaggttttgctcctcaaagctacagagagagtttcatcaatgccccctagtcaataaatctattgatcaggtgagtagtcagtctagtgtggctagagtatagggaacagagagataagagaggagaggcacatgaggtcaagatcaaggtcataaaggaccctggaatgccaaagctaaagtttaggtttttttttttttttgagacatggtcttgctctgttgcccaggctggagtgcagtagggcaatcatggcacactgcagcctcaacctcctgggttcagaagatcctcccacccaagcctcctgagtaggtaggtgtgggagttcaatcagggttgtgggaaaaattgtagaaagatgcaaaccttcttgggaggctggaaggttttataatagtttcagtaaaagatttggctgaaggcagctgaattctcttaaaagcttagggtgtagatataaggaatgtaggggagtatatc

SEQ ID NO: 329269 - DNA, 630 bp, Homo sapiens
tttatggcagaatgtgatgagtcaattatagattcaaagcaagatatgtatgtacagataagagcataattctctgtaagtaatcagaggaattttcttggaagagaagggatttgaataattgaactgagccttacaatttaggtaaggttttgctcctcaaagctacagagagagtttcatcaatgccccctagtcaataaatctattgatcaggtgagtagtcagtctagtgtggctagagtatagggaacagagagataagagaggagaggcacatgaggtcaagatcaaggtcataaaggaccctggaatgccaaagctaaagtttaggtttttttttttttttgagacatggtcttgctctgttgcccaggctggagtgcagtagggcaatcatggcacactgcagcctcaacctcctgggttcagaagatcctcccacccaagcctcctgagtaggtaggtgtgggagttcartcagggttgtgggaaaaattgtagaaagatgcaaaccttcttgggaggctggaaggttttataatagtttcagtaaaagatttggctgaaggcagctgaattctcttaaaagcttagggtgtagatataaggaatgtaggggagtatatc

SEQ ID NO: 329270 - DNA, 584 bp, Homo sapiens
accttcttgggaggctggaaggttttataatagtttcagtaaaagatttggctgaaggcagctgaattctcttaaaagcttagggtgtagatataaggaatgtaggggagtatatctaaatagcatgtttactcatgtggtcctaagactgacctttgatcatttgagggtgacactgctctctccaggggagggtgaccagattaattacccacaggtgtattgacccaaagcctttgtcatttaatctatactaaataaatgcaaacttcacyggcttatcagcacacactgtggactcaggcagcagagacccttagctgtgctgacaggcgaaatatctgtgtcagtgtaagtctttcattcatctctgggtcagggtctgcaggtcggacctggcagctgggactataggcatgcatcaacatgcccagctaattcttaaatattctgtaaagatgaggtctcactatgttgcctagactggtctcaaactactgacttaaagtgattctatctccttgaccttccaaagtgctgggattacatgcatgaaccaccacacctgtctcaaagctaaagta

SEQ ID NO: 329271 - DNA, 584 bp, Homo sapiens
accttcttgggaggctggaaggttttataatagtttcagtaaaagatttggctgaaggcagctgaattctcttaaaagcttagggtgtagatataaggaatgtaggggagtatatctaaatagcatgtttactcatgtggtcctaagactgacctttgatcatttgagggtgacactgctctctccaggggagggtgaccagattaattacccacaggtgtattgacccaaagcctttgtcatttaatctatactaaataaatgcaaacttcaccgkcttatcagcacacactgtggactcaggcagcagagacccttagctgtgctgacaggcgaaatatctgtgtcagtgtaagtctttcattcatctctgggtcagggtctgcaggtcggacctggcagctgggactataggcatgcatcaacatgcccagctaattcttaaatattctgtaaagatgaggtctcactatgttgcctagactggtctcaaactactgacttaaagtgattctatctccttgaccttccaaagtgctgggattacatgcatgaaccaccacacctgtctcaaagctaaagta

SEQ ID NO: 329272 - DNA, 584 bp, Homo sapiens
accttcttgggaggctggaaggttttataatagtttcagtaaaagatttggctgaaggcagctgaattctcttaaaagcttagggtgtagatataaggaatgtaggggagtatatctaaatagcatgtttactcatgtggtcctaagactgacctttgatcatttgagggtgacactgctctctccaggggagggtgaccagattaattacccacaggtgtattgacccaaagcctttgtcatttaatctatactaaataaatgcaaacttcaccggcttatcagcacacactgtggactcaggcagcagagacccttagctgtgctgacaggygaaatatctgtgtcagtgtaagtctttcattcatctctgggtcagggtctgcaggtcggacctggcagctgggactataggcatgcatcaacatgcccagctaattcttaaatattctgtaaagatgaggtctcactatgttgcctagactggtctcaaactactgacttaaagtgattctatctccttgaccttccaaagtgctgggattacatgcatgaaccaccacacctgtctcaaagctaaagta

SEQ ID NO: 329273 - DNA, 584 bp, Homo sapiens
accttcttgggaggctggaaggttttataatagtttcagtaaaagatttggctgaaggcagctgaattctcttaaaagcttagggtgtagatataaggaatgtaggggagtatatctaaatagcatgtttactcatgtggtcctaagactgacctttgatcatttgagggtgacactgctctctccaggggagggtgaccagattaattacccacaggtgtattgacccaaagcctttgtcatttaatctatactaaataaatgcaaacttcaccggcttatcagcacacactgtggactcaggcagcagagacccttagctgtgctgacaggcgaaatatctgtgtcagtgtaagtctttcattcatctctgggtcagggtctgcaggtcggacctggcagctgggactataggcatgcatcaacatgcccagctaattyttaaatattctgtaaagatgaggtctcactatgttgcctagactggtctcaaactactgacttaaagtgattctatctccttgaccttccaaagtgctgggattacatgcatgaaccaccacacctgtctcaaagctaaagta

SEQ ID NO: 329274 - DNA, 569 bp, Homo sapiens
tttgtattgtgttttattatacttgcttgaaaacttgataacttgttcagatttcagaatctcatcactattttctttcagggatggaaatgcatttctatcaggacataaaaaagtctatgggtttgtcacctttgagtaggattcattgtcatctctcaaaaatctatgaaaattcaaaacaaaagatatcatccttttaggagatgttgtaattcactctctaaatgatttacctgtattatatttgaatctgccaatttttctgccttctagaataaaaataattagactggtgggatactctgtgatctctaataatatttgttkaagctggctcttggatataaaatgtctatacatttatatttttcaaaagttctaaataactgaaaattatcagggataagaggatgctattacaagttgaaagattagcatatcatatggattaaaaaacagtgtgatgaaactggtattacagtgatttgcctctcaaatattcacctgatgttatttaaagactttgatgcttactgcaatgctgcaacacatcggacactcaatta

SEQ ID NO: 329275 - DNA, 626 bp, Homo sapiens
gtgaaattcaagccctcccaagcacaattttccatttagtttccttttatctttgtatgaatagtatgacagggaagcctggttgaggataagggacattcacgaggtttaagggacgtgtttaagactacatgtacttagcctaagggacaggacaataaacaaaacctaagaccctatagtcagtacatttttcactaaatcaaaaagcttctggtataaatgtgcattcaagccagagcatattgccatgctgggggaaggaagagcatgattatggcaaaaatatgtaaatgagcacctgctgaagaccaccagagccatctgctccttggaatyacgtacccatttaccaacctctttttgttagcttttcccctcagttgttcaggacatgaagggaggaccacattctctaattatgaattttaaagcattagcaataattgagatcatctcataaaatgaacttgccaaagaagtgcctgcttgatttagtggactagtatcttaaactgcttggagacctatgtgcgaatcttaaagaaattgtggccaaaaaaattcttaaagttgaccctatagattatcagaatcagaatgaggtattcattctagcattggct

SEQ ID NO: 329276 - DNA, 626 bp, Homo sapiens
gtgaaattcaagccctcccaagcacaattttccatttagtttccttttatctttgtatgaatagtatgacagggaagcctggttgaggataagggacattcacgaggtttaagggacgtgtttaagactacatgtacttagcctaagggacaggacaataaacaaaacctaagaccctatagtcagtacatttttcactaaatcaaaaagcttctggtataaatgtgcattcaagccagagcatattgccatgctgggggaaggaagagcatgattatggcaaaaatatgtaaatgagcacctgctgaagaccaccagagccatctgctccttggaatcacgtacccatttaccaacctctttttgttagcttttcccctcagttgttcaggacatgaagggaggaccacattctctaattatgaattttaaagcattagcaataattgagatcatctcataaaatgaacttgccaaakaagtgcctgcttgatttagtggactagtatcttaaactgcttggagacctatgtgcgaatcttaaagaaattgtggccaaaaaaattcttaaagttgaccctatagattatcagaatcagaatgaggtattcattctagcattggct

SEQ ID NO: 329277 - DNA, 626 bp, Homo sapiens
gtgaaattcaagccctcccaagcacaattttccatttagtttccttttatctttgtatgaatagtatgacagggaagcctggttgaggataagggacattcacgaggtttaagggacgtgtttaagactacatgtacttagcctaagggacaggacaataaacaaaacctaagaccctatagtcagtacatttttcactaaatcaaaaagcttctggtataaatgtgcattcaagccagagcatattgccatgctgggggaaggaagagcatgattatggcaaaaatatgtaaatgagcacctgctgaagaccaccagagccatctgctccttggaatcacgtacccatttaccaacctctttttgttagcttttcccctcagttgttcaggacatgaagggaggaccacattctctaattatgaattttaaagcattagcaataattgagatcatctcataaaatgaacttgccaaagaagtgcctgcttgatttagtggactagtatcttaaactgcttggagacctatgtgcgaatcttaaagaaattgtggccaaaaaaatwcttaaagttgaccctatagattatcagaatcagaatgaggtattcattctagcattggct

SEQ ID NO: 329278 - DNA, 565 bp, Homo sapiens
agcaagtcattatttgctccagttttaatatgattttgytttccctttgagatagaaaacatcagaggagttgattaaaaagccagacttgagtgcaattctgatggcatgcctgaagaaagacaacataaagtttgaagaaaggacaagaagtagctaaaatcaagaatttgcagaaattttcatatgaggacatgagcttcattaatctctaaaaaataagtttgaaggggaatataattaaattgtataaaacagtgaaagtgacacagaggaaatagatgctgaaagagaatagcacctcttctgtgctagaaaattgtatgtgctgtaatctattctattttgaaaatatagctagtcattattatgacatttcaaatgaagaaactcaggctcaaagaatttcaggactatctaataacgattaaatgaagtaatgtcccataatataaaaaaaaaagtagcactttgcacttcagtggatggagacaagaggtattggaggccaaagtaaaattaaaatgtaagttaataaaaacacaaggacaactcagatttatga

SEQ ID NO: 329279 - DNA, 565 bp, Homo sapiens
agcaagtcattatttgctccagttttaatatgattttgctttccctttgagatagaaaacatcagaggagttgattaaaaagccagacttgagtgcaattctgatggcatgcctgaagaaagacaacataaagtttgaagaaaggacaagaagtagctaaaatcaagaatttgcagaaattttcatatgaggacatgagcttcattaatctctaaaaaataagtttgaaggggaatataattaaattgtataaaasagtgaaagtgacacagaggaaatagatgctgaaagagaatagcacctcttctgtgctagaaaattgtatgtgctgtaatctattctattttgaaaatatagctagtcattattatgacatttcaaatgaagaaactcaggctcaaagaatttcaggactatctaataacgattaaatgaagtaatgtcccataatataaaaaaaaaagtagcactttgcacttcagtggatggagacaagaggtattggaggccaaagtaaaattaaaatgtaagttaataaaaacacaaggacaactcagatttatga

SEQ ID NO: 329280 - DNA, 559 bp, Homo sapiens
acagatacagctattcatgcccaggtacagtcatgagtcacataatgatgttttggtcaatgatggactacatataagacagtgttcccataagattttaatggcgctcaaaaattcctgttgtgtagtgacatcatagccatcgtaatgtcacagcacaatgcatgactcacaggtttatggtgatgctggtgtgaaaaaacccactgcactgccagttgtataaaagtctagcacacataattatatacaacacatattttataataataaaccactgttattgattttgtatttactatactcctatttattaaaaaatgttaatgataaaataacctcaggtaggtctttcagaaggcatgtcagaagaagctgttgttatcatagaagattacagttctatgtgttttattggycctgaaggccttctagtgtgacaagtggttgaagtgagtgacattgatgatctcgacccatggataggcctaggctagtgtgtgtgtgtgtgtgtgtgtgtgtgtgtgtgtgtgtgttatgcgcacgcaggtgagcgggt

SEQ ID NO: 329281 - DNA, 592 bp, Homo sapiens
tttaaaaatcaaatttaatcattttctagataccataagattgtcttctggtccagatatttgaaggtatctagataaaagtcaaagtaataggactatatattttaygggagtgtgctgttaattccataacacctctagagtcattctatttgtttataagaccaaaaggaagtggaaagagaggtacaggaccaattggctcagctatcattggtttagagatctgtgcctatgtcttagtaaagtggtaagtttcatagtgaatgcgagccctacctgaaatccatacatgctagctatatctgaagagagggcaaaaccagaggtgaggatttgcatggtaggaagattagatgggtcccaacaaaactcacagaggatgtcatttttcatccaaatgctatgtttaaatcagttcctaataactgttagtagaaaaagataaaagtgtatctttttccttcaaacaacttgataaaaccccatattaacatccaaacagagtttcaggtatgtcaggaagcccactttaaagaaatacttaagaagcagatcttcattcagtccatttggaccacaaggcctaaga

SEQ ID NO: 329282 - DNA, 567 bp, Homo sapiens
tgcagagggcttcttagctagcctcccaagtctcccatcaatatctgaaaaatcaattttcttactctcagatttcttctcagtcttaacactaagactggcttgaaactggatgagttcagaggttttggaggattaccttatcagagtaagtttatccagttggtaatatgtgaatgtttacaaaagtgtattcataaacttaaaatcataaaactgaacagaaaagtttgatatttatgaatttatagacaagttattaattaactctgtttattcagttagaatattcacatggggaaagtttccaggataattctagtcgttctcagtgccactccaaacaaaggaacaacagcaaggtaattttatcaggttatgattgtgagacaggaaaattcccttgaccccctcacgggacttgtgactggggtggcttgyttacttggcagcctcactcaaaccccttgcaggagggggagcacacaagtgagtgggtgcaggagctgggacaagtgcctttgggtgctggcaggaaaaaaccctgtagcaacccgtggcagtgta

SEQ ID NO: 329283 - DNA, 595 bp, Homo sapiens
taattaactctgtttattcagttagaatattcacatggggaaagtttccaggataattctagtcgttctcagtgccactccaaacaaaggaacaacagcaaggtaattttatcaggttatgattgtgagacaggaaaattcccttgaccccctcacgggacttgtgactggggtggcttgcttacttggcagcctcactcaaaccccttgcaggagggggagcacacaagtgagtgggtgcaggagctgggacaagtgcctttgggtgctggcaggaaaaaaccctgtagcaacccgtggcagtgtattggggtagtccatgacctctggagtcccagagggtgtgtgttacaaacaatgctgttttagctttgctgtctgctgattgcttaagtttaaactgctcagtgactagtcaatgtgatagcctttttgggttcttgcacccagtgcatcccaaattcttgtccagcrtctaggaagaatcaggtcacacgaatgcattgaagggtggcataagtgtaggattgtattgagtgatggaaatggttcttagtggggtggggagctggaaaggggatggagagggaagata

SEQ ID NO: 329284 - DNA, 559 bp, Homo sapiens
ccccctgcaggctgctttcacaggctggcatttagtgcacatggctgtgcaagtacctayggcattgagtgcctatagcacagtgcaagctgttggtggatctaccattctggggtctggaggatggtggcccttttcacacctctactaggcagtaccccggtggagactctgtgtgggggctctgaccccacatttcccttccatactgccctggtggaggttatccatgaggattctgcccctgtagcaaacttcttcctggacctctaggtatttccatacatcctctgaaatctaggtagaggttcccaaacctcaattcttgacttctgtgaacctgtaggttcaaaaccacgttggagctaccaaggtttggggcttgcaccctctgaagcaatggcctgagctgtacgttggctccttttagccatgactggagtggatgggaagcaggatgccaagtccccaggctgcatacagcaggggggccctgcgcacagcccaggaaactattttttcctactaggcctctgggtctgtgatgggaggggctgcc

SEQ ID NO: 329285 - DNA, 559 bp, Homo sapiens
ccccctgcaggctgctttcacaggctggcatttagtgcacatggctgtgcaagtacctatggcattgagtgcctatagcacagtgcaagctgttggtggatctaccattctggrgtctggaggatggtggcccttttcacacctctactaggcagtaccccggtggagactctgtgtgggggctctgaccccacatttcccttccatactgccctggtggaggttatccatgaggattctgcccctgtagcaaacttcttcctggacctctaggtatttccatacatcctctgaaatctaggtagaggttcccaaacctcaattcttgacttctgtgaacctgtaggttcaaaaccacgttggagctaccaaggtttggggcttgcaccctctgaagcaatggcctgagctgtacgttggctccttttagccatgactggagtggatgggaagcaggatgccaagtccccaggctgcatacagcaggggggccctgcgcacagcccaggaaactattttttcctactaggcctctgggtctgtgatgggaggggctgcc

SEQ ID NO: 329286 - DNA, 559 bp, Homo sapiens
ccccctgcaggctgctttcacaggctggcatttagtgcacatggctgtgcaagtacctatggcattgagtgcctatagcacagtgcaagctgttggtggatctaccattctggggtctggaggatggtggcccttttcacacctctactaggcagtaccccggtggagactctgtgtgggggctctgaccccacatttcccttccatactgccctggtggaggttatccatgaggattctgcccctgtagcaaacttcttcctggacctctaggyatttccatacatcctctgaaatctaggtagaggttcccaaacctcaattcttgacttctgtgaacctgtaggttcaaaaccacgttggagctaccaaggtttggggcttgcaccctctgaagcaatggcctgagctgtacgttggctccttttagccatgactggagtggatgggaagcaggatgccaagtccccaggctgcatacagcaggggggccctgcgcacagcccaggaaactattttttcctactaggcctctgggtctgtgatgggaggggctgcc

SEQ ID NO: 329287 - DNA, 620 bp, Homo sapiens
gacatgccttggagacattttccctattgtcttggtgattagcatttggctccttattacttatgaaaatttccgcagcccacttgaatttcttcccaaaaaataggattttcttttctactgcatagtcaggctgcaaattttccaaacttttatgctctgtcacctcttgagtgtttgatgcttaggaatttttacaccgcctttgtaaaattatgactgaaacagtgaaagagatctaacttaaccgattccatcttgttctaacctccaagctgtctttgtttattcctgggcataggctgaactaactttgggagaaacttagtttgttgtttttagtttaaacaaagatggtaatagccctttcccaaagcagacctccttcttgcctggtgactasactaactttagccacaggattagaaattatggtttaggagttgaacaagcgaagtcgctcacgcctgtaatcccagcacttcgggaggctgaggtgggtggatcacaaggtcaggaattcgagaccaacttggccaatattatgaaaccccatctctactaaaaatacaaacaaattattagctgggcatgatggtacacgcctgtagtcccagctg

SEQ ID NO: 329288 - DNA, 620 bp, Homo sapiens
gacatgccttggagacattttccctattgtcttggtgattagcatttggctccttattacttatgaaaatttccgcagcccacttgaatttcttcccaaaaaataggattttcttttctactgcatagtcaggctgcaaattttccaaacttttatgctctgtcacctcttgagtgtttgatgcttaggaatttttacaccgcctttgtaaaattatgactgaaacagtgaaagagatctaacttaaccgattccatcttgttctaacctccaagctgtctttgtttattcctgggcataggctgaactaactttgggagaaacttagtttgttgtttttagtttaaacaaagatggtaatagccctttcccaaagcagacctccttcttgcctggtgactacactaactttagccacaggattagaaattatggtttaggagttgaacaagcgaagtcgctcacgcctgtaatcccagcacttcgggaggctgaggtgggtggatcacaaggtcaggaattcragaccaacttggccaatattatgaaaccccatctctactaaaaatacaaacaaattattagctgggcatgatggtacacgcctgtagtcccagctg

SEQ ID NO: 329289 - DNA, 525 bp, Homo sapiens
aagtgatttattcaaggtctaatagccagtaagtggctgagcagtgatttgcattcccattgtctttgctactaaacagagcattatgttgctattagatgctcaaaggtctgaaaagtatctgttcattctaataaccaagaaattattgatcacttggaaagattagttttgcttaaacactaagagcaaattcatttttcagtagtttgaggattgaatgtcaggtgaaaaaatgaaagcagaaaatgtctttcaagaaatgagttgtgatacttttgataatttaaacaaaatttttaaaatttattttgtaaatagrtgtgggaaacaagtgcagttttgctatgttgatatatagcactgtggtaaagtaagggccttcagtgcatctgtcactggagcaatgcagcttgtacccaccaagcaacctcccatcatccactccactcctaatcccctacccctccaagtttccattgtccatctctgtacactctgcttctgtgtgtacacattatttag

SEQ ID NO: 329290 - DNA, 323 bp, Homo sapiens
gttcctatccattttctgaattctatttctgtcattttagccatttcagcccaattcaaaacccttgctagagagctagtgccattgtttgaaggaaagaargcactctaggtttttaaattgtcagcatttttgcactggttgattctcatctgtgtgcgctgatgttccttcagtctttaaagttgctgtcgtttggatttttttttcttttatcctatttgatgaccttgagggtttgattgtggtataaggtaggttcagtcaactggctttatttctggaagattttatggggccaatgctcaactcacaattcctag

SEQ ID NO: 329291 - DNA, 585 bp, Homo sapiens
tgagttgctctgaaaccactgttcatagcactccaataggtggtgccagccaaagtgtttcacagggtgatggcagcaggatccatcctcattcacatgtgcccacagcagcaacagtggcagtgtggcaggatgcacaatcatccactgcagtagagtgccagcaagtgccagggtgccagccctcctgcaggtgtttgcagcagcagcggaggcagcacagcttgaggaaagtgggtgccctgctggtgactgtgagcagtcacactggtgatagttttagcatgtggggtggggtgttggtgggcagaggactgtgtgcaccctctgtgcattcacacaggtggaggtggccactgaaggtagggagggtttgctgtcctccatgcgtaatttcactgcagtggcagtgttggcacagtggcagggcactggtggcagcagagctggtgggcatacggcccascaaggctccaactacaatgacagtaagatgttggggctggtagagtacactttgctggcagcagtgggaggccagctttcatgcacaaatgcgctggtggggcaggaaaggaaagatgc

SEQ ID NO: 329292 - DNA, 585 bp, Homo sapiens
tgagttgctctgaaaccactgttcatagcactccaataggtggtgccagccaaagtgtttcacagggtgatggcagcaggatccatcctcattcacatgtgcccacagcagcaacagtggcagtgtggcaggatgcacaatcatccactgcagtagagtgccagcaagtgccagggtgccagccctcctgcaggtgtttgcagcagcagcggaggcagcacagcttgaggaaagtgggtgccctgctggtgactgtgagcagtcacactggtgatagttttagcatgtggggtggggtgttggtgggcagaggactgtgtgcaccctctgtgcattcacacaggtggaggtggccactgaaggtagggagggtttgctgtcctccatgcgtaatttcactgcagtggcagtgttggcacagtggcagggcactggtggcagcagagctggtgggcatacggcccaccaaggctccaactacaatgacagtaagatgttggggctggtagagtacactttgctggcagcagtgggaggccagctttcatgcacamatgcgctggtggggcaggaaaggaaagatgc

SEQ ID NO: 329293 - DNA, 537 bp, Homo sapiens
gctcttgcatgttaccaatctcttgataactcctttgtcttcatcttcatctttcagcagcagtagatggttaaccattattgatttcttgggtcaccttattgtcttaacttctctactactacacttcagtggcttctacttctcatcctacttttctggtttcttttgtgactgatttctgaacaatagatgtcccagggattgaactttggctcttttttctttctccatagataatttttttttcaatcctgtggctctgaatacctgaataccatctacttttgactgactgtcaaatttgtatctttagctccaaacatcccagaactctaggttatataatgtgccacttgtatctataaatttaaacatctaataggcatccaaaattttacatgtacaaaacaaaggaattggtttccactaccctctctcctgaactgcaaactttctcaagccamagacacaatatttatctactaggtatgtcccttaaatcccatatgaaagtccacccgtaaaacttgttaa

SEQ ID NO: 329294 - DNA, 610 bp, Homo sapiens
tgcagttttagtgattcttattatgtccctgtttaaccacctgatttggcaggtgcagaagatgaatgcattttggataatgttagtggattattataaatgttgtcaagctggtggatttccttgctgaggaaatttttaccaactgtggtaaatagtgggtaaacacatttgtaaccttggaaataatgtttaatcttgcccaatggctaaaaaaaaaaaaaaccctccagaatgagttttattacattgagcaaggagaataatacaaattcatagtcttgtctcaaggattcatgaaaggtatagtctgtgggaactaattatctcatcatcctataggttgtcactttggtcyactgatgacattaggctgacaatacctggagaatgagaagttgtttatgccgagatgcctaggtaggacaagtatgtatcaaaggatagggaataataaccatgaaaattaagttcctgcagcctcagtggagcttctggaagactagtgagtaagagtatacattgagatatgttttcccaagtgcaagtggttccaccttatatcacctactttaagaaagaggcacaatgcttgtaggaccacttctta

SEQ ID NO: 329295 - DNA, 522 bp, Homo sapiens
aatgcttcagcagattcagtgtctggtaaggatctgcttcttggttcattgatggtcatcatctccctgggtcctctcatggcaatagaggcaagggagctttctaggttatcttttttaagggcactaatctcattcattaggactttgccctcatgacctaatcacctcctgaaggccccacctccaaatacaatcacactggggattaagtttcaacatatgaacagggtgggaggccattcccctacagcatggtgtgctacttctatatatagcaatagcgcaccatttattagccatttgccaattgcctttcttgcaactatatagaatcaaaaaagataaatcctcaaatcaaacgtacaaaaagcaaactcttgctcaaactacaaggtgctctccaaaaaaaagtgatggaaatgttttaaaacccaaaaactattttaaataattaatagtcacttktcttgttttgtctgttggagatccatgagtgcagatgccttctttaatccattt

SEQ ID NO: 329296 - DNA, 594 bp, Homo sapiens
tttgctgtacctgctgcctgaaatataattctcctagatattgtgcacggcttgcactttctcattaatgtccattgttaagtgtaatcgcctaaccactgagccccaagtgacctcccacccctaccgcccagtcactctctacactgtacattgatatttttccttcattgaacttacaactaactgagacaatcttgtttaactaattatcttttatcagacaacccctattagaatgtaagctccaagagagatagtgctttatatgtcatattgactgctatatctccattgtattaaagagcacatggcatagcagcatatttaatgcatrtgctaaatgtcagatgaaggatgctggtccagcctagttctagttgcatgacttcaacaagtcatttaacatcttagaaacttgctttcttccatggaaaacaggaaaaactgtcacttttctctccagcacattgtatcaaatgttaggccgattcactaagattatataggctaaagtgatttctaaactacaaagcactatataactatttgaaaactgcaaactatgctcagaaaacactgttacttaatgtt

SEQ ID NO: 329297 - DNA, 564 bp, Homo sapiens
ctggccatttcattgtagttttaatgaattatttccttaaggttggtgattttttgtgtcctaagaagtctgattatcccaagattgcaaagatcttcccctatgttttcttctaattttacaagtttaacttttatgtgaaggctctgactcattttgacttagttttcagcatggtgtacagtatttttgcataaaatatctagttgtttcagcgtctccccccattgaattacctgaggatcttttttgaaaatcaattgactatatatgtgtagtaatacttctggactttccatgctctgcctttggtatatatatttattcctttgtcaatatctcagtgtcttgcatactataacctygcattaaattctgaaatcaggtagtgtgaattcttcaaattcctttttcaatattgctttggctatttttggctctttgcatataagttttactattggcttgtcaatttctacaaaacaagtacgaaaattttgatggaattgcattaaatctataaataaatttggggagaattgataattttccaatattcagtgt

SEQ ID NO: 329298 - DNA, 534 bp, Homo sapiens
acactttttctgtagagaatattaatgagatatcaggcatgccttttgtttatactcattattctcttttaaaataataattttttaaactttttttccaaatccctgtttaaatcagttttgtcttttttatggttatctccttaggcatatttagaatgcctctttaaattaattttgaatctttacctcggaggcaaaagcctgtatgttttctgaaaaagtttacaaaaaacaaactccatgattccaaaggaaaagtgtttcttatactactcaaatatcaggtattgctttttttcatttctgaggccattttttttctttttgtcctggtcttagcaaacaaagaaaaatactctgcagaagaaaatggtaatttgttttcttcatttgtcttcccacaatccctacatatctctatcttcaggaacccgtaactcctgagaaagaaactctctcatcctttttaaatctatttctttctgcctgtattttcartctcacatatgtctcattcttctggaatcttgt

SEQ ID NO: 329299 - DNA, 534 bp, Homo sapiens
acactttttctgtagagaatattaatgagatatcaggcatgccttttgtttatactcattattctcttttaaaataataattttttaaactttttttccaaatccctgtttaaatcagttttgtcttttttatggttatctccttaggcatatttagaatgcctctttaaattaattttgaatctttacctcggaggcaaaagcctgtatgttttctgaaaaagtttacaaaaaacaaactccatgattccaaaggaaaagtgtttcttatactactcaaatatcaggtattgctttttttcatttctgaggccattttttttctttttgtcctggtcttagcaaacaaagaaaaatactctgcagaagaaaatggtaatttgttttcttcatttgtcttcccacaatccctacatatctctatcttcaggaacccgtaactcctgagaaagaaactctctcatcctttttaaatctatttctttctgcctgtattttcaatctcayatatgtctcattcttctggaatcttgt

SEQ ID NO: 329300 - DNA, 555 bp, Homo sapiens
gagtccaaaggaagaagtttctgaaagacaagygaaagatgtagcaggaactcctagttcttcaccaacatttattctcaccttcttttgtagtaaaggaaattgggataaacgagtggccacctgtgttggtactacatttcccagactccttgaggttagtttggtcttatgactgaattctcacccagggaatgtgagcaaaagtagggtgtgccgctcctgagccagagccatagacagtaggcaatatcttcccctttcatactggatgtaaccactggggtgtgccagccttggccatgtaaacaatacaagacacagagaccagcaaagcaacaactcactaacagccaggtccctgaatgattatatggagcagaaccaaaggctagcctggaaaccttaattcagactgctatgtgaaaaagaaagttttttagttcttcgagtcataacatcaggagacattttactttttattacatcagccttctctaactctagctgtggccccagattaatgacaagtggcatcctaaatagaaaggctag

SEQ ID NO: 329301 - DNA, 589 bp, Homo sapiens
aggtaatggtgatcaaaggacacatagacccttaaagacctctgaggtatgctgaggaagggtactagaccttgtactrtatgcaagatggggattcaagacagttttctcaattcttgaaaaatagcctcagaatgttgggagatgagatcagacagatgacagacacttaaattacatccttccctgtcatttaaatcctccttgcatttcagccttcaattcaaatgtcacttccttcataaagtggcacaaaatgtggcatctggactcttggatcagcatgaaaggggatactttgggggttttctaccaagttccatggacaggatgcctggtctgtaatgggtagccctacacggcaaatatggcattcagctttgcatcattataaattaaaaatgcaatttatgaaacgagtcttttgctaaggataggttggtttatgaagtaccatcatggcctatcatcagaaggtctcaaaatggccatgcctttatcttattattttctttcagtataaatttgaactttcattgtaccaatgggtataataaatacctcccatctgagggtgtactagcctaaa

SEQ ID NO: 329302 - DNA, 620 bp, Homo sapiens
tttggtagtcatctacactcaagttgactttatgtgaatgaaattatcctagattttctgggtggaaatgatccaattagttgaaaggccttaagaacagcactgaggtctctctgaagaagttctacctgtggactggagcatcagctcctgctcaggagtttctagcttgctctatggatttagaacttggaaatttttctgttttgttcactattgtatccctagtaccggcccaataggcaatccattaatatctattgaatgaatgaatacatgagcttaattccatggtaaagtcagcsaagtatgtgaggtggtattatttagataaaacagttgacgtcctaaattttaattttctgccagtttcccccgctctcacacacacacacacagatactctctcaaatgtactcacttgtgatcaaaccttgttcagtctttctccccctctacttttctgcacagtggacatattggtcacattttccctattgagaacctctcttctttcataattctgtgctgctcatccaacaaactccatctctacagttaccttttctatgaattattctaagatttccttaatagaagttgtcttggtatctcctgaa

SEQ ID NO: 329303 - DNA, 644 bp, Homo sapiens
ttacaatgagcagctctgatctctgagatttctaagatattcttatttaagtgttatggagacttcccatttctgccaagatgtcaaaataacgtaagactctgtcttcctctcctaaattcaactctgaatataacacaagtgtaagaagagggtgagattgaccagtctgagaaaataatgctgcaactttgagaaacccctggaaagagaagataaatgaaatctgatagagctgagagcagcagttcagagaagatgagggttatgtacaatagggattgggttgagaaaaagcctttctatctgctcttctctcaccacaacattgccctgacaggatcactgctcatttcaacatttctgcraagcaaaaattgagcagcttcttaccaggtctgccaggttgaaaggtggcattccagtgcatctagaggtgcatgaagtgggaagcaaagaactgcagatgagctagaagatttcttcttccctcctcccttgttgcatgaattcagttatgacaattgaggaaaacaactcttagataagaacaggctaaggatgatggaacaggaagttttactgagggacaggattaactggttaggagggtggtaagtgggcctagattaaataccaatatt

SEQ ID NO: 329304 - DNA, 644 bp, Homo sapiens
ttacaatgagcagctctgatctctgagatttctaagatattcttatttaagtgttatggagacttcccatttctgccaagatgtcaaaataacgtaagactctgtcttcctctcctaaattcaactctgaatataacacaagtgtaagaagagggtgagattgaccagtctgagaaaataatgctgcaactttgagaaacccctggaaagagaagataaatgaaatctgatagagctgagagcagcagttcagagaagatgagggttatgtacaatagggattgggttgagaaaaagcctttctatctgctcttctctcaccacaacattgccctgacaggatcactgctcatttcaacatttctgcaaagcaaaaattgagcagcttcttaccagktctgccaggttgaaaggtggcattccagtgcatctagaggtgcatgaagtgggaagcaaagaactgcagatgagctagaagatttcttcttccctcctcccttgttgcatgaattcagttatgacaattgaggaaaacaactcttagataagaacaggctaaggatgatggaacaggaagttttactgagggacaggattaactggttaggagggtggtaagtgggcctagattaaataccaatatt

SEQ ID NO: 329305 - DNA, 589 bp, Homo sapiens
atggatagactgatttgaccagagtggcgttttcaaagaagggagcatgggacatgaggtttagacgtaatcaaagggaccagataattgatggcatttaatgctgggtgaaggcttcagattttccttaatgggaaatagagtagttattaaaggctcttgagtcaaggattgataatcacttatagaacatatttatgaagtaactatgaagagttcagaactctgcattaatcatgcaaggagacatcagaaaagtttcatttggctgtgatatttcagtttgactggatggagacaaagtgaaaatagggatcccagtcaggaaacacacacacaagaggtgaggcttgagatgattagggctgagtgaggaggccaggagtagcaattaggaaggaaagaatagctgtcagacacactgaaaagcacaagctgacagcacttgtagggtgaatrgacgtggtggaagagaaagcagaagaagcatgtcctggacaacatcaaggtatttagctttagtgattgacagaatcactgtagacagaaaaagggaacttaggaaaaactggcgcagacagggagataa

SEQ ID NO: 329306 - DNA, 589 bp, Homo sapiens
atggatagactgatttgaccagagtggcgttttcaaagaagggagcatgggacatgaggtttagacgtaatcaaagggaccagataattgatggcatttaatgctgggtgaaggcttcagattttccttaatgggaaatagagtagttattaaaggctcttgagtcaaggattgataatcacttatagaacatatttatgaagtaactatgaagagttcagaactctgcattaatcatgcaaggagacatcagaaaagtttcatttggctgtgatatttcagtttgactggatggagacaaagtgaaaatagggatcccagtcaggaaacacacacacaagaggtgaggcttgagatgattagggctgagtgaggaggccaggagtagcaattaggaaggaaagaatagctgtcagacacactgaaaagcacaagctgacagcacttgtagggtgaatggacgtggtggaagagaaagcagaagaagcatgtcctggacaacatcaaggtatttagctttagtgattgacagaatcaytgtagacagaaaaagggaacttaggaaaaactggcgcagacagggagataa

SEQ ID NO: 329307 - DNA, 629 bp, Homo sapiens
accatggtttacaggcctcactctgcatccctagcaccaagcacaatgcttggcaaattgtaggcaatcaataaatatttgatgactgactttccaggaaaacatactaaagcagaaaataatagcaaaatcttaactaaatgaaattactaaaatctacagctggcaaarctcttctccctccctttttcaggagattaattgctgtacttaacatttgtaaagtatttctgacacatcaaaatggccagaggggaattcatactgaaaatctaattcgttattattaataaattgctttgtggtcccagctattccctagggatgcagatatgggaaagaaagggaaactcacttttaatatttttctcaatgtcttaatttgggaaaactctgaggtttttttttggtggttcattctgaggtctgggcaaaggttcaagcccattcctgagttatctaaactgattcatcctcccccatccaaagccaacaattgcagaggtttgcaacagtactatgccctaactacttagtgctgagaggtttttaatctttttcttgttggtctccttatcttctggtgcttctctgtctcatccccttttccagaggctcccaacataatc

SEQ ID NO: 329308 - DNA, 553 bp, Homo sapiens
aacaaaatgaaaattcacaaaattgacaaattttggcaagtctttcatattgaattaaaacatcttggcttatcctgaaaccataaataggggattatttctttccattctcttgggagctgtgcccyggtattcagcatcagagggtacaagatttatttttctagatgagatatattctagagaaactagtaggcatgcaaaaagtgatagataaatatttaaaagttcttacaaacttaagaaaacttcattattctgttgccttgtaacaaatagtcatcaaaaccatgttttgccctattcaatctatcaataactcacctctatgaacaacacactttcacaaaccaaccaaccagtgccagcacctcccttctgaaagtcagacaatcgaggacagactcactctggcaaacatgcctctgagctccaacaaatcaataccaatctcacccaagtaaacatgctctggagatgatgtcaatttacttgggtctctggaagtccaccaaaccatgaaccatatttcccaaaaactctatgtgaaata

SEQ ID NO: 329309 - DNA, 553 bp, Homo sapiens
aacaaaatgaaaattcacaaaattgacaaattttggcaagtctttcatattgaattaaaacatcttggcttatcctgaaaccataaataggggattatttctttccattctcttgggagctgtgccctggtattcagcatcagagggtacaagatttatttttctagatgagatatattctagagaaactagtaggcatgcaaaaagtgatagataaatatttaaaagttcttacaaacttaagaaaacttcattattctgttgccttgtaacaaatagtcatcaaaaccatgttttkccctattcaatctatcaataactcacctctatgaacaacacactttcacaaaccaaccaaccagtgccagcacctcccttctgaaagtcagacaatcgaggacagactcactctggcaaacatgcctctgagctccaacaaatcaataccaatctcacccaagtaaacatgctctggagatgatgtcaatttacttgggtctctggaagtccaccaaaccatgaaccatatttcccaaaaactctatgtgaaata

SEQ ID NO: 329310 - DNA, 578 bp, Homo sapiens
attttagtaaatatcagcatatattccaaagtggctgaagcaacttgtatttctaataatattgcatgaaagacttcaccatcactagcatttatcactgattttagttcttgctagactggttggtaaaaagttatatttttattgtttctttaaattttatttccctgtttacaagagggcttgaaaatcattttgttgatcacttggattttcttttctataaaattcttattaatatcttttgctttttwaaaaaaaatcagtttatgagactatgcattatggctattaaattttttctttatttgtgttgtattgtttttctaaatctatcattatttatatattttgctctacatgattttaatattataaagtcaaaatattaccctaattctttcataacttctgagttttctgtcatggtctcaattatttccatatcttaaattgaacaagtcatctcctatattttctcctaacatcctttattgttctatttgtttaaatttaaatatttcctccatctggacttattcttgtataaagtatgggtccagcatgattttattgta

SEQ ID NO: 329311 - DNA, 549 bp, Homo sapiens
gtatggacatgtggattagctggtgatataagcagagaagagttgaggcccatttaagcccccaccctccctgaatcctaactaggaggttaggtttagatggttgaatttaaagggcctgagagacatcctagtggagattttgagtaggaaattagatrtactaggttttattcgctgaatgtttgcatcccctcaaaattcatgtgttgaagccctaatccccaaagtgatggtatttgaagatggaacttttggagataataaggtcaggagggagactccattaaggggttagtgcccttataagaaaagatactatagagctttctctctctctctctctttctctctcccatgtgaggatacggtgagaaggcagccattgacaagccaggaggcaggccctcaccagacacaggatcttctggtaccttgatctcaggcttcccagcagccataactgcaagaaataagtgattgttgttcaagacacccagtctgtggtatttgttatagcagcccacactgactaagacattaggactc

SEQ ID NO: 329312 - DNA, 589 bp, Homo sapiens
tgaatttattttgctgaagtttctgacagaaattatatttatttaatactttagaataataataatcacagacccaagtctttatttcatgtttctcaatggaagcacatcaacactgtaggaatgtcagaaagcaaaaagaaaaaacattttcacagggaggaaagtcattcagtgctagtaacaatattttaatgaataatgatagaccagcaccattgctttgtctactgggttttcacataatggtactaacaacagcaatagtgagcaaagaagggtgactgtgctgctgcagaggcttgcctggagatgagtccaggaaaggtaaaaccaactctgcaagatgrcaggattgacttagcaccaatttgagaataaaaagtgcaagtagctaagctttgagctctccatcagaagcacaggttttgtctgaaccactaaagaaattggtgatcttttactgtgtctgtatgccatcaaaaaaggagttttagaaatgtatattatgaaattggatagtagtatgtgaaagcagaatggaatcaaatgataggagtcacttggaaatcaagatggccagaatgag

SEQ ID NO: 329313 - DNA, 589 bp, Homo sapiens
tgaatttattttgctgaagtttctgacagaaattatatttatttaatactttagaataataataatcacagacccaagtctttatttcatgtttctcaatggaagcacatcaacactgtaggaatgtcagaaagcaaaaagaaaaaacattttcacagggaggaaagtcattcagtgctagtaacaatattttaatgaataatgatagaccagcaccattgctttgtctactgggttttcacataatggtactaacaacagcaatagtgagcaaagaagggtgactgtgctgctgcagaggcttgcctggagatgagtccaggaaaggtaaaaccaactctgcaagatgayaggattgacttagcaccaatttgagaataaaaagtgcaagtagctaagctttgagctctccatcagaagcacaggttttgtctgaaccactaaagaaattggtgatcttttactgtgtctgtatgccatcaaaaaaggagttttagaaatgtatattatgaaattggatagtagtatgtgaaagcagaatggaatcaaatgataggagtcacttggaaatcaagatggccagaatgag

SEQ ID NO: 329314 - DNA, 608 bp, Homo sapiens
agctctatgtgggtgttgaatttattttgctgaagtttctgacagaaattatatttatttaatactttagaataataataatcacagacccaagtctttatttcatgtttctcaatggaagcacatcaacactgtaggaatgtcagaaagcaaaaagaaaaaacattttcacagggaggaaagtcattcagtgctagtaacaatattttaatgaataatgatagaccagcaccattgctttgtctactgggttttcacataatggtactaacaacagcaatagtgagcaaagaagggtgactgtgctgctgcagaggcttgcctggagatgagtccaggaaaggtaaaaccaactctgcaagatgacaggattgactyagcaccaatttgagaataaaaagtgcaagtagctaagctttgagctctccatcagaagcacaggttttgtctgaaccactaaagaaattggtgatcttttactgtgtctgtatgccatcaaaaaaggagttttagaaatgtatattatgaaattggatagtagtatgtgaaagcagaatggaatcaaatgataggagtcacttggaaatcaagatggccagaatgagagc

SEQ ID NO: 329315 - DNA, 586 bp, Homo sapiens
gcataaatgtttataaaaagctgttatatgaaatcttctctgatcaatattgattattaatattgctgctaggctgggtgcagtgactcacacctgtaattccagcactttgggaggccaaggtgggcggatcacctgaagtcaggagttcaagaccagcctggccaacatggcaaaaccctgtctccactaaaaatacaaaaattagcccagtgttgtggtgcatacctataatcccagctacttgggaggctgaggcaggagaatcgcttgaacctgggaggtggaggttgcagtgagccgagatcacgccattgcactccagcctgggcaacaagagtgaaactctgtatcaatatatatatatacatacatacatatatatagacagagagagagagagagagctgctaaatrtcttccatcagaacactgaactaaacttgtgtatattattatccagctccttgaatacagcataaaagcctgtgaaattggactctggagtttccagcatgcacattaacatggactgctaaggatgactaagtcaggatgttagaccttactttctttgtgcttcttt

SEQ ID NO: 329316 - DNA, 561 bp, Homo sapiens
gttaatatccaaaacatataaagaactcaaacaaatgggcaaatgtcataagtagacatttctcaagacatacaaatggccaacttgtcagaatgaatatcataaaaaatatgaaagattacaagttctagcaaagatgtggagaaaaggaaacccttgcaaactgtcggttggaatgtaaattagtgcagccattatggaaaacagtatggaggttcttcaacaaattaaaaatagaactaccatgtgatcctgcagttccacttctgggtatatacccaagggaaataaaatcattgtgtcaaagagatagttgcacttccatctttattgcagcactattcatgagccaagatacggaatcaacaaaagtgtccatcaattaatgaatgaagaaaaaaatatgctgtatatatatatacaatggaatactattcagccttaaaraagcaaaaaattgtatgatttgtgacaacatggatgaacctggaggatattatgttatgtgaaataagccgggcacagaaagacaaatactgcatgatatggtttgggtacgtg

SEQ ID NO: 329317 - DNA, 498 bp, Homo sapiens
tctcattaatgaattggtcctgtcctcgtggagttcttgctttattagttcacttgaatactgattgttaaaaagagcctagmacctccctcccctatcttggtccttctctcaccatgtgacatgctggtgccccttcttctgacaccatgattggaagcttcctgaagcctcaccagaagcagatgttggtgccatgcttcttgtacagcgtccagaaccgtgactcaagtaaacctgttttctttttaattttttttctttttttttttttttcttttgagatgaggtctcactctgtcactcaggctggagtacagtgggacgatctcagctaactgcaacctctgcctcctggggtcaagtaatcctctccatctcagccttgaagtagctgagaccacaggcatgcacgagcatgcctggctaatttttttgtatttttggtagagacaaggtttcaacgtgttgtccaggctggtatcgaactgttgagct

SEQ ID NO: 329318 - DNA, 498 bp, Homo sapiens
tctcattaatgaattggtcctgtcctcgtggagttcttgctttattagttcacttgaatactgattgttaaaaagagcctagcacctccctcccctatcttggtccttctctcaccatgtgacatgctggtgccccttcttctgacaccatgattggaagcttcctgaagcctcaccagaagcagatgytggtgccatgcttcttgtacagcgtccagaaccgtgactcaagtaaacctgttttctttttaattttttttctttttttttttttttcttttgagatgaggtctcactctgtcactcaggctggagtacagtgggacgatctcagctaactgcaacctctgcctcctggggtcaagtaatcctctccatctcagccttgaagtagctgagaccacaggcatgcacgagcatgcctggctaatttttttgtatttttggtagagacaaggtttcaacgtgttgtccaggctggtatcgaactgttgagct

SEQ ID NO: 329319 - DNA, 498 bp, Homo sapiens
tctcattaatgaattggtcctgtcctcgtggagttcttgctttattagttcacttgaatactgattgttaaaaagagcctagcacctccctcccctatcttggtccttctctcaccatgtgacatgctggtgccccttcttctgacaccatgattggaagcttcctgaagcctcaccagaagcagatgttggtgccatgcttcttgtacagcgtccagaaccgtgactcaagtaaacctgttttctttttaattttttttctttttttttttttttcttttgagatgaggtctcactctgtcactcaggctggagtacagtgggacgatctcagctaactgcaacctctgcctcctggggtcaagtaatcctctccatctcagccttgaagtagctgagaccacaggcatgcacgagcatgcctggctaatttttttgtatttttggtagagacaaggtttcaacgtgttgyccaggctggtatcgaactgttgagct

SEQ ID NO: 329320 - DNA, 533 bp, Homo sapiens
gttgaaaccattgtgaaacccatgcgaatgcccagggaaagtaggtagaacaagaagagaaaagaaccagggaaaaatcttggggaattcttaaggcacactcaaggcagtagggagaggacttggaaaatccttttgtttatttcacatattgatctaggaatctatatctgtatctatatcatctattcctatttatgtcctttcaatgacatataaacattatctatgtatctatctatctatctatcatctattaatatctatctgtcatctgcctatccatccattcatccatccttcaatggtaggttcatggaagagggaaaggacagtgcaataagaactcacacattcctctgaaaatggtcttaatttctgtagcattaagagtggtatcctggctaagtatgtactsgtatactgaatcttactgctggccattgccctatagtatggtgcaggtaactgaggaggccagcttgtagtacattcacccaaggaaatgaatgtgttcaagtgacacaaagttt

SEQ ID NO: 329321 - DNA, 589 bp, Homo sapiens
ctatgtattttatttttttaattctagagtctgccttctctctcttcctctccttctcctcctttttcctctttctctctcctacccccttctccttctcctctcctttttccttcttcatctgcttcatttttctcttcctccccaacttctttttctcctttcttcctttttcttttcttttcccttctcctccttccctctttctcccttyttctcccctcctcctggacctccttcctctctctctctttccccttccccatctcctccacctttttcctcttcctgtttctctcctcctccttccagtcacagccacaattctggttgtctggctaaggtgatcccctcttactaaactcctaggtgaatgttgcatgttatatgaagtgttggttgaaagactcaggtttctgtgccagggcacagtttggtctgggacatgggtgagtggatggacccaggaaggcattgagcatagggccagtggggtgtgtcatggtctgactcaatatagttaaagaaaaaaaaaagaaaatagcttggtaaagactgaattggactgatttttttttttttttttttt

SEQ ID NO: 329322 - DNA, 597 bp, Homo sapiens
gtgtgttgtgatctacatctttgatcactgtatccctatctgccttagggggcaccctaagggcagtaatgttgtgactcttacagactcatagaggtacctccttagtctttggtgagatcyaggagatttctctggattactagacagagactcttgtttccttctcttactttcccccaaacaaatggagtctctcttccttcatgctgagctgcctagtgctgggggaggggtgacacaagcatatggaactatgccaggtcagacctgaagccagcacagcactgagtcttgcccaaggtaaccacttcctggctaccaccaatgttccctcaaggccccagagttccacaatcagcaggtattgaaaacatccacacttgtgtctttccctttagagcagcaagctacccacaggtccgagataggtccagaaatgctgtccaagggccaggacctggagtctggaaccttaggaatctacgtgaaattctattttactgcggctgagctggccctcaagccacaaaacaaagttcttcccactttcctttctcctttccttaagtagaggagtctcttaccatggctacc

SEQ ID NO: 329323 - DNA, 597 bp, Homo sapiens
gtgtgttgtgatctacatctttgatcactgtatccctatctgccttagggggcaccctaagggcagtaatgttgtgactcttacagactcatagaggtacctccttagtctttggtgagatctaggagatttctctggattactagacagagactcttgtttccttctcttactttcccccaaacaaatggagtctctcttccttcatgctgagctgcctagtgctgggggaggggtgacacaagcatatggaactatgccaggtcagacctgaagccagcacagcactgagtcttgcccaaggtaaccacttcctggctaccaccaatgttccctcaaggccccagagttcyacaatcagcaggtattgaaaacatccacacttgtgtctttccctttagagcagcaagctacccacaggtccgagataggtccagaaatgctgtccaagggccaggacctggagtctggaaccttaggaatctacgtgaaattctattttactgcggctgagctggccctcaagccacaaaacaaagttcttcccactttcctttctcctttccttaagtagaggagtctcttaccatggctacc

SEQ ID NO: 329324 - DNA, 459 bp, Homo sapiens
ttggaaaatacgtaagaattagtgtcagagctcaatgggatttgagccctaggtcttcagaagatgctaaaactccccagtccctcacttccaaaatgaaagatgtaaagctcaccccagggcttgtagctgggctgaatggacctaatggttatataaacacctggcacaggcactggtgcaagtgacccaccaacatgaattctctcctttttctctgttttcagtggttggattagctgagccagaaattacaccatttcattgtcatcctcctttgtttgtctatttgttcttcttcctaggagaattgagaggttgggaggactataatctgtaagctctggaaacacaagaactacttgtgtttactcatcattgaktttccagcacaggccaagcctggtgcaaggttcttttctattgagagaatgtgaagatgtaccttaatgacaaaca

SEQ ID NO: 329325 - DNA, 485 bp, Homo sapiens
tgaacacatagcatcgtcttcatctccaactcaggtggattcccaaattcagtatgaattgtaagcctctattcaagcacaagaagtaagtgttgatgtcatagctcaggttggtatgccttgaggtgtgaygggtgctgtgcatttctgctcttgtggggagagatgagcaagataccagacaggacagaagctggtagaactgtcctagctctagaggctttgcacacaggtccaacatagtctacaggagtgttggaaactttttccagggaaagtcgtcagtagagcccagcagtctaggccacaattaagctcaaaataagaattgtaattcttaccaattgatcctgatgtagcaaaactctagagcaagccaaacagttccaggatcactaaggaatcagagagcaggacatggagatgaagcctggagctcatttgtcctgaaaggcggaatcttacttcagtaagtatccactgat

SEQ ID NO: 329326 - DNA, 485 bp, Homo sapiens
tgaacacatagcatcgtcttcatctccaactcaggtggattcccaaattcagtatgaattgtaagcctctattcaagcacaagaagtaagtgttgatgtcatagctcaggttggtatgccttgaggtgtgacgggtgctgtgcatttctgctcttgtggggagagatgagcaagataccagacaggacagaagctggtagaactgtcctagctctagaggctttgcacacaggtccaacatagtctacaggagtgttggaaactttttccagggaaagtcgtcagtagagcccagcagtctaggccacaattaagctcaaaataagaattgtaattcttaccaattgatcctgatgtagcaaaactctagagcaagccaaacwgttccaggatcactaaggaatcagagagcaggacatggagatgaagcctggagctcatttgtcctgaaaggcggaatcttacttcagtaagtatccactgat

SEQ ID NO: 329327 - DNA, 485 bp, Homo sapiens
tgaacacatagcatcgtcttcatctccaactcaggtggattcccaaattcagtatgaattgtaagcctctattcaagcacaagaagtaagtgttgatgtcatagctcaggttggtatgccttgaggtgtgacgggtgctgtgcatttctgctcttgtggggagagatgagcaagataccagacaggacagaagctggtagaactgtcctagctctagaggctttgcacacaggtccaacatagtctacaggagtgttggaaactttttccagggaaagtcgtcagtagagcccagcagtctaggccacaattaagctcaaaataagaattgtaattcttaccaattgatcctgatgtagcaaaactctagagcaagccaaacagttccaggrtcactaaggaatcagagagcaggacatggagatgaagcctggagctcatttgtcctgaaaggcggaatcttacttcagtaagtatccactgat

SEQ ID NO: 329328 - DNA, 535 bp, Homo sapiens
ataatgatcttatggggagggttgtagacttggagtgaaattgctttcatcaaagtcaccaaagtccactggacacatttcactagtcaacgaatgccctctgggggcatttagtgccatttaacaaccttctgttggaataccttctcccttctcttccatgacactcatcactggttttcttactacttctgactattcctcacatctttggggacgtgcttcctctgccaatctctggcatatgcgcagtccctgaggatgcaccaccagctctgcttctctttcctcagatgcgctcaargcattcagtgcaacatgaatgctgatcagccttagatccacgtctgtgccttgagctctcccctgcgttcctgactcaaaagaccaactgggcttcttcttttggatgtccttgggaaagctcaaactcaatcttactcttcgattcactaccacaaagagtgatgcctacagccaccactcctcaaccctccgaccagccacataggtcagaatgtggcagatgcccttg

SEQ ID NO: 329329 - DNA, 618 bp, Homo sapiens
aaggacaaataagaaagtttaaatgacagtggaggtcaacactgagttcctgaagacataacctgctggctcccaagtgccatctctcttctccactttccactggaacattgttctatccctctctactmttctacaatgaaagaaagctgataatcaatcatggagcacccacattacgtgaggagctggactgggaacttacataataccggcatcacttcaacccctgctaaataatatctcacacttattgagctcttaccatgcgcctatgacctgtgtatatctacataatttttatttaatactcacaataagcttttcagttagggaccttcattgtagtcttcatttcaaaggtgaggaagttgaggcttagtgatttcttaaggtcaaaaggttagaacttaaagaagccaggatttaaacccaggtctgacctgagatgatgaaacactgtgaccattacaagaaaccaatggggaaaagcagggttattctcacttgggtgaggcagagcaaggcaaccaagagcaagtgcttttgggttggagacacctgaatcctcatccaggtgcaagcaactccttcccaactctatcatggtagctaagt

SEQ ID NO: 329330 - DNA, 618 bp, Homo sapiens
aaggacaaataagaaagtttaaatgacagtggaggtcaacactgagttcctgaagacataacctgctggctcccaagtgccatctctcttctccactttccactggaacattgttctatccctctctactattctacaatgaaagaaagctgataatcaatcatggagcacccacattacgtgaggagctggactgggaacttacataataccggcatcacttcaacccctgctaaataatatctcacacttattgagctcttaccatgcgcctatgacctgtgtatatctacataatttttatttaatactcacaataagcttttcagttagggaccttcattgtagtcttcatttcaaaggtgaggaagttgaggcttagtgatttcttaaggtcaaaaggttagaacttaaagaagccaggatttaaacccaggtctgacctgagatgatgaaacactgtgaccattacaagaaaccaatggggaaaagcagggttattctcacttgggtgaggcagagcaaggcaaccaagagcaagtscttttgggttggagacacctgaatcctcatccaggtgcaagcaactccttcccaactctatcatggtagctaagt

SEQ ID NO: 329331 - DNA, 594 bp, Homo sapiens
tgaacatttactagctgtcaggcatctggtgcaaagccctgtgtcttcaagggcacaagaaagggcaagacccttgagaaagcaattctatgacaaagaatatggacaaactggctttccccatctgaccacatgaatttactaaacacttaccaataccagtcagtatggtgcagtgtccatgtgcagaattacactttgtttgtgtaacagcccagcagtcaagatccaccaatcctcccatttaaccaagaccgaggtrggtggatcacctgaggtcaggagtttgagaccagcctggccaacaatacaaaaattagctgggtgtggtggcaggtgcccgtaaccccagctactcaggaggctgaggcagaagaattgcttgaacctggaaggcagaggtgcagtgagcagagatggcgccattgccctccagcctggcaacaagagcaaaactccgtctcaaaaaaagaaaaataaaataaaataaaataaaataaataaataaataaataaataaataaataagtgctgaagccaggacttgaactcaagtctagttctaatgcacatgcattcagctttcagatgcct

SEQ ID NO: 329332 - DNA, 557 bp, Homo sapiens
ttttaaataataatgctttccaattaaaaaatactttccttatctcttttttcacttttgatttgaaaaatatcttaattttaggttcttattrtctatttctattctgttttcatcacagaatagtcagattcacagctcagaagttgggctgtccgcctttttgataggtggccaattgatgttctcatcctaagtcagctctctgggttgccttttccatacttagggaggtaggattgttattagtagcagaagcagtgactgcattcatctattaacttctgaatagcaggaatggtgtccttttcttccagaacacacccctagtgctgactaagaaagggtgaactactgaacatattaatagaagccatttaaatctgcaacgtatattaagcatttacatctttaaaatattgtttccatttatttaatgtgagactgcttatttgttttcctgcctggtgcttagcacttaacaggcaatcactcattcattttgcttaaccacaaacctatgtgctgttgttatctccatgctagggatgagaaaa

SEQ ID NO: 329333 - DNA, 488 bp, Homo sapiens
aatcatttccggctagtgggaaaggtcctgatggttcaaggttgaaatgtgattttaataaaaataatgctaaaatgagattcgtgaggagtgcattctttagcttatgggagttgagcaaatatttgtggcatctaaatattcgcagcctgacatytggagacatgaacgcttccaaatctcgtggagcaactgatcttgttttattgcgctggctccctcattgccatagccttgaccttgccaggtggggcaagggtgcagagaacggtccgcactaaggcctggcatgcgtcagcaatgtgctaggtacaccacgggctttgcctcattaaatttccaggcattttttcccaagaaagcagtagttcctttttgcatgtgaggaaattgagactcaaagacctgggtcacaggtcaaagttcatactgctatttggtagccaagaaggaattcaaatcctggtcccagcctaaactctttaatt

SEQ ID NO: 329334 - DNA, 469 bp, Homo sapiens
tatttcctttgacagctgagaaagttgaagtttagcgtcattactagtgctgagaaacacagaaagtggtttaaaaaaaaaaaacaaaaatgtacctgattctaaagtttgtgttctttccaccacactcagtttgcttcccctaaatgaaaaaaaaaggtacacatgtaggaagcttcaagttcagtctcactgtctgtaaaatgagatagtgaaaattactcaaaaactaattggaagtattgaattgttcctggcttatacattgtaggggataaggtaggtaaatycagtgctagttgaattttgtgttaggctattcttgtactgctataaagagatacctaagactgggtaatttataaagaaaagaggtttaattggctcatgattccccagggtgtacaggaagcatggctggagaagcctcaggaaacttacaatcatggtggaaggtgaagaagcaggc

SEQ ID NO: 329335 - DNA, 507 bp, Homo sapiens
ttcctgacagtggttttaacaacgcaaaagcttttaattttgatgaaatctaacttatccatttttcctttgatggattgtgttgatgtcaagtctttgcctatttctagatactaaaaatgttctcttatgtttttctctaaaacatttatggttttacatttaagtccctcatctcttttagatttattttttgtgtaacatgtgagatgtagatcatttaagtttttttttctttttcccctggatgtccagttgctccagcaccatttgttgaaaaggttatcctcctccamtgaagtgtttttgcatttttgtcaaaaatcatttggtatatttgatttggtatatctgtttctgggttctcaattcttttccattgatctacgtgtctatttctattccaacaccacagttttgattactgtagctatataaaaacgtcttaaaactgtgtaaacagggtcttcccactttattcttccttttaaacattgttttagtttt

SEQ ID NO: 329336 - DNA, 623 bp, Homo sapiens
catgcaggctgtgtccactgtgtcatcagtgctccttggcatacagtgttgagaatgtgtcctggaagtatgccattgattttaaggtacatcccaatttcagagatgctagatcctgtgctttgtaaaagtattgaaagatagaaataaaaactgataaatttctgttgtataaatagaagaatgagagtttgaaagatcctgaacgtcaggggaaaaaaaaacagtttgagatttgaacttgttctaaagatcatgaaatctccagaaattattaggatgtgagcacttggaatatgggatcgtaggatctgatcttgattttaaaatcaagaactactggaaagaaaagaaaatcctcaaaatttgaaaatcccattgtctaaaataattagggatgttcataaaacaagatggagtctgctgagctgatcatatgggtcttcctcaggatgagacacctgagggactggctgtgtacgcacccagaatgctggtgggagtgatttgcatgtygccctcctcgaaggcaggggtcaggtgagattcgcctccaggtcccttggagcccatcgaatctgcattcaatcagcagtgccgttgttgcttatgtttccagaccc

SEQ ID NO: 329337 - DNA, 567 bp, Homo sapiens
ttataaaacatttcaaagctgctttgtattattttacaaatggaacacacactgcttcttaayagtcatgcagatgtaaaaaattactctcattattcaaacagagacaagtgacaccatattgtaaaatgttatttttatctcggcaaagggttagaaacagtttcattctgatccccaaccttttattctacttaaactctccgttcatatgtagtgatgtagataactattttaagttactaacagtttgtgatttttgtccctttcgctctttgcaatgataattggctaattagagagctgatcattcacaaaaaaaacacagccctgttgagaagctggctttagatatggaaatgtactaatatattaaaaaggataattttgaatgtgtttttctcctaaaattcaaatgttactgctttttcttgtctttactactaaaaggtcatcaatgacacattttaaatacactaaaaagtaaactatgactaatttgttttataaaccttatactttaatgtttgttcacattttaaaaatgtgccactctcatgtatttat

SEQ ID NO: 329338 - DNA, 624 bp, Homo sapiens
aaggcacacttactcaaagagtatagattgagaatatccttttgcaaactatgtataggatactaaatagaattatktttcttagcccatggttctatggttgtataaaaacaaaggtttggccaggcgcggcggctcatgcctgtcccagcactttagggggctgaggcagacggatcacgaggtcaagagatcaagaccatcctggccaacatggtgaaaccctgtctctactaaaaacacaaaaattagttgggtgtggtggtgtgcacctgtagtcccagctactcgggaggctgaggcaggagaatggcatgaacctgggaggcagaggttgcagtgagctgagttcgtgccactgcactccagcctgggtgacagagtaagactccgtctcaaaaaaaaaaacaaacaaaaaacaaacaacaacaacaacaaaaaaggtttttttgtgtgtgtttttgtttataaaccaaaatctacaatgaatccaaggtctttgaagttgatcactctgcaaataattttttctgtttattaatttccttctcgtaacatttttacatgggcatctactaattttaaggcaatattcatttattttaaaaattagtctattatttg

SEQ ID NO: 329339 - DNA, 624 bp, Homo sapiens
aaggcacacttactcaaagagtatagattgagaatatccttttgcaaactatgtataggatactaaatagaattatgtttcttagcccatggttctatggttgtataaaaacaaaggtttggccaggcgcggyggctcatgcctgtcccagcactttagggggctgaggcagacggatcacgaggtcaagagatcaagaccatcctggccaacatggtgaaaccctgtctctactaaaaacacaaaaattagttgggtgtggtggtgtgcacctgtagtcccagctactcgggaggctgaggcaggagaatggcatgaacctgggaggcagaggttgcagtgagctgagttcgtgccactgcactccagcctgggtgacagagtaagactccgtctcaaaaaaaaaaacaaacaaaaaacaaacaacaacaacaacaaaaaaggtttttttgtgtgtgtttttgtttataaaccaaaatctacaatgaatccaaggtctttgaagttgatcactctgcaaataattttttctgtttattaatttccttctcgtaacatttttacatgggcatctactaattttaaggcaatattcatttattttaaaaattagtctattatttg

SEQ ID NO: 329340 - DNA, 627 bp, Homo sapiens
caggatcaatgttgcattgattttagtgcctgaaattgtaatgtctcttagctttctctccttatatgtccaaatagagcccattttaagagattttttaaaataggggaatcagcagccaagttgcatgacccaaccatcttgaagacaattttttagactgaagtgagcctctgacccatggcatcctacataaaggctggtcacagtctagaagaggtctggctcaaaggcttattccatagcaatgacaataatgacttaggccaatcatatagtctctcttgagaaagtctgaatgaagatgtgaaaaaagagattgtcargtagtggcctgaacaggaatacctagttttgggagcacaacctaaaaggtgactagggagaagcagaaagagaaggcaactaagtcacacttataatgatgaacctacaggacacatcaacaaatttctgttgctgaggcacctttaattacaatctggtaactagagttgcttaaaagggcaaggacaatacagaagagagaggaggatcaaggatgctaacaaagaagcaagttcatgagtacttgcccatctcttcctttaattctcctgaagaatgtttccatcttttgaattcagc

SEQ ID NO: 329341 - DNA, 575 bp, Homo sapiens
caagctcctgagcagaaaggggcgggtccctggtgaagccccgccttcatgcttgggaaggcctaaagactgggggccaggctgccagtcccacagacaggagtgggaacttatggtgatttttctgggccaacccatggctacacaggggctaatcagcatgcactttctcccctctgaagcccataaaatccctggactcagccagacttgaagtgatgttgggacttcctgcctgtggagaagagctacccctccagggtctcctctatgctgatagctcagcagatgatgggactaacagctgtagagaggagctatccactccaaggtctcctctctgttgagagatgaacacttgataggacagcttgtctatagagaggagctacacactccagggtctcgtctctgctgagaaatgtatactygatgggatgacctgcctctggagaggagctacccattccagggtctccagtctgccgagagctgaatactcacagagataccctggctgtggagaggatctacccactgtgggtctcttctgagctggtctattactcaacaaa

SEQ ID NO: 329342 - DNA, 542 bp, Homo sapiens
ttttgctatgtcttttgttatttacttgatcttgaatctttgtctttatcactaagttctgattgctgtagtgggcctcctatacatgaggctgaggaacaggttctttaraaaaggctctcccactacctcattatatgatcttgtccaagtcacataacttctctgcgccttgcatcaaaagagattgtttaaggtaccccttctataattataattccatccccattttgctgacctcattctacatctttggcactcttgccaatagtgcttttctgaatctctggatactgcttttgttacctagttcacagactttttcatagttaaactcagctatccttctggtcttgagcctcacctgctatggaatctgcattgatgcttatttaccagattattagcttcttggcatattattagaattgcttaaaatacagtcatttctatataaatggaaatgctttaacactttatcctttttaataatcaagcaacaaaaaaacctgcagccatcaaactctggtacaatctctttt

SEQ ID NO: 329343 - DNA, 549 bp, Homo sapiens
gaggaatcaaggtttttttttgtttgtttkttttttccacatccagtgatgcaggatgaaaataaactccaactaaattgggctttctgtcacttgtattgattctactatgagaagaaaatgagaactatatttgggtttctgaaatgtgtatgttttaatgttatagaaacactcagtactatttgtcactattaatttttaaatgctctatttccattttattgtgtatagtgccatttgtaaaaattaaactacaaatcacatcgattgcttctatcctaattagcagaaataatcaagttttttaaaatcatctattatgttgtaggaattaattccaaaatatatcttgattggtcattgatatcatagagttaatgtgaggtttgtctttctgtgaattcactgggacatggaaggaacaatgactctgagattttgacagatggtaaaaccaggcagagacattgctttctgtcttgaaaacctctctcccacaattctagtttgtctaccagtggaaactacttaaaatggaagacagag

SEQ ID NO: 329344 - DNA, 480 bp, Homo sapiens
accatttgagttataattttgtgttttgccattcttcataccatctatataagtacttacttaatatttttctttgatcaatttaatcatgttacttatataccttcaaagcagtacaaccagtgtcacttgccatgaatcaaagtaaccatgaaaacaaacacaatacaaaacaatgtgattaatttgaaaataaaatataaaatagaattawtaatgatataatcatcttctcaactaaagataagtttgtcactaaaaataacaaagttatcaattatataatagcataaagtgtcacttgactagatgacacttaatttaagaagaacctgggctctatattaggaaaatgattgcataattttgtttgaggctaatcagtaatgaaaattccatctctgggaattttcccaggtcattaaagtattttaataatttacacagtaattcatcctatgcacatgccatcattatttc

SEQ ID NO: 329345 - DNA, 579 bp, Homo sapiens
ccatttgtaatagtaccaaaaaagaataaaatacctaggaataaatttacctaacgtgaaaaacctgtctatggaaaactatgaaatattaaggaaaaatttaaataaggcacaaataaacagaaaaacatcccatgtttatgaattggaatacttcataatgttaaaatgtttatgtattagtctgttttcacattggtataaagaattacttgagactgggtaatttataaagaaaagagctttaattggctcccagttctgcatggctggggagrcctcaggaaacttataatcatggcggaaggcacaggggaagcaagcaccttcttcacaagttggcaggaaagagagaaagtgcaggggaaactgccacttttaaaccatcagatatcatgagaacatcatgggggaaaccacccccatgaaacaatcacctcccaccaggtccctcccttaacacatgaggattacaattcaagatgagatttgagtgggtacacagagccaaaccatatcagctcataatacttaaagtgacctacagatttagtgcaatctctatcaaaatccaaatgg

SEQ ID NO: 329346 - DNA, 604 bp, Homo sapiens
aagaccaacaaatccaaccaaaacataaattctcatcaccagttgtttcagcctccatgaatctcgactcactggctttgcttcccttccttatcacagtggaagaagtctccctgatcccatagactctagattgtctcccatcttgtctgtccaaagactttacacttgcagttatcctgactctcacctacatcagcaatttatccctttctataagattagtgtaggccaggcacggtggctcacgcctgtaatcccagcactttgggaggccagggtgggcagatcacctgaggtcaggagttccagaccagactggccaacatggtgaaaccctgttgctactaaaaatacaaaaattagctgagcttggtggctcacacttgsaatcccagctactcaggagcctgaggcaggagaatcgcttgaacccaggaggtggaggttgctgtgagctgaaatcgcaccattgccctccagcctgggtgacaagagtgaaacttctcaaaaacaaaaaaaaaaaaagataaaagatgagtgtaataagaaatcaactatgtcactttccatttaaaagtactccccactatgatcataaatt

SEQ ID NO: 329347 - DNA, 604 bp, Homo sapiens
aagaccaacaaatccaaccaaaacataaattctcatcaccagttgtttcagcctccatgaatctcgactcactggctttgcttcccttccttatcacagtggaagaagtctccctgatcccatagactctagattgtctcccatcttgtctgtccaaagactttacacttgcagttatcctgactctcacctacatcagcaatttatccctttctataagattagtgtaggccaggcacggtggctcacgcctgtaatcccagcactttgggaggccagggtgggcagatcacctgaggtcaggagttccagaccagactggccaacatggtgaaaccctgttgctactaaaaatacaaaaattagctgagcttggtggctcacacttgcaatcccagctactcaggagcctgaggcaggagaatcgcttgaacccaggaggtggaggttgctgtgagctgaaatcgcaccattgccctccagcctgggtgacaagagtgaaacttctcaaaaacaaaamaaaaaaaagataaaagatgagtgtaataagaaatcaactatgtcactttccatttaaaagtactccccactatgatcataaatt

SEQ ID NO: 329348 - DNA, 530 bp, Homo sapiens
ggagataaaagatttgtatactgaaaaattacaaatgttgttgaaaaacagagccaaataaatggaaagatgttgtgtttatggatcagaagacttaatattttttaaaatgtctgcatacccaagggaatctacagattgaatctggtccctatcaaaatcccaatgatatttacagaaatagaaaaaagaatcctaaaatttatttggactcacaaagggcctcatacagccaaaagaatcatgagaaaaaacaaagctggaggctttgcattttctaattttaaaacacattacaaagttactggcataaagatactggcrtaaagacaaacatacaaatggaacagaattgagactctgaaatatacccacacaaatatggccataattattaattttaaaaaggcttaaaatttatctgaaaatgacaaaaaaaaactccatgtcaatacccacatttgaaatcttagtaaaacagttaaacacaaattgttaactcaataaaaagaaaaatacttagcaaaata

SEQ ID NO: 329349 - DNA, 621 bp, Homo sapiens
tgacgaaagttcaaaggccctgaagttagatgtgtattttgctggcttgaagtcttgatcggctccattgactgtggctatggtgaaagttgtaagaaaagcaaaaagcagtagtgctcccccccggccacaccccttaccacccataccaatcttaactatttaggcttgtcctctacacaactgtcttgaaaaattctttgacaaattttgtggatcctctgccattcattcagtttgacagctatgtgctttttttataggaaaaagataaaatagacatatgtaactattaggcaagttgcatcaaaatttgggagtgctaattaacagagaacttacctttacaaaaatcctgtaaattgctgtctatttttccagaaattatgcttatttactgttttctgtttctgagaaagaatgttttaaaaacccaacccaactcaattttatattaataatataaagaaagmccatataaaatggattatgagaattatgttagattatacatgtaaatgatattatacatggttaatattagggatcatttttctaatttcctattttcctttctttcctatatttcttttcagagttatattatgtcatgttctatta

SEQ ID NO: 329350 - DNA, 555 bp, Homo sapiens
atatacttagaagtgagatttctgggttatataataaatctatatttaaccttttgaggaacttcacactgttttttaaagtggctgtaccactttacattctcattagtagctcataaagtccaatttctctatatcatgacaatacttgttgtattttaccttgctgactacaattattttattggctatgaagtgatatctcattttagtttttatttgtgtttctataataactaatgtctttatttttaacacactaaataactgatataacctaaatgttgttgaaaggggtggaccaatttgtataagaagcacagggattaattgagaggtaaaggagagaggcgactgaccccccacgccccccaaaaacccacttgaattcaattcaaaactaytgaaacagtcagggtggcacaggaagtctacaattgaagttcaggggaaactaataaagtcccaagagaagcccctatgagagtaaaatgatcttagtggactgaccattacatggagtcattactaagatggaagacagagtctcagtcc

SEQ ID NO: 329351 - DNA, 576 bp, Homo sapiens
cttccatacaagcagtggcagcagaaacaagtgaaaggacttttcccactgtccactattgacctgttttcccaaaacctctgcctttgatggaggcaacagcaacattgaggtctacctgaagcaactaaattcaattccgaktggttccaccatcaaactctcaaccaagcagtgaagaggaacaaatagaccgaggcttcatgcattgctttttgggtatctcatgtctctatcggtagtttgtttcataattatcaccccctccttctatgttaagcacaaaggatcaaatagccaacagcatattataatcagcgccctcacaaatacctagttgactggcttattaacagtgtttcacttcttcagaggataaatatgccagaaaatcaaatcaatctagcatagccccagcctatcaacacttttcctaatgtgtggcaaatgtgtgtgtgtgtttgtaatgctgtctatggttttacttagaaaaactgtattgtgttagttgtttttttcttacatatatatgtaggtgatccagttaatcaacactttacataagcatgtatacta

SEQ ID NO: 329352 - DNA, 507 bp, Homo sapiens
ttaccattatttttcccttttgttcttctagctggataatttcaaatgacccatatttgagttcattgattctttcttctgcttgatcaagtcttctttgaactactctagtgaattactgtgttcttcagctccaaaatatctactcggttctcttttatattcctttttctctgttgatagtgtaattttgatcatgcatggttttcttgaactagtggaacatattttcccagtctttatggactggatttgtaaaggaaaaaaaaaaamctcaccattcagtctggctagagattctggagcctctaaacctttttagggagatctaacttctctagttctgtgcatacagttgctcaattaaagagacactggtttctttttcagtagttcgtgatccttcaatccctctggcatttgtctatggcactgcagattctatgcttctactgcagcaagcctcactgctcacccttattctcagtggcctccaggcatccaaac

SEQ ID NO: 329353 - DNA, 533 bp, Homo sapiens
tccctcatctctaggcccagcttgctacracagaatccaaatggaatttagcaatagttactaattttaaaaagtgagtctgactcttgttctttatctactgggaaatacttttcagccttctttgagccataggtgccaaagtctgactgcttttacatacttctaggtctgcagcccacaaatcttgtagctttatcattattatttttttctttttctgatctttagagatgcatacctcagtgctcttatgtctaatcttatagcttattgcttgatcttatgagtagactagaaatgtgccttaaaacataaactcattggaccttttgaagtgatgttcctgtctatcattttgtgtatgctttttgcaaatcccattgatctacccagtgtaagttacttcatttcatttcacttcactttacttcacttcacttctttatttttgagacagtctcactctgtcacccaggctggagtgcagtggcgtgatctcggctcactgccagctccgcctcccgggttca

SEQ ID NO: 329354 - DNA, 533 bp, Homo sapiens
tccctcatctctaggcccagcttgctacaacagaatccaaatggaatttagcaatagttactaattttaaaaagtgagtctgactcttgttctttatctactgggaaatacttttcagccttctttgagccataggtgccaaagtctgactgcttttacatacttctaggtctgcagcccacaaatcttgtagctttatcattaytatttttttctttttctgatctttagagatgcatacctcagtgctcttatgtctaatcttatagcttattgcttgatcttatgagtagactagaaatgtgccttaaaacataaactcattggaccttttgaagtgatgttcctgtctatcattttgtgtatgctttttgcaaatcccattgatctacccagtgtaagttacttcatttcatttcacttcactttacttcacttcacttctttatttttgagacagtctcactctgtcacccaggctggagtgcagtggcgtgatctcggctcactgccagctccgcctcccgggttca

SEQ ID NO: 329355 - DNA, 476 bp, Homo sapiens
gatctcttggcacaagatagatgcatgctagtgacaaagcattcatatgagcttttggccctttccaaggtatatataccctttctgttgagccataatagtccctaattggggatgccatattcttcatacagtctaaaaactgtcagcactgtatagtaccaggaaatttaagactgaaaataatagctaaaaataaaaataacaaatagaacatttgttagatttgtggcctggaaaaaaaaatatctccttargccttatttttcacagttcccaaatagagacatatgaggttaaatatttgaatatagtctaaatgagataatatattttaaagtgttttggaaatataaagtcttgactatgttagcctactatagtttgtagttttatctcaggtaagatcccaggtgtattttacagtgctagattcttcttcttttcctaggaaaagataaattaggactaaagaa

SEQ ID NO: 329356 - DNA, 608 bp, Homo sapiens
aattattgcaattattgatgactactattcaaattttatctttaacatttccccataacttactcttttcaccattttatggatgaggaaactgaggtgcaaagaagtaactttctcaaggtcacaggcgataaagtggcagaagtagagagtaaagcctgaccacaaagawgttgctctttctgcaactctactttgcctcaagaataagattttctttccatttgaaaccatatttgaaattacatagtctagcatctccagtttacaaatgaagacataagagtgaaagaagaaagttattagcctaggacaatgtaatgaatgaacccagaacctagattcctgatctcacagaccaaagttctttgcatgctgccatgttgctgactgacattgcccctgtcaataccaagttctcctaactccctgcctgttctaatacccagtcttggattaataaaattgatgaatattgttgtagacatacatagactgatgctctacaaatccaaggtctttcgctagtcaagacacttacagctgcttgtaatcttgtgatatttttgaactatttccctgtaatcaatatcatagtgtcctgggct

SEQ ID NO: 329357 - DNA, 608 bp, Homo sapiens
aattattgcaattattgatgactactattcaaattttatctttaacatttccccataacttactcttttcaccattttatggatgaggaaactgaggtgcaaagaagtaactttctcaaggtcacaggcgataaagtggcagaagtagagagtaaagcctgaccacaaagatgttgctctttctgcaactctactttgcctcaagaataagattttctttccatttgaaaccatatttgaaattacatagtctagcatctccagtttacaaatgaagacataagagtgaaagaagaaagttattagcctaggacaatgtaatgaatgaacccagaacctagattcctgatctcacagaccaaagttctttgcatgctgccatgttgctgactgacattgcccctgtcaataccaagttctcctaactccctgcctgttctaatacccagtcttggattaataaaattgatgaatattgttgtagacatacatagactgatgctctacaaatccaaggtctttcgctagtcaagacacttacagctgcttgtaatcttgtgatattttygaactatttccctgtaatcaatatcatagtgtcctgggct

SEQ ID NO: 329358 - DNA, 390 bp, Homo sapiens
agaattctaacgttataaagtgtaagcagtctcctccagttatcatccctccttccttccctattcctctcttcaaaggtaatgctcttaaaaaatgttctgtgattcttccaattaaaaaagcattaattgtattttaacttttttatagctaattattaataatacgktgagtattactccaagtttcaatattattatattaagaaataaattgtaaatcagatagatgctgattttctcagtggtttataaggttatgaagggtgagactttctcccaattatgacagattgggctaagattcgaattattaatatggtccctttattttgcagagaagcaggcaacgtggctcccaggaaaatggcttgaacagaacccatgaga

SEQ ID NO: 329359 - DNA, 551 bp, Homo sapiens
cccactcctgtccatgacagaatgaatctgactagacttgctctcccatagtaaacaagtaggaaaccaaacaaaatatataaaacaaacaattgttttcagagactggacaacagacagtacaggtgtgtgattctgaggtaagggaagcaaatgatatgatccctaaaataaccttggctttctacctggagacattttccagaccacaatawggaaaagaaatcccaagcagagaatggtactatctctgaattagggaaatcgtttctgagtttggagaggctgagactactagaatttgggggcagagtaaaaaaggacagagctacgcagagaaaaagctccataaatctgcaccagcgtgcctatgagtctttgtacatttatagggtaaggctctataaggaggctaagcagaaaataatcacaatggaaagaatgactaataaggagatattcattctagaattctgagagctagaagacatatgagttttgactaataggaatggcgatactcgaactcctggggtattcaatggaagctt

SEQ ID NO: 329360 - DNA, 624 bp, Homo sapiens
attaattttaaaataactaatataaatatcttaaaggatttagaggaaactattaatatagtcaagagaacctagaagattaataaagacagaaatggaaaaatagataaacaaaacatatattatctgtaaagaaaaatccactgagaaataaagaatagatagatgtggcaaagggaaaaaaaatccagaataaaacatgagcagcaaaagattgaaacaaaaataaacagatcttcaggaacctgtaggaaaatgtttggcaatttattatgtatataactggaggatcagaagagcagaacaaaaaaaagttaaaagaataaatgccacatttttgcaaatttcataaaaattataaactctcaaatctgagaaacccaacacaactcaagcaggataaacataaagaaaactatactaaggcccattataatgtatttccataaccaacaataaaaaggaaatcttgaaggtagcaragtagaagcaaatacgacatacaaacaaagataatgacaaagatatgacaaagataaaaatgaccactgacttctcattagaaacagtgaattctagaagacaatacaatgacatctttgaattgctgaaataaaattatca

SEQ ID NO: 329361 - DNA, 623 bp, Homo sapiens
aaattataattctatctttaagcaaaaaataattgaaatatgaaacaactggatgtaaagttttaaaatattatttaatattttcaataataatttaacatttaaaaaatattcacctcaaaacatcaaatatttagaaataacttttagtaatgagatgtacaagacctatacactgaaaactacaaaacctacccgagaaaataaaaaagaaataaagaggcaatgaattaaaaaatacattgktagaatttcaattgttctcaaactaatatgtagatttcaaaaaagtcacagtcaatatcttttcctatagttcctttatagacattgttatggtgatacttaaatttcacacgtaaatgcaaataaccttaaaactaaagataggttctagcagcttcttaattgcagctatcaaatatcaaaattccaatactatctggattgtgactcagagcatgctatgatgcttataaagagatagatcagttatgccatttccatctattatggccataaatctaatgcataattggaatttgaagctgtggcatttcctccactgctaatacaattaaaatcttggaagaatgttcaaaactttagttttttttttcata

SEQ ID NO: 329362 - DNA, 522 bp, Homo sapiens
accattttggaagcatatctgtcataagattacaatcagcactgagaaggatagaccccacgtctctacatcccaggaactcctgctgatattgccctgtgtccacttagagagctgcagcaacacagcactggctggacccagaggtgctgcaggctcctcagtaatctagcccatagggagtgttattctccagggaaaggattatgaagtgcaacaaaaaagcagacctcaggataaaataaaccaaagggcactttcatcaggsctgcaagctatttgtctgtagctatgtaaaattattttccatcccatccctagcagccataaaaactctgtgttcatctttgtaagcaaacggtgaaattccctcccaccagcaaaacagcctctgtactaaaacacgcacatagagaacaggatacctcctctcctactgcatacttgctcctactgccactgaagtctggggtggatgaacctgagggctccctctctgagtctgtgagtgacaactgttac

SEQ ID NO: 329363 - DNA, 500 bp, Homo sapiens
ccggccttctacagctcttcctatttgttaggtaacaagagcaaggaggaggaggtaacgattggtcagttgcttaattgatcacaggtgtgaacaggcttcaattatggctaatcataagaaacacttgtgaagcctccaacactagtgctaaagaaagagacacactgcaatacaatgatagyggagtcaatgggggaaattaagatggcaataaaaatattttgaaacaaatgaaaatggaaacacaacattaaagaaaaaacctgtggcagacagcaaaagcagcgctaagagttaagcatatagcaataaatgcctacatcagaaaagtgaaaaaaaattgcaaactaacaatcttacaatgtgccttaaagagctaaagaaacaagaacaaacaaaaccccaaattagcaaaagaaaatcagtaaaaaagatcagagcagaattaaatgaaatagagacctaagaagcaatacaaaggatcaacacaacaaata

SEQ ID NO: 329364 - DNA, 586 bp, Homo sapiens
atagacaaatgagacataattaaactagaaagcttaattacagcaaatgaaataatcaacggaatgaaaagacagtcttcagaatggcagaaaatatttgcaaactattcagctgaacaggggattaatatacagactctacaagtaactcaaagaactcaacagggagaaagcaaataatctcattacaaagtggaccaagggcataaataaacatttctaaaaaggagacatacacatgaacaacatatatatataaaatacccaacatcaccaatcatcagataaatgcaaatcaaaaccacactgaggtatcaccttacaccagtcataatggtgattatcaaaaaagacagaaattaacagatgttggtgaggatgcaaaagaaaggaaactcatacactgtcggtgagaatgtacctagaacagccactgtggaaaagagtatgaaaatttctcaaaaaycttaaaatagaattaccattctatccagcaatcctattactgggaatgtatccaaactggcgggaatatacatatatatggaatgcctgcaatcacatgtttattgcagcactattgaca

SEQ ID NO: 329365 - DNA, 589 bp, Homo sapiens
caagattgcttttgctagttgcctgtcttttgtggttccatacaaattttagaacgaattttttatttatgtaaaaagtcattggaattttgatagaggttactacgtgtgtgtgtgtgtgtgtgtgtgtatttttaaggcaaagtctctctctgttgctcagcctggagtgcagtgatgtgattttggctcactgcaacctccaccacccagattcaagcgattccctgcctcagcctcctaagtagctgggattataggagtgaaccaccacacccgactcatttttgtattttcagtagagacagggtttcaccatgttggtcaggctggtttcggactccttacctcaagtgatcsacctgcctcgggcctcccaaagtgttgggattataggtgttagctcctgcatccagccaacattgcattttttatactgctttgagtcatatggacattttaatagtattaattattctaatacattaacatggattgtcatttcacctaattgcgtcttcttcaacctctttcatcaataattgacagttttcagcgtacagccctttcacctccttggttacattta

SEQ ID NO: 329366 - DNA, 586 bp, Homo sapiens
tatggactatattttgttgaggtacattcctactatatctaatttgttgagaatttttatcataaaagtataggttagtttttgtccttcatactatgaatgtgatatgtcacatttattggtttgtatatgttgaaccaatcttgcatscatgggatcaatcttacttggatgtggtaaatgatgtttttaatgtgcggatgaattcagtttaataatattttgttgagaattttttcatgtaagttcatcaggaataatggcccatacttttctcatcctgtagtgtcctttcctggctttgacattagcataagcaggcatagtaaaatgggtttgggtgttttttcctcaactttttggaagagtttaacaatgattagtattagtgtttctttcaatgtttgataaaattcatctgtgaagcaattaggtcctgggttttcctttgaggggagaaattttttaaattactgatttgctcacgttctcattatttttctgttcagactttctatttttttgttttaatttttcagttattctttggttttagtttttcagttttgggaggttgtatttgtct

SEQ ID NO: 329367 - DNA, 614 bp, Homo sapiens
ttctcactatatctctcttataaaggtaataacataatttaattaagtaaagcatctaaaatacttttcaaactgactgtaaaactgttcaataaacacttgctgtaattaaatattctattattactaaatctacctcaaaactttgaaggtaatattttaatgttatacttttattaagaaataattcacaaaccataaaatttatcaattgaaagtttacagtttagtggtttcttgcatatttacagatctgtacaactattactacaatctaattttaaaacattttcaacaccctcaaaggatagcctataaactacattagcagacattcccaattgccacttcctacccctaccccaaacctcagcaaccactaatccaaatccacttcctcgcttttacagacttacaaatttcacatatggaattcaataacawgtggtcttctgtaactgcctccttgtatttagcataatgtttgcaagtttcacccatgttgtattatgtatcaaaactttattcattttattaccatataataatccattgtgtgaacatactgtttaatttattcatcagttaatggacatttggtttgcttccacttc

SEQ ID NO: 329368 - DNA, 590 bp, Homo sapiens
gttaaaatggctgttatcaaaaaagatgagacagcatatgttggagctgatgtggagaaaaggaaacccttatacactattggtggtaatgtaaattagtactgccaatatagaaaacagtatggaggttcctcaaaatattgaatatgaaactatcatatgatccagcaattccacttctgtgtatacactgaaaggacataagatgagtatgttgaagagctatctgcacttccatgttcattgaagcattattcataatatccaagacatggrattcaacctgtatcatcattgggtcaattaataaagaaaatgtgatacatatgcacagtggaataatagccttaaaatataaggaaatcctgtcattaaccacaagaagcctaaacctggagggcaatgtgctaaatgaaataaatcagtcatagaaaatattgcataatctcacttatgagtgaaatcttaaaaagtagaagcaatggaaatagggtagaatggtgattaatatatatatgaggcaatacatatgttaaatagcttgttttacccattcaacaatgtatacatatatgaaaaccccatgttgt

SEQ ID NO: 329369 - DNA, 560 bp, Homo sapiens
acacacttttggaaaagacaactgatagtatattaccttttcaatataaattaataattatgatgagtattaatccatattttatgatacatttttactatcttctgttctatatgaagtattttataattaaaataaaaagagtgttaccattgaaagcatagacaagtaaatggtacagaacagttcagattcaggtatacacaataataacctagtattgggaaaaggttgtgtaataatcactaatgaaagagaatattattcaatacttgacactagcaaaatcagacacttaagatatatatatacacacatatataattttctttttcttgtgtccatatgtacatatgtatataattatatataaatatatgtagttttatatgtatatatacacatatgtatacaattatgtataaatatatataattttatatgyacatatggacacaagataaagtatatataattatatacaatttatatatgtgtgtatatacatatatatgcaatttgattctcacttcacctccagacaatttctaaagaaaact

SEQ ID NO: 329370 - DNA, 606 bp, Homo sapiens
tccactttctaaaactgattttaaaagttttratttaattataaaacaatttattttatgcaacaatgtttccattggaaatttgattacaccacagtaaaaaggaaacactattctagaatgcagagtgttaagatagggcaaatacatctttcatgcctgataatttaaattgttttggctaaagaaacacctcaaggaaaatatgttgactgggaaaaatggtcttcagtatttaatgaaaagcggaaaaaaaaaataaagaaaacaaaacctctcactgagcctaaaacactggagtaggtattgggctttaggaagtttagatataatcaaaaagaacatattaaaaacaaaacaagctaacaaaaaatagcaaagacaggaaaaatatcaatgatatttggtgagaaataccatgtaaaagattactgtatgcactctggaaacagttacatctagatgtggcttatattttatttatgctttgtcacgttttctgttatacttaaatcttaaatcatcattaaaatttttttatcccttaaaactttaattatatttggaagattgagaagggcctaagtgtcaaatgggacaaaagtg

SEQ ID NO: 329371 - DNA, 590 bp, Homo sapiens
tctaatctcacttgtgatttcttttttggattatttagacatttaattttctaaatatttatagatttacttctgctttcatttcttattggttcctaatttagttytttagatattaaattgattcctaattgtttatataaattaaattcttttaaaattttggcctacagcatgatatacctggaaaatgtttcaagtaataagtgaaaagcatgtccattttgcagttggttgaaatgttctataagtgtcagtaggtcacctttcttgatagatttgtttaagtcttctgtgtcattcctgacttcctatctagttatatgtgctgatgtaaatggaggtttctattaccttaatattttaattgaactaattatttctcttattcattctgtcggatttttttctcacatatttttgggtttatcgtattttaaacatttgcttgatttttagagcagttttaagttcccaacaaaactgagcagaaagtacagataattcccatatattctctgcctccgtacatacattgcctctcccattaacaacatcccccaccagagtatacatttgtacaattcatg

SEQ ID NO: 329372 - DNA, 540 bp, Homo sapiens
cttaactaaaatctcatgtactgtttttttctggagcacaagcatgtccaaatactctatcttcctagggttcattgcaatttttaataatatgactatgttctcctttggggatatctccacatttgtgaggctccgtgtaatatgaaaatatgtagagttgggaatggagaaraggatgtgttgaagaagcaggaaaaaaaagctccattaaaggtactgttaataatttataaggctttcatttatctgtttcttcctctcaacttatcacatatttgtatttgctaattagtgtcttttaagaaaaaaaataaacaagattattattatgtcttgtgacagggcctcactctgtcaccaaagctggagtgcagtggcacaaacacagctcactgcatcctggacatcctgggctcaagcaattctcctgcctcaacctcccaaatagctaggactacaggcatatgacaccatgcctggctattttattattatatttgtagaaacagggtcttaccttgttgcccaggctggtct

SEQ ID NO: 329373 - DNA, 540 bp, Homo sapiens
cttaactaaaatctcatgtactgtttttttctggagcacaagcatgtccaaatactctatcttcctagggttcattgcaatttttaataatatgactatgttctcctttggggatatctccacatttgtgaggctccgtgtaatatgaaaatatgtagagttgggaatggagaagaggatgtgttgaagaagcaggaaaaaaaagctccattaaaggtactgttaataatttataaggctttcatttatctgtttcttcctctcaacttatcacatatttgtatttgctaattagtgtcttttaagaaaaaaaataaacaagattattattatgtcttgtgacagggcctcactctgtcaccaaagctggagtgcagtggcacaaacacagctcactgcatcctggacatcctgggctcaagcaattctcctgcctcaacctcccaaatagctaggactacaggcayatgacaccatgcctggctattttattattatatttgtagaaacagggtcttaccttgttgcccaggctggtct

SEQ ID NO: 329374 - DNA, 560 bp, Homo sapiens
aagtgactaatttctgagtttcaaaaagataattttagaagagctaatgaacttgaaactgaacaaaaggctgtcgagctactggccttctcaaagtttacaaggcctgactcctttttcctttcccccacatcaatttttgagctttaaatctcattgtaagattatgttacgttaccacagagttcttagattcttccatctttaatataatcaggttggggggaggagaggaatctgcagaagattttttaaaaatccagaacgaaggacaatggagaacttcgaaatggacagaaaagtaatayatggtattgtgagaaaaaatgtatctctgtaagttcacaaagaaaatgggacccagcagacctaaagggaactatcaggaagagtaggaatgaagtaaaatacccagaaaaagaagaatctgccctcttcaccttccagacaagtgaaaatctatagaatggagatggaaagcgaggcttacataaggattggaaagaacaccatgcccccaagtgataaatcattgattacatctgcatctgatggctgaa

SEQ ID NO: 329375 - DNA, 585 bp, Homo sapiens
ttgtttttatttgctcacattatttcctatatgattttctttgacaattcttttgatctttttgtgtgtgtgtttgtggtgtgtatcttcatgtgaaatgagaaagaaaaaccgaggcattatttttcaaaaatatattagctacaattaaatgtattgtataaaccactattacttaataagtacttacattgtatagagaagggagctgtagcaattactaaagacaacatatggcaggtgtctcaaagctctagagtgacaacaaaaacatatgacttcagctcattataagtattttctaagatcttcttaattgccatagtaattaaaatgtaccaatatttgtgaatatgccaactgacttgaatatatggaatgaatatgttttgtactattaaatttacatgaaatatacatcttaagaaaatgtagtctgaacctatacatgtatgcatatattatcatataaagaaaccttagaaactgaatctcttacaaagctgtcakgtatcatttctattttcttcacatgataacattgtctctgaacattttctgattagtaatacatactgtgtgatg

SEQ ID NO: 329376 - DNA, 515 bp, Homo sapiens
aatttcttttgctgtgcagcagctctttaattagatccaatttgtcaatttttcgttttgttgcaattgtttttggcatttttatcatgaaatctttgcggacaacaatgccctgaakagtattgcccagattttcttctagggtttttatggttttgcattttatatttatgtttttaatccattttgagttaatttttatataaggtgtaaggaatgggttcgctttcaaaattctgtatatagctagcgagttctcccagcaccatttattaaatagggaattctttttccccattgcttgtttttgttaggtttgcaatggcagactttttaacatcgttacatatttcaattattctgtaattatattatgggtcagatgtacacaacctactcagtcatacatactacttgttgtcagttcatgacacatataaatataaggaaatgtttttcaaattgaataattcagtaatacatcaaggaatgtaagaaaaatgtgatgcgtcatc

SEQ ID NO: 329377 - DNA, 515 bp, Homo sapiens
aatttcttttgctgtgcagcagctctttaattagatccaatttgtcaatttttcgttttgttgcaattgtttttggcatttttatcatgaaatctttgcggacaacaatgccctgaagagtattgcccagattttcttctagggtttttatggttttgcattttatatttatgtttttaatccattttgagttaatttttatataaggtgtaaggaatgggttygctttcaaaattctgtatatagctagcgagttctcccagcaccatttattaaatagggaattctttttccccattgcttgtttttgttaggtttgcaatggcagactttttaacatcgttacatatttcaattattctgtaattatattatgggtcagatgtacacaacctactcagtcatacatactacttgttgtcagttcatgacacatataaatataaggaaatgtttttcaaattgaataattcagtaatacatcaaggaatgtaagaaaaatgtgatgcgtcatc

SEQ ID NO: 329378 - DNA, 562 bp, Homo sapiens
gttgaactttttgaactttctgtaggttgcctgttttctctgttgatagtttattttgctgtgtagaagctctttattttaattagttcccatttgtcaacttttgttttgaggcagttgcatttggtgtcgtcattataaaatctataccaggacctgtgtccagaatagtattttctagactttctttaaaggtttttatagtataaggttttatatattaaggtcttacttcttcttgagttgatttttttatatggtgtgaggaagtcatccagtttctatcttctacatccagcactgtttgttgaatagagaattctttccctattacttgtttatgtcaactttgacaaagactagatggttacaagtgtgtagctttatttgtgggctttttattctgtttcattgaattatatawtgctgttgggtttgttttttttttttttccctgtaccatgcttgttttgattaccgtagctttgagtataggttgaagttagatgatgtgacgtcttcacctttgttctttttgtttgggattgctttggctatttag

SEQ ID NO: 329379 - DNA, 562 bp, Homo sapiens
gttgaactttttgaactttctgtaggttgcctgttttctctgttgatagtttattttgctgtgtagaagctctttattttaattagttcccatttgtcaacttttgttttgaggcagttgcatttggtgtcgtcattataaaatctataccaggacctgtgtccagaatagtattttctagactttctttaaaggtttttatagtataaggttttatatattaaggtcttacttcttcttgagttgatttttttatatggtgtgaggaagtcatccagtttctatcttctacatccagcactgtttgttgaatagagaattctttccctattacttgtttatgtcaactttgacaaagactagatggttacaagtgtgtagctttatttgtgggctttttattctgtttcattgaattatataatgctgttggktttgttttttttttttttccctgtaccatgcttgttttgattaccgtagctttgagtataggttgaagttagatgatgtgacgtcttcacctttgttctttttgtttgggattgctttggctatttag

SEQ ID NO: 329380 - DNA, 476 bp, Homo sapiens
acaaataatgctcatgcaactagacatccacatgaaaaagaataaggttgtactcttccttcatatggtagacagaaattaatcaaaatgaattgtagaacctaactgtatgagctaaaagtataaaagtcttaaaagcaaacatagcagtaaaccttcatgaccttgatttaggtaatggtttagttcwtatgaatccaaaattatagcaacaaaagaaaaaaattacaaatgtggccctatcaaaattaaaaacttttgggtttcaaagcacactgtcagaaaaaaaaattgaaaagaacaaacaggatgagagaaaatatttgaaatcatgtatattatcatggactattatcaagaaagtataaataatttctactacacaacaatgacaagacaaatacccaatttaaaaaatagacaataatttgaatagatatttcttcaaagaagataaacaaatgacaataagcaca

SEQ ID NO: 329381 - DNA, 623 bp, Homo sapiens
gatacatatttgagtcatcactactctttgatcaatatttttttccaataactggatcttaagccagtctggattgtaataattatcccccactcatattcctaatgtgtttttacatccaggtagatatttacaatctgccaaytcctagtttgcttgtaagtttacactttattggagatatcttgccaaataattgtgctttttaaataactttaatacgttatcaagtccagtgtctaggtaattttatgaacgttgtcagctaatacaacgtcacataactaagcttgttttctcttatgatgtaaataatatgcaatcctcatatgtcactagaagcagttaatttttttttctaagtacttgtcataaaggtttttttagtttttgtttttattttttttaaaaatagataatgggaatgggagtaagtttaagtaaagggtaaccagctccctgggcttcatctaagtctaccttgcccaaatatttactggttgctgcttccaataaccatctttattggatttaatgatttattttactgttacttcatgtgattcctagacgttcttcagataaaatagccctcctttcacgtctcaaaatatacaacagca

SEQ ID NO: 329382 - DNA, 623 bp, Homo sapiens
gatacatatttgagtcatcactactctttgatcaatatttttttccaataactggatcttaagccagtctggattgtaataattatcccccactcatattcctaatgtgtttttacatccaggtagatatttacaatctgccaactcctagtttgcttgtaagtttacactttattggagatatcttgccaaataattgtgctttttaaataactttaatacrttatcaagtccagtgtctaggtaattttatgaacgttgtcagctaatacaacgtcacataactaagcttgttttctcttatgatgtaaataatatgcaatcctcatatgtcactagaagcagttaatttttttttctaagtacttgtcataaaggtttttttagtttttgtttttattttttttaaaaatagataatgggaatgggagtaagtttaagtaaagggtaaccagctccctgggcttcatctaagtctaccttgcccaaatatttactggttgctgcttccaataaccatctttattggatttaatgatttattttactgttacttcatgtgattcctagacgttcttcagataaaatagccctcctttcacgtctcaaaatatacaacagca

SEQ ID NO: 329383 - DNA, 565 bp, Homo sapiens
atggggaaaatagtaatacccattacctaaaggtattatatggaggaaatttggctcaaggagttgtaacttgtctagaatcccatagctgataatttactaagttagattttaaactcaggccttaatcattccataggtcatgttctcagtcactgttttcacaactttgcttcaattgattctgttgaatttttccatccatcgagtcattaattcccttatgcatgaatggatgcattcaaagatyccaaatgcataggtttcatatattattaatgcagaattgaagaaaccatacaaatttcaagctcttgtgaagttgatacaccttatttactttcatttctccaccttctaccttgttcacactacctacctaaaccttatttttgttttctctatttttaacacattgataaagtcttccttttataatcttaacatactattttttatttcaataggcttttgggggaacaggtggtgtttagttacataaataagttctttagtgatgatttctggtattttcatacacccatcatccaagcagtatacactg

SEQ ID NO: 329384 - DNA, 543 bp, Homo sapiens
atttttcataagaatccagcttccagaactcaagagtctagaattctgggttttaaaagcatttctcagctgggcatagtggctaatgcctgtaatcccagcactttgggaggccaaggcaggtggttcacctgagattaggagttcaagaccaacctggccaacaatgygaaaccctgtctctagtaaaaatacaaaaattagctgggtgtggtggcacacacctgtaatcccagctactcgggaggctaaggcaggaggatcacttgaacccaggaggtggaggttgtagtgagccttgcactattgcactccagcctgggggacagagcaaggctctgggaaacaaaacaaaacaaaacaaaaacaaaacgcaaaacaagaaaaaaatcaaaacagagtttctctaataattcttacatatgctaaattttgataactattcttctgcaatattgtgaatgaggcaataatgcaataactataaaaaggtaacagtatcatcactgatgtctaacatttcaaatgtgctctttatttacc

SEQ ID NO: 329385 - DNA, 451 bp, Homo sapiens
tctttttctttctatcaaaaatctgccagaagtctccatgagacaggaacagttttgtaaatctgaatatagatgttcaaagagaacacctctaagaagacatcattatttttcaaagcagtcacaccaactattttcatgttagggggaaaaacgaaagaaaaaatcctgaaattataatactattcttagaattcaatagggtcactaggtcccatgctgtgctccagctattaactttctgactaagcatttcaaactcargaagcattatgacatcctcttaggctatctatctatctatctatctatctatctatctatctatctatcgctcactcatgtggcaatcttttctcaggtgataagaatggagttaacatattctgcttgctttatctctgggtgggagagagagatcgaagtagatagagagagaagggtgtatcat

SEQ ID NO: 329386 - DNA, 543 bp, Homo sapiens
atttttcataagaatccagcttccagaactcaagagtctagaattctgggttttaaaagcatttctcagctgggcatagtggctaatgcctgtaatcccagcactttgggaggccaaggcaggtggttcacctgagattaggagttcaagaccaacctggccaacaatgcgaaaccctgtctctagtaaaaatacaaaaattagctgggtgtggtggcacacacctgtaatcccagctactcgggaggctaaggcaggaggatcacttgaacccaggaggtggaggttgtagtgagccttgcactattgcactccagcctgggggacagagcaaggctctgggaaacaaaacaaaacaaaacaaaaacaaaacgcaaaacaagaaaaaaatcaaaacagagtttctctaataattcttacatatgcyaaattttgataactattcttctgcaatattgtgaatgaggcaataatgcaataactataaaaaggtaacagtatcatcactgatgtctaacatttcaaatgtgctctttatttacc

SEQ ID NO: 329387 - DNA, 574 bp, Homo sapiens
agtattgtaaaaaccaattgtgtatatagaaaatgaccctacagtataattgtctagtaatacaagggtcatcatttggataacactrttgaaatgaccattaaaaataaaatatattcttgttagtacgtttcaatacaatttgttctgcatttccatcttaacaaccacaaaaatttacatcaatttttctgtgctagagtcctttaaaaagcaaattgtttttgagactagtacttttccagttcattggaaactaaggctatgaactgaagacaattataatataactcttaattctccgggcctggatgactgacaggtcccaagtgctttcatctagagatgatattctccgggtggcagaacgtgggtccagggtagatttcacagaccgttaggttgatggctctgcaattgcttcctggtctgtcacttgtctgcctgttgatggtctccgatgggctctactggtccccttaggtataattttgtcttgacatctttttgatcctgaggtaatggagcattttatcaattttagtgagtaggtcttgaccagatttttttttcc

SEQ ID NO: 329388 - DNA, 426 bp, Homo sapiens
attaataaagctgaatgtgtgttgtttttaataaatatatgttgaatgattggttaattacaaacccacaacccaatgtttttcactgagtattaggtttcattattgttgctgtcttgctttgtaggatcaggaaagatctaagactttctttgggaaagaagtgtcctgctactcacatttccatagctggggctttttaaataagagctagaatggcattaaggaacggtgcctaagagaacatagggaagaaaattgtggaaagataattttaggacccasggtgtttgttagaataaataacattggattggggccagatcatgaaggatcttacataacatatctatttacattttatttcaaaaatacttattgtctgtgcctttcttgtagagctctgtcataaagatggaatgtagt

SEQ ID NO: 329389 - DNA, 545 bp, Homo sapiens
tttgttgtagtgttgagtggaatatattacacttaatggaaagtcagattaaaacacatactttgttattagagtgaatgtaaataatcagaaagaacaagaattcttgatttttattagactttcagtgtaactgcatggattctggcttggttcatctataacaaatgaacaaaaatattatgggttagggaggttgtaaagtttcatgatgtaatttacatgacagctcttatcataattcataacagatgtagaatttgaaaattatamacttttaattcttaattcatttttaattttaaaaactaaaaccaaagatgcaagttttaaattgacacaaaactatgagaaaggagtatacctattgatatataaatacatgtgtgtagaagtgcaaaatctgaagcatatttactagttgattccattgatatcattaagaatataattagccttggtgttatgatgattacttcatgccagctttatacttattcagtcctaaaattataaagtttataagaagcttttgtgtgactttc

SEQ ID NO: 329390 - DNA, 618 bp, Homo sapiens
ctttatgtgagtcaagagttcaggtgccgcttagctgagtgagtacgattcaggtactttcctgaaattgtacttaatatgctggtcaaggctgcagtcatctaaaggcttagatggggccagaagataagctttcaaaatggttcattaacaacgctgttgtcaggagatcgtcttttcttgccatgtggacctgtctataggactcctccaggatcatcataatatggaagttggcttcctcaaaagtgctttagccaagacagagcaagaaggaaggcacgatgccttttactactttgtctcagatgtaacacatcatcacttctactactttctcttcattagaagttggttactaagttcagcccacacttagaataaagttgtatctcctgagaaaagaagtatcaaagactttttgaatgcatttaaaaaccaccacagtaggaatatttaaagtgtttgataaaggttcagaatccatggccaaggctgaatgagtccttcccatcattagcacatcagtctaaaatattattctttgagagaaggaggaaaatgtcttactgtaaaacarttttatttggctgatatttggatatatgtggaaggttt

SEQ ID NO: 329391 - DNA, 537 bp, Homo sapiens
ggtttaaacagaacattctaaacttgcaatctcactgctgttctttcaaacttaatatgatcatggcaaatcctgtgatgtcagcatttaagagaaaggctttcatctattctaactcaacctctaactattcaacttggaacttgttttcagttagtcactcaaatatacctttgaggtatataaaaatgactcatcaaattcgattatattaarataaattctagtctttcttcctctgtcaaattcttgaggcattttattaatgaggtctttaaaagcagccattgcaaaatgacttttttgcatttgagtgcaatattgacactttaaaaagctacgtaaatttatgaaaacgcacagttacagcagtacctgttttatttttttccatatagcctcagtatcagttcaattttgccatgtaacaaattgcaccaatactttgtgatgaaaaatagcaaccatcgtgtattttactcatacttttttgagttggctagatggtatctctggactgagccagctcagctgctg

SEQ ID NO: 329392 - DNA, 502 bp, Homo sapiens
gctctcctgtaggtaggacagtgggcatccatcttggtaatggtgactgctagagatctcccacctaccttttctctgcatgaggagtctctgttcatttgaaactagttctggccaggtgtttttcttacctctctatgctacgatttcaaggttccatgcttcagagggttttcatgtcttccttgctcaattytagtgttttcttgtagagtatctactcaaagtgccattatttatttcttgttttggtcttttttgtggaggaggtgaacattgggcacctctagttagtcatcttgatgataaagcaggttatctgtaaagtatagataaggtatctgcacaattataagcctggccctataccccacaaaatggtacagaaggtaagtcacaaagaagcatttaataatggttaatatttacatgaaaaaaaaatcatgtgatgtattatcagtttagcacctgagaggtctaatataaagtctccacattcatt

SEQ ID NO: 329393 - DNA, 577 bp, Homo sapiens
tagtacctgggtgatggcagcaattgtcagtatcatgcaatataaccaggtaacatacttgtacatgtctcctgtgaatctaaggtaaacattgaaattattttaaaaatctrctacttcaccgctatattaaaataaaataatttaaaataaaaaataggaacagagtaatagtaatagtaataggaacatgtaaatctgaattggaatggaaaatgatggactacatttttaacaaattaaaaatagaatatttttaaatgtgacaggattcattcacaattattaattagtatttttctttaaaaggaggatattttaattaggcagcaagtgagaaaactgaattctgactagtttcaaaggaaagtatcatccagttgtatttctacagagaggacctggtaatgttaattgatgtttttattgacagacccaaagtaaatgcaccatttatctaatgggtgattgatgagtttgctttccaaatctaaattaactacttcccacattctactgcatttctgttttagatttaaagcacagaagtgtatttcattttttaccagtgtgccaa

SEQ ID NO: 329394 - DNA, 624 bp, Homo sapiens
atatccttttcagcaacatggatggagcaggaggccattatcctaagcatattaattcaggagtagaaaccaaatatctcatgctttcacttataattgggagctaaaccttaagtatacatggatacaaagaaggaaacaatagataytgtggcttatttcagtgtggaaggtgggaggaggggggaggactgaaaaactaccgactaggtactgtgcttattatctggttgatgaaataatctgtacaccaaacctccatgacacacaatttatccaagaaacaaacctgcacatgtacccccctgaatctaaaataaatgttggaaaaaaaaagaactctctatcaatttttgtaaggcaggtctgatggtgattaactcacataggtgtttttgttgttgttgttgtctgggaaagttttttatttcttacccatttctgaaactcacctttgcttgaaaaattattcctcattaaaacttttactttgtttatttcaagcactttgaatatattatataactgtgtcctggcctgctgtgttttttttcccccactaaatctactcatagtcatattgacacttgtttctatgcaatgtgtttcttttctcttgttgct

SEQ ID NO: 329395 - DNA, 572 bp, Homo sapiens
aacatcctcgagtcaataaatgtgatacaccacatagacagaatttttttaaattctgtgatcatctcaatagatgcagaaaaaccatttctcaaaatccagcatccctttatgactaaaacactcagaaaaatcagcatagaagggatataccataaggtaataaaagccatgtacaaggaaccctcagacagcattatattgaatcgggaaaagttgaaagcattccccctgagaacaggaacaagacaaggatgcccacttacaccacttctattcaacayaatattgaagtcttagctagagcaatcagacactaaaaagaaataaaggccatccaaataggtaatgaggaatcaaacagccactgtttgctgataacaatattatatacctagaaaaatcctaaagactcatacacaaagctcctagagcttataaatgaattcagcaaagtttcaggatacaaaattaatgtaacaaatcagtagctctgctatataccaacagtgaccaagctgagaatcaaatcaagaattcaacacactttacaagagcagaaaaaaaaactt

SEQ ID NO: 329396 - DNA, 572 bp, Homo sapiens
aacatcctcgagtcaataaatgtgatacaccacatagacagaatttttttaaattctgtgatcatctcaatagatgcagaaaaaccatttctcaaaatccagcatccctttatgactaaaacactcagaaaaatcagcatagaagggatataccataaggtaataaaagccatgtacaaggaaccctcagacagcattatattgaatcgggaaaagttgaaagcattccccctgagaacaggaacaagacaaggatgcccacttacaccacttctattcaacatartattgaagtcttagctagagcaatcagacactaaaaagaaataaaggccatccaaataggtaatgaggaatcaaacagccactgtttgctgataacaatattatatacctagaaaaatcctaaagactcatacacaaagctcctagagcttataaatgaattcagcaaagtttcaggatacaaaattaatgtaacaaatcagtagctctgctatataccaacagtgaccaagctgagaatcaaatcaagaattcaacacactttacaagagcagaaaaaaaaactt

SEQ ID NO: 329397 - DNA, 535 bp, Homo sapiens
ctctgaaagattctgaatgaaatcataaagcagaaatcattgccctgatattttaaatgccatcttccatatactttcctgttaaaaaaagacactatttcattgagtatatacaggaatgccatgttaatcattaataaatgatcaattctgaggcttgtacctcattagtaaacaaatgatgttttttcatgcctctaatgagagactggacaaagaggaatatttctgcttcacctgtgtttctgatttgactccacttgtacagttttgtgcatttgtacaaactccattgtacagtttcttatggcctcattgccttgtgatgaaatgttagcatctagcagagaactttatgaaaggaatggtattttgaagaagaaatacatatgggtttttccccttatgaagtaaataatgacagtatctttccatcactcttattctgaagttatgcyttgtgaatccaacaataaaaaatctgtgacttattaaggaagaaaaatgcataattggcagtgtatcatatggtagt

SEQ ID NO: 329398 - DNA, 613 bp, Homo sapiens
tgacataatccataaatattagttactattaatgtattttcttccagaaggggaaatgaagaaagtaagtttaaagcattgtctgtgactggcagtagcaaaagaaagaaagttgatggagccttccaaagagacaggccaccagtttcaaattcaaaggcagcagctagaaggttactaaagatcaatattgaaagattcacaaatttatctgtgatcatccttagattccttctgtttttcaaaggggtaaatgggtgtctttctaagatgtgatagatatctagagaccagaggaagagtcaccragtaaaaggagagcgatatagaggacaaaacatgttatttgaatttaggagactctctcaagattttgacagtaattaagagtcaggtactgtttgtggtgactcatctattaagatgccaattgctaagaaaatgagggctaagtctcaaccagtgattaggactacgtttcagaagcccattcctgtggaatagaaattagggcaagatttctggaactggtggtcaattattatctgtggaagaagtctagacagaaaaactgagataacatgaacaaaagttgggtaaagtggctatgagg

SEQ ID NO: 329399 - DNA, 597 bp, Homo sapiens
tgtaatataggactttattttgctagagctgccaaaatacaccctagactggatgatttaacagaaaatattttctcacagtcctaggagctagaagtctgaaatcaaggtgttggcaggactgatttaattttgagacctctcttcttggcttgtagatgactgwcttttccctttgtctttacatggtcttgtctgactttgtttaaggacaccatttacagggactggataaggtcccaccctaatgatctcatttaacattaattacccctttaaagatcttatctccaaatacacttacattctgagatattggtggggggtggctagggccttagcatatgaatttaggggagaaactattcagcaaacaacactgtataataatgtttcccaaattatagtctgctgagcacttgtatccagatgtactttagtaacagattatactggtgaaacacattgggagaatgctaagtgatataccaaaaagtttgtgtttggttgagattgtggatctttttacaagctaagaatggtaatttccaggagagtgttataggagttaggctttcctatatttatctgaccaag

SEQ ID NO: 329400 - DNA, 597 bp, Homo sapiens
tgtaatataggactttattttgctagagctgccaaaatacaccctagactggatgatttaacagaaaatattttctcacagtcctaggagctagaagtctgaaatcaaggtgttggcaggactgatttaattttgagacctctcttcttggcttgtagatgactgtcttttccctttgtctttacatggtcttgtctgactttgtttaaggacaccatttacagggactggataaggtcccaccctaatgatctcatttaacattaattacccctttaaagatcttatctccaaatacacttacattctgagatattggtggggggtggctagggccttagcatatgaatttaggggagaaactattcagcaaacaacactgtataataatgtttcccaaattatagtctgctgagcacttgtatccagatgtactttagtaacagattatactggtgaaacacattgggagaatgctaagtgatataccaaaaagtttgtgtttggttgagattgtggatctttttacaagctaagaatggtaatttccaggagagtgttataggmgttaggctttcctatatttatctgaccaag

SEQ ID NO: 329401 - DNA, 547 bp, Homo sapiens
tgataaacacgctccaggagtcctgggagtgattgtcaagttgcaattggggtaagtgtgacaaaggagagctactcacgatacaaggaaatgcagtaagaggattgcgaggtgattaggtgtattgggcaaggtatttattattgatttcaacaatgagctgagatctggaggaaaaacaggagttaaccaataaaagggaggtaaaaatcttttgttttaggcaacaaccacaaagacccttacaaatagtgttggcagacatgagggatagaaagtaaaccagcatgcctgagagaagatatacatgtatgtgcctgtgaatgtgtttttacactttcatttacgtgaaacatatgcaatttaarcataaagtagaatcagactttataaatttttctgcaaattgctttaaaatatatgtatatatatcatggatatctttccatgttcattcatatatatctactttattaattttaatggttgccttggatttcattgagttccataatttaactgtctcactactgataaaaatttaagt

SEQ ID NO: 329402 - DNA, 471 bp, Homo sapiens
tccaaacttttcaaagttaaaaaaagtttttaaaagttaaaaaaaatttaaactaaaaaaactctagtaaaacacatactaatagtattttgcttactctaaaagcaaaatactattttttgaattgtcattgatattgttacatattcccagttcttgaatcctatctttacatgaaaatagtcttctccctccctctttcttgtgtctttgagggatctcttatgctcgcaatttttgcccacctactcttacaagtaaagggattaaatagaaaacaccatccagccagsacagagatgttatttataacaatacctttaatgaagagagtcgtgtgcattttcattttatcctctcaataatactgcaaggaatgtatatggaatatgcattattatcctctggcaaagagtttaataattctctgccacaaatttcaattagtaggcagaaaataggtagaaaaga

SEQ ID NO: 329403 - DNA, 560 bp, Homo sapiens
ttccaaacttttcaaagttaaaaaaagtttttaaaagttaaaaaaaatttaaactaaaaaaactctagtaaaacacatactaatagtattttgcttactctaaaagcaaaatactattttttgaattgtcattgatattgttacatattcccagttcttgaatcctatctttacatgaaaatagtcttctccctccctctttcttgtgtctttgagggatctcttatgctcgcaatttttgcccacctactcttacaagtaaagggattaaatagaaaacaccatccagccaggacagagatgttatttataacaatacctttaatgaagagagtcgtgtgcattttcattttatcctcycaataatactgcaaggaatgtatatggaatatgcattattatcctctggcaaagagtttaataattctctgccacaaatttcaattagtaggcagaaaataggtagaaaagaagaacaaagtaaatacatatatattagtatatatacatttatatatagtatttctacacacacacacacacacacactcaaatatatc

SEQ ID NO: 329404 - DNA, 546 bp, Homo sapiens
acaatttaaaatgcattttgcttcagttaattgcttggtaaacttaattgaggaagttatattgtagatagtattattttcctgaaaactattctcaatggtttttcttatattgtttcaccctcccaaaaacacgtctaattgaaaattaagttgtatgtcactttgaaatttttaaaaatgtctttttcagaaaactttaatattaattttttctcttttattctatataatttagtatagaatttacctgctattactcaccttwaaaattgcaaatatctttcttttttattgaatattattcaacaagctaaacaaagatgggcagggactgtttttgattatagataatgcaaagaatcaaagaatgtgtggactttaatttcctatagataagagctttgtcataaaaactatctagctcctgtgttgtcaatatgatggtaataagtttgagttctaaaagggaaatttgcaatttatgtttattctaaaaatgtaatattgattaaaaattttgagaacattacccttcctacaata

SEQ ID NO: 329405 - DNA, 546 bp, Homo sapiens
acaatttaaaatgcattttgcttcagttaattgcttggtaaacttaattgaggaagttatattgtagatagtattattttcctgaaaactattctcaatggtttttcttatattgtttcaccctcccaaaaacacgtctaattgaaaattaagttgtatgtcactttgaaatttttaaaaatgtctttttcagaaaactttaatattaattttttctcttttattctatataatttagtatagaatttacctgctattactcaccttaaaaattgcaaatatctttcttttttattgaatattattcaacaagctaaacaaagatgggcagggactgtttttgattatagataatgcaaagaatcaaagaatgtgtggactttaatttcctatagataagagctttgtcataaaaactatctagctcctgtgytgtcaatatgatggtaataagtttgagttctaaaagggaaatttgcaatttatgtttattctaaaaatgtaatattgattaaaaattttgagaacattacccttcctacaata

SEQ ID NO: 329406 - DNA, 518 bp, Homo sapiens
ataaaaaatattttgctccatgaaaggccatgtgaagaagacaaaaagacaagctacacattgggagaaaatgttaggaaaaagactagtatctaagaaatctcagaattcaacatataaaaacctgaaaattgacagaatactgaacagacttttcaccaagatgataaacagatgaaaagcacactcatggaaatatgttgaacatcattaaccaccagggatatgtacctaagaaaacccccaatgacatcattacacacctttaaaatggcttaaattaaaaaaaaatagtgataccaccaaatgttggcaaggatgaggaaaaactgattcattcacatcttcttgatggraatgtaaaatggtacagcgactctggaagtttggcaatttcttataatagtaaacatgcaattaccatgagacttagtaactgaactctttgatgtttatcccagatgaaagaaaactatgtttacaaaaatacatgtacaaaaatgcccagagcagcttaa

SEQ ID NO: 329407 - DNA, 424 bp, Homo sapiens
gtcactaaagactgactgactttgtatgtgcccagattaaaaatggcctctgggtcttggtcccaggtctgggaaaatgcctgcaagttttcctgatttcttcccttctcagaatctccaagcctctccccaagttagctccattgcttgggagaaagaaagtgttctcccttgctctgtgactcacctctatccctctgcgactaacttttccactggggttgctcagatccccactgaagaggtgagttgcagagggaggctctctgcctctctcatgtactrgagcttcactgacttgtatcagctagatatatcacaggagctctttgctcacattctcctccccagaatcaggggatgtcctttacaattgcagtggattctccttttccttctagaatgacagttcacaaagttgact

SEQ ID NO: 329408 - DNA, 455 bp, Homo sapiens
  misc_feature (1)...(455): n = A,T,C or G
caataaatcatctaaaaattatatttttatggctcagcatttgccagacatctacaattatataatgtcagcatnccatggccaatccaactttttytccactgctgttttgccaaatcaaagaagcatagcacaacacaataaaaagaacacaagggtatgaaactcgagtttcaactctgtacaatctactatcaaagtaacttcagaaaattttatcactttctgattccctcacatgttcttttaaaattaaataaaaattttaaaaatccactttagaacttggtactattaaatgtttagtacagtcagtagctttctttccttttctaatatatgcatttgtttttgttgttgatgttataaaatgattcatattttcctccatacatgcttatttcaggtaaaataaaaggttagttcattttggtagaagcaaaagaatacacaca

SEQ ID NO: 329409 - DNA, 548 bp, Homo sapiens
cccaactttttaaagcaaatacaggaaacaacacaagtgagacaatttctgcatgtgccatggtttcaaaatcaatagcacttcaactgccaaacaggctctttaaactttaatgaagaatggattagttggtagaacaggagaaattcaagcctatcaccagttatagtaaagggtccttgcaacatttcttgaaacctattaagtaactttttttggtgcccagtgtttcaatatcccacattttaacgtcagaggtagctaaattatttcaaaggaaaaggctgtcttttcatgawcacatacaaatcattacactggaaattcacagacattgctgcagtcccttcctccaccagagactgctgaaaaggaaattagattgcattttgagtgagcaggaggtcagtgacactttatctccctgatttcatctttcattgtcttaaaactacttaaactagcaccagacagacaatgaaaattaacatttacatagtaaacactaagataattctgtaaggaaactcctgcctacacaatcttag

SEQ ID NO: 329410 - DNA, 583 bp, Homo sapiens
cactttctcagtgtctaagaaatattctaaaaatgtttcaccaagattcatcaaataacaataaatatatctattttktaatcgagacttgccatgttgaacctaaatcatgagaaaaaaattgaaaaattccaaatattttattgtagtcaccccttctctaacttaataactttcctttcttttcatgtttgtgtttttgttttgttttgttttgtttttgagacagagtctcactctgtctcccaggctggagtttagtggcacgatctcggcttactgcaaacttcgcctcccgggttcaaatgattctcctgcctcagcctcccgagtagctgggactacaggcgtgtgccaccatgcccagctaattttttgtatttttagtagagacagtgtttcaccatattagccaggatggtcttgatcttctgaccttgtgaaccgcccacctcggcctcccaaagtgctgggattttaggtgtgagtcaccacgcccggctgtgtttttgtttttaagagagacactctgtcacccaggtgctacagtgcagtggcgtgatcactgctcactgaaacctgg

SEQ ID NO: 329411 - DNA, 399 bp, Homo sapiens
cagtgcgtggggtttctcagttacatgagtccaaggaacgtccccgaacgcgactcgtttgcccggaactgccgctgcctctaaccgaggctgcgggtcctggagaaactcctcagtcttgcccctttctccggtgaacgtgacggttccaaggtccttatcctccccacccactcctctggccccggctgagaggatagaaaccacattttaatttctgcttttcacaccgtaaggtgtttttttccgcctccccccgcctcgaggcgggaatccctgcttaaatcacattttwaaacctagccgtttaaatacagggaagagctttcccacaaaaggtttttgaactcagtcccccttaataaaacctctcattcatctatatatgttcttagactt

SEQ ID NO: 329412 - DNA, 578 bp, Homo sapiens
tttattttctcagaactttagcttactaagatgtaaaatgggttatattaatagttctttaaagttaagataaaaagcaataacacatgaaacacataaatgttagctcttatttttattaggaaatttctagatttacagtaatttccacattactttctaaaaggactatataaatttatactgtcattaacaatctatgtgtgtgcttatgttatcttaaaacatattattgttactaatttratcagtgtaacattttatacctttcttttgctttgcatttctttagtcttatacaaagtgagggatagttttttccgccatattgctatagttttccaaactgagtgatggaaatttcattacctcagtcattttgagctgtaccataagctagacatataggggtggtcagttacaccactaatgaatagtgaaccaaattttccaatagacttttttcaaactaattgtagttttcttgtattttcagtctatggtaatatttattagctattattattatttaactcttagaaaagtagctgttaactaagatataaacgatatttaag

SEQ ID NO: 329413 - DNA, 581 bp, Homo sapiens
ttatatacaaccaaagattcagtctctcagttatactggttacatttcaagcactcaatagctgctcatggctggtggctgccatgttggactgtgtagatatagaacatttccatcactggagaaagttctgttggacagtgctggtctaaactctttgatttggaaatttccctttttggaatttgttagaaaaaaacaattagacaaatgcacaaaggcatatagcaaaaatatcacttgaaacattatttataaaagtaaaaacattagaaaccacctaaacaccatgttattaaaaatcaagttgtagtaaatatctatgaaaatagtgttacatatgtcgtgaaactatttctattgtagaatctttttttttttatttaggtagataacttagttacaaggggtttkgggatcactttttctcttgtcacaaacgcacatgagtatgacagagctttccctttttagcctacagctcttatagtaggatgggttgactttcactaaaacatgagcagaggcacttgagaactctctaaataacatccgtatcagctggattcttgttagatatt

SEQ ID NO: 329414 - DNA, 581 bp, Homo sapiens
atgatgcacagtcttcattttcttgtcctcagtcactgggagggtgatcaagaaagagaaagaaagcatggtagctggccaggtgcagtggctcacgcctgtaatcccagcactttgggaggccgaggcgagtggatcatgaggtcaggagttacagaccagcctggccaacatggtgaaaccctgtctctactaaaaatacaaaaattagctgggcgtggtggtgggcgcctgtaatcccagctgctcaggaggctgaggcaggagaatcacttgaaaccagaaggtggaggttgcagtgcaccgaaatcgcaccattgcattccaacctgggcgacaagagtgaaactctgtctcaaaaataaaaaaaaaaaaaggatggtagccttacaagttctatgccatctatttcaattccctgcyttttgtaaacagcataacttcccacatacccccagaatttatctcaaaattaaacctgcacaaaagttcttagacttacataaaagggaaatagttatttcaaaaaatctgtatgtatgattggggacaaactataaaaagaatatccaattaatata

SEQ ID NO: 329415 - DNA, 596 bp, Homo sapiens
gcttggggttttagtggatattggggtaatttaggcaaaggtttagaatgatcaatttggactcttatagcttccacacttttaatccttcctgcatcattgaagaagaagctcataaacattcagttattttagaaaggtcagagttattacaggcctgagttgcagtcttatcaatttcagcctgtagacagcataacagttctggttcaggaatcaggaaactctaagattatttctccctctggagagaattatatgcccttttagctttgaaagtaagtatcaccctagcaagtttactggagcactaccacatatttgaaagatacgtttttctgaaaatggcttcaacatcaattggataggttcagatatggggacctattgaacttgatttgaaactcccaccacataaatgaccttttttttctttatttcttctaaaaaaaaaagtgatacatgtgyagaatgtgcaggtttgttacataggtatacatgcaccatggtggtttgctgcacctattgacctgtcctctaagtttcctcgcctcatccccactccccaacaggccctggtgtgtgttgttcccctc

SEQ ID NO: 329416 - DNA, 617 bp, Homo sapiens
gggtgaccaaaaacttagatcacaacattcaagtcgttttaaatacctagaacaccttcccaagaagggtgggtacaaacaagcccagatggcaaatactgcaataaatacctaactcttcaatacccagacaccaatggacatccaaaagcctcaagatcatccaggaaaacatgacctcaccaaatgaaccaaataaggcaccagggaccaatcctggagagacagagatatgttacctttcagacagaaaattcaaaatagctgttttgaggaaactcaaagaaactcaagataacacagagaaggaattcagaattctattagacaaatttaacaaagagattgaaataattaaaaataagcagaaattctggagttgaaaaatgcaattgacatactgaaaaatgcatcagagtctcttaacrgcaaagttgatcaaacagaagaaagcactagtaagcttgaagacgggctgaacatacacagtaagaggagaccaaagaaaaaattaaaaagaaagaagcatgcctgctggatttagaaaatagcctcaaaagggcaaatctaagagttactggccttaaagaggcagtagagagagagattagagtaaa

SEQ ID NO: 329417 - DNA, 567 bp, Homo sapiens
cagatatggttggggtgaccaaaaacttagatcacaacattcaagtcgttttaaatacctagaacaccttcccaagaagggtgggtacaaacaagcccagatggcaaatactgcaataaatacctaactcttcaatacccagacaccaatggacatccaaaagcctcaagatcatccaggaaaacatgacctcaccaaatgaaccaaataaggcaccagggaccaatcctggagagacagagatatgttacctttcagacagaaaattcaaaatagctgttttgaggaaactcaaagaaactcaagataacacagagaaggaattcagaattctattagacaaatttaacaaagagattgaaataattaaaaataagcagaaattctggagttgaaaaatgcaattgacatactgaaaaatgcatcagagtctcttaacggcaaagttgatcaaacagaagaaagcactagtaagcttgaagacrggctgaacatacacagtaagaggagaccaaagaaaaaattaaaaagaaagaagcatgcctgctggatttagaaaatagcctc

SEQ ID NO: 329418 - DNA, 641 bp, Homo sapiens
tggaaactacaaaacactgttgaaagaaattaaacaagttctaaataaatggaaagacacctagtgtttacagatttaaaaatctaatgctattaagatggcaatacttcccaagtttatctactgattcaatacaatccctatcaaaattacagctgccttgtttgtagaatttccaggctgatcctaaaattcatatggaactacaggggactcagaatagccaacaacaaagtaggaagacttaacrttctctaatttcaaaatttactacaaaggtgtagttccagataatgcagtactggcataaacatatatagatcaatggaatcatagtgggaggccagaaacaattcaattgatttctgatgaggatgctaaattcagtgggggaaagaatggtgttttcaataaatggtgctagaacaactggatatccacatgcaaaagaatgaagttggacccttaccccataccatacacaaaactaactcaaaatggatcaaagacctaaatagaaaaactaaaactataaaactctgagaagaaagcatagacataaatctttatgaccccgaatgaggaaatggtttcttagatatgacatcaaaagtacaaataacaataacaatataaattgg

SEQ ID NO: 329419 - DNA, 622 bp, Homo sapiens
cagaataaacttaagcaaagaaatatgaagcttataaaatggaaactacaaaacactgttgaaagaaattaaacaagttctaaataaatggaaagacacctagtgtttacagatttaaaaatctaatgctattaagatggcaatacttcccaagtttatctactgattcaatacaatccctatcaaaattacagctgccttgtttgtagaatttccaggctgatcctaaaattcatatggaactacaggggactcagaatagccaacaacaaagtaggaagacttaacgttctctaatttcaaaatttactacaaaggtgtagttccagataatgcagtactggcataaacatatatagatcaatggaatcatagtgggaggccagaaacaattcaattgatttctgatgaggatgctaaattcagtgggggaaagaatggtgttttcaataaatggtgctagaacaactggatatccacatgcaaaagaatgaagttggacscttaccccataccatacacaaaactaactcaaaatggatcaaagacctaaatagaaaaactaaaactataaaactctgagaagaaagcatagacataaatctttatgaccccgaatgag

SEQ ID NO: 329420 - DNA, 618 bp, Homo sapiens
tcttcttatttgtccaagttttccttctctaaggaagggaaacctctcctgattccaattcttagatgatgaagcattaaaccaggagcagtgtttttcgtaaactgctcgctattgtaaaacaagaagtgccctggttccaacgtagctctcttaagctaggatttatctgtagtgaggaagtgctgagtatggcaagaaccagcttccttcacctgaagaagtgataatggctaacactgactgagtttctactttgtgcccaggcttaatayaggtaattgtcacatagccctaaggtgtgagtactattatcaatcccattgcacagatgaagaaaactgaggctcagagagcctaagttgcgtagacccccagagttcataagggatggcacctggatttgaattcaggtttgcttgttttcacagccacaatgctatatttatcattcgttcactgtacaaactttattgtgcaccagcaatgtaccaatgtgctgggggacacagtaaacagcatagatgcaaatgtctgccctaacattacgagaggggcaggagggacagaaaataatagaataagtaagttaaatgtgttgtatgttaggtggcaata

SEQ ID NO: 329421 - DNA, 574 bp, Homo sapiens
agtcctgtctttgctaactatgagtgagctttaacatcctcctatataaagtaagaatactgatacctgccttggagggtttttaagactgagataagtaaaaatgattcgtaatctctaaagggcattcgaatctctgcagggttattaaagtgctatgcacatatgaggtggcataaggatttgtttgcacttcaattcattcaccagtgtttgagggagaatgacaggcatgtatttggctggcacaggaaagagatcttygggagcagtgggtacctcagtgcccacccccatgttaggccctgtttccagcatgcaggtagacactcacctagtttgctgacctattggactgggcttgattgttgtccctgggaacatataaagccagtttagaaacattagcagttgggaaaatgccaactctatctcttctggcagcaagagaaggaaactcttcatttgatttcctttactacgtctttgagactctctgcagactgggcaataagaaatgccattttacacgctgaagaggaagatgtttgactcataaaaaactctggttgaa

SEQ ID NO: 329422 - DNA, 636 bp, Homo sapiens
gccactatcatgagcagggctgtgtgcatgcctgggaaagacctgagaaggccctaatccctcacctctggctgacttggaggctctgcataagcagaaagtgaaggcgaaggcagagttgtaaactgcctgccacatagttgaaggttgtgtcccaacatgcacacagtgccccttggtaaacaccaggagacttactggcttaaggcatttaaggaamtctctatctagtcattagctgaacactaagctgactgagcagacttcagtggccagacatgacaaagaatacagactttacagaattcattatggaaagtcactaagcaaacaaacagcatcaacaaccaactccaggaaaagaaagatatatgatttctagagttgccacatcacattatttaaaatgtttggttttcaacaaattatgaaatgtacaaaaatattaaaaagtcaatagaaactgtccctgaggaagcccagatgttggatttactaaagatttttaaaaatctattttagatagattcaaaaactaaaggaaatcatctctaaagaattaaagtttgaaaacaatgcctcatcagatatagaatattgattaaaaatagaaatttttaaaatagaaattctaca

SEQ ID NO: 329423 - DNA, 602 bp, Homo sapiens
aatctaccatttccattctcctcatccgtcacttaagaacaagtcctaatatttttaagtaataagtatatggtcaaaaatgaataactcagaaatatcatgaatgagagaattccatgtcagtcttacagaatatttgaagagaaattttctttgtaccacatacacaaaaatcaagcatagcttagcttgttacgtattgcttaagtggaaaaaaaaaatcaactttagtgtagttaatacctcagccactaggggaatatctgcttttattaagttaatatttcttgtacctaagtaaacattccttcttcttcctgtctgttcttacaagtaacaaataagtagataggtattcccttaaaattccgtgtgtctttctttggataatcaaygagcagttacagaacaactagccccattctaaatctgataccagagatttctgaatcaatgcaattttatgtcaaatctatacatctctacccatgtgaaccagcttctgttcaagcactgtttgtcggcctccagagcaaggagcatgacaatgcccagctttcctcctcagagctgttgctgttaatgtggaagaaaaatgaggg

SEQ ID NO: 329424 - DNA, 574 bp, Homo sapiens
ttttttttttttttttttgagatgaagtctcgctcttgtcccccagtctggagtgcaatggcatgatctcggctcactgcaacctccgcctcccggattcaagcaattctcctgcctcagcctcccaagtagctgggattacaggtgtgtaccaccacgcccagctaatttttggtattttaagtagagacggggtttcaccatgttggccaggctggcctcaaactcctgacctcargtgatccgtctgcctcggcctcccaaagtggtggatttacaggcatgagccaccactcctggcctccacccttaattttttaaatttattttatttttgtttaagtttcagggtacatgcacaggatatgcaggtttgtttcataggtaaacttgtgccatggtggtttgctgcacctgtcaacccatcacctagtaattaagcccagcatgtgttagttcttttttctaatgctctccccaccctgccctcccccgacaggccccagtgagtggttgttccctccctgtgtccatgtactcccattgtttagcccctattataagtaagaacacg

SEQ ID NO: 329425 - DNA, 574 bp, Homo sapiens
ttttttttttttttttttgagatgaagtctcgctcttgtcccccagtctggagtgcaatggcatgatctcggctcactgcaacctccgcctcccggattcaagcaattctcctgcctcagcctcccaagtagctgggattacaggtgtgtaccaccacgcccagctaatttttggtattttaagtagagacggggtttcaccatgttggccaggctggcctcaaactcctgacctcaggtgatccgtctgcctcggcctcccaaagtggtggatttacaggcatgagccaccactcctggcctccacccttaattttttaaatttattttatttttgtttaagtttcagggtacatgcacaggatatgcaggtttgtttcataggtaaacttgtgccatggtggtttgctgcacctgtcaacccatcacctagtaattaagcccagcatgtgttakttcttttttctaatgctctccccaccctgccctcccccgacaggccccagtgagtggttgttccctccctgtgtccatgtactcccattgtttagcccctattataagtaagaacacg

SEQ ID NO: 329426 - DNA, 486 bp, Homo sapiens
agacaagtcactttacctttatgggcttcagactgtgcacatgtaaagacccttgagggcactggtgttaatggttaaagcatctgtaggcaggtagatacaaacagattcagactgaaaggaacattaaatagcaaacacctgcactgcaattcaaatgtgtgttctmtttgtgcagttttcatcttctgttctgtatctggtctttgcaaccaatctttcaatctgttgatctagtggaaataaacattaatgagacagcaattgattgatcagatcaataaaacataatcagatcattgttttgaatagcatacacttcacacagagttttcagaacagctatcaacctgatttgattactattaacacacctgaaccttgttggtgattaaattaaggtagcatccatttttcctccaggcttcttcagacttcattagatactcctaacatttaggaatgctacacactcaagcaaactgt

SEQ ID NO: 329427 - DNA, 407 bp, Homo sapiens
gggtttgaagtgttaatttttcagtacacaatctcatagtcctctcctttctttcttaagaattaattagttgctgactctttggggaaggtagaaggaagtttaaaatggcatataacattttgacctggtatgttctggaaattaggactggaatgtgtccctttagaggagaacatatcagaattgacatctgtttaatggcttgcagagaaaagaggtagagmttgttatattcctatctctatttctatgcagctgaaattgatcagtacaagttcaaaaaatgtatttatcctgcaggaaagcaaatagaagggatggatctagagattcacattgatggatagccatgggccctgctcctagcctgctctccttatgggcattgggagtgtttgaaaata

SEQ ID NO: 329428 - DNA, 561 bp, Homo sapiens
tgttttttcttcctgtgtcttttttatctttaatctaacaaatgactaaataggtttgtctagaggcagtgacaaggtggggagtgagaaagaagtgtagaaaagctggcaggtaatcaacttgagggaaaacaaaaaggaaagtcataataaacaagctgaactacacacatgtagagcaataaaactgcattgaagttatgttaatattgaaagaaccaatgaaatcaaagttgtagatgaaacttgtttgcttaagtctagaagcgaatgtaccattaattaagatgcaaatgatctgacatgctttctgaactctagcaaaactcttctatttttatttatttagtttttgagacagggtctctctgtgttgcccaggctgcagtgtagttgggtgawcatagctcactgcaacctttaactcctggattcaagctatccttccacctcagcctcccatgtagctgggatgactggtatgcaccatcacacctggctaatttttaaacttttttgtagagacagagtcttgttatctttccgtgttgcccaggctgg

SEQ ID NO: 329429 - DNA, 565 bp, Homo sapiens
gttggtgctagtggaggatttgaaaacccaaaaccttggaaagggaagaggagcgaggggagaagtgggatgaagagagccaagtttagaagacagcatattaatgaggaaagaaagktatataaggttatcctggagagacctagacacgaatctaaaccttgcctacttcccagctttgactatcgttgcccctgatacactccttttattatagttctacttttacgtttattggtttcattaattcattcactcactcagtaatcagttcaaatttatcatcaatcatactgtgaaagtggtggcacttctgccaagagatggtggcctcagcttcttaagaatagccctcttgctgataaagctattcaaacacagtaaacttaactgtggaaaggcactaaaggaaggtgtttcaagcactgaaaatattattaggaaaaccatgcaatttatcatgcaaatgaggatacaaagggggcattatttataattacatcaggtctacaggcagacatgtcaactagaatgtatggttatcctatttacaaatccatgtttg

SEQ ID NO: 329430 - DNA, 565 bp, Homo sapiens
ggaatggttggggactttggaaacagacaggctcaaattccaaatttcactttgcctgtgtaagacctgcctttacctcagttttcttatctgtaaaatgtggaaaattccacttacctcasagggttcttctaaatataattgcaaatgtgtattttaaagacattcagtgagttagtcctatgggtcagtgtcacatgctatatatccttttgttccattcccgatctcagatcaccatacattttttcagtctttatttgctgatgaacacacacagagagaaagtcctttcttcatttcttcacctttcttcctgccactatctatgatggattgtatatgcctgaaaattccttgactttgtcctatcttagctcttccctagaacctgttacataccagggaaaatagaagcagcttctgcagagctgggttccagtaaagcttgggtttaggttggagagaccgtcctccttcaagaatacagagggggtgtcttcctttgaggtctggggaagcttgttcttttatctctcttacctctcacccccaaggaaaggag

SEQ ID NO: 329431 - DNA, 591 bp, Homo sapiens
ttttattttcctgttctgatcttgatgagtatttcagtgtcttttgtatgtgtaggcgtgtgtatgtatgtgtgtagattctggcctgctgggtgattgggtattctctcttggtctacttttctattgtgtgtgaaaatgtgctttctggaagaaaactcttctcttgccgagatgcaggggagagccagaaagtgggaagcaagggaaagaagaagtaagagaatagttttaaaggaagaaacaaaggaaggaaggaagaaagaagttattttctctccatttaatgaaaaattaaactttagagataatcaggaataccaaaagattggctgaattcttcaagctcacagtatagaatgagtgtcaattccttcacttctgttaaaagatcatctttcctttgcttagaatcatgttgcagctgwtctaattggtctgaactcaattttagtgggagactgtgggcaggctggtgaagaaagaacatggtcaagtgaaattttaaaaatgcacgcttttctgctacaaaagcaatttcaaaatctccactctcctcctttccccaaaacctggactcaaaattggtga

SEQ ID NO: 329432 - DNA, 566 bp, Homo sapiens
taaatcatgccttctgtatgtagttattttatttttgtatataaatgccatctcctaatataatttgttttctagcccctatttttttctttttatttaaaggtaaaaagtttctaaatgccttttaaaaggtgctagtattttaaaagcataaacaataaagaaaactagttgcaattcataatttccaatcaaatcaatcccatttaataattatggattttggatctctttttttggcgagggaaggctaggaaacacatattttcctcccatagtttcctcttaggtgggacaggacatatgctatcctattcctcattgtcattcttcattttgatcaaatttctctttgcatgtggtcttcatattgaaaggcrgccatcaaaagggactcctttcctcatcctcagacacattccctccttttgcccacacagggagaggcatgtgcctgggcacccccagcagagggcaaaagtgggttagagaggcagccttggaagaccttacctttctgatggctgagtgagccctccttaagggcttcttctttcctcctatgc

SEQ ID NO: 329433 - DNA, 553 bp, Homo sapiens
gtgtttctactgtttccacctccccttctcacctcactgcccccaacaagaaaatacaaaaataacaaataaaaattggtagagggagctgggaaagacaattaaattgagtggagaaggccagggctaggtgaaaagaacagctgaagagtttctgacaaggaggtttcattatcaccagttgtttcctagtaggcattcatgaaaacgtcagctgttccaaggtacaccaatatgttcctttgctgattccacatgggaatttctgcacagaccactgagtgaaggaagccgacatttargtatctgggctcagcagccttccgtttatatctgactgcttgtccatgggccatacacctggtattcttcaccgcagaacattactaatatatggttatatattctaagacatccctgcttctgcaagcactggatgtgaagaacaagatgtttcctgtgaagtctagcataaatctctagattctggtactgtacaaaatttcactgccagaatttccttgtcactataatatttgcatgtgaaaagtta

SEQ ID NO: 329434 - DNA, 617 bp, Homo sapiens
tcatgtcttcccacggagcagtcatttaataccttctagttggtgacatctacaaacctcctggccttcactgatgactttgaagcctggttcactctcttccatgccagttctgacatgatcctggcaccttggtgctatgtgaacaagctggaatgctagactgtgtgtttctttacttattgaattctagtgtcctttgcatttagctattcatatctcttcactgcccttaactttttcaggaactattccactagagaacccttgaattcagcactctagcaaaaaaatcttgccatctattactcccaatctacttacccataacctcctgtagttacttgcatgtgccaaattgatgatctgtaattgggttaaagactagatataggagaagtgggatttttcacctgratcttaaaaagattgacagtttttcatgaagtcagggaagtgaaacttgttggtaggagtgggcattgagggggtggaaaaagggagtcgatttgcaccttgtttatcaaatgactttccagtaaaggtttagatagcaactctgaggcagaattcaacatctgacccacttgggttgtttttaaagtgcctaatgatga

SEQ ID NO: 329435 - DNA, 573 bp, Homo sapiens
ttgacaacacttttttatgacatgcttgcagaaaagatgaaagaatatgttctggataatagaattgtgaaaatgtgagtaaagaatgcattggtttgccaggattggtggctcacatctatcatcccagcacttgggaggccaaggtgggtggatcacttgagtccaggagtttaagaccagcctgggcaacatagtgagacctcatctgtrcaaaaaaataaacaaaattagccaggcatttgtggcacatgcctgtagtgctagctacttgagaggctgaggttggaggattgcatgagcccaggaggttaaggttgtagtgagctgagatcacaccactgcattccaacctgggcaacagagtgagactctgtctcaaaaaaaaaaaaaaaaaagaatgggttaattgtgcatcattaactggaaatgtagctttagtggaataccacaagactttgactgcatcctgttgtcaaaataccatactctatagaaaagttttaataatggcagttcattaagactgtactatttgtcagatatgtaaatagaatacctcttttaattgtt

SEQ ID NO: 329436 - DNA, 474 bp, Homo sapiens
ttccttgtcctggatcttaactcctctagggattcctgttaatcaactttgtttccctacyttcagcactgattctggctcatagagaagttcaataaatgattgttaaaaaatacagaactttgtcccttttataaaaagaggtaattagattaaaataagacaatcaacaaggaatattctagtcttgacattttacgacttcatgaccttaatttcttatttttaatagcacagacaaacccataacaaatggaaacatcatatttgtgtgttgcttaacgatttacaaaatatttatacctattttctctcagtaaagtccaataaacctgatagctaggtttaatcattcacattttaaggacaaaattgaagctagagacaggagctaataaagtaatggagcctggatttaaatccaaattacctgattgcaaattgagtgttttcccacccactgcatgtcttctc

SEQ ID NO: 329437 - DNA, 474 bp, Homo sapiens
ttccttgtcctggatcttaactcctctagggattcctgttaatcaactttgtttccctactttcagcactgattctggctcatagagaagttcaataaatgattgttaaaaaatacagaactttgtcccttttataaaaagaggtaattagattaaaataagacaatcaacaaggaatattctagtcttgacattttacgacttcatgaccttaatttcttatttttaatagcacagacaaacccataacaaatggaaacatcatatttgtgtgttgcttaacgatttacaaaatatttatacctattttctctcagtaaagtccaataamcctgatagctaggtttaatcattcacattttaaggacaaaattgaagctagagacaggagctaataaagtaatggagcctggatttaaatccaaattacctgattgcaaattgagtgttttcccacccactgcatgtcttctc

SEQ ID NO: 329438 - DNA, 586 bp, Homo sapiens
agtcttgacattttacgacttcatgaccttaatttcttatttttaatagcacagacaaacccataacaaatggaaacatcatatttgtgtgttgcttaacgatttacaaaatatttatacctattttctctcagtaaagtccaataaacctgwtagctaggtttaatcattcacattttaaggacaaaattgaagctagagacaggagctaataaagtaatggagcctggatttaaatccaaattacctgattgcaaattgagtgttttcccacccactgcatgtcttctcccaccattttgagaaccatacttttcttgtctgtgtcacatctccctttagtgcatttgccccacctctctctgtaatatgacattgcaacgaagcctgttgtggaattttagatgagagaatgcagcttatctgaggaacctgagacagagccaacatgtctagcaataaaaataataatgacattttggaaacctcacctttcaattatcagctgtgacagtgagtacacatttgcaaggaggtaaccttctctcccaaaaagcaggaagggcccattgcctggaatcacatg

SEQ ID NO: 329439 - DNA, 586 bp, Homo sapiens
agtcttgacattttacgacttcatgaccttaatttcttatttttaatagcacagacaaacccataacaaatggaaacatcatatttgtgtgttgcttaacgatttacaaaatatttatacctattttctctcagtaaagtccaataaacctgatagctaggtttaatcattcacattttaaggacaaaattgaagctagagacaggagctaataaagtaatggagcctggatttaaatccaaattacctgattgcaaattgagtgttttcccacccactgcatgtcttctcccaccattttgagaaccatacttttcttgtctgtgtcacatctccctttagtgcatttgccccacctctctctgtaatatgacattgcaacgaagcctgttgtggaattttagatgagagaatgcagcttatstgaggaacctgagacagagccaacatgtctagcaataaaaataataatgacattttggaaacctcacctttcaattatcagctgtgacagtgagtacacatttgcaaggaggtaaccttctctcccaaaaagcaggaagggcccattgcctggaatcacatg

SEQ ID NO: 329440 - DNA, 511 bp, Homo sapiens
ggagaaactgacactgagagaagtgacataattctacttaagataatccagttcattggaggaacctctggagcytgtgccaactttcttgactcctggatttatgctgtagcagcaacatcctgctttctcagccatttttctctataggagcttttacctagctaataagaattgcgttttaaaagataacacgaatattttaaacttatgtggcatctactccctgaagatctcaaggcactttcacctggattgaaccatttttgccagtgtaggagctgcttctggatgggaaactggattactaggtagcaacagcaatttaggtcaactagttattacatatcatctggattaataatatctttaaaaggtaagaggtaaacatatttaacctgcttataggaagcaatatgatacttaataaaataatcatgttatatatttaggctcccaattgaattaccaaaaccccagactaatggcattagcttgtccatcccaacct

SEQ ID NO: 329441 - DNA, 511 bp, Homo sapiens
ggagaaactgacactgagagaagtgacataattctacttaagataatccagttcattggaggaacctctggagcctgtgccaactttcttgactcctggatttatgctgtagcagcarcatcctgctttctcagccatttttctctataggagcttttacctagctaataagaattgcgttttaaaagataacacgaatattttaaacttatgtggcatctactccctgaagatctcaaggcactttcacctggattgaaccatttttgccagtgtaggagctgcttctggatgggaaactggattactaggtagcaacagcaatttaggtcaactagttattacatatcatctggattaataatatctttaaaaggtaagaggtaaacatatttaacctgcttataggaagcaatatgatacttaataaaataatcatgttatatatttaggctcccaattgaattaccaaaaccccagactaatggcattagcttgtccatcccaacct

SEQ ID NO: 329442 - DNA, 597 bp, Homo sapiens
tataaatgagtgtttttctttttaaaaaaatcattattgaccctctcctcactataatgcatgctccatgagagcaagggattttgtccgctttttcattcccactgctgtatccccagggcctgaagcagtgactagtgcatagtaggtgttcaataaacatttattagatggattaatactgttattacttcctgaggcataaacaagaagactaagcttctgtaamctagcgcccagatccaatgcgttctaatcctaactttcttaagatgtcacttgctagttccttctttgtcatatccctacaaagacagaaaaaaacaaaattagctttgttgatttctgtctcagagtatttttttagtatcttgtttggcatggcaacaaatgtagttcaagtttgattttttaattcctagtaccgtcaatacctttgcttcagcccagtggctatttttcactcattctatcaaggaacgtgcgggatccaaaattataaattcctcattaaactgaataaacatattccctttgagggtggactttataatattggctctatatggtatttgtaaaatgtgtatgactttgtca

SEQ ID NO: 329443 - DNA, 597 bp, Homo sapiens
tataaatgagtgtttttctttttaaaaaaatcattattgaccctctcctcactataatgcatgctccatgagagcaagggattttgtccgctttttcattcccactgctgtatccccagggcctgaagcagtgactagtgcatagtaggtgttcaataaacatttattagatggattaatactgttattacttcctgaggcataaacaagaagactaagcttctgtaaactagcgcccagatccaatgcgttctaatcctaactttcttaagatgtcacttgctagttccttctttgtcatatccctacaaagacagaaaaaaacaaaattagctttgttgatttctgtctcagagtatttttttagtatcttgtttggcatggcaacaaatgtagttcaagtttgattttttaattcctagtaccgtcaatacctttgcttcagcccagtggctatttttcactcaytctatcaaggaacgtgcgggatccaaaattataaattcctcattaaactgaataaacatattccctttgagggtggactttataatattggctctatatggtatttgtaaaatgtgtatgactttgtca

SEQ ID NO: 329444 - DNA, 590 bp, Homo sapiens
gcttgtttaaccaagttcctttagttcaggtgtagagcttttcgtatgctaatgcacattttgaattttccagagagtaatcgtatacacagaatctcccacaactattcaaccagagctcttttctaaaggacatggtttgacaaggcctgcatggttttctgatcccagagaggctggtcagaaattggtaataggagtttggtggctggagttgaagcaaagcctgctcatgactgtgggacagaaaacattacttactgtctgatgtaggattattccaaggccctctggaaatcaagaatagaaagmaacagtacaatttccagaaactgagaagtaggtgaggcactagaaatgggtccctggagtgtcctccaatcttcacccctctttgccctcacttgcagtattgcttggaagcactgaattgctgtgagggagttcaacccagctcaccagttttctcatctccttggttaagagagtttaaagaacctttgaagagctggtaatgaagtggacaaattataccacaggtgtcatcatcatgcagactccagcagggacagatgtagagcatgggacaa

SEQ ID NO: 329445 - DNA, 617 bp, Homo sapiens
ataaatgccccaccgatgagcctgaatatggaacacagagtctgggtcactctttccagaggacagagaagcttgaaaatcaagtgaggaaggggttattttaactcctttctttaattctctgtaaaggggaaccaagctcctctattcctaggcacaaacatgcmaacatgaccagcttggccttctcttgaagtttgccccagaattgacaagaggcagatagatccagtcacctgttattactgcagacaggctgtttaactccccagttacatgtgtaaatgactaagaggacacttcaccctcatctccatagaatggcactttagaaagataaattttatgacctaattcttagatgcagactgagaaggaattagtttaaaaagaaaaattcttcttttcataacttaaaagtgaaagtgacctcaaggggcaaaaatgaaactgaatgtcttcttcttttttttttttttattacagtaggcttttttccccgttttttcctccattaaagtaaaaaaagctaactaagtcttagacagcttagaagttttttgaattcttctaagttctaaccatagctttggtctggtattattctaaacactctc

SEQ ID NO: 329446 - DNA, 617 bp, Homo sapiens
acctgtctgtccagggcctgtgcgccctgagcctgcatacaaggcctatgtgtcggacctgcatgtttggggcctgtgtgcccagagcctatgtatgaggcctatttgtcaaacctgtgtgtccaaagcctatgtctccctcagcctagtgggtggagtataaagaaaatggatgtgctgtggtcaataataggccaaggcagacatctggtccagcatgactcagaaagtttggagcgcaggtacacaactccattcattatgtaacsacacctcatgaagtgcattaggtgattacccacgtgagctcgtgcttggctcggaaccactattgtctgtaaaaggtataattaccctgctaatgctgtacgtatggctcacacccagactcactcctggccagagagagagtaaatcaatgtcgaaactttctacgattcctcaagtgtttttccagctacctgccactcgcccaccaactccccttgggcctcagttagaacctgacattagcatttggatcagtaagaagtgagaggaagatcactctcacgaatgtgggtaggcatcatccagtctattgagggcaccaataggacaaaagcaggaaaaggggc

SEQ ID NO: 329447 - DNA, 537 bp, Homo sapiens
tgcccagagcctatgtatgaggcctatttgtcaaacctgtgtgtccaaagcctatgtctccctcagcctagtgggtggagtataaagaaaatggatgtgctgtggtcaataataggccaaggcagacatctggtccagcatgactcagaaagtttggagcgcaggtacacaactccattcattatgtaacgacacctcatgaagtgcattaggtgattacccacgtgagctcgtgcttggctcggaaccactattgtctgtaaaaggtataattaccctgctaatgctgtacgtatggctcacacccagactcactcctggccagagagagagtaaatcaatgtcraaactttctacgattcctcaagtgtttttccagctacctgccactcgcccaccaactccccttgggcctcagttagaacctgacattagcatttggatcagtaagaagtgagaggaagatcactctcacgaatgtgggtaggcatcatccagtctattgagggcaccaataggacaaaagcaggaaaaggg

SEQ ID NO: 329448 - DNA, 636 bp, Homo sapiens
gactcattcccaaaatctccatgctaaacggtctttgtggtttaaaagagtcatgccttagcaggggttctcagacttttccactaacaaacctttatatcagtcaatgtcagtcaagaaaaccgaaaccactccaggtattttgcacatcaggattttaatacagggaatggatcacaaactaaccagaamaactgaaagagcaagaagaatatagaagaaaactagaaaagcacagggcctaagtgtggtctcatggcccacactcactgctgagctccctggaggcatggccttttctgccgctgctgctataggaatcacactactgccacaatacaagtagccaagaacctaaaattagtgctgttgctgctgaagcccatggccatctgcgatctctcctaatcatccacacctgctaccactggaaactagtagaggggaaggggaattttcccttctcctcaccttctagttacctgcagtgcatcacattagcaaacacttaatagcaagctagatagtaaaggaactgtgaacatagagtttgcagaattccaatcctagcaatacaaaggacagtataaaatggtgagtatggatctaagcctgctaatgcctaggtaggtacct

SEQ ID NO: 329449 - DNA, 598 bp, Homo sapiens
taattctaataagtcaagactaagtttctcttccctgtttttaataattaccacacatagtgatttagtctacgtyctccaaagtaattctcatatcaatatagatcattttggaaacccagatttcttttaaaaatataaaaatgcgaccaccttcagttatttaaaagatgggatatttgtaggcttgaaccgccatttcaaactcacgcttaaccaaaacctgttctaacacaaatgaacaaatgatcatggccaaatgtttttggaaaagttgccctattgtaattcaataagagttagtcatttcaggttagttttctttggatggtccatttgtgactaaacaaactacttcttcccattgctaaacttcctttgtgttatataattatcttgtgttcacacaagtttatctgacaaaaaattattgatttaaaattttataaggtacttatgtgtcagtcacattttcttgaggtaaatcagcatttttttttgctcatttcctaggtagattgcagctggtctgagggtaaacacagaggagtttctttctcttcccaggctctataatgagaatattctgtctgatcag

SEQ ID NO: 329450 - DNA, 598 bp, Homo sapiens
taattctaataagtcaagactaagtttctcttccctgtttttaataattaccacacatagtgatttagtctacgtcctccaaagtaattctcatatcaatatagatcattttggaaacccagatttcttttaaaaatataaaaatgcgaccaccttcarttatttaaaagatgggatatttgtaggcttgaaccgccatttcaaactcacgcttaaccaaaacctgttctaacacaaatgaacaaatgatcatggccaaatgtttttggaaaagttgccctattgtaattcaataagagttagtcatttcaggttagttttctttggatggtccatttgtgactaaacaaactacttcttcccattgctaaacttcctttgtgttatataattatcttgtgttcacacaagtttatctgacaaaaaattattgatttaaaattttataaggtacttatgtgtcagtcacattttcttgaggtaaatcagcatttttttttgctcatttcctaggtagattgcagctggtctgagggtaaacacagaggagtttctttctcttcccaggctctataatgagaatattctgtctgatcag

SEQ ID NO: 329451 - DNA, 537 bp, Homo sapiens
accttcttgtgagatcaccatgggcctttgtcagcatccagtcccttagtctctagattcttgtaacgatttccttcttttgccccttcaggcttaggggttatagcaatgcctaaatctctagccctagggcatagcactatcctttgtgttttccttgccctcctcttgataaactgcctcttcattaaactctccttgaaatttttctttttgttttctgggtttgttttgggtttgtttttgttgttgttgttgttgttgtttttgtttttagatggagtcttattctgttgcccaggctggagtgcagtgacatgatctcagctcactgcaacctycacctctcaggttcaagcaattcttcttgcctcagtctcctaagtagctggtactacaggtgcattccatagcacccagctaatttttgtatttttagtagaaacggggttttcaccatgttgtccaggctagtctcgaattcgtgacctcaggtgatctgccctccttggccttccaaagtgctgggattataag

SEQ ID NO: 329452 - DNA, 563 bp, Homo sapiens
tactacaggtgcattccatagcacccagctaatttttgtatttttagtagaaacggggttttcaccatgttgtccaggctagtctcgaattcgtgacctcaggtgatctgccctccttggccttccaaagtgctgggattataagcgagaaccaccatgcctggccttctccttgaaattttycaatttgatcatcctatctcattcctaccggaatactaatcgatataatagtcataagagattaatgtactggtttcaaaagcttctacaattttattcatatttaaattctactcatattaaaagtatttctgcctttaactcatgaataaaattgttaacaaaatcacctatttcagttcatctgggatagaaaaggaaattatcagaagaatcccagaagaatctgtgccaactggagtcccatagtaaagctattaatcaattaattgtttggaaagaaaaagtataaatattggaaatataacaaaggtgataataggcaattcagttgtaaaatatggtcttcttaagtacaattgaataccatacagaatatg

SEQ ID NO: 329453 - DNA, 563 bp, Homo sapiens
tactacaggtgcattccatagcacccagctaatttttgtatttttagtagaaacggggttttcaccatgttgtccaggctagtctcgaattcgtgacctcaggtgatctgccctccttggccttccaaagtgctgggattataagcgagaaccaccatgcctggccttctccttgaaatttttcaatttgatcatcctatctcattcctaccrgaatactaatcgatataatagtcataagagattaatgtactggtttcaaaagcttctacaattttattcatatttaaattctactcatattaaaagtatttctgcctttaactcatgaataaaattgttaacaaaatcacctatttcagttcatctgggatagaaaaggaaattatcagaagaatcccagaagaatctgtgccaactggagtcccatagtaaagctattaatcaattaattgtttggaaagaaaaagtataaatattggaaatataacaaaggtgataataggcaattcagttgtaaaatatggtcttcttaagtacaattgaataccatacagaatatg

SEQ ID NO: 329454 - DNA, 561 bp, Homo sapiens
ataattatctttttcattattggtaaatcttcattctcctctcctgtgctgtccttgacatatatattattttatatgtatatatatatattttatatgtataaaaaatgtatatatatattttaagctaagcaatcttatcctaacttggagctaaaatgttccctggactttgacagccctgtacttgaggcacactagggtttaaagacccaatctctcttctctcagctttagcactgacttgtcttggtctctgccacataccatcatcccacttaggttgctaaaactaattaaaagaaggtcttaattttcaacctaacactgtcaatcagctaaagaggtttatgctgctccttcarttcttttgctttgcatttctctgtgaggccaataatattcttcctaaagaggaagaatggaaagaggagcatggaagtggcagcaatgttgccccaattttacacaagtgttttcctacttcttcttttgctttttgaaagcattaggtccaatttctctccctcaaactctcaaggaaagaaaaaaagtcgttta

SEQ ID NO: 329455 - DNA, 582 bp, Homo sapiens
gggcaggggcaaacagatcgtgggcaaaaagacagagaagcatcacagagtaatctgtaggaatcagaagtccatggggaaagaagacacacagcaaaatttggtgtcataactgcacttcatgacaaggctgtaaaggtgctacgttgctgtgcacctggcagcccactataggcttttctgttatttttcttgctcctaaaatgtcacatcacttatactatttttaattctttgtcagtggacasataattggcagagaaaactgagaacagaaattttctcagaacatcctggttatgatttacaagcttctgatttttcctgtcatggagaaaagtacctgagaacaagagctgggaaatgcttagctggtatcaaaattcctttctttgtattgaaagctgcagcattcaatcatttccaagaatattcaagaccaaaactggcataaaatttaaggttgcttccatctaaatatgatatttgggattttcccaatagagcaatcaaaattcacatttctaaatcagccaaattttcatgctttgggattttattatagattgaaaatatgacaac

SEQ ID NO: 329456 - DNA, 581 bp, Homo sapiens
ctttaaagggacatactcaatcattattcagcagcagaaccacctgcaccaacccaggctagctacttaatttattccaattccttttgttgttgttattattattgttcttagaaacaaggacattttgggggaaccttagcagggcttcatctgaaatctttgccatttataaacgttatgtagttactttaaagtgatctgtaaaagccacagtgactccccatgcaggtttctttatgaaattacaggggaagaatgtwaagtataaaagtttactcttccaattctagaattttgcattcccaaaaggttgtaaagagattgttaccaaatcccagcttaggagaagggaagaaacgtccagtatctgctgttttcttcctagtcatgatgcaccctgagagtgttacacaaaatgggctttttgggaccacaatctggccagccctcaaccaccccaagtggtcctaaagatcattgatggggatctttgggatgttgggggaagctcttctgacatttctctcatgtggtgggaaaaataacagttctcacttccttctcctgcaatactgaac

SEQ ID NO: 329457 - DNA, 581 bp, Homo sapiens
ctttaaagggacatactcaatcattattcagcagcagaaccacctgcaccaacccaggctagctacttaatttattccaattccttttgttgttgttattattattgttcttagaaacaaggacattttgggggaaccttagcagggcttcatctgaaatctttgccatttataaacgttatgtagttactttaaagtgatctgtaaaagccacagtgactccccatgcaggtttctttatgaaattacaggggaagaatgttaagtataaaagtttactcttccaattctagaattttgcattcccaaaaggttgtaaagagattgttaccaaatcccagcttaggagaagggaagaaacrtccagtatctgctgttttcttcctagtcatgatgcaccctgagagtgttacacaaaatgggctttttgggaccacaatctggccagccctcaaccaccccaagtggtcctaaagatcattgatggggatctttgggatgttgggggaagctcttctgacatttctctcatgtggtgggaaaaataacagttctcacttccttctcctgcaatactgaac

SEQ ID NO: 329458 - DNA, 581 bp, Homo sapiens
ctttaaagggacatactcaatcattattcagcagcagaaccacctgcaccaacccaggctagctacttaatttattccaattccttttgttgttgttattattattgttcttagaaacaaggacattttgggggaaccttagcagggcttcatctgaaatctttgccatttataaacgttatgtagttactttaaagtgatctgtaaaagccacagtgactccccatgcaggtttctttatgaaattacaggggaagaatgttaagtataaaagtttactcttccaattctagaattttgcattcccaaaaggttgtaaagagattgttaccaaatcccagcttaggagaagggaagaaacgtccwgtatctgctgttttcttcctagtcatgatgcaccctgagagtgttacacaaaatgggctttttgggaccacaatctggccagccctcaaccaccccaagtggtcctaaagatcattgatggggatctttgggatgttgggggaagctcttctgacatttctctcatgtggtgggaaaaataacagttctcacttccttctcctgcaatactgaac

SEQ ID NO: 329459 - DNA, 599 bp, Homo sapiens
ataggaacttgggacaagaaagtctagctacttaaacttttaatctgatctaaaataaagatgaaattgcaaattcaaagcttattctgaggtacattgttgacaagatctgaaagtaggagaatgaaaaaatggtaactacaactactttttatgaagtttaacagcagaaattatgcccaattatattgctgttaggaaaatcttcttctattatatagctctgtagagcagcattgtaaaatagaaataaaatgcaagctatatatatataaatttaaattttccagaagctacatttaaaagaataaaaagatatagatgaaattaattttaataatatattttaattcaataatccaaaatattatttcaacatgtgatcgaaatctaaaaattaataagatattttactcttttcatactaagtgttcaaatcttatgtgcgtttcacacttatagcatatctcaatttgatatgcccatagttcatacttcatatgcccagtaattcatatgctcartaaccacatgacatgtctgtgtgtgtagtttgtgtatatatttatgttggtgtgtatctgtgcatatattttaac

SEQ ID NO: 329460 - DNA, 528 bp, Homo sapiens
cttttatggatatgtggattactatctgtagcttgtcttttcatctttttaacaggtcttaggcagagcaatagttgttaattttgatgaagtctgatttatcagtttctccttttataaattgtgctttgggtatgaagcttaataactctttgccttgccctagatcytaaagatttttctcctatgtttctaatagaagctttatagatttgtgtttgacatttaagtgtgtgatctttttggagttgatttttatgtaaagatgtgagacttagtttgagggttttgtcttgtgtgtatgtgtgtgcttatgtatgttcaattctttcaccaccatttgtcaaaaagtctgtctttcctccattgaattgtgattgaatgtttgtcaaaaatcaactgggcatatttgcagtggtctgttttcaggttatcttttaatctatgtgtgtatccctttgccaataccacacagtcttgataactgtagtaatgtaatgtgtcttgagattgcgtaaactgattctt

SEQ ID NO: 329461 - DNA, 606 bp, Homo sapiens
gggcaggaaccttgttcagtctgtttaaaattgcctgttcggtgcctagtccagtgcctgaaaataaatagggcctcaataaatattagttgaagcaatgtgtgagtaacaaatatgaattttttgaagtctgctattcgcataccaatttytccctgctagaaacactttagaaaagtccgttgaaggagtttattggaaagtgatctgtagtgcttgtcccaattacctaattcacatgaaaggaggccctttagcagaagtaccaggtgcaggatggagacagcttcctttcctcctgactcctgggtgctttggacccagcctgtgtaacaccaggtgacaagtcagggttgggtgcatgccaaaacagagagaggtggagagaaatgtttcatatttttctttacactaactcaaggcttcttaactggagatgaagaggtttgagtgttaggggtaataaaaaaaagcatattttacattttttactaaaccccaggctgtttgtcatggagggtcatctgagagacatgttggttatgagaatgcagagtgcgattcaatttggcagacatttggatattgtaagaagttgaattagat

SEQ ID NO: 329462 - DNA, 425 bp, Homo sapiens
tcaggaaattggatattacctcactttgtacaggacctgggagagcaccatatacaaccctgtgcttaacaaaagcttttatataatgatgacagtgataagggagtgccatccctctgcatatgaggaatcttgtaaaaagtgggtcaaatgtgaaaaatattgtacgtttggaatttgcatttaaggtgatgcactggctagttcaagctactgaggtacctgcttggtgcctaggaacaggactacatttagttaagtgatctgtgtcattaggctgttaaattaatggacagaagaatttccagcattaycttattttttgatcatgtaaaataaatcggacactgaatggcacttaatattgtcaattaattagaaatttatattttaaaattgcatttaaacattttttttagacaacg

SEQ ID NO: 329463 - DNA, 562 bp, Homo sapiens
aggtctcctgtattacttctctytttcttggctccaatatctccgtttcataaagatattcttaatttttgtggaatacttacttcagtccctgcctgaaaaagagtaaaagttttagagctgcatacttgaaatctcctttattctgctctcatacttccttagcagtttgactgggcatacaattctagaatgaaaataatttcattctgaattctgaaggcaatgtgtcaatcccttggggccattaatggtgatattgaaagtcagatgtgagtcagatgactgagtctttgtaagtgtaccatctcaagaacaggtcctatctctcgccagaagattttaggatcttctctttgttcccattgttttgaaaatatgtgattatgtgccctggttgcatcctttctattcagagaactgagcagaaatcaggcccctttaatctcgatgtcctgtccctgtgttggaaaaatttcctcgtacttttcttctatttcatctctttctgaaacttctctttctggaactcctagtttccaatgttgaagttaatgaattg

SEQ ID NO: 329464 - DNA, 536 bp, Homo sapiens
  misc_feature (1)...(536): n = A,T,C or G
caggaaatcagatcaagaaaaactttttgttcaatagcacaagaaagagggaactaggtgactatcactaaactaccactagttaagagagagcagatttatgagcatgagtttctaccttaggcctgtcatattttttcacctttatgttagttaattgcagagtaacataaattaactttggaacacaagcaaaaatgggaactttatttatgaatttcttggatttctttacctcaagccaaacaactaaattgctacttagcataaattatttatgggccctggctcaataccatccagcaccagcccccggaggtatgggagatataaaagatttaaagcattgctgcgacagtgttcaggctgccatggagctgtgtttctttccaraagggtccactttattttgttgtaaataaatagaggctggatttccagggagggaagttagcttccagcaggacggtgngtggtgttttgcatatgttaattacacaacccttttatgacagatagacacagtgtttgcatag

SEQ ID NO: 329465 - DNA, 584 bp, Homo sapiens
actattctatatgatattacaatagaaattgcataccattatacattgtcaaagcccatagaactttagagcaccaagagtaaccttaatgtatgcaaatgtctaaaaattattcaggactaaagaaggaatgcagtctgtgacacttgaactacattacgaatgtatgttacaacctcagcgatggggcagggggatgatgtgacctaagtcactgtggaaatgaagtaaggcacaagcatctgtaagacaaaggctaaagatgaaaggytaaaggaactgcacatggaactgtattctggttgataaagttgtttcacatcagggtatggtgtgaagacaagagtgattccatctcggaattccatgtcgattcctaactatcccagtcccatgaatgtattttgatttctgctttaccatcctgatttaccatctctgttgtaagaacatgtcattcttgccttttctggatggttgcatttaaatgtcttgctggagcatatacacccttccttatggtatacaagccctggatctgaggagtaacagtgcagagatctacttgccttgcagccaaccaa

SEQ ID NO: 329466 - DNA, 512 bp, Homo sapiens
ttcacctgcccggacgcaaatcttgtgccatttcttcttatgactcattccatatttctaaataatatacttgtgatttattgtcttccattttaaaaaatgctatctctactatggaaaaaaackattgatttctcataaacaatgctacacacatacactttttatattccagtttcacctgtaaatataattataattttctagtgagtcagtagtcaatgtttatgtaattactttgaaatattattcccactgaatacaatgagcagagcataattatgtttccatcttgtgcaattcttagcatttcctgaagctcctaaatggcttttgaaattttcctagttttctatatacttgtctgtcatgaaattgattcccaaatttaaagaacagtaaaactcctcttaacaaagtcacatattttaatgttttcaatcataagatagtgtgatttttaattttttaaaaatctatctctctcctggactcatacatcctcctgttcc

SEQ ID NO: 329467 - DNA, 565 bp, Homo sapiens
gacctccaactgcagatattgtacaaattgttgcactatctcaatctggagtgcagggaacaggacagggtaagatataagctggagcttagtcacttttaaagccatgagaatggatgacatctgaaagagcaagtgcaaaaagtaaaakaaaaagaataacgtaaagaactaagctttgcaccattaaagtgcctatagatggaaatgaagaaaagactcagcagtgaagactgagacttagagatctctaagttgcttagagattggaggaaaagaggaatgcagggtacccaagaagcccgtaagaaaatatttgtaggagaaaggagtgtcagtggtgttgaaaacacaagtaaaattaggaatgagaaatatccattaaattgagcaatgttgaaataactagtgaagttgaagagagaaatgtcagtggagtagtggggatgaattactgaatttgggggatgatggcaaagaaacaatcacttcaatggctttgctctggaagaggaagcagagaaatgcagtggatgctggaggagaatttcgggccaagagagag

SEQ ID NO: 329468 - DNA, 531 bp, Homo sapiens
taactgggcgacatttcataagtataattctacatgctaagaaagcaaatattgcgtctagagaaagtaaagtgtgaggatcacataggtgccttttgatagactctgaaatagaagtcagttctctcctataaatcgctaagtctcagaatatacagtctacagagtaagataatgtggcacgtgcttcataactagtagaaaattcaaggagtgtcaaaattctgcatatgctccttatcgcaragatgttccaacttgtgtatataagcaattgctttgattttattgatgtcacttagaaaagtgtatatcatggcggttcaaactgaagttatacatatctttgaagataaattttttataagttacaattgttttaccaaattttccagtgggtttaaaaccacctagaatttcttctttaaaacactttttcaagtacaagtaaaaataagtcctcctatactatagcaatttatagtgtccaaagtgcacttgaatgtattactttatgtgacatttgaagca

SEQ ID NO: 329469 - DNA, 531 bp, Homo sapiens
taactgggcgacatttcataagtataattctacatgctaagaaagcaaatattgcgtctagagaaagtaaagtgtgaggatcacataggtgccttttgatagactctgaaatagaagtcagttctctcctataaatcgctaagtctcagaatatacagtctacagagtaagataatgtggcacgtgcttcataactagtagaaaattcaaggagtgtcaaaattctgcatatgctccttatcgcaaagatgttccaacttgtgtatataagcaattgctttgattttattgatgtcacttagraaagtgtatatcatggcggttcaaactgaagttatacatatctttgaagataaattttttataagttacaattgttttaccaaattttccagtgggtttaaaaccacctagaatttcttctttaaaacactttttcaagtacaagtaaaaataagtcctcctatactatagcaatttatagtgtccaaagtgcacttgaatgtattactttatgtgacatttgaagca

SEQ ID NO: 329470 - DNA, 606 bp, Homo sapiens
cctacctgcctcagttatatttggactctagggtaggatagcagttcaygtttgttagtaagaagaggaggaaaaagagcagcttttactttcatatctactatcactgtggtctccatagcaacctggggcagcagagcctccagacagagctagtccacagctacaacttagtgggaggaaagaggaggcatgacagacacatcttgacagattgattagggcagcaatttgtcagatcactggactgggaaatggctacagctctgctgattctgttcctatgttcacttcataaaccggggactgaataaatatgtccataacatgttgcatgcagggctgaaaatccaggaccagaactgtttccattcactgctgggactgactgtctcacttccatgactctgcagaaatcacaaaactgattagtaacaaaaaacattacacattaagggaagccattaagagcaatgaagcattgttctttttgatattgattagtgaaagagacgtaaaaggatttcatagatatttttcacaccaatcatcaaaacattccttgatataagtagaagtacataactttattccaattattgatga

SEQ ID NO: 329471 - DNA, 529 bp, Homo sapiens
ttttggaaatctttctattcagcaaactttttagttatcttgcttttaccaggcattactctaggagcacaaaccatggtgtgaaagacagcattattgtcaccattgcctyttggttttactgggaggccggtaaagagatgcttatgatgtggttgaattttactgggatctactatagcatgcgaaggaacacacggaaatggcatctgactctggcatttggccatttcagcattgccattcaggaatctacagaagtcaggtaggcaaatgcacaaggaggaggataactggaatctgtgaaatacctgagaaacagtggaggcccaaagtttccagagcttctgatttttaaatgaagagccacatatctgaatttttatgtgatttgtcatgattttaaaaaaattttaattgtgagaaactacatataaaatgttccatcttaaccattttttttctttttttgccactgcatgctcttttttattattattattattattattatactttaagttttagg

SEQ ID NO: 329472 - DNA, 535 bp, Homo sapiens
atggctagggagccctcaggaattttacagttatagcagaaggtgaaggggaagcaaggcatcttcttcataaggtagcaggaaggagaagtgccaaatgaaatggaaagagccctttataaaatcattagatctcctgagaactcactcactatcatgagcagagcatggggaaaaccacccccataattcagttacctccacctggtttctcccttgacacttggggaacgtggggattgcaattcaagatgagattaggttggggacacaaagcctaaccatatcacttgccaacrcttgttttctgttttgattttgtttttaatagtggcattcctaactggtttgagaatatcactttgtggttttgatttgaatttccctaacgattagtgtgttgagcattttttcatatgtttttttggccatttgtgtatattttttggagaaatgtccattcaagtcttttagacagtttttaattgggtaaggttttttgttgttgttgttgttgttgttaaatgtagttctt

SEQ ID NO: 329473 - DNA, 568 bp, Homo sapiens
aagtgtttatgatcacatatgaacaaaagataataccataaacataggaagctggcaattttgttttatatgtgtaaagaaaaatacacattttcaagtatatgtaatatatactcataaaacattaatattacactcatgagccattattgttgctacatgtttcactttaatgtttttctgcactttactgtatttctaaagtaaaaatataattaaggcacacgtttaaaaaatatcttttaccaaccataagcaaacggaattccatgttttatttccaaaagataaaaatatcaggtaaatatagatgtactctttcagaaactggagtttgaatagtatttttaagtraaagaatatactaaatacccaagatgaaaataatcttcatattctgtttgaaatggaatggtaaaaaatagtattttaacctatttatgcctgaggctgcagtcttttttagtttttgcaatcagaccttggtaatgaccttgagcagtagaatataaataactcccacatgcttagcgttccaataatggaaccctaggcataaatgggttga

SEQ ID NO: 329474 - DNA, 581 bp, Homo sapiens
tattaggtctctgtgaaaatgtttaagacatagacattcaatccgtcagctatggaattggctccaagttcatttttaaacattacattgttttactaatttcagttcttgcaacatctgctttatatctccattatttttcctacagtttcttatgaatggttagctgagtaaaattgcaaatgagaactgaaaaacagacacttgaaattgtctttacttgatgggacttgttatcattagttttgtatctttgttggtttaatgaaacaactgaaaagctgtgtagtccctaactcatacctgctttcaagggttcctatctttcagccttgttccccttctgtgagagaagtcctcycccacaggaggataaagggcaaggacccaggaagcagactcagccactaatgcctgaaggtggggaagctggagccagtcaatcacattgtaatttaggattcttgaatatcatctcacacttcaaaaacaatgccttaaagaaatggctggtacacaattctctaaacatattacctctttgttccttggagatttttgaaacgacaactggaatgtta

SEQ ID NO: 329475 - DNA, 593 bp, Homo sapiens
actgctcagttcccttttcctcactatttcacagcaacctaatattcatgcaccgcacccctcagctctgtgggggaagttactggcgtaggttacaatggctcccacttgttctgctttttggtctgtgtgtccctaacaaacacagactgtgtctaagatgaccctgcctctgacctgarcagagatagtgatttgtggctgacagtgtggtggaaatcaagtgcttatttagcacacagtaaacactgaataaaggaaggctattatgctaacacagcccatgtattaagatttatgaggaaactcacatagcattaaagtggtaaataagattaggactaatcccttctaagacccttaatatttatgagttagaactccaaattcccaatccccttttatctgttctattttgtcccattacagttatcagtgtctaacatgttattttttcatttctcacacttattgttttctttcttcttcccattcctaactaaaatgcacatttcttcagggtgcagacattttttggtagtttgttttgtgcatcgatgtaaacccagtgcctggaataatgtctggtctat

SEQ ID NO: 329476 - DNA, 536 bp, Homo sapiens
tgttttgttaaacctagcattgttaaatccacttgttattgtgcatcttgttttattttacctttaaaataattttaatatgagattttctttatacatataaagcaaatttattgacaactctttaatacttagttttttcttacattttgtacctatttgtctttctrtggggcactaaaggtgactccttctttcttcttttcagttcataactctttctttgacagattgagtccattatttaaactattgaatttctgattcttattattatgtttttcacttctaaatgaatataatactatctgtcttatcgggtaattgtgaagatgaaacaagtgaatgcaagtaaaagagaatatggtctctggcacatagtaggagctcaacaaataatatctttattaacatgacacatgatacaatgtgggtgtgtatagacatggtgatacacagagtacagaggtctaggtcaggaactgctttccagaggatgtgattaaggtcccacctcttaaatagcaggtagaatt

SEQ ID NO: 329477 - DNA, 605 bp, Homo sapiens
aggatacagttgggaaggatgtaaggtggggtgcaaagtgtattggtgggttgtggtgccatcaataaagggagcaatttaagtaggaaaatcaggttttagagcggtgtacaatggaagttgaattgagaccaaaaaagcttagaccatttagaaccaatgcaattttgtcatagactgatatcaagatggaaactaaaatcagttaattaaagcaatggtgcctggttccactggcttatcagttacattgctcacgtttgtgattttacagatttgtcatacttacaaaaagatatgtcattatttacacaaatgaatttttataacattaaatgtgagtgtaaagttcaagagggttatgatcaatcatgtgcccatcagcagcttaatgatagatagagatggatgatagatrcatagaggcatagatggatgacagatatagacagatgattgattcataggtatcaatagattaatttaacactgttcatttgtttttttcttcttccttaaaatggttgacagtttgatgtattttgtaatattttcatcccttagctctcatactgagttttggagtttgagaaagtctgccatct

SEQ ID NO: 329478 - DNA, 605 bp, Homo sapiens
aggatacagttgggaaggatgtaaggtggggtgcaaagtgtattggtgggttgtggtgccatcaataaagggagcaatttaagtaggaaaatcaggttttagagcggtgtacaatggaagttgaattgagaccaaaaaagcttagaccatttagaaccaatgcaattttgtcatagactgatatcaagatggaaactaaaatcagttaattaaagcaatggtgcctggttccactggcttatcagttacattgctcacgtttgtgattttacagatttgtcatacttacaaaaagatatgtcattatttacacaaatgaatttttataacattaaatgtgagtgtaaagttcaagagggttatgatcaatcatgtgcccatcagcagcttaatgatagatagagatggatgatagatgcatagaggcatagatggrtgacagatatagacagatgattgattcataggtatcaatagattaatttaacactgttcatttgtttttttcttcttccttaaaatggttgacagtttgatgtattttgtaatattttcatcccttagctctcatactgagttttggagtttgagaaagtctgccatct

SEQ ID NO: 329479 - DNA, 539 bp, Homo sapiens
ataatgtaatataattaatataatatatgtccagaaataaatgcaaacaaaaataaacaacaatttttcaacaatgttgcaatggagtagagaaagtaaaatctttttaacaaattgtgctggaactatttcaaatcctcattagaaaagaaaaggagctttgagctataccttacacgacatactaatactaactcagagtgaatcaattacctgaatgtaaagtctaagcttataaaacttctaaaagtaaactttggagaaaaccgttgtggcattaaggcaggatttatttttgtagttattaatccaaaagtacatccaataaaaacacaaattgttaagttgggagtaatcaaaattgaaccattcttttctatgcaacatacttttaagaaagtcacaaactttgagaaaatatttstaaatctttttctgataaataatatatacttggaatatgtttcagaacactcaaaactcaataataatacaaacgcctaataaaacatgaggaaaaatcttaggcaggtatatcc

SEQ ID NO: 329480 - DNA, 591 bp, Homo sapiens
gtttcaccacgttggtcaggatggtctcaatctattgaccttgtgatctgcctgcctcagcctcccaaagtgctgggattacaggtgtgagccaccacacctcyggctcttatttttaatttttgaagaacctccacacagttttccatagtagttgcacgaatttacactcccaccaccagcgtacaagcgttcccctttctctaccccttcgccagcatctgtcataataaaatggagcagttttcctgaacatagtttccttccctctgcctccaccacccttttgtccaatgagccctgcctgcctgcccccatgcccctctttgctttgcttgtctttctggccagggcagctccagctattagcgtttcagcagccgtggaactatgaccctgcacaggggccaccccatagcataccaacgctgctatctccttcagtgcctagggctggagttagcatggccttcatcacacccaaagagaccgaagctaactccctgggacctgcctcctgtcccgggctcaagagaacacagcaggaatgtggggtaattgatccccaggtgacatactttgtccagtgaa

SEQ ID NO: 329481 - DNA, 626 bp, Homo sapiens
gaactgtctaaatctaatcatgttgttcacctgccagatagttcttgtggtaggccaaaaatgctcctcccaaaatatccacatggaaaacctggaaccagataaagggtccttgcagatctacttcagttaaagatcttgaggtcagactggaatacctgagtgggccctgggaccaatgacaagtgttctgataagtgacacacacagaaagaagcaatgtaaccacagaagcggaggtcagtgtgatgtggctgtgagccagggaatgctggcagccaccagaggctggaagagacaaggcttctgcattacagagtccagagggatgtatcctgctggcatctgatttcagacaaatgggccacagaattgtgagaaaatgaatttctgttgtttgmaggcaccaagtttgtgtaatttgctttgaaattgttttaggaaattttggaattttaggaaactaatacagttccctattgctgtgtaacagaataccccaaaactttgtgactttaactaaatatttattatcctataatctctgtatgtcaggagtccacatgtggcatagctgggtcttcatcctgtttttttttttttttttggttttctcccctactctc

SEQ ID NO: 329482 - DNA, 573 bp, Homo sapiens
atttttaaactgtcaaacttattattttatatgcattttaatccttttttcagttttattttatgcctgataatctcttgagtggaatttctttaaatatttatcacaatgtttttatttctgcacctattattaacaagctattcaagtcagacttatacaagcctatactctcagaatattggcaaataaagaaaaaggtctacatctttccataaggtgttatttccagtatatctttagaattaaaaaataagagaagtagaactgatatctaactaacctaagcaaaactttcctagctactctttctgcctaatttctttctttatgctaattaaccatattaattgtttcatcaatgcattctgccttctcygaaatcaatgtgactttcacattttttattgctatgcctaataacttttcaacatttatgtagtactttccatatcagaatacattggaacctaatacttttgaatggaaactgattgcaagaacaaaagaacatgtaattagaatatagaaacaggaggtgaaagaagaaatacataacttttaatatgcaac

SEQ ID NO: 329483 - DNA, 622 bp, Homo sapiens
tagcccttccaattaccctagttcatatatctatccaggatctagctgcattgcctagactgagcttcctgttcatccacrcaaattacgtggttatttttcattttagaatttcctgtcactgtgacctccagtcactccaatcttactacttcccagccctcaataaatccagtttaactaaatgaatacccttttcttcctggcatagcaggattccctggcaaaagtaataaattgtgcaaagaagcaccagtacaattgatctctgggaccccaaggtccttagttgctcttgtctactttgttacctttctaccctcacaggagcaggtattacatatgcagatgcttacctggacatcattttatttatctcttcctggctaatcctagtcacataacagctcttccataatttctctgtccttttattcctgaatcctgccatcttgaaggcatttgaagcagaaagcattgccatgcaaattttgaatatctcatgacatcagtagaagcactacattatacacctttaacctatatttggttaaaatttatggtctttgaaaatatatattcgatcatttgatcaaatgtaattttttattctgtgactgaa

SEQ ID NO: 329484 - DNA, 446 bp, Homo sapiens
tttttctaactgattacacaccggaaaagaacttcaccaatcagcctgggtaaagtgtctcccaaacattttcaggggattcatcttctctgggcatgtaatatcccaaaagagaggtttgttggtttctttttcctgaccttataattactatttcctctgctggtctggctgcagaactgcaggttctctagtgctgcaatgagcccctgaactcttctgtgttctctgagcctcaggcatccagagtatgctatgtctatcagtgcacccagtcagtgacacagaaaccagacccttgtgcactcccccaaaagccagaatattggatgagtgttttttgcttttcttccactctagagagtggctgcaagtttracacttacttctgatcacaccaagttattccagcttagtggaagggctgtcatgggtgaaatgaaatg

SEQ ID NO: 329485 - DNA, 657 bp, Homo sapiens
ttcacactatagacattaagactcaagaacttagagggtttttggttgtttgattttgtttgtttgattgcttgtttgttttgctttttaagtgattagctttcaaggcaaagttaaacttcaaattcatgagtttaactttgttgtaactgagctattctctgtcttcattcattcaacaaatattaattgagcacctactaagacctaggccttctctaggtgcaagtcggtgcagtatagactgagacagacagaagtctgtgacctagaacttacattctagtgaggggagcaaataaattacaaaagaaaagtattaaaataagcagttattagatactgataagtatstctatactgataagtatcctctatactgatagtatagaggaaataaagatataattaagcacaatgtcacatttttagtgtgtatgggtgtgtgggtgtgtgtgtgtgtacatgtactatgcatctgaaagtatcatcctgtctgatttatttgaggtactgcaatttttcttttagcagaaaatattccaatacaattctagaaaaaaacaggaattcaagcataacatattttttttattgaataagtctggaggttcccatttaagcaaatacgatgacctaggcttggttttgaatagc

SEQ ID NO: 329486 - DNA, 450 bp, Homo sapiens
atcctgatttaaggaattaaagtccaagaaaatctctcgactgtattttacctgtgacacctatacatttgggagaattcctctcttctcaaagttctccaaatactctgaggtcctttgtctgcaacgaaaatatctttttcagcatctctaaacctgagaccctacaaagcaaatcaggtttttctgagagggatttatgagtttttggctccagaaagtggacctcagttctttaaagtagygtacctttctgattaaatgagcagcattctcaaatgtgatatttcagacaaggcatttgttgcctaatgaatagttccctttatattttttatttaaaaaggacaaattcttaatgaatctatgcaaagatattgccatggaaattgaggaaaacttaaggggaattcctgatttggaaaagggatgatagttagaaaaatatat

SEQ ID NO: 329487 - DNA, 568 bp, Homo sapiens
tgctgaagctgcgcccacagccacccctttacccaagtgctctgtcccagggagatgggagttttatctgtaagcacctggactggaactcctacctttctttcagagatgccctgtccagagaggaggaatctagagaagcggtctgggtacagsagctttgtggcactgtggtgggctccgctcagtccaaactgcctagtggctttgtttacattgtgaggggaaaactgcctactcaagcctcagtgttggtggactcccctcccccgaccaagctggaacatcacaggttgacttcagactgctgtgctggcagtgagaatttcaagccagtggatcttagtttgctgggctccatgggggtgggatccactgagcaaaaccatttggctccctggcttcagccccctttccaagggagtgaatgattctctctcgctggtgttccaggcactactggggtccaaaaaaaaagaaaagaaaaaacctcctgcagctagctcagtgtcagcccaaacagctacccagttttgtgcttgaaacccaggggccctggtggtttagg

SEQ ID NO: 329488 - DNA, 568 bp, Homo sapiens
tgctgaagctgcgcccacagccacccctttacccaagtgctctgtcccagggagatgggagttttatctgtaagcacctggactggaactcctacctttctttcagagatgccctgtccagagaggaggaatctagagaagcggtctgggtacagcagctttgtggcactgtggtgggctccgctcagtccaaactgcctagtggctttgtttacattgtgaggggaaaactgcctactcaagcctcagtgttgrtggactcccctcccccgaccaagctggaacatcacaggttgacttcagactgctgtgctggcagtgagaatttcaagccagtggatcttagtttgctgggctccatgggggtgggatccactgagcaaaaccatttggctccctggcttcagccccctttccaagggagtgaatgattctctctcgctggtgttccaggcactactggggtccaaaaaaaaagaaaagaaaaaacctcctgcagctagctcagtgtcagcccaaacagctacccagttttgtgcttgaaacccaggggccctggtggtttagg

SEQ ID NO: 329489 - DNA, 568 bp, Homo sapiens
tgctgaagctgcgcccacagccacccctttacccaagtgctctgtcccagggagatgggagttttatctgtaagcacctggactggaactcctacctttctttcagagatgccctgtccagagaggaggaatctagagaagcggtctgggtacagcagctttgtggcactgtggtgggctccgctcagtccaaactgcctagtggctttgtttacattgtgaggggaaaactgcctactcaagcctcagtgttggtggactcccctcccccgaccaagctggaacatcacaggttgacttcagactgctgtgctggcagtgagaatttcaagccagtggatcttagtttgctgggctccatgggggtgggatccactgagcaaaaccatttggctccctggcttcagccccctttccaagggagtgaatgattctstctcgctggtgttccaggcactactggggtccaaaaaaaaagaaaagaaaaaacctcctgcagctagctcagtgtcagcccaaacagctacccagttttgtgcttgaaacccaggggccctggtggtttagg

SEQ ID NO: 329490 - DNA, 589 bp, Homo sapiens
tggtgagagtccagtgaccccacttcaagcagtcaattcatgagtattgatgggtataaataaaggaggttaaaaatctctgtgtgtgtgtgcgtgcatgtgtgtgtgtgtgtgtgtgtgtgtttacattttatcaacttatcagctgtctccacccagtatttgaagaaaactgtcattttaataaatacaggaggacacagataggtaaaaaatgaaaggaacttttagaaactcaaaaggagctttgctggaaaaagactttggggacataaaagacaacataaaattaaatatctattctcttaattcaagtttttctgatatgccatctctaaagtattgcttcccactgattttgtccctagttgtgctgctgttcctctgtcactccagaaaacttgaccagctgaaagagcctttgcaaaattatgactgagacagtgaaagagatctaatctaactgactctgtctttgttctaaactttaagctgtccttgttccttcctgggcataggctggactaactttaggaggawctcagtttatagagtttatagtgtatggtttgaaacaaatgtaatagta

SEQ ID NO: 329491 - DNA, 561 bp, Homo sapiens
gtgctgttaaatgaatgtttctgattaataactctggagagtgtgacattagaatagaggaaaaactttcgaatagaagactgaagtaatttttttgactttttgcttaaaacgatgctgatccttttttgttttccaaagctaagaaaacttttcttttgagctatttaccacttttaacaaatgagtaaaatatactcatstgaacaaaatttggagcatatttgtttccctctacctgattttttcagaattttaaaactatttttgagtattctcaacttatggcagtataattatttgcataagggcaataagaatctgttttcttttgtaacaggacacagttggagaaactggttgttttaccaaggctttgactggaatgtcatgctttctttaaataatcaaagttgacttattgagccaacaaaagcccctagggaaatctgccttcataccttgtctacaccgtccctattcaaggttcctgacctgttgtaagtaaagaatgtaactttctaacaggctcaagagccccaagttatcttgggacctcaa

SEQ ID NO: 329492 - DNA, 559 bp, Homo sapiens
atagaatagccgaatggttgagtaaaacaagacccaactacatgctgcctacaaaatactcacttcacatttaagcacacatatagattgaaaaataaaaagatagaaaagatatttcatgcaaatggaaatcaataaagagcagggcagatgtagccatacttatataagacaaaatagaaattaaggaagaactataaaaggagaccaaaaagtttaagagatcaattcatcaaggagatattacaattataagtgtatatggacccaatatktaagcatctaaatatgtaaagcaaatatcagtagatctaaagagaaagagtgattgcaatacagtgatccacctgcaataacagacggatcattcagacaaaaaaatcaataaacattcgacttgaacttgagttaagaccaaatgaacctaacagacatgtacagaacattccatttatacatagtagaatccacatttctctcaactatacgtgaaatattctccaggatagatcatgttaggcttaaaaaaatccttaacgtatttaaaaagaatgaaatg

SEQ ID NO: 329493 - DNA, 559 bp, Homo sapiens
atagaatagccgaatggttgagtaaaacaagacccaactacatgctgcctacaaaatactcacttcacatttaagcacacatatagattgaaaaataaaaagatagaaaagatatttcatgcaaatggaaatcaataaagagcagggcagatgtagccatacttatataagacaaaatagaaattaaggaagaactataaaaggagaccaaaaagtttaagagatcaattcatcaaggagatattacaattataagtgtatatggacccaatatgtaagcatctaaatatrtaaagcaaatatcagtagatctaaagagaaagagtgattgcaatacagtgatccacctgcaataacagacggatcattcagacaaaaaaatcaataaacattcgacttgaacttgagttaagaccaaatgaacctaacagacatgtacagaacattccatttatacatagtagaatccacatttctctcaactatacgtgaaatattctccaggatagatcatgttaggcttaaaaaaatccttaacgtatttaaaaagaatgaaatg

SEQ ID NO: 329494 - DNA, 589 bp, Homo sapiens
atgctcccaattacagtttactaacacaaaccatgacatcaatgccatgaaaattcataattagatcttaggctaggaaatattattttattttgctgtaaaagattttacaggaatagtttgtgaattataagttctgcagactagcttatagtatttttcaatccaaataaacatgttaatatttatttcgaagaattttaaatatattgagaaataaattacataagtagttggcaagattatcaaaagtattctaaagaggaagatagagaagaacagagagatggagaatgggaaagaaaaagtgagaaagaaacaaagaataataaaggatrgcacattacaaagcattaacattagtggaatttggcctgattctaggactggagcagaaaatacataagtttaaatcatcttgtagtgccagaatatgaggaaaatgttttttttttcctataaaatagcaacaacaagtgttaatgtatatgtcaaaggggatcaggactcaaatgcaaaagatttcaatgaccaaagctggaagaatttgaataataaaataaagtagtcccagattacaacccaaagt

SEQ ID NO: 329495 - DNA, 565 bp, Homo sapiens
agcttatagtatttttcaatccaaataaacatgttaatatttatttcgaagaattttaaatatattgagaaataaattacataagtagttggcaagattatcaaaagtattctaaagaggaagatagagaagaacagagagatggagaatgggaaagaaaaagtgagaaagaaacaaagaataataaaggatagcacattacaaagcattaacattagtggaatttggcctgattctaggactggagcagaaaatacataagtttaaatcatcttgtagtgccagaatatgaggaaaatgttttttttttcctataaaatagcaacaacaagtgttaatgkatatgtcaaaggggatcaggactcaaatgcaaaagatttcaatgaccaaagctggaagaatttgaataataaaataaagtagtcccagattacaacccaaagtctaaaagaaatatccattaatccatagtgacataatcaaattactgaacaggtaaataaatgggggagaagtgagacatcttcccctgtagaatttcaaataatttgtatgaatactgcac

SEQ ID NO: 329496 - DNA, 550 bp, Homo sapiens
tcactgtatatttagacttggagatttctattttggaaggttattgattactgatttgatttcagaaagtaatacaggtcatttatttatctttgtgtgtgttataatttgtggctttcaaggaattgcctgctgttacataagttatcaaatttgtgggtgtactctgtatagtgttcctttattgtcattttaatgttcatgggatcagcagtgataattcccctgtaatacagatagttgtttgtttgttttattttgtaaaatgctatctcsacagagttttgagaccctggctagaaactgatcaattcccctttttgagtagctgattaaatccacatgagaaccccttcccttatggaactctcacactccaggccattatatacctaatctaatcacttgagagccagctcccagctaactgagaatagctcctaaaccccagagactgataaaattattcagattagccaatccacagtgaccctgtaaaatctaggtatccacaccctgtttgccatacatgttacccactaaagatcca

SEQ ID NO: 329497 - DNA, 513 bp, Homo sapiens
caacatactaaaatttatggaatgtagcaaaagcagtgctaagatggaaatttaragtaataatgcctatgtaagaaaaaagaaacatgtcaaataaacaacctaactctataccacaaagaattagaaaaagaaaaacaaagcccgaatttagtgaaaagaaggatataataaattttaaagcagaaataaattacatagacactagaaaaacaaaaaaattatttacaaaaaacaactttggacaccaatgtcagttgatcttccttggttggcaatactccatgcatattgtaacacatcgatactggggaagtagtgctgtcctgattccactgggagaggacaatgggaagctccgtgtttgacacactcctggacactgctctatgtgtcttgtcctttggctaattttgatctgtatcttttccctgtaataaatcataactatgatatttttgaaacacaataccaactcttctcaaacttttacaaaaaaagctgaaggagagg

SEQ ID NO: 329498 - DNA, 598 bp, Homo sapiens
tgttttgccctaaattggtgaagggggtttgaaatgagggagaatttgaataacaaattattaacagattttattaatatattttgcttctaaaagcaggcaagttcttagtaaatcatgttcagagaaagctatttgttgagggtgtgtacgtgtgtgtatgtgtgtgttaacacttaattaggttgtacattcagcaaaacttgacaaaacgacttttgagcaaaataactatatgtaaggagaataaattctcaatatctagggcacaaaaactgagccctagatttacctcactcttttaagaactctatggagttgtagtcactagaaaatgcaggctagtgaaggttaatctgcaagtggaataaaaaacttgctgagcagtggagaatgaagtgtttcccagccagtgtcagagaacagaagtacagagaaatggctcccgacacaaggacttagagcaaggacctggtggagtgcacatrgaggggatgtaatctgctgattcttggaaaagagcagtaagccaatcactgaaaaggagctgaatattaaacattcgaataacttggatataccaggagcatgggcagca

SEQ ID NO: 329499 - DNA, 631 bp, Homo sapiens
aaactgatttatataggacatgaacattccaagcacaatgtagaacctgagcaaaagctcagaggtaaggaatggaataggtcattcaagaactgtgaatgtattcacatggctgtgggacagtagaagaaggaagagctcaggctgaaaggtttgacggagaggccaaccacacatttgatacttttaagtggtatcgggactttctgcttcattctgtatgacagataaaatggaacaatgtggtgaattttcttctgtttatcttgtttgtggcctcagaatttttatcatgtaactccaaacagtcactagcaatattttggagtagtcatactccatgagatgatccctaactggcatctgtactatattaaataattacagaatattaatgaaatgatgatgctggcattttggaaagattcccttggggcagcatggagaatgaattaaatgggtgcaaataataggtaatatttctctttatatattagatcttgtcagcccaatatttatctgyttagtcagaaaatgtcttgagcactaaaaagatatttttttcaagaatagatttaagtagcagagaggatataattaggtgcacttggcatttacaactgctaaattg

SEQ ID NO: 329500 - DNA, 534 bp, Homo sapiens
gtcctcctgtaagtcagaatgttaaccccacatttcagggatactaactccaagaggaatcaaatcaaaacatttttggcaccaatacaattctcttctaaacttttaattataaacaatggtgagtttgatgtatttgataaatcccagtgtyctccaaaaataagtaatatgaggatttcttttaattaaaaatattatagaactctgagaatgtttctgaggctatatgagattatatggattctatatctcagtttcagacaaactgatctaagttgaaattgaacctttaaataaattttatttgtaataatcttagcattgtaatatgactaaacacaaagcaatgtaaatatttaccttgcttttttatcatgaaaaaattataataaataatgcttatgtgtgcaacatattcattatactaattatattaattagtcaatacaaaattaggaaacagtcatgtaatatagtcaaatctaaagctatataaataaagtttgaaaatatagtggagagataggcatt

SEQ ID NO: 329501 - DNA, 476 bp, Homo sapiens
aattgctagttccatgtacacataatattttatttctttccttgcaaagcatacatttgatacttgttccagctgaaattacaattcattaacatggacttcatttttttaattatttagtcacagtgttattaaattattctaagagcttgaaagagcttctgctatgaaaatagacttctgtatcttaaaatcctctgtatcttaaaatcagcaaacataataatctcagtttcaggtggtatataatatttttttctaattatagtttaatcttacatatttttacctcataaaaaatctttattaaatagatcatgattttttcaaatcacaatattttaaagcccatatatgcycatcaaaatgtgtatttcctttgggtgtaatttttaaaaccaaaattaatttgaaatgcaccatgcgattttaaatgttttgtgtcctcaaattttgtttcattttttgtttgagac

SEQ ID NO: 329502 - DNA, 483 bp, Homo sapiens
aataacataaggagactctattggctctgccttgaaaatttataagaattatatcatggcaaaatatttttctgttacattattccatattctttcttcaggataatctgtatatagtgtttgcctagatgtttataaccatcatttgctcttcttccccaatgtatttttactttttctttttataayattttcataaatatttttgtttatactgtcgctatttttacacacacttaagtgattttttccacttctttcataaacttttctagctcacattttatctacttttgtctcaaaatctcttctttgttcttatatttctcttctgtgctactgttttatatgagcaatgaccttaatatatacagtgatatttaatttgtgatatttaattgtgttcattatttttatatattctgtggcaagaatgagcaaactacttcctggaaaacaaatcacttccaattcttgtttttg

SEQ ID NO: 329503 - DNA, 510 bp, Homo sapiens
actgtggtgtggtggggcaatcagctccaggtgccagcacaggttctgcctccacgtaaacctgtcgctggatcagatgaatggcaagtggcttctgctgtgggcaccctcatctggatgaggggaatgcactggtgcctggaagcttagagattccagaaactgcagagccccaaagaggttgtcaaacaccagttcagaaagcccctaggtctgtgctccctgaagggctacagctcttctttccttgttgcccacaatgtggcaagatggagagtgtgtttcagccttgtttgtattacagatcttttcgtaccaccatttggcaagtcccaagttcttgtcccacatccatgaagaatgaggtacgcagataactggagtgtgagcaagrcaaagaagtgctttattgagtgatagaacagctcttgagagactcaaagtgggtagatcctttccccacgcaagttgttctcacgagtgcagccctcagtggagaggagatgcaga

SEQ ID NO: 329504 - DNA, 624 bp, Homo sapiens
gggggcttgcaggtccatgctgagccaccctcagcagcccctcagcatccattccatgctyattggcacccaaagtccagaggaggctgaggtggcaggggactggcatgtcagtcccccctggaacacccacatacccagcagggttgtaatagcgcctgggtttggccacagctttgctccaccctggaacagtctctgggagctgggagaggccagggagtgagatcagtcacttccaagcctgtcagggaaagggacttccagggcctccaagaactcagaaatgctggggctggaactgtgggtgtatctcaactgttcctagtttctgctggccctacagagggcatagccccagccacacctcccctgttgcagccagtgtcctcacaggggctgctctgaatgggccattgtcagcatcactatctccaaattgaaaatatgattaaagaaactacttgagtagtctgcattagaataagattaattaaccatcatcaccaccattctttgctttttcagtgattctgaaagagcaagtcattaataatatctcatgtttaagacaagagaataaaaaagtcctgtgaattaactgcatttccaccttatgtcatt

SEQ ID NO: 329505 - DNA, 576 bp, Homo sapiens
aacagcaacagtagttatgatggtggtaatgaaatatgcagtctataaactccctttgttattcactcagtgaatcccaaaagactcycctgatactcaaggagtcttggggagctgtgacctccctcagaaccacagcatctggcaagagattgaggccaccacctcctgcaagcagaatacaccagaggactagggttttactatattctgtatcaaggaggcctcagtaactgtgcagagcttgtggagtgctccttttatgattcaaatcataatgggaagctggatatgaagggtcatagacagagtctttgaaaacatatctttccaggaaagcacagtataagaccaataatttttgctctagtagtgtatagaatgaaggtgagatggggtttcttgcattagaaatccatggcaacttgttgtcatcatgtgtggtccagagactccaggaggcaggaaaggaggtggtgaaagcctctaaagtgaagaagtctctgaagacactaaagggagtgcctgacaattttaatttggacagattctagagcctttttaaaacagggtacc

SEQ ID NO: 329506 - DNA, 576 bp, Homo sapiens
aacagcaacagtagttatgatggtggtaatgaaatatgcagtctataaactccctttgttattcactcagtgaatcccaaaagactcccctgatactcaaggagtcttggggagctgtgacctccctcagaaccacagcatctggcaagagattgaggccaccacctcctgcaagcagaatacaccagaggactagggttttactatattctgtatcaaggaggcctcagtaactgtgcagagcttgtggagtgctccttttatgattcaartcataatgggaagctggatatgaagggtcatagacagagtctttgaaaacatatctttccaggaaagcacagtataagaccaataatttttgctctagtagtgtatagaatgaaggtgagatggggtttcttgcattagaaatccatggcaacttgttgtcatcatgtgtggtccagagactccaggaggcaggaaaggaggtggtgaaagcctctaaagtgaagaagtctctgaagacactaaagggagtgcctgacaattttaatttggacagattctagagcctttttaaaacagggtacc

SEQ ID NO: 329507 - DNA, 576 bp, Homo sapiens
aacagcaacagtagttatgatggtggtaatgaaatatgcagtctataaactccctttgttattcactcagtgaatcccaaaagactcccctgatactcaaggagtcttggggagctgtgacctccctcagaaccacagcatctggcaagagattgaggccaccacctcctgcaagcagaatacaccagaggactagggttttactatattctgtatcaaggaggcctcagtaactgtgcagagcttgtggagtgctccttttatgattcaaatcataatgggaagctggatatgaagggtcatagacagagtctttgaaaacatmtctttccaggaaagcacagtataagaccaataatttttgctctagtagtgtatagaatgaaggtgagatggggtttcttgcattagaaatccatggcaacttgttgtcatcatgtgtggtccagagactccaggaggcaggaaaggaggtggtgaaagcctctaaagtgaagaagtctctgaagacactaaagggagtgcctgacaattttaatttggacagattctagagcctttttaaaacagggtacc

SEQ ID NO: 329508 - DNA, 576 bp, Homo sapiens
aacagcaacagtagttatgatggtggtaatgaaatatgcagtctataaactccctttgttattcactcagtgaatcccaaaagactcccctgatactcaaggagtcttggggagctgtgacctccctcagaaccacagcatctggcaagagattgaggccaccacctcctgcaagcagaatacaccagaggactagggttttactatattctgtatcaaggaggcctcagtaactgtgcagagcttgtggagtgctccttttatgattcaaatcataatgggaagctggatatgaagggtcatagacagagtctttgaaaacatatctttccaggaaagcacagtataagaccaataatttttgctctagtagtgtatagaatgaaggtgagatggggtttcttgcrttagaaatccatggcaacttgttgtcatcatgtgtggtccagagactccaggaggcaggaaaggaggtggtgaaagcctctaaagtgaagaagtctctgaagacactaaagggagtgcctgacaattttaatttggacagattctagagcctttttaaaacagggtacc

SEQ ID NO: 329509 - DNA, 581 bp, Homo sapiens
ttcacagatagtttcactctaatttttgtcacaggatattctgtttttccccattttcctcaacagactctgaaatatctcttcataggtgccacaaagaaagagtttccaacttctgaattaaaaaaagtttaactttgtaagatgtatttgtacaacacaaagtggattcacagagagcttctttctaatttgtaktgtgtgatattttgcttttcagcatgggctgcattgggctccaaaattttcatttctagatttcacaaaaaaatatttcccacctgcggaatcaaaagaaagttttaattctgtgagaagaatccacacatctcaaagcagtttcacagattgactctatctagtctttatcactgaatattttttcacctttagcagcaatgagctctcaaatgtcccttcacacattccacaaaacgagtgtttccaatctgctgaatcaaaagaaaggttaactttgtgagatgattccacacgttgctaagcgatttcacatatggcttctttatagttttatcatgggatagtgtgtttttcaccattggtgtcaatgggccccaaaa

SEQ ID NO: 329510 - DNA, 524 bp, Homo sapiens
caacacaaagtggattcacagagagcttctttctaatttgtagtgtgtgatattttgcttttcagcatgggctgcattgggctccaaaattttcatttctagatttcacaaaaaaatatttcccacctgcggaatcaaaagaaagttttaattctgtgagaagaatccacacatctcaaagcagtttcacagattgactctatctagtctttatcactgaatattttttcacctttagcagcaatgagctctcaaatgtcccttcacacattccacaaaacgagtgtttccaatctgctgaatcaaaagaaaggttaactttgtgagatgattccacacgttgctaagcgatttcacatatggcttctttatagttttatcatgggataktgtgtttttcaccattggtgtcaatgggccccaaaaagtcccttcctaagtcccacaaaatgcagtttccaacctgctgaatccaaggaaatgcataattctgagatgaatccacatatcacaaagtgatttca

SEQ ID NO: 329511 - DNA, 582 bp, Homo sapiens
gagtccttggactctcactgtattgggcatgcacagtatcaaagtgtagggggcctgcccactttggttgtagcttttcatgagggkggggttggcagataaacatgtctgtgcctgcaagacagttatgtatagaggacaaagagatgactatagggagaggcatggcctcatttgctgcttcatgaatgaaagaccatgtctggattaagacagggaggtaattactgactggttcagagtttggtaagggtggaggccctaagacaaaagtttggccatacatgatttcaaagggactataaatagagggtgcattttgtgttgcacagagtctcataagggtgaaaggaagatttcctgtccatgattggtgggtttctagagccagcttggtgagtttggctttaaagacagagttgactttttcaacattacctgaagattgaagcctgtagggtgtgtggagaacccattttattcccaaggatgtagagaagtcttgggtaatttggctgctaaaggagggcccgttattggactggatggatgttgggaatccaaaatgggtaattatatgca

SEQ ID NO: 329512 - DNA, 546 bp, Homo sapiens
ttctctgaaatcattattttagtttttctttctttctcctcattctttatattcagtttgctacatagtactaccttctgcaaaattttggggatatttatttattaatttataaaaaattcattgaacaactaccatgtgtcagtcactattctagattgtggaaatataacaatgaaaaacagacaaaacatgttacatattacaggggagatataggtaataaataaaaataaagtggtaaggaaagctatgaaaaagcagttcctggaaaggattaaaaagtgtcattgggagcagattaattttagtagtcaaagaaraccatcttttgctctgtatatgacataaagtatccctggcctcttatcatctcttacttgcaatctccagtctccctggttccatatctcaccctcccattcatctttttttcagtcattccagactactcttcaaaggagacgaagtcgatcacatcacacattttataataacttccaatggagtttatgttaaacattgactctattctaattaactgta

SEQ ID NO: 329513 - DNA, 546 bp, Homo sapiens
ttctctgaaatcattattttagtttttctttctttctcctcattctttatattcagtttgctacatagtactaccttctgcaaaattttggggatatttatttattaatttataaaaaattcattgaacaactaccatgtgtcagtcactattctagattgtggaaatataacaatgaaaaacagacaaaacatgttacatattacaggggagatataggtaataaataaaaataaagtggtaaggaaagctatgaaaaagcagttcctggaaaggattaaaaagtgtcattgggagcagattaattttagtagtcaaagaaaaccatcttttgctctgtatatgacataaagtatccctggcctcttatcatctcttacttgcaatctccagtctccctggttccatatctcaccctcccattcatctttttttcagtcattccagactactcttcaraggagacgaagtcgatcacatcacacattttataataacttccaatggagtttatgttaaacattgactctattctaattaactgta

SEQ ID NO: 329514 - DNA, 562 bp, Homo sapiens
ttctcaacatacatatagcttttttcaagtttaagtattttaattcatcaaaacatatttaaaatgtgtgtaaagaaattaaaattcattttcattgaatttaggcatattaaaccacacaaaaggaatctcattgactacaatttggggcattatcttctargcttgacccacttaatactagaaaaaaacaaaattagtacgaatcaggagtgagcagagcatgctgagtttttccactaactcctggtaacattttagaaactttaatttcccatttaaaaatgcatcatgaaaatgtctggaaattcagtagctcatctgtaagttttcttgagttttccttacaaaagctcaggcatgacttcagggtaaagatgacttgtcagagttatataatgcactatgattgaattaaaacaataagaactgtggaaataatacatcacagttttatttccagtggccccacgggtacttgaaaccagtgaactgagaaaatgcaattcgatatagagtgtttcagcacaaaaccgtcatgaacatcacacttcttaatagg

SEQ ID NO: 329515 - DNA, 562 bp, Homo sapiens
ttctcaacatacatatagcttttttcaagtttaagtattttaattcatcaaaacatatttaaaatgtgtgtaaagaaattaaaattcattttcattgaatttaggcatattaaaccacacaaaaggaatctcattgactacaatttggggcattatcttctaggcttgacccacttaatactagaaaaaaacaaaattagtacgaatcargagtgagcagagcatgctgagtttttccactaactcctggtaacattttagaaactttaatttcccatttaaaaatgcatcatgaaaatgtctggaaattcagtagctcatctgtaagttttcttgagttttccttacaaaagctcaggcatgacttcagggtaaagatgacttgtcagagttatataatgcactatgattgaattaaaacaataagaactgtggaaataatacatcacagttttatttccagtggccccacgggtacttgaaaccagtgaactgagaaaatgcaattcgatatagagtgtttcagcacaaaaccgtcatgaacatcacacttcttaatagg

SEQ ID NO: 329516 - DNA, 562 bp, Homo sapiens
ttctcaacatacatatagcttttttcaagtttaagtattttaattcatcaaaacatatttaaaatgtgtgtaaagaaattaaaattcattttcattgaatttaggcatattaaaccacacaaaaggaatctcattgactacaatttggggcattatcttctaggcttgacccacttaatactagaaaaaaacaaaattagtacgaatcaggagtgagcagagcatgctgagtttttccactaactcctggtaacattttagaaactttaatttcccatttaaaaatgcatcatgaaaatgtctggaaattcagtagctcatctgtaagttttcttgagttttccttacaaaagctcargcatgacttcagggtaaagatgacttgtcagagttatataatgcactatgattgaattaaaacaataagaactgtggaaataatacatcacagttttatttccagtggccccacgggtacttgaaaccagtgaactgagaaaatgcaattcgatatagagtgtttcagcacaaaaccgtcatgaacatcacacttcttaatagg

SEQ ID NO: 329517 - DNA, 562 bp, Homo sapiens
ttctcaacatacatatagcttttttcaagtttaagtattttaattcatcaaaacatatttaaaatgtgtgtaaagaaattaaaattcattttcattgaatttaggcatattaaaccacacaaaaggaatctcattgactacaatttggggcattatcttctaggcttgacccacttaatactagaaaaaaacaaaattagtacgaatcaggagtgagcagagcatgctgagtttttccactaactcctggtaacattttagaaactttaatttcccatttaaaaatgcatcatgaaaatgtctggaaattcagtagctcatctgtaagttttcttgagttttccttacaaaagctcaggcatgacttcagggtaaagatgacttgtcagagttatataatgcactatgattgaattraaacaataagaactgtggaaataatacatcacagttttatttccagtggccccacgggtacttgaaaccagtgaactgagaaaatgcaattcgatatagagtgtttcagcacaaaaccgtcatgaacatcacacttcttaatagg

SEQ ID NO: 329518 - DNA, 507 bp, Homo sapiens
cctttgtaacacaagttacaaagtatatttgtatatgctgtctcatttatttctctcaaccaaaaacacacattgttgttaggcccattacgcaaactgaaatttcccacataaacttttattccttaacatttatattaatcaggtagatacataaagaagctttttttttttttttcttttttttttttgagacagtatctcactctgtcacccaggctggaatacagtggcacgatcatggctcactgcattcaacctcctggggctcaagggattctcccgcctcagcctccagagtatttgagactatagacacacacttccatgctcagctagtttttttttttttttctgtaraaatgaggtcatgctatgttgcccaggatggtatcaaactcctgggctgaagtgatccttcttcctctgcctcccaaagtgctgggacttcaggtgtgaggcacctcacctggccaagaagcaacattttacagtagaacaacacct

SEQ ID NO: 329519 - DNA, 576 bp, Homo sapiens
tagagactttatgcattctaggtattcaatatatatttatggaattgaatcaaacacaaccattctgaagcactgcttctgtaatgtcatttctcagttccacattgctttttaattcaagtcataaagcctcaggttggtttacaaagtcttcctgatttattcacccttgctaatccttaaatcccacagttccaaatgtacaccctcgtgctgaggttcccccttacctgtttctgattgtttcagtgtttcttgttctttgcctttgcttctgctattgcccttccctgggacacttcttctccccctgttcaaatcatgtccatctccaagactcaccccaagtaccactcacctytgaagcacttcccgtgatgcttgccagcaggacctcatccctcctggacattgggtgggactcatcattaccagatactcttacaatcatattccatagagaactttattagaccccctactcagggcagactaatccagcattacagtaagcacagtacctagggcccatgacactttgaaggacgcgtgaaaatatcataacttttttttaga

SEQ ID NO: 329520 - DNA, 621 bp, Homo sapiens
agtgaaagtgggaaaaaatatatttgtatgtaagttcaaatatagcagcaaagcctgcctataaggcttacatttgcagcaggagttatattcagagttgccatagcagccacccacactcacacacacacacaaaggggtggtggggtaagacagagaaacagcagagaacagaatctattgttaaaaagacagaagtacccatcaatgtaattacaagcaggaatcctagtttgtagtctgaaccaatgtttaacagtacaacacttcccagtgctggagtgtctattaagggattttgctctaaatgaatctaccatctgcacccttggctttacagtttactsgatgctggtattatgcaggaaagaattcagcagcagatgcacacactagggctaaaataatctaatgtttccttctctggaacattcagaaacatcgccaccagaaaaatttgtggttctatgaatctgagaaagttactttactttttgagtctcctcatttataaaatgggtaaaataatatcacgtactttaagaaaatgctacgaggattcaataaattatcacaaattatcaattattaaataaataataatgataaataactttaaaa

SEQ ID NO: 329521 - DNA, 547 bp, Homo sapiens
acacatataaaaaggttttgcttacttgtttgcttttactaaaatataatcataatgtcctattagtctgtaatatgcattgactcacttgttataatatacatccttttttgtgtaaattgagaaaacactgaactattattaataataaaacaatgctrttacaaaaataaatggaaataaaaaaacacaaatatttattaagcacctactatgcatcagaggctgtgctaggtttcttcaaagaggaggcatctatggttagatcctgaagaatgagcatgagagttccaggcaaaagggaaatggtgggggaaaggtgtcctaaacaacatacacaatccttctgtgtgttctcaaagcaccttgttcctcatctgagaaccctggccacaatgtatggttataatttattttcattgtttccttcactagagtgaggacataaaagccaagtctaggctattcattgaggcctagcttttggagaacctttttctttctcttgttttcatgcttctttcacccttttcttatgctatttagc

SEQ ID NO: 329522 - DNA, 547 bp, Homo sapiens
acacatataaaaaggttttgcttacttgtttgcttttactaaaatataatcataatgtcctattagtctgtaatatgcattgactcacttgttataatatacatccttttttgtgtaaattgagaaaacactgaactattattaataataaaacaatgctgttacaaaaataaatggaaataaaaaaacacaaatatttattaagcacctactatgcatcagaggctgtgctaggtttcttcaaagaggaggcatctatggttagatcctgaagaatgagcatgagagttccaggcaaaagggaaatggtgggggaaaggtgtcctaracaacatacacaatccttctgtgtgttctcaaagcaccttgttcctcatctgagaaccctggccacaatgtatggttataatttattttcattgtttccttcactagagtgaggacataaaagccaagtctaggctattcattgaggcctagcttttggagaacctttttctttctcttgttttcatgcttctttcacccttttcttatgctatttagc

SEQ ID NO: 329523 - DNA, 547 bp, Homo sapiens
acacatataaaaaggttttgcttacttgtttgcttttactaaaatataatcataatgtcctattagtctgtaatatgcattgactcacttgttataatatacatccttttttgtgtaaattgagaaaacactgaactattattaataataaaacaatgctgttacaaaaataaatggaaataaaaaaacacaaatatttattaagcacctactatgcatcagaggctgtgctaggtttcttcaaagaggaggcatctatggttagatcctgaagaatgagcatgagagttccaggcaaaagggaaatggtgggggaaaggtgtcctaaacaacatacacaatccttctgtgtgttctcaaagcaccttgttcctcatctgagaaccctgrccacaatgtatggttataatttattttcattgtttccttcactagagtgaggacataaaagccaagtctaggctattcattgaggcctagcttttggagaacctttttctttctcttgttttcatgcttctttcacccttttcttatgctatttagc

SEQ ID NO: 329524 - DNA, 547 bp, Homo sapiens
acacatataaaaaggttttgcttacttgtttgcttttactaaaatataatcataatgtcctattagtctgtaatatgcattgactcacttgttataatatacatccttttttgtgtaaattgagaaaacactgaactattattaataataaaacaatgctgttacaaaaataaatggaaataaaaaaacacaaatatttattaagcacctactatgcatcagaggctgtgctaggtttcttcaaagaggaggcatctatggttagatcctgaagaatgagcatgagagttccaggcaaaagggaaatggtgggggaaaggtgtcctaaacaacatacacaatccttctgtgtgttctcaaagcaccttgttcctcatctgagaaccctggccacaatgtatggttataatttattttcattgtttccttcactagagtgaggacataraagccaagtctaggctattcattgaggcctagcttttggagaacctttttctttctcttgttttcatgcttctttcacccttttcttatgctatttagc

SEQ ID NO: 329525 - DNA, 599 bp, Homo sapiens
ataaatggaatgcttacttcattaraagtcactgtgtatgctctttactatgcggggaaatatgatttgacatggtatggtcttaaaaactattcatgagtttttagttactgatgtaaaatgcctcatctcacaggtgaggctgacctgctagcactgggacatggaggctcagggagagtacagcagggactcactaggggactttgggattctctcaataccccagcatgccaacttccctgaggaatctttaaaaaatatccaaaccagtcctgaaactcgcctataacattttttaaggatttatataaagtttgttataaatccttaaaaaatattataggcagtttttacccagtcttaaaaactatttgggagggacagtatgtttttaggccagctctattttatatgaaaatatattgttcaactttaagcataggatttgtatttttttcatccccaaacctgacttgtggcagaacaaatgggggaggaggaagaaatgaatgacttaaatgatttgttttatatacttaaatgaatgatttgtttgatatactacatttagacaaacccagtgattcacacttgta

SEQ ID NO: 329526 - DNA, 517 bp, Homo sapiens
ttcaataaaaaaaatgacttttcatgaaggtatttcctttattagcatagcatattatgtgtatgtacaaacatatatttatagacatatatacgcctgtatgattcaaatcattaactggagtttatgaagtttttgaaatcagtttcttaaaagcagaattcaagagtagcaattattttgttttacttacctcgtayggcaatctcttacaaatggccaattcttagcataacattcttaatcatctagaaacaccaagcacagatagtccaactgtctttttttctttttattcttactgtatccattcttgttttatctgaattttcattttagatcaacctcaacaatattattagaagggggaaactgttgaagtgtttaagtgtttttaatgtttccatttgtgtatgccatatttagaggacacatacttgataaaaaccagcattatgaatacagctagaaaaaataaagtggaatagatttctaccaaacagatgttactttgaag

SEQ ID NO: 329527 - DNA, 619 bp, Homo sapiens
ggttattggggcctgctgtacctgccttaataaaactatatggatattaatttcccttagatctactggaaatatcccattttctatcaaatcctattcatccttatatttatttttaaatatttttgttcttttaccaaataaagcctttttctctatattttctatatggcatcagttaaaatggataattcatatattatctccatgtgctgacctatgccagtctcatagacccagcactggcccttggagtgagaataagcacaggcaggagagagagaaggacgacagagctcagtgctttgctgttggggtgactgcagtctgacctatgaggatcatctggaaggactgccaatgcacaccttatctgttaattacaaaggagaggwatccgtgaagaaagaacagggaaaggccatagatgaaggatcagcatatactatgggtaggggagagggatgtggttttcttagtgacactctggctgggagcccttttctactgtaaatcatgaggtgagataagtcctctaaatcagcacctaacagcagactttgccaaatgacatctcatcagtcaaaatggcataacatgctgggctttactaagattt

SEQ ID NO: 329528 - DNA, 526 bp, Homo sapiens
tcatctcagcacattctcactcacatgggcttttatcattgcatatatctttagtaatccaatattttaaaagtaatgtagtggtaatattttgagttgaatatctgtatgtaatgaggtttaacatttgtatataaattatctgagagagtgaatgttggggaaattacagcaagaatgggtgcaggactagaaggctgcaatagctagaaggctttttatcctgaggctagattctttgatttattctgcaaatacaagtgctgtgctggctctgtcaggcactatactctatatcagattggccataaagcagtggttcccaaatttcgctacatattgaaatcacctggggattattaaaaactgtgactacctagctcccacccacagacattytgatttaattggtatagggtgtgacctgggcagcaagagttttaagtttccccaggcaatttcaatgagctgcgaagtttgagagccctgtcagggttaaaaaaggtgaagtcacagaacacaacaa

SEQ ID NO: 329529 - DNA, 561 bp, Homo sapiens
atctcactatgttgcctaggctgttcttgagctcctgagttcaagctatcctcctgccttggcctcacaaagtgctaggattacaagtgtgagccactgcacctggcctaaataattatatctatatattttcttttgagatggagttttgctcttatcgcccaggatggagtgcagtggcgtgatcttggctgactgcaacccccacctcccgggttcaagtgattctcctgcctcagcctcctgagtacctgggattacaggcacacaccaccatgcctggctaatttttttttttttttgtattctttattaragatgggtttcaccaggttggccgggctggtcttgaactcctgatctcaggtgatccacccacctcggcctccttaagtgctgggattacaggcatgagccactgcacccggccaataattatatttttaaagttaaaattttccatgacttagtatcttccaattcgacaattattttctttccttaatgaaaattatattccttgcttatagttgtaaactcttggggagaatatagcctcat

SEQ ID NO: 329530 - DNA, 599 bp, Homo sapiens
tcttgaaggtaagtagtcttacctctgcttgaagactactccagccccgccttcctccccaaggctgagggagaaaggatccttgactcctgtactgcatgtattaatagcatctttgttagagcatgggctctgtaactgaactgcttgagtttgaatcccagcttcatcaccttttagccttaagtccatygataagttacttaacctttctgtgtctcagttacctctgttgttgagtaccaatgtcatggaattgtttggattacctgattgagtgcatgtaaagcaccgagcacagttcttgacacatagtaagcattcatgaaattttaacttttattatgattagctgttactgagagtgagccaagaaccataccaggcgctgaggttacaaagagaaaaggatattcctatcccatataagctagcatgggagaaaaagataaatatttttatttaaaaataactctttttataataattatgaacagaatactgggtagcaaagtgagaaagagtcatcctgctcctccaacagctgagactaaggctgaggatgtgatttgaggtgcaagcagacactaagcaaagag

SEQ ID NO: 329531 - DNA, 610 bp, Homo sapiens
tatagttggcctcatcatatttcaagtgctaatggctacagtagctactggctaccacattggttcagtgcctcagagaaagacctcaagataagaagaaaaagaagtgtttagcttcagtagttaaatgaggctatctttgtcaagagagaacaggaatttccaaataccacagctttacatatcaaaagcaaaatttgaatatctgaatattttattatgagcataaaatataattataattatatataatgaaagtcttattattatattttattatctgagtattttatagagaaaacacaaattataaagggtgataccaccaacctaggggaagggaaggaagtacttcctgtcctaaraagtggagggttggaggaaagggaagggctgaatggcaaatgtgtccatgtaggtgagcacccttacgtcagaaacccaaagaaggcagttgatcactggataacagaaactccagagaggttgtggagataacagaaagtagaagggcttgtacttcatttctggcttgaaactgggagaacaatttctcttagtacacctgcagcaggtaagtcaggctgcagagaagacagtgggagcccag

SEQ ID NO: 329532 - DNA, 433 bp, Homo sapiens
ttcagtagttaaatgaggctatctttgtcaagagagaacaggaatttccaaataccacagctttacatatcaaaagcaaaatttgaatatctgaatattttattatgagcataaaatataattataattatatataatgaaagtcttattattatattttattatctgagtattttatagagaaaacacaaattataaagggtgataccaccaacctaggggaagggaaggaagtacttcctgtcctaaaaagtggagggttggaggaragggaagggctgaatggcaaatgtgtccatgtaggtgagcacccttacgtcagaaacccaaagaaggcagttgatcactggataacagaaactccagagaggttgtggagataacagaaagtagaagggcttgtacttcatttctggcttgaaactgggagaac

SEQ ID NO: 329533 - DNA, 549 bp, Homo sapiens
tgcacttacccagtaaaaatactatactttttttttttttttttgagacaatcttgccctgtttctcaggctgcttaattatttgtacattcctcactgcagccctgaactcctgggctcaggcagttctcccacttcagcctcccaaataaaatactatactttgcattcacactagtttattattttaagttttaracatgaataaaaactccaggtggtcacatagattggaagaattgaaatagctcaagttctctttcttcatttttacaattactatgctatcatgtctttttttttcctttttctttttgctttttttcaaaactactgtttaaatgcatcaccacaggggctggagacactaaatggagcaaaagccacaaatgattcccaccctctatgagcttactctccagatgaatatgagtagatgagtccacatgtctgctagggggcaaatgtatataggtgggcattctttgaattaatttccatgtgtaatgcagtatttattacagattatgtaacaaaagtatgcttatt

SEQ ID NO: 329534 - DNA, 560 bp, Homo sapiens
gaaagtggtagcctctggaaagctcaactggcacrtaggaagagatagagctgatatctcctgctttttcttatgtcttgtgtttgacattttaagctatttgcatacattgctttgataaaaataaaacttacttttaaaaatcactgtgtcaaaagtctccctaagcctcaatggagtccagaattgaaattaaaacaatgttagttaattatgtaactcctttccaaaaaatgactttttacttttggatagtaatggaatctattttcctgcctgaacaatattttcttgaatttaagatctaggaaagcattgggaaaaggaagcacagaaatagaggtggcactggttaaattgaagccaagaagaatctaaattcagggaacaacttaggttgagccaagagctttttacttataaaactggttaaacacttatgcttgaaaatgaagttgagaaaaggaaggtattaaattgtaaaatatactcacttcccaaatgaagatacaaatattctgattgaatatgaaatcagaaataaagtacttagcaagcac

SEQ ID NO: 329535 - DNA, 560 bp, Homo sapiens
gaaagtggtagcctctggaaagctcaactggcacgtaggaagagatagagctgatatctcctgctttttcttatgtcttgtgtttgacattttaagctatttgcatacattgctttgataaaaataaaacttacttttaaaaatcactgtgtcaaaagtctccctaagcctcaatggagtccagaattgaaattaaaacaatgttagttaattatgtaactcctttccaaaaaatgactttttacttttggatagtaatggaatctattttcctgcctgaacaatattttcttgaatttaagatctaggaaagcattgggaaaaggaagcacagaaatagaggtggcactggttaaaytgaagccaagaagaatctaaattcagggaacaacttaggttgagccaagagctttttacttataaaactggttaaacacttatgcttgaaaatgaagttgagaaaaggaaggtattaaattgtaaaatatactcacttcccaaatgaagatacaaatattctgattgaatatgaaatcagaaataaagtacttagcaagcac

SEQ ID NO: 329536 - DNA, 588 bp, Homo sapiens
ctaaaatgtaaaatttgcatggttttccaagctcaagtatttaggagttaaggatcacaatgtatgtaacttacccttaaatggtccaggggaaaaatattttgtgtgtgatagagagcaaataataaatacataaaatgttaacaggtgaatctgaataaaggttacaaagattttctttgtattattcttattcttgccatttgtctgtaagcttgaaattatttccaaataaagttaaaatttaaaaattacacagcattttatttgaaattaacaatacatacttggattacacagcaacattcttacaaatacaaaacactggtttttatggggaaaaatgcagtaatttgtgagcaagtatgtaccatatcctaccaacttatcatcacttaggaataaatttcagactagcctaccatataataaaatatggcaatagtgacttgacttgaaaccatagcaggaaaacacaaacacaccagatagtttggcataactgcttcgcaaatttaatayaggcctgctgcaaaatgcagcaatctacaattaaagtgttatgtgatatctcttgtttgcagtaag

SEQ ID NO: 329537 - DNA, 601 bp, Homo sapiens
aggtctgttacaaaggtatatcacacacacacaccatttttaaatatctaatatacaactttctcctatctaggacctgctggcctctatgcctagggctgaacccagcctactctcttcctctcctctaaggatatcatcacttcagtgttgtcccagacatccgtgaacaataaaaccacrgctacctcaagtcttgtatgttgacccactcttttcctttcctcctctactccagctttaaccaccaacctttgcttagtttgaattgagtttatgataccttctcagagttgttctaaccttttggggacctctgctcctagctccctaatttgcttggaactgcactaagaagtatacccttgacttttccaaagtcactctggccagatcaccactatgttatacagtgtgtttgtgaaaatttttttaaaagtacctctctaggtagtcacagatctttaggtacaagtgttgctgagtaagcctcacctttgtgcctagagaaaaggagtgagcagaacatgcacagtctacggtattttgttttgttttgagacagggtcttgctctgttgcccagactggaatgcagttgc

SEQ ID NO: 329538 - DNA, 735 bp, Homo sapiens
atgcattctacatcgtagcagagtttatggggaatccgactaggttataggaaagactgagatcaaaagaccaaacactacgtttccaagattgtttgtaggaaatagtcaaaattgagaagctgtagatatgaacaggacaccctgttgaaagaaaatgaagtgctaggccagtactgacataaggtaagagataaaatgagccagtgagagaatcccacgcaccacacctcatatgatccaggaaagcttcctggatgtggaggactttgatgtaaagagtaaccaaaatttcctatgaggaatcaccccttcccctctctcagtcccaaggtgaaacacatgacttggttctgaacaatcaaagccctgaatccactatccccagtgactgtttgggaggaaggggttaagcagggtgactcctaagtctgaatttgaacctgtaaggataaagtcgtgaatctgttacccaatggagaatgacaataagccaacaacaagagtagaggcgagaaatggagagaggcccagtccacatgagtcctgggttaagctttatctgaagtcttttatatataaaagacagtaaattcccttttctgartaggccgatttaagttggatttctacttctttggaatcaagagtcctgatgattcagaggaaagaaggacttatataacatgaacaaagacagaaagctgggaactaagaaccagagggtagtggaca

SEQ ID NO: 329539 - DNA, 487 bp, Homo sapiens
gtcagtggcctaagaactccggacgggtgagatttggggcagacagcaggggtagtcaccctacaagagtcacgccaagtgcaagcactcagagacatctcccaacactcaaaacagcaaagaagttctggtgctttaagtgttcctcgctcggctcagagactcggcttcgagccgcgactcaagacagcacctgggggtatttgttttgcctaagcctgctgcacttccacggccattgaatcccaaaaactacaattcccattatgcaccgcgagttcgcggactaaacaggmataaactacaagccccagaatgccttgggcgagacgcgagagcacggaggagcggaggggcgtggccacgtcgaccgcgcgggaccgttaaatttgaaacttggcggctaggggtgtgggcttgaggtggccggtttgttagggagtcgtgtacgtgccttggtcgcttctgtagctccgagggcaggttg

SEQ ID NO: 329540 - DNA, 561 bp, Homo sapiens
atatgcaattaataaattatactaaataatttggaacttcaaatgaacttcaattttggctcaacataaaatagatttcaaaaatgtacaaaaaatgtgtatatgtrtatatatatatgtgaatatgtttcatataaagaaaatgtccactgtcatgttttaaaaaagaacctctggaattcagtaactttattctttctctatgaaaggagcagtttgcatcctcaggttccatatgttcaaaggattgtttcacattcttgacccattgaaggaataacctagcaagtcaattaacgtggaatgaatggacttacgtgcagatagatggtgtcttcagatcttatgagaagattttgcattttgtccttctaacctatttataaattctaattttgccttaaaagttacaaataattctaaattatagactgttgctgacctttaaggaagcatcctttctaaactaaaaataaaaaatacaaaaaatacaaaagtgtcctttatccttctctgattaaaagataatttcagttatctcactttttgataaatttcttc

SEQ ID NO: 329541 - DNA, 614 bp, Homo sapiens
tctcacatttacccgtctagaatttgctcattaaggccctgtccagtctctcctgagtgtctgtgtagcctcgtctatgctgtaaccttccagtttaggattccatcaaggctggctttgactgtcttattctccaggtttctctgttaaatttctagctgatctgctaatctattgcttaccctgatcatttgctgctragatctctattggttttggcaataccccaggtcatgtcatttttagcatccttctccaaataaagtgagtctccttctgctttcttggtaccacttgtgtcatggatctggatctgggggttggggatggttgagagtagactcagactaaaaagtcacagactcccactgttcttattgaggctcagttttcttgaagaaatacttcacattttgctacacaactttgatcaatttcagactctttaaatggctatttttgataattttagatgatttaaatttcattttgaagaaagtgagaggtgaagccagctggacttcttggtcaggtggggacttggagaacttttctgtcttataagaggattgtaaaatgcaccaatcagcactctgtagctaggattgtaaaac

SEQ ID NO: 329542 - DNA, 514 bp, Homo sapiens
aatattctctctgatggggaaaaatggccacctgagggaagtataaattataatactatcctgcagcttgaccttttctgtaagaggtaaggcaaatggggtgaaataccctatgtccaagctttcttttcattgaaggagaatccacaactatgcaaagcttgcaatttacatcccacaagaggacctctcagcttacctccatatcctagcctccctatagctccccttcctattaatgataagcctcctctaatctccctcacccagaaggaaacaagcaaagaaatctccaaaggaccacaaaaactcctgggctgtcagttatgtccccttcaagctgtagagggaggagaatttggcccaactcgggtacatrtccccttctccctctctgatttaaaacagatcaaggtagatctgggaaaattttcagatgatcctgataggtatatagatgctctacagggtctagggcaaaccttcgacctcacttggagatatgtcatgctat

SEQ ID NO: 329543 - DNA, 514 bp, Homo sapiens
aatattctctctgatggggaaaaatggccacctgagggaagtataaattataatactatcctgcagcttgaccttttctgtaagaggtaaggcaaatggggtgaaataccctatgtccaagctttcttttcattgaaggagaatccacaactatgcaaagcttgcaatttacatcccacaagaggacctctcagcttacctccatatcctagcctccctatagctccccttcctattaatgataagcctcctctaatctccctcacccagaaggaaacaagcaaagaaatctccaaaggaccacaaaaactcctgggctgtcagttatgtccccttcaagctgtagagggaggagaatttggcccaactcgggtacatatccccttctccctctctgatttaaaacagatcaaggtagatctgggaaarttttcagatgatcctgataggtatatagatgctctacagggtctagggcaaaccttcgacctcacttggagatatgtcatgctat

SEQ ID NO: 329544 - DNA, 590 bp, Homo sapiens
aaattgtccaaaaagacataagctgccccctcgcccatgtccattatgctgaggcaatcactggaaggcccactgccccagaggacaaagcctctcttggccagaagccccaaaccagatgatccaaaaacaggactgagggtgcccggggcaagcaccagctcatgtcatcaccctcactgagccctgggtacatttaaccattgagggccaggaaattgacttcctcctggacactggygcagctttctcagtgttaatctcctgccccgatggctgtcctcaaagtacgttaccatccgaggaatcctgggacagcctgtaaccaggtatttctcccacttcctcagttgtaattgggagactttgctcttttcacatgcctttcttgttatgcctaaaattcccacacccttattagggagggacatattagccagagctgatctacatgaatatgaggaaaaagttacccatttgttatcccctacttcaggagggaatcaaccctgaagtctgggcattgaaaggacaactcggaagggcaaaaaaatgcccacccagtccaaatcaggctaaaagatcccacc

SEQ ID NO: 329545 - DNA, 601 bp, Homo sapiens
aggttgattatgtctttgcaatcacctttatgtgaccttggaccaatcacttaactatttggagtgagtctcaatttcctaattacatagttaaatggttgtattggctcattcttggaccgaggctaaaaagtccccaaaagtctatagttgctgcactaattaccctacacactagaaataatatttcaatatttcaaattttcctagaggccacagatgtgaatcaaaacaaaatctacacataaagtaaaagcaagacataattaaaattctgttctgtaggcagaaacagctccccatacccaactatctaycctaaaatgacatgccactagtgaaagggactaagtaagaacatatgggtagaaaattgtaacacagcaccctaagtagaaagaaaatcctaaacattgggactatataattgcattaacgcattttaatgccttattttattctacatgaaaactgccggaatgctcctgcattctacctttatacctaacaagcctattgaaaccttgaagggctgaagactcaggaggagtcatccttggctccaagatgaactgcttcctcagtggcacaaggtttagcc

SEQ ID NO: 329546 - DNA, 592 bp, Homo sapiens
gcagttatattttaattaatgtgattatgtgctgccattaggaaaccctcccccagcacatttctcctgccaggcccatgaatgcctgtaaaccattaacataaaagggctgtttggttattaaattcatctacacaaataggcaagggttgcaattgttgatttgccactgaaagaaccgaatgaggagttgttcagtgcctggcagttgcaattatttgctgtaattaagtctaatttataacccccccctcaaatgagaaagtaacaatttttgttaattaacaggagcatttgtaaagctcrttaattccatcattcacagtctgtctggaaaaatgggagcatatggctcttacgatgggacatgttgcatatgtgtatttgtacattaatctgtttggaaggtctaatgattgaaatgggagctagaaatggatgttatattactgagaaaagaagatctactgttttcatttatctttacagcaatgtgagtgctttgtcattatcttctgcatacggtttcattattctgatacagcactccacattgcctcataccatcatgcccataagcctgcagggttca

SEQ ID NO: 329547 - DNA, 577 bp, Homo sapiens
gatcttaatcttcaactgacaacaaaccttctgtcctcatctgagctttgagtcccctaaagacaaaccacgagatgagagtgaaataccataaaaatgctaagtttcaggatatcgcttcagtgtacgtcaataatggtcttttaaaatcctaaacttcaaaattaggctgatgtrtttatttacttggtcccaggaagagaacaacttcaggccatactatgtgatggccatatctataaaaacttatgtcatgaacaggtccccagaaacaaagtaggagcaaaaagctgagccatgcatgccaattcctctcccgaactcatcaatttggtaatttatttcaactccttgaaaggaataggatgcagcctatgaccaggaactattaaggaatagcatttcttgtggatactataggagtatggaaaacagtgtaccacaaatatgtatgtagaaaatcctaaatgttagtgtaattacttttatctggaaaccccagtacatccacatcagcctttaaacatcaccagatataagcatggtgccactatagcttaattgattgatcttctag

SEQ ID NO: 329548 - DNA, 597 bp, Homo sapiens
tgggtttgtgacagggggtctcattaattttgcaatggtcttgactgctagtgcttcaaataatcctttttgtctttttctttgcmtaatattttagttatgcacatgtaacacttgtgaaattatcacacagttcttaggtattctgttctacttgtatcatttttttctctgcattttggcatgagaaattcccattgacttcgattcaagcacatttattctttcctagactgtgcccagtctattaatgacaccaaaggcattcttctcagctgttataatgtttttgattctttcttggacttttaatttatctgcttacattacccttctgttgctctctgttgtttacttttttcattagagtccctaacatattaatcatagtggttttaatttcatgtttgacaatcccaacatctgtggcatatgagtctagtttggatgcttgctttgtctctggagaatgtggtttttcttaccttttagtatgtcttctaatttctccttgaaagccggatataatgggaactgaggcaaatgtcctttaatgttagcttttatgtcaatctggctgggagtttgcctctatgc

SEQ ID NO: 329549 - DNA, 659 bp, Homo sapiens
aggttgaaaaattactcaacaagggttgatctaatcaaaactgctaagctgatgaaattcatttctggcaacatttaagcatcctttctgcaccatttcctgttgatttcatctcttctctaccagcatctcaagaccaaaatcccttacttggtgtaacaattcaggactgatctgaaattattactcatatcttatttatctctgaaacagggattttttgttttgttttgtttattcatgtgactcatctcaattaggtgctcagtggaaagaaaaaatacctctaattagcactgacttataaaggactggcagctttccaaggtccatttgctctggaagggtaggtggctaaaccaaatgaatcactgattgagttttaagtgactgtgtgatttagtgaaagggagatcattgaaattctatctaaagctggggccagggctgggcctgagatcaaaacttctattggaatcaggattagtcccagttctagtttctgctttcccctggaatgggtaagcacmaaagtatagggaaaccaaaaacagtttgtgcttagagggtgcaatatccatgaattcagcagatgaagttgtaggccagacaaggtttgaagcagaaagtatcaatgtctagtataccaggatctacca

SEQ ID NO: 329550 - DNA, 642 bp, Homo sapiens
atcacagatgtctatgtacccaaagattcattgtgcagaaacttattccaaaatattccctttaaaatttgcttatgcatttccttatgtaaacaagtgaaggcagtcagrcataagagaagaatgagaatgttgctacatttttaagtatacagcatctgttgtattaaaataaatataacatgttttttaattctgtgtcattaaaactagcctacaggaaacctcagggagtaaactataagtggtataccccatacacacatatttaataatgactagcacacagggaacctgtacatttgcaaagaaaatcaatgtcaatgtttcctattcaaactaatttggccatagggaggaatcctcagaaataggatatttgttattcagaagccagactgagcctagatgagttttcaaaaacaaaatctaatcagggtgctttttgtgccaggtgctttacaaacattatgtcatttaataatcatcccttaaggtatatataattatcaacatttacagaggaaggaactgagactcagatatattgaataattaaccagaatagatgcagttaggtaacagtggggttggacttgaactcaggtataactccaaattcttcccgttgtccactcaggc

SEQ ID NO: 329551 - DNA, 540 bp, Homo sapiens
tcattaattaaggactgtgattaattaaggacaaatcccaagctaatcccaaacaggcctctcctacttgatatccatgtgcattttttccttactaaatgaaactggagaagagatttttcttccaaagaccaagcccatcatagactttcctcatctcgaccttcttgagcttgggattccagcatatgtttatttaatctaaatagtcttcygtaaattatttaagttcacttcagtgtgctcacccatgaaagtttgtagtaatgcataatgagatatcttcaaggattaaatgagattaattagaccagacaggttatagggaaaattcttagtcaatgttaagtttctctcttttaccttctcttagactttctaatttattctaagttctcatcagttcttgctctttttccctagttccctttttttctagctatttatttcttcactaatatccttcaaacttgatctgcttattttgaataaattctgcagcctcaaggctttctataactgaactctcctatcagcctc

SEQ ID NO: 329552 - DNA, 540 bp, Homo sapiens
tcattaattaaggactgtgattaattaaggacaaatcccaagctaatcccaaacaggcctctcctacttgatatccatgtgcattttttccttactaaatgaaactggagaagagatttttcttccaaagaccaagcccatcatagactttcctcatctcgaccttcttgagcttgggattccagcatatgtttatttaatctaaatagtcttccgtaaattatttaagttcacttcagtgtgctcacccatgaaagtttgtagtaatgcataatgagatatcttcaaggattaaatgagattaattagaccagacaggttatagggaaaattcttagtcaatgttaagtttctctcttttaccttctcttagactttctaatttattctaagttctcatcagttcttgctctttttccctagttccctttttttctagctatttatttmttcactaatatccttcaaacttgatctgcttattttgaataaattctgcagcctcaaggctttctataactgaactctcctatcagcctc

SEQ ID NO: 329553 - DNA, 448 bp, Homo sapiens
acatgcaatctgcactgagactttccaagaaaaggcagatcatatgtggtgtttttagaatctcatggaactagtatcttaaagaacatactttgggaaacagtgttctggtgacatgctgcagggttttatactttcatatattgtgctccacacttttgctaataacttaaacaaggacaagatggcctgcttatcacatctacagccaacacaaagctaggagagacagttaatatgatggatggctaaatcaagtttaaaaaaatattatgacaggttggaatattgggctgaaactaacaagataatagyggtctccaaaattatctcatatgtacaagacaggagacacctggcttaataatagtcatttctatcaacaaaatctagagagctacaaactcagtatgagccaacagtgtgttgcctttgcaacaaaaacaat

SEQ ID NO: 329554 - DNA, 588 bp, Homo sapiens
tgcattttccattggtgaagatgagatatttgatgccagatggatggctttcccaaagtgaataatccatggaaaagtaaggtagaaactacaatgtcttttatgagctatacaaaggctgagtactggggataagtgggaatcccaggatcagggagagctgtcttggaggctkactaacacagtagtctaccttttgttttattgagatttgcactgaaataattatagatgtttatgtagctgtaagaaccaatacagaaagatccaatgcactctttgtctaatttttcccaatggtaacattttgaaaaactatagtaaaacattgttaaaaccagaagattggcattgatataatccacccaatttctattagctttactagttttactcctgctaatttctgtgtgcatgtatgtacttgtgtctgcatgtatatattgagttctatacaattaaatcacatgcattggtttgtgcatccaacacctcagtcaagatactgcaacacaagtttccaacaccacacgtattcctcctgttatcttttcataactacaccctccttcctcttgcatcacctct

SEQ ID NO: 329555 - DNA, 588 bp, Homo sapiens
tgcattttccattggtgaagatgagatatttgatgccagatggatggctttcccaaagtgaataatccatggaaaagtaaggtagaaactacaatgtcttttatgagctatacaaaggctgagtactggggataagtgggaatcccaggatcagggagagctgtcttggaggctgactaacacagtagtctaccttttgttttattgagatttgcactgaaataattatagatgtttatgtagctgtaagaaccaatacagaaagatccaatgcactctttgtctaatttttcccaatggtaacattttgaaaaactatagtaaaacattgttaaaaccagaagattggcattgatataatccacccaatttctattagctttactagttttactcctgctaatytctgtgtgcatgtatgtacttgtgtctgcatgtatatattgagttctatacaattaaatcacatgcattggtttgtgcatccaacacctcagtcaagatactgcaacacaagtttccaacaccacacgtattcctcctgttatcttttcataactacaccctccttcctcttgcatcacctct

SEQ ID NO: 329556 - DNA, 577 bp, Homo sapiens
gttggagctgaaacattatatgacatttcacaggtaaaaataaatttgataagggggttgaagcatcactacaaacaattggactacagtttatttaaaaatgtcttgaaaaccaatttccaatgatgaagttaagtggatagggcaattgaaatgaatagcagagcttagcagggcttccactgccaaatttgggacaatttgtkcactataacaaataataagtggaataaattacaatactttaaacaaagaaggaatctctaataaactgggccaatagtttcacagaatttattctgaacccggttacatgacaagtgaaaactcaactgtactcctttgcaattaatagctcttaatgatacctcaaaatagtaatttcaaatgttgaagagataatgaatgaaaagctcctttttatagaaacataactagtaaatatggaagaaatgatgaaattagaaaatcatttgctgacactgtagtaacgattgattcaagcagtattaattcatggatgccaaaaccatcagggttagaatcattggagagcaagatatttgcacagtctcaa

SEQ ID NO: 329557 - DNA, 577 bp, Homo sapiens
gttggagctgaaacattatatgacatttcacaggtaaaaataaatttgataagggggttgaagcatcactacaaacaattggactacagtttatttaaaaatgtcttgaaaaccaatttccaatgatgaagttaagtggatagggcaattgaaatgaatagcagagcttagcagggcttccactgccaaatttgggacaatttgttcactataacaaataataagtggartaaattacaatactttaaacaaagaaggaatctctaataaactgggccaatagtttcacagaatttattctgaacccggttacatgacaagtgaaaactcaactgtactcctttgcaattaatagctcttaatgatacctcaaaatagtaatttcaaatgttgaagagataatgaatgaaaagctcctttttatagaaacataactagtaaatatggaagaaatgatgaaattagaaaatcatttgctgacactgtagtaacgattgattcaagcagtattaattcatggatgccaaaaccatcagggttagaatcattggagagcaagatatttgcacagtctcaa

SEQ ID NO: 329558 - DNA, 577 bp, Homo sapiens
gttggagctgaaacattatatgacatttcacaggtaaaaataaatttgataagggggttgaagcatcactacaaacaattggactacagtttatttaaaaatgtcttgaaaaccaatttccaatgatgaagttaagtggatagggcaattgaaatgaatagcagagcttagcagggcttccactgccaaatttgggacaatttgttcactataacaaataataagtggaataaattacaatactttaaacaaagaaggaatctctaataaactgggccaatagtttcacagaatttattctgaacccggttacatracaagtgaaaactcaactgtactcctttgcaattaatagctcttaatgatacctcaaaatagtaatttcaaatgttgaagagataatgaatgaaaagctcctttttatagaaacataactagtaaatatggaagaaatgatgaaattagaaaatcatttgctgacactgtagtaacgattgattcaagcagtattaattcatggatgccaaaaccatcagggttagaatcattggagagcaagatatttgcacagtctcaa

SEQ ID NO: 329559 - DNA, 577 bp, Homo sapiens
gttggagctgaaacattatatgacatttcacaggtaaaaataaatttgataagggggttgaagcatcactacaaacaattggactacagtttatttaaaaatgtcttgaaaaccaatttccaatgatgaagttaagtggatagggcaattgaaatgaatagcagagcttagcagggcttccactgccaaatttgggacaatttgttcactataacaaataataagtggaataaattacaatactttaaacaaagaaggaatctctaataaactgggccaatagtttcacagaatttattctgaacccggttacatgacaagtgaaaactcaactgtactcctttgcaattaatagctcttaatgatacctcaaaatagtaatttcaaatgttgaagagataatgaatgaaaagctcctttttatagaaacataactagtaaatatggaagaaatgatgaaattagaaaatcatttgctgacactgtagtaacgattgattcaagcagtatkaattcatggatgccaaaaccatcagggttagaatcattggagagcaagatatttgcacagtctcaa

SEQ ID NO: 329560 - DNA, 586 bp, Homo sapiens
aactgtcatacttaataagcagcaaatgccacagtcagcactgtagtgtagccatccttacgggatacaataattagctcaccttcaaatgaattcttggttttttttccctgccaagctccaagaacaaggagcctgtttccgaagggctgtgtcacattgataaaaggggcaatggctctcaaggaagaagaagaggtacctagaaaagagcaaagcaggggctgaagagccctgcccctccaaatgttgtcctttcttacatgctctttgatgctgggaagtaggaagtgagtgaggaggatggggagaggcagaaactagtgagagattcacatctttacctctttgagacttacattctccttgcaaatcacattttctccttttagagcagaagtaggatttttgcatcccaaaatctgtagaagaaaagggcctgaggctggctgcaggaagcaataaagtccccaggaattttcctwccatttctgctccagcacagaggctgctgatgtgggctgagttaaagcacgtagaaaccaaatagcatcatgtttttgagacatttctgatgctagttcct

SEQ ID NO: 329561 - DNA, 572 bp, Homo sapiens
aatctatgaatggagaaccaccctgaagggagccatggtctcagaagagactccaaggtttctcagaaggatacattacttggcgtgtctagcagagtcaaatttgtaagagtggacaaagttacagccttaagagtgtttgaaagtccatgagaatgtggtattcccagtatgcagtgtgaaataatgaggtaagccttgcaaagaatgctcagtgtcttagactttaaaattgtgctaattctgctttgaaagacttgaaataaagcttagatgatttatccttcttcaagactcatttatagagtcaatcaaacttcaaaacatagcaaaaatgcaaaccaaaagcctacaacaaattatacatatataagcgttccagttgccaagaatatatgtatttttgtttttgttttaaatcacaatccartaataaacctagtattcagtcttggcaaaatatgagtcaaactcatttacaaagcttagaaaatacagaaatagttacaaagaacattcttttttgtcacaatcttaaatttgtaatcccttgttcccttttagaatgccat

SEQ ID NO: 329562 - DNA, 621 bp, Homo sapiens
ctggccaactatccaaaccacttttctatatatcaaggatccaaaataattccagcagacactaaagtgcaatgtcaatttgcctattcccatctcacatatcttcctaggaaattgagatcaacacagaatacatgatatttttgctcaaacatggaccttggcagatgtctcagaaatgcaggaatggatataccgctagctatagtgctaaatgaaacatctttcatattggtcattggtatacaattataaaatgaataataaagacaaaggaggtttatgtttgggattatagtttgaacctttttgaaaagccttctagatttaagaatatagtgaattcaaacaggtagtcaatatggcattactgtaatagrgatataaagagctttcctgaagccatagtccctgtaaaattttcaaatgaaacatctttgcatttcaaactctaagtcagacgtttcagtaaaattgtatatgtcaaaagaaaatatatcaacggtgggttcatattctgatttccttggactttgcagtggtgagaattaagctgttctctttagaatgctggccaaggctgaaaaatacttgttatagaatttcaggtggtaggtaaca

SEQ ID NO: 329563 - DNA, 599 bp, Homo sapiens
catcaatggtgatatctgaaaacactttgctgttcctcaacctgaggtcaygtgtgtgcattagacctcattctaccttttgtgaaaagatctgtttgtctttggggcataaagggaataagccagatcaatatctgatggtcactcacatcctctgactgcatggaagctgcccagggttgaacttcccttctactcatgcatccgctgatgaaagcttgggctcagcagctgttcagagaacaggaagtctagggccactgtcaggtcctgactctgttcagccattcaagcagcagccttgcctcacatgactcattgccccgtctctaggggttggaagtaccaggctctgttggcctgctgtacaactgacatttctagcatcagcatcttttggaacctagctgcattttatctgattaaggattttggtgaggtgagaagctacaagctaaagctggtgcctaataaataatagggtccacaaatgtttgtggaagagtacatgaagttgatgtgatgactattagttagtaagtctagaggggaaaggaacttatttcttggggaaaaacattccttgtagtagttaatag

SEQ ID NO: 329564 - DNA, 624 bp, Homo sapiens
agtagtgtgggggtggcagtaagaatgggaatgggcagaatgtttccaggaataaacttcattctacttcatggctacctctgttgccccaatcaactctcatctcggactaagcaaaaacccccatcatggaggggagcaatggaagtagataagtgaatccctctccattctgcattcttcccaattgtgtgataaagtgttctggaaatacaaatacacrtattttcaactctctaatagctgccagggtagcagataataatttaccttattctatattttgcagctagattacctgtcaaggccacttttcaactttatcaacccattactttatagctcttcatgctgtagagagtgtccctttcattttgctcatttgtattcctcatagcatgctggtttatcagaacttacttctacctagaagatgaaaattgggcctggagaattttggtgaattgagcaattcatctcaataaacaggataggaccagagagtaagcttagaagttttttgaacacatgctgttgtagaagccactaggccccgaaagagtctcctcatctaagtctctactttttatttcgtttgtattcatttaaggtcttttgcttttg

SEQ ID NO: 329565 - DNA, 538 bp, Homo sapiens
cacttttattctccaaaattattggtgacaagtttatctgttttgtggtaaagttatatacttttctatttatataaagtgaatcattcagactctgcaagaaaccaaaccaaaacaaacaaatataacttaaacccaaattcatcaattccattcattcttctactcaaggacatgttatagcatgagcataatgtaagtctgaactctgctatttgccctgttggtctcagttccagagcatctctcatacagtgagtatttctccttatttattttattattattattwttttttgagacagagtcttgctctgtcggctaggctggagtgcagtggcacgatctcgactcactgcaacctccatctcccaggctcaagcaattctcctgcctcagcctcctaagtagctgggattacaggcgtgtgccaccatgaccggctaatttttgtatttctagtacagacggggtttcgccatgttggccagtctggtctcgaaaccctgacctcaggtaatccgcccacctcagtatc

SEQ ID NO: 329566 - DNA, 620 bp, Homo sapiens
atgcagcattcaacaaaatatttatggagtctttctgagataggcactgttctaggtgcttgggatacatgagggaactaaatatggaggcgtgtttgtatggaggtaaaattattgcaagtatgacatcatttgggcaaacattaaatatcggattttagcaactcttggcaaagatttagaagaacagaatattctatgccttaatggtagaagtaaaaagtagttcaaaattaaaacaaacaaacaaaaactcagaatcttgatagtatcttgtagtattaaacaggcaaggcctattacccaaaaattacacttatgagtatacaacctaaaaggactcttacacaagtacacaagtaaatataacaataatgtttatcacagcattgttgtaatattttaagaattggaagcaatcagagagttgaaaaatatgaggtatatacaraggaaggaatactgtcaagtagataaaagaaatttagcagattttaatatatcaacatggctagatctcaaaccacaagtttaaggagaaaaacaatcaactggcagaatatagagcatgcaataaattatattaataaaattacaaataacataatatgtatatttaa

SEQ ID NO: 329567 - DNA, 610 bp, Homo sapiens
ggaatggttagggggaataaaagcaactttaactttatctctaatattttatttactttatgcagaattgataagtatggcaaaatgttaacattaatttcaatgaataggcatagcttcatatattttttgtatttttctgtaatttaaaaaagatctgtaaatataaatgaaattgtgagaagtataagtgaattttttacaactctactccaagacaagcaaatagttgtatatacctatcaggatttctgagctaataagacttaacataaccacttccaaccttttatgaaaattaaggatgtagacaccaaaaaggtaaaagcttccagaaacacagtgacaatctgggcagaatttcctttaatttttagaccaaaggaattgaaggaaaaattacaatctgtggaatgcttaaaggaggggaactagaaataaagcaaacctactcaccagacaatawtttaaaaatccccttagctctccctgtagtctgttcattggtccagggagggaacaaaataccttaccagacagaagagctggcagctctcttcactgtgatgctagttttttgtgatggccaaatgcaggctctctttatacc

SEQ ID NO: 329568 - DNA, 244 bp, Homo sapiens
attctctccaagccttggtactgtcagattttcttaggttctgccaagtgggtgtaaagcggtatctcatkttggttttggttttattttcttaagttctgaacatctcttcatgtgtgatcatgtgtttccttctctgtaatatgtctctttatgtcttttactgatttttcttttgaggtttcttcttttattattgtaagcattcttgatacgtttttgagagtaatcttttttgtcacag

SEQ ID NO: 329569 - DNA, 244 bp, Homo sapiens
attctctccaagccttggtactgtcagattttcttaggttctgccaagtgggtgtaaagcggtatctcattttggttttggttttattttcttaagttctgaacatctcttcatgtgtgatcatgtgtttccttctctgtaatakgtctctttatgtcttttactgatttttcttttgaggtttcttcttttattattgtaagcattcttgatacgtttttgagagtaatcttttttgtcacag

SEQ ID NO: 329570 - DNA, 244 bp, Homo sapiens
attctctccaagccttggtactgtcagattttcttaggttctgccaagtgggtgtaaagcggtatctcattttggttttggttttattttcttaagttctgaacatctcttcatgtgtgatcatgtgtttccttctctgtaatatgtctctttatgtcttttactgatttttcttttgaggtttcttcttttattattgtaagcattcttgataygtttttgagagtaatcttttttgtcacag

SEQ ID NO: 329571 - DNA, 597 bp, Homo sapiens
aatattgtatttctctgaccatttacatctttctctgcttatgaatagtctctcattttaaggaatcatgtgattatggtgggcccacccagataatccaggataatctctcccatcacaagaagcttaattttaatcacatctgcaaagtactttttgccatgtaaggtgatatattcacaggttcctgagtgtagggcacaaacatctttatgatggctatcaatctgctgaacacatgtatatatgtcttatttctttttactagattgtaaactccttggagcctcaaatctgtgtccmgtgtattgttgtattccgcacagaatctatccaagtctactgcttacaacaaaggtttagatcacagcatttgctgaatgcgtcagaagaactgaagcaatttcaaagactcattcgagaaaatggcatactcgtgggactttaaaaatccctgaaagaatgatttttgaaatatttctaaatctactgagaaattcctgattcctgaacatttaaataattttataagtatattattacaaaaattattgtttatttttggtgcttgtacatgactatagttatgtaacctta

SEQ ID NO: 329572 - DNA, 634 bp, Homo sapiens
ctctttctattgatttctagttttattccattgtggactgagaagatgcttaatatgatctaatttttaaaaatgtgttgagatttattttatgtcctatcatataatctatcctggagaaatttccaggatagattacatgttgagtgctaatgagaagaatctgtcttctttaactgttggatgaaatgttctgtatatatctgtctgttatgtccatttggcctatggtgccgtttaaatccagtatttctttrttaaagtttctgtctagatgatctgtcaaatgctgaaagtgagtgtggaagtacccaactattattgtattggaatccatctctccctttagttcaaataatatttgctttatatatatctgggtactctaacgttgagtgcatgtatatttagaattcttatattttcttgataatttgatctctttatcattatataatggccttcctagtctctttttgctatttttgacttagagcctgtttctttctgccttcagaattctttgtctttgaccttggacagtttgactataatatgccttaaagaagatctttttgaaatgtatctgtttgggtatacgtaagcctcctgttgtatctggacgtctaaatct

SEQ ID NO: 329573 - DNA, 634 bp, Homo sapiens
ctctttctattgatttctagttttattccattgtggactgagaagatgcttaatatgatctaatttttaaaaatgtgttgagatttattttatgtcctatcatataatctatcctggagaaatttccaggatagattacatgttgagtgctaatgagaagaatctgtcttctttaactgttggatgaaatgttctgtatatatctgtctgttatgtccatttggcctatggtgccgtttaaatccagtatttctttgttaaagtttctgtctagatgatctgycaaatgctgaaagtgagtgtggaagtacccaactattattgtattggaatccatctctccctttagttcaaataatatttgctttatatatatctgggtactctaacgttgagtgcatgtatatttagaattcttatattttcttgataatttgatctctttatcattatataatggccttcctagtctctttttgctatttttgacttagagcctgtttctttctgccttcagaattctttgtctttgaccttggacagtttgactataatatgccttaaagaagatctttttgaaatgtatctgtttgggtatacgtaagcctcctgttgtatctggacgtctaaatct

SEQ ID NO: 329574 - DNA, 520 bp, Homo sapiens
caaaaatctagaacatagtatgtcttggtaccagcacaaccatattctttccattgaaaaccacgttttaaatgtgatawtatttctggttatcggaatgtgtcttatgacagatttcaaaaggaatttttttccattatttataaaagtagactttaatgggttgacattacctgcacttgtgtgaatttggctacatgtagactgttaaagtttataatattgagtcatttgaattggcagtatcctaaaaagttaaatatttacccaaatttggattttttaacaccgcttaaaatgtcttcgatattaaagtatgatttagcatataatttagttataatatgtagcatataatagagcatcttgtaactctcaacgcttccactgataacaaacaacattggatcaaatttaaaataaccatttaaaaggggcaagtgagcttccaaaacactgaagataaaagtgaaaaaatctgagagaaaagaactatagaaagataaattaataaccatca

SEQ ID NO: 329575 - DNA, 520 bp, Homo sapiens
caaaaatctagaacatagtatgtcttggtaccagcacaaccatattctttccattgaaaaccacgttttaaatgtgataatatttctggttatcggaatgtgtcttatgacagatttcaaaaggaatttttttccattatttataaaagtagactttaatgggttgacattacctgcacttgtgtgaatttrgctacatgtagactgttaaagtttataatattgagtcatttgaattggcagtatcctaaaaagttaaatatttacccaaatttggattttttaacaccgcttaaaatgtcttcgatattaaagtatgatttagcatataatttagttataatatgtagcatataatagagcatcttgtaactctcaacgcttccactgataacaaacaacattggatcaaatttaaaataaccatttaaaaggggcaagtgagcttccaaaacactgaagataaaagtgaaaaaatctgagagaaaagaactatagaaagataaattaataaccatca

SEQ ID NO: 329576 - DNA, 520 bp, Homo sapiens
caaaaatctagaacatagtatgtcttggtaccagcacaaccatattctttccattgaaaaccacgttttaaatgtgataatatttctggttatcggaatgtgtcttatgacagatttcaaaaggaatttttttccattatttataaaagtagactttaatgggttgacattacctgcacttgtgtgaatttggctacatgtagactgttamagtttataatattgagtcatttgaattggcagtatcctaaaaagttaaatatttacccaaatttggattttttaacaccgcttaaaatgtcttcgatattaaagtatgatttagcatataatttagttataatatgtagcatataatagagcatcttgtaactctcaacgcttccactgataacaaacaacattggatcaaatttaaaataaccatttaaaaggggcaagtgagcttccaaaacactgaagataaaagtgaaaaaatctgagagaaaagaactatagaaagataaattaataaccatca

SEQ ID NO: 329577 - DNA, 571 bp, Homo sapiens
tgcaaagtatttatgactttatgttaggcaatttcatttcttagatagtactcagaaaacatcgatcrtaaagaaaaaaatgacaaattgaatatcatccaaagtaaaaatgtctgctttttgaaaaacactagaaagaagataaaaagtaatgccacatatttgcaaaacatgtatctgataaaaatacttgtatcaagaatatatatcttaaaagattcatagaactcagtaatgagaaaataaacaatccaataaaatggctaaacaatttgaacaagaacttcaccaaaagattttagcattactggggaaatagtaaaattaatattttatattagactatagtaattcagggataggtattataatctccagggaaaccactaaagaagagtaaaaaatatttgtcttggaagtcaatagaaggaaaataaaataataaaaatattcattatccaaaataatgcaagaatgagggaaaagaaacttaaatattggagccaaataaagaagacttgtagtttgcaaatacaaaatcaaatgtattaataattagaataaatacaaa

SEQ ID NO: 329578 - DNA, 566 bp, Homo sapiens
aaatagtaaaattaatattttatattagactatagtaattcagggataggtattataatctccagggaaaccactaaagaagagtaaaaaatatttgtcttggaagtcaatagaaggaaaataaaataataaaaatattcattatccaaaataatgcaagaatgagggaaaagaaacttaaatattggagccaaataaagaagacttgtagtttgcaaatacaaaatcaaatgtattaataattagaataaatacaaatcaaatttaaagtttaattaaaggactaaaattmtcagactgcataaagatacaaattcattctattctgcttacaagaaataattaaataagtcataccatgaatacatgaattaggaaaaaagcaaagtagactttaaggcaagaaacattgttagagataaagagagacattttaatgatgataaaattgactatccaataacatgacaaaatgatttcaaatatgtaaaacaaaactcatggaataaaaggagaagagataaattcaaaacagtagtgacaaattaaaagatcctttctcatta

SEQ ID NO: 329579 - DNA, 545 bp, Homo sapiens
taacgacgttactgtatttcttacaaacagaggtatataaacgtttttgttttacaggttggaaaactgagattaaaaatcccttactttttgcctgcatcactctatctcatcytgcacaatacttgagccatctccatatgaaatctcggcaataaatgacattgttgaccatgccctatttccctaaactctctccaaaaacatttatgaagttagttatatacaagtgaggttggtctttttcaatatcaggactattaagatatcaggacagttaggagataggtaactaaatgagatcaacaagggattaatatgtaggctataccagaaacacctggatattgataagaaaatgatatcaataccaacgggagaaagtgagcaaaggatataaacaggcaatttttggaggagaaaatttttgtaagtctaacaggcatataaatacttcaattcattagtagtagaagaattatacaccacctctctccaaattcttacacaggtctacaaataactatgtacatggatattctttg

SEQ ID NO: 329580 - DNA, 545 bp, Homo sapiens
taacgacgttactgtatttcttacaaacagaggtatataaacgtttttgttttacaggttggaaaactgagattaaaaatcccttactttttgcctgcatcactctatctcatcttgcacaatacttgagccatctccatatgaaatctcggcaataaatgacattgttgaccatgccctatttccctaaactctctccaaaaacatttatgaagttagttatatacaagtgaggttgrtctttttcaatatcaggactattaagatatcaggacagttaggagataggtaactaaatgagatcaacaagggattaatatgtaggctataccagaaacacctggatattgataagaaaatgatatcaataccaacgggagaaagtgagcaaaggatataaacaggcaatttttggaggagaaaatttttgtaagtctaacaggcatataaatacttcaattcattagtagtagaagaattatacaccacctctctccaaattcttacacaggtctacaaataactatgtacatggatattctttg

SEQ ID NO: 329581 - DNA, 474 bp, Homo sapiens
caagctctattgtgaactgtacatttgagggatctaggttgtgtgctccttaagaaaatctcatgcctgatgatctctcactgtctcccattatccccagatgggacaatctagtcgcaggaaaacaagcttagggctcccaatgatsctacattatggttagttgtataattatttttttacattacaatgtaatagtaatagaaataaagtgcacaataaatgtaatgcacttgaatctccctgaaaccatctacccacctgcagtctgtggaaaaacttgttttccacaaaactggtccctggtgccaaaaagattgtggactgctgatctctgtgaccttcagtacgagagtagaagcatatctttgaggacaatgcctcaagtaaaataatggattataagcatatggcaacagaactggacctaaaaatcagacatgcaataccacctacataacttaagaatatatg

SEQ ID NO: 329582 - DNA, 473 bp, Homo sapiens
ggctttgctgcaagcataccaactcattctattattctaaatattatgacattctttcctcacttgtaaaattggaagagattttttggggaagaaataagtgagtaattgtcttggatctttggaaacaattgtgaattatactgaaggcagctgtggtaatgtaaaatttttggacacttaagatgagccgtttcttgtgcagatcccatttactgaaagcatctgatcacacatccaaaaactctcccggctccaagtatctttgccaccatggtgatgttgaaagawatctagtgttctagactcactaaaaagtgaattcaatagtgatgattcagtgaatgttatggagtgcaatacagatccttgctttcaggaccaggacactcattatcccaggttacaggcgttggttgccaatagctctgagtttctctctgggaagtcccctcaggtacaggaagccacct

SEQ ID NO: 329583 - DNA, 473 bp, Homo sapiens
ggctttgctgcaagcataccaactcattctattattctaaatattatgacattctttcctcacttgtaaaattggaagagattttttggggaagaaataagtgagtaattgtcttggatctttggaaacaattgtgaattatactgaaggcagctgtggtaatgtaaaatttttggacacttaagatgagccgtttcttgtgcagatcccatttactgaaagcatctgatcacacatccaaaaactctcccggctccaagtatctttgccaccatggtgatgttgaaagaaatctagtgttctagactcactaaaaagtgaattcaatagtgatgattcagtgaatgttatggagtgcaatacagatccttgctttcaggaccaggacactcattatcccaggttacaggcgttggttgccaatagctctgagtttctctctgggaaktcccctcaggtacaggaagccacct

SEQ ID NO: 329584 - DNA, 416 bp, Homo sapiens
tttgattctgttgcagttccacttgtccctctccctaatactgyagtttttccatcatttactggtgttgttcccaagagctctctcccacaaaaatctcctgcatacaaatctttatcttagagtatctctcacagggaacctatcctctgacagatgaagtcaggagcgactccaggaaatagattataaagtgaaagtctgggagctgtatctccctctggccaacttgtaatgaggaccccatcatagaaggtgagcagagtactcatagcccccagcgtgttatagtggttattgtgaaaactttcactaatggtgaactggaacaagatacctggtgaaaggaaatgcacaagtatgagagtgtcttaggcatttgaaagattctgaggaaatagtaatcataagggcgg

SEQ ID NO: 329585 - DNA, 572 bp, Homo sapiens
ctgcagtttttccatcatttactggtgttgttcccaagagctctctcccacaaaaatctcctgcatacaaatctttatcttagagtatctctcacagggaacctatcctctgacagatgaagtcaggagcgactccaggaaatagattataaagtgaaagtctgggagctgtatctccctctggccaacttgtaatgaggaccccatcatagaaggtgagcagagtactcatagcccccagcgtgttatagtggttattgtgaaaactttcactaatggtgaactggaacaagatacctggtgaaargaaatgcacaagtatgagagtgtcttaggcatttgaaagattctgaggaaatagtaatcataagggcggtggaatcaatcagacaaccttcgctggctgctactgagtcattgaagaaatactttaaaatgctgatgataattaacaattaaatattagctctgaaagctgaagagcttttttggtagcagaaaagagactcaattcttggaacttgaagggaagaaaagaatgatgtaagactcagacagttccagagaaagtt

SEQ ID NO: 329586 - DNA, 572 bp, Homo sapiens
ctgcagtttttccatcatttactggtgttgttcccaagagctctctcccacaaaaatctcctgcatacaaatctttatcttagagtatctctcacagggaacctatcctctgacagatgaagtcaggagcgactccaggaaatagattataaagtgaaagtctgggagctgtatctccctctggccaacttgtaatgaggaccccatcatagaaggtgagcagagtactcatagcccccagcgtgttatagtggttattgtgaaaactttcactaatggtgaactggaacaagatacctggtgaaaggaaatgcacaagtatgagagtgtcttaggcatttgaaagattctgaggaaatagtaatcataagggcrgtggaatcaatcagacaaccttcgctggctgctactgagtcattgaagaaatactttaaaatgctgatgataattaacaattaaatattagctctgaaagctgaagagcttttttggtagcagaaaagagactcaattcttggaacttgaagggaagaaaagaatgatgtaagactcagacagttccagagaaagtt

SEQ ID NO: 329587 - DNA, 566 bp, Homo sapiens
ggatatgttactctgcaagaatggaatgccattccctacaaagcactacacactctaaatcaggaatcaacaaactacagtccaaggacctgccacctttgttgtaaataatgttttaatagaacatggccactttccttcatttacatattgcctatggctgctttcacagtaaagcagcagaattaagagttgcaacaaagatcatattgcctgcaaagcccaaactatttactgtttggccttttacaaaaaaaaaaaatatgctgacacctgctctaagtcaatgactatcatatggtgcagggttccccgtaggttaaatacattggttcttgaaccaaattgtggaaatcwgaatatccccacatatcatcacctccaatggtccacatatgtgctttccagcccagaaactttatgttttttgaggctaggagttctagttaactgagaaggataatgcttcctttacagaacacagtgaaaaccccattaaactctaaggtacggtttccatccagttactttgggatctccatgcaaagaggtcagcacaaagggta

SEQ ID NO: 329588 - DNA, 611 bp, Homo sapiens
cctggaccagcggaagtgctgaagttgaaggaattctagaattggtagcagagaagaaagatgagcattagttgcaatcttgagacagcaatatggtggggtttgtggtttatcccactaaccttccttagtatagttccccagaaaaarataccaaccataattctggaaaagcggatgggatgaatttataatagaaagcaaatggatccaagaagtacaaggggtgaaatggaacttcatttcttttctcttctatatattccatatcagttcgtaccattcctctctcatgacattccagttacattgatctcctttataaaaacattccaagtctttcaaatttctaggtcattgggatttttcttccttctgccaggaatgctcttcttctggctgttatcatagtagtctcaatttcttcaagtctcaactcatatgtcatctcccctgaacgtattcaccaaaccgccctatctaaagtggccttttcaggttgttctgtatcatcaacatgcttactatgtaacatttaacacaatctgttaattatgttatttatttactgtgtcttccccattagaatgtaaattctgtaagggcaggga

SEQ ID NO: 329589 - DNA, 397 bp, Homo sapiens
actaaccaagaaagaagccattactttagccagatggcagtaaaatcacacctctttgagaaagaaccaactgcctttactttaaatggcacataaatcttaatgtttaaattatcctttcaacatagtgccaggaaaaatataggggaaatgactgaatgtatcagaaatagtcataaatcccttagtgtagaaaggtttgaagctttcaacaatggaaaggatatttcaggctgttacacatcttgcttcagactgctgattgaaagacaatgctttctcagaraaagtagatttgaggagttttaggtagtattgtcaagaatttctgataccaaattgatttgggaaccttgccaaagcagcattttcctaggatataaacttgtagtctcct

SEQ ID NO: 329590 - DNA, 393 bp, Homo sapiens
gaatgtatcagaaatagtcataaatcccttagtgtagaaaggtttgaagctttcaacaatggaaaggatatttcaggctgttacacatcttgcttcagactgctgattgaaagacaatgctttctcagagaaagtagatttgaggagttttaggtagtaytgtcaagaatttctgataccaaattgatttgggaaccttgccaaagcagcattttcctaggatataaacttgtagtctcctatttgtaatcatggatatatatttgctccataaatgtacatgtgttggatgctttcttgtaatgatgattatccactcccaaatagcatcctgttttgttcttagagtgattcctttttacctgttggacttatttagcctaaacaactgta

SEQ ID NO: 329591 - DNA, 631 bp, Homo sapiens
gactttgttgtctgttatcactgttgtagtagcagatatcagaaaaggagagatggcgactgattgttaactgtgttgcttagatacaaaagtagaataaaacacaccaaagaagcttccattttatttctaaaaagtacatagagagctgtgggtgaaagaacttttgttatttaagtcataagctttatcacttgttctgcagaaagactacttaaattaacttcagtagcagtgaacaaagggtttattgaattttacattgagaaataaaattaaaaattataaaaatatacttattaaaccaataattaggttattaaatgaaatatggttatgcttgcaactacatgccaataataggaagaaacaaaatataaatcaagatctctcttttttttgtggtgaaatcatacaaaattaattagccctatctctaaatacaatcacattgagggttaggtyatcaacatatgaatcgggagggacacaactcagtcgatggcaacatgtgctcatatcacagctccattgcttccttcctgtttgaatttggacaagttataaacatctctaagcctcaatttgaaaatctataaaatatgggtaattctactactcaaaacacagg

SEQ ID NO: 329592 - DNA, 582 bp, Homo sapiens
ctgctctagaaatgaagcaaagcaaatactgtcctctctggagaacttgccactgtctgaacaacatggcttttttgccatctaggaccagatgtcttagaagatcggtgctatgaaaatcattcctaaattcacacacacacacgcacacacaaaagaaaaaaaaaacrgaaaaatataaactccaggagatgaaatgtattcaatgaacatctgaatgtcaaccgtattcatccatgatagctttttcttctaactcagagcagatgccaatcatattctacgaggtcatgtgacatgtctcaacacaagagatataataaaatgtgtttttaaaacacctaaataagaaagtgattttcctgtaaaaggaaaagaaaaacatattcttccatttcctgtaaaaggaaaagaaaaacatattggatacaagagagtgtttctttctattcccctctcctgcacttccttttgcagctccattgaatttttttgcctgctaggagctagatttgtggaggtcatatagatttcagcaagcagttgtgtagagccatcagtctctgccctggttggagaatt

SEQ ID NO: 329593 - DNA, 539 bp, Homo sapiens
ccacaagtacatggagatttttttcttgttggattacagatctctttggcaatagtaaacttgggaacacatcaggagatcaaggctttttcatatcttctccccaagtataggaagggaatacttatgtaaatggataaggaggattatatttcccaagggattcattcctacctgccaataaacagtcctggttttctcagggacagtctgcttgatagttacagcataacatactagcttcatatagttattgatttaaacataggtggttcctaggagatcttacttgtttatgggttctactccaaggggaaaaagagccagtgcacyagcaggattgctctttataatatgcaacttagagcaagcaatgccacttgacaagggatgctttttgtgttattaggtcacatttctgcaatggagtttattccaggagtgttattcaaaatatgtaacaatcataatggcagaggcacatcaatcaaaagaagtgcctaaccaataagaatggtcagcccccatccccaagaaaa

SEQ ID NO: 329594 - DNA, 556 bp, Homo sapiens
ggtttctcaccttgttccccagatagtctcattaaagattaactatctcwtatatatatatatatatatatatatatatatatatatataccacttggacatatctcatactaattttcctttatcagtatgtgggtatattagtctgttcttgcactgctataaagaaatacctgagactgggtaatttataaagatacgaggtttaattggttcatgattccccaggctgtacaggaagcatggctggagaagactgaaaaaacttactttaatggtggaaggcaaaaaggaagcatgcgcatctcacatggtcagagcaaaaggaagagagagaagggggaggtgctacacacttttaaacatccagatcttatgagaactcactcactatcacaagaacagtaagggggaaatccacccccataatccaatcacctcccaccaagcccatcctccaacactggggattacaatttgacatgagatttgggcggggacacagacccaaaccacatcagtaggtatagcctcagcttaggacgtgacttcaatt

SEQ ID NO: 329595 - DNA, 602 bp, Homo sapiens
gtaaacaatcatttttcattcctcttggttacaaatataactggataaactataaagcaatataagttacattaatacattttctccaagtaattttacagccctatttttgcatttttacctgaagctaagaaaattcaaattttcaggtgaggcacagtggctcacacctgtaatcccagcactgtgagaggctgaggcaggaggatcacttgagcctagrggtttaagaccagcctggacaacatagtaagactctgtttctacagaaaaaaaaaatagccaggcatggtggcccacatctgtagtcttacatacttgagaggctgaggtgggaggattccttgaacacaggagttcaaggctgcagtgagctgtaattatgccactgcactgtgtctctgaaaaatttaaaaaaatattcagcaatgaagattagaaagagaaggggtttgagggccagccaaacttggattagtcccatttttgctgtgaaaaggtgattgaataaaaacattttatgtctttaatccacagtttactcattaaaaaatgaggataaagacaactgctttttttgtgaggttatatgcaaacaatag

SEQ ID NO: 329596 - DNA, 611 bp, Homo sapiens
aatttttgggaagaatggaatgtggtggatgtatttagctaacttttaaaagttaattcataattaaaagcagttgtgatgagctttaatactggtatttgtttgtggattaactttttttttttcacttctaaccaagtagcccaaataagtgttgtaagtatatatatttgtaccaaacacagcctcatgcccatcctgtatgctaggttttatttttgttatgtccatttattcagtcttacaaaccaaagaacaaggataaataccacatgtatgcccattcttcccttggctatgctacaaactacttgatcactccagaaacagatcaagcataggtttaaagcggatgtccttctctttgctaagattttttttcatggcaaacatcacttggatactttgtaagaagtttacattaatatcatcttgattaacaggatcataacctatgtttgttcaccttttgtgtgcatagaaatgagagacttggaggactacwactgagtaatttacagtctcatatcagaaagaaggcaaatatacaggtaacatgtcttagcagttcccccacacacattcatttaaatttcttattcacttatgct

SEQ ID NO: 329597 - DNA, 598 bp, Homo sapiens
atctcagctgacagagttggatagagactacacagctgcattctcactgatgccagaactgctgtacaccacctagaaaatggccttgcaaccccttacccatacataggggaaggtctttttatagtraaactaccctttaaagtttggaagaggtgactactctacaaaatgtgcagacatcaatgtaaggcagcaagaaacatgaaaaaccgagatataaaacctcaaaataatacaataatattcaaagagctgattccaaagaaatggggtttaaaaattgactgacaaataattcaaaataattgttttaaggaagtttagtgaacttcaagaaaatacagaaaaacaactcaatggaatcaggaaagcaataaataaccaaaaatataactttaacagagattgaaattatacaaaaaatcaaacaaaaattctggagctgaaaattacaattaatgaaataaaaatacaataggattaatagccaaattgatgcaacagaacaaagaatctgtgaactcaaagacaagttatttgacgatatacagttgaaagagaaaaaaagaaaaaaaaagaaaaagaataaggaaag

SEQ ID NO: 329598 - DNA, 616 bp, Homo sapiens
agagattgaaattatacaaaaaatcaaacaaaaattctggagctgaaaattacaattaatgaaataaaaatacaataggattaatagccaaattgatgcaacagaacaaagaatctgtgaactcaaagacaagttatttgacgatatasagttgaaagagaaaaaaagaaaaaaaaagaaaaagaataaggaaagcttacatgatttatatatttaatttaaaaaactgaatttttgagttacaggttcaagaagaaagggacaaaggagtaggaagcttatttaaagaaataatagcataaaaatttccaaatctgggaaaatatatcaatatcaaggtactaaaagtcaaatgtttccaataactttcaatccaaacaaaactatgctaaaatacgttataaccaaactgtcaaaaatcagagacaaagagaggatcctgaaagcaacaagataaataaagcaaatcacatgcaaggaagttttagtaaagctagccactggtttctcaggaaaaaacaaaacaaaacaaacaaaaaaaacttataggccagagagagtggaatgatatagtcaaagtgctaactgcatcttttgagaataaagaagtgataaa

SEQ ID NO: 329599 - DNA, 459 bp, Homo sapiens
gtacttctctgtggttcctctgagggcatggygcaatgagtgtgagctccatgaaggccagcaagagtgattgtctgtttatgacattttggaacatttgaaatagttccttatgtttatgaactatgcctataaatatcaccaccaaaataaagatagcaccaatcaaagttttaaaagcacaggtcaactcatgatactttatctcacaaaggaaattagaaagcataatttaaatggttaagagatcaacttatcactaatgagtgttagaaaccaatgcacagaggcagacttcctttttgaagcagtttgctacattgcaaagagtgtgccaataagtccaggttgatatatatatacctttaaagtaagcagggtcaaatggggcatgaatgaaacagttctaatcattattaccacctaaaaaaaaatcacaaacatattgttgtatataat

SEQ ID NO: 329600 - DNA, 585 bp, Homo sapiens
ttgctacattgcaaagagtgtgccaataagtccaggttgatatatatatacctttaaagtaagcagggtcaaatggggcatgaatgaaacagttctaatcattattaccacctaaaaaaaaatcacaaacatattgttgtatataatgataaactagtattttagaaactcttattcaaattaaattacatcaagttgcaattaagtagctcatattttcttgaaattgggtggatttcatttcaaaaagtgtgtttacactttttacatcattatgttttmttctaaactaggtgaaaatattaattctgtttttgtggcgtgctgggggttgggagatggtgtttgaagcagtctagcatgcatgcaaacaatgcggggttttcctgcagagaattttaaaacagcaataaaaccaactaaaagtttatctgctctttgctaacaccatgtgagtttttgagtttctgcttcttagtataacagactaacattccaccaaatgacctccctccctattaaaaacaacaacaactatgaaacctgaacataatacaaaagcaaataccttaaagtactggggag

SEQ ID NO: 329601 - DNA, 585 bp, Homo sapiens
ttgctacattgcaaagagtgtgccaataagtccaggttgatatatatatacctttaaagtaagcagggtcaaatggggcatgaatgaaacagttctaatcattattaccacctaaaaaaaaatcacaaacatattgttgtatataatgataaactagtattttagaaactcttattcaaattaaattacatcaagttgcaattaagtagctcatattttcttgaaattgggtggatttcatttcaaaaagtgtgtttacactttttacatcattatgttttcttctaaactaggtgaaaatattaattctgtttttgtggcgtgctgggggttgggagatggtgtttgaagcagtctagcatgcatgcaaacaatgcggrgttttcctgcagagaattttaaaacagcaataaaaccaactaaaagtttatctgctctttgctaacaccatgtgagtttttgagtttctgcttcttagtataacagactaacattccaccaaatgacctccctccctattaaaaacaacaacaactatgaaacctgaacataatacaaaagcaaataccttaaagtactggggag

SEQ ID NO: 329602 - DNA, 522 bp, Homo sapiens
tcatgttcacttggaggaaaggaaactgaaagctgtagaaggaaattctcatctctttggctttgggcctgggactaagggcaattcccccaaaaaatgtagtgcagagcatacaatctttctggtgctgagaatcagaaaagtgaataggaaactataaagggggaatcctagaagagatagagccagacaattgtttccacaaaagccctctatccacattgctggttgatctccacccatgcatgggaccaactcaaggcagctcarccaaagacaaaaactgaaatgagatgagagctgctaccatgaagctgccagagtatgaatagagaagcaggcacactttggtagagagagcatacttgcctaagaagaaaagataggcaactcaacacttgtgttcaaagagaaaaaggtttgcttctctggtctggagacttattataatagagaagtgaagagggcgcaaatactgaagagaatgagggaatcccaggagggaaagaaccagagaagggc

SEQ ID NO: 329603 - DNA, 601 bp, Homo sapiens
gttattttggcccaaaacccctgaaaaaaaggtcaagacaatgtattcatcataggctgtttgtaagcataataattattgttataaaaataattcctaaggaacagatgatacaaattaaaacccgaagtagctatatgaggtagtaacagattatactgaaaactccatattctcctaagaatactttcataggggcatgggtcattgcaacatgcagaaaccatctttaaaagtaagtagatgattcataaaagttttgttatctaggcatttcagcgtacatctctttccagtctcaaagaaaatctttgataacttgtacagggagattaaattgaaatgtactccttggacacctgggctttgcaggtatctctgccctggctggttaccaaaggtgatttcacaccataacataccaaggcaatttgtgtgtgtgcacgaatgtgtgtgtgtgtgtgtgtgwgagagagagagagagaaagagaaagtggaagatacagagggaaagaacgggagagagagagaatgcacatgaatgagtgactggaacgctgaagaggcagctccatagaactgtaatttgattgacaataga

SEQ ID NO: 329604 - DNA, 544 bp, Homo sapiens
aagctggaagccatcatcctcagcaaactaacacaggaacagaataccgaacactgcatgttctcactcataagtaggagttgaacaatgagaacacatggacacagtaaggggaacaacacacaacagggccagttagcaggtagggggcaaggggagggasagcattaagacaaatagcaaatgtatgtggggcttaaaacctagatgacgggttgacaggtccaacaaaccaccatggcacatatatacctatgtaacaaacctacacattctgcacttgtatctcagaacctaaagtaaaatttaaaaaaataataaatacagaagcagactaaaggcctatcacagtcagactgtttaaagccaatgatgaagaacaaatcttgaaagaaggttttaaaaaacaacgctttttatacaagggagcagcaatacaattgatggctgattcttaacagaaactataaggagaggataaaaaaagagtgaagttacatctttaaagtgccaaaggaaaaaaatattggtcaactcatattat

SEQ ID NO: 329605 - DNA, 601 bp, Homo sapiens
tgaaagaaggttttaaaaaacaacgctttttatacaagggagcagcaatacaattgatggctgattcttaacagaaactataaggagaggataaaaaaagagtgaagttacatctttaaagtgccaaaggaaaaaaatattggtcaactcatattatatatccaacaaarctataattcaagaatgaaggcaaaatatactttttcagacacaaaaaactaaaagaattcattgcctgcaaacctatattaaaagaaatagtaaatgaaattctttaggaggaagagaaataataccagatgcaaatttgaatcctctgaaaagaataaagactaataagggctggacacattggctcacgcctgtaatctcagcacttttggaggccaaggtgggaggatcacgaggtcaggagttccagaccagcctggccaacatggtgaaaccctgtcactaccaaaaatacaaaaatttgctggccgtgatggtgcacgcctgtaattccagctatatgggaggctgaggcaggagaatcatttgaacctgagaggcagaggtcacagggagccaagatcgcaccactgcactcattccagcctgg

SEQ ID NO: 329606 - DNA, 601 bp, Homo sapiens
tgaaagaaggttttaaaaaacaacgctttttatacaagggagcagcaatacaattgatggctgattcttaacagaaactataaggagaggataaaaaaagagtgaagttacatctttaaagtgccaaaggaaaaaaatattggtcaactcatattatatatccaacaaagstataattcaagaatgaaggcaaaatatactttttcagacacaaaaaactaaaagaattcattgcctgcaaacctatattaaaagaaatagtaaatgaaattctttaggaggaagagaaataataccagatgcaaatttgaatcctctgaaaagaataaagactaataagggctggacacattggctcacgcctgtaatctcagcacttttggaggccaaggtgggaggatcacgaggtcaggagttccagaccagcctggccaacatggtgaaaccctgtcactaccaaaaatacaaaaatttgctggccgtgatggtgcacgcctgtaattccagctatatgggaggctgaggcaggagaatcatttgaacctgagaggcagaggtcacagggagccaagatcgcaccactgcactcattccagcctgg

SEQ ID NO: 329607 - DNA, 537 bp, Homo sapiens
acgctttttatacaagggagcagcaatacaattgatggctgattcttaacagaaactataaggagaggataaaaaaagagtgaagttacatctttaaagtgccaaaggaaaaaaatattggtcaactcatattatatatccaacaaagctataattcaagaatgaaggcaaaatatactttttcagacacaaaaaactaaaagaattcattgcctgcaaacctatattaaaagaaatagtaaatgaaattctttaggaggaagagaaataataccagatgcaaatttgaatcctctgaaaagaataaagactaataagggctggacacattggctcacgcctgtaatctcagcacttttggaggccaaggtgggaggatcacgaggtcaggagttccagaccagcctggccaacatggtgaaaccctgtcactaccaaaaatacaaaaatttgctggccrtgatggtgcacgcctgtaattccagctatatgggaggctgaggcaggagaatcatttgaacctgagaggcagaggtc

SEQ ID NO: 329608 - DNA, 539 bp, Homo sapiens
cgtgatggtgcacgcctgtaattccagctatatgggaggctgaggcaggagaatcatttgaacctgagaggcagaggtcacagggagccaagatcgcaccactgcactcattccagcctgggcaatagagtgagactctgtctcaaaaaaataaaaaataaagactaataaaaatggtaaatatcagaataaatgtgaatgactaacttttgtttacttttgtttgtcttaatttctttctacattgtttaagawtttaaaataaaattatacctttttcaacattactgtgaacctaaaactgctcttaaaaaaaacattgccttctgagatttataacatgtgtaggtgggaagagtacttgaggccaagaattcaaatctagcctgggcaacatagtgaaaccctgccttaaaaaaaagatcctgacttaatgtttggtaatacaatccaccaaaatattaattacattatatattaatgaagtaaagactctaattagaagacagagtttgtcaaaaactactaagaaaaaaaca

SEQ ID NO: 329609 - DNA, 539 bp, Homo sapiens
cgtgatggtgcacgcctgtaattccagctatatgggaggctgaggcaggagaatcatttgaacctgagaggcagaggtcacagggagccaagatcgcaccactgcactcattccagcctgggcaatagagtgagactctgtctcaaaaaaataaaaaataaagactaataaaaatggtaaatatcagaataaatgtgaatgactaacttttgtttacttttgtttgtcttaatttctttctacattgtttaagaatttaaaataaaattatacctttttcaacattactgtgaacctaaaactgctcttaaaaaaaacattgccttctgagatttataacatgtgtaggtgggaagagtacttgaggccargaattcaaatctagcctgggcaacatagtgaaaccctgccttaaaaaaaagatcctgacttaatgtttggtaatacaatccaccaaaatattaattacattatatattaatgaagtaaagactctaattagaagacagagtttgtcaaaaactactaagaaaaaaaca

SEQ ID NO: 329610 - DNA, 609 bp, Homo sapiens
ctgatcacttctctaaaggaaagttctagaagtctgcacactctgcagtcactttcaattctatccaagtgtacacttagaactctagaaaacactacggacagtcttcagccaggtaaagcctaaaaccagcaaagaacagggagagtgagggattgtgagagaaatttatatttgtcttatttaaccttcaagggacagaatttattgtatgaaactcaggagcacctgaagacatagtttacctagaagactagtggggtattaagcattttggaatctctattttcagaataccacctggctaattaactccaacactactaccacttcttacccatgaatttaggcattttctmgagcagaggcaagatttctgaacataagtgttttctcaagaccttgctgttaattttggagagttataaatgtgtttagggtccagttaatttctgactttaccaaaaatttctgataatgaatgattaaactatgctatgtgatttcaactttttaggggaaatggctatataaatgtactggaactattaaaatatttctgacagcaaacaatcactattttgggttcaagcaatactactataccat

SEQ ID NO: 329611 - DNA, 609 bp, Homo sapiens
ctgatcacttctctaaaggaaagttctagaagtctgcacactctgcagtcactttcaattctatccaagtgtacacttagaactctagaaaacactacggacagtcttcagccaggtaaagcctaaaaccagcaaagaacagggagagtgagggattgtgagagaaatttatatttgtcttatttaaccttcaagggacagaatttattgtatgaaactcaggagcacctgaagacatagtttacctagaagactagtggggtattaagcattttggaatctctattttcagaataccacctggctaattaactccaacactactaccacttcttacccatgaatttaggcattttctcgagcagaggcaagatttctgaacataagtgttttctcaagaccttgctgttaattttggagagttataaatgtgtttagggtccagttaatttctgactttaccaaaaatttctgataatgaatgattaaactatgctatgtgatttcaactttttaggggaaatggctatataaatgtactggaactwttaaaatatttctgacagcaaacaatcactattttgggttcaagcaatactactataccat

SEQ ID NO: 329612 - DNA, 609 bp, Homo sapiens
ctgatcacttctctaaaggaaagttctagaagtctgcacactctgcagtcactttcaattctatccaagtgtacacttagaactctagaaaacactacggacagtcttcagccaggtaaagcctaaaaccagcaaagaacagggagagtgagggattgtgagagaaatttatatttgtcttatttaaccttcaagggacagaatttattgtatgaaactcaggagcacctgaagacatagtttacctagaagactagtggggtattaagcattttggaatctctattttcagaataccacctggctaattaactccaacactactaccacttcttacccatgaatttaggcattttctcgagcagaggcaagatttctgaacataagtgttttctcaagaccttgctgttaattttggagagttataaatgtgtttagggtccagttaatttctgactttaccaaaaatttctgataatgaatgattaaactatgctatgtgatttcaactttttaggggaaatggctatataaatgtactggaactattaaaatatttctgacrgcaaacaatcactattttgggttcaagcaatactactataccat

SEQ ID NO: 329613 - DNA, 470 bp, Homo sapiens
aatggctatataaatgtactggaactattaaaatatttctgacagcaaacaatcactattttgggttcaagcaatactactataccattaatacatttactctacaacctataagtcaaaataggtgtgttaattgtccaaggattccacctagagtaagtagtaggtgctggtagatggtttcgccctttctatggttaaaattatagcattacagttatcattactaaagtaaaacatttttatttacccagtgtagaacrtatttctcatctctaatatctgaattcatgattgtcaaagaaaagttacccatctaatatttgaccatgctgaaattccttgaaactaaaaataggcagtgcctttggtataaaattgatgtatgaggttccccaaacaagatgtttatgcatgggcctttgtacttactataatttcaaattgtaaccacattgttctgatgatgg

SEQ ID NO: 329614 - DNA, 470 bp, Homo sapiens
aatggctatataaatgtactggaactattaaaatatttctgacagcaaacaatcactattttgggttcaagcaatactactataccattaatacatttactctacaacctataagtcaaaataggtgtgttaattgtccaaggattccacctagagtaagtagtaggtgctggtagatggtttcgccctttctatggttaaaattatagcattacagttatcattactaaagtaaaacatttttatttacccagtgtagaacgtatttctcatctctaatatctgaattcatgattgtcaaagaaaagttacccatctaatatttgaccatgctgaaattccttgaaactaaaaataggcagtgcctttggtataaaattgatgtatgaggttccccaaacaagatgtttatgcatgggcctttgtasttactataatttcaaattgtaaccacattgttctgatgatgg

SEQ ID NO: 329615 - DNA, 470 bp, Homo sapiens
aatggctatataaatgtactggaactattaaaatatttctgacagcaaacaatcactattttgggttcaagcaatactactataccattaatacatttactctacaacctataagtcaaaataggtgtgttaattgtccaaggattccacctagagtaagtagtaggtgctggtagatggtttcgccctttctatggttaaaattatagcattacagttatcattactaaagtaaaacatttttatttacccagtgtagaacgtatttctcatctctaatatctgaattcatgattgtcaaagaaaagttacccatctaatatttgaccatgctgaaattccttgaaactaaaaataggcagtgcctttggtataaaattgatgtatgaggttccccaaacaagatgtttatgcatgggcctttgtacttactrtaatttcaaattgtaaccacattgttctgatgatgg

SEQ ID NO: 329616 - DNA, 625 bp, Homo sapiens
ttttaattgtttgggatggactgataggtagtgcccctcaccacccctcctttaaatcattatatttatgaattttttctgaggaattgatacagaatggctgggctcctggctaaaccctacccttaagcccagaaccgtggctctaagtgaaaacagctggccttgtttttctgcccaaatgtcacctttttggcctgccgcacccctatcctgtgcccataaaaagacctcagctagcagagccacacaagcagctgatgcaagcggtcagggatacaagttgctgagcgttggggatacaagcagctgagtggcaagcagagaagcagcaactaaagtcaaagactatgggtaaacgtggctaacttcagacagtgcagcttcagggaaagaccacgttcttcccgcaccatcccctttccacctctggtaacacaggtctcctaaggtgagctcagggagttcagaaacctcccgtggagcataaaggcaaaagctcacttaatcttgattttcattactaatacagaccacgaaagtgagscctcacaatccttctgacttttgggttttaagcaggaggtgcccccatcccactgagagccatcacccaataaaatcc

SEQ ID NO: 329617 - DNA, 593 bp, Homo sapiens
ttctcatgagagctgatggttttataaggggctttccccgcttttgcacattcttctccttctggtcatcatgtgaagaaggatatttttgcttccacttccaccatgattctaagtttcctgagggcttgccaaccatgcagaactccatragtcaattaaacctcttttctttataaattacccagtgttgggtgtatccttatagcagcctgagaacaaattaatacagtccacaaagttcagtacctgaggaaaaaaagcaatgttaagtataaacattgttgtgaggttctacaagaaagaagacaggttggactaaaactatcctcatgagggatgataccagcattttttaaaattttaaatcaccttgattgttataatgaagctaagttctaaatattggttatcttttaaaggagccttttattttctgtgtatcttttcattgaaattagtttttttaaaattattggttatctcagccttagctcactttgagtaagtcctaattttattttacataggttaagttgaaaccatgtctaaccaatttcatttgtctcaccaattccatttgtctcattctt

SEQ ID NO: 329618 - DNA, 593 bp, Homo sapiens
ttctcatgagagctgatggttttataaggggctttccccgcttttgcacattcttctccttctggtcatcatgtgaagaaggatatttttgcttccacttccaccatgattctaagtttcctgagggcttgccaaccatgcagaactccataagtcaattaaacctcttttctttataaattacccagtgttgggtgtatccttatagcagcctgagaacaaattaatacagtccacaaagttcagtacctgaggaaaaaaagcaatgttaagtataaacattgttgtgaggttctacaasaaagaagacaggttggactaaaactatcctcatgagggatgataccagcattttttaaaattttaaatcaccttgattgttataatgaagctaagttctaaatattggttatcttttaaaggagccttttattttctgtgtatcttttcattgaaattagtttttttaaaattattggttatctcagccttagctcactttgagtaagtcctaattttattttacataggttaagttgaaaccatgtctaaccaatttcatttgtctcaccaattccatttgtctcattctt

SEQ ID NO: 329619 - DNA, 593 bp, Homo sapiens
ttctcatgagagctgatggttttataaggggctttccccgcttttgcacattcttctccttctggtcatcatgtgaagaaggatatttttgcttccacttccaccatgattctaagtttcctgagggcttgccaaccatgcagaactccataagtcaattaaacctcttttctttataaattacccagtgttgggtgtatccttatagcagcctgagaacaaattaatacagtccacaaagttcagtacctgaggaaaaaaagcaatgttaagtataaacattgttgtgaggttctacaagaaagaagacaggttggactaaaactrtcctcatgagggatgataccagcattttttaaaattttaaatcaccttgattgttataatgaagctaagttctaaatattggttatcttttaaaggagccttttattttctgtgtatcttttcattgaaattagtttttttaaaattattggttatctcagccttagctcactttgagtaagtcctaattttattttacataggttaagttgaaaccatgtctaaccaatttcatttgtctcaccaattccatttgtctcattctt

SEQ ID NO: 329620 - DNA, 593 bp, Homo sapiens
ttctcatgagagctgatggttttataaggggctttccccgcttttgcacattcttctccttctggtcatcatgtgaagaaggatatttttgcttccacttccaccatgattctaagtttcctgagggcttgccaaccatgcagaactccataagtcaattaaacctcttttctttataaattacccagtgttgggtgtatccttatagcagcctgagaacaaattaatacagtccacaaagttcagtacctgaggaaaaaaagcaatgttaagtataaacattgttgtgaggttctacaagaaagaagacaggttggactaaaactatcctcatgagggatgataccagcattttttaaaattttaaatcaccttgattgttataatgaagctaagttytaaatattggttatcttttaaaggagccttttattttctgtgtatcttttcattgaaattagtttttttaaaattattggttatctcagccttagctcactttgagtaagtcctaattttattttacataggttaagttgaaaccatgtctaaccaatttcatttgtctcaccaattccatttgtctcattctt

SEQ ID NO: 329621 - DNA, 572 bp, Homo sapiens
tcagtatcactaatcatcagggagatgaaaatcagaaccacaatgagatggcatcttaccccagttaaaatgggtattatgaaaaaggacaaaaatgacaaatgctggcatgggtgcagaggagaggaaactcttatacattgttggtgggaatgtaagttagcacagccattatggaaaaaattatggaggctcctcaaaaagtaaaaatagcactgccatatgatctagtaatcccactctatttatatatccaaggaaaaagaaatcagtatgttgaagacatatctacactttwaagtttattgcagtattattcacaaaaatcatttattgcagcactgctcacaataatcaaggtggatacataaagaaaatgtagtgtgtacatacacaagtggagaaaatggcaaaattaacaagtttatagtgataaatgctatgtggagaaaatggcagagagaatactattcagccataaaaaaagaaggaaatcctgacgtttgcaacaatatagatgaacctggagaatattgtgctaagtgaaataagccagacgcagacagacaaat

SEQ ID NO: 329622 - DNA, 572 bp, Homo sapiens
tcagtatcactaatcatcagggagatgaaaatcagaaccacaatgagatggcatcttaccccagttaaaatgggtattatgaaaaaggacaaaaatgacaaatgctggcatgggtgcagaggagaggaaactcttatacattgttggtgggaatgtaagttagcacagccattatggaaaaaattatggaggctcctcaaaaagtaaaaatagcactgccatatgatctagtaatcccactctatttatatatccaaggaaaaagaaatcagtatgttgaagacatatctacacttttaagtttattgcagtattattcacaaaaatcatttattgcagcactgctcacaataatcaaggtggatacataaagaaaatgtagtgtgtacatacacaagtggagaaaatggcaaaattaacaagtttatagtgataaatgctatgtggagaaaatggcagagagaatactattcagccataaaaaaagaaggaaatcctgacgtttgcaacaatatagatgaacstggagaatattgtgctaagtgaaataagccagacgcagacagacaaat

SEQ ID NO: 329623 - DNA, 572 bp, Homo sapiens
tcagtatcactaatcatcagggagatgaaaatcagaaccacaatgagatggcatcttaccccagttaaaatgggtattatgaaaaaggacaaaaatgacaaatgctggcatgggtgcagaggagaggaaactcttatacattgttggtgggaatgtaagttagcacagccattatggaaaaaattatggaggctcctcaaaaagtaaaaatagcactgccatatgatctagtaatcccactctatttatatatccaaggaaaaagaaatcagtatgttgaagacatatctacacttttaagtttattgcagtattattcacaaaaatcatttattgcagcactgctcacaataatcaaggtggatacataaagaaaatgtagtgtgtacatacacaagtggagaaaatggcaaaattaacaagtttatagtgataaatgctatgtggagaaaatggcagagagaatactattcagccataaaaaaagaaggaaatcctgacgtttgcaacaatatagatgaacctggagaatattstgctaagtgaaataagccagacgcagacagacaaat

SEQ ID NO: 329624 - DNA, 499 bp, Homo sapiens
ttcccgcaaaggagaatcttaaactgcagtaaaatgtagtcttgcagttggtttgctgcatacattaaccatggctttcctttattattttttctgaagtttttgtctttatttttattattataaaaatgcattcttcatcaaatcgccaatttttaactcagtttcttaatcaacctcccctttggatgtaagtattcaagattattttcaaatttgcctgtagagttacacaagttcattctctcaagaccagccratcacattgcattttcttcaccatccattctaccactagagatttttaaaatctttacctacttgatacatgtaaaaatattaatttagtcaccaaatagtctaaactgtttaaaaaattttaaaatttctttctttcaattacaagtttgtggcctttgtgcatttttcaattaagatagctacctttctctgctatttttataattcttttacgttgattttggtatgcaaactttgt

SEQ ID NO: 329625 - DNA, 499 bp, Homo sapiens
ttcccgcaaaggagaatcttaaactgcagtaaaatgtagtcttgcagttggtttgctgcatacattaaccatggctttcctttattattttttctgaagtttttgtctttatttttattattataaaaatgcattcttcatcaaatcgccaatttttaactcagtttcttaatcaacctcccctttggatgtaagtattcaagattattttcaaatttgcctgtagagttacacaagttcattctctcaagaccagccaatcacattgcattttcttcaccatccattctaccactagagatttttaaaatctttacctacttgatacatgtaaaaatattaatttagtcaccaaatwgtctaaactgtttaaaaaattttaaaatttctttctttcaattacaagtttgtggcctttgtgcatttttcaattaagatagctacctttctctgctatttttataattcttttacgttgattttggtatgcaaactttgt

SEQ ID NO: 329626 - DNA, 558 bp, Homo sapiens
ggttactgcaaccaagcaaatgaacatattcattatgtcacataggtcttttttgcggttaagagcatgtaaaatctactctcatagcaaatgtaragtacacaatattattaactattgtcctcctcatgctatacattagatctctacatattcatttgacataactgcaactttttactcttcaacctatatttccttatttcccctactgtctccatatctgataaccacctttctactctgtttctatgtatttaaggtttttttagattctacatataagtgagatcatgctgtctttttctttcagtgcccggcttatttcacttagcataactcaccccaggttcattcatgtgttcacaaaacacagaatatccttctttttaaaggctggctaatatttcattgttcatatacaccataattttcttaagccttttatctatccatgcaaacttaggttgtttccatgtcttggctattgtgaataatgctgtgatgaccaagagagtgcaaatatctccaaaaggtgctgatttcatttcctttgtg

SEQ ID NO: 329627 - DNA, 459 bp, Homo sapiens
aaccccgattctactaaaaatacaaaatttgctgggtgtggtggtgcatacctgtaatcccagcccctcgagaggctgaggcaggagattcgcttgaacccaggaggtggaggttgtggcaagccaagatcgtgccattgtactctagcctgggcaacaagagcaagactttgtcaaaaaaaaaaaaaaaaatgaagtattctgaatttgactttgtacttacttttaccaaggagttttctacatttatgtttttacgataataattagcaacctttcatttatgattgaagaactccctttagcacttcttgtaaggcaggtctagtgataatcaactatctcagctattttttgtaaatctggaaaatacttcctttttccctcatatgaraaggacagctttgccaggtaaagtattcttgagtggcagtttttgctttcaacagtttgaatgta

SEQ ID NO: 329628 - DNA, 410 bp, Homo sapiens
aagtgaaaaaaaaagtattctccacagggtaaaatatcttgatatttttcgagaaaagtatgtcaaaatatttcagagtatgtgttactttttaatcattctgagtattatttwaaataatctatatctctatctatgtcctgtatgaattggtatatttgtaaaatgtgcataataacagtacctcctataggcttatttctagtattaaatgagttaacttatgaaaagctcttaaaacaatacttgtatatagacagtgcattagcagcagtataaacatttataaatacagcacatggagaatcagtatagcatggtataagctttagattcatattgcctgtttcagctcaggttttctgggaactggactcagagagagatttttaatagaggaagcttattgg

SEQ ID NO: 329629 - DNA, 410 bp, Homo sapiens
aagtgaaaaaaaaagtattctccacagggtaaaatatcttgatatttttcgagaaaagtatgtcaaaatatttcagagtatgtgttactttttaatcattctgagtattatttaaaataatctmtatctctatctatgtcctgtatgaattggtatatttgtaaaatgtgcataataacagtacctcctataggcttatttctagtattaaatgagttaacttatgaaaagctcttaaaacaatacttgtatatagacagtgcattagcagcagtataaacatttataaatacagcacatggagaatcagtatagcatggtataagctttagattcatattgcctgtttcagctcaggttttctgggaactggactcagagagagatttttaatagaggaagcttattgg

SEQ ID NO: 329630 - DNA, 504 bp, Homo sapiens
gtgttaagtaatttaaatcatgtcgtgtgtgtgtattctgtaatctttatagtgtgagttatcagtttcagacaaatttaggttaacatatgctactatgaaactggagtcctctaattctcttttgatttttatgagtttgatttacataccagaagctatcatattattttttcctccctgtttcttgttggctaaatctgatattctttgctccattgtttttctcctactggtttggaagttawatctgttttggaagtcatatctacttttctattgtgtattcttgttaaaccaccatagccaagtccatgtttttaagttttattagtctgtagaagtaattgagtgtatgtattcccgcaataaaaaggaagtcttagaactgatttttttaataattctgatacatttctgatttaaaaagatgcatcaatttctgtggttgacagaatacctccttaccttcttccatcccctaatgttcatatcataatccat

SEQ ID NO: 329631 - DNA, 504 bp, Homo sapiens
gtgttaagtaatttaaatcatgtcgtgtgtgtgtattctgtaatctttatagtgtgagttatcagtttcagacaaatttaggttaacatatgctactatgaaactggagtcctctaattctcttttgatttttatgagtttgatttacataccagaagctatcatattattttttcctccctgtttcttgttggctaaatctgatattctttgctccattgtttttctcctactggtttggaagttatatctgttttggaagtcatatctacttttctattgtgtattcttgttaaaccaccatagccaagtycatgtttttaagttttattagtctgtagaagtaattgagtgtatgtattcccgcaataaaaaggaagtcttagaactgatttttttaataattctgatacatttctgatttaaaaagatgcatcaatttctgtggttgacagaatacctccttaccttcttccatcccctaatgttcatatcataatccat

SEQ ID NO: 329632 - DNA, 519 bp, Homo sapiens
catgcctgtaatcccagcactttggaaggccaagggggacagaattgctttagctcaagaatttgaaactagcttgggcagcatggtgaaatcccatctctataaaaaaattttgaaaattagctgagcatggkggtatgcacctatagtcacagctactggggagactgaggtgggaggatcgcttgagcctgaaaggtcgaggctgcagtgagccatgatcacaccactgcactgcagcctgagtgatgtgagtgagaccctgtctcaaaaaaattttaaaaagcacatgttcaccattatcaaagtaaaattaaaggtcaaagttaggtacttatttgtttacctagtacccactaataaaaaccaataataaaagtgtaaactaaattgggccatgaaccatcagatccttttggacttcattggggaaaacaccaggatcagatccagtgatagtttaggtgtgaatgtagctaactcctccaaatttgaaaattaaggtagtaagattctttt

SEQ ID NO: 329633 - DNA, 621 bp, Homo sapiens
taggtacttatttgtttacctagtacccactaataaaaaccaataataaaagtgtaaactaaattgggccatgaaccatcagatccttttggacttcattggggaaaacaccaggatcagatccagtgatagtttaggtgtgaatgtagctaactcctccaaatttgaaaattaaggtagtaagattctttttactggttagtatcaaaattaattgctataaaatgttcagccatgatcaaggtttgtataacartaaaatatacaaatattttggtgattctatcaacttcctgacacatataatcaaatattgtctatgttatattattgcctgaaaaagtgtaaacaaaggtctgcttcctaagagtttggtcatagttactttaaatcatgagctggatattagtgagacataataatcttaatcagcaaatatctactgggtaccttcaatgtgcaagtcactctagtagacattagaggggaaaggcacatgaagcaccacttgcactaaaaggtttgatatccagatggagatatcacatgtgatgtgcccattgcttctgataactcacaatatcctcaaagtagagatcaaccaaaaacagaaaaaactat

SEQ ID NO: 329634 - DNA, 475 bp, Homo sapiens
ggagtttttatacaagacaattttatctttgtaaaaactactctcatatatagttctatcaatatgtactccaattggatattatactcttattaaaatatgtttagcaaaggaaaagaatatgctgtaccattaatattttatatctttaattgatagcattcttaaacttgcatccccagggtaagtgttcrtcaagagaatgagatgacaagcagtagactgggagaaatatttacaaaagacacatcagaaaaatgactgttatctaaaatatacaaagaactcttaaaaattaataataaaaacacaaacaacccaatttaaaaatgggccaaaaactttaatagacatgtcaccaaaaaaaatatacaaatggcaaataagaagataagaatgttccacactgtatgtcttcagggaaattaaaacaacaataagaccctactacacacctattagaatggccaacatc

SEQ ID NO: 329635 - DNA, 475 bp, Homo sapiens
ggagtttttatacaagacaattttatctttgtaaaaactactctcatatatagttctatcaatatgtactccaattggatattatactcttattaaaatatgtttagcaaaggaaaagaatatgctgtaccattaatattttatatctttaattgatagcattcttaaacttgcatccccagggtaagtgttcatcaagagaatgagatgacaagcagtagactgggagaaatatttacaaaagacacatcagawaaatgactgttatctaaaatatacaaagaactcttaaaaattaataataaaaacacaaacaacccaatttaaaaatgggccaaaaactttaatagacatgtcaccaaaaaaaatatacaaatggcaaataagaagataagaatgttccacactgtatgtcttcagggaaattaaaacaacaataagaccctactacacacctattagaatggccaacatc

SEQ ID NO: 329636 - DNA, 475 bp, Homo sapiens
ggagtttttatacaagacaattttatctttgtaaaaactactctcatatatagttctatcaatatgtactccaattggatattatactcttattaaaatatgtttagcaaaggaaaagaatatgctgtaccattaatattttatatctttaattgatagcattcttaaacttgcatccccagggtaagtgttcatcaagagaatgagatgacaagcagtagactgggagaaatatttacaaaagacacatcagaaaaatgactgttatctaaaatatacaaagaactcttaaaaattaataataaaaacacaaacaacccaatttaaaaatgggccaaaaactttaatagacatgtcaccaaamaaaatatacaaatggcaaataagaagataagaatgttccacactgtatgtcttcagggaaattaaaacaacaataagaccctactacacacctattagaatggccaacatc

SEQ ID NO: 329637 - DNA, 589 bp, Homo sapiens
gctagaatgtatcattcttagcaaactaatgccggaacagaaaaccaaataccatatgttctcacctataaattggagctaaatgataagaacttaygaacacaaagaaagaaacaacagacactagggtctacttgaggtggtagggcgggaggagggagaggagcagaaaagacgtttattgggcaccgggcttaatacctgggtgaagaaataatatgtacaaaaaaacccatgacacgtgtttacctgtgtaacataccttcacatgtacccccaaacctaaaataaaagttttttgaaaaactttaaaaacaaacaaaaaataccaccttgtacactgtaaatatatataattttagttgtcaattgtatcttaataaaactgaaaaaaatgcaagggataccatacaccatgattcttcaagactatgtaaagattcactcctctgagctctcctaatatccaaactgtcatctgtcattaaatttactatttaccttattgctttgtctgccacggtaacataaatatcttcacagggaatgtgtgatatgaatgttgtactccaaaacctagtacaaagtt

SEQ ID NO: 329638 - DNA, 580 bp, Homo sapiens
cgggcttaatacctgggtgaagaaataatatgtacaaaaaaacccatgacacgtgtttacctgtgtaacataccttcacatgtacccccaaacctaaaataaaagttttttgaaaaactttaaaaacaaacaaaaaataccaccttgtacactgtaaatatatataattttagttgtcaattgtatcttaataaaactgaaaaaaatgcaagggataccatacaccatgaytcttcaagactatgtaaagattcactcctctgagctctcctaatatccaaactgtcatctgtcattaaatttactatttaccttattgctttgtctgccacggtaacataaatatcttcacagggaatgtgtgatatgaatgttgtactccaaaacctagtacaaagtttggtacatagtaggcacaagaaaatgttggttgaaataatgcatgattctttgtaaaatttgttttcagtgctcacatttgactaactttgtacactgcctttctaatataacaagtgttattcccaaacaggaacccaatgattccagagacaaatcacctaatatgaatagcagcaaa

SEQ ID NO: 329639 - DNA, 580 bp, Homo sapiens
cgggcttaatacctgggtgaagaaataatatgtacaaaaaaacccatgacacgtgtttacctgtgtaacataccttcacatgtacccccaaacctaaaataaaagttttttgaaaaactttaaaaacaaacaaaaaataccaccttgtacactgtaaatatatataattttagttgtcaattgtatcttaataaaactgaaaaaaatgcaagggataccatacaccatgattcttcaagactatgtaaagattcactcctctgagctctcmtaatatccaaactgtcatctgtcattaaatttactatttaccttattgctttgtctgccacggtaacataaatatcttcacagggaatgtgtgatatgaatgttgtactccaaaacctagtacaaagtttggtacatagtaggcacaagaaaatgttggttgaaataatgcatgattctttgtaaaatttgttttcagtgctcacatttgactaactttgtacactgcctttctaatataacaagtgttattcccaaacaggaacccaatgattccagagacaaatcacctaatatgaatagcagcaaa

SEQ ID NO: 329640 - DNA, 616 bp, Homo sapiens
aataaaactgaaaaaaatgcaagggataccatacaccatgattcttcaagactatgtaaagattcactcctctgagctctcctaatatccaaactgtcatctgtcattaaatttactatttaccttattgctttgtctgccacggtaacataaatatcttcacagggaatgtgtgatatgaatgttgtactccaaaacctagtacaaagtttggtacatagtaggcacaagaaaatgttggttgaaataatgcatgattctttgtaaaatttgttttcagtgctcacatttgactaactttgyacactgcctttctaatataacaagtgttattcccaaacaggaacccaatgattccagagacaaatcacctaatatgaatagcagcaaatataaagcacttgtcagtaaatcccatagtcccatcctggttgtttttctttcagaaatgattttctgacacaaaataatcaacacctagtttgcagcttcttgcagtctagaagcaaatgattcatgcttcttgttattgtattagtgcatgggaaaagcaataaaaaatccaagaagccataatatattcacaacatcataactttctctcattacccagaag

SEQ ID NO: 329641 - DNA, 558 bp, Homo sapiens
atttggtgtggcttaaggatttagtaaagatgtgtcagttagaaattagaggtattttatgataataatggtagtgatttattgtgagtaacaagtattctactcagttgacaagaaggctgtttatataaaattctcatatgaatatgagcccaatttttgaggcatggtcatggtaaaaataaagatgcttttacttaaagtggaayagggacattgatataattttacaacttcctttcctaattcagtagcaggagttccatgatgaaaatagcagagtgggcccatagttgctagccttagaagcactcatgaagaaaattttacatttcttacttcttaatgtgctctctcactctctctctctctagttctttttgagttttaaattttactttatttccttttaaaattttttttattttattattattatactttaagttttagggtacatgtgcacaatgtgcaggttagttacatgtgtatacatgtgccatgctggtgtgctgcacccattaactcgtcatttagcattaggtatatctcctaaag

SEQ ID NO: 329642 - DNA, 558 bp, Homo sapiens
atttggtgtggcttaaggatttagtaaagatgtgtcagttagaaattagaggtattttatgataataatggtagtgatttattgtgagtaacaagtattctactcagttgacaagaaggctgtttatataaaattctcatatgaatatgagcccaatttttgaggcatggtcatggtaaaaataaagatgcttttacttaaagtggaatagggacattgatataattttacaacttcctttcctaattcagtagcaggagttccatgatgaaaatagcagagtgggcccatagttgctagccttagaagcactcatgaagaaaattttacatttcttacttcttaatgtgctctctcactctctctctctctagttctttttgagttttaaattttactttatttccttttaaaawtttttttattttattattattatactttaagttttagggtacatgtgcacaatgtgcaggttagttacatgtgtatacatgtgccatgctggtgtgctgcacccattaactcgtcatttagcattaggtatatctcctaaag

SEQ ID NO: 329643 - DNA, 568 bp, Homo sapiens
actatcagttacaaactaattagaaattaacccattattatatattgaaatttatggaatgtgactaaaattatactaagaggaatattcatagcattgcatgctttattattaaagagagaggaaataaaaatgaaagaactaaakattccacttgagaagatagaagattaacaaactaaaggccaaagaaagaattttaaaaaggtaaatataaaaattagtgaaatagaagccattttaacattagtatttaaaattaattttaaggcctatttctaaaataacctacaaattacataaaatttcagcaaggttaaagccaatgaacagatcaaacaaagtaaaatattaggaataaaaatgaaagatgatgtacacattataaataaataacatataagtcaatgaagataaatttgaaaatgcctaaacaatatattattttatctgaaaaaaaggattatcaaaatagactcagaatgatgtaaaatacttaactggatcactaaagatgagagaagtataattttatcaaagaactattaagcatcaacacttactggtt

SEQ ID NO: 329644 - DNA, 472 bp, Homo sapiens
gcctatttctaaaataacctacaaattacataaaatttcagcaaggttaaagccaatgaacagatcaaacaaagtaaaatattaggaataaaaatgaaagatgatgtacacattataaataaataacatataagtcaatgaagataaatttgaaaatgcctaaacaatatattattttatctgaaaaaaaggatwatcaaaatagactcagaatgatgtaaaatacttaactggatcactaaagatgagagaagtataattttatcaaagaactattaagcatcaacacttactggttgcatgatcttgggcaagttactttttttctctcaatggcacagttttatcacagataaaatggacataatacacaccttgcaagtatattgtaaggactgaggtttaatatgtctaatgcactcagtataagagtgatttacaagtggcagtcattgctgtaagttctcaatgc

SEQ ID NO: 329645 - DNA, 520 bp, Homo sapiens
taggaataaaaatgaaagatgatgtacacattataaataaataacatataagtcaatgaagataaatttgaaaatgcctaaacaatatattattttatctgaaaaaaaggattatcaaaatagactcagaatgatgtaaaatacttaactggatcactaaagatgagagaagtataattttatcaaagaactattaagcatcaacacttactrgttgcatgatcttgggcaagttactttttttctctcaatggcacagttttatcacagataaaatggacataatacacaccttgcaagtatattgtaaggactgaggtttaatatgtctaatgcactcagtataagagtgatttacaagtggcagtcattgctgtaagttctcaatgcatgttgatcattatatgaaagacaatcactcaaagtatgggcagaggaaaaagagaagtgaagaggctaatagtaaatagctagagagcaggaagaatacattattacgggaaccaagagaggatagttt

SEQ ID NO: 329646 - DNA, 506 bp, Homo sapiens
ttaggaagttaaatatgtgtagtttatgatatttgtaaatctgtattgactcgcttgttccctaaatgtagatagaataccagatttaacaagaaagaaaattgcaaacaactaacatttattgatctccaaatctgagcacttccacaaatattatctaacaatctccctcattacctttatgaggcagacaattgtccatgtcagagacgttaaaactgaggttcaaaaaggtaatttasttggccagtatcatgtattatggtcttacttaggatggaggcgttcatctaaaaattaggaagagataggagatgaacatttttacttcacttttaaatatctgctgtccaaatttgtttttggttttgtttttgaggacttatttctaccatgcacaatacatactgtggtcctgcaagaactaacagtgagtgtattagtccattcgcaaattgctataaagaaatacctaagactgggtataaacaaaagaggtttaattg

SEQ ID NO: 329647 - DNA, 506 bp, Homo sapiens
ttaggaagttaaatatgtgtagtttatgatatttgtaaatctgtattgactcgcttgttccctaaatgtagatagaataccagatttaacaagaaagaaaattgcaaacaactaacatttattgatctccaaatctgagcacttccacaaatattatctaacaatctccctcattacctttatgaggcagacaattgtccatgtcagagacgttaaaactgaggttcaaaaaggtaatttacttggccagtatcatgtattatggtcttacttaggatggaggcrttcatctaaaaattaggaagagataggagatgaacatttttacttcacttttaaatatctgctgtccaaatttgtttttggttttgtttttgaggacttatttctaccatgcacaatacatactgtggtcctgcaagaactaacagtgagtgtattagtccattcgcaaattgctataaagaaatacctaagactgggtataaacaaaagaggtttaattg

SEQ ID NO: 329648 - DNA, 506 bp, Homo sapiens
ttaggaagttaaatatgtgtagtttatgatatttgtaaatctgtattgactcgcttgttccctaaatgtagatagaataccagatttaacaagaaagaaaattgcaaacaactaacatttattgatctccaaatctgagcacttccacaaatattatctaacaatctccctcattacctttatgaggcagacaattgtccatgtcagagacgttaaaactgaggttcaaaaaggtaatttacttggccagtatcatgtattatggtcttacttaggatggaggcgttcatctaaaaattaggaagagataggagatgaacatttttacttcacttttaaatatctgctgtccaaatttgtttttggttttgtttttgaggacttatttctaccakgcacaatacatactgtggtcctgcaagaactaacagtgagtgtattagtccattcgcaaattgctataaagaaatacctaagactgggtataaacaaaagaggtttaattg

SEQ ID NO: 329649 - DNA, 595 bp, Homo sapiens
aaaataataacattataattcaaaataataaatgattaagtgccagtatgatttatataaaacatacatgtaataggagctcagaaacagagatgattatacatgaaaaggtgatttgggctgcatcatttgacacttctccataagagtcaaaacattcatattgcttaccctaataatccactggtgggaaaaggtgttgcactttatgcctacaaagcattgctgtacatgcatacaggaagccttgtrgcataatataaacaatgcaaaaatagagcagaatattttaagagcatgcgtcactgacccagacaatattgaaaattaagcaataagtgtgtctttgctaattccagccctgttacctgctactttctcaatactggtgtttagtgtccaagaaaatcctctcagatatccaattctccattggttgtttacatgttagtctatatttagtcactatgcaaatattccctgaggtttagttttgcttatgaaataagatattttgtcttttattaaagcagcattaacatcagaaattaggtagcagatacgttttggggaatatttagaggaggtaaaagaa

SEQ ID NO: 329650 - DNA, 301 bp, Homo sapiens
taaaaagctctcaagcctgcctcttctaatttgatgttaccacatggtagagaagatggatcacaaaggcagcataaaatgtttgarttgagggcagccagctgtttactgctacttatcagcttccggaaaagagactatggagctgccctctctttttcctcacatacataaaacttgatgagatattaacatttaaattacagcactctttatttttattctgttctagaagctctgaaatgcatttgactgtttcaaaccgccttctggggaagcttaataatacctccagcattct

SEQ ID NO: 329651 - DNA, 409 bp, Homo sapiens
acactattgcactagcccagcgatatggtttggctatgtcctcacccacatctcatcttgaattgtaacttccataattcccacatgttatgasagggacccagtgggagaaaactgaatcacgggagcggtttaccccatattctcatggtagtgaataaatctcttgagatctgattttttttaaactttttttatcttcagattccatcatttatcagctctgtggccttgggaaagtttctgtaaacttttttttttatactttaggttctagggtacatgtgcacaatgtgcagatttgataaataggtatacatgtgtcatgttggtttgttgcacccatcaactcctcatttacattaggtatttctcctaatgctatccctgtcccaggcccccactcccc

SEQ ID NO: 329652 - DNA, 546 bp, Homo sapiens
gttttatgccgttctgcagcacagcaggctacattttatgggcaaaaaagaaaggtcatggaatttactcattgatttgctattagggcctatactgcaaagtacaatggattctgcttctttgcaatgctggcccattccagctagtgaatttggtttcatcgcttcgtatggacagggtttgatttcttacaatgaccctcttggcacatgctcaatgactggctggctcttcacttaccttgttattttgcagtgytctgtgaagcccagaattcaaagcccagactcttactttcttttcaacagaaataactgagtttggcccctgtgtttcaagggcaatataagtagtttaataacttagaaaggttttcatcatttctttcactcaacactttatctttatccatgggatataaaaaaatagactgttttcacattgattttcttttctcagagcagtattcagtctttggtcttacttcagagacaagtctagctcccggtgcatccaattgctttcctggaatcctagcggcattc

SEQ ID NO: 329653 - DNA, 546 bp, Homo sapiens
gttttatgccgttctgcagcacagcaggctacattttatgggcaaaaaagaaaggtcatggaatttactcattgatttgctattagggcctatactgcaaagtacaatggattctgcttctttgcaatgctggcccattccagctagtgaatttggtttcatcgcttcgtatggacagggtttgatttcttacaatgaccctcttggcacatgctcaatgactggctggctcttcacttaccttgttattttgcagtgctctgtgaagcccagaattcaaagcccagactcttactttcttttcaacagaaataactgagtttggcccctgtgtttcaagggcaatataagtagtttaataacttagaaaggttttcatcatttctttcactcaacactttatctttayccatgggatataaaaaaatagactgttttcacattgattttcttttctcagagcagtattcagtctttggtcttacttcagagacaagtctagctcccggtgcatccaattgctttcctggaatcctagcggcattc

SEQ ID NO: 329654 - DNA, 575 bp, Homo sapiens
tcagttcaggagcagcatcagaggtgtgtggctcttttgaggacttggattcatctgctaagtacaaactttcaggctgcctgtatgatgcttattagcactatgctctgacataaatggaatttggcctctaaaaayaatcaatttgtatttctcaagggaagtttgttccacctaaaaaaaaatactcatttgtatttctcgagggaactttactccacctaagacctgactttttttttttcagaagagaatttccatcatataatacaaggtacacacaacgattttccaagtataaattactaaaacaatgtagcattgaaattgaactctcttaagtcaacctcagttcatattaattcaacccttaattcatattaaacacatttctataaagaagatatgatatagaccagggcatagatgacttccatgcagcatggaattgttctcaactgttttgttgataagtaacacttatacttagtttttaaccaatgaaattcagttgatagagctcagttttgtggagtgacatgggtttctgtattccacataaagtactaaaagag

SEQ ID NO: 329655 - DNA, 575 bp, Homo sapiens
tcagttcaggagcagcatcagaggtgtgtggctcttttgaggacttggattcatctgctaagtacaaactttcaggctgcctgtatgatgcttattagcactatgctctgacataaatggaatttggcctctaaaaacaatcaatttgtatttctcaagggaagtttgttccacctaaaaaaaaatactcatttgtatttctcgagggaactttactccacctaagacctgactttttttttttcagaagagaatttccatcatataatacaaggtacacacaacgattttccaagtataaattactaaaacaatgyagcattgaaattgaactctcttaagtcaacctcagttcatattaattcaacccttaattcatattaaacacatttctataaagaagatatgatatagaccagggcatagatgacttccatgcagcatggaattgttctcaactgttttgttgataagtaacacttatacttagtttttaaccaatgaaattcagttgatagagctcagttttgtggagtgacatgggtttctgtattccacataaagtactaaaagag

SEQ ID NO: 329656 - DNA, 649 bp, Homo sapiens
ggaagtacttccccccaggattttattttatttttattgtgaaaaatagaaaaatgagcaggaatctaaatgtacagcttaataaattctcataaactgaacacctgtgtagcaaatgtcccagtcaaaatagaatgctgacttcatttagaagcacttcttgtgacttctcccaaatactaagcccctctttagtggtgaatgtagatactatcttgamttctaacataatattttatttttccttgccttggaaatatatttaattggaatcattatgtgggtgtgtgtgtatggatagatagatacgcacatttctgttgctaatttaggagtagaattatgggatctttgtccatgcgcctgttcaaattagtagtgaataaaattttttgttttccaaatagttttgcctatttactgtcctacgaggagtataacagttcctgttgctccatgtccttgacagcacttggtgtaccattctttccactttggccctgctggcatattatgtagtaacatctcgttataaatttaacttgaattatcctgatgactaatgaagtttgaatagaatttcacttgttgatttcttcgtaactcttgcccatttttctactgtgttgactctacatattcttattga

SEQ ID NO: 329657 - DNA, 649 bp, Homo sapiens
ggaagtacttccccccaggattttattttatttttattgtgaaaaatagaaaaatgagcaggaatctaaatgtacagcttaataaattctcataaactgaacacctgtgtagcaaatgtcccagtcaaaatagaatgctgacttcatttagaagcacttcttgtgacttctcccaaatactaagcccctctttagtggtgaatgtagatactatcttgaattctaacataatattttatttttccttgccttggaaatatatttaattggaatcattatgtgggtgtgtgtgtatggatagatagatacgcacatttctgttgctaatttaggagtagaattatggratctttgtccatgcgcctgttcaaattagtagtgaataaaattttttgttttccaaatagttttgcctatttactgtcctacgaggagtataacagttcctgttgctccatgtccttgacagcacttggtgtaccattctttccactttggccctgctggcatattatgtagtaacatctcgttataaatttaacttgaattatcctgatgactaatgaagtttgaatagaatttcacttgttgatttcttcgtaactcttgcccatttttctactgtgttgactctacatattcttattga

SEQ ID NO: 329658 - DNA, 616 bp, Homo sapiens
ctttctctagcaggttgagctatgagtagcattcacaactgtagtatacatgttctatagggaccaagaactttcttaagggctccaggcatagcgtgatcatccccatctgtaatcgaggaaaggcttgttgtcctgtcttctgggaagcgaccctcttacttggggccatacccttsctaggattggcaagaacttgatctcctgtgttccccacatggttgcctgaggctgttgcctaattgacatcacagctctgtgtttccctctgccccatctggtgtcttcctgtttccccacactgattttgattacatttgctaataaacttctaataccacaaacttcatctccaagttgtttttgagagaactcaaccttgtaatgatagtcttattggaacttgatatgcgtatttttcttaaattgatctgcctgaaagtgcacctgtggttgggcggctatgcttttcttcattctcacacgtctctcacccattttgattctcactatggatcattattctagagggtaagaaactgtaggacttcttggccagataactctgcctgatttctcaggtattatttatctgggaaacatacatagcacagga

SEQ ID NO: 329659 - DNA, 616 bp, Homo sapiens
ctttctctagcaggttgagctatgagtagcattcacaactgtagtatacatgttctatagggaccaagaactttcttaagggctccaggcatagcgtgatcatccccatctgtaatcgaggaaaggcttgttgtcctgtcttctgggaagcgaccctcttacttggggccatacccttcctaggattggcaagaacttgatctcctgtgttccccacatggttgcctgaggctgttgcctaattgacatcacagctctgtgtttcyctctgccccatctggtgtcttcctgtttccccacactgattttgattacatttgctaataaacttctaataccacaaacttcatctccaagttgtttttgagagaactcaaccttgtaatgatagtcttattggaacttgatatgcgtatttttcttaaattgatctgcctgaaagtgcacctgtggttgggcggctatgcttttcttcattctcacacgtctctcacccattttgattctcactatggatcattattctagagggtaagaaactgtaggacttcttggccagataactctgcctgatttctcaggtattatttatctgggaaacatacatagcacagga

SEQ ID NO: 329660 - DNA, 587 bp, Homo sapiens
acaaagctctgttggaccaaatgataaatatagaggagacatgcattacatgtacgattctctttttgtttgaagagctttatagaatctgaaccactggtgtgttttccaaatgtaaaaataaagctttgaacagcacaaatgtgactatacacacacacacacacacacacasagagagagagaaaatatatatatatatacattgcatatatatatatatatatatatacattgcctatatatatatgtatgtttatataggcgatgttaactgcaatgttggctctttaatccataagttctgtttacctgggaagtaaaaatgaagtcttttattatatgttgatattttaatacagcaatcagagaactaaaataatgtgctagtcaatctttcaagtttctatcagtactctactctcagattcacacttttctctaaatttctcctgtatcatatcatgccccaattactataactttctcacccttcccctcatggcagtatgattttacagcaatacatccaatatgaaaattatgttaaacatttaaaacttcttggataacatcactcctattgt

SEQ ID NO: 329661 - DNA, 587 bp, Homo sapiens
acaaagctctgttggaccaaatgataaatatagaggagacatgcattacatgtacgattctctttttgtttgaagagctttatagaatctgaaccactggtgtgttttccaaatgtaaaaataaagctttgaacagcacaaatgtgactatacacacacacacacacacacacacagagagagagaaaatatatatatatatacattgcatatatatatatatatatatatacattgcctatatatatatgtatgtttatataggcgatgttaactgcaatgttggctctttaatccataagttctgtttacctgggaagtaaaaatgaagtcttttattatatgttgatattttaatacagcaatcagagaactaaaatamtgtgctagtcaatctttcaagtttctatcagtactctactctcagattcacacttttctctaaatttctcctgtatcatatcatgccccaattactataactttctcacccttcccctcatggcagtatgattttacagcaatacatccaatatgaaaattatgttaaacatttaaaacttcttggataacatcactcctattgt

SEQ ID NO: 329662 - DNA, 468 bp, Homo sapiens
ctaagaagttggagctcaagaaattcttcttagcaaaaacacttgtcatagtcaatgtcttaataatgtaaattttggtagaggtaattattttagaatcatacaattgttctatattattaaatgcytgcggagtgtggatcagaatgctttcagaactctggaagttcttgtgatgcagatacactcttttgttttttctatgttcgtttgtttgaaggagagattggcactctgacgtcatcctgttcctcatttaacataatgcagcaaggacaagtaaattcatatttttcatctcaatatgtccacttggactttgactggccatatatttaatgctattacgtttgcagtttaggagccaaaattcttatcaaatttattgatataattctaacattcagaatcagaatgcccacacttaatttgtaaaataaatgaaagatggatagatttgtcagctta

SEQ ID NO: 329663 - DNA, 468 bp, Homo sapiens
ctaagaagttggagctcaagaaattcttcttagcaaaaacacttgtcatagtcaatgtcttaataatgtaaattttggtagaggtaattattttagaatcatacaattgttctatattattaaatgcctgcggagtgtggatcagaatgctttcagaactctggaagttcttgtgatgcagatacactcttttgttttttctatgttcgtttgtttgaaggagagattggcactctgacgtcatcctgttcctcatttaacataatgcagcaaggacaagtaaattcatatttttcatctcaatatgtccacttggactttkactggccatatatttaatgctattacgtttgcagtttaggagccaaaattcttatcaaatttattgatataattctaacattcagaatcagaatgcccacacttaatttgtaaaataaatgaaagatggatagatttgtcagctta

SEQ ID NO: 329664 - DNA, 468 bp, Homo sapiens
ctaagaagttggagctcaagaaattcttcttagcaaaaacacttgtcatagtcaatgtcttaataatgtaaattttggtagaggtaattattttagaatcatacaattgttctatattattaaatgcctgcggagtgtggatcagaatgctttcagaactctggaagttcttgtgatgcagatacactcttttgttttttctatgttcgtttgtttgaaggagagattggcactctgacgtcatcctgttcctcatttaacataatgcagcaaggacaagtaaattcatatttttcatctcaatatgtccacttggactttgactggccatatatttaatgctattaygtttgcagtttaggagccaaaattcttatcaaatttattgatataattctaacattcagaatcagaatgcccacacttaatttgtaaaataaatgaaagatggatagatttgtcagctta

SEQ ID NO: 329665 - DNA, 528 bp, Homo sapiens
caaaatgaatatgcccagtatatttaagagtagcaaagcaacttcacaacaaataatgttaaatatgaatttgaattgtaccatctcttttgctactttgtcttggaaattgtatgataacataatatctaggttttctgacrctagtccaatagatagctgccttatttacatttgttttattgtagttcaatttcagaatggttctgggcatctttatgcaattttataaagttaagtccatcagcctttgggcagtgctattgaacactgaccttggaatctaggaaatgaatataaatgagattctaaatataatgtgtttcctttcatagcacagatgatgtataaaacgaacacagaaatgtgccattaatttgaatttgagttacatacttttgtgttttccttgggtagaagggtctgtgattacagatgacagaattggaattcacaacgattttcctgaaaactactacatagaattatttttccactactcagcatctttgcaaagcattttattgt

SEQ ID NO: 329666 - DNA, 609 bp, Homo sapiens
gataacataatatctaggttttctgacgctagtccaatagatagctgccttatttacatttgttttattgtagttcaatttcagaatggttctgggcatctttatgcaattttataaagttaagtccatcagcctttgggcagtgctattgaacactgaccttggaatctaggaaatgaatataaatgagattctaaatataatgtgtttcctttcatagcacagatgatgtataaaacgaacacagaaatgtgccattaatttgaatttgagttacatacttttgtgttttccttgggtagaagggtctgtgattacagatgacagaattggaattcacaacgattttcctgaaaactactacatagaattatttttccactactcagmatctttgcaaagcattttattgtaatttttctacttacaatgttagctttcactataaaatgaatattattataattacatagtgttgaatgacatggaaattgcaaattattttatttgagatgaatctttcagtaaaactatgttattaaagtgttcaaagtaagcataaaaatatcaccctgccctggaaaagagagctaatgtcataaatggagc

SEQ ID NO: 329667 - DNA, 566 bp, Homo sapiens
aagaaggtgaaaggaaattgattaagccactgaaattccctagaaatagaataacattcagagttccccagcagctttcccctgtctcatactcagttatcctcgctcacttctcacccttcagacccctgaatatgcatatgacaattactacattataaataaattcacagttgtataataaattgctaactgtctgtcataactgatagactttcagccccaccagggctggaaaaagtctgtcttctccactaagctatgtgtcttgcaagtatcagactgtcagcaaattgtgaaaataataaatgaattaaataatrcatttgatagtctagcaatagatctggctactcagcagcgtctctgacagcatccactttagaaataagcatatgtttttcccactttcgcactgtgtatcactgtgatgcaggtccttaaagcaattgaccagctaggtctcattcagaaaagagcagtcctgtcaggcgcccagcctatgtctgtatcaggccctactacttggtacattgtctgtcctgagaagcagcatcatttggtcc

SEQ ID NO: 329668 - DNA, 566 bp, Homo sapiens
aagaaggtgaaaggaaattgattaagccactgaaattccctagaaatagaataacattcagagttccccagcagctttcccctgtctcatactcagttatcctcgctcacttctcacccttcagacccctgaatatgcatatgacaattactacattataaataaattcacagttgtataataaattgctaactgtctgtcataactgatagactttcagccccaccagggctggaaaaagtctgtcttctccactaagctatgtgtcttgcaagtatcagactgtcagcaaattgtgaaaataataaatgaattaaataatgcatttgatagtctagcaatagatctggctactcagcagcgtctctgacagcatccactttagaaatargcatatgtttttcccactttcgcactgtgtatcactgtgatgcaggtccttaaagcaattgaccagctaggtctcattcagaaaagagcagtcctgtcaggcgcccagcctatgtctgtatcaggccctactacttggtacattgtctgtcctgagaagcagcatcatttggtcc

SEQ ID NO: 329669 - DNA, 563 bp, Homo sapiens
tgtcagcaaattgtgaaaataataaatgaattaaataatgcatttgatagtctagcaatagatctggctactcagcagcgtctctgacagcatccactttagaaataagcatatgtttttcccactttcgcactgtgtatcactgtgatgcaggtccttaaagcaattgaccagctaggtctcattcagaaaagagcagtcctgtcaggcgcccagcctatgtctgtatcaggycctactacttggtacattgtctgtcctgagaagcagcatcatttggtccatgcttatgacctctgcccagaatctcttgaaaaggagaccacaggaagcaggcatcatgaaggagtcttcagaagaggcagtgtaccaggaaggcaccttgtctggaccccctgccgggtattcaaattttgctatacattagaatcacttgtcaaaaccccagtggccagatgaatcccaataagttttaaatcagaatttttggaagtcagacgcagacatcaatattttctaggattgccaggtgattccagcatgtagccaagttacagatgcca

SEQ ID NO: 329670 - DNA, 563 bp, Homo sapiens
tgtcagcaaattgtgaaaataataaatgaattaaataatgcatttgatagtctagcaatagatctggctactcagcagcgtctctgacagcatccactttagaaataagcatatgtttttcccactttcgcactgtgtatcactgtgatgcaggtccttaaagcaattgaccagctaggtctcattcagaaaagagcagtcctgtcaggcgcccagcctatgtctgtatcaggccctactacttggtacattgtctgtcctgagaagcagcatcatttggtccatgcttatgacctctgcccagaatctcttgaaaaggagaccacaggaagcaggcatcatgaaggagtcttcagaagaggcagtgtaccaggaaggcaccttgtctggaccmcctgccgggtattcaaattttgctatacattagaatcacttgtcaaaaccccagtggccagatgaatcccaataagttttaaatcagaatttttggaagtcagacgcagacatcaatattttctaggattgccaggtgattccagcatgtagccaagttacagatgcca

SEQ ID NO: 329671 - DNA, 596 bp, Homo sapiens
tgaaggagtcttcagaagaggcagtgtaccaggaaggcaccttgtctggaccccctgccgggtattcaaattttgctatacattagaatcacttgtcaaaaccccagtggccagatgaatcccartaagttttaaatcagaatttttggaagtcagacgcagacatcaatattttctaggattgccaggtgattccagcatgtagccaagttacagatgccacactctaggattttgtgactagtgctccaggaccagggacattggcatctgctgggagtgttttaggagggcaaaatcatagctctgtcccagatctatgaaatcagaatttgcatcataaagcaaatcccttgtgtagagttgtctgagctccttatacattctgataatcaatcctcattgattgctgtgcatgttgaggtgtgagaagcactgccctagcacagagagcagtatcacaccattaacttactcctggccattttctttctcttttgtccttctctcttccacctgtctcttcactctatataccagccatctagaactccaattacctgaaatgcaacctctttctttcttagtaaagtgct

SEQ ID NO: 329672 - DNA, 622 bp, Homo sapiens
atgatctaagtccccctttctttatgtcatattcttgaatattatctctaatttccctccaatctgtttagrtatcactcatttgacagttataaagtgtcaaatttatgccagcaatttccagactattttacttattcctccaaagactttttcttgaacaacccagttcactgtacctcctccccatttttgatacccatgcagtaggaatgttaaagcttcacatgtttgcactaccttttacttcattaataataagaactgtattttctgttaatattgtatttttcttttttccacttaagtacacacacacccctcgctaactgtaattcaatagaaggctcagaacattgtaatttgggtttttcaagttatatcaatttgagggataaaaactggaacatactgttctggaagtcccacagcgtggtgtgtgtgtcctgcagactctcagctcccatatggcagggacaattttccttcttctctgcttcataagaagcagagatatctctttgctctgcagaccctaagtggaagttaaggtactgatctctaggaaaagcgccactgctcctgctgaccaggcactgaaaattcaccgggtgctgtttgc

SEQ ID NO: 329673 - DNA, 622 bp, Homo sapiens
atgatctaagtccccctttctttatgtcatattcttgaatattatctctaatttccctccaatctgtttagatatcactcatttgacagttataaagtgtcaaatttatgccagcaatttccagactattttacttattcctccaaagactttttcttgaacaacccagttcactgtacctcctccccatttttgatacccatgcagtaggaatgttaaagcttcacatgtttgcactaccttttacttcattaataataagaactgtattttctgttaatattgtatttttcttttttccacttaagtacacacacacccctcgctaactgtaattcaatagaaggctcagaacattgtaatttgggtttttcaagttatatcaatttgagggataaaaactggaacatactgttctggaagtcccacagcgtggtgtgtgtgtcctgcagactctcagctcccatatggcagggacaattttccttcttctctgcttcataagaagcagagatatctctttgctctgcagaycctaagtggaagttaaggtactgatctctaggaaaagcgccactgctcctgctgaccaggcactgaaaattcaccgggtgctgtttgc

SEQ ID NO: 329674 - DNA, 515 bp, Homo sapiens
atcctttgccttctgacttcaacttagtttgaatggagaataccaaaaaaagaataaaggaaggaaggagtgtgggatcaggtatttaatgtcccttttctcttcctagaggatcatctggagaatcctggaggatatagattgactaaatctttcaaccaaaggggtcatagctaatgtcaggccaccctcttaacacaaatcagtaaatctctatctctttctcctcctctttccctcccccttcctccatttctstatctctctctctctctctcatgaccataatcttaacagccttggggtctgatatggtttggctgtgtctccacccaactctcaccttgaaatgtagctcctgtaattcccatgtgtcataggggtgaccctctgggaagtaactgaatcatgggggtgggtctttcctgtgctgttctcatgatggtgaataagtctcatgagagctggtggttttataaaggggaattcccctgtatacactctcttgcctgccg

SEQ ID NO: 329675 - DNA, 566 bp, Homo sapiens
tcgcgccagtgcacaccagccttggcgacagagggagactccatctaaaaaaaaaaaaaaaaaactagcagcacagcaggtttttctacaccagtgtcgccacaaacacatgagcartgcattctgctacaaagttaggatggccatacgtcactagacaataggaatttttcagctccattgtaatcttaggggacccccatcctatatgcagttcatcattgactaaaacgtcattataggacgcatgactgtaaatataaaattctagacaatgcaggctaagcgacagttacaaaaagcataccggttgattgggtggggcaatgggaaagtgtgagaaggataaaataacggcacagggaaaccttcaggggtgacagatgtgttccgcattttgattatgatgatttattaagtgtacattcatgtcaaaatttatcaaattgtataccttcaaagtatacaatatatttggatgtatacaactacctcattacagctgtttaaaggggtattttgtttgttcttttttttataatccgcacataagctttataaacatt

SEQ ID NO: 329676 - DNA, 585 bp, Homo sapiens
atagtaactatactagaagcaaattatcacaactactatacaaaatagacaaaatgttgtggggcatgaataaagcagttaataatactttaaaagcacatttattaacaatttttaaacataggcaaatgtaaaggtaaaacaaatggctctaaaatctcagtatacaaataatctcaactgacattcaaaaataaggtaaaacaaatacaagtaatatatgtgcatgattagaaactcaaacaatgtggatagaaataaatttaaaaaaagaccctcaccttcactaactttgttccaaagtaaacactgttaagagttaaaatgtcaccatgtacaatgtcttctatgaaaattatgtaaatatatgcatctacatacatatgatattggaatgaaaacaataacacarttatacacatcgttctgcaccctgattcttagatgttttaataaatcttggaactacatttatttcaggacaatttcattgctttaaatactacatagtattttgtttcatggatatatcataatatatgaaagaagtgagtcattatttcaaacaaagtttatggtgatttg

SEQ ID NO: 329677 - DNA, 532 bp, Homo sapiens
gatggcgacataacaacatgccaggaaatgcaaagtaacaaacaagatgctaagatgtataaaatyagtaatcagggctgtctcctttccatagagaaaaaaaaaaatcagaagtgaccattttttcatggtttaaatatgattccagacaacataagtttatatgtgcttcagtagttgaagtgttagttaaaagtcttgcagaaaagcaggcaccgtaggaaatgggtcagaggaaggacctgggcacttgtagtgaaaacagcagcatttttttgtttgtttgttttttgttttcttgagacgagtctcgctctgtcgccaggcttgagcgcagtggtgcaatctcagctcactgcaacctctgcctcccgggttcaagagattctcctagcatcccaagagatcctcaaaatgattttatgaggtcagtctaagttatcgtcagttacaaataagaaaactgaagtgttcatgcattgcaaaggcttaatgtagaaagagaacaggacttctcactccaaaatattga

SEQ ID NO: 329678 - DNA, 532 bp, Homo sapiens
gatggcgacataacaacatgccaggaaatgcaaagtaacaaacaagatgctaagatgtataaaattagtaatcagggctgtctcctttccatagagaaaaaaaaaaatcagaagtgaccattttttcatggtttaaatatgattccagacaacataagtttatatgtgcttcagtagttgaagtgttagttaaaagtcttgcagaaaagcaggcaccgtaggaaatgggtcagaggaaggacctgggcacttgtagtgaaaacagcagcatttttttgtttgtttgttttttgttttcttgagacgagtctcgctctgtcgccaggctkgagcgcagtggtgcaatctcagctcactgcaacctctgcctcccgggttcaagagattctcctagcatcccaagagatcctcaaaatgattttatgaggtcagtctaagttatcgtcagttacaaataagaaaactgaagtgttcatgcattgcaaaggcttaatgtagaaagagaacaggacttctcactccaaaatattga

SEQ ID NO: 329679 - DNA, 532 bp, Homo sapiens
gatggcgacataacaacatgccaggaaatgcaaagtaacaaacaagatgctaagatgtataaaattagtaatcagggctgtctcctttccatagagaaaaaaaaaaatcagaagtgaccattttttcatggtttaaatatgattccagacaacataagtttatatgtgcttcagtagttgaagtgttagttaaaagtcttgcagaaaagcaggcaccgtaggaaatgggtcagaggaaggacctgggcacttgtagtgaaaacagcagcatttttttgtttgtttgttttttgttttcttgagacgagtctcgctctgtcgccaggcttgagcgcagtggtgcaatctcagctcactgcamcctctgcctcccgggttcaagagattctcctagcatcccaagagatcctcaaaatgattttatgaggtcagtctaagttatcgtcagttacaaataagaaaactgaagtgttcatgcattgcaaaggcttaatgtagaaagagaacaggacttctcactccaaaatattga

SEQ ID NO: 329680 - DNA, 502 bp, Homo sapiens
agaaccaggtcatacaggctgttgaaggtcttatgagcagcttagattgtattctgagattagatagctctggggttttaaactgaagcgtgatttaattgtactattgtatgtgtattttggattcataaacatgaacatgatataaacaaaaaatgatgaattgatgatgaaatgcattgcttagttatattgcttaataattcccaaactaagcttgttcataactagaaacattttactttctgaacattgaagaataaacatttggtcttgtggtttcatcatattttaacagttgcttrtaagggaacacacatcagaccacacggcactaatgtccatgtagtaatatgtattttcttgtgtctcaaagataatacctaaaatctaaaaatgtgtgctttcccttccagaaggtggaggccttggcccagcccatgttgaatccaggtaaagccatgtgacaagtactcacaagagaacatgaatggaagtgatg

SEQ ID NO: 329681 - DNA, 502 bp, Homo sapiens
agaaccaggtcatacaggctgttgaaggtcttatgagcagcttagattgtattctgagattagatagctctggggttttaaactgaagcgtgatttaattgtactattgtatgtgtattttggattcataaacatgaacatgatataaacaaaaaatgatgaattgatgatgaaatgcattgcttagttatattgcttaataattcccaaactaagcttgttcataactagaaacattttactttctgaacattgaagaataaacatttggtcttgtggtttcatcatattttaacagttgcttataagggaacacacatcagaccacacrgcactaatgtccatgtagtaatatgtattttcttgtgtctcaaagataatacctaaaatctaaaaatgtgtgctttcccttccagaaggtggaggccttggcccagcccatgttgaatccaggtaaagccatgtgacaagtactcacaagagaacatgaatggaagtgatg

SEQ ID NO: 329682 - DNA, 607 bp, Homo sapiens
ggagatgggggagaatgaaaattgtagtgatcattttctctgagggatttttcccccacacactcagttcttacttattaaacggcttttgtatgtcttaggaataaaaagccattcttcctgggtgtcttcttcctgctagcaatggagctctacctggtctcgtcagcaatcacgtcattaaatctgactggcaacttgcagaggatggtggggccgagagacaacaggtcaagttttcgagggtatgtcctctgaaactcaggcaggagttcaggtagtaagaatttgaaagctatcaaaaacagaagtgggcattctccttcttgctgaatgagctactcattcaggaaagccagtgttgagtcagagatttaataaagacatgcaacaagtagctgaaactttaggaagataacaaagccacttcctgaagamaccaagcattggcaacaaactgagcaggtggagggaaactgtccagatctcataaagatgctggcagtgtagattaggttacagcttccatttttaaaagatttctcagatttctgtcatattctcactgaacggtttctatcctaatctcaaagggcctaacatgttc

SEQ ID NO: 329683 - DNA, 619 bp, Homo sapiens
cttctacaatcccctgccaggcccagggtgcccacttttgacattcattttgagcagacgaaggagctaagcagaaagagcagtttgaaacataattccaggccaaatctgctcacttgacagcattcattggtttgaaggttgcacacactcagacaatgaaggtactttaaaaaatgtcatttaattgcyaagaatcatgtaaggctacatcccacagagatgtcttttgatatatatatatatatatatatatatatatatatatatatatatatatatatatatcacaaagaaaatatatatattttcacaaagagtttggtgtaatctggcagtgtatctggctaggacccaccatcctaaagttccctttaacctgggcagatacatctaggtggacatttgttactcttctcatcccatggacaggtggaagtgcatatccaaccactctattttaaagtgtccttgctcttgcagatagctctatattgctcaggacacgagatgacctctaacgttaagactcccacctttgcagtgtagcttatgtcttgttaaaaacttgatatcctcacacatcacctgtaccagcatcttctgggagggtggattg

SEQ ID NO: 329684 - DNA, 573 bp, Homo sapiens
ggaaaaacgcttgagcccagaggttcgagaccagcctagacaacacagtggagctcccaactctacaaataatgaacaaataaatggcaagccaggcatggtggtgcatgtctgtggtcccagctgamtgggaggctgaggtgggagaatcacttgactactgggaggccgaggctgcagtgagccatgatcatgtcactgcactccagcctaggtgacaaagagagaccctgtctcaagaaaaaaaaaaagccacactatctagattcattaggtataattaataacatgtctggctacaaatagcaggaatctcaaccaacagcagtttaaacaacaagcatgtatttttctcacatgacagacatcaaggttagagattagccgctggcactggttcagctgatctgcaatgtctccctccaacttagcatgctggctctattctcctgttgagtttttaagtcttatggccacaagatgggccgtgacagataaagacattgtataaagctcaggacaagaaaaaggagcaaaagggggctgtaacacttccatttgctcacttcatag

SEQ ID NO: 329685 - DNA, 594 bp, Homo sapiens
ttcattaggtataattaataacatgtctggctacaaatagcaggaatctcaaccaacagcagtttaaacaacaagcatgtatttttctcacatgacagacatcaaggttagagattagccgctggcactggttcagctgatctgcaatgtctccctccaacttagcatgctggctctattctcctgttgagtttttaagtcttatggccacaagatgggccgtgacagataaagacattgtataaagctcaggacaagaaaaaggagcaaaagggggctgtaacacttccatttgctcacttcataggaaagcaaaagcgtttcttgaaacttcccagagattctcacttgtgtctcattttcaagaagtgtttcacctgaccacatctaactgtgatgctggaatagtcagtatttatctcctatataggctttagtggaaataagacaagtgagaagggggttgagattaggagtggttcagctgatccacagtatcttccataccctgaaattccaaagtcgtccggygagtctagaagtctctccacagtctagccctgacttacctttctagttctgacttctgtactt

SEQ ID NO: 329686 - DNA, 594 bp, Homo sapiens
ttcattaggtataattaataacatgtctggctacaaatagcaggaatctcaaccaacagcagtttaaacaacaagcatgtatttttctcacatgacagacatcaaggttagagattagccgctggcactggttcagctgatctgcaatgtctccctccaacttagcatgctggctctattctcctgttgagtttttaagtcttatggccacaagatgggccgtgacagataaagacattgtataaagctcaggacaagaaaaaggagcaaaagggggctgtaacacttccatttgctcacttcataggaaagcaaaagcgtttcttgaaacttcccagagattctcacttgtgtctcattttcaagaagtgtttcacctgaccacatctaactgtgatgctggaatagtcagtatttatctcctatataggctttagtggaaataagacaagtgagaagggggttgagattaggagtggttcagctgatccacagtatcttccataccctgaaattccaaagtcgtccggcgagtctagaagtctctccrcagtctagccctgacttacctttctagttctgacttctgtactt

SEQ ID NO: 329687 - DNA, 632 bp, Homo sapiens
ttagctaatggctttttaatgttatgtggtaattgtggtgaagcaattgtcaattccagttaaattagcttaaaatgataagagcaaacacatatctttgatgataaggctgggatagaggttaatgtctcatcaattttgggtctctcttagatgtttgaccttatcctaacaacttaagctttaggtaaagtctgcatttggtactctaatctcttcctatcagacacaggtgctcttctctgcccaactgcaattcagtccaagacatgccttctccagttagtctctggagaatgttgttcctacttagactcactgcatagatcttaacttgtactcctgctggtggtgtgcatatatgagctgtcacttgaccatgcagccacacctggaracccatttctaggttcagagtcatctctgatgcagcctgtaatttccccactagcatgccactctgtaggaatgaaccagacattgccacatcattctatgtagcattttcttaaaattagagcttcactataaacaatctttggtcaaggaaaggctttgttatctactccatggtctctttgagaaaaaaggcctggtcccattaagctcttgcctcgtttttgcctttcagg

SEQ ID NO: 329688 - DNA, 567 bp, Homo sapiens
ggaaaagtcatagtggataacctcaatttattcagtcttctgagataatgtaagagtaaagcatggmaacaggaatacagagttcatcataattatagatcatccattcaaaacattttgaaaacagtgctatgtaaacttgggatgacaaataatgaagcatagttaacacttctcattggttgtgaattttcaaatacatccaagtatttaatcatggccattcatcattctgtaaatcaaaactaggtctttgaattctctccctttcctattctcagattaaggcatatttggtttcatataaaatcttatgcataattttgaatttcttgggccaatcaaataatggtacataatttaatttaaaaaacttttcagaaggagaaaactcatgtttcacatacttcttattaatcctaaggcctagcaaagggtacatacagctgtagttcacctcaattatacactgtaaatatttagattagagacacgaaataagttttgggagttgcaagaatagaatcagatgtaggaggtattcttgtagaatagagatggagatgg

SEQ ID NO: 329689 - DNA, 659 bp, Homo sapiens
cttggtgggtatggagtttttcagtgatccagtttcaagtaaataagcaacgaataagaagaaattgtgtttctttctagaatgtgttgtcaaccactgaatttaatgctaccaatagatgcagactcatgaagtgcagtatgatttcgataaggcctaagcaattatcaaatcagaaatggatctctcatgctataaaattgtacatttaagcaaataattttaagataattggctttcaaactatttttggatgtatcasaagggatggttgtggaaataacagcacagtaaatgaatagttactggaggacaggaaagcagaaaaaaaatctgaagtgtaaggagatacagtcaagctgtttataaaatacatttagatacaaaagaggtcactgtgtggaaaacctttagaatcactgttgaaagaaaaaaaaatgtccacttcccaatttcaagttctattgggattgtttgtattataaagagttgactaataaattcctgccaaggattatttccctatccaaacaaaatgtccacaattctttatgagagaagatgatacccatagcttctgcttcccgcagtggcactctcatcacatatattggtaagtatagaggtgccaaggagaagcaggcaacagttttctccat

SEQ ID NO: 329690 - DNA, 632 bp, Homo sapiens
catgctaatgaaactttagaataccaagacttaagatcctaaagattttgaaaaagaaaaacataaacaaacattctatcataggaatgacaatcacagtcaagttttcaatctgcatcttgaaaatgccagatgataacaggacagtgacctaatgttcggacagaaaacaaacctaataccaaatggaatcaaacaggaaactcagaaatagacacgttaatatgctcaagtgatttttgacagaggtacaaaagtcattcaattgccttttccacaaatggtgctggatgcccaatggcagaaaaaagtaagtcttcacctaagtcttacaccttacacaaaagtcaactgaaaatggatcacagacttaaatataaaatatgtacctataaaaccttttagaaaaaaacaggagagtgtctttcagatctaaggtgagccaaataatgggtcgacttgatactgagatcacaacttataaatggaaatgttgataatttggactttgtaaaattaaaaacctttgccctgcaaaagaccctttaaaaggatggaaagacaagctacagattgggagaaaatrtttacaaaccaaatacttgatctaggactagtaactcaaaagtcaa

SEQ ID NO: 329691 - DNA, 619 bp, Homo sapiens
tgtacgctaatgttgaatgttcacagcaactttatttgtaatagctgcaaactggaaacatctccagtgtccactaatgggtgcatggttaaacacattgtgatacatccataccatggaatagtattcagcaataaaatagaacaggcatgcaatggaaagttacatgcaacagcctggatgaatttccagagaaatatgctgagtgagaaaggccaatctcaaaaaattacataatgtatgatctaatttttataccactttgaaacmataaaattaaatgaagaacagattagtggttgccaggggttaagtaaagtgggaggaaagtggttgtggctataaaagtgccacatgaggaatgcttgtaatgatggaattgtctgtttcttgactatgagtgtcaatatcctgaatgtgatattgtgagatgttaccatgggggcaactgggtaaagggcaaatggaatttgtcttatttcttacaactgcctatgaatttacactgatctctaatgaaaagtctcatttaaaaatttgatagtgcttgattttatcagttgatcaagctgctcttagttgaaataacaatttcagaaggatcagcataatgaatcta

SEQ ID NO: 329692 - DNA, 647 bp, Homo sapiens
ggagctgcttaatacatttcaatcttagaaggtcaagattccctcagccaattccaaactgcattgtcccattgaatagatgtggcacattctggatctagtgagaataacctatgtatattactttgaagtaatacaggtaggccattatagcagaaagaagttgagtaaatgttgatatttaagaaggttsataaaatatttgaacacaactgcaatccatacccaattctcagtggttttttttatagaccatgaaatcatagctaaagtcaacttcggttctgccctaacggagagccacaaataaccctaaaccatagataactcaaatgcatttttacttggcttttgactgctttttatgataattttcacagcacattgctcttctaattatgttttgtttgggatcatattaaaattaacttgtatttagtgattatgtgctacctgatgagttaaagaggagccctgggagtgtattgaaaaaccaggctgtggatggccttcagtactttacacaaagaaaagccaaatagttaaaaaggcattaaaaatggaaaggatgtaactagtgggcaaatagctccaggacctcagttgcatgaacttagtatatctctttcctcctccttctcccctcc

SEQ ID NO: 329693 - DNA, 563 bp, Homo sapiens
ttacttgggggcaagacatggatagttacgtccttggaggaaaataaatacaaggcagtagatccaaatgtatttgtcatgcaaagaacattagctgagagagagcttccatatataggtttgcaaaactgagagcaaagccaaagccattcctgggttttgctttgtgatatagtctccaaatggatactattatgattaatctattctgagttccttaaatgctattgtaacaatgtcaggggccaagttcaagtctaaagtacgtgtatgatgatcatagctgctataatactcataatgctgaagacatagtaacaacaatttataataggagagcagttttgtgcagcaaaatagttccgtggagcagaattagatcatgaaaatgttgcatggtgggcatttagtcgtgaaagtataaatctgtacctaatgattgatgtgaatcaggtttcaaacctattagatgtgccatttaaccaggcaacatwtgcccattatttttttgcatgaaaagtaattaccgtatgtttaatagttactgaattgtgactggcagg

SEQ ID NO: 329694 - DNA, 548 bp, Homo sapiens
cacattgcattgagcatccatgtgtgcttggcactgagctagccactgaccaggtaatgctaagtagagcagaacaaaagacatggtccttccctcatagagcttacctcttagtgcagtagagacacagtaatccaatcatcacacaagacatttatactcaccaactgtgctaactggggactatggcagccaactgatgtgaagatttggcttaatggcaggagtcaggaagcctttcctccaaggtgtggtgtttgaactgaaatctgaagaaccagcagaagagcacaaggagggaaaggagtttgccaggcccaggccagtgggtttgaagccttgaggcaggggggartgaggtgcattcaagaaactgaaaggcggaaagtgcaggagcagaagaatgagggactcaagaagaaagaggcagtacaaaataagaatgaaagatggtcaggggccagttctgtaggacctgtagccatttaaaaatgtttagttattaacttagaacagtgagagcactgaaatgtgtgagggtcagaaga

SEQ ID NO: 329695 - DNA, 502 bp, Homo sapiens
ctttaaggagcctgttatgtagtctatggtggatctgaataccaggcagacagatgacatttttataaatagtgtgaggaaaccccagaagtaatgtgaatggatgagagttcaagaccactgctgacctggaaagccaatgactgaggcaccagaggaagtaggctctcagagggaagacagaacaccccctttccagctcattgagagtgaagcaggtgcttttctgaagcaggtgatattctgaagatccacctcctcagaacaagtgttctgaagttyctctgaaatgcagagaatctaccatatgatatggttttgctgtgttcccacccaagtctcatcttgaattgtacttcccataatctccatgtgtcatgggagagaccttgtaggaggtaatttcatcatggggggcagttacctccatgctgttcttgtgatagtgagtgagttatcatgacatctgatggttttttataacagggttttcctcctttgc

SEQ ID NO: 329696 - DNA, 605 bp, Homo sapiens
gttttgctgtgttcccacccaagtctcatcttgaattgtacttcccataatctccatgtgtcatgggagagaccttgtaggaggtaatttcatcatggggggcagttacctccatgctgttcttgtgatagtgagtgagttatcatgacatctgatggttttttataacagggttttcctcctttgctcggcacttcttcctgccgccatgtgaagaaagatgtgtttgctcccccttctgccacaattgtaagtttcctgaggcctctctagccctgtggaactgtgagtcaattaaacctctttccattataaattacccagtctcaggtatttcttcatagtagcatgagagcagactaatacaccatctgtaagaaacttggaaaaatgatttgtttagagttccatctgagcagtcatattattagtaagatatatatgtcgggaaaagaaatttacttcttatgactttttacattttgagatcttattgtttgatgctccaygttgagggagccatatttctccacctggtcaccaggctcattaggagggacagatgtggcctcacatttcatgtgcggttcttgtctcagcccttc

SEQ ID NO: 329697 - DNA, 502 bp, Homo sapiens
ctataggcaactctagttctataggtaactctagttcagtatcatgactttcatggtttctataaaaattgccatcccacagccttcttcacatctgtgacaggcagttgagaggggactgaggaaaagtattgcccatacatggaatttgtggagactcaatcartgttacttggattgagtaataaaggaagttatttgtctaagtttgggcagcaagagaatggcagggacagaaccaaaagcagtttttaaacgataatctttttttatttttttactattaaatacagcttgggggcaaagaagagggatacaatttgttgactttcattgctacatttttggacaaggaaagagaaacagagactcaggactgtttagaagtccaaatgctatttatttccccatactacaatggctgttgaaaattctcctataatatgctacaaatacaagtgtattagagagtttattgtgtatatttttgaacatagtgtaa

SEQ ID NO: 329698 - DNA, 509 bp, Homo sapiens
atgtagcaaactataaaggttattttgctctgaagaggaattcagaattagaacttggatgtagcaggacacctctgttctcattgccataaagaaaaaaaaaacaccttttatattgaatttcagtgaaccttgcagccagcatctgtcccattaattttcrtatacgagaacaatgtggcatgattactcaccagcaacagaagtagcagttttataaatcttatgttgtagtggctggaagggacagggttgtgctctcattgtttccatattctttgtgaaattcacctttgcagggggtggtttgctctttctcttccagatgtgcacagaaatatgccatgtcactaaacgtcatgtggcttaacatttctccaattttcagctaatctactgagaaagtagtaattttttctgactagtggtggcctacttctcctataaggctgtcttttacaatgagggaagttggcctcactttatttataaaggtgcacctaaggctg

SEQ ID NO: 329699 - DNA, 500 bp, Homo sapiens
agatttctggtgcctcttactggcttgttaagttggcagatttttctccccatttgcttccttcattataaaattcccatttccattttgcctctaggtagaagctcatggaactcaaatgggaaatgatgatggtggattttcctgctgaaaagatgtacctcaaaaggaaaaaatagtgtatttaacatggagaaatgaaatcctccgaagggagcttcatgaactaaattacccagaatggccttactgtctgttgtcagcatttttctgctgcccctttgagcatcagtttactcactcatgtgtgggtcagctctactcatctgtgaaggtagataataaaacctacccccaaaaggttgcagtgaagattaagtgatgtcatatttttaaaaatgcctctgtaggctctggtacattccaatggcttggtgaatttttttttttccktttccttttccaaagggaattaaaaaaaaatgagagtgagttttgag

SEQ ID NO: 329700 - DNA, 566 bp, Homo sapiens
accgcacagctgcatatctgagtgtttatcagtgaattacattgatgtaaattcatttatgaaaatrtcaagatatcgtgagcactagtgcttttaggagagaatatttaactcatttcagacaacatatattaacttcatcaaaagtttgcctgttataaacctgtgactcactcttggtcaccatgatggtgcaacagctgtccactggacaaatactaaataatattttatccttgccccctatttcttatgagaaagccacaatgaacttccttttgtctctcatttcacccttaaagggacaaatagcattgcattatccttgaaagggtcttctgctgacccatctttgacgcttccatcacagggtgacgatgggatgtttgctgtatcacacttccctgtgctttcatgaatgtgttactggtgatgaagaatgccaattctttgtttagtagcagtttgctgggtctccctgaaaataatgtgtcagttaggctacctataaatctgagtcagtaatgtacttctctaaggtatatttatgttttgaatttgtctct

SEQ ID NO: 329701 - DNA, 609 bp, Homo sapiens
actgatctgggatacagaaggattgtaagaattagtatcctccctaatggagttttcattctagtatgagagacaaaagtaacacttaaaagctaaaattgaatgagttagttacaaagtctgtggggttgactcgagtagagggtggttgatcagtgtaggtttaatgaaattaaaatgagtaagattctataaatgcaagactggccagagaaagtggggagctctggggccagaacagcagaggaccaaaggcatcctacacagccaattaaggaattttcctactgmagcatggggtccagggagcttcatttgtaatcccttgttctgctttgtttcattcttggactctaatatggtttgactgtgtcctcacttgaatctcaccttgagttataacaatccccacgtgtcaaggttggtgccaggtggagatgattgaatcatgggggcagtttcccccatactgttctcctggtaagtaaataagtctcattagatttgatggttttataaaaggcagttcccctgcacaagctctcttccccaccactgtgtaagacatcccttttctcttccttcatcttccattttgaatgtgaggcc

SEQ ID NO: 329702 - DNA, 420 bp, Homo sapiens
atgacttttctcatgaataatagggcctggggtgagtttctcaatatcacttayggcaataagaatttcagcaatcataatcttggtgcattttccaaaaaggatggctccccattgggtaacacaaggtgaaatgtgtattctgttagaaatttttgattccagcctagggaggtatcaagaataatgctgttgccataaagatataagtcttgagacaaacactggagaggttcagtcattcaatcaactatacatatattactgaacattttttatgttcaaatgctgtgctaagtatctgaataatattcacatgaagctgaaaatctatcaaaaatacatttgaatacagatacttggtaaaatctctaaaatgcacaaagcttcatggacacatgaaatttctttactatggag

SEQ ID NO: 329703 - DNA, 409 bp, Homo sapiens
agtctaatatattaccacctggttagtctagcctattccccttgtttttttctgtaaaatcctacaccaaagtgagaaacatggcttctaccttcctctatccattcacataattattaaattctattgtatgcttgtagctgaacaaaatttttaacccatattgctgtaggaaagacactttatcaactagagagtttgagtttatgtgcagttcctcttccttttagacttacagactccactcatttccaaaattactgttaaccacttttaccttcagtgaggttgtagtgtacatttgtgatayagttatattcttttggaacagcctgcattccatcctgtgataaatatgtattgcaaactctaaagaaacctttttaaaatgactaaaaagaagattaaa

SEQ ID NO: 329704 - DNA, 411 bp, Homo sapiens
  misc_feature (1)...(411): n = A,T,C or G
gagtgtcgattgcatgactttattgaagctagtttgaactcagactttcccccactgaatctgagatccactgaggcccagacaccaaggagctgttacacatgtataactattccattcacacctcttcaggagtttcaaacaagtttaattataagagaarcaaaagaaagcacttcttctttgccactgctaggaaaaaaaattgctttgcttggaaatcaattcattgtaagctttaatctgcctagttcggtttctcagaatgaatatttcaaatattaaatattttcttgagtagaatgtatagtacatattttatactaatatctatgntgtgtgttagacaattaagaagactggagtgttttccaaaaacttgaaaagtttcggtgactcgtatacagaagt

SEQ ID NO: 329705 - DNA, 479 bp, Homo sapiens
cagaacaaaatcatctgattccactctctgtgctcttaaatacttcactagaataagtcttattttttataattgatacaactggtctaaatattaatgaagttttaagattcaatttacatatagcttctgtctctgtaagttaccagttattactacctaaaatacacttgkagtcaatagtaacattgaatattcctagattttattttataataccaaccagaataggaggcctcaaaacacctgtgatggaaaaaatgcagtgcctgagtgcatgcagctaagcctgatcactagaatacatttcatttatattttataagataccaaagacttcagaactacaaagagaactatagttgctgcaaccagaaacctattcacatatacgtacttttataaatcatgtgcatatgtgtgtgggtaccttcatgtgtgtgcatatataaatacatctaaaagctgagaaccacctt

SEQ ID NO: 329706 - DNA, 479 bp, Homo sapiens
cagaacaaaatcatctgattccactctctgtgctcttaaatacttcactagaataagtcttattttttataattgatacaactggtctaaatattaatgaagttttaagattcaatttacatatagcttctgtctctgtaagttaccagttattactacctaaaatacacttgtagtcaatagtaacattgaatattcctagattttattttwtaataccaaccagaataggaggcctcaaaacacctgtgatggaaaaaatgcagtgcctgagtgcatgcagctaagcctgatcactagaatacatttcatttatattttataagataccaaagacttcagaactacaaagagaactatagttgctgcaaccagaaacctattcacatatacgtacttttataaatcatgtgcatatgtgtgtgggtaccttcatgtgtgtgcatatataaatacatctaaaagctgagaaccacctt

SEQ ID NO: 329707 - DNA, 479 bp, Homo sapiens
cagaacaaaatcatctgattccactctctgtgctcttaaatacttcactagaataagtcttattttttataattgatacaactggtctaaatattaatgaagttttaagattcaatttacatatagcttctgtctctgtaagttaccagttattactacctaaaatacacttgtagtcaatagtaacattgaatattcctagattttattttataataccaaccagaataggaggcctcaaaayacctgtgatggaaaaaatgcagtgcctgagtgcatgcagctaagcctgatcactagaatacatttcatttatattttataagataccaaagacttcagaactacaaagagaactatagttgctgcaaccagaaacctattcacatatacgtacttttataaatcatgtgcatatgtgtgtgggtaccttcatgtgtgtgcatatataaatacatctaaaagctgagaaccacctt

SEQ ID NO: 329708 - DNA, 571 bp, Homo sapiens
atttaaactgagtgataatagtgacacagcctatcaaaaccactgagatacagcaaaaaatggtgctaaggggaaagttcatagcattaaatgyttacatcaaaaagtctgaaagagcacaaatagacaatctaaggtcacacttcatggaactagagaaaaaagaacaaaccaaactgaaacccggcagaagaaaagaaataacgaggatcagagcagaactaaatgaaattgaaacaaacaaaaacaatacagaaaataaataaaaagctgtttctttgaaaatgtgaatgaaattgatataccattagtgagattaaccaagaaaagaagagagaacatccaaataatcgtaattagaaatgaaatgggagatactacagccaataccataaaaatacaaaagattattcaaggctactatgaacacctttacacacataaactagaaaacctaggggagatggataaattcctggaaatatacaaccctcctaggttaaaccaggaagatatagaacctctcaacagaccaataacaacctgcaagattgaaatggtaataaaaaaa

SEQ ID NO: 329709 - DNA, 560 bp, Homo sapiens
ctcaacccataaaagtaaacctagaggtcttaatttttattctaacaaggacaatgacatagaggtgactttatggcattatatttttccataatgtctcctgctaatggcgagataaaggtagataaaagtcatttaaccacatagtycactgagaagaaaatcaaatgagggctgatttattgatgtatattttggacatcccttctcaattccacatttagtgacatcatgttggtagcctgaaaacaatcatggtggggatatttacaccatggcaaacgggagaagccaagtccactcagatttgctgactcttattacagctcattccattgcctctgctattgaccaccacagccaccatgaaaacaactaatgcgataacaaggtggttatatataagttaacattttggaggcaagtctcctatcccaactctgccaagttcacttgctcctgatgtaggtaaagcttgtcaagaagtcattagaataattcctaaaatcagcactgaaattccagggctggcatttcagttgaaatattctaaaacaaga

SEQ ID NO: 329710 - DNA, 560 bp, Homo sapiens
ctcaacccataaaagtaaacctagaggtcttaatttttattctaacaaggacaatgacatagaggtgactttatggcattatatttttccataatgtctcctgctaatggcgagataaaggtagataaaagtcatttaaccacatagttcactgagaagaaaatcaaatgagggctgwtttattgatgtatattttggacatcccttctcaattccacatttagtgacatcatgttggtagcctgaaaacaatcatggtggggatatttacaccatggcaaacgggagaagccaagtccactcagatttgctgactcttattacagctcattccattgcctctgctattgaccaccacagccaccatgaaaacaactaatgcgataacaaggtggttatatataagttaacattttggaggcaagtctcctatcccaactctgccaagttcacttgctcctgatgtaggtaaagcttgtcaagaagtcattagaataattcctaaaatcagcactgaaattccagggctggcatttcagttgaaatattctaaaacaaga

SEQ ID NO: 329711 - DNA, 603 bp, Homo sapiens
gtaggtaaagcttgtcaagaagtcattagaataattcctaaaatcagcactgaaattccagggctggcatttcagttgaaatattctaaaacaagattgctgcttgaatcacttaggaaatagtaaatgatcacaatgtgtgttcagggaaacatcagctgaaagagaaatttcttttccttcatagaattaaaaaaawtttttaaattaagaaaattaacaaagtctcatatagaggggacatgcatattatgtaccactttatttcttagttaagggtttagatgatgtggaaattgatctatcaacatctccataattgcaaccaataccacaaaataaaatcctgagtgttcaccaatcatattttagtgctcaacatctcatggaagcagctgttaatgatgccaaatatagtttccacagcatgcaaaatgaactaatgaccaagtctacattttagatttcagagaggttctttttctttgctgcaattaatcctaaattctgcagagatcatagtctgctgattcacacagaggtcagagggaaggatggtttatgatgccagaggtctgtccagcatgctcttcctgttgccag

SEQ ID NO: 329712 - DNA, 603 bp, Homo sapiens
gtaggtaaagcttgtcaagaagtcattagaataattcctaaaatcagcactgaaattccagggctggcatttcagttgaaatattctaaaacaagattgctgcttgaatcacttaggaaatagtaaatgatcacaatgtgtgttcagggaaacatcagctgaaagagaaatttcttttccttcatagaattaaaaaaatwttttaaattaagaaaattaacaaagtctcatatagaggggacatgcatattatgtaccactttatttcttagttaagggtttagatgatgtggaaattgatctatcaacatctccataattgcaaccaataccacaaaataaaatcctgagtgttcaccaatcatattttagtgctcaacatctcatggaagcagctgttaatgatgccaaatatagtttccacagcatgcaaaatgaactaatgaccaagtctacattttagatttcagagaggttctttttctttgctgcaattaatcctaaattctgcagagatcatagtctgctgattcacacagaggtcagagggaaggatggtttatgatgccagaggtctgtccagcatgctcttcctgttgccag

SEQ ID NO: 329713 - DNA, 603 bp, Homo sapiens
gtaggtaaagcttgtcaagaagtcattagaataattcctaaaatcagcactgaaattccagggctggcatttcagttgaaatattctaaaacaagattgctgcttgaatcacttaggaaatagtaaatgatcacaatgtgtgttcagggaaacatcagctgaaagagaaatttcttttccttcatagaattaaaaaaattttttaaattaagaaaattaacaaagtctcatatagaggggacatgcatattatgtaccactttatttcttagttaagggtttagatgatgtggaaattgatctatcaacatctccataattgcaaccaataccacaaaataaaatcctgagtgttcaccaatcatattttagtgcycaacatctcatggaagcagctgttaatgatgccaaatatagtttccacagcatgcaaaatgaactaatgaccaagtctacattttagatttcagagaggttctttttctttgctgcaattaatcctaaattctgcagagatcatagtctgctgattcacacagaggtcagagggaaggatggtttatgatgccagaggtctgtccagcatgctcttcctgttgccag

SEQ ID NO: 329714 - DNA, 624 bp, Homo sapiens
aaactgtcaactcaatgtaatcgttcccaaggactaggaaatgtaatggcaaagtaaaatcactggacacttgttgagtgtccacatatgtgtggtcaggtaagttttacacatagtagtaaatggtcacctatatgttatgataaagtgattctgatgtaatgttttgaccaccaaatctttccaaaaataataaaacaagttgcttaaactggtatatmtctttgaatagtccaccttatcaatatgagaacatggttttggtataaagggtacctgagttacacacacacacacatacacacacacacacacacactttaagacttggtggcagccttcattaaatgctatataacacaaattattagatttgagaaaatgacaaaacaatatagggctccgggattttgatattatttatttatgaaactgttatgagtttttttaaaaaaaatcttttcaacttttagctcagaaaaaaatgagttaaatcttgagttttacaaagatacaacctgaagttttcctagaaggaaacaaaagatgtattcacccagaaggaaatgaatcatgcttaggaactggggtctgtatttgaaaacaaaagacaaagaaccatca

SEQ ID NO: 329715 - DNA, 630 bp, Homo sapiens
attgtcagatgaaagtagtttttggtaaattgacttagcttacttcttagctagaacaaatcttaaatgcaaaataacatttatacttacaaataaatagctgcattagaggatttttactgactgatatatcactaagattttaataagatgactgataattaaaatataaaattggaacataaaattaaattgagcaaactcacaaatttggagaagcattggctaatytgttattttcactatctttgctaaaatgcatataaatatattttggagggaaatgagtataagttgaaattttatataatgtcattaattatcagatacacaacaaatttatcttgcttaaagggggcatgttggctaaaatgattcagaagaaaataatcagatttctcccatttacctaagtcaatagaaaatatagatgggtggtaattttttaataataaggacataatataaaatccccctaaatttttaatcttttctttatgcaagccttttgtcatcaatataggatcatgttgaatattttcccattctggaaataaaacaataataactaacatttattaagcactttacatataataattcctttcatctcacattgattttatgaag

SEQ ID NO: 329716 - DNA, 600 bp, Homo sapiens
gtcctccctacctttctccttaccacttttctctgattttcaatcaagtttttttttattttatctcctgtatatgttatctgttcatcacctttccttcatcattacagccaccatctaaatcacttattttactgcatcaatacctattttagttaaggtaaggctaaacactgtaagaggtaaaatcctcaatccagtcattacataatcagtttgcttctcactcataagaaatcttagttgtgagttcctgattagtgagtgatttcggacctaagctctttccatcacatgatgtcactattttcaatacatggcttcttccayagtcgctgtattcacattaagccggtggagagggaaagaacatggatggttgtatgtggaaggctttatggttaagagttggaagtggtgctcatagcttccactcatattacattgaggataaatctatcatatgatcacatctaactttaagggaggctggaaaaggcaatctgactgtatgccaaagaaaaagaggtaataggtatgatgaacaactagccatacattaacccagttccctcagtggcctccatgcttccagcctag

SEQ ID NO: 329717 - DNA, 660 bp, Homo sapiens
tctgggaacatgagagactaataggatttgtttaatttggaacataatccagcaacagtttagagcataaagcggaagaatgagtggaaaatagggacaaggaaacaagtaggaaataagctgctgcagtacaaacacagaagaatgacaaagtcctggataaagacagagctgggggtctgccgaaagggcattgctgaattttggagaraactatttgcctattcataggatttaaattctgacattcaaagaaaatttttaaaattttgtttaataatatttgtatgaaatttggagaataaatatattcattgtgtttcccctcccctaaatatcgttttgcatcattgggaggtgaaacagatgctcaggaagcatgactgttacttgtagtttaaaaaatgacgtatttcttggttttaaaaaagaagactagtagtatagtatgatctataaaactgtattgccaacttggaaataaatgtctctatgataaaggtaagaaatattctttttgaaatattcatataattggatatgctttgtgtgtataaggggcttcacaagtgttctttttataagcttctgaaagaccagaggctctctctctctactaatcctatcatctgattagaatgcagatattttggagaaatt

SEQ ID NO: 329718 - DNA, 660 bp, Homo sapiens
tctgggaacatgagagactaataggatttgtttaatttggaacataatccagcaacagtttagagcataaagcggaagaatgagtggaaaatagggacaaggaaacaagtaggaaataagctgctgcagtacaaacacagaagaatgacaaagtcctggataaagacagagctgggggtctgccgaaagggcattgctgaattttggagagaactatttgcctattcataggatttaaattctgacattcaaagaaaatttttaaaattttgtttaataatatttgtatgmaatttggagaataaatatattcattgtgtttcccctcccctaaatatcgttttgcatcattgggaggtgaaacagatgctcaggaagcatgactgttacttgtagtttaaaaaatgacgtatttcttggttttaaaaaagaagactagtagtatagtatgatctataaaactgtattgccaacttggaaataaatgtctctatgataaaggtaagaaatattctttttgaaatattcatataattggatatgctttgtgtgtataaggggcttcacaagtgttctttttataagcttctgaaagaccagaggctctctctctctactaatcctatcatctgattagaatgcagatattttggagaaatt

SEQ ID NO: 329719 - DNA, 526 bp, Homo sapiens
agcactgggatctaagatgatgtgagggtttttgaggaagagtgactacaccagtttgcttagaaattagggtgtgcataaaagaagcaacgggaaatacctgcagtttgacatttgaccacattgtttgcatgtcatacacccctcagagattgcaaataccttgaagaaggtattgttgtgcacacacacaggtacccatgcattatatatgtatatatgtatatataagtgtggttttgtgtgtatccttgtatatataarctaatgtatacatatgtattcttatatatgtactaatatctatatatagatatttattcttttacacagccctaggtgcagtaatagatacccaataatcatttatctaactgaactgggttttttaacacctttttagcaaagttgtctatactgcttgatacaacagctgttaacttggtttgctaccaaacacagtagccgtcctcatccacaattttctgggtcagaaactgctcagattagaacatcaagaacatgc

SEQ ID NO: 329720 - DNA, 523 bp, Homo sapiens
cattccaaaagaggcagattggatagtaattggttccccttccattattataatgcagtgtttgatactaaaccccaagattcaggatgcctgactcaagtaaatcattgaagcccctgtgatgtatttttcattctaatcttcttcacrgacaaccacaggtaagaactggcattatgtgaggtcgtgaaactgctcagcctcaacaatttctccttgtcactacatagggtcccagtgcacagggcttgggcctttgtcttagtcccttttcctaagtcatgagtggatccctggcctgcacattgttcctttatcactgtccttatgacatttctgttttctgtgctgccttgttccagcctgtccctctgtacaggaaatggaattttgtcttatgagtcatcttggtgtttgagccttttctcctacgggaacacttcccagtgctaaccgttggtctgcctcactcctgagcaatcagccagttcctgaatttctctgtgttctgaattgcccctta

SEQ ID NO: 329721 - DNA, 567 bp, Homo sapiens
tatatgtgtaaaatgttaccactgtttacctctgaaaaatgctcccactggtgtttgatacgactttagtttttgtcccagtggagtcaataaagcataaagtcaagggtttctaaacacgacctgggtgcagatggcagccggtgaactgtgaaagctgaccctgcatccaatctgtgactcaactaatccttcagagctatttataatcataattttctcttgaaatcagatgacrtaactcccaaagggcttatattttgaactaaaaagtttgcagggaagggaagtaaagaaggaggcggccacggaaggagaggtcatgggattttgactcttacaatcatatgtcagtgaaaatatttctgtccacagtggactcttggaaaatgattacattcatgtactgatgtggttatttctgggcaattggtacccgcaattacaccttctaagtgctaaaattcaagtgctaggtgcagttaggagatactggtttctcaagtttgaaatgttcctttcctgctttactattcttataaaggacatgtttcacgcagcaacgaa

SEQ ID NO: 329722 - DNA, 591 bp, Homo sapiens
atgttctcagccaaaacataaaagattgtttaatagttataaaatgaacatttaacacaaaatttctgggagcaaatatgagaaaattctgctaatatataaaagataactatagaaaagggccggggtgtggtggctcatgcctgttaatcccagtgctttgggaagctgaagtgggagagtcactagaggctaggagttccagatcagcctgggcaacatagcgagggcctggtctctacaataaataacacttttttwaaaaaagtagctgggtgtggtggcgtgtgtctgtagtcttagctactggagaggctgagatgggaggattgtttaagcccagaggtttgaggttgcagtgagccatgattgcaccactacactccaagcctgaatggcagagaaagaccctatctcaaaaaaagaggataaagaaattttaccaaatttgtagcttattcaaagaaagtgtcacatgtgaacacaataaagcaccagagtaagaatagctttctccctatcaattgctcactcagtgaagttacaaagaaaatttcataagtaagagcttatgctttatgggggtgatgg

SEQ ID NO: 329723 - DNA, 615 bp, Homo sapiens
ttcttaaccacttttcctcctacttaaaaatctgaagatgctacatgtagttaagggctagcttctcttttgtattctgtttctaatttcaaacttcccattttctgcagttttacaagaggtatttcatgaagtgagttttatgagacaaggtgcccttggcttagtttaatgccacatgagaaaggaggtgtcggaacccaaaatagcctttagaagctttattcttcagtattcatttcacttggaggctctttgaaagwtttgacagcaaactagtcttcagtgatgagagcaggcattacccatgcagaagttatggtggtgaattttattagacatactttctgaagaataacatttaaattggatataatttgcctgaaagcaaatagaagtacagttgcatatattacaaatgaccttaaaagcagccatttgcttattttgaaactcttctgacaattttataaatctacaaactgcatatacttcattttaacgtttaccttggccttgtcataattcaacaatccccataaattgttctttaatgaaagttgcattttacagtataatctcagccatctatgcccaaactacgcagcaagagct

SEQ ID NO: 329724 - DNA, 530 bp, Homo sapiens
aattctgattagttgggttagacaaaacttcaaaaaggaagtttcctgatgcatataaagatttagaaagtatgcagatgtaagggcatcagaaaaggcatggggacataaaacacaaggtaaatttaagaagtagtgattggttaagtgarccttgagggagagtggctgagtagagggagataaatatggaaaggaagattagaatcaggctatccatggctttccagaaccctaacatacgaacactatgaagccattacaggattacatgaaaaggtggtatcatcggattcgtccctaaaaagataactttaagtgaggaagggtgcaatcatgtccacccaaaacacaagcctagaaaatggaaggtggctgagaaatggttgagagccaaccaagagatagtcatccacttagaggcaagaactgcaacacagctcatcacaaggaagtgggtgctgacttccctaccttgatctgcaggcatcagtggagccacatggtagcttgggacaaactgcttataa

SEQ ID NO: 329725 - DNA, 582 bp, Homo sapiens
agaattatggtattcaggataggattgattatgctgcagtgacaaacagccttcaaagttcagtggactaaaaaacataatttatttcttgcttaaactgggtgtcaattatcagttgaagattggcagggggttctactccatgtcatctttgtgtatcatctttacgtgaatactttatgtattcaggagatctcgttcgtgaaagtgtggttgacaatttggttatcagactaaagtcttatggttgcaaagtgatatattttcaaaggtatacagtacatagatttactgataaaattatagccactcaagaagagtttctgaaatgcaggtttctatatactacttctyggaatcaccatataattagatttattaaaattagattaagtttaataagtgaaaattagatccattatttaaccagagaatttaggtactcagaaattccaattttcaaccatactgattaactgacatcttaatgtagtgagtattttattctgtttaccctgtgctcgatctcacagaattgaaacagataggtttttatattacaaatataaacttttattttaa

SEQ ID NO: 329726 - DNA, 544 bp, Homo sapiens
attttttctaaagtgttgtatagtaaaaaagatataaactaacaggttgagagagggaatatcaccaagtaaagaatgttttagttaaatarttcttattttctgagaagcctccttgtcctgtttgttctcaatctgatgacataaaagccaagcatctgcagtagtttagaaatgtaaatcatcagggtttataaaaaattctcaagaaataaagaattaaccttttactcagtgggaacccccaagttggaactgtaaatataaatagcaaccttctaagagtctgaactaactcttgtttgttagctttggagtttgataaaagatttattgacctcctttgagatttactgatgtaaaatgccttctaacagaacttataataacttttaatatataaagagataaagcaagcatttggggatcaaataagggccaaatgcaaggaatttaataacgacatacaagcaaaccaaaaactgtttcattggtgcttgtttccaagtgattaaaaataccatttgaagctcttactattatt

SEQ ID NO: 329727 - DNA, 577 bp, Homo sapiens
ttcttgcctcggaaggtattcagacttctgtgtagacacctcccatactaaacagtgtcracctgtgtaagcaatagtatactgtgaaaattacaaagtgagactttgagaccaggccataaaagacattctggcttcttcctggctatccttctgggggaaaccagacaccattttatgagatactcaagcagctctatggagaggtcaatgacatgaggaaatgaggcctctagccaataaccagccctaactcttcggacatgtgagtgagccaccttgaacgtggatcccccagcctcagacaagccttaggccacatcttgactgaaattttacgagagtcatggagccagaaccatgccctctgaattctggataaaactgcgaagtaattaatgtccattgttttaagcactaaattttgaggtagttctttttgtacctcaaaaaaaaaattttgtacctcaagaaaaaatagatagttaatgtactggtgaatgtatgcatgtataaaaaacacttgcctacatatattacctagctctatccattgacagactctggatacaataac

SEQ ID NO: 329728 - DNA, 489 bp, Homo sapiens
caatcaggcaagagaaagaaataaacagcattggaaaagagaaactaaaattatcctcatttgctgatgatataattttatatctagaaaaacctaaagactttaccaaaaaaccctcttggatttgataaatgaattcagtaaagttgcaggatagaaaatcaatgtacaacaatcaatagcatttccatgcaccaataacaatctggctaagaaaaacttaagaaggcaattccatttatcatatctacaaaaagtaaaatgcctagaaataaatttaacacaggaagtgaaagatatctacaggaaaaactacaaaacacttatgaaagaaattaaaggtgacmcaaactaatggaaaagcatctcacgctaatggatctgaagagttaattttgtaaatatgaccatactgcccaaagcaatctaaagattcagtgcaatttctatcaaaatacctagctcactttttttttacataattagaaa

SEQ ID NO: 329729 - DNA, 530 bp, Homo sapiens
aaattggaaaaaaaagagagcagtttactctttattatgcccaagagaacatgtgatattagtctggggataatctcatgtgtcttaattaaacaaatattatatgaatatgcattggaggctttgactcaattctgatcgtacatgcttagcccaattttagttatatcctcacgatattctagatgttgcaaccactatcagtttcccaactaaacaacagattccatatggacacattagttttgtagagttcacatcaccagtttttattttacaaacttaatctcttttaattaattttaagtatcaacatcatgtgctgaaggctactcatacaccaatttgaagactagcttataaaaagtctgaaatatttatatattaaattatcagaagttttcataaggttaataakttagatttgcttttatggagtgttgttcagcaaattgtgtataccaattgccaatatctcttactttatgtttcatctgtgcactctcatgtattaggtctcaaatattgtc

SEQ ID NO: 329730 - DNA, 530 bp, Homo sapiens
aaattggaaaaaaaagagagcagtttactctttattatgcccaagagaacatgtgatattagtctggggataatctcatgtgtcttaattaaacaaatattatatgaatatgcattggaggctttgactcaattctgatcgtacatgcttagcccaattttagttatatcctcacgatattctagatgttgcaaccactatcagtttcccaactaaacaacagattccatatggacacattagttttgtagagttcacatcaccagtttttattttacaaacttaatctcttttaattaattttaagtatcaacatcatgtgctgaaggctactcatacaccaatttgaagactagcttataaaaagtctgaaatatttatatattaaattatcagaagttttcataaggttaataagttagatttgcttttatrgagtgttgttcagcaaattgtgtataccaattgccaatatctcttactttatgtttcatctgtgcactctcatgtattaggtctcaaatattgtc

SEQ ID NO: 329731 - DNA, 584 bp, Homo sapiens
agacaccacttcaatcaaatgatcaaagtaagcatcattaataatgcaataaattgaaattgccacctactagggcatatgaggagactgcatcagttttgtgactctactattaaagacacataacctgaatctattcctagagatgttactatacgcatcatgccaactttaacttatagaaatgcagcaaaaatctcaaatgtttccttctgggtcagcagataccctatacacggtacaagcattgataactcttcttattgtaccactcatcctttcctcccttagacatatctctgatctatcatcttaatctctttgctatttttatatttttagatatgcagcacatttttctaattagagcacttctacttcctcagaatttgtataaaaacagatagcaacatgaatatcactagaagattttatctggagactaacctagtatcttttaaaataccagatctctgtcaagaacaaagtttccacaggacagtagattataaacatctggcacccaatggccagtgattsagttactggctgacatttcaaccctgaactcatctagcaaatgg

SEQ ID NO: 329732 - DNA, 591 bp, Homo sapiens
atctcatgttgaaatgtaattcccaatgttggaagtggggcctgattggaagtgtttgggtcatggggacagatccctcatggatggcttggtgctgccctcatgatagtgagcgaattctcatgatatctggtggtttaaaagtgtgtggcatctcctagtctcctctcttgctcccactctccctatgtgatgtgcctgctccccttagcttccactataattggaatcttcctgaggcccccaccagaagcagatgcagtgccatgcttgtcagcctgcagagccatgaaccaatgggatattcctttctagcaattcaagaacagcctaatatagtggctctaccaaagaacctacatgtgtcctcttcagaatggtggattccaggtagtaagatttcctagatggtggcagatttcctccagggcaagcattccaaaaacaccagggggaaccatacagtcyttctaacctagcctaaattattagccaattgttaaacattcatcaaaacaccactgacttagttcttccttctttgctttctatgtttgtgtacatgctgaaaagcatttagaaaactatgaa

SEQ ID NO: 329733 - DNA, 539 bp, Homo sapiens
agtatatatccaaaagaaaataagttgttctaccaaaaagacatgtgcacccatatgtttatgacagccctactcacaatagtaaagatatggaatcaacatggaatgctacgcagtcatataaaggaatgaacatgtgttctttgcagcaacattgatgtagctgggggccattatcctaagtaaattaatgcagaagcagaaaaccaaatactacctgttttcacttataagtgggagctamacattgggtactcatggacataaagatggcaacaataaacactggggactaatagaggtgggagaaagggggcaaggtttgaaaaactaaccatttcataccatgctcactacctgggtgacagaatcaatcataccccaaacctaagcatcatgcagtatagccatgtaacaaacgtgtacatgtactttctgaatctaaaataaaacttgaaattatttttaaaattataaaccaaaaccaaataaaaaatttaaaaaaatatttttgcaacacagtcaatcctattcgttaa

SEQ ID NO: 329734 - DNA, 628 bp, Homo sapiens
tgaacttatgtaaataattatattaccatgaaaataagaatattcaaaaagagctttggaattctgaagggatcaggaaagggaaaagataaatgtttcatttctgtttacaaaagtataatatactaaatcattgtaatttatggatagtttaagagaaaaaagaaaggggtttcttatatccaaaaaatggagcattaaagaactaacaatattccaaagaaaaaccattatcttctctcaccagttcattcagtcccatgttattaattcttattctactcagycttgagttaatagtttcataaacccatcagcttttcaataaaactcttgggacttacatatgattccaaggaagacaggtaatgaatgagattaaattttctgctaaacaggtggctgggtctcagattcagaatatatttgatttaaagaaactaaagcatgttgatatgttttgtatctctgagtatatgaagtaaagttcatatctgttgtattcaagtttcttgaggacagaggctttgtcttacttctattttcttaaagctgacgctggataagtgattcaaaaatatttgctaaatggaattgaaagaaaaagtcaatgaacaaaataaatata

SEQ ID NO: 329735 - DNA, 578 bp, Homo sapiens
tgtaacatctccctggttccctcattggtaaatgagtagaataaaatatttaccgtctgttcatttttatttctttgacagtcatgagtttcaccttttttgaaaattagtttttaagacttcccaaaataatattagttttaggagaaagtaaatattcaattcaaaaaacacacatagttaaaaacagaatcaaaaagaggacattcaagctgtcaaaataaattargaggtaagcttggaataattattagtgtgttaaggatacaggtaaatatttatgctcataatacatcacctaagcccattgcagtagcaacagcattcaggtaatactctaaaagccatctataaatacattgttttaattatttaccccattgccttcatcaaaatgtagaggtgagtcaaatcccaaagccaatttcctttttctccctgtatttacatttgtttctttctttttgctaaatatccatgcaaaaatcacactagtgttaaaatgtgtacatgttatagggctcagttatcctcttttgagtctattaagaaatctcctgtggtctacttccaggtaa

SEQ ID NO: 329736 - DNA, 380 bp, Homo sapiens
atatagtgatttaaacaggggaagtttaatatacaaagttattaaactatggtcaaagtgtaactataaaatatttttaaggctaaatatgctaccgtaggatgaggagagcactaaagaaaggccaaatttggaacgtgtgacttctccccaagtctgggttggaaaaagtaagattgcagcccagtgracagcagagaggtttcctctttgcctggaccagatcttctgcagtcactgagcaagcaggaaacaaccctctggggctcacgctttatacagccagtggccagcacgctggcaagcagagtcaaccttccaggcatggtgagagtataagtgagcttcagaaagtggttagagacataggagtaataaga

SEQ ID NO: 329737 - DNA, 380 bp, Homo sapiens
atatagtgatttaaacaggggaagtttaatatacaaagttattaaactatggtcaaagtgtaactataaaatatttttaaggctaaatatgctaccgtaggatgaggagagcactaaagaaaggccaaatttggaacgtgtgacttctccccaagtctgggttggaaaaagtaagattgcagcccagtggacagcagagaggtttcctctttgcctggaccagatcttctgcagtcactgagcaagcaggaaacaaccctctggggctcacgctttatacagccagtggccagcacgctggcaagcagagwcaaccttccaggcatggtgagagtataagtgagcttcagaaagtggttagagacataggagtaataaga

SEQ ID NO: 329738 - DNA, 562 bp, Homo sapiens
ggcatagtaataactgcacctacctcatagtatcactgtgataataaaatgagaagcattttgcacagtgcctggtacacagcatgtgaaatattagcaccatgtttgytacatagaaaacactttataaatgaggtatattattaaaatttgttgcattaattaaaagctatctgccacaccttgatctcccccataaggccatttctttctgattttcttgaacaatgaaattatgcttcatatggaactattttattgtaatatttccactgcaggatatattatttattcagtgttctgtagatccattaagggatgtctctcttccagagttaactgctgatcattgatcaattttcaaagggtttattaacttttttattttaaaaaatatagaatcatatttccctctgagaaatcatcacatgatattagatcaaaaacagaattttcataaactccaaacttttgcatttctaggtagtcagtaaagaaagatgggcaatgcagtgtgatttccagaacatttacatttgtaatttaaaagattttagaaaaa

SEQ ID NO: 329739 - DNA, 647 bp, Homo sapiens
atatggttaacccagttatcccagcactattcattaaatagggagtcctttccccattatttgttgttaactttgtcagagatcatgtggtttttagtgtatggatttattaatatttgagttttctatcctgttcaattggtctatgtgtctgttattgtaccactaccatgctagtttggttactgtagccctgtagtatactttaaagttggataatgtgatgtctttggctttgttctgcttaggattgctttggtgattcaggctcttttttggttccatgtgaattttagttttttctaattctgttaaaatggttttggtagtttgatgggagtagcactgaatctataaattgctttggacagtatggccattttaacaatattgattttttcctctccatgagcatggaatgtttttccatttgtgtatttcctgatttctgtcagcatcattttgtaattcttgttgtagagayttttcacctccttggttagaggtattctgaggtattttctcctttttgtggctattgtgaatggaattgcattcttgattaggatctcaatgtggatgttattagtatatagaaatgctactaatttttgtatactgacttttgtatcctgaaactttactaa

SEQ ID NO: 329740 - DNA, 561 bp, Homo sapiens
actggcacttctagcaacatacgataatttttaattggttatttccagtgctttgaaagatgtatgaataaaaacttgcatctttgctgtgcctccaatagggtacagaaaacttatcatttcaaacgaagatatattacttcaacaattgtaggaaaggtgctaatgatgtgttgagtagcaaagatctaatgttaggcaatggatggtgttttacaagaaaggatcaaatagagtgcaaatattttcttaccaacattgccctgctctgcttctcatgtcctccctacaataccaaaatatgagctcaactgactaaattataaagcatttgactgacttagaagacattattactatctcccatacatgctttcctagatttagaagggcatttagaattaggtttgtcagatcttacacctgtyagaatggctattatcaaaaagacaaggaagaaaaaggaactctggtgcactgctggtgggattttaaattagtacagccattatgaaaaacaacataaaggctcctcaacaaactaaaaacagaactgccata

SEQ ID NO: 329741 - DNA, 577 bp, Homo sapiens
cagatgccagggctcaggaaataagaatgccttcaaatcttttaaacaattaagccaatgcaatcatctagagatcattcaaagttagtaagatgagatctatccattgatatttctggtagaacagaatgtgaaaagcatttgagagagaaagaaaggatagtgaatagaaataataatatttagtacaaaacatgttgatataaagagttttcccaaaatcctatagaaaacctcttgtgatacagtaggaattcttattcagttctttttactgattaaatcatagcaaggggccaaataacttcctaattcactcagctaccacatggcacatacaggactctattcaatatctttaactacaaattctcacctctactgtatacttcctatttaatttgagagggcaccacagagggcctaaccaggctgaagacatggtcagatattgattttgaatctgttgaatgaggaatagaagtrctgatctgaataaagtcaataaaataatctctggttatgtgattacttatcactttccacccccactgtttaatcctctgttatagaatta

SEQ ID NO: 329742 - DNA, 617 bp, Homo sapiens
gctgatgtctgccactgcatcaccatctgtctgtttatttgtttatgtgagcaacatgtattgaacctctagtgagagccggaaatggggatggggataataaaaagatgacactgagagcctgtggcatttctcctttgttggtagctgcagaaccaacatcagcactctttcattacagtaacaggctagtcctcatcttttagtttagggaccactgaattagtttttaatctaaatctatattctcttaggatagtcttatattccattctgtaagtcatattattaatattaatattaagctctttgtcaactaaagtctttatattctcataagaattgctgttaaaccagattcctttcatgaacttgtataattgattcttttattctaagtacagtttacttcatcatcacataacttcatgtcatattttcaagcccagagagaatgttttgaatttctgtcgtgctgttatagawctccaaaatattggtctcctaaggatttataagcatgcttttgtccttacatgaatcactgataaacataaggaacaggacaaggccagacacaagcccagaagcattttatttattcagtcaggcacaaa

SEQ ID NO: 329743 - DNA, 504 bp, Homo sapiens
taaatggggaacacaggcagggtcccatttactgaggcccatttactttagctgtaaatatggagtgatttaagaggcattaggaaagcttcctgacttcaagcatttgttttaccaatgtaatagagaacttgaaattccacctttaaaaatttatattttgttttactaagtgtcttttgaaaataaaacctttcttgaggttttgttcttttaaggtggctacagttgtttttattttaataaatatttacgwaggattgtatttctcttagagtttctgcttccttcatttcttccttcctgttatttttcttccatcctctcttccttccttctttcttttcttccttctttctttccttctcatctttgtttcttccacaaataatgaacctttacgatgtgccaagtattatgtaaagctggggatacaaggatgaatgtgactcctcaaatatctcatcatttaaagaggcacatgtatatcaattcaacgatagc

SEQ ID NO: 329744 - DNA, 615 bp, Homo sapiens
tttgttcttttaaggtggctacagttgtttttattttaataaatatttacgaaggattgtatttctcttagagtttctgcttccttcatttcttccttcctgttatttttcttccatcctctcttccttccttctttcttttcttccttctttctttccttctcatctttgtttcttccacaaataatgaacctttacgatgtgccaagtattatstaaagctggggatacaaggatgaatgtgactcctcaaatatctcatcatttaaagaggcacatgtatatcaattcaacgatagcatagtgaaataactagtaccatggagatgtgttggtcagtgcacccaactcaggagatttcctagagggtaagaaagaaggacgatgtcacttgaaatatgcaatactacttaaagcagggtggcttgggagggggacgctggcaggtgacccccagtagtgagaggatagttatcagaagttagtaaaacactggtgccacagagggtgcctaggtctgtcctgaacacaggaactttgagtaatagcaaggcaggccataaaccacaatgcctaattcttgagcttcaatgtttttattgactaccaatgagc

SEQ ID NO: 329745 - DNA, 504 bp, Homo sapiens
taaatggggaacacaggcagggtcccatttactgaggcccatttactttagctgtaaatatggagtgatttaagaggcattaggaaagcttcctgacttcaagcatttgttttaccaatgtaatagagaacttgaaattccacctttaaaaatttatattttgttttactaagtgtcttttgaaaataaaacctttcttgaggttttgttcttttaaggtggctacagttgtttttattttaataaatatttacgaaggattgtatttctcttagagtttctgcttccttcatttcttccttcctgttatttttcttccatcctctcttccttccttctttcttttcttccttctttctttccttctcatctttgtttcttccacaaataatgaacctttacgatgtgccaagtattatgtaaagctggggatacmaggatgaatgtgactcctcaaatatctcatcatttaaagaggcacatgtatatcaattcaacgatagc

SEQ ID NO: 329746 - DNA, 615 bp, Homo sapiens
tttgttcttttaaggtggctacagttgtttttattttaataaatatttacgaaggattgtatttctcttagagtttctgcttccttcatttcttccttcctgttatttttcttccatcctctcttccttccttctttcttttcttccttctttctttccttctcatctttgtttcttccacaaataatgaacctttacgatgtgccaagtattatgtaaagctggggatacaaggatgaatgtgactcctcaaatatctcatcatttaaagaggcacatgtatatcaattcaacgatagcatagtgaaataactagtaccatggagatgtgttggtcagtgcacccaactcaggagatttcctagagggtaagaaagaaggacgatgtcacttgraatatgcaatactacttaaagcagggtggcttgggagggggacgctggcaggtgacccccagtagtgagaggatagttatcagaagttagtaaaacactggtgccacagagggtgcctaggtctgtcctgaacacaggaactttgagtaatagcaaggcaggccataaaccacaatgcctaattcttgagcttcaatgtttttattgactaccaatgagc

SEQ ID NO: 329747 - DNA, 615 bp, Homo sapiens
tttgttcttttaaggtggctacagttgtttttattttaataaatatttacgaaggattgtatttctcttagagtttctgcttccttcatttcttccttcctgttatttttcttccatcctctcttccttccttctttcttttcttccttctttctttccttctcatctttgtttcttccacaaataatgaacctttacgatgtgccaagtattatgtaaagctggggatacaaggatgaatgtgactcctcaaatatctcatcatttaaagaggcacatgtatatcaattcaacgatagcatagtgaaataactagtaccatggagatgtgttggtcagtgcacccaactcaggagatttcctagagggtaagaaagaaggacgatgtcacttgaaatatgcaatactacttaaagcagggtggcttgggagggggacgctggcaggtgacccccagtagtgagaggatagttatcagaagttagtaaaacactggygccacagagggtgcctaggtctgtcctgaacacaggaactttgagtaatagcaaggcaggccataaaccacaatgcctaattcttgagcttcaatgtttttattgactaccaatgagc

SEQ ID NO: 329748 - DNA, 615 bp, Homo sapiens
tttgttcttttaaggtggctacagttgtttttattttaataaatatttacgaaggattgtatttctcttagagtttctgcttccttcatttcttccttcctgttatttttcttccatcctctcttccttccttctttcttttcttccttctttctttccttctcatctttgtttcttccacaaataatgaacctttacgatgtgccaagtattatgtaaagctggggatacaaggatgaatgtgactcctcaaatatctcatcatttaaagaggcacatgtatatcaattcaacgatagcatagtgaaataactagtaccatggagatgtgttggtcagtgcacccaactcaggagatttcctagagggtaagaaagaaggacgatgtcacttgaaatatgcaatactacttaaagcagggtggcttgggagggggacgctggcaggtgacccccagtagtgagaggatagttatcagaagttagtaaaacactggtgccacagagggtgcctakgtctgtcctgaacacaggaactttgagtaatagcaaggcaggccataaaccacaatgcctaattcttgagcttcaatgtttttattgactaccaatgagc

SEQ ID NO: 329749 - DNA, 583 bp, Homo sapiens
cctatggaaactaaagtaacgtcttaacatactctgagttgtttttcaggaacctggacccctaccacatgaatccactggctggcacatagacctcagataaggaggtactaaagactgaacgctgatggctgttttccttctaaacttcttcccaaagggcctcaaggaggtcatgcccacgagccagagctaacattcttttctgctgaccccaaaattttaaacaaagcttctcttccttgatcaattgcaaatcagaaaatctttgaatttacctatgacctgtaagccacccctscaccccccgccacccacgacccccactttaagatatcccacccttttaggccaaaactaatctgtaacctccaggtattggtttgcaattttgcctgcagtttctgctttcctgaaattaaaccctgcctttaaaaatccttacctgcaaaccactagggaggtcagagtttgagcattagctacctggtgctccttgcttggcacccggcaaataaatgccttccttttccccactgcaaactcggtgtggttatctggtcttactgtgctgggtgagtgg

SEQ ID NO: 329750 - DNA, 578 bp, Homo sapiens
gctccttgcttggcacccggcaaataaatgccttccttttccccactgcaaactcggtgtggttatctggtcttactgtgctgggtgagtggaccccagttcagttctataacaggctgggctgggtaaaccttcccatatttgaatggtaggagaatacttattcatcaaccgttaragatccaacataggaagaaaaaattagtccttattttgtctgtcttgtcagattgtggagagggtcaagcaagtgtcaggtgagttgtgtgtgtgtatgtgtgtgcgtgtgcatactcactagggttgggggtgtggtgagggtaggttagaagaaataacttaattcaaataccacaggatatgcaggtagaaacagtatgtgagaatcagtaaggtgttctctgaaatttgaccagtggtatcctggatgatgtagaccgtagactgtgcagtgtccagttcttttattaagtacatggggtctgtagtcacacttcctggggcaaaatcctgcctcttatgtttttgaccttcggcaagttacctcacctcgcaaaacctgtttcctcaccggtaaa

SEQ ID NO: 329751 - DNA, 578 bp, Homo sapiens
gctccttgcttggcacccggcaaataaatgccttccttttccccactgcaaactcggtgtggttatctggtcttactgtgctgggtgagtggaccccagttcagttctataacaggctgggctgggtaaaccttcccatatttgaatggtaggagaatacttattcatcaaccgttaaagatccaacataggaagaaaaaattagtccttattttgtctgtcttgtcagattgtggagagggtcaagcaagtgtcaggtgagttgtgtgtgtgtatgtgtgtgcrtgtgcatactcactagggttgggggtgtggtgagggtaggttagaagaaataacttaattcaaataccacaggatatgcaggtagaaacagtatgtgagaatcagtaaggtgttctctgaaatttgaccagtggtatcctggatgatgtagaccgtagactgtgcagtgtccagttcttttattaagtacatggggtctgtagtcacacttcctggggcaaaatcctgcctcttatgtttttgaccttcggcaagttacctcacctcgcaaaacctgtttcctcaccggtaaa

SEQ ID NO: 329752 - DNA, 578 bp, Homo sapiens
gctccttgcttggcacccggcaaataaatgccttccttttccccactgcaaactcggtgtggttatctggtcttactgtgctgggtgagtggaccccagttcagttctataacaggctgggctgggtaaaccttcccatatttgaatggtaggagaatacttattcatcaaccgttaaagatccaacataggaagaaaaaattagtccttattttgtctgtcttgtcagattgtggagagggtcaagcaagtgtcaggtgagttgtgtgtgtgtatgtgtgtgcgtgtgcatactcactagggttgggggtgtggtgagggtaggttagaagaaataacttaattcaaataccacaggatatgcaggtagaaacagtatgtgagaatcagtaaggtgttctctgaaatttgaccagtggtatcctggatgatgtagaccgtagactgtgcagtgtccagttcttttattaagtacatggggtctgtagtcayacttcctggggcaaaatcctgcctcttatgtttttgaccttcggcaagttacctcacctcgcaaaacctgtttcctcaccggtaaa

SEQ ID NO: 329753 - DNA, 586 bp, Homo sapiens
acagtattaagagtgaatagtaagcccaagttaagagccagattaaagatcagacaaatagacaatgacccagggcaccaagctatgaagtgtgatgtgttagttagctaagattgccatagcaaagtgctgcaaaccgggtggcttaaacaacagaaatgcatcatctcacagttctggaggctggaaatccaagatcaatgtattaacyggtttggtttcttgtgaggctgcaagggaaggatcttttccatgtctgtgtcccatctgctgattgcttcccaccagtctttggtatcacttggcttggagaaggattatctttgccttcatcttcacatggcattccccctgtgtgtgcctgttcaaattccgcccccctcccttttaaaaataaagccaccaatcatatcagatcagggcccaccccagtgacttcattttaactaattgaatttgccaaaatccaacttccaagtaaggtcattttctgaggttctgtgagctagaacttttaacatatacaattcaacccataacaagtgataagtccccataggaataaattgaaaatcagtttgcgggt

SEQ ID NO: 329754 - DNA, 563 bp, Homo sapiens
tgtgtcatctgtgatttctttcagcagtgttttgtagttttccttgtaaaggtctttcaactccttggttaggtacattcataagatttttttttttcttcagctattgtaaaagggattgaggtcttgatttgagtctctctttggttgctgttggtgtagagaagagctactgatttgtgtacattaatcttgtatwcagaaactttgctgaattcttttatcagttctaggagctttctggaggaaagctagggttttcaaggtaaacgatcatatcatcagcaaacagtgacagtttgacttcctcttaccaatctggataccatttatttctttctcttgtctgattgctctggctaggacttccagtactatgttgaagaggagtggtgaaagtgggcctccttgtcttgttccagttctcagagagtatgcttttaacttttcccctttcagtattatgttggctgcgggtttgtcatagatggtttttatcacactatggtatgtcccttgtaggccaattttgctgagagttttaatcagaaagggacactgaa

SEQ ID NO: 329755 - DNA, 563 bp, Homo sapiens
tgtgtcatctgtgatttctttcagcagtgttttgtagttttccttgtaaaggtctttcaactccttggttaggtacattcataagatttttttttttcttcagctattgtaaaagggattgaggtcttgatttgagtctctctttggttgctgttggtgtagagaagagctactgatttgtgtacattaatcttgtattcagaaactttgctgaattcttttatcagttctaggagctttctggaggaaagctagggttttcaaggtaaacgatcatatcatcagcaaacagtgacagtttgacttcctcttaccaatctggataccatttatttctttctcttgtctgattgctctggctaggacttccagtactatgttgaagaggagtggtgaaagtgggcctccttgtcttgttccagttctcagagagtatgcttttaacttttcccctttcagtattatgttggctgcgggtttgtcatagatggtttttatsacactatggtatgtcccttgtaggccaattttgctgagagttttaatcagaaagggacactgaa

SEQ ID NO: 329756 - DNA, 557 bp, Homo sapiens
tgcttttaacttttcccctttcagtattatgttggctgcgggtttgtcatagatggtttttatcacactatggtatgtcccttgtaggccaattttgctgagagttttaatcagaaagggacactgaattctgttgaatgcttttttttgcatctattgagattatcatgtgatttttgtttttaattctgtttatacagtgtttcacatttattgacttgcatatgttaaaccatccctgcatcccttgtatgaaacccacttgatcatggtggatttttttttgataygttggattttgttagtattttgttaaggattttagcatctatgttcatcaaggatattggtctgtagttttgttttttgattatgtccttccctggttttggtgttagggtggtgctggcttcatagaaggaattagggagggttccttctttctctgtcttatggaatagcatcattatataatgtccctctttgtctcttaactgctattgctttaagtttgttttgtctgatataaaaataagtacccctgcttgattttggca

SEQ ID NO: 329757 - DNA, 557 bp, Homo sapiens
tgcttttaacttttcccctttcagtattatgttggctgcgggtttgtcatagatggtttttatcacactatggtatgtcccttgtaggccaattttgctgagagttttaatcagaaagggacactgaattctgttgaatgcttttttttgcatctattgagattatcatgtgatttttgtttttaattctgtttatacagtgtttcacatttattgacttgcatatgttaaaccatccctgcatcccttgtatgaaacccacttgatcatggtggatttttttttgatatgttggattttgttagtattttgttaaggattttagcatctatgttcatcaaggatattggtctgtagttttgttttttgattatgtccttccctggttttggtgttagggtgrtgctggcttcatagaaggaattagggagggttccttctttctctgtcttatggaatagcatcattatataatgtccctctttgtctcttaactgctattgctttaagtttgttttgtctgatataaaaataagtacccctgcttgattttggca

SEQ ID NO: 329758 - DNA, 658 bp, Homo sapiens
tttcagtttaggttataattcctgtgtgtactatgttacatttactatgtttgtttatgtgttgtatcttctttgctactttttagaatttactttggtagttaggaagccttttatttaaatacaaagttacctttgtactgrtatctttttacagttttctcttgtttattttctggtgtgtcagttctattagttttcaattgctgccataacaaaggacaacaatcttagtgacttaaaatgaaacaaatttattatcttaacaggctaagatcacagcctaatcagggatgcaaccctttctggaggctccaggggagaatctgtttccttgctaatgcagatttctggcagaattcattccttgtggttgtagaattaaggttgccttatccttgcaagttgtcagctgagggtcattccagcttccagatgctgcccacattgcttgacatatagcttccttccatcatcttcacggccagtggcgcatggagtccctcttatgcttcaaatctctcctatctcttcttccattgtcacatctctctgactgactgtctgccctcttatttcacttttaagagcccatgtgattacattggtcccatctgaatcatcaaggataatctgtctcttttaaggcttgtggcat

SEQ ID NO: 329759 - DNA, 634 bp, Homo sapiens
tgttgaaacgaagtcctgtggcacctgattcctgtaaatagaagagaagaaccccaggaggcgcatgtgtgtaatactctactttgatgaagtttttattgatgaaagatttcttctatattctgtataaataaaaagggttactactcatgtgagctgagccacagtggaaagtttcctgcaaagtcagtgaaaggtaacacrtggattactgggaggatgtaaaaatgcaagcaaagtcccctgtgatggcaggaggaagcattaggtgctaaagttggacgcatagaacaaaaataaaacataggctacactaaactgtgagaattccttaaagtgctcataaaaataagcacatacacctagtttggggcttttaacccagtacagtaatacatactgtatgtattaatgtagtgtatatataaaatctataaaatgtaattttatggtattataaattataccatttaaaactgttattttcctatctctttaaaaagtgccaagcatatctcaatacatttatatatgtgtgatattggtggctagtttgagatagtctttattatgctaattaattagatgcttctttatttaaagtttgcaaggacagatgttgaatattgactaa

SEQ ID NO: 329760 - DNA, 623 bp, Homo sapiens
aattaagaaacttgtctaagatcagataggtagtaaatagtggagtcagcactcaatcccaggaactccgatcagagtctgtgctttcattcactactctccattgggtgggcacagtgtgaggacattaaatggacatcaacatccacttctaaagcttgggtttggkaagatttggattagagaataaagactggcaagtgggggcttgagcaagtgttaaccaaaaaaataaagaaatatggtgtcatctgtgccttcaaagatgaagagttatggagtgaattgcccaaattcacacaaagtgacaacggaggagcttgtcttctttggattaaccttcagatccctctgcttttgggtaactgtggagtgtctcagacacaaggaagttgaaagcctcaggaaagacatccgtggttcctatcaaactccacaaagacaagtccgaagaaatgcagaatacagcctgctttcctcaatggtttctggcggtcagttcttcccttctccagactcaccccaaatgcatgtaatgcaagcccagccttccgttaacaacctgccataaaaatgaattggaatacattgactggagtcggatacaatctaaaagtaaagga

SEQ ID NO: 329761 - DNA, 560 bp, Homo sapiens
ataatgaagtatacctatttcaaaaatatgtattacaaattttgttgtattttgtttgtgcaaacattaaaaatatgaaaagcatacaaaaatataaaacactatctccaattttccagtttattttaatcttcagcattcaatatcagaccacatctttgttttaaaaaccttgaaatgcttaacattgaactctagccagctcttttattctctgggccctcatcctcatgctcccctgaaaacatgagcatttcccaattttgtttttattgttccccaactctctgctcagttccatccctcagatgataaaatcactcataaatagttatctaatgtgcctattctaattctcataagctcttcragagcggggactttgtctcattccctgctaaatccctatgtaaggaatatgaaagccggctcacaacatcactcccagggcttccgtcacccccgtctatctaacactctgtgcataactctgtgttctaccccattgctcaccagtgacctcaaactcaacatatccaagccacacttatcacatttaa

SEQ ID NO: 329762 - DNA, 580 bp, Homo sapiens
catcacataaccagatagcattactcaactaaggataaaataaatctgttttattgttttgggttctttttttcttttttgctttcacagaatgttttgattttctgacacattctctttgacaacagaaacattgtcaagtggcatgttcccatagagaatataaacgctcatttgatattgatgattgtaaatacggcttgatcattttaagtttattaagtcatcacatttataactttttcccatgagcaattttcctatagtatattgaatcagagaagcagcagttattggraaccttaaaataaatggactgtttttccacctatgcctcatgttgggggatcctttatccccagccggctcctcagtcagtgagtttggttagtgggcttggtggtgggagtgggggcaggtaggtacaggctgagtatacgctctacagccacattcaaagaaacagccagggctccctttatccagctcacttatccggttcagttattaccctcttggccagcccaatgaatttacctttggtgagctgaccagcacattccctggccctcactcctct

SEQ ID NO: 329763 - DNA, 580 bp, Homo sapiens
catcacataaccagatagcattactcaactaaggataaaataaatctgttttattgttttgggttctttttttcttttttgctttcacagaatgttttgattttctgacacattctctttgacaacagaaacattgtcaagtggcatgttcccatagagaatataaacgctcatttgatattgatgattgtaaatacggcttgatcattttaagtttattaagtcatcacatttataactttttcccatgagcaattttcctatagtatattgaatcagagaagcagcagttattgggaaccttaaaataaatggactgtttttccacctatgcctcatgttgggggatcctttatccccagccggctcctcagtcagtgagtttggttagtgggcttggtggtgggagtgggggcaggtaggtacaggctgagtatackctctacagccacattcaaagaaacagccagggctccctttatccagctcacttatccggttcagttattaccctcttggccagcccaatgaatttacctttggtgagctgaccagcacattccctggccctcactcctct

SEQ ID NO: 329764 - DNA, 580 bp, Homo sapiens
catcacataaccagatagcattactcaactaaggataaaataaatctgttttattgttttgggttctttttttcttttttgctttcacagaatgttttgattttctgacacattctctttgacaacagaaacattgtcaagtggcatgttcccatagagaatataaacgctcatttgatattgatgattgtaaatacggcttgatcattttaagtttattaagtcatcacatttataactttttcccatgagcaattttcctatagtatattgaatcagagaagcagcagttattgggaaccttaaaataaatggactgtttttccacctatgcctcatgttgggggatcctttatccccagccggctcctcagtcagtgagtttggttagtgggcttggtggtgggagtgggggcaggtaggtacaggctgagtatacgctctacagccacattcaaagaaacagccagggctccctttatccagctcacttatccggttcagttattaccctctkggccagcccaatgaatttacctttggtgagctgaccagcacattccctggccctcactcctct

SEQ ID NO: 329765 - DNA, 634 bp, Homo sapiens
ttggtgtataattattcagaataatttcttwtgatctttgtatttctgtagtgtcaattataattgtttctctttcatttctgattttatttatttcccttttttcctagtaagcctagttaagggtttgctgattttgttcagcttttcaaaaaaaccaactcttagtttcatcgactttttttcctgttgtttttctaggctctattttatttttttctgccctgatctttgttatttccttccctctactaattttgggtttagttgttctttttttttttccagttccttaatgtgtaagactaggttatttccgatctttcttctttttttgatctagacatttattgcagaaaggcaatgtggtagatttcatcccagcacccccctccccagtcatggtctcttgtggtgggctttgaggccacaatgagccctgtttaaactcacaggtatgccataattagcccctgatttttgctgaaatgtgctgtgatgagcatctctctccctaggggggtcttggggccgggtctgaggctaggcctggatctagggattcaagccaggtagaactgtccaccacttctaggagtgaccagctgagcttttgcaggtgggctttgttgtt

SEQ ID NO: 329766 - DNA, 510 bp, Homo sapiens
cacccccctccccagtcatggtctcttgtggtgggctttgaggccacaatgagccctgtttaaactcacaggtatgccataattagcccctgmtttttgctgaaatgtgctgtgatgagcatctctctccctaggggggtcttggggccgggtctgaggctaggcctggatctagggattcaagccaggtagaactgtccaccacttctaggagtgaccagctgagcttttgcaggtgggctttgttgttggctggtacctctcattggccaccatggctggcaggagcacagctgccatcaagatcctcgtgctggttgttgtgaactctgtttcacttctcttctgtgtttctacctgactctgagttgtctagtggtgccattaccctcagtgttctccatgaggtgaaactggagggggcttcccaggaaacatctcagaatgctagagaagatgaatgtccctttctggttctcttttctcaaaataaaaaccataaaccctagg

SEQ ID NO: 329767 - DNA, 540 bp, Homo sapiens
aggcccacccacatcagggaagaacatttgctttactagtctactgattgaaatgttaatctcatccataagcaccctcacagacacacccagaataatgtttggccaaatgtctgggcaccccrtagctcagtcaagttgatgcataaaattaaccatcaaaactgcctttaggttctgatggatcctgtgtttacacaggaagtaggatgtcagttctctatgctatagggtttggtctgtcagtgttgggcatctgtgtgcactctccttggcacctcagagcaagggttagcatggagtagaaaattacagaagggccaggaggacatgtagccattgtggtcctgtgagagaagtggagccttagagaatggcaagatcactgtggtccagagtagttagaagtttcatggaggggatgtgacctgaatggtgccttgaggaatgattgtactttttctggggagagaggagacagagaggatccagtggaaaaagcagcatgaacagacacagcatgaaggagtgggtggggca

SEQ ID NO: 329768 - DNA, 488 bp, Homo sapiens
catgatgcaatgataaaactacatcgtatttaataagaagaaaaccagagagtatgcattctctctctctctctctctctctctctttctctctctctgccatgtgacaacacagtgagatggtataatctacaagccagggaaagaggcctcagtaacaaccaaatcttactgtaaccttgatcttggacttcgcagacttcaggactgtgatagataaatgttgcagaagccactcaggctgtggtgtgttgttacagcagcccaagctgactcccacagcactgactcttgacaaaacgagagtcaaactgctcacttccgtgatcaggtgggtgtatccatcactaggagggaaayaagaaacaaaactggaaaattgtataattgtccagttttattggctataattgatgtctttcctgtggctagccatctttagtaggccaacattctcagacatggccttcacagatgacttgttcaac

SEQ ID NO: 329769 - DNA, 547 bp, Homo sapiens
ctataactttactaatatacatacatgtgatcrtgcacccgtgcaatgggcgctgcagtgtgccttctgtgtcccttccctatggtgctgggagggccaatgcctggcagctcccaactgtgtctcactcctggtggctgcccactgcaaatgagagtctccttcttcctgcaggcagccaacatccaatgactgggcagctgtccagagcaatgctgccttccccgggatgggctgaggcttttgtcctgactgcatggcagcccagcttctccttccaccccatcctgcttgcctccctcccccacaggtgtgacaaggagggcacatcctcctgcaggcaaacctccgtctcagagtctacttcccagagcctgtttctcagtctacttccctgccctagacaatctgcttgaactgttaaagtgtcatcatttttctcattttcttttcttttttgtttgttgggagcgactaacccctcttcatctcttgtgccatacaccatcttcagcttccttaatttctcccaagaaaacacatgtcc

SEQ ID NO: 329770 - DNA, 560 bp, Homo sapiens
agtaagtgccatgcaagtaccactaatatggatggaaagtttgtgtcctccccaaatccacatgttgaaaccctaaccaccagtgtgatggtgttaggaggtggggcctttgggaggtgattaggactagatgatgtcacgagggtgaaccctcataatgagattcatgcccttatacaaagaggaaggtaccagagagctctctctctctctctcttcatcaggtgagaatgcagggagaaggcaaccatctgtgacctagcaggagaaccctcaccaagagcctgacaatgctagaaccctgatctcagacttccagcctccagagctctgagaaatcaatgtcagctgcctaagctgcccagtctatacctgcccaggtattccattatggcagcctgagctgacaagtctaccgcttgacatcacacacatcctcaggtstgtgaatggtttcacttcttctttcctaggaaaagagtcattaaactctacacgtttcacacaatcctcttgtgatcacagccacaagggaaagctcagcttactgaactgtgtag

SEQ ID NO: 329771 - DNA, 518 bp, Homo sapiens
tatatcaatctaaaaccaatggacagtgtcatatctgtcaaaatatcaaagcagcatttcccaayttcattgtttaatcaattttccaggagatgttagcagatgtgcttaaaactaaagtctaaacaacagttcaaaagtagtttgggaagtaaatggagtgacaaaatgaatccagagttttcttggcagaatgaatgtacaatagacaaaataattttgaaaaagaatattcatccaggccttaaactagagaatattaaaatgtattatgcaaccacagccattaaagtaatgtgacagcaatactagagcagagagacagataaatggaaaagaagcgagtgtattccaaaatagatccaaaattctttttaatataacaaatgtggttttccaaataagaaaggaaatgatggattatttgataagccttttgagactatctggctaaccatttcaaaataaatactgtgaggcataatctaccaaaatacaaacatgaattccaggtagat

SEQ ID NO: 329772 - DNA, 575 bp, Homo sapiens
atctaatcttggtcaaccatgtcgaggccccagcacagctaactgaatgaagttcaagaccaggcttaagagtagctgcactgcaggaaaccaaggcagatactcacttatatgaagtaaatcaacccaggccccaaataccaggaatgaggaggcaagacctcaggagactctggtctctgatattggtgcagggactcgagccagctgaacctcttgcaggttaaatgcctatagctggcaaggttggagattgcaggtattgtgaaatcaatcccttggaaataggctgagtcaagaaatattcataaatgaaggaagaggatacatgaagagagacgaaaagctgctgcagagactaatatcttgtgattttctcaacagacgtgctcttaacatacttttactatttttggaactccctctgactgatccgggtctgggtgaaatgctttcatcagctatagtcttacaggaaaagggaacatgttttgcagmtatctcttaaggcagtgtttctcaaagtaggaaatttgcaccccaagaaatggtgtgtcctgcatcatttcctcaca

SEQ ID NO: 329773 - DNA, 584 bp, Homo sapiens
tattcatacacagaaataaatgaataaacagtgtcagtaaatgatctacacgatttacaagaaacagcatgatccatgtaaaacagcatgattaagtctcacaaatataatcttgaattaaagaagctaaatatgatcaaatatatactgtatgatttacataaagctcaaaaataggcataagtataaaattagacatcaagatagtgtttacctatggggaagaggatgattggctatgaaggaggcttctagggctttggtaatgttctggttcatacttgggcaattgtgataatctatcaagttgtacatttacagttggtgcactgtgtattttgcttcaatttcagaagtttagacaaaagataatcaatgagaatgttcagraattaaagaattacgtgaatcttcattttaaaatgacacaagtagtatccaacagaatagaaacagatttacattttatgaaactttaggacataaaagacaaaaataagaccctaagagctactagagataaaagattgttacaaaaaaaaataactacagcaatagcaaagttaccatcagcaaaaatgaat

SEQ ID NO: 329774 - DNA, 517 bp, Homo sapiens
ccacctcttaataccatcacctcggaatttaggctacaacatatgaattttggggagaacacaarcattcagacaatagcatatacatataatagaatcactgtggagctcttataaaccatgttttggtataaatgtaataatagaatgagttcatgatataatataagtgaaaaagtaagatatataattataggtacagtatgattacactcttttatataatgtatacaatgtataatatgtgaaatatatatgtatgcataataaatacatgtacataaaatatttcctggtatgtacatgtgtatatatatttttccatgtatataatttatacacattaacaaaaaatgagaaaatatgacaaatatttaacaatagctatttctccagtggcaggattacagataatttttattttcatacatttctgtctgacttttccaaatgtgctattatgagcataaattttataattaaatacaagtcaataagcattttaaagtgcctataa

SEQ ID NO: 329775 - DNA, 517 bp, Homo sapiens
ccacctcttaataccatcacctcggaatttaggctacaacatatgaattttggggagaacacaaacattcagacaatagcatatacatakaatagaatcactgtggagctcttataaaccatgttttggtataaatgtaataatagaatgagttcatgatataatataagtgaaaaagtaagatatataattataggtacagtatgattacactcttttatataatgtatacaatgtataatatgtgaaatatatatgtatgcataataaatacatgtacataaaatatttcctggtatgtacatgtgtatatatatttttccatgtatataatttatacacattaacaaaaaatgagaaaatatgacaaatatttaacaatagctatttctccagtggcaggattacagataatttttattttcatacatttctgtctgacttttccaaatgtgctattatgagcataaattttataattaaatacaagtcaataagcattttaaagtgcctataa

SEQ ID NO: 329776 - DNA, 455 bp, Homo sapiens
ttcaataagtcgtacctttattgacccagttgctcttgaagaagcccagtagtcatcattttgacccctcacacaagccattaatagatcatatcatttctgctctgaaatagatttttgaatctgccattttcactgccactatctcagtccaagccaccatcatgtctcatgtagatttctgcaataaccagctaactggagaccttgtatctatttgccctgtgtccagtaatttctccattcaaccatcagagagattcttaaaaatatatatatcaaactgtgatgcattccagtaaaaccctycagtggtttaccattgcatttagaatagaaatttagaatccttaacatggcctacatgacctgcatgatctgaccctcactcatttctccaacttcatactgttctaacattttctttcactgcactagccttaaggacttgctgt

SEQ ID NO: 329777 - DNA, 440 bp, Homo sapiens
tgctcaggtgtcacttgagctccatgaagctgtctgcactagccatgccagtcatgcctgtctccaaccagcctgactcctttcctgttgccccttcactagttctgatttctctcatgaaatttaactaaggattacataaaatctgsataagtcaaatgctctggaagatggaaatttctatgcatgtataaagcgttattgttataattgtacatgttgtggcatcccaggcagtaatgcttgtgagtttacatttgtatgtaacatgctctgaggctgtactgtgggccaaacaaaaaatatttgatttaatctcacaacaacctttataagtggctgttaacattgccctgcttttaccagtgaggaatctgaggagtagagaggttgtatatattgagccaacactcatagtgagggactggctcacccagaat

SEQ ID NO: 329778 - DNA, 440 bp, Homo sapiens
tgctcaggtgtcacttgagctccatgaagctgtctgcactagccatgccagtcatgcctgtctccaaccagcctgactcctttcctgttgccccttcactagttctgatttctctcatgaaatttaactaaggattacataaaatctggataagtcaaatgctctggaagatggaaatttctatgcatgtataaagcgttattgttataattgtacatgttgyggcatcccaggcagtaatgcttgtgagtttacatttgtatgtaacatgctctgaggctgtactgtgggccaaacaaaaaatatttgatttaatctcacaacaacctttataagtggctgttaacattgccctgcttttaccagtgaggaatctgaggagtagagaggttgtatatattgagccaacactcatagtgagggactggctcacccagaat

SEQ ID NO: 329779 - DNA, 500 bp, Homo sapiens
atcttctaggaatgtacttaataactggttcttccattatttttctaccattgaacttgaagaagatgtgactggggaataaaggcaaagccaagcatgagaaggtagatctgaaacaggaatgttagacatggaatacaagaggcagagcaagagtaagcaagatagataatcctgtaatccttcacatgggaggaaaggttgtagtaacaactccattctaacaagcacagatagtrcacaggttgtttttcattaaacttgtgagagaaagagacacatctctagatatattattggagtggtcaaaaatgtcttcatgaacacagaactgaaagcctaacacattcatgcctaggccaaagaatgtctagatgagatggccactgtgagataaactgcagtcttccacagtggactatgtttgtcctttatttaaaaaaaaaaaaagaatctaatatgggtggttttttttttcctgtacttatccttactgacat

SEQ ID NO: 329780 - DNA, 601 bp, Homo sapiens
atttgatcaaaagtgccagagtcatggttgtaaaaggcgtaattttaagatgacttccarggcccctgaacttgatattatgcccatattatggtgaaagggaaattgtccaggtaggcaaaactaatcatgcttttaaaagcagagatttttctctggctggcagcagacgagggagtcagagagatttgaagcataagaataattcaaactaccattgctggcttgaagatggagaacccacatggaaagggtaagaagaaaatgaattctgccaacaaccaatgagcttggaagaagtccccaagactcagatgggaatggcagctggctgatatcttgagtgtgagactctgcgtgaagaattagctaagcttacctggaattgtgtgcaataataagtggctatcgtttcaagtttgccttgtttgcataatttgttattcaacagcagaaatataatacagcggtcagaacaaaccagattttatgccttactgataccaagtttgcaacctctttacctaccgtcaaccaagggcacatttcttgacaaatttaaataggtaagaatgaattttatgaatctctaaaccaccac

SEQ ID NO: 329781 - DNA, 601 bp, Homo sapiens
atttgatcaaaagtgccagagtcatggttgtaaaaggcgtaattttaagatgacttccagggcccctgaacttgatattatgcccatattatggtgaaagggaaattgtccaggtaggcaaaactaatcatgcttttaaaagcagagatttttctctggctggcagcagacgagggagtcagagagatttgaagcataagaataattcaaactaccattgctggcttgaagatggagaacccacatggaaagggtaagaagaaaatgaattctgccaacaaccaatgagcttggaagaagtccccaagactcagatgggaatggcagctggctgatatcttgagtgtgagactctgmgtgaagaattagctaagcttacctggaattgtgtgcaataataagtggctatcgtttcaagtttgccttgtttgcataatttgttattcaacagcagaaatataatacagcggtcagaacaaaccagattttatgccttactgataccaagtttgcaacctctttacctaccgtcaaccaagggcacatttcttgacaaatttaaataggtaagaatgaattttatgaatctctaaaccaccac

SEQ ID NO: 329782 - DNA, 541 bp, Homo sapiens
gcacatttcttgacaaatttaaataggtaagaatgaattttatgaatctctaaaccaccacataatagaagaacatggtatcatcaaaggtataaagcccataatatatgcacatttatcgatattaatgaaaagcttcttattaatttataaaaaacaaactcatggtagtttaacaaatgacataatagaaatacatgcaggctgctgttagggtatagaggaggctcacctaaccctacctgggtrgagcaggaagagtttttcctagaggaaatggtgattgtcaaaggaatgtaggaggcgacaacttatgtttacagaccctgttcatgtgtgtaaaaaaattgggggagatagaagtctactatgatgaaccaagaggaggggtaggaggtggataaggcaacttgggatttcatttcctttcctactccaagtcttagagtgatcatctcagaggaatgctcttatcaagaccctcacttaaaagcttgccctggtagtagaaggtacttcaatgacaggctaaaggcagctt

SEQ ID NO: 329783 - DNA, 237 bp, Homo sapiens
tgaggaattgtattcttggctgcctatgagaaagcaagtcatcatttattcattcgccattgattcattttttttaaatgtaagcttatctttttgagaaacatataggaarggtatttgagggaaggtttgacttcacattgtccctcagttaaccttaacagtcaccttaaccatcaagaaagactacttgttagatgtaaacaaaaccctaagctgcttttcaagttcccatag

SEQ ID NO: 329784 - DNA, 552 bp, Homo sapiens
gaatttttctcattcccactgtcgcatgaggccccactggcacacacaatgtgctggcgtctggcaggcactgcttttgagggggtgctccccactcttcacaacacasgaacaggaggcaggcacgccatatgggaactcatggacctgggtcaggcccagaaagcaacagtgaaaagaaaagagaagtgagagttgcacaaagaacaaggatgggtgagggtggtggatgacacacgccacctcccatccacccgcggggtccagcccctaacggtgcccaaaggcagtgtctacagagcggaagccacctcgtggggctgacagagctcaggcagagtgggggacccacaaaggaagcaggaagaaaatcacccaaggcccaagtcaacccaggtccacagacacttcctggcacttccctgctgcgggcctggtgaagggagttgagcaaggcccggtccagccctgcaggggccacagctacagacagccctcaggggccagggagaacgaggcccaaaaaccaggcccagtctaaccctgcccaac

SEQ ID NO: 329785 - DNA, 552 bp, Homo sapiens
gaatttttctcattcccactgtcgcatgaggccccactggcacacacaatgtgctggcgtctggcaggcactgcttttgagggggtgctccccactcttcacaacacacgaacaggaggcaggcasgccatatgggaactcatggacctgggtcaggcccagaaagcaacagtgaaaagaaaagagaagtgagagttgcacaaagaacaaggatgggtgagggtggtggatgacacacgccacctcccatccacccgcggggtccagcccctaacggtgcccaaaggcagtgtctacagagcggaagccacctcgtggggctgacagagctcaggcagagtgggggacccacaaaggaagcaggaagaaaatcacccaaggcccaagtcaacccaggtccacagacacttcctggcacttccctgctgcgggcctggtgaagggagttgagcaaggcccggtccagccctgcaggggccacagctacagacagccctcaggggccagggagaacgaggcccaaaaaccaggcccagtctaaccctgcccaac

SEQ ID NO: 329786 - DNA, 552 bp, Homo sapiens
gaatttttctcattcccactgtcgcatgaggccccactggcacacacaatgtgctggcgtctggcaggcactgcttttgagggggtgctccccactcttcacaacacacgaacaggaggcaggcacgccatakgggaactcatggacctgggtcaggcccagaaagcaacagtgaaaagaaaagagaagtgagagttgcacaaagaacaaggatgggtgagggtggtggatgacacacgccacctcccatccacccgcggggtccagcccctaacggtgcccaaaggcagtgtctacagagcggaagccacctcgtggggctgacagagctcaggcagagtgggggacccacaaaggaagcaggaagaaaatcacccaaggcccaagtcaacccaggtccacagacacttcctggcacttccctgctgcgggcctggtgaagggagttgagcaaggcccggtccagccctgcaggggccacagctacagacagccctcaggggccagggagaacgaggcccaaaaaccaggcccagtctaaccctgcccaac

SEQ ID NO: 329787 - DNA, 505 bp, Homo sapiens
ctcgcatccaggaggctgtctacaaggtgggcctggggcgctggggtgtcagtgggcttcctggggtggaatcaggctgacggtacctgcttataggtaccatcacacctataggcacgttgaatagtggaagtgagatgctgtcccgtgatttcaggatgtgggttcatatttttatgtgtttggtttgggtttgtttgagcctcaccttacaaagaaaggtgggtgaggccccasaaagcatctctaggggtgcatagcatttgctcattcttagtttctagggaggtccaagagcaggaggtttccagtaactcacctgtttccaactggtgcccccaccgtgctggtatatggacactcccaagcacttggggctttgacaaaacctggggctcctgggtgtcttctatgctgtctctccttgggcccccattggagccctgagactggtggcccacggatcctatgtgtagatcacctcaaccccctgccccagccgatc

SEQ ID NO: 329788 - DNA, 556 bp, Homo sapiens
acaccccagcatctaacagtacagtcctctcaatctataaatatcttctacttttagagacatcaccagacagaagtagaccttccagaagtctcctacattttaaattgaggttggaaagttttatcagctagtcagaaccccaaagacctactttgataatgctattcaagtctaaaaactacattttctggtaattggagctagacacccctatgccacttctttcttcattcctttcaattgcctccacagaggggcagaaaacacccactccttgctggatgcttgtttttatcaaagactctagaccagaaaccacaaaaaaagatataaggtagcatattaaacaccatcacttaaaaaaaaagacagcaaaagaatgaggttgggaagattctgaacaacagtataaactatctgatgccataaaaccctttaccwtctatcccaaatacatctcatcctgagattcctaacttaaaatatttgaccaaaacaaaaagcctgagacaaatgttaaaattgtgacttacgccaggttaattctattcca

SEQ ID NO: 329789 - DNA, 574 bp, Homo sapiens
tctcttcaataaatggtgctgggaaaactgaatatccatatgcagaagaataaaagtagatccctatgtctctccatatgcaaaaatcaaatcaaaatagattaaagacttaaatctcagagctcaaattatgaaactattacaaggaaagattggagaaaatctccagcatattgatctggacaaaaaattcttgatcaatatcccacaagcacaagcaaccaaagcaaaaatggacaaatgggatcacatcaacttaaaaagcttctgcacagcaaagtgaaaagatgactcacagaatgggagaaaacatctgcaaactgcccatctgacaagagattaataactagaatatatgaggagctcaaacaactctacaggggaaaaaaatctaataacctgatccaaaagtagggaaargatttgaatagacatttctcaaaagaagacagacaaatggcaaacggacatacgaaaacgtgctcaacatcactgatcatcagagaaatgcaaattaaaactacaatgcgatattatctcacctcagttaaaatgacttatacccaaatggcag

SEQ ID NO: 329790 - DNA, 543 bp, Homo sapiens
ttattggctacttgatttagtcataagcttgaatcattcactgtggtcaggggatgcagtactttgattcccctggattggggcattttacctctgatttataaggagtgtgactggagtatgacatggttaacctgaagggaaatcggtgtgcagttaaagaaaaaggagggatgcatgctgaagagtcacacatcatacagtaatacctcaaatgcaatagctttccagcacattggatgggagatagtggctgtggcaggcagaataatggcacgccaaagatgtctgtgcctggatccttggaacctgcgagtatgttatgttacatgccaaagggggattaagtttgcagatgsaattgaggttgacaatcaaatgaccttaaaatagagagattatcctggattatcagggtaggagtctttataaatggaagagggaggtgaaagagagagaaccagagaggtgatagcaggaggacttagtcccctgttgctggttctgaggatggaggaagggggaccataagccaggcgatgc

SEQ ID NO: 329791 - DNA, 529 bp, Homo sapiens
ttccatagcatgtggcctatgcgttcctaaaaaatatttaaccattgctttgaaagaggtattaggtattagtaatatggaacaaccaagatttagatattagtaatatggaacaaccaagaaaaatcactctaacctactatcttttccttaacataaccagtcttctgatttagaataacattttwagaatatgaaaattgagtattcacatgaagacaatgactaatgcttcaactttaacaaaactcttaacatgcaaaccttctgcaaagatattaaatattaacaggcaattaaataacagctagcattcattaagcacctatttttgttgaatactaccttcagcaatttgcatatacatctaatattattacaactgtgcaatatatattacttcttttttcattaaaaaactgaggctcagagaggttaagtactaatctaaggtaacagaacaacttggtgtgcagagctattattactcataccaagtctaactgcaaagcctctacagtgactctct

SEQ ID NO: 329792 - DNA, 560 bp, Homo sapiens
tagtatttcccttctttccctttgtaagcctcacagggaattcttaaaagctatgccatctccatatgccacttctacgcttgcctttatgatgtgcacatacaaacagccctggaacctatgsgaccgtgtctcacaagaaaacattactacaactcttctactattcttggcccataccctctggaacaaacctctagctttcacttaaaagagcattgagctagtgggtacttagtagtaatgctgatcttccagatactccaataattggagtttctttccttatctgactaattactttatacttagtcatgtactatgaaatgcacatatttttcaaaagttatataattattccctattcagagttgttcctattggttaatggattcacctcttctacaaatataatttccaacatcttcctcatgctttcaaattttaattttaatctattctatattatggtcatattattttatctcctattaccagtactttcaacactcactgctattggccttctcaggcattaattaattaatgtccataaaata

SEQ ID NO: 329793 - DNA, 560 bp, Homo sapiens
tagtatttcccttctttccctttgtaagcctcacagggaattcttaaaagctatgccatctccatatgccacttctacgcttgcctttatgatgtgcacatacaaacagccctggaacctatgcgaccgtgtctcacaagaaaacattactacaactcttctactattcttggcccataccctctggaacaaacctctagctttcacttaaaagagcattgagctagtgggtacttagtagtaatgctgatcttccagatactccaataattggagtttctttccttatctgactaattactttatacttagtcatgtactatgaaatgcacatatttttcaaaagttatataattattccctattcagagttgttcctattggttaatggaytcacctcttctacaaatataatttccaacatcttcctcatgctttcaaattttaattttaatctattctatattatggtcatattattttatctcctattaccagtactttcaacactcactgctattggccttctcaggcattaattaattaatgtccataaaata

SEQ ID NO: 329794 - DNA, 560 bp, Homo sapiens
tagtatttcccttctttccctttgtaagcctcacagggaattcttaaaagctatgccatctccatatgccacttctacgcttgcctttatgatgtgcacatacaaacagccctggaacctatgcgaccgtgtctcacaagaaaacattactacaactcttctactattcttggcccataccctctggaacaaacctctagctttcacttaaaagagcattgagctagtgggtacttagtagtaatgctgatcttccagatactccaataattggagtttctttccttatctgactaattactttatacttagtcatgtactatgaaatgcacatatttttcaaaagttatataattattccctattcagagttgttcctattggttaatggattcacctyttctacaaatataatttccaacatcttcctcatgctttcaaattttaattttaatctattctatattatggtcatattattttatctcctattaccagtactttcaacactcactgctattggccttctcaggcattaattaattaatgtccataaaata

SEQ ID NO: 329795 - DNA, 532 bp, Homo sapiens
gggcatttgattctatgttgctgtggattctgtttatattaataaatgcacatacccaaactataatctcactcatcttggcagaagacatatctgaaccaaaacagcatgctttctgttatttatttcctttcattgatttgtaaaatataaaagcaaatcaaacaacaatataacaataaaaaactaaattagcttggcgaagtgcttcatgcctataatcccaacacagtgagagaccaaggatggtggatcacttaagccaggagtytgagaccagcctaggcaatatagtgaggccctgtctctacaaaaataaacaaataaattatccaggcatataggcatgtacctgtggtcccagctactgtgttgagaggctgagatgagaggacttgcttgaaccctggaggtcaagactgcagtgagccatgattgcaccactgcacaccagtctgggcaacagggcaagaccccatctcaaaagaaaagaaaaaataaaaaactgaatcaaagcagtcatccactctac

SEQ ID NO: 329796 - DNA, 450 bp, Homo sapiens
ggatcagccctatattgtttttctattgctgccataacaaattgccacaaatttaatggcttaaaacaacacaaacttatctttcagttctgtagatcagaaggctgactggtgtcaaggtgttagcagggacaatttccaaaagctctgaatgcactggtactattctctttcaacctaacttctcacacatgccagttccactctttctcaacaccccttagatcccattgaattcattaatcattcccaggctacactcctcccaattctaatgtaactgcagagagcctaagctgaaagtttcaagaacttcctacttgaggtgggagagtggggtccaagaaattccattacattccccttttgagtgtcaaacacttctttccaagtctctgctggtatcaaccacagccagytatgtcaatgacctttttattcagctgatta

SEQ ID NO: 329797 - DNA, 530 bp, Homo sapiens
tcagccattcaattcactcccagtcagttgagcattcccaggcgaggaacccagactttctgaagcaaagataaatcatccacacttgccctcttggaatgcctaacatacaaaatccatgaacatagtaaattaactgttgttttatgctctaaktttgaggtgatctgttctacaacgatggaaaactgcaagaatggaattagagttaatgtagagaaaggatatctactaaataaaggaaaaaaaccatacgttatttttaatagtttaaacaaagctgtgtggttaagaaagggaaagtctggtgatagagacaaagtatccaaaatcattaaaaaaaaaaaaactcaaggaaaaagtctggctggaatagaagatgagttctaagatgaggcaagagattataatataaattaaatggggaggattataaagaaactttaaaggaatcagtaacagatagtaaccaagtagatgaaaatttgagaatggaacatgaactattaagattttaagattttttttgt

SEQ ID NO: 329798 - DNA, 515 bp, Homo sapiens
aatgcagtgttgttccacagacataaaataaatcttttcaatagggatcagcatgaaaagcatctgcactgctagaaccacgtacatcgaaaatttatcaaccaacatcctaaaatattttcaaagtaactgaatgcctataaaagaaggctctgtaccaatttattgcaacacaaagattatcagatagctagtattttgcccrtggatctgtatcctccttagttgatactaggaattgtatagcatgatcatagtcctatttctatcacagttcatcactctcaagtaagtgtttactgaaaaaccgatgcagaagatgctttgcgagggttgtgttgtcaacaattttccccagttccaaagctttcagccaagcctctgtgttggtgcactatgaaccaatcttctagagggtgatgataacagaaacaataatagaatgggctcagctcttcaaagccatgtggctttgattattttcactaccaacaattcagacccataaagtaaac

SEQ ID NO: 329799 - DNA, 515 bp, Homo sapiens
aatgcagtgttgttccacagacataaaataaatcttttcaatagggatcagcatgaaaagcatctgcactgctagaaccacgtacatcgaaaatttatcaaccaacatcctaaaatattttcaaagtaactgaatgcctataaaagaaggctctgtaccaatttattgcaacacaaagattatcagatagctagtattttgcccatggatctgtatcctccttagttgatactaggaattgtatagcatgatcatagtcctatttctatcacagttcatcactctcaagtaagtgtttactgaaaaaccgatgcagaagatgctttgcgagggttgtgtkgtcaacaattttccccagttccaaagctttcagccaagcctctgtgttggtgcactatgaaccaatcttctagagggtgatgataacagaaacaataatagaatgggctcagctcttcaaagccatgtggctttgattattttcactaccaacaattcagacccataaagtaaac

SEQ ID NO: 329800 - DNA, 434 bp, Homo sapiens
gttttaataattcctaagtttcatttttgttaaaacatgaatgaaaaaaatcatattatttagattaaaatgttatttaaaaaaatcaccaccctaaccagtggttttccctcatgtgagatatttaacattattgaattggcaacagacattcatttcaagctcaagacatttttcttgccatctttctcacaaaatgaaatgtgtacctacagttgctatggtactggtataagccttaccgtggcatagtaatattgtttaaataaatcattttattaaaaagtgtttgctgaaactttaaaatatatttccaaaggcaayaattttctaaaaaaaagttgcttccttctccaattatttttgtatttttttcactcaattgtttacaaattcactgagatggttacttatgactttttaaagaactatat

SEQ ID NO: 329801 - DNA, 667 bp, Homo sapiens
aatccctaccaccataaagcttaccctctagtgttaaaaatgtctttatctgcacctagacaattacctgattgagagtcacctctgtatcttattcagcacattccctaacaatggctagattctcaaaaatgtttgacaaattaatttcctacaaaagataaagtagtttaatacttgttcacagttagttcatctaggtaatccagcacaatctgtattaaaataaattaatgtaattttaaaaggtaatatttccyttagggaaatctgaaatcccaaaaacgttcgaatggaaaaaaaaaaaatggtacaagaaacctcatttgcattcccatttgaaccactcctttttcatgtttttactattattaggttaattattcctcaaaatcctggcagtagaaaagagtaatactggtcattttggtgatcatctgtggtcattgaagtgtgttctatgggtcactagttccaacccattcaagactaatgggttgggttgcagaatggttatccaaggtcctcacagtctttctccctgcagacaaagtcatatatttatggggccaaaataaacagacaagtaatcaccatagtgaatagccattgtttttatcatcatatgctgcagggaacttaaaaatcagctcaaatatggactata

SEQ ID NO: 329802 - DNA, 537 bp, Homo sapiens
cttgcaaacatcttctggtcaagttcccctcagatctcactgccaggattgggtcacataatcatgcttaaaccaatccttaacaaggagaatgagacctcaataggactggatcattctaatmatgatttgcccctgaactcggcaggagagatcatttcctcaaatcagaacaatgaggtgagaacaatgaacaaattcaggcttcttccaggaaggaaggtgagcaactctcaccaagaaaacagcgatcacactggtgtatgatccagacactatttcacatggaaaaccaataaaaaacggaggatgtttaacctacacaggggaaggctatgatgaagtcttcaaatatgtgaaagtcttcaaataccatgtgaaagagaagatccctgattaatttaatatgaggccttacaaactatagctctctaacaatatgctcagtgcaaactcatgagagagcagtcattagacaattcacatacaagcagaatcatcatttccagagaatatactctttggatagaaggttga

SEQ ID NO: 329803 - DNA, 575 bp, Homo sapiens
aataaataccaatatctgaaaatcccttatgtctttctttgctgttattctaactgccagcatgaacaagcaaaaggagcaattaaagaagctgccatcaatatcatgggaggaacccattatttccaatccttacctcctctcttccaaatcttaccttctaatttccattctgacctcttttcatgcagctaatattgataattatttaaacaaatactatgatctcagcctgaatttatttcactctctgaacagaatgtcagtaaactgcaagtaaagttattaattttatgttcaattacaacaaaatttgagtcaggattttctccataatgccacattggaaaatacatttaacaaaatgtagatgtaaaaattacttaagattttcttgtattcaaaaacaagtgaggctttgagatgtgagaaaatgacctaagwttaatagagaagatctttcattgccccacactccatcttcaacatctgcatcttcttcatctacacattttgcagtagattactaaacataaagaagcacagttggctctaaaaggcaaaaccggtgaccc

SEQ ID NO: 329804 - DNA, 571 bp, Homo sapiens
aaacttttcactaatgacttcagacactttttttatactgagtagatatttttaaagtataaacccaaaggggacctctctgtttttatctcacttgatcactcacctgtcctgtatgcactttattactctctccttccaaacgaagctaamtcagtttaaggttcagggccccttatttacaaaggccaaactaaggctcagagaggggccccaacaatgtttccataagacattttatttttaagtttgccaaaatcacgtatattttcatcaattggtggatactgctcgacctcccctctatcacatttgcctttatgctgggaagcgagcaagcatctttaagatctatataagtaggcagtgagtttggaattatattcacttcggattcagtacgatgtaatttctgtgattcagagtaattttcttacataattcagttattgctaattatttccagtgtagaaatgccttccaggctcttaacaccaaagcatcggtaacaaactggtttataagttattctttaagattacttaagattagtcactctgcatgaaaactt

SEQ ID NO: 329805 - DNA, 526 bp, Homo sapiens
ggcagcttgaaatgggtcaggggagtatttacaccacggaaatccacaaaygctacaaataaggactttcattctatttggagattcagttgctaaacacttaccaacataccatggcccacccatttcctgctcctaagaaatatgctccccaaacagtgccttttcctattccactttgatcttaaaatgtatgaggtcttgtaataaaataaccttgtatttctttacaatcactgaatatgtgttcaatttagacttcagcataacaagaccaaaactagaaaaaataaccttaggataaagagcatgcattagtcatggggcattactggatggaaagtattgtaagatttcaaaaatgtttgattcacaatatgtattaagaaacctgtaatcccagcactttgggaagccgagacgagagtatctcctgagtgcaggagtttgagaccagcctgggcaacatggcaaaattctgtctctacaaaaaataccaaaaaaaaaaaaaaaaaaaaaaacagcc

SEQ ID NO: 329806 - DNA, 489 bp, Homo sapiens
aattatataatgaagcccatggsaagagtgattactgggatttaattactatttaatcagattgttccattatctggaatattcagaagggaattaacctaaataagttataagcacaatcatactatcaataacacttctttgaatgtaacaaagctctgtagcagtgagggataagatacatggaaaagatcaggtctgtttgcaaatatcatggacccctttataagaatagtttatgatgacaaaaaaatgtagttttctgtcacagtcttgtttcaaacagcagggacaataggaggagactgaagtaataacaacagcatagtattctgaaggaattagcatacctcaaaaaattcttaacgtattctcaaaattaatctgtctttgtgaaaacagggctagctgtttcaatttgcattaatctgttaaaccatgcacaagttcagtttacttaagtaacatatccaatgttagcttaattga

SEQ ID NO: 329807 - DNA, 489 bp, Homo sapiens
aattatataatgaagcccatgggaagagtgattactgggatttaattactatttaatcagattgttccattatctggaatattcagaagggaattaacctaaataagttataagcacaatcatactatcaataacacttctttgaatgtaacaaagctctgtagcagtgagggrtaagatacatggaaaagatcaggtctgtttgcaaatatcatggacccctttataagaatagtttatgatgacaaaaaaatgtagttttctgtcacagtcttgtttcaaacagcagggacaataggaggagactgaagtaataacaacagcatagtattctgaaggaattagcatacctcaaaaaattcttaacgtattctcaaaattaatctgtctttgtgaaaacagggctagctgtttcaatttgcattaatctgttaaaccatgcacaagttcagtttacttaagtaacatatccaatgttagcttaattga

SEQ ID NO: 329808 - DNA, 491 bp, Homo sapiens
cctcaaaaaattcttaacgtattctcaaaattaatctgtctttgtgaaaacagggctagctgtttcaatttgcattaatctgttaaaccatgcacaagttcrgtttacttaagtaacatatccaatgttagcttaattgattgtctgaaaaatttaatctgattaaccaattatccgacatgtgaaagataatacctgtgtaatattaacaatctgctcttgctgtttaagatatacagagttctataaaattagattaacccacaaaattatcctagaccctgttctttgggggtgccttttaatggtggctgggggaatttagaaggattaaaataaatggcaaaaaattaaaaaaatgaagttgtgattcaggccatcatcaattttcatctcacaacgaaccatcaccaaagtgaaccctcaatctgcaatcactgtactgatagccctcaggcttctgtcaagatgtatttttccactgacatcag

SEQ ID NO: 329809 - DNA, 467 bp, Homo sapiens
tgtctagccacaaataattattagtaccttttaaataatcaatttgtactctgaaaaaagaagaaaaatatataacctttcccaaaaataggtagtgggaaaatagtaaatacrtgccattactcataggtgttatacttcttttttcattgcactttgctttacaagatatatatttaatattcatgtaaaatgctttcttggcactaggtcagtgtcttcccaatgaagagcccattgatgatacagaatggaacttctcttctaattaaagactgcctattatccagtgtactttttgtcacattgaagaacagggaactttttattcttattaagaaatggcctttcagattcagtaacaaaatgttctgttcctcaggaaataagagaagatcgagatagggcgcggctggactccatggtgctgctgattatgaaactggaccagcttgatcaggacatag

SEQ ID NO: 329810 - DNA, 467 bp, Homo sapiens
tgtctagccacaaataattattagtaccttttaaataatcaatttgtactctgaaaaaagaagaaaaatatataacctttcccaaaaataggtagtgggaaaatagtaaatacatgccattactcataggtgttatacttyttttttcattgcactttgctttacaagatatatatttaatattcatgtaaaatgctttcttggcactaggtcagtgtcttcccaatgaagagcccattgatgatacagaatggaacttctcttctaattaaagactgcctattatccagtgtactttttgtcacattgaagaacagggaactttttattcttattaagaaatggcctttcagattcagtaacaaaatgttctgttcctcaggaaataagagaagatcgagatagggcgcggctggactccatggtgctgctgattatgaaactggaccagcttgatcaggacatag

SEQ ID NO: 329811 - DNA, 509 bp, Homo sapiens
agaagaagttctgcatataataaaaattatcaagaataatatagtctttaaggatgtctttaacataaaaataaattaaagcacaggtagagataaaggtttaaggaggctgcatagataaaaccttatagattggctatggcctgatgaattgacacagcccaggatccggtggttttctcctttgcaagcctggttttacccaggcactcagagtgtgccagtctcttagggctygctgagatagccaatctcataggatgaatggggataggggatcagatcaagactaagtatttagtgagtgctaagctttatgtaagttacttcatttaacctcttgacagtcctaccatgagaaatgtgagcttcagagagagaggatgagtaatttacctgtgttcacactgacggagagtggtgagttatttaccaaaggtcacccagcaggtgagatttgcatccacattagtcagactccaaagcctatgctcattctgctacattag

SEQ ID NO: 329812 - DNA, 431 bp, Homo sapiens
tcaaaaaatttgaattaatacagtttttaattaaaacatttaaacacaaatgtaatagtcttagaaaagaatgtcttttgatgtcttgcttttgaatatggcaatttcattttgccatgtcaaagcaatcacattaaagtatgtggatttttaaagaaagatttgcttctgttggtaagatcctcattgtttattagaaagaaaaataggcaaaatttatagctttttaaggaagaactgagtcaccagagagctggaaaaaatatttctaaaaaggaaattgttcagtgattattataatgtgatatttcctagaattctgtgatttaaaagcacagaggatttcatwcacctagtctggattttgaaataataaataagtgtgcaattcattaattttggactttgaaaaacagagatatttccacggc

SEQ ID NO: 329813 - DNA, 608 bp, Homo sapiens
acttctgggcaatataaaatggcaagccaacagcatgccacatcatagcaaccaagagtataattcatagcactgaggagtaataataactggtaagccattttcacagtcttcactttattcatttcaaacctagttgtctccaagctctaattacatattaaatattttcccatatttttctaccttcttgctaacagattgataattaattctgtcccaggcatttgatggcctctgtgctcatgtcttaaagacagttaaagtcattgaaaggtttaagcaaggatttcatgtgaatatacaaagtttacacagagggccttcttgactatagttttgagctgaatcaatcacataccaaatttcaaaatgaaacaataaaaatataagccaaccatatgagtagtctgaaaatcacatatataaatatttggaatcatgtaacagaaatctgaaagtaaaggaattgtttactctgtaycctcataaagtcctaagatgccaccacttgaaaacctcctttatccttgactgttttggttatttaatgaatactttatgtactcgcttcatttatttttaaatcaatcaactatactccttag

SEQ ID NO: 329814 - DNA, 537 bp, Homo sapiens
aagaattgagtactagattttcctttcttttcttctttacttccacccttcttcccttccttcttcctttgtctttcattccttccttctttttttttttgagatggagtttcacttttgttacccaggctgaagtacaatggcgygatctcagctcactgcaacttccgcctcccgggttcaagcgattcttctgcctcagcctcccaagtagctgggtttacaggcacccaccaccacgcctggctaatgttttgtatttttaatagagacagggtttcaccatgttggccaggctggtctcgaactcctgacctcaggtgatctgcccaccttggcctccgaaagtgctgagattacaggcgtgaaccaccattccttttcttatttcctttcttttcttcttcccttcccttccctctcctcctccccttccctccgttccttccttgtttctttctcttttttccttcctttccttcttttttcttttcttctctccttctttctatgtacacaaagccaaagttcactggc

SEQ ID NO: 329815 - DNA, 546 bp, Homo sapiens
tcaatattttcaaaaatctctgggttaatttttaatgtgcataaaaagctgcaaacccttttgaagtttcattggctcaaaaaatagaagtgaaaaaattgaagaggttcgttaatcactagttttattcctatgtcaatayagaactagaactaagaaaaaagtttatttctcccagttacttatatttcctttgaaattggtgaggttatctttaaaatagcactataattttctttacggttagaaaattatctgtagaatagagatcttgttggcagcaagggataagtatattatttgtaagaacatgagccagaaaaacagatcctgttggcaccactgtgtctggtacccagataagaggcaggactctgttacataggttatgtgatttatcccaacttgtgtggatattggcatttcttcgagggaggcagcccaaaacctatggttgtttgttggtattaaaagattaataaattggtcatggtttatagtaacagaaatccatgaggaacaagctaaatcagtttcactattacg

SEQ ID NO: 329816 - DNA, 546 bp, Homo sapiens
tcaatattttcaaaaatctctgggttaatttttaatgtgcataaaaagctgcaaacccttttgaagtttcattggctcaaaaaatagaagtgaaaaaattgaagaggttcgttaatcactagttttattcctatgtcaatacagaactagaactaagaaaaaagtttatttytcccagttacttatatttcctttgaaattggtgaggttatctttaaaatagcactataattttctttacggttagaaaattatctgtagaatagagatcttgttggcagcaagggataagtatattatttgtaagaacatgagccagaaaaacagatcctgttggcaccactgtgtctggtacccagataagaggcaggactctgttacataggttatgtgatttatcccaacttgtgtggatattggcatttcttcgagggaggcagcccaaaacctatggttgtttgttggtattaaaagattaataaattggtcatggtttatagtaacagaaatccatgaggaacaagctaaatcagtttcactattacg

SEQ ID NO: 329817 - DNA, 622 bp, Homo sapiens
gcaaaacatttcaaatcagtttgaaatgttataaatgccctttttgatatttacttgtcgtatttttttcttaaatctgttaatataggagattaatgacattcttattgtggaattaccctaggtgagactctaattcctgtcaccctaattttcatcagaaaccatgtaacggttttctctgcaatctactaaaatrttcctcaaacctagctgtgctatgaatacatccatggaactttttaaaaacacatagcttagcctccccgtaggcctactaaatcatgtaccaaattctacatgaaccttagcatgtagaagtgtccaaagctatacaagtatactgacaatctgccgctattgaaaactactactcactgaagctgtaaaattaaacataaagagacaaatactatttattcattcaaagaaacaagcctttgagagacccctctattggagtcacattgctcttgaagccaagggtttcgtctgatatacccagcaagaagtaggttaagccaaaagaaagttattacatgaatgaaaacacagttgccagataagacataaaatacccagttacactttaatttcagataaaaatgtttagccacagtag

SEQ ID NO: 329818 - DNA, 622 bp, Homo sapiens
gcaaaacatttcaaatcagtttgaaatgttataaatgccctttttgatatttacttgtcgtatttttttcttaaatctgttaatataggagattaatgacattcttattgtggaattaccctaggtgagactctaattcctgtcaccctaattttcatcagaaaccatgtaacggttttctctgcaatctactaaaatattcctcaaacctagctgtgctatgaatacatccatggaactttttaaaaacacatagcttagcctccccgtakgcctactaaatcatgtaccaaattctacatgaaccttagcatgtagaagtgtccaaagctatacaagtatactgacaatctgccgctattgaaaactactactcactgaagctgtaaaattaaacataaagagacaaatactatttattcattcaaagaaacaagcctttgagagacccctctattggagtcacattgctcttgaagccaagggtttcgtctgatatacccagcaagaagtaggttaagccaaaagaaagttattacatgaatgaaaacacagttgccagataagacataaaatacccagttacactttaatttcagataaaaatgtttagccacagtag

SEQ ID NO: 329819 - DNA, 622 bp, Homo sapiens
gcaaaacatttcaaatcagtttgaaatgttataaatgccctttttgatatttacttgtcgtatttttttcttaaatctgttaatataggagattaatgacattcttattgtggaattaccctaggtgagactctaattcctgtcaccctaattttcatcagaaaccatgtaacggttttctctgcaatctactaaaatattcctcaaacctagctgtgctatgaatacatccatggaactttttaaaaacacatagcttagcctccccgtaggcctactaaatcatgtaccaaattctacatgaaccttagcaygtagaagtgtccaaagctatacaagtatactgacaatctgccgctattgaaaactactactcactgaagctgtaaaattaaacataaagagacaaatactatttattcattcaaagaaacaagcctttgagagacccctctattggagtcacattgctcttgaagccaagggtttcgtctgatatacccagcaagaagtaggttaagccaaaagaaagttattacatgaatgaaaacacagttgccagataagacataaaatacccagttacactttaatttcagataaaaatgtttagccacagtag

SEQ ID NO: 329820 - DNA, 622 bp, Homo sapiens
gcaaaacatttcaaatcagtttgaaatgttataaatgccctttttgatatttacttgtcgtatttttttcttaaatctgttaatataggagattaatgacattcttattgtggaattaccctaggtgagactctaattcctgtcaccctaattttcatcagaaaccatgtaacggttttctctgcaatctactaaaatattcctcaaacctagctgtgctatgaatacatccatggaactttttaaaaacacatagcttagcctccccgtaggcctactaaatcatgtaccaaattctacatgaaccttagcatgtagaagtgtccaaagctatacaagtatactgacaatctgccgctattgaaaactactactcactgaagctgtaaaattaaacataaagagacaaatactatttattcattcaaagaaacaagcctttgagagacccctctattggagtcacattgctcttgaagccaagggtttcgtctgatatacccagcaagaagtrggttaagccaaaagaaagttattacatgaatgaaaacacagttgccagataagacataaaatacccagttacactttaatttcagataaaaatgtttagccacagtag

SEQ ID NO: 329821 - DNA, 578 bp, Homo sapiens
ctccagactactttggaatttgtctcagaattgcttttaaccagccgcctcaccccagagaccagccaggccctgagtgctggtcatatgtcacccaaccttatggcacattcactaacatttgctcacaatttgtttggttttcctttgatatcagtggcttcaatttcattatatatttcatcctatttagaggaattattggcttaaaaggtcaatatttgtgatcccctatatactacatatatactaaaaataaaggtatatacttgtacatatactacaaatgtaatcccctccaattgagactcctaataaatataygtgtgactaaaccctggtagtctgaaatatcatcggaaactaagaaaactaagctttgcaaaacgatgaatgcctgctaagatttatgggcttcaaggaaggataatttttattaaaagtacaatgatatctctagagcactatttcaatacattttgaagatcccccttataagctcttttatttttttcttcaggtcttagaactttgatgtgatcttgacaaaagaaatcaatgtgcacaaatttattgaa

SEQ ID NO: 329822 - DNA, 519 bp, Homo sapiens
gaagcaatgattttcagtgcataggattctgtgaggagtgagattagggagagcagggaaaataatttaagggagatagtcactttctgtagcaggaagttaacagataatgtttaaaatagaaaaaaaaatcatagtacaatcatattgtttagaaatacagagttaaatatcagaagacatagctaaaaataatttaaagtattatgatattgtgtgccatttgctaagaaagtcttatctctggatttcagaattcatgctaaaaataatttaaattttaaaatgttctacagcagtaattttaaggttaagytgatgcataaacacgactgcagttcttctgcaatatgtctggtggggccaaaccattctttttgccccattccccctcaccacagcatcccctcgcaattacacaaacaccagtctcatgtacgtagcaaagaaaaggtgccagtttggatatttatcttatgtcaccaatgtcagcacaatttctatgagattcttaggtca

SEQ ID NO: 329823 - DNA, 509 bp, Homo sapiens
aacattggtgacagttttaccttttttttttttttttttwaaattagaggaactgcaaatttctgtctgcaaagcacccttctactggacatgttcatacttcattatgcataattattatgggagggcaggatgatgggataaaaaggtatctgaattatgaatcagggcactgtggttctgctgtcctctcttctattagctagaggtgtgaccttggacaggtcacttttaaatcccatttctcagcttcttgtagacaacctcaagccattgttagaggagaccatctcttatgttctttccttctctgaaattccatttggagattttaattaaatcataatttagataagtcagtattttatcttccacatatataaaaagtagattctttttctcatatttaagaagttttaacacaaattgtcagtgaatagttaaaatttatcaatataagttattctagcataaaatttgagaatagctaatatagcagatggtcacct

SEQ ID NO: 329824 - DNA, 578 bp, Homo sapiens
gcaggttagtctgtatttgccactccatttattatatggagccactataaaggtcaaaaatggtcaggaaaatgtggcacatatacaccacagaatactatgcagtcataaaaaagaacgtgttcatgtgatttgcagggacatggatgaagctggaagccatcattctcagcaaactaactcaggaacagaaaaccaaatactgcatgttctcactcataagtgagagttgaacaatgaggggaacacaaggaggggaacatcacacacccgggcctgtcaggggttgagggggttaagggaagggagagcattaggacaaatacctaatgcatgcgagacttaaaatctaaatgacgggttgataggtgcagcaaaccaccatggcacatgtatacctatgtaacaaacctgcaagtttgcacatgtatcccagaacttaagtttaaaaaaaatagtcagatattggcaatttcatataattgaacttaattactgtagcgtaagtmtctaccaatttcctccctactatctcctttcatgctattatgaggacataagaaaatccttggagacac

SEQ ID NO: 329825 - DNA, 578 bp, Homo sapiens
gcaggttagtctgtatttgccactccatttattatatggagccactataaaggtcaaaaatggtcaggaaaatgtggcacatatacaccacagaatactatgcagtcataaaaaagaacgtgttcatgtgatttgcagggacatggatgaagctggaagccatcattctcagcaaactaactcaggaacagaaaaccaaatactgcatgttctcactcataagtgagagttgaacaatgaggggaacacaaggaggggaacatcacacacccgggcctgtcaggggttgagggggttaagggaagggagagcattaggacaaatacctaatgcatgcgagacttaaaatctaaatgacgggttgataggtgcagcaaaccaccatggcacatgtatacctatgtaacaaacctgcaagtttgcacatgtatcccagaacttaagtttaaaaaaaatagtcagatattggcaatttcatataattgaacttaattactgtagcgtaagtctctaccaatttcctccctactwtctcctttcatgctattatgaggacataagaaaatccttggagacac

SEQ ID NO: 329826 - DNA, 591 bp, Homo sapiens
cagtggctcatgcctgtaatcccagcactttgagaggccaaggcaggcagatcatgaggtcaggtgatygagaccatcctggctaatacggtgaaaccccatctctactaaaactacaaaaaactagccgggtgtggtggcgggagcctgtactccctgctactaggtaggctgaggtaggagaatggcatgaacccaggaggtggagcttgcagtgagccatggtcgcgctactacactccagcctgggtgaaagagcaagattctgtctcaaaaaaaaaaaaaaattaaatattttaccctgtttaaacatcactgagaagatgaaggggaaaattaaacatatccttatatgcttatgcttaaagaaacagtttttcacaacaagtgactaataatatttttaaatttcaaaatgtatttacttaaatcactagcaaatagtgatttatttaatttatttaaatactagtaaatcacttaaatcactaaataaaatcactaaagtgttttaaattacatcaaatcacattgtatggcactagttgccactgacttaaaaaaaaataacatcgtgggccaggcgcagtg

SEQ ID NO: 329827 - DNA, 521 bp, Homo sapiens
taagcttgtctcacaagatctataattgcttctttctggttgtaacactcctgtccccacacttacattcaaatgttgctttctcatagaggccttccttcctgacaacctatgaaaaatagcacacacactcgcayccacagagatgtacacatgactatttagacccttgtcccgacttatttttctttatagcaactatcatcttaattagtatatatgttttttcttaatgtcttctgttaatttaatacaataaagatatcaactgcaaaggggaaggaactttgcctcatttttgatctgtgatcaaaacgttggtcagtgtctggtgtataaagaactctcaacaaatatgtgctgaaaaattgaattagtgattagcgagagataaggattctcctatacctcagcagaaaggtgagtgagagtcagctgtactacatcagttagaggagtgtgggccagtgttgcaaagggcagatgtgatggtcagcaaaacatctctcagatttttttcc

SEQ ID NO: 329828 - DNA, 618 bp, Homo sapiens
gctaacattgtctacttttcatgattatggagatttcaaaagttaatgtaaatgaaaattacaacatgctacatatgagttgtagttcatattgagtccctcccactcattttaagatgaraaaactggggtccaaataagttattttgcctgaaaccacagatatagttgttgactggggcttcaaaatatcttaattactttagaatatactacatgtcaaatatattttgtctttccatttttggagtattgtcttctcacaatgaaaaattcaggaaatactcaaaattagaaaacacaaaaaaaaacaacgattattctactcaatatataacattgttcgtggttatattttgatatatttacccagtgtttctctttatggattaatttttttgactgtttgttttacttcatggtggttttatggcctccagcatatgttaattagtattttaatgtaagcattactaatgacacatagcgtttcaactaataatactcccattttatctaacaattattccacaggctagttccaaattttttaattgggttatgctatcaaaaacaacttgaatataactaaaaaataattaaaatttaaactacgta

SEQ ID NO: 329829 - DNA, 557 bp, Homo sapiens
ctgcaattgatccaaataataaattgatcaaaatcccaacagtcttttttacagaaatggacaagctgattcttaaattcatgcagaattacaatggccctagattatccaaaactactttaaaaaggaataacaaacttgaatacttataatacttggtgtaaaacttattgtaaagctataatagttaatgcagtgtggtattgtatgcgatagaaaaatagattaagagaatggaatagagaatttagaaacaggaagacacatagttggtcaattgatttttgttaaaggtgcaaagaaaattccatgggaaaagaattgtcacaaatggttttggaacaattgcatgtccatacttaaaaagaaaaaactttgatccatactttcaccatataaaaaattatctctamatatgtcatagaacctaggtgtaaaacctaatactataaaacttctagcatatagtgtaggagaaatctttgtgatcttagattaggcagagatctttttgccatgagaccagaaacatgatccataaaagaaaaaaacacttg

SEQ ID NO: 329830 - DNA, 586 bp, Homo sapiens
ggactgcagtggtgtgatcatagcttactgcaacgtcgacctctgggctcaagtgatcatcctgcctcagctggccaagtagctggaactataggtatgagtcaccatgcctagctaattttttaatttttgtagagacagcgtctccttatgttgcccaggctggtctcaaactcctgtcctcaagtgatcctcctgctttggcctctcaaagcactgggattagggtgtgagccrttgtgcctggccaagagttttgtaatatttgtagagcatgcagtattgggaccatttgttgtggggtatataggtggtaaagattttggagatagataagcatgtttgggacttctttgaaatctgagatcttgtttttttttgttgttcactgaatctccatgtgccaagtgcctgatacacggtagacttgcaacaaatgtttgttgaatgatttaatgagtaaataaattagttagataagaggtgtgaaatgactccattgttcataactcacacttttcatataaatcaaacaaaatgattcttttttatttattaaagcaaatattacaaatgaattgaaaat

SEQ ID NO: 329831 - DNA, 586 bp, Homo sapiens
ggactgcagtggtgtgatcatagcttactgcaacgtcgacctctgggctcaagtgatcatcctgcctcagctggccaagtagctggaactataggtatgagtcaccatgcctagctaattttttaatttttgtagagacagcgtctccttatgttgcccaggctggtctcaaactcctgtcctcaagtgatcctcctgctttggcctctcaaagcactgggattagggtgtgagccgttgtgcctggccaagagttttgtaatatttgtagagcatgcagtattgggaccatttgttgtggggtatataggtggtaaagattttggagatagataagcatgtttgggacttctttgaaatctgagatctwgtttttttttgttgttcactgaatctccatgtgccaagtgcctgatacacggtagacttgcaacaaatgtttgttgaatgatttaatgagtaaataaattagttagataagaggtgtgaaatgactccattgttcataactcacacttttcatataaatcaaacaaaatgattcttttttatttattaaagcaaatattacaaatgaattgaaaat

SEQ ID NO: 329832 - DNA, 524 bp, Homo sapiens
cccttctttggagtcaggtggtttagttcaatgatgcaatttagcagccctgattcccgatgatccctgccccaccaaggtagcatcaaatttttgcttgcgtagaaggaagaaaaacatgaatttcttaaacctttactttttgcctctgtattatggtagtgtgggaatagctgaaaagagaagttatttatcattgatccaaattcctgtcatttattatcttttttgaaatactttattaaagtatagaataggttcaagaaggaccaacacagaccacgaagttggacagtaaaktaataattgaaaaactgagagtatgtgaaaattaaaggctctcagtgctagaatctaaagcaatcagtacggaatccattttataaaagaaagtagaaagagtctagacactatagaacacaatgtttaagtcatacatgaactttaacagacaaattatctgagttaaaaatttttaattctagccaaaatttgagtgttatgtttattaccattagttgtgt

SEQ ID NO: 329833 - DNA, 524 bp, Homo sapiens
cccttctttggagtcaggtggtttagttcaatgatgcaatttagcagccctgattcccgatgatccctgccccaccaaggtagcatcaaatttttgcttgcgtagaaggaagaaaaacatgaatttcttaaacctttactttttgcctctgtattatggtagtgtgggaatagctgaaaagagaagttatttatcattgatccaaattcctgtcatttattatcttttttgaaatactttattaaagtatagaataggttcaagaaggaccaacacagaccacgaagttggacagtaaagtaataattgaaaaactgagagtatgtgaaaattaaaggctctcagtgctagaatctaaagcaatcagtacggaatccattttataaaagaaagtagaaagagtctagacactatagaacacaatgtttaagtcatacatgaactttaacagacaaattatctgagwtaaaaatttttaattctagccaaaatttgagtgttatgtttattaccattagttgtgt

SEQ ID NO: 329834 - DNA, 630 bp, Homo sapiens
tcaaaatcagcaatggcacacatcagagcagaaatccgatttctgtttaaatggtcacagaatgtttaggaaatgcctagcaattaatcatagtattaatactccttagtactgaagatactaatacttcttataattataattagtattataattcattctttcttcaatactaagaatcaaggattatccacaaataacagagagatgaaactataccatcctagcaragatccctccccatcagcttataaaacaagtctacttctccaaatcacttaaatggcaaatttaggttcaccttgaaacaaataagggcgatactatgccagtacatgtctcctgcaaagatggccctgtgaggtagtagggatcacaggaagagcagaaaatgttcattttatttttccactttcaatataattttacaaaaatgcatttatttccttctaaaaatataataatgaagacctggaaaagacaaatggtgagtgaagagaaaaatagaaagacatgcatgccaaacttggtagacaaggcaaacctgcaaaaatcaattcaattcagcaactcttttgtgtttagttgtgcctttcactgtgctttgcaataagaactgagctagagcta

SEQ ID NO: 329835 - DNA, 590 bp, Homo sapiens
gaaataagtgaaggagataaactgaaataaaaagaagagagaaaaagatgaaatttgagcacagtgaaaagttttcccagagttaggaaagactcaagatataggcaaaatgcaagaaaaaaattgcagggcacattgatgtgggctgaggccgggggaaaccagcagggttgttgttggatttcttggaggacacagagaaacaaagcttcttaaaaccctgggctttttaggcagatggatctttgtcttcttaatctggagggctagatgtgtggtgaagaaggccaagtgcccagggtcagaggtaattgagatttacacaaaagcaacagtagctactctttatttctttcactgackgaatgcattcatgtatcctcttgaccatgtgttagttagaattataagtcattatccttgcctttgagcatttgcaatctaattaggaaacataaatctcaaaaataacaatttaaagaacagcaataaaaaactgcctaaatctttatggttaaacgcaatcacatttgttatcacattaaatgtttctcttttttgccttttaatacatcagttgatacacgaaa

SEQ ID NO: 329836 - DNA, 474 bp, Homo sapiens
ttacatttaagagataatgccaaatttttttcctaatattattgtatcagttatattgatacctagaatgtatagggagttcctgttgatcctgactctggcacttggtgtatttgacattttaattgtgccaatctagagagagtgaaatggtacgtcactatgactttaatttgcatttctctgatttcaagagtttgatattctttttatttatttattgtcaatatgggtttcctgttctataaaatatccatttttttgcccgttcttcttctgggttatttgtatttttttattgttttaaaggacattctcattagtatttgaatactattctttgtttctaaatgttgctaatttctactstcattttattttaaaaaattatttccttatactgtgtttctctaaatagattttctaaattttaagatattcaaatatatccatcttttctaagaaataactttt

SEQ ID NO: 329837 - DNA, 630 bp, Homo sapiens
tcaaaatcagcaatggcacacatcagagcagaaatccgatttctgtttaaatggtcacagaatgtttaggaaatgcctagcaattaatcatagtattaatactccttagtactgaagatactaatacttcttataattataattagtattataattcattctttcttcaatactaagaatcaaggattatccacaaataacagagagatgaaactataccatcctagcaaagatccctccccatcagcttataaaacaagtctacttctccaaatcacttaaatggcaaatttaggttcaccttgaaacaaataagggcgatactatgccagtacatgtctcctgcaaagatggccctgtgaggtagtagggatcacaggaagagcagaaaatgttcattttatttttccactttcaatataattttacaaaaatgcatttatttccttctaaaaatataataatgaagacctggaaaagacaaatggtgagtgaagagaaaaatagaaagacatgcatgccaaacttggtagacaaggcaaacctgcaaaaatcaattcaattcagcractcttttgtgtttagttgtgcctttcactgtgctttgcaataagaactgagctagagcta

SEQ ID NO: 329838 - DNA, 633 bp, Homo sapiens
acatgcacattgtaacccctggaacctgcaaatatgatcttgtttggaaaaagggtctttgcagatgtaatcaagttaaggatctcaaggtgagatcatcctggatatcccaggtggaccctcaatctaatgacaagcgtccttacaagagacagaagaggagcagacatggacacacagacaaggccatgtgaaaacagaagcagagattggaccgatgcagccataagtagaggagcgcctgaagccactagaagccagaagaggaaggaaagattctgccctagagccttctgagaaaagcacagccctgccaacctactttgacttctggcccctagaattgtgaaaaaaattcctgttgttttagaacagttaagtttgtagtgatttgttagagcagcctcaggaaactggtatacaaacctccaattcaaactgtaaattccttgaagacagggaccrtcacactcattacttagtcaccattctctccttagcagctagcatatgcccagtgtacagcatgcatttattaaatttctgttgaatgagtgattgagtgaagacaagcacggcacttcaagcatgatcttatgtcacaataatcattaatcctattctctcactgtc

SEQ ID NO: 329839 - DNA, 608 bp, Homo sapiens
gttaaactctctctctctgacttgtcccattcttgtagacaccatgattaactgtctccaatctgtgcattagatatatgactagaaatacatgcttccatttatatacatacatattaattaatgatattacttcaaatttataatgtccacctgtgaaagatggggtatttcctttgttcatttaacaaatattctttgactgctgtattcattttcttgggctgtcctaacaaagcaccttaaattgcatgcttaaaagaacagaaagtcatcgtaattgtggtctagaagtcccagatcaaggtgtgggcagggttagctccttcaattggctctgaaggagaattggttcctttacactcccctagcttctggtgctttgctgctaatctttggcattctttggcttgaagacttgtaggtatattatctttctataggcctttatgttgacatgggcttcttcgtgtgtgtgtgtgactatgtccatatttccccytttttaaggacatcagttgagttggaatactggcctgtccatctctaatatgacctcatcacaacatgactagttacatctacaaaaaccctatttccaaataaag

SEQ ID NO: 329840 - DNA, 600 bp, Homo sapiens
agcatatgtattctatctaatgactattatcattctgtgcttcacctataggataaagattcaaagaccatagcagtctttatgatacataaatattcactccagaacaaagcagtaaaattggacccamaggaagaagatatagtctatctttaaaagatcaaccaggcaggcatcaagttctaaaagattttcttttacgttctttctattttgttcctgttttctatgttatgcatctttcccatgtccatgttctttatctttcttatattcttatttttctggtttacatatctccctgaataacttaatcacattgtcgtgcatatatttttaagcttttatgggtccttgtttggctcatattttaaccaataatcaaacatatttaactgtctatgctctattttttcccttgagaaactggatgatatttctcaactctcctgtgacccagtattttatattagaagatctatatgtcacactgatgtctgtcttttgtaaataagttgttttgtttgtttttgagacagggttttgttctgtcactcaggtcggactgcaagtggcaagaacatagctcactgcagcccc

SEQ ID NO: 329841 - DNA, 600 bp, Homo sapiens
agcatatgtattctatctaatgactattatcattctgtgcttcacctataggataaagattcaaagaccatagcagtctttatgatacataaatattcactccagaacaaagcagtaaaattggacccaaaggaagaagatatagtctatctttaaaagatcaaccaggcaggcatcaagttctaaaagattttcttttacgttctttctattttgttcctgttttctatgttatgcatctttcccatgtccatgttctttatctttcttatattcttatttttctggtttacatatctccctgaataacttaatcacattgtygtgcatatatttttaagcttttatgggtccttgtttggctcatattttaaccaataatcaaacatatttaactgtctatgctctattttttcccttgagaaactggatgatatttctcaactctcctgtgacccagtattttatattagaagatctatatgtcacactgatgtctgtcttttgtaaataagttgttttgtttgtttttgagacagggttttgttctgtcactcaggtcggactgcaagtggcaagaacatagctcactgcagcccc

SEQ ID NO: 329842 - DNA, 600 bp, Homo sapiens
agcatatgtattctatctaatgactattatcattctgtgcttcacctataggataaagattcaaagaccatagcagtctttatgatacataaatattcactccagaacaaagcagtaaaattggacccaaaggaagaagatatagtctatctttaaaagatcaaccaggcaggcatcaagttctaaaagattttcttttacgttctttctattttgttcctgttttctatgttatgcatctttcccatgtccatgttctttatctttcttatattcttatttttctggtttacatatctccctgaataacttaatcacattgtcgtgcatatatttttaagcttttatgggtccttgtttggctcatattttaaccaataatcaaacatatttaactgtctatgctctattttttcccttgagaaactkgatgatatttctcaactctcctgtgacccagtattttatattagaagatctatatgtcacactgatgtctgtcttttgtaaataagttgttttgtttgtttttgagacagggttttgttctgtcactcaggtcggactgcaagtggcaagaacatagctcactgcagcccc

SEQ ID NO: 329843 - DNA, 557 bp, Homo sapiens
tttagctatgagttcatctttgaacagaagggctagactttagctaagagttcatccctgaacaggagagaaggtgaagaatatgsactgacatagattgaatatgtgtccctgtccaaatctcatgtcgaattgtaatctcaaatgccagagttgggacctggtgggaggtttctgggtcatgggaatggatccctcaggcttggtgatgccttggtgatagtgagtgagttcttctgagttctgatcgtttaaaagtgtgtggcacctccacctacccccttctctctctcactcactcctgctttcatcatgtgatgtgcctgctcccccttcactttccaccatgattgtaagcttcctaaggcctccctgagcagatgcctataccatgcttcctgtataacctgcagaaccataagccagttaaacctctcttctttataaattacccagtctcgggtatttctttatagcaatgcgagaacaacctaatacatggacggtgttctctgcctggttttccctagtaccatgttcatgttttacaaatgtaa

SEQ ID NO: 329844 - DNA, 513 bp, Homo sapiens
aattgtaatctcaaatgccagagttgggacctggtgggaggtttctgggtcatgggaatggatccctcaggcttggtgatgccttggtgatagtgagtgagttcttstgagttctgatcgtttaaaagtgtgtggcacctccacctacccccttctctctctcactcactcctgctttcatcatgtgatgtgcctgctcccccttcactttccaccatgattgtaagcttcctaaggcctccctgagcagatgcctataccatgcttcctgtataacctgcagaaccataagccagttaaacctctcttctttataaattacccagtctcgggtatttctttatagcaatgcgagaacaacctaatacatggacggtgttctctgcctggttttccctagtaccatgttcatgttttacaaatgtaatattttctcaaatctctctgaaaatactaattacagggattctcttagaggttttttaatatgttattggtattacctgaatcatt

SEQ ID NO: 329845 - DNA, 544 bp, Homo sapiens
cacttgccactcactgcagcctcacttttagcctcatgtacctcagtccttagtatgttcttctagggatttgagtaccagcctcagggtttgtattttccccagttcacctccaagctggaatacactgaggaatctcctctggaagagagtttgtggtgacagttatgtctttcttttcgttgtgaaactactactgtttataatctatattttctatggtcgctattcagaataggktattttattcactttctttgtttaattcactaagtaagtccaaaaatctccatggcttctgggcacacgctaagaataacaggaaatttattattttaaccactgtgcttagccagaaacccaatataaaagatggccttttactgggccctcaaaatcagaagattaaagtccttttgaaccagaatggaaaatcaatattttcttcaaagtaaagatttttttgaaataaactttaataattaagatatctgtgctatatcgtagggaacacctttttttaaaggctgttttaacaaaattc

SEQ ID NO: 329846 - DNA, 565 bp, Homo sapiens
tctcccagctgctttcacgggctggtgttgagtgcagcttctccaggcacacgatgcaagttgtgggtggatctaccattctggggtctggaggacagtggcccttttctcacagctccactaggcagtgccccagtagggactctacttgggggttctgaccccacattttccttctgcactgccctagcagaagttctccaggagggcctcacccctgcagcaaacttcttcctggacatccaggtgtttccatacatcctctgaaatctaggcagaggtttccaatccccaattcttgacttctgcacacccacagactcaacaccatgtggaagctgccaagacttgggtcttgtaccctctgaagcccaagctgtaccttggctcctcttattcatggctggagcagctgggacacaggccaccaartccccagactgcacacagcatgaggaccctgggcctggcccacaaaaccatttcttcctcctaggcctctgggccattgatgggaggggctgccatgaagacctgtgacatgccctggagacattttccccac

SEQ ID NO: 329847 - DNA, 583 bp, Homo sapiens
agaaacacaactgtatggatttgggcagcacaaaaatatcaagaaaaaggtgcatgagatatcctagaaagcatgaaggcccagagccagagcaatgttttaactggaatccaggctgtcatttcccgttagtgtaatctttcacaaatctcttaacttctctaagactgtttccttatgtataaaatggcactaatcatgatttcatagggatcttgtgagaattaagcaacggaaatattattttgttagattgtaagctccttggaaagcaaagaatgggtcttagcagcatagcaactgccasggagagaaagagtgtttaataaatgtgtactaataagtgaaaaactcttaagaaactaattccagatcccattctcaggtgaggctgaggctgctagtctattcacattctctttcttattactcaaagtggagttcatgaacattgatattccctgggaacgtcttagaaatgcaggctgtctggccccaccccagacctataattttggccagatccccaggtgattcttttgacattaaacattgaaaagcactgcttatgtcaggatgcaca

SEQ ID NO: 329848 - DNA, 583 bp, Homo sapiens
agaaacacaactgtatggatttgggcagcacaaaaatatcaagaaaaaggtgcatgagatatcctagaaagcatgaaggcccagagccagagcaatgttttaactggaatccaggctgtcatttcccgttagtgtaatctttcacaaatctcttaacttctctaagactgtttccttatgtataaaatggcactaatcatgatttcatagggatcttgtgagaattaagcaacggaaatattattttgttagattgtaagctccttggaaagcaaagaatgggtcttagcagcatagcaactgccacggagagaaagagtgtttaataaatgtgtactaataagtgaaaaactcttaagaaactaattccagatcccattctcaggtgaggctgaggctgctagtctattcacattctctttcttattactcaaagtggagttcatgaacattgatattccctgggaacgtcttagaaatgcaggctstctggccccaccccagacctataattttggccagatccccaggtgattcttttgacattaaacattgaaaagcactgcttatgtcaggatgcaca

SEQ ID NO: 329849 - DNA, 549 bp, Homo sapiens
caatttgcctcaacttcttttcattcattcagtaatatctgtcaggtctgagacttgactgatatatacttttaaataaacttaaatatatcaggaagctaagagactttatagttcttatatttcccaggatctaggtttaaaatcaaaaggattgaatttgggctcacgcctgcaatcccagcaccttaggaggccaaggctggaggatcgcttgggcccaggcattcaagagcagcctgggcaacatagcaataccccatctctataaaaaaaawttttaaatgatccaggtgcagtggcatgcacctgtagtcctagctactcagaaggctgaggcaggaggattgctcgagcccaggaggtcaaggctgaatagctaggactacaggtgtgcagctcaaaccgaccatattactctgggcaagctattcagttcttctgaattatagtttccctagctgtggaaactaataatacttcctaccttataggattattttagcattaaatgatattgtatgtgaaaacattttgaaaactgtaaag

SEQ ID NO: 329850 - DNA, 637 bp, Homo sapiens
acatccacttccaggaaaagcgtcctctaatcactcctacattaggctggaggaacctgctatgcacttccatgtcctcctattgttcagcatgtttctcatccagaaggatgcaaagtcagtgaagataaggtctctatcttgctcacattgtatcctaccacttagcatagtgtcttggctaatagattctcaataaatatttgttaaattaatgcaatatattcagtgaatgagttagcaattaggatcagaaagatcagaaatgaaagatcagaatggctgatctacctccactaccttttgttggtatgtcagcataaaaacaaaaatgaataccaaaatcctaaaagcttgagtatataagaaaaccggctctctaaaatctaagatttatacagacacrtgaaaatccatgagagaagctaacacatccaaacctctaggagagaaatactaatcattgggaggcattctttagggacgaaaaagatattgtcattagccatatgtggttgaacatttgtggaagcagcagcttccagctgaatgtcctgacccagatctgtcaggccatatttggctttatctaaaatatgccgtgcctacccagttcttggagaggggaaaatgtgca

SEQ ID NO: 329851 - DNA, 514 bp, Homo sapiens
cactgcacaataccaaaaaaaaaaaaaatcctctaacatatggacatagaaatggtaggctgaaaagagacattatgctatgagtttctactttaagaagcacttatttcacagaagaaaataaaatttctccactattaatatgctcttaaacataattttcctggtcaagaaatatttgcaaacgtaaaccctacaaaaacaagattaccacattaatagaaatgtgatctcttagttgtttactcctattttagacatatgatttgtcctatgccagacattgactcttcccatttaacattctagcttttgaagacagccatgaaatacttctaggagcattaataaaattaattcaaaaccgtggaaggcaggattcagatgtttaacrtctgtgtataattgggtacacatatgagtgcattctccagatcaaaggttgtagactttctgggtttcatgatctagtataatttccaatgaaatgttgggaaataacatgggatagtca

SEQ ID NO: 329852 - DNA, 607 bp, Homo sapiens
tctagtctttgacagtatagagaagttttcatagagatttcaaaaggaatgctggtacttccatgtattcctgatgtttcacaggacgaagacaagacaaaacccaaacaaccagagccactgggaaagaaatagtgcttctcagtcacaaaaatcaaaatgggatttgggaaatatggtgacccttcagggagagctaagtccaagtgttttcttgttaagaagggatcgaagggagcasgggaggacctgggcacactgcagactctgaggcagcctttgggacctggggctggtcatggaagaggtcagaatgggatgcctccttggtgtggtctgtaatcaaccgagggtcagtctacaagggttagaaggaggcttctccgagagttctcccttgtcactggtgactcattattgggggactggagtctttagtttataaaactttgagaaagtagcttttctgggatagaatagaaggaaatggtttatctcttgtaaaacattgaatttgttatgaaaaagccttggttcaattcctggctttggcaatgatcatggtgttgcatcactgggtccggcacatcatcaggctgacctcact

SEQ ID NO: 329853 - DNA, 603 bp, Homo sapiens
caccatctatgccaggaatcaatattcaatactagatggatgtttgtttttgtaggaaaattgtgaaagcggatttcacaatgcggcggagaaagggaacctccatggacaatagctgagtgagagatgaggagaatcagkgctatgtctacactgcttcagcaactttaagggtgttcatctccattagccaacacatttttgtcttacttaagccactatgtgttgtgtttttgctcatttgaagcctacaaagtcttaacaaagcacatatagataaaagtcctggaaaggcttttgtttgtttttgtttgcttcagtgtttttctgagatgcttacaacctaattcaaaccatttactaatcttcttatgcttagtgagaaaaaaaaaattccataaagcatttcacgatttcatcagtcactggggtaatgaataaaaagctacacaataatttccttaaacgggtgtccatatttgtattcatattcacatgacaattctgtaagtctaagcagtgagttgtttaataaaagagaccacatacaaacaatatatcgtttgtactcaaaagatacaggaaagggaacttcacaaaata

SEQ ID NO: 329854 - DNA, 599 bp, Homo sapiens
ggtccatttctggaggtatgagggatcaagaagcaacagaaaatgatctcactctattaatgtcttctgttactgaaaaacttaaagtatgtcttcttgaaagcttcgaagtttatgttttctatcagacaagagaaaaagaagagaaagtgatcgcttttcctttttgctactcttcttasttgttaagtctgttgcttctggagtcttttctgagaaatgtaagaccctgaaatatgtgattcttacctaagtaaaaggagaaccgttcaacagattaatgcaacagattaaaagctgtctttaaaataaagctgatgcttattattctgcaaatgtgtttcaaattccctgaaggaagagcttgagatcagaaacccatgtctttgcaataacgtaccagctcagccccagattctggtacccccagcgtggaagtcaagatgcaaactgcaagacactttcaacatgtttcccagctcatcagctcgtctgcattctgaatagaaatgcgatcttgcttatacttagttctgaaattctgtatctgaatcttgagtcatttgttctttctactcagttcctgcaaaccagagcca

SEQ ID NO: 329855 - DNA, 439 bp, Homo sapiens
gggctggccagtctaggggttcgtgtttacactgtagtgagggactccactgatggtcctgttcattcattcattcaacatcagtaattagatatcctctactaaatattgagaatacaagtcccaagttaatgaatcttgaatggagaaacctcaggttttcagaaggaggggaatgtagcctgaatgagacycttccggacagaaaatcacgacagggaagacaagctgggtattcgcccgctgggtacatcatttattaactcaacagatgttagctcagcacctgttctgtgtgaggcgttatgctaggaactgggtacaaagaggaaggccaggaggacaggggccctgacctggctaagcctgaggctacacacactcatcagagccctcagggatccacgtgcagccctaacagccaattcagagaacagga

SEQ ID NO: 329856 - DNA, 439 bp, Homo sapiens
gggctggccagtctaggggttcgtgtttacactgtagtgagggactccactgatggtcctgttcattcattcattcaacatcagtaattagatatcctctactaaatattgagaatacaagtcccaagttaatgaatcttgaatggagaaacctcaggttttcagaaggaggggaatgtagcctgaatgagactcttccggacagaaaatcacgacagggaagacaagctgggtattcgcccgctgggtacatcatttattaactcaacagatgttagcycagcacctgttctgtgtgaggcgttatgctaggaactgggtacaaagaggaaggccaggaggacaggggccctgacctggctaagcctgaggctacacacactcatcagagccctcagggatccacgtgcagccctaacagccaattcagagaacagga

SEQ ID NO: 329857 - DNA, 503 bp, Homo sapiens
tgcctgtgtttggaagtcgtgcacatcctgcaggctcatctcttcctctgcttcttcctgctaggccagtgaaatttttctaccagacctaccttgattgtacctttagttcaagatgagccccttgaaagtttggggttttcccatccatgacccacagatcacacaccatacctcctcatcccctgacagcccaagctaccagtacacaaccagtatctactgatgaatgaatgaatgaatgaatgaatgaatgaatgaatgaatgaaaagggagaaaggaatctctctgtgctttggaacaaaagccctatagattctttcatttatgcctcctaatctgatgagtcttttgtgaattttgctttgggaacccacgttcatcakcttctttacacagccttgctttcaaccctccacaattcatttcatcattaacatgcacaaaacctaaccacatagggcagcgcgactgtagtctttagagatatttcaactcttct

SEQ ID NO: 329858 - DNA, 593 bp, Homo sapiens
ttatgagcattgctaacatttattaagcacrtgcattgtagttaagttttgcacatgtgataaagagtaacttttcattataactacatttcctcatttgacattagggaacagagacacgtaggatgagtcatttgcctcaaatcatgtagcagtttcaaagtctaaaatctaaattcaaagcacctctgtctatttctcaattcctcctttataaatatcactggatgattaaactttctactggcatttgtaaggcttagcacatttaaaattggtcctttacacctctattatagtccgtttcaaaagaaaagagacaatatttgtaattttgaataaaattatactatcatctttgcccacttacgcatgcaacaagtattcattgtgtccaatttatgcccagctctctcatgtatttttattgtgtctaaatataaggtattgcaattacttcgaagcagataagcacactaagtggtcattgtttccagcctgctgaacttcctgaggaacaaaaagcagatgcagtgagcaaagcaatccatttcggtcacgctgaaaatttgcagatttaaaagagagaagcc

SEQ ID NO: 329859 - DNA, 527 bp, Homo sapiens
atctgcaactgggttcaacaatgatgatatagaaagacagtgccatttgtttctagatggccagtaaaaaagataaaatatatgttcataattagcaagcaaagaaaaatcccaaaacctatatctaaataaaattgttaagtactatgagtcatgcagatgaaaaaaatatattttgtatatatgtacttatatgttatacattttatatattatgtaatatacaacatgcttgtatgttttatataatatataacatatagctatatattttatataatatataatttatatattatatataatatataacatatagctatatattttatataatatataaattatatattatatattatgttatatattatatataatatttacatgttatatatattacatgtmacatgtaaatatatattatataaattataacatataggcattatatattatataaattatatattatataatatataatatctatacatttaaagttgcttttttcatgtttagagtaa

SEQ ID NO: 329860 - DNA, 513 bp, Homo sapiens
ctgtgtcccattaatgacatagcatcagagtttcctttaatatcttcctactctgtattaattgattcatttattattaactcagtaagcatttattgaacatttacagtatatcaatcataccgctaaatgctcactttctagagatgaaatgaaccttaaacaaggaaagcatggtatgtgttacaacacaagtacttacaataaggcataggaataacgagataagttattgattctccttggggtgaagagsttggaaaaggctttttaagatagaaaaaccatggattttcatggattgaaaaacctgaaggaggagtagaagctgcgtctccaagtctattgcccatggtaatgtgctgctggaaaatgtttagcaaagggttctcccaggagaagagcctgatatgcagccttcttccatttgcctggtttaaatacatccgccatggccaatttcaaaccaccaccatgcccatcactggagacagccttgggaacagatgccca

SEQ ID NO: 329861 - DNA, 535 bp, Homo sapiens
cttcctactctgtattaattgattcatttattattaactcagtaagcatttattgaacatttacagtatatcaatcataccgctaaatgctcactttctagagatgaaatgaaccttaaacaaggaaagcatggtatgtgttacaacacaagtacttacaataaggcataggaataacgagataagttattgattctccttggggtgaagagcttggaaaaggctttttaagatagaaaaaccatggattttcatggattgaaaaacctgaaggaggagtagaagctgcgtctccaagtctattgcccatggtaatgtgctgctggaaaatgtttagcaaagggttctcccaggagaagagcctgatatgcagccttcttccatttgcctggtttaaatacatccrccatggccaatttcaaaccaccaccatgcccatcactggagacagccttgggaacagatgcccagtgacactgcaccatgtcatactctgaccggatgaaaaagtaaataccttcaagagtagacaatg

SEQ ID NO: 329862 - DNA, 582 bp, Homo sapiens
ggcatttggacaaaaagtaggacaggagttcccggatcaacaacaatctctcaaaaatgctgtttctgggaggacaatcagccttggcttgtgttcttttcatttgcagcactttttctaggctcagatcagctcagagacaccagaatatttgcatgatcaacrttttcataacaaattaccattcctgttctcctctaaatggaatgtaggttaaaagactcctaatgtctatttttcagataaataaaatattttcactatgcgtgcatacttgtgtgtgtgtgtgtgtgtgtgtgtgtgtgtgtgtatgtgcagtatttgagagggtgaataagacagaactcactgtatgccttctagaaggtgaggactagcaagggtattatctgtttgcttgagcttttatgaaactaggcttgaacttttctattgatttttagagatttcataattttaaagtagtactgtagctacaaattgtaatgacccaagatgaagaaggggcttcagaaaccctgtaatcgatgagcactacgtaggagcatcaagaaagatcgtttaagttgtcattttaaaatt

SEQ ID NO: 329863 - DNA, 582 bp, Homo sapiens
ggcatttggacaaaaagtaggacaggagttcccggatcaacaacaatctctcaaaaatgctgtttctgggaggacaatcagccttggcttgtgttcttttcatttgcagcactttttctaggctcagatcagctcagagacaccagaatatttgcatgatcaacgttttcrtaacaaattaccattcctgttctcctctaaatggaatgtaggttaaaagactcctaatgtctatttttcagataaataaaatattttcactatgcgtgcatacttgtgtgtgtgtgtgtgtgtgtgtgtgtgtgtgtgtatgtgcagtatttgagagggtgaataagacagaactcactgtatgccttctagaaggtgaggactagcaagggtattatctgtttgcttgagcttttatgaaactaggcttgaacttttctattgatttttagagatttcataattttaaagtagtactgtagctacaaattgtaatgacccaagatgaagaaggggcttcagaaaccctgtaatcgatgagcactacgtaggagcatcaagaaagatcgtttaagttgtcattttaaaatt

SEQ ID NO: 329864 - DNA, 582 bp, Homo sapiens
ggcatttggacaaaaagtaggacaggagttcccggatcaacaacaatctctcaaaaatgctgtttctgggaggacaatcagccttggcttgtgttcttttcatttgcagcactttttctaggctcagatcagctcagagacaccagaatatttgcatgatcaacgttttcataacaaattaccattcctgttctcctctaaatggaatgtaggttaaaagactcctaatgtctatttttcagataaataaaatattttcactatgcgtgcatacttgtgtgtgtgtgtgtgtgtgtgtgtgtgtgtgtgtatgtgcagtatttgagagggtgaataagacagaactcactgtrtgccttctagaaggtgaggactagcaagggtattatctgtttgcttgagcttttatgaaactaggcttgaacttttctattgatttttagagatttcataattttaaagtagtactgtagctacaaattgtaatgacccaagatgaagaaggggcttcagaaaccctgtaatcgatgagcactacgtaggagcatcaagaaagatcgtttaagttgtcattttaaaatt

SEQ ID NO: 329865 - DNA, 545 bp, Homo sapiens
taaaatcaagtgctttttaaaaaggaggctgggggagggatagcatgaggagaaatacctaaggtaaatgatgagttgatgggcgcagcaaaccaacatggcacatgtaatcctatgtaacaaacctgcacgttgtgcacatgtaccctagaacttaaagtgtaatttaaaaaatgctatatattctcagagtcaacaatgtttgagaacaagctaatagtttttggctaggttcaaggagctgggtgttggtgatactgaattataagaacagtatgaatagagatctaaataaactttaggaattaaagataacaaatgattttataagaggtttttctagcatgaacacttatggagcgactttcttgccctagctcgcctgggaatactataccgtgagccattaccaaaaaataaayaaataaataaaactgtggttaaaaatacatggcaagagatctagcctctaaaccaaattgtaggtacaggattgttagctataagcaaaattaagcacaacgtcctatagcacatcgcaagca

SEQ ID NO: 329866 - DNA, 371 bp, Homo sapiens
tggtcctacctctgtgatgttgggtaagttctttaacttctcttggccttagtgcctgtctgcatgatggagatgatgactactgaatyaaagagttgttatgaagaatcaatccatcacagtttgtgaaatgctcagaagagtgtctgtttcaaagcaagcacgacagaagcatttataaaataaatgatgaaacttcaggctgcggaaaataaatgccccgggcaaggcctcagtcagcagtggaaccatttcttttttcattccacacctggccatcaagggtctgttctggtgagaggtcaggctaagcagctgggacccagcaatgccaagatcagcaatgggccatgccctcctaaggcttgtac

SEQ ID NO: 329867 - DNA, 476 bp, Homo sapiens
ggggtgtcattcacatagaacacactgtagcccccataccagccacatattatgtacaaatatatactggctgctttccattcctcctgtgtggaaggcatttccagttctacgtgtgtccagcttttggatctttaacaggaaaaatctccctcacagtggggattttgaagttagttgtaagaaagacttaatcattgttctggaactcattagagatgtcaccttgccaggttaaaaatgcctctaaatcgcagattcctcgtgtgtttaataaagatgatcaccacctgmccctcagagctgtggtgaagattacatgacatggcaaatagaagcacctagtgcaatgtctagcctgtgtggttacacaaagtgcatggaaaatacttctcagaaaatgaagaactttccaagtctttgttacattcaacgtggaatgttaatgcaactctttattcagcttttcccgttaa

SEQ ID NO: 329868 - DNA, 553 bp, Homo sapiens
cagaaactgtaggtattttcttatcacattaacggtgatggcagatatcagaagctttactttaaaattcagactattgtcgctattagatctgccatggtaaagaagcacatgccccactatgtacaaattctttttaaaatatgttgatgactatttcaacgcaactagctttgtttggtatcctaatattttatacagctataaaygttattctgggaagaggcccattaacctctccagacgactagaggagtgaggcaggaggttaagggccctcagcatagcggtttggaaggtgagttttcagcaaaggaggtagacacagcagatagataggaaagggactaaaggagggagctgtgccctgaaggcaaggaggtaggttcaaggaaatgaaagtgaaaagagattagtgttgctaggaaggccctcaaggtgtgggttgagaggtaaccaatgagtttggcaggtccagggccatgaagacctggacaagtgctatttcagtcatagggcaggacaaacatatccctgcatggacagggaaaca

SEQ ID NO: 329869 - DNA, 553 bp, Homo sapiens
cagaaactgtaggtattttcttatcacattaacggtgatggcagatatcagaagctttactttaaaattcagactattgtcgctattagatctgccatggtaaagaagcacatgccccactatgtacaaattctttttaaaatatgttgatgactatttcaacgcaactagctttgtttggtatcctaatattttatacagctataaacgttattctgggaagaggcccattaacctctccagacgactagaggagtgaggcaggaggttaagggccctcagcatagcggtttggaaggtgagttttcagcaaaggaggtagacacagcagatagataggaaagggactaaaggagggagctgtgccctgaaggcaaggaggtaggttcaaggaaatgaaagtgaaaagagattagtgttgctaggaaggccctcaaggtgtgggttgagaggtaaccaatgagtttggcaggtccagggycatgaagacctggacaagtgctatttcagtcatagggcaggacaaacatatccctgcatggacagggaaaca

SEQ ID NO: 329870 - DNA, 553 bp, Homo sapiens
cagaaactgtaggtattttcttatcacattaacggtgatggcagatatcagaagctttactttaaaattcagactattgtcgctattagatctgccatggtaaagaagcacatgccccactatgtacaaattctttttaaaatatgttgatgactatttcaacgcaactagctttgtttggtatcctaatattttatacagctataaacgttattctgggaagaggcccattaacctctccagacgactagaggagtgaggcaggaggttaagggccctcagcatagcggtttggaaggtgagttttcagcaaaggaggtagacacagcagatagataggaaagggactaaaggagggagctgtgccctgaaggcaaggaggtaggttcaaggaaatgaaagtgaaaagagattagtgttgctaggaaggccctcaaggtgtgggttgagaggtaaccaatgagtttggcaggtccagggccatgaagacctggacaagtgctatttcagtcayagggcaggacaaacatatccctgcatggacagggaaaca

SEQ ID NO: 329871 - DNA, 615 bp, Homo sapiens
gaacaatttccaacaaagaccatgtgacccataaagcctgaaatacgtacgtactccctggccctttacagaaatatcctgttgactgacacaaaactatcattgttctgagtaggtatttggaaatacagatgagggtaaagagtggatgtgggtgtaggtggtggtagagaggggatttatttgtgatcattattaatgtaggcatgcaaataaagtgcaattccaggctggcacagtggttcacgcctgtaatcccagcactctgagaggcaaaggtgagaggatttcttgaggctgtgagttcaagaccagtctggacaacatagtgagacccccagtctctacaaaaaattaaaagattacaaaactatccagatatggtgtgcacatatagcyctagctactccagaggttgaggcaagcggatggcttgagcccaggagtcggagactgctgtgagctgtgattgcaccactgcactccagcctgcgtgaaagagcaagacactgtctcaagaaaaaaaaaaaattccacctggttttttcagtcagaaccgttcataagtaatgcgagtgagaaaatatatatgttcaaagcagcaacaaaacaagc

SEQ ID NO: 329872 - DNA, 615 bp, Homo sapiens
gaacaatttccaacaaagaccatgtgacccataaagcctgaaatacgtacgtactccctggccctttacagaaatatcctgttgactgacacaaaactatcattgttctgagtaggtatttggaaatacagatgagggtaaagagtggatgtgggtgtaggtggtggtagagaggggatttatttgtgatcattattaatgtaggcatgcaaataaagtgcaattccaggctggcacagtggttcacgcctgtaatcccagcactctgagaggcaaaggtgagaggatttcttgaggctgtgagttcaagaccagtctggacaacatagtgagacccccagtctctacaaaaaattaaaagattacaaaactatccagatatggtgtgcacatatagctctagctactccagaggttgaggcaagcggatggcttgagcccaggagtcggagactgctgtgagctgtgattgcaccactgcactccagcctgcgtgaaagagcaagacactgtctcaagaaaaaaaaaaaattccacctggtttttkcagtcagaaccgttcataagtaatgcgagtgagaaaatatatatgttcaaagcagcaacaaaacaagc

SEQ ID NO: 329873 - DNA, 528 bp, Homo sapiens
gtccatctatgggttccaagcgactgactcttactctgcacttttcattaagtacttacgattagccagtaccccttctacctgtgtgtcttgctaccttgttttataaaatagaaataatcacgtccaccttggagaaccatggtggacttctagwcaaacggaagaaaagtgggacaagggttttttctagggctgggaagtgggagggagctcgccacactgaggaccttcctcagactcaatgcctccccagcccaaagcaactaaaacaaacagcttgaaattccacattttaaaacataaagaacaaaacaatgactttttttttgcactattggtggaaatctgaattgatacgaccgttttagaaaactgttttaccatcaagctgaacataaggaacatttcaggcatgtgtccaacagaaatgagcagctaggcacaacaggtacagagaacgtccagaggagatgcaagcgctattgtcaaccactgagaatcacctaaatgttcattaaccataga

SEQ ID NO: 329874 - DNA, 528 bp, Homo sapiens
gtccatctatgggttccaagcgactgactcttactctgcacttttcattaagtacttacgattagccagtaccccttctacctgtgtgtcttgctaccttgttttataaaatagaaataatcacgtccaccttggagaaccatggtggacttctagacaaacggaagaaaagtgggacaagggttttttctagggctgggaagtgggagggagctcgccacactgaggaccttcctcagactcaatgcctccccagcccaaagcaactaaaacaaacagcttgaaattccacattttaaaacataaagaacaaaacaatgactttttttttgcactattggtggaaatctgaattgatacgaccgttttagaaaactgttttaccatcaagctgaacataagraacatttcaggcatgtgtccaacagaaatgagcagctaggcacaacaggtacagagaacgtccagaggagatgcaagcgctattgtcaaccactgagaatcacctaaatgttcattaaccataga

SEQ ID NO: 329875 - DNA, 587 bp, Homo sapiens
gcttgtaaatagcatgtgctttggaacttgaagcattacaatgtacactgcacatgttaagctgtccaccacagtcatccacatttacattgacaaactagtcatgggagtctgacatgaaaataaagaaacgaatctttggatctattttatttatttatttatttatttttgcctccaaaaagtttagaagtcctagttaaaatctagtttcctagacttttttcctggttaaaatctttctatggaataaaacctcatgtaattcattaacctgggttccaaatctggtcctgctgtgccctgtttagtaatcastggaagcccacagggtatcacaggcagagtagatgctctccgtgctgtgtccccatccgccttttcaaactcatcttttgatccgtattccaaacttcccatgctcctgttgcacacacctgctgcggcttgaacacgtcatccctgtcctcaactcccactcccgccagaccttccatgcccttgtcaatccagaaaagtgacgagacaagtctcaatcatttcaggaggtttacttgccaaagggaaggatgcatgctggggagaca

SEQ ID NO: 329876 - DNA, 421 bp, Homo sapiens
ttaacctgggttccaaatctggtcctgctgtgccctgtttagtaatcagtggaagcccacagggtatcacaggcagagtagatgctctcsgtgctgtgtccccatccgccttttcaaactcatcttttgatccgtattccaaacttcccatgctcctgttgcacacacctgctgcggcttgaacacgtcatccctgtcctcaactcccactcccgccagaccttccatgcccttgtcaatccagaaaagtgacgagacaagtctcaatcatttcaggaggtttacttgccaaagggaaggatgcatgctggggagacaggtctatgtccttctcggaagaggattgtgagggctccacattgaaggggaaagggcaggatattgagaaatacacaattttcatgtaacgggggtaggggaa

SEQ ID NO: 329877 - DNA, 596 bp, Homo sapiens
agtaggatggaaggcctagttttcattctgtctatcataatgatggccttaattctttgggtaattaatagattctttacaaccaagtatatagaaatgaaaataataaccaatatgcccctgaagcctgtgggacacaaaagcgtgtgtgaagccctcaagcatcctgatacggccatggcctgaataatgaaggcaatttgaagctatcagcttctataactgagtctccaaaagaaccaacacagagccacggtgctctgtgctttgaggcatattcactmactacctacacgcacacttatcatagaaatgtaaactcctgcagagcttcttcccagagtagtaggaacaacatcaataatcaatgtaagtcagcttcatatgtgcattagacaatgcgttgagcacttgaataatcttatcaaatcttcaaaacaatctaatgagaggtaatatttccattttaggtatggaaaaacaaatttaacaatgaagacaagtaatgcaaaatgttagttgttttagctactaaatactaggtgcagcatagttcagaactaccttttctaaccatttggtctagctagtagaca

SEQ ID NO: 329878 - DNA, 421 bp, Homo sapiens
ctatgtgtaaaacttctttgcaatttgtggattcatctcaaaggtttgaacgtttttttcctattcagcaggttagaaacactctttttgatgaatatgcaaagggacatttgggagccaagtgaggcccatgaggaaaaacagaatatccacagacaaaaactaggaagaaggttactgtaaaactgctttgtgattgcggattcatctcaaatgaataaacctttccttttattcagcatgtagaatctgagaagggacattttgraacctattgatgctctatcaaagaaactgaatatttccagacaaaaactagaaagatgctatctgtgaaatgcctttgagatgtatggattcatctcacagagttaaacctttcttttgattcagcaggttggaaacactcctcttggaaaat

SEQ ID NO: 329879 - DNA, 659 bp, Homo sapiens
agctgcatgtgaaactgctttctgatgtgtggattcttctcacagggttaaactttcttagattcagcaggttcaaaacattctttttggacaatctgcaaagggactctaggaagccttttgaggtccatggagatacaccaaatatctcctgataaaaactcgaaataggctatctgtgaaactgctttgtgatatgtgggttcaacttacagagttaaacgattcttttgattcaacaggatggaaacactcttcctggagacctacaaagggatatttgggagtccattgatgccaaagggwtaaaaacaaaatatccacaggcaaaaactagaaagaagctatttgtgcaactgcttggtgatgtgtggtttcatctcacagagttaaacgttttgttttgattcagcaggttggaaacacattttgggagaatctacaaagggacatttgggagaccactgtggcctaggggaataacagaatatccccaggtaaaaactagaaagaagctatctggggaactgttttgtgttgtgtgcattcatctcacaaaggtaaacttttcttttgattcagcgggtttgcaatcactctttctggtgaatctgcaaagggacatttgtgatccccttcatgcatatgaagagaaagga

SEQ ID NO: 329880 - DNA, 634 bp, Homo sapiens
ggtgcagaacagactggaggagaaaacaggtgcaagatacacccactaatgtctcaggggtctggcttggttactgcttccatggttacaggcctagccagcaaagaaggtacattggtataagcaattccacgaacagccaacagaacaaaaaacttgcatatatttgttccaagtgtgagaggggggcaaagaaagattattgatgatgaaaaagaccagccttttgtcaaaagcatgtattttaccataaggctaacagaaaatgccagtagactcggagacatttcggtgagggaaaatgatggctttacccagaaactatcaacaagattgacagagaataactcactaaatatagaagtaatgaaaaaaatcaagaatgttctgcatagggctgctgcagatgacaggaagtttatgctgcccactccagctggttgtgtcctttgctgaggtcttgattttgtgtgtatttaagaaatgacagaaacagagcaagcattgaaatagtggataccataragaacactgtgaataatttcattcagtttgagaagccaattgtatcagccaatagcccagccatttgactagctgcatccatactgcctctttgtgatttggttaaaag

SEQ ID NO: 329881 - DNA, 466 bp, Homo sapiens
agtaccctattttttattaaaaattccaggtattttttagtatatctaagattaaatctttagatggccaacaaaaacatgccttattaactgtaacaagataaagattaccttttgacacatttctgccagaagttgcttttctatttctctcttatcttcatttagctttatttctaaagactcaaactttatatgcttaggataagcatctgccagttgatcaccaataagctgaaggttgtcagctattaaaaagtaacaggtcaaattaggacacagaagcatggtcaggtgtgtaagaggccagacttctagctcaaaagtagagtatacttaggggaaaatatgggtgtctgcaatttactttgaaatmcaaaaaaaaaaaaaaaaaaaaaaagcaagatagatgaatagatggacagacaaaaatgatgaagtatgtataatacaaatgtaatcgtga

SEQ ID NO: 329882 - DNA, 495 bp, Homo sapiens
cagttttacagatacacacgactgtttgagtaatacgcaatagacaagtgatatatgggatttagtgacaagtataagatatgattccaaaaacagggtaaatgcctgaagaaaggagagttaagaaaaataaaattaaaccttgtcacaggcaactctttccatgagtcttcctatcatagaaaataaataaatgagttgacagtggcatatctagaactaagacaagcagcatgtagatctagtaaagaaaatgatcaaatggggtgtggcatcttacacctgtaattgcagcactttgggaggctgaggtggggratcatttgaggtcagtttgagaccagccttggcaacacggtgaaaccccatcacaattataagttctaaaactagccaagcgtggtagtgcatacctgtaatatcagatactcaggaggctgaggcaggagaatcaatcacctgaatccaagaggccaaggttgcactgagtcaaga

SEQ ID NO: 329883 - DNA, 593 bp, Homo sapiens
agactgaataaaaagaaatgatctaaaagttaaattttagaaagtaaattttagctgggtgtagtgactcatacctgtaaccctagcactttagcaggctgaggtgagtagatcacttgagcccaacaataacaacaagaaaacaccaaaaatgttatccaggcatggtggcacattcctgtagtctcaactattcaggaggtggaggtgggatgctcacttgggcgaaggaggtaggcatagtacattttgccttgggacatttatttgcctgtccccttgccccagcactttgggaggttgatacccaggggtaatcatgtagaccaaccccggcaacagattagaaactatgatctccgcagaatggagctgagttccmgtcaatattcccactgattgactacagtaacctcagacactgaataaagatcagagggcagaccatggaagttacaggccttgagtgcatccagtgctcaactgtgtgatacaggtgcaacctggcactgagtcgactttgtcagtcaaattactccagccatgaaagtctgctcattaatgtttcccctcgtgctaccagggctgaagct

SEQ ID NO: 329884 - DNA, 492 bp, Homo sapiens
gaaaatgccaaatgagaaaaaccaagtaagtttgagtttctgcagttacaaagtgctatggtttgaatgtccctatcaaaactcaggttgaaataaaattgccattgtaatggtattaggagatggggcctttaacaggcgattaggccatgagggctctgccttcataaatacattaatgtcattattgcaggagtgggttagttatcacaggagtgggttagttattgtgggagagggttcctgataaaagcataaatttcacccccktccactccatcttcagtgctcacttcatccttccaccttctgccatgggatcaccatccccagatgccagcatgatgttcttggacttcccagccccagaaccatgagccaaataacttctcttctttataaattgcccagttgatggtattctgttatagcagcagaaaacagacaagacataaaggaagacacataattaccctcccccaacagttcatg

SEQ ID NO: 329885 - DNA, 590 bp, Homo sapiens
ggctgacaaactgaaggtcatggctaacagagtctccatatcagtgaatctcaaacatctgtttacataaatagcatcttcttataaaaaaatacaaattctgagcccccatcccattatagttggtaagtctaggatgagaccagaaggggtcattttaaygagattttcagatgactttgaatttatatttaatatttattctggtttgcctggggttgaagggttccccagggcatgagactttcagtcttaggcaaactggaatagttggtcactcagatttcggtgcagtggttaaagttaacactttcaaaaatattgtagtgatctagatttggttctaggagtttggctcaattcagggctaacaaaaaaatctgtttagggccacttggggattagtgattctcaaaaggtagtccttgaatcacttactgaatacctatagttgaagaacagataactgcattttaacaagattcaaaggcaaattaatgtttgatgaccgttgacatcaagtctcagaatcagaactgttcaacttccaagcaaatgaaattactaaactcacttctctgagtgaggct

SEQ ID NO: 329886 - DNA, 591 bp, Homo sapiens
cagcagttgtgctcttggacatttatcccagagaagtaaaaacttagactcagtaaaaacctgtacatgaatattaatagctgttttatttgtaaaagccccaaactggaaacaacccaaatatccttagatcagtgactggttaaacaaactgtagcacagctatactatgacatactatgaagcaataaaaaaggaatgagctattgatacagacaaaaccatggatgaatttcaagggaattgtgctaactaaaaataagccaatcacaaaagatttcatgtgatgtgattttatttatataatattcttgaaatgacaaaaatatagaaatggagaacagattagtagtttccaggggtcagagagtagaggagggagggaggtgtgtgtgtccataaaaacgttgcgccagggatcctggtgaggaagctrttctgtatcctcattgctggtgttcacgtgaatctacatatgtgataacatttgatggaaccaaatacacacacaaacacacacatacacatatgagtgcatataagaccagagaaacttattttggtggattccgtaaatgtcaaatctttggt

SEQ ID NO: 329887 - DNA, 596 bp, Homo sapiens
tcacgtgaatctacatatgtgataacatttgatggaaccaaatacacacacaaacacacacatacacatatgagtgcatataagaccagagaaacttattttggtggattccgtaaatgtcaaatctttggttatgatattgaagtgtagtttggcaagatgttactattggggaaaatagtaacattgtactattgtcctgtgaattattgattcacaggaaattgtaaaaaaaaatgctttgtcctatacatttttttagaatttcctgtcaatccataattatttcaagataaaaaaagttttgtaaaggaagaattttmgagactctttcagattttttattttgagatttaatcaattatatgagaaaaataagctttaactgaccactctttccttcctatccaaagcttagtcaatgagaaaatgttgcaagagaaggagaatggggggtacctgagactccaggagagtacataccctttttaaaaaagcaatacaagccagcagaaaaaggaaagatgggactctggagcgattatgtgaatctgtggttctcaaagttcagcatgcatcagattcccagagggctt

SEQ ID NO: 329888 - DNA, 596 bp, Homo sapiens
tcacgtgaatctacatatgtgataacatttgatggaaccaaatacacacacaaacacacacatacacatatgagtgcatataagaccagagaaacttattttggtggattccgtaaatgtcaaatctttggttatgatattgaagtgtagtttggcaagatgttactattggggaaaatagtaacattgtactattgtcctgtgaattattgattcacaggaaattgtaaaaaaaaatgctttgtcctatacatttttttagaatttcctgtcaatccataattatttcaagataaaaaaagttttgtaaaggaagaattttagagactctttcagattttttattttgagatttaatcwattatatgagaaaaataagctttaactgaccactctttccttcctatccaaagcttagtcaatgagaaaatgttgcaagagaaggagaatggggggtacctgagactccaggagagtacataccctttttaaaaaagcaatacaagccagcagaaaaaggaaagatgggactctggagcgattatgtgaatctgtggttctcaaagttcagcatgcatcagattcccagagggctt

SEQ ID NO: 329889 - DNA, 596 bp, Homo sapiens
tcacgtgaatctacatatgtgataacatttgatggaaccaaatacacacacaaacacacacatacacatatgagtgcatataagaccagagaaacttattttggtggattccgtaaatgtcaaatctttggttatgatattgaagtgtagtttggcaagatgttactattggggaaaatagtaacattgtactattgtcctgtgaattattgattcacaggaaattgtaaaaaaaaatgctttgtcctatacatttttttagaatttcctgtcaatccataattatttcaagataaaaaaagttttgtaaaggaagaattttagagactctttcagattttttattttgagatttaatcaattatatgagaaaaataagctttaactgaccactctttccttcctatccaaagcttagtcaatgagaaaatgttgcaagagaaggagaatggggggtacctgagactccaggagagtacataccctttttaaaaaagcaatacaagccagcagaaaaaggaargatgggactctggagcgattatgtgaatctgtggttctcaaagttcagcatgcatcagattcccagagggctt

SEQ ID NO: 329890 - DNA, 539 bp, Homo sapiens
attaatcatcttatttgttgatcatattaaaatgacaaaaaccacaattattttgcaccaacctaatatttcagcagatgtcctctgaatcagaagtaaatagccatgataatcttaccattagttattttattgagcaattacaagtcccaggctcttacgtttttatattaattttttacaaccagtttatgcgatgcatactgtcctcatttatcatataaggaaactaaaacttaaagagtttaatatattgctcaaggttatccagtgtattggtttgctagggctctgtaacaaagtaccacaaaccaggtggctcaaacaacagaaatgcattgtttcacagttctggcgtcaaaaagtccaaaatcacagtgttggcagctttggttccttctgagggctgcaagggaaagattgttctgggtmcttctccttggcttgtagatgtctgtcttctccctgtgtctctccatgtcattttttcctctatgcatgtctgtctctgtgtccaaatttttccattttaaaaggac

SEQ ID NO: 329891 - DNA, 631 bp, Homo sapiens
gtgtctattttcccatgtgtataatgaggttaataatagagctgatgtcataggttattaagagaattaactgaggcaatgcaggtaaagcactttgcttgtccagcccactgtgaacactcaagaaatactagttacttttgttgtgataacttttgttgcctttgaaacactgaggaagggtttggagaagtttactggaaaggaaaagctaataggatgggggacattgaaaataggggcaaaaattcacgttatagatacagtgaatggcctggtacatcaaaatgacatagggagcacaagggggtgtcagtggagtcctggacaagtagtactccaatataccttcctgacatgtgattgtatcataacttagtttctacatttttttttgaaaaatcttgtcacaatatgatttcggggctccataaatatttagtgatttattgattaggggattctattcactttgcatggtgagttcactgtttgttgggaagatttgatccctctttgtcctcagtgaagtcctcagacttcaacygagtgtcaggcttggagaatcttctatgagagaatcaagtatactggatgctcaccaagaagtagcaattaattgcatggaaat

SEQ ID NO: 329892 - DNA, 293 bp, Homo sapiens
gtggcaggcaagagagaacttgtgtaggggaactcccctttataaaatcatcagatctcatgagacttactatcatgagaacagcaggggaaagacctgctcccatgattcaattacttcccattgggtccctcccatgacaaatgggaattatgagagctacagttcaagatgagatttgggagggggccacagccaacccctatcaataactatacaaggacacatggtgaagtagagaaaagcttatacctacacatggaatcactgygaatctgatcattacaaatgta

SEQ ID NO: 329893 - DNA, 606 bp, Homo sapiens
tctcctccacaaaattattctagaattcagggtgagcaagccttgtccattttgacatatggccttccagttgtccygggtgtcatttccaattcatctagctggaggggaaagggcatggaggagctcatgtccatgggaagtttttacaggccaagcctggaggtggtatacaacagatcttctcacattgcatttactagaccttagtcatatggtaatacctaagagaagatgagaaatatagtttaaacatgagcccaagaaagacaggagaacatggtttgggtgaagaaactagagtctctgccacactgacttagaagatggattgcctttaaagttagaaaagaataggtccaggaatggtggaaactactagaaattttctggaaaggcattgcaactgtgtgtatcagctaagaacccaggctatggaattaggtagcatggtatcaaaaccaaaagcgaatagtcgctacgtgactttagttttactttctctgtatcttagttttctcatattaaaatgaagacaaagtactgatttcatgggttgtaggtaggatttaatgaggtaaaaacacagcagagaaagctaattgc

SEQ ID NO: 329894 - DNA, 572 bp, Homo sapiens
cgggaggcaaaggttgcagtgagcsaagatcatgccactgcactccagcctgggcaacagagcaagactccatctgaaaaaaaaaaaagttataaacagatttttgactgtaagggtggttgtcaccccaatgcctgcattattcaagagcctgctatataaggatactgtgtaagtgttatcagtttctgttctttttctctgtcacctgactttggttaaactctatcctctgcagtagtagaaacagacatttgtcttgtcaacatagatgctcaaaaccagcaccagtatgagtgagcccactgtgctataaaaccatcatgagatagcttgcaagggctatcttcagctccagggagagttctgggctctctgactgagcagagaaatccacatgacctatagctctttgttgttcctcagatctaccattcttcagagttgaaaggattcaagttgagtttccttacctgatgaaatagataagaagtagccaagggactaaaaattcttctgctcttcctttacccatgtgaggtcagcaacacagagctactagcacccattac

SEQ ID NO: 329895 - DNA, 575 bp, Homo sapiens
gataaatgtctctagagcaatcactttggagactagatactccaaatcatttccatcttaatgaaaccttctttgtttggccatcaacctatccctaagttagttgaacaccttaaatagaaaattgcatttcatgctacatgaaaatgcagcagcttgattttgaataagagaatgcttggcttaagcaatgcatttaaaaagaattttagggtcagttttgcctgaacatccagtggctctagagtcagggctaattccagttgggtccatagatgaggtcagcctaatgactcttcatctgcacaaccagaggcaacaatacaggcacctggtcttcgctgctgcatttcacctgctaagacgctgtggatattcctccccttcccagacaaagcaggggatctgacaggctttcagaaaatgccaactcctttctctgccatcagcatacgcatctygcctcaagttgtgagaagctgttatcttttactccacctctaaacctgtttctcccttttcttccccacttgggtctaggaaggtgtatcaaattcctaggatttgtgtaacag

SEQ ID NO: 329896 - DNA, 575 bp, Homo sapiens
gataaatgtctctagagcaatcactttggagactagatactccaaatcatttccatcttaatgaaaccttctttgtttggccatcaacctatccctaagttagttgaacaccttaaatagaaaattgcatttcatgctacatgaaaatgcagcagcttgattttgaataagagaatgcttggcttaagcaatgcatttaaaaagaattttagggtcagttttgcctgaacatccagtggctctagagtcagggctaattccagttgggtccatagatgaggtcagcctaatgactcttcatctgcacaaccagaggcaacaatacaggcacctggtcttcgctgctgcatttcacctgctaagacgctgtggatattcctccccttcccagacaaagcaggggatctgacaggctttcagaaaatgccaactcctttctctgccatcagcatacgcatcttgcctcaagttgtgagaagctgttatcttttactccacctctaaacctgtttctcccttttcttccccacttgggtctaggarggtgtatcaaattcctaggatttgtgtaacag

SEQ ID NO: 329897 - DNA, 521 bp, Homo sapiens
gggaggatcactaaaggccagcagtttgacaccagcctggtaaacatagtgagactctatctctacaaaaatgtttttaaaaagttatctgggcatggtggccatatgcctgtagtcccagttactcagaaggctgaggtaggaagattgtttgagcccaggagttcaaggctgcagtgaactatgttcgaggcactgcacttcagcctgtgcaacagaatgagatactgtctctgaaaaaaaaaaaaaataagggcaatatcttacatgtgtgataccyacctccaacttccctctctcactaaatatgctgtgcaattgtagaaataaaagctaacccatttacttgtttgtgtgtgttggggggtgggggagagggagaggtgtcaaaaccctctcattttatttcttagtgcctctatttatatactggagctaagaatgtatcagtgatccctttgggacattgtaactccaaagatgaaacagcaatcctcaatatagaggcaacaggatataat

SEQ ID NO: 329898 - DNA, 568 bp, Homo sapiens
cctagcgtgaaatgaaacagctcagctttgtcaattaagtaacagtgaaactcaagggccaagaatccgaaaatgaatgatattcctaacgtaccagtgtttccacctttgcaagttatgtctgttttcttcctgggcagagcgagtaaattaagaaggagtagttaaacactttaggcatmaattgaagactatgaccccattcttagggataaaaaacataagataacatttctgaaactctctttccaaagctactggtgggaggtgtaggcagtgagcaagtaaaagacaataaaactcaaaccatgtttgcgcctgactcttttccccacgttctttttcttcttgccaaggatgaaagcagttattaatatggcaacattgatgcttgtgttttttgcaggttttatacccacagaaagcctcccaataacttagaaacaaaagtctgcccacacttggagagccagctcatcaaagactgtgtcgtagtcttgtgggctcctgccaatctttagcaaacagttcccttgagggctggaaactcatttctgtttctgaagtc

SEQ ID NO: 329899 - DNA, 568 bp, Homo sapiens
cctagcgtgaaatgaaacagctcagctttgtcaattaagtaacagtgaaactcaagggccaagaatccgaaaatgaatgatattcctaacgtaccagtgtttccacctttgcaagttatgtctgttttcttcctgggcagagcgagtaaattaagaaggagtagttaaacactttaggcataaattgaagactatgaccccattcttagggataaaaaacataagataacatttctgaaactctctttccaaagctactggtgggaggtgtaggcagtgagcaagtaaaagacaataaaactcaaaccatgtttgcgcctgactcttttccccacrttctttttcttcttgccaaggatgaaagcagttattaatatggcaacattgatgcttgtgttttttgcaggttttatacccacagaaagcctcccaataacttagaaacaaaagtctgcccacacttggagagccagctcatcaaagactgtgtcgtagtcttgtgggctcctgccaatctttagcaaacagttcccttgagggctggaaactcatttctgtttctgaagtc

SEQ ID NO: 329900 - DNA, 568 bp, Homo sapiens
cctagcgtgaaatgaaacagctcagctttgtcaattaagtaacagtgaaactcaagggccaagaatccgaaaatgaatgatattcctaacgtaccagtgtttccacctttgcaagttatgtctgttttcttcctgggcagagcgagtaaattaagaaggagtagttaaacactttaggcataaattgaagactatgaccccattcttagggataaaaaacataagataacatttctgaaactctctttccaaagctactggtgggaggtgtaggcagtgagcaagtaaaagacaataaaactcaaaccatgtttgcgcctgactcttttccccacgttctttttcttcttgccaaggatgaaagcagttattaatatrgcaacattgatgcttgtgttttttgcaggttttatacccacagaaagcctcccaataacttagaaacaaaagtctgcccacacttggagagccagctcatcaaagactgtgtcgtagtcttgtgggctcctgccaatctttagcaaacagttcccttgagggctggaaactcatttctgtttctgaagtc

SEQ ID NO: 329901 - DNA, 607 bp, Homo sapiens
cagttattaatatggcaacattgatgcttgtgttttttgcaggttttatacccacagaaagcctcccaataacttagaaacaaaagtctgcccacacttggagagccagctcatcaaagactgtgtcgtagtcttgtgggctcctgccaatctttagcaaacagttcccttgagggctggaaactcatttctgtttctgaagtcagtgctctcacacatacaaaggaggcttgaggaagggtgtatgcagggtattcaatgatgaaggccaagttcctgccacatgggtctctaggctggaaaaccagagctgaggaccwctctgcctggaagggttcccttcctgtctcgctcttgtaattgttgaaccacttattggataaatatgattcattgatccttccacatctttctacatttaattttcttttaaggagctaaatctcccttggttcattggatacacattggttcacagtttccagtcaaagttgtatcacatttggaagctggaaagaagtgtcaggagacaccatagaggaaggatgttcacaagccttgtggtgtggttggttcatattgcacccctcctcacccctcgatggga

SEQ ID NO: 329902 - DNA, 607 bp, Homo sapiens
cagttattaatatggcaacattgatgcttgtgttttttgcaggttttatacccacagaaagcctcccaataacttagaaacaaaagtctgcccacacttggagagccagctcatcaaagactgtgtcgtagtcttgtgggctcctgccaatctttagcaaacagttcccttgagggctggaaactcatttctgtttctgaagtcagtgctctcacacatacaaaggaggcttgaggaagggtgtatgcagggtattcaatgatgaaggccaagttcctgccacatgggtctctaggctggaaaaccagagctgaggaccactctkcctggaagggttcccttcctgtctcgctcttgtaattgttgaaccacttattggataaatatgattcattgatccttccacatctttctacatttaattttcttttaaggagctaaatctcccttggttcattggatacacattggttcacagtttccagtcaaagttgtatcacatttggaagctggaaagaagtgtcaggagacaccatagaggaaggatgttcacaagccttgtggtgtggttggttcatattgcacccctcctcacccctcgatggga

SEQ ID NO: 329903 - DNA, 591 bp, Homo sapiens
taagtagaaagctttaggagcaatatgagtaacamattattctaatgggctagagatgtgagttgctcaccactaagatcctattcaccataaatgattggcctataaaccattccctgctgttctcagtcaaacagtcagatatttttaactctggctttcttttttcaaactgtctaattggattttttgaatctgttattagacggaaatagcccactggtactacaggaaggctccccatatgctgttatgatgtttgcatagttttgctagatttaatcaaatttcattcataaagattagctgaaaattgagaaggaaactgattgttccctactgaactagaaagaacagagtagtagcttctgaccagacagagatgcttaacagggtaaaatggaagtcatcctttatgcaactaaagtaaccaaaatttccagaagaaaaaacaaaagatatatcaagcaatggcactcaaatatctaaaatctggaggtattaggttgatgcaaaagtaatggtcatttctgcccttacgagtaatggcattaagagaaatggcagaaactgcattacttttgcaccaat

SEQ ID NO: 329904 - DNA, 591 bp, Homo sapiens
taagtagaaagctttaggagcaatatgagtaacacattattctaatgggctagagatgtgagttgctcaccactaagatcctattcaccataaatgattggcctataaaccattccctgctgttctcagtcaaacagtcagatatttttaactctggctttcttttttcaaactgtctaattggattttttgaatctgttattagacggaaatagcccactggtactacaggaaggctccccatatgctgttatgatgtttgcatagttttgctagatttaatcaaatttcattcataaagattagctgaaaattgagaaggaaactgattgttccctactgaactagaaagaacagagtagtagcttctgaccagacagagatgcttaacagggtawaatggaagtcatcctttatgcaactaaagtaaccaaaatttccagaagaaaaaacaaaagatatatcaagcaatggcactcaaatatctaaaatctggaggtattaggttgatgcaaaagtaatggtcatttctgcccttacgagtaatggcattaagagaaatggcagaaactgcattacttttgcaccaat

SEQ ID NO: 329905 - DNA, 539 bp, Homo sapiens
actgtcatgttctagaggcttacttcctccaaagggtgttataaacatgtatttgaaaaaacaaatgttgttttccacacatttgacatctatttattaagtaaataaaaggaacacagtaatatttacagtactgaagaggtcattggaataggtaatatgcactgactcacggaggagatagatggattatggtgaagttctggattcagtcattttagtcaggcataatttttatttcacaataattagaataataattctggtcatgaataactcagaaacagaaagtcaaatactgcatgttctcacttataagtggctgctaaataacgtgtacaygtggacacagaaagtggaattatagacactggagactcagaagggtggaggttgtgggaaagggatgaggaattacttaatgcgtacaatgtacactatattcaggtgatggctacacaaaaagccgagacttcaccattacacaatacatccatgtaatgaaactgcacttgtaccccctaaatctataaaaatta

SEQ ID NO: 329906 - DNA, 593 bp, Homo sapiens
tttttgcaagcaaagcccaacacaatctggactgccctttcctcatctttctgacstcattcccatctcactgagtcagctgtagccataccaaactactgactattcttcaaacatgtcatacccattctctcctttgaacatgctgctcctcctcttggcatgatcttctatgtaggtgtagatatctaggagatatctctactcaactccttcaaatctttactaaagatatttcattctcaataatctgatcacctgattttccattgctacactttttgtatctcaatatatcctattcctctttcctttgaatttttctctgtggtacttccacagaactatccatgggtattactggatccacgttcaagctctgatatcatctcttcctagttgctgattctgatggggattgcaggtacatgaatgtaagtgccatgaggatggaggtaactgttttattccctgctatatccttagctcatagaaatgcacttggcccaaaatacacttggcctatagtaggcacacaattaatacttgttgaatgaataaatgaatgaatgaggctgggtgtggtggctcac

SEQ ID NO: 329907 - DNA, 593 bp, Homo sapiens
tttttgcaagcaaagcccaacacaatctggactgccctttcctcatctttctgacctcattcccatctcactgagtcagctgtagccataccaaactactgactattcttcaaacatgtcatacccattctctcctttgaacatgctgctcctcctcttggcatgatcttctatgtaggtgtagatatctaggagatatctctactcaactccttcaaatytttactaaagatatttcattctcaataatctgatcacctgattttccattgctacactttttgtatctcaatatatcctattcctctttcctttgaatttttctctgtggtacttccacagaactatccatgggtattactggatccacgttcaagctctgatatcatctcttcctagttgctgattctgatggggattgcaggtacatgaatgtaagtgccatgaggatggaggtaactgttttattccctgctatatccttagctcatagaaatgcacttggcccaaaatacacttggcctatagtaggcacacaattaatacttgttgaatgaataaatgaatgaatgaggctgggtgtggtggctcac

SEQ ID NO: 329908 - DNA, 569 bp, Homo sapiens
catctctactaaaaataaaaaaagttagctggtgcctgtagtcccagctactggggaggctgaggcaggagaactgcttgaagctgggagacagaggttgcatgagccaagattgcaccactgcactccagacaaagtgaggctctgtctaaaaagaaaaaaaaaataagtgaataaatgaaataagaactaaagaattactaaaattttgcaacttatatagaaatttactcctaaaacttccacactccgtagattcctttctctcttcctttcttcttctgtttctggttgccagttttattgtytcacactttcccttacctccatctagtcctaaaaaaaaaaaaaaaaaaaaaaaaagctggcttgcttaaagttccccaagattaccaacacatctgacatcagggctgcgttcaggaccacaaagccagtggcagagtcagtgacagaagccaaattccagtatttgataagctgaaccacagtatcacttgcaacttgagagtcatatgtagttttacaaagatcaaacacatcaatggtcttcctagtgatatggacag

SEQ ID NO: 329909 - DNA, 565 bp, Homo sapiens
attaagcccacattctgtgatgggcactgaactatctctggagcggcaataatcatgggacagatgaggtttaggccctcccagcactggcagctcagtgtgaaggagtggatccaacctttacctgagagtgggctttgatgggtgaaagctcgggtaagaggcacacttgaaaagatgtaaaatggaagggttgtgagagatgaagctctgttgccaattgctttaggctgtcactccctgtctgcagcatcccgggtttttctcccctgcagcttgacctcagctgagatgagtagtgtttgctgcttcatgtgatgtttggaatcatctctcagtattataactgtctgctccaaacatctttacttagcatttagtgagagcccgacctttttccacccgaggccattagttatatcagtgggctctgtgtgtgctcttagtcagaataaatcccccctgagtcaggggcaatagatcatgggctccatcatttatggcctataaattaaagggtggttgggaaytctggcttctgtgcctggccgctcactccttagtt

SEQ ID NO: 329910 - DNA, 529 bp, Homo sapiens
cctctgaaaatattatataaatatttctcatcaaacaagcagaactttcagcaagactaaagccatcagccttgccactgtgaaatccacattaacttcttgaggtcccttcaamtgatgccatatggttgtgttggcacttcttggattataagtacaccaatggtcctatatgcagttgagtttgacgtatttgacaaatttggacatcattattttctacggtctatttaaagtaggagaaatggggattttctctttactttttacaacttgataagtcagttatttgtaagactcagattttaggagttaacaaagatacttagaagcactctaactcttaccacaacatgacttgaaaatgtaatgaatcatttcatgtgtaagtaaattccttatcactggagagattcaattcaagattgtaaaatcacctcttagggatatagtttaggcatccaggagaggttggaataaatgattgccaaattattttgactcagagtccatggaattgtttagaaaa

SEQ ID NO: 329911 - DNA, 529 bp, Homo sapiens
cctctgaaaatattatataaatatttctcatcaaacaagcagaactttcagcaagactaaagccatcagccttgccactgtgaaatccacattaacttcttgaggtcccttcaactgatgccatatggttgtgttggcacttcttggattataagtacaccaatggtcctatatgcagttgagtttgacgtatttgacaaatttggacatcattattttytacggtctatttaaagtaggagaaatggggattttctctttactttttacaacttgataagtcagttatttgtaagactcagattttaggagttaacaaagatacttagaagcactctaactcttaccacaacatgacttgaaaatgtaatgaatcatttcatgtgtaagtaaattccttatcactggagagattcaattcaagattgtaaaatcacctcttagggatatagtttaggcatccaggagaggttggaataaatgattgccaaattattttgactcagagtccatggaattgtttagaaaa

SEQ ID NO: 329912 - DNA, 599 bp, Homo sapiens
cactaagagaacaactaaagcactcttggaaattcagtatctgcattaaaaccatcaagagcaacaatgaaatataaagttgaggcggtttctagaatttaatccaaaaagacatcttcaaaaaacactagaggaaacattagtccagaagaaccaatgtcaaactcataggaatccccgaaagtaaaaatattagagggaaaatggagtggaggaaattatcaaagtaataagacaagaaaattccctggtgagtccattaaatgtttaaaacaggccgggtgcagtggctaatgcctgtaatcccagccctttgggaggctgagacgggcagatcatctgaggtcaggagtttgagaccagcctggccaacatggtgaaatcctgtmtctacaaaaaatacaaaattagttgggcatgatggtgcgcacctgtaatcccagctactcaggaggctgaggcagtagaatcacatgaacccaggaggcggaggttgcagtgaactaagatcgtgtcattgcactccagcatgggcaaaaagagtgaaactccactcaaaaaaaaagtttaaaacaatgagagaattttaaaaattacta

SEQ ID NO: 329913 - DNA, 599 bp, Homo sapiens
cactaagagaacaactaaagcactcttggaaattcagtatctgcattaaaaccatcaagagcaacaatgaaatataaagttgaggcggtttctagaatttaatccaaaaagacatcttcaaaaaacactagaggaaacattagtccagaagaaccaatgtcaaactcataggaatccccgaaagtaaaaatattagagggaaaatggagtggaggaaattatcaaagtaataagacaagaaaattccctggtgagtccattaaatgtttaaaacaggccgggtgcagtggctaatgcctgtaatcccagccctttgggaggctgagacgggcagatcatctgaggtcaggagtttgagaccagcctggccaacatggtgaaatcctgtatctacaaaaaatacaaaattagttgggcatgatggtgcgcacctgtaatcccagctactcaggargctgaggcagtagaatcacatgaacccaggaggcggaggttgcagtgaactaagatcgtgtcattgcactccagcatgggcaaaaagagtgaaactccactcaaaaaaaaagtttaaaacaatgagagaattttaaaaattacta

SEQ ID NO: 329914 - DNA, 545 bp, Homo sapiens
aattgcccattccttctttcagaactcaagtttcttggcaagccttgcaaatgccagccaaagagctctggagtcctaggtaaacttaaaggtcagtctaggacagaaggactgcaatgtttaggcaatttctaatgctgagctaggctcagagccagaggactagagtgacatgtgacctaaagagacaccagctggggtgactaaaaaaaggtgcttgcgctaccccacccccaatctcaggcagtgcagctcacagaaatgaaagtgtctcattccctttgtttaagtgaagagagtgaagagtacagaggattctgtccckcatcgtggatatcacctcagccacagtaggacaggagactgggtagagttgtgaggcccccattccaagccctagctcctggacaacatctctagacacccctgggtgaaaagggaacctactgccttgaagggaagaacacagtcctggcagaattcatcatctgctgaatacagaaccattgggccctaaataaccagcagcagtacccaggtggtat

SEQ ID NO: 329915 - DNA, 622 bp, Homo sapiens
aattcagacccagcatcactcagctggtaggtggtaaaactgagaagagaatccatgtattttgttttttcctagttctgtgttgttgcactgcataatgaattccagccagaaccacacattcagttcctgactagtccacaattagaatcaccatcaagtcaaacacaagtgaggcattacatccaggaggtcatagttagttgtgtgtgtgttccctagatagattccctgaagctttctcatcaacaccaagaagctgaaggggaaaatgaaagttccccttcrgttcccctcaattcaagagtaattgagaccaacatcattcatggatattaataatatgaccttttttaaagaatcaccaaatcattacatcataaagaacaatgatcttatattttactaggtttattagttgcagtctcagcctctaggttgctagaaagctctgggctcctttggatatggacatggccaaatctctttaactttctagttatggcactttaggcaaattcaacttctctgagtctaggttttctcctctgttcaatggaactgacaattctatgtcagagagctattgtaaggattaaaggaactaatatttgcaaacccc

SEQ ID NO: 329916 - DNA, 482 bp, Homo sapiens
agaaagtcaaaggaaaggagagaaggggagaatggaaggagaactgagaaaccagcagtgtttttttaaaggtgataactgaagaaggtgagcagaggaagaaagaacacagtgagyaattgaaatcaccagttattttcttctgattcatctcttaaaggaaataccttctaagagagatctttgctcttttgtgtgctggtgaatgtaaggtgagaatctctcctttctttttctaatgatgaccctgaacaaggccgtgctcttcttttaaacatctcttctgtttgaagctctgttacaatagaatcaaatagggtctccttggtttatgtcactgatctaaggttgaatgatgtacttgacagatccttttgaactgccccatctgggaactgaaccaaagactggatcgccagtcatggtactcacaattacctttccctttccgcacagtccccacattcactacccgaaagtat

SEQ ID NO: 329917 - DNA, 482 bp, Homo sapiens
agaaagtcaaaggaaaggagagaaggggagaatggaaggagaactgagaaaccagcagtgtttttttaaaggtgataactgaagaaggtgagcagaggaagaaagaacacagtgagtaattgaaatcaccagttattttcttctgattcatctcttaaaggaaataccttctaagagagatctttgctcttttgtgtgctggtgaatgtaaggtgagaatctctcctttctttttctaatgatgaccctgaacaaggccgtgctcttcttttaaacatctcttctgtttgaagctctgttacaatagaatcaaatagggtctccttggtttatgtcactgatctaaggttgaatgatgtacttgacagatccttttgaactgccccatctgggaactgaaccaaagactggatcgccartcatggtactcacaattacctttccctttccgcacagtccccacattcactacccgaaagtat

SEQ ID NO: 329918 - DNA, 592 bp, Homo sapiens
ccaaagtcatctcctgtccatagaacaattaatagtcataattgatagttttatgcatgaaaattaagtattgctcctgcaaaactgaggagttaatgtctttacgtgctttttcacaaacattccttataatggaacaccaaatgcctacaatttgaacacatggctggtggaaaaaaagaagaaaaagaaaatcaatcctaagccagaaatctgaaaaaagacagtgactttgggtcattttgtaatcatctttggtgcttcagtgactaaaaaatacatgcagagtgcaagagcaccttgctgaatcctacaccctgccctccttgtgcagttatgttacatgcaactccaaagcctccacagctgttgtctctactctccattcaaaayaatgcacgtgcaactttcccttgtggctggcttcgtcctccacacaccaatgctttgtgtgaaaaggtttcattaaaattgagtttagggtaagtacgggataggtggagaaaagattttcttctaatgcttctccagaccacactgtttagccttcaggagacccaggaattgatatgagcaaaatgtttttacacat

SEQ ID NO: 329919 - DNA, 578 bp, Homo sapiens
cctcttccacttttaaggaaacttgtaattacaaggggcccaccgagatcatccaggattatctattttaaggtcaactgattagtaataatatggtttgattatgccccctcttaaattcaggtgttgccaacctagtagttttaagagatagagcctttaagaggtaattaggccatgagggctgctccctcacgaatgcgattaaggcctctataaaagaggcttggcagtgtttggtagcttgctcttttgttcttctgccaggtgagaacatactgttcctttcccctccccyctgaagatgcagtactcaccagatgatggaacctgctggcactttgatcttggacttcctaggctccagaacagaaaacaaatttctgttctttatacatacccagtctcaggcattttgttatagcagcacaaatggactaaaatagtaactttaattctacctgcaatgttaattgcccttaatcatgttacagagcatactgacaggtttcggggatgagggtgaggacttctttgaggagggtcatggttctgcctaccaaattccaagttttttc

SEQ ID NO: 329920 - DNA, 530 bp, Homo sapiens
ccaagttaacagctgtaagcaagaggagctatagcacgaaatgccttctcaacttttgggaccacatagccctttttgctgagtttcataaaactagtattctgaagaaaagattggtaaaatgttgccttatacaaatacaagatgttacaatttattcttaatgtttccagatatagtgcagataaatatgaatttcaggcaaataaaatatatgtatatatattagtataagtaagcataggacacaattctgctaaaaattatttgttgtttatctgaaattccaatttgactgggtgtcccccatttcmtcaggcaaccctgtcctaagggattattcaagttcatttaaaatacctatcacaatgacctggaagtagagaaagagaatggggcatttggccaagtgaaaatgtccctaaactcataatttccatgcatttttcccattcagctttcttttatgtgtaacattttagctacttccctcattcagagtttagttacatgactggcaggggcttatt

SEQ ID NO: 329921 - DNA, 593 bp, Homo sapiens
aattacatgcagtgaaggcatttactatttaaaagtatgtcataggaagttatttcataatcattgatcgtctcctgaattatctgagttataagtattaattagttgtccttaaaatagagtacttacagatgactaaaaccaaggttttaaatctttttcaagtatgtttagtgtctaacatataactctagacatgtttgagtctttttcaaatatgatgtataaactctttaaaaataaaagttaaacttggaatatgtgacaaagccatcagggtttcttcaaatagaagaaccacaaagtgttctctacagctctacagcttgcaaatgttcatcactaacacacgaagtgaagagctatctccctatgaagaccacaacttttagaaaacagcatttccattttattcccatctagcaatctttcccytaaaggaatagctgaacaatacatgcacacttaagattgctaaggcagaaacaattatttaaatccagttgtggagctcttgtgatgcaacgtgaatagctaaaatacaaacaactagaatcttacttttaaattttgtgcacttcgcctaactcact

SEQ ID NO: 329922 - DNA, 549 bp, Homo sapiens
acaaatactgaactcttaaaaggacactaaaaatttataacttgggttttgaccacaatgaaacagtttagaggataatttgcaataaatatgggtatgtttattgggtatgggcacttctttacacacatttttctcttttacttgaacatgtgctgaaagtgaaggtcgaggtcctttatagcytcaaaggcactgagatgctcaggagcctgtgggccaggggtcttagtctgtttgggctgctataacaaaacttcttagactgagtcatttagaaataaaataaatttaattatcacagtctggaggctggaacgtccaagattaaggcgccagcacattcagtgtctggcaagggctcactctgcttcataaagagtgcctcttgctacgccctcacatggcagaagcagaagggcaagaggccctagggtgctctcttcaacctcttttataagagcatgaacccattcatgcatatggagaacccctcatgacttaatcagttccccaaagaccttatctcttgattatatcacactgggt

SEQ ID NO: 329923 - DNA, 531 bp, Homo sapiens
acaaatactgaactcttaaaaggacactaaaaatttataacttgggttttgaccacaatgaaacagtttagaggataatttgcaataaatatgggtatgtttattgggtatgggcacttctttacacacatttttctcttttacttgaacatgtgctgaaagtgaaggtcgaggtcctttatagcctcaaaggcactgagatgctcaggagcctgtgggccaggggtcttagtctgtttgggctgctataacaaaacttcttagactgagtcatttagaaataaaataaatttaattatcacagtctggaggctggaacgtccaagattaaggcgccagcacattcagtgtctggcaagggctcactctgcttcataaagagtgcctcttgctacgycctcacatggcagaagcagaagggcaagaggccctagggtgctctcttcaacctcttttataagagcatgaacccattcatgcatatggagaacccctcatgacttaatcagttccccaaagaccttatctctt

SEQ ID NO: 329924 - DNA, 557 bp, Homo sapiens
aatcagtggtgtgctggtgtaacaatcagctcctaaagggtgaggcagggtgggtaggggatgtttagaaaaagtgggtatggagaagtccctgaattctagtttttgccaaattctgtgatgcaaatactcccaccacagccaatttcaaggttatttttcccagttacatttaatcagggccatacaagatgttacaagaaagaaaatgacaggaacccatgtggttcaactgatactcactcaggagctgagatagcatttcatttatgcaattcaaatagctattggtttggataccttagtattgtttcttccaagaaatattttcattctttcctaaagggataataatagacattcatgacctaatttaggagataatcattttttattttatcactcattattaatgcttcatacgaaaactagatttatgaaaaggcccatggattttacatctattatatcatctcctgtyggtttgagaatgaaatgtttgttttgctaatatgtttttctgattaagaagtggaggcagcaggctattaaaagtt

SEQ ID NO: 329925 - DNA, 512 bp, Homo sapiens
ttgaaaaagagaaggttgacagtcatttaggaaggtgaggaatcaaacacagtgcagatgagggtggtgtagggagatcattctctaggtgccctttgcatttttgctcatcttacgatcagagtcactaactctcttggttcaggagttggaagatacagtggcctgttccagagcaaaggcaggttcagttgctgttcaggataatgaagataatgcctcccactgaggcaaagatcaacagagcttactgcccattataaaatattcagattccttaagcgcatggttcctctcctataatacaaacctcttgcaggtactkttgtcacctggcccttttcatatcaccctgtgaggagtggggcccagagaacctacacaaatgcaaacacttcaaccactgctattgtcataaagtccgtggtctctgacccaaagtctcatgtcccctgctagcatccatgaaacagtggcaggtgaactttgaaaacaggataggctaaaatctc

SEQ ID NO: 329926 - DNA, 597 bp, Homo sapiens
taatgggaaacattcacaattcccaggggttcacagactttttagaaatagtatatggagccttgatctataattgctagaatttaaaactatcctattatttctagcactgatcagcctatttaaaaacacaactttaccctccttcactttatttccaaatagagtcttattagattattttgataattaagatatctaaaggaagagacaaaaataaggagtatttcacaagatatctaaaaatgcctcagtgtctttgatactattctaataatgagcatatttaataacaatatggggaaggaaggaaagaagggagggaaggagggagggagagaggaaaagagagggaaggagggaaggaggaatgtacagaggaggtaaagtgattttcttaaagtttctgaagtaaattggctaatgaatatcatcttgtgagctaagttagtttccaggacttctagattatttcactaaatgggtaatgtatccctgttctttaagtgatgttctaataccaccatgcttcaagggatgggactctgatttacccgtccttcrtgcttccctggagacttgcacagggctggtcaa

SEQ ID NO: 329927 - DNA, 537 bp, Homo sapiens
tttaatatcaaatgccataatgatgcaaagtagaatttaattttgcctctgtttaaaaacataacattttcttracttcttagtctactcttaataatattttttctttaccttctgagtaatctgcctagaaggcaaagattccatgtcttaaaataacttcctatattgtgtattgagtttatcacgtccttgcttatttaataaagtcttctcccttttgaaaaagctaagattctttacaatcatgttactgcctgtgcttactttttcactctttttgctgtcaccttagttaaggtagcaaagtattgtttatcagtaactcacgaccgtatcctagtaaagtgtcccaatctcctgacaacttttgatattttccctcccaaaactgattcctaagtgatatctattgcatctgaaactgtctttgatatctcccagagggcctttgaaaatcacaaaggatttgttatttcaccttatgaaaagaaagttgctgaaaagaattaggtttatttgatatgttactattta

SEQ ID NO: 329928 - DNA, 603 bp, Homo sapiens
ctctaatctagagagttaacctcctccaggtagggttgaaaatatgaacagagctgcttttgcaagactgtgttgcctctaaatgtgatttaactcrcatattcagaatcttagcaaaaataaataaataaatagtaagatggggtaaggcaaatacatagatattttggagatcttatcccttattcaaggactgtagattattacagctttgttgtcatattatctctaggcagtaaatcatagtaaagtagtaaattcatagggaatgaattaatctcctttttgttttgttttctctgaaaaagagggtgtgattacagcatatattgattgggtactgattatgggacattttcattgtatttgttgttgttgcagtagactaaatgtcgagcccgtgaatctcttgtgttggcattgtcagaaaaaagttgtattttttttaaactggtctaaaaggaaaaaaattgaacatatatctttatattttttttgctctcttctcaaccatgtttagtgttttgtttatattcaaaggattttattttcacacttacaattctttacttgtctgtcattcaaatctttgttaccaaaaca

SEQ ID NO: 329929 - DNA, 544 bp, Homo sapiens
cccttaccccctcctgtgacsccacatatgtgaccacaaacctgcttacacagagatgaagccccatagcatttccacttttgggtctttgactgcggctctctcatcacatgaatcacccactgacattctctctcatcatatgaatcacccactgacagccccaggaacagatgaggctgtgagattctcaaagagaaaaatgagcttagagccccaaactcctggggttggtcccatgtaagcacgacactaacatggttcttgggcccaaactgcagcaaagtaaacagatgtgggcttaacagcctccaggaatggaggaggcaaggggagaagggataagcagttgtcaaaggcaaggatgagagacagaagagagacaagggacccttgctacccactgatttaaagggccaggtcccaaaccctaagcacccatcatgagtcatgatcataatctcacactatccttagaaatggacagtagcacctgaaccaccattgatgaaagcccagaaaagctggatcctttaaataatca

SEQ ID NO: 329930 - DNA, 544 bp, Homo sapiens
cccttaccccctcctgtgaccccacatatgtgaccacaaacctgcttacacagagatgaagccccatagcatttccacttttgggtctttgactgcggctctctcatcacatgaatcacccactgacattctctctcatcatatgaatcacccactgacagccccaggaacagatgaggctgtgagattctcaaagagaaaaatgagcttagagccccaaactcctggggttggtcccatgtaagcacgacactaacatggttcttgggcccaaactgcagcaaagtaaacagatgtgggcttaacagcctccaggaatggaggaggcaaggggagaagggataagcagttgtcaaaggcaaggatgagagacagaagagagacaagggacccttgctacccactgatttaaagggccaggtcccaaaccctaagcacccatcatgagtcatgatcataatctcacastatccttagaaatggacagtagcacctgaaccaccattgatgaaagcccagaaaagctggatcctttaaataatca

SEQ ID NO: 329931 - DNA, 391 bp, Homo sapiens
ccattcaattccattaatctccattaaattccattctactccaactgattccattccattctattcctttccattccattccattccattcgcttctattccattcgtgtccattccactccagtccattccattcgtgtccattccattccagtccattccatttgtgtccactgcmttccattccactccattccatattattccattacactccattccattctattactttcatttccattcagttccattccatttgattccattccactcggtttcactccacttgagtccattccattccattccattctgttccattccattccattccattccattccattccattccattccattccattccattccattcggtaccattc

SEQ ID NO: 329932 - DNA, 450 bp, Homo sapiens
aacagaaatggtcttgaatggaatttattcgagtataatttaatcgaatggaatgcaakagtatggaatggaatcgaatggaatggaatcgaatggattggaacgaaatcgaatggaacggaatagaacagactcgaatgtaatggattgctatgtaattgattcgaatggaatggaatcgaatggaatgcaatccaatggaatggaatgcaatgcaatggaatggaatcgaatggaatgcagtggaagggaatggagtggaatcaagtggaatcgaatggaatggaatggaatcgaatggaatggactggaatggaatggattcgaatggaatcgaatggaacaatatggaatggttcccaatggaatggaatggaatggaatggaacagaacggaatggaatggaatggaatggaatggaatggaatggaatggactcaaatggagtg

SEQ ID NO: 329933 - DNA, 619 bp, Homo sapiens
ggaaaagaataggttactagatattattactatttaggattatgattataatatgagtaagacaggataaagagagaaagccatctgagcataataatatacaaccgaaacatttaagtgcacaaaaatttcttagtaaagaggagtaataaaacccacaacacccgtcaccattatagatccaatcatctggaagaacagttggtacagaaaatataccaacccacaagcattagtcacaactagcttcacattgtagtcagaatgtggctcatggtatttgcatttgttagaggtggcacaagtggtggttasaaagagagctattccaagccctttgcgaggaatagaagacatttcctggactgtcactcttcaggcatgataagtgaatgtaaaacaaaggcaatgaatggttttacctatttccagttaactgacttgtgggtttaatcagtactccctagaccaatgtctatggaacactgattctttttttttttctttttattattatactttaagttttagggtacatgtgcacaatgtgcaggttagttacatatgtatacatgtgccatgctggtgtgctgcacctcttaactcgtcatttagcatt

SEQ ID NO: 329934 - DNA, 569 bp, Homo sapiens
agtattttcaggtattttgatcccttttatatctgctttttcattttgtaaagctaaaattatttttgaaaatataaataaacagatacataagcaaaatgcaacattttctgaagttagaaaaatataattttaccatgatgagattcctacagatagaaattgaggatcaaagataagacataaatyatgggtatggatactccttggggttcagcaattgaatttttcttaaacaaattataccctttcaatttcctatttcctttttctttgtgcatctttgatgttttaaaagatttagtgtaattctatggatttggaaaacaacataattgatgtgttatttgtataaacaaatttgcattaatgcaaagttagaaatacgttacaagtgagtttgatttctaaaatttgctttctcagatgtgactggtaattgctcacaaggagtaactcactatttcctctttcaagagacttatgacagttgagcagcaatcaggaatgaataaacccaaggggggtgaacaatattacataccccaacagaaaataattgcaacatt

SEQ ID NO: 329935 - DNA, 583 bp, Homo sapiens
acaataagaattttttaaaaaaaatcgatgggtcttctgaagwgaaggaagctgtttcatttcttgacttctctttctaggatatatatcagtagggaatcttaatttcattttcactgttccatagaggccactaccccaaggcataatggttaaggactaggactagaattcaggaaacaagctagtgaattctgatccaactctgttttcaaaattacatttagagatcatatgtctggagtttttattttgcataatcataatataaattgattatgccatggtgtcatatatatcagtatactatttaatgtgcctaccattttcatagctggtttgataatttattgaataaacatagaaaactttgtgctatatatacaaagaattatttttgccactacagtaattaatgtaatgtctttatagtctttgttttgctactactaaggacctgtattaaaaagtaaaattcttaaacccctgtggttgattatgatgtaatgaaccaaatttactcatgcattcctctgaccattaccttgggtattcccttcctaaattgaatcttgacttggcc

SEQ ID NO: 329936 - DNA, 583 bp, Homo sapiens
acaataagaattttttaaaaaaaatcgatgggtcttctgaagtgaaggaagctgtttcatttcttgacttctctttstaggatatatatcagtagggaatcttaatttcattttcactgttccatagaggccactaccccaaggcataatggttaaggactaggactagaattcaggaaacaagctagtgaattctgatccaactctgttttcaaaattacatttagagatcatatgtctggagtttttattttgcataatcataatataaattgattatgccatggtgtcatatatatcagtatactatttaatgtgcctaccattttcatagctggtttgataatttattgaataaacatagaaaactttgtgctatatatacaaagaattatttttgccactacagtaattaatgtaatgtctttatagtctttgttttgctactactaaggacctgtattaaaaagtaaaattcttaaacccctgtggttgattatgatgtaatgaaccaaatttactcatgcattcctctgaccattaccttgggtattcccttcctaaattgaatcttgacttggcc

SEQ ID NO: 329937 - DNA, 583 bp, Homo sapiens
acaataagaattttttaaaaaaaatcgatgggtcttctgaagtgaaggaagctgtttcatttcttgacttctctttctaggatatatatcagtagggaatcttaatttcattttcrctgttccatagaggccactaccccaaggcataatggttaaggactaggactagaattcaggaaacaagctagtgaattctgatccaactctgttttcaaaattacatttagagatcatatgtctggagtttttattttgcataatcataatataaattgattatgccatggtgtcatatatatcagtatactatttaatgtgcctaccattttcatagctggtttgataatttattgaataaacatagaaaactttgtgctatatatacaaagaattatttttgccactacagtaattaatgtaatgtctttatagtctttgttttgctactactaaggacctgtattaaaaagtaaaattcttaaacccctgtggttgattatgatgtaatgaaccaaatttactcatgcattcctctgaccattaccttgggtattcccttcctaaattgaatcttgacttggcc

SEQ ID NO: 329938 - DNA, 545 bp, Homo sapiens
atgtaacagttaatttcttagtaattctggctgtgaatgacctaatttacctcggtagttgataagcacaaagatgagtgtgatgattatttgcacagaaaaatctcaggaaatgtactatacaaaaaagaaagcaaattattgactgtatcaagttaacaggacatagtttagcataaaaattaattgtaataatatttgtatatgtagcagaaaaaacagaaaattgatatttaaaaaataattccatttatgatagtaaaattatatagggtaaatctaaaaatatacttgtattctacattgagaactaaaaatktttatgaaagaaattacataggtgaaaagttatgctgtgtttacggattagaatatcaacagtgttataatggctattttcctatattgaattctagtgtcaacaaattcctagtgaaaattttagcaagatttatatatatatatatatatatatatatatatatatatatataagcaaggtgactgtaaaatgtattaaaaaacttaaaggacctaaaatatcc

SEQ ID NO: 329939 - DNA, 613 bp, Homo sapiens
tacttaatgatttccaataaggaccactcatttttgtcaattaatcctgtgggtggaacatcgtcaggcttgctctaaagcctagcaaaatgattaggctttctaagtatataaatcttgtgctaatcactaaaccacagttgctctcccagtggtttcttatatggaggtatggacaacacaacttttttttttttagaatctgaggaaggtagggaaaaacttttgtcaaagtgaaaataatagcatcattcatattatggtaractttgatgtgttaaactgtgatctttgatgaagtactgctattcacatataatttgaacatattttagcacttcaaaatatctgattatttcacactttagttttagatatgctaaacagaagtgtagctttactgcacctgaatacatttaattagcagtttagagaaagagaaataaatcttctacataaaacataattttttaaaattaagaagtttggtggcacatatgttatttgaagtatccaagagcctgtctctgaggactcccctctccctcatcccatgtttttctcgttgatgccaccatccctttgctaaagggatgggcttgaacttagttgc

SEQ ID NO: 329940 - DNA, 613 bp, Homo sapiens
tacttaatgatttccaataaggaccactcatttttgtcaattaatcctgtgggtggaacatcgtcaggcttgctctaaagcctagcaaaatgattaggctttctaagtatataaatcttgtgctaatcactaaaccacagttgctctcccagtggtttcttatatggaggtatggacaacacaacttttttttttttagaatctgaggaaggtagggaaaaacttttgtcaaagtgaaaataatagcatcattcatattatggtagactttgatgtgttaaactgtgatctttgatgaagtactgctattcacatataatttgaacatattttagcacttcaaaatatctgattatttcacactttagttttagatatgctaaacagaagtstagctttactgcacctgaatacatttaattagcagtttagagaaagagaaataaatcttctacataaaacataattttttaaaattaagaagtttggtggcacatatgttatttgaagtatccaagagcctgtctctgaggactcccctctccctcatcccatgtttttctcgttgatgccaccatccctttgctaaagggatgggcttgaacttagttgc

SEQ ID NO: 329941 - DNA, 613 bp, Homo sapiens
tacttaatgatttccaataaggaccactcatttttgtcaattaatcctgtgggtggaacatcgtcaggcttgctctaaagcctagcaaaatgattaggctttctaagtatataaatcttgtgctaatcactaaaccacagttgctctcccagtggtttcttatatggaggtatggacaacacaacttttttttttttagaatctgaggaaggtagggaaaaacttttgtcaaagtgaaaataatagcatcattcatattatggtagactttgatgtgttaaactgtgatctttgatgaagtactgctattcacatataatttgaacatattttagcacttcaaaatatctgattatttcacactttagttttagatatgctaaacagaagtgtagctttactgcacctgaatacatttaattagcagtttagagaaagagaaataaatcttctacataaaamataattttttaaaattaagaagtttggtggcacatatgttatttgaagtatccaagagcctgtctctgaggactcccctctccctcatcccatgtttttctcgttgatgccaccatccctttgctaaagggatgggcttgaacttagttgc

SEQ ID NO: 329942 - DNA, 403 bp, Homo sapiens
gtatcttttcatacgtcctccaataattttttggagggaagctggagtcaaaatttctaacaaaaaaattgttcttcccttctgaccaataaagcctagcttggagcccctgatttcctagctgcctatgttttataatcagtgtaactacccgktctttatttatgacctaagtcgtttactattttaattaatgaagttttatgtgtatctgcgccctgaggcaacttaaagcaggggtataatttctgagcctttgcaaagtaaattcataaacagaaagccattttcagccaggctaataaaaacacactgattttaattgaccataagccatagtgcaagctgaagaccttcatcatatcgaccttatggagtctctggtgaaacaattcaaactaag

SEQ ID NO: 329943 - DNA, 573 bp, Homo sapiens
cattctgcgtgctttatagcatacagtaaggggtattctccctcacagcttgcaatgtaactttggattatagggtactctttatataatctgaaatatatctttcagtctctgtgtcagttgccacagaaaaaaataaagatgctatcactaacataattttgttattacaaatatgattattatataattacatatttttgtaattatcaaatttgtatacattcaaatgtaataagaycccactaaacatactaaaatatattatggtaatcattaatttaaaactcctagaaagattctaacaaaataactagcctatgttaagtcactctcttcgaaaagatgacttataggaacattttaagtttatcaaagacactttttcccaggataacattgatcttagctgaatctgcacatgaaaagctcagcagttagggaataagaaatccacaagtcctggatgaagaaatgagtagcataatgatctgatgtacatgggcccagtctagggaagctggtgaagcagctaacactagaagggaggctatcacagaggagatggctaag

SEQ ID NO: 329944 - DNA, 573 bp, Homo sapiens
cattctgcgtgctttatagcatacagtaaggggtattctccctcacagcttgcaatgtaactttggattatagggtactctttatataatctgaaatatatctttcagtctctgtgtcagttgccacagaaaaaaataaagatgctatcactaacataattttgttattacaaatatgattattatataattacatatttttgtaattatcaaatttgtatacattcaaatgtaataagatcccacyaaacatactaaaatatattatggtaatcattaatttaaaactcctagaaagattctaacaaaataactagcctatgttaagtcactctcttcgaaaagatgacttataggaacattttaagtttatcaaagacactttttcccaggataacattgatcttagctgaatctgcacatgaaaagctcagcagttagggaataagaaatccacaagtcctggatgaagaaatgagtagcataatgatctgatgtacatgggcccagtctagggaagctggtgaagcagctaacactagaagggaggctatcacagaggagatggctaag

SEQ ID NO: 329945 - DNA, 580 bp, Homo sapiens
cataggcccttatattttatcaagtcctttcacttaccatgcaaacaccttccacaacccggtgaagaagtgaggagtcattttcactatttttaggtcagaaaacagaactatccagccatagagggtcttttgctacccacaacttataacactcatgctcgtcaccatttcattgtttattctctttctgctgatgggaatgtcagttatttatacagacacttatcactgatgacattcacaaatacrcactaaatacctactataagctaggcaccaaaagctttgagatggataagatgaaacaaacagaatcattttcctcaaagagtccacataccagtgaataaaaaggtaaacaatagtgcacacctatagtcctagctattcaggaggctgaggcaggaggatcacttgtgcccagtatgttaaggctacagtgagccatgatcgcaccactgcactccagcctgggtgacagagtaagaccctgtctctaaaaaaaaataataataataataaaatatttttaaaagacaagtaaatagaggaaagtgatcagtgatccaacagaagg

SEQ ID NO: 329946 - DNA, 549 bp, Homo sapiens
agagaccttccttcacaggtgcactctcacacccacactcacttagactgggactatgtcgacatgcccattcacytagtgtgcacatctttggggtgctggaggaaaccagagtacctgcagaaaaccagcagacctgggaagaatgtgcaaacatcacatagacaatggccctggctgggaattttttttttctcatcagccttgtaataaaaagatgttattccaggtcctgctgtacacatattaaataggcaaagatgttcaagtttgacagcaccctccattggcagggctaagcagaaacactgttacgtattgatggggaagtacaatattgtataaccctagagttcagaatatgtcaatattgacaaaaactataggcatttacctaagcaatgacacttctgacagtttaccttaaagattcacctctaaaattatccaacaacatatgttcatgattaattctaccattattttgtaatagtaatagatgaaaatagcataaacgcccatccataggagactgacagaaaaaaacta

SEQ ID NO: 329947 - DNA, 421 bp, Homo sapiens
ggggtgctggaggaaaccagagtacctgcagaaaaccagcagacctgggaagaatgtgcaaacatcacatagacaatggccctggctgggaattttttttttctcatcagccttgtaataaaaagatgttattccaggtcctgctgtacacatattaaataggcaaagatgttcaagtttgacagcaccctccattggcagggctaagcagaaacactgttaygtattgatggggaagtacaatattgtataaccctagagttcagaatatgtcaatattgacaaaaactataggcatttacctaagcaatgacacttctgacagtttaccttaaagattcacctctaaaattatccaacaacatatgttcatgattaattctaccattattttgtaatagtaatagatgaaaatagcata

SEQ ID NO: 329948 - DNA, 549 bp, Homo sapiens
agagaccttccttcacaggtgcactctcacacccacactcacttagactgggactatgtcgacatgcccattcacctagtgtgcacatctttggggtgctggaggaaaccagagtacctgcagaaaaccagcagacctgggaagaatgtgcaaacatcacatagacaatggccctggctgggaattttttttttctcatcagccttgtaataaaaagatgttattccaggtcctgctgtacacatattaaataggcaaagatgttcaagtttgacagcaccctccattggcagggctaagcagaaacactgttacgtattgatggggaagtacaatattgtataaccctagagttcagaatatgtcaatattgacaaaaactataggcatttacytaagcaatgacacttctgacagtttaccttaaagattcacctctaaaattatccaacaacatatgttcatgattaattctaccattattttgtaatagtaatagatgaaaatagcataaacgcccatccataggagactgacagaaaaaaacta

SEQ ID NO: 329949 - DNA, 549 bp, Homo sapiens
agagaccttccttcacaggtgcactctcacacccacactcacttagactgggactatgtcgacatgcccattcacctagtgtgcacatctttggggtgctggaggaaaccagagtacctgcagaaaaccagcagacctgggaagaatgtgcaaacatcacatagacaatggccctggctgggaattttttttttctcatcagccttgtaataaaaagatgttattccaggtcctgctgtacacatattaaataggcaaagatgttcaagtttgacagcaccctccattggcagggctaagcagaaacactgttacgtattgatggggaagtacaatattgtataaccctagagttcagaatatgtcaatattgacaaaaactataggcatttacctaagcaatgacacttctgacagtttacyttaaagattcacctctaaaattatccaacaacatatgttcatgattaattctaccattattttgtaatagtaatagatgaaaatagcataaacgcccatccataggagactgacagaaaaaaacta

SEQ ID NO: 329950 - DNA, 638 bp, Homo sapiens
catgaattttaggaggacaaaattcagcccctaacattaaatttttctcaatcaaaataatttttagtttttgctatttgattgaatcagatttattttraagcattttagttgaacttcaaatactgtcatgggacatgtgatgctgagaaaggaaagggactctaatagtctatatttccagtgatggatgtcatctcttgcttacttattttgaagaatttgcaggaatgtttcaattggattctcatttcatagcaataggtaggtgaaaatcatccagtaagtagtaaaccatgtgtagtatttcttgctaggtaattcagaaatggatgaggaggaaagtgtgtggtgataaatgaagtgtgactgaacacaggtctcttagcaacagcattatttaagagggaatcaatcaaagctttggcactctcttcagtcttctgactaatctccggattatgaatctgagtcttcaggccatgaattcccttcttaaatatctcaccttctaacctatacatttattccatctacgtctatttctctgcattttcttaaaatctcaatctttaatattttcttacttgccttgctttactatccccttttccaaattctaagactctttctcttcc

SEQ ID NO: 329951 - DNA, 540 bp, Homo sapiens
tgattaaattgttcaaaacatcacagaatagacaatagcaaaaaatgatgtgtatattgggatggatcaggaacatcaatctccatattatattttaagcttcaaygtttccgtattcatttgctaagaaatcaaaatgacttactgaaatgaaccataaaaaaggaaatttctcctaagaatttagcttttgttgtctacttaatgcctcatacattgtagagagaatcttttccctcttaagatggctttaattcaactagagagaaaattatatatattaattttaatatatgtataatactttaatatatacttagaactgcccttcaccaccacagtgatatctgaaggacaaataaaaaagacaaccactggaattccccatgctgataacctgagtagaaacaaaaatcaaatcaaaacatatactttaccattgattgggattaagaaagaactgctgcttgtgaagcccaaggcagacattattaattaatcacctgtgttcacccccagatgccatctcaatccagtact

SEQ ID NO: 329952 - DNA, 539 bp, Homo sapiens
ctctttgctaattcaattctgtagacaaactaagaactgaagatatcccttaaatatcaaatagaaactccagtgcttttccaaaagcaatggcatctgaaacgggaaaagatgagaaattcaacttattttaatggaaagtgaagacrgcaactatcatttcatcatatggccacagagaaacaaagaaaacaagcctgaagcagggaagatgaaaagaagttggatgtctcttattttatatttattaattgaatctgtgactagacccctcaaaataggatcagaaacatgatgttataaacatctcaatttttaagcttttgtgtgtactccactccctcacccatagtttattaatatgattttgttttgaaaaactgtcacaaagaaaagaaatttggggaggcccagaaggcttctgaagatgttggtccaaatatacaaaatgccaattagacaggaggaaaatgttcaagaggtctattgtataacatgactataacaatgtattgtgttcttaaacattgctaagagta

SEQ ID NO: 329953 - DNA, 539 bp, Homo sapiens
ctctttgctaattcaattctgtagacaaactaagaactgaagatatcccttaaatatcaaatagaaactccagtgcttttccaaaagcaatggcatctgaaacgggaaaagatgagaaattcaacttattttaatggaaagtgaagacggcaactatcatttcatcatatggccacagagaaacaaagaaaacaagcctgaagcagggaagatgaaaagragttggatgtctcttattttatatttattaattgaatctgtgactagacccctcaaaataggatcagaaacatgatgttataaacatctcaatttttaagcttttgtgtgtactccactccctcacccatagtttattaatatgattttgttttgaaaaactgtcacaaagaaaagaaatttggggaggcccagaaggcttctgaagatgttggtccaaatatacaaaatgccaattagacaggaggaaaatgttcaagaggtctattgtataacatgactataacaatgtattgtgttcttaaacattgctaagagta

SEQ ID NO: 329954 - DNA, 620 bp, Homo sapiens
tgatggagaaacgtttttttcagttttgcatttaacatagattttcctgttcagcaaagtctgaagagcttgatattccttccagactccctgggtcttcctataaasataataatgtgcagaaaggtaatttaaaaattagtgcgacagctaagtcccttcacagcatgcccagtttacacaatgcattttagtgtcttccaaaaaaaagtgaacacctgttctatgctcttattagggaatgctgtaaaaggccaccaggtctctctggtagtattggtatggatagagaggcaggacagtgggagctgttctggtgccatggccagtaccactgaacccacttctgggtgaggatatgaggttctaatcatcacactgcggggaaaggttactaaagctggagaggtagggcagagggcagacagaatgactcagactttccagaatgcacagcccatgtgttgacctcactctcctgttgcaaatcaatggtagtaaagaccccaacaggaggaacctcctagagcctttgcttacaaatttcagcatggggtaaaaacggtccttcctgagttcctggatgcttaagggaaattttttttaacacctggtcctga

SEQ ID NO: 329955 - DNA, 620 bp, Homo sapiens
tgatggagaaacgtttttttcagttttgcatttaacatagattttcctgttcagcaaagtctgaagagcttgatattccttccagactccctgggtcttcctataaagataataatgtgcagaaaggtaatttaaaaattagtgygacagctaagtcccttcacagcatgcccagtttacacaatgcattttagtgtcttccaaaaaaaagtgaacacctgttctatgctcttattagggaatgctgtaaaaggccaccaggtctctctggtagtattggtatggatagagaggcaggacagtgggagctgttctggtgccatggccagtaccactgaacccacttctgggtgaggatatgaggttctaatcatcacactgcggggaaaggttactaaagctggagaggtagggcagagggcagacagaatgactcagactttccagaatgcacagcccatgtgttgacctcactctcctgttgcaaatcaatggtagtaaagaccccaacaggaggaacctcctagagcctttgcttacaaatttcagcatggggtaaaaacggtccttcctgagttcctggatgcttaagggaaattttttttaacacctggtcctga

SEQ ID NO: 329956 - DNA, 598 bp, Homo sapiens
gtaatttaaaaattagtgcgacagctaagtcccttcacagcatgcccagtttacacaatgcattttagtgtcttccaaaaaaaagtgaacacctgttctatgctcttattagggaatgctgtaaaaggccaccaggtctctctggtagtattggtatggatagagaggcaggacagtgggagctgttctggtgccatggccagtaccactgarcccacttctgggtgaggatatgaggttctaatcatcacactgcggggaaaggttactaaagctggagaggtagggcagagggcagacagaatgactcagactttccagaatgcacagcccatgtgttgacctcactctcctgttgcaaatcaatggtagtaaagaccccaacaggaggaacctcctagagcctttgcttacaaatttcagcatggggtaaaaacggtccttcctgagttcctggatgcttaagggaaattttttttaacacctggtcctgaaacacattcaaactaactcatgtgtcagtcaagtccaatcctcctccagcatcaaaacaatgctttcagcgctacttccttactctttatgccagagtgtaagt

SEQ ID NO: 329957 - DNA, 598 bp, Homo sapiens
gtaatttaaaaattagtgcgacagctaagtcccttcacagcatgcccagtttacacaatgcattttagtgtcttccaaaaaaaagtgaacacctgttctatgctcttattagggaatgctgtaaaaggccaccaggtctctctggtagtattggtatggatagagaggcaggacagtgggagctgttctggtgccatggccagtaccactgaacccacttctgggtgaggatatgaggttctaatcatcacactgcggggaaaggttactaaagctggagaggtagggcagagggcagacagaatgactcagactttccagaatgcacagcccatgtgttgacctcactctcctgttgcaaatcaatggtagtaaagaccccaacaggaggaacctcctagagcctttgcttacaaatttcagcatggggtaaaaacggtccttcctgagttcctggrtgcttaagggaaattttttttaacacctggtcctgaaacacattcaaactaactcatgtgtcagtcaagtccaatcctcctccagcatcaaaacaatgctttcagcgctacttccttactctttatgccagagtgtaagt

SEQ ID NO: 329958 - DNA, 523 bp, Homo sapiens
cctgttgcaaatcaatggtagtaaagaccccaacaggaggaacctcctagagcctttgcttacaaatttcagcatggggtaaaaacggtccttcctgagttcctggatgcttaagggaaattttttttaacacctggtcctgaaacacattcaaactaactcatgtgtcagtcaagtccaatcctcctccagcatcaaaacaatgctttcagcgctacttccttactctttatgccagagtgtaagyagtaaaactacaaagcagaaaactgaccctaaaacgaagacagcaacagaataaattggaatgttcctctattatattttaacatgctttgctgtttaccaacactgaacttagatcatttttttctacccttgtttccagggcaatcaattcatttgggagtggcggggagaggcacagacaagaaaaagaaagttttttaagtgacacataccatgaagtcaacctgaatgaatttaatttgctgtggtggtgcaacaatgctcaaagggtgta

SEQ ID NO: 329959 - DNA, 590 bp, Homo sapiens
catgtaagcttcccagtagctacaactgaaacacaatcaactctaattcacaatatttttaagataaaaacaagttagaagcatagcagaaacaaaggccagacaacaatttctcccatgaatccttaataagaagggccatgtcatgtcgcgaaagataccctcaacaacatcccatacagtagctgcataatttatggagctgtttcttgcaacagttcacattgtaggttgacagtaatatcctcattcagtgtttatataaggaactcygctggaagatggaaaagcaaacacaatggtccaggtttgctgctccataatccagcttaatcttaggataaactttttcacatacaggaatatgtgttcccttattgcttttgtcgaccaaacgttctgtgatatgatattccctaataccaagtgacaactgctattttatgtttatatttaaaagcagatctgtgtgttctaccagttagtgtactaaatgaaaacttgatatcttctcattcattcattcgtttgttcattcagttgttttaaagtaattcaacaaacatttatggaatacttgtctcccaaaa

SEQ ID NO: 329960 - DNA, 459 bp, Homo sapiens
atgtgttcccttattgcttttgtcgaccaaacgttctgtgatatgatattccctaataccaagtgacaactgctattttatgtttatatttaaaagcagatctgtgtgttctaccagttagtgtactaaatgaaaacttgatatcttctcattcattcattcgtttgttcattcagttgttttaaagtaattcaacaaacatttatggaatacttgtctcccaaaagtctgtttgtatgctaggaagttagtggtgactgaggccgacttggccactgtgatattctcatgtaactgacaatgcagtttagagcatggtttctcaacagcagcaccacgacattttgggctagataactctttcttgtggtggggctgtcttgtgtattgtaggaagtttagcagcatccctagcctcractacatgtcaggagcaactccaccagttgtgaatgtaaa

SEQ ID NO: 329961 - DNA, 583 bp, Homo sapiens
cattcaatatattcttcctgggaaatcttaactgatgtcagaaatgatggcttccagcttctgttttctgagctgcagatctgtgcatacacctgctcactggactccacttgtgtgtccaacacacacttcaggttcaatatctcaaatctgaattcagcatcttccttccagagccagaccattctcctgggttttctatctctaccttattgctcaagccagaaactaagagactggctcactgaatagttacackgaatagatctgcaaatcctacccagactactttctcagtagctttcacatcagcccctgttctctgtctccacaaacaaatgccactgatttctcatcattattgacccctttgactttacaatacaactcatctccttggtagtgctataagttctttactggttaccctcggcatccattgtaaaatccaattcccttagcagagtgtgcaaaacctttgatgacatggcttctgtctttctttccattttctcatctcacaagcactctctgtgtgttctgtgctttatacctacacaggctctgttcctaaatgtcatgc

SEQ ID NO: 329962 - DNA, 515 bp, Homo sapiens
tgtccataaacagctttcccttcttccacaaagagcccaagaaactgactggcgtgtccaagaagattctggaaactaccaagaaaagcactgggaactcccccgcaggctctagggctcctcgcgtaattcccacgattctcccactctttacagtgaaataatycggggaaatgctacgaacatatgcaaaatgaattcaatcctagcagaattcttatcttctgaaattctactcaggtgcaattaggataaaacagtaaggtgggaagtagaataaacagaggagatgaacccagcctcaccagaaataatctgttgagaaaaagaaggaagcagtatagtcacacatacggatactgagagaccacaatttgttctcagtatctgtgagtcctcttaagcctcagtcttcttgtctgtaaaatagagataaagtacttacctcaaaggggataattctgaatcaagagatttaacgaccaaatgtaatatgtaaccttacttggatcctg

SEQ ID NO: 329963 - DNA, 464 bp, Homo sapiens
gttttgaagaaaatgtccagatttttagatagtcatgctgagatagagaggtaacataggttctggaatttgttttaatatacttaccaatgaaagaaggagggagagaggaagcgagggaaggtaaggagggagggaaagagggagagaatggagggaaggagagagggagagagaaacaaacaggaattacagttttgaaatgcttcttttcggctccatccactgtaaacagccaatttatccaaaccytccttctctggaacatgacgccacatttaaaacccaaaccttcctaaaacgttctcacatatgaaccacacaagatgttggctcctggtgggggctacctataggtattacatattctcaaatcaatcatttgacatttttatagcatcacaaaatctacaccttcgctccagcctaaatcaacaacaaaagcatcagccaagactgcatat

SEQ ID NO: 329964 - DNA, 549 bp, Homo sapiens
agctatttaccaagtcctgttaactctctgatccttggctgggccaggcaagagatgccacatcatgctgtcatttagcaccagatgttttcatcactttgttaatggtctatatagacccaaagtgtgtgacaaatatgcaggtttttatttgcctgatgggaaggttctgggcagcatggtggtaggtcacwggcattgagagaagacaggaggtagaaggtagtgagtgtgactgtatcacccactgtttgcccatcagaagctcctgtatggaacatgtctgtcagtatagcaaagcccactgactggaaacaaactcttggggccaagatttggtaaggggagtccagctggcacattaaggaatggaggctcacacctggctagaccaataaatttttccccaaagtgtgcatgctgtcatgttggagcatgcccaacctgttcttaagtcttgtctttttgacattttgttttttatcttactaatggattccacctctctcagctttaaaaatgaggagaataaaagggctaccagtaacc

SEQ ID NO: 329965 - DNA, 575 bp, Homo sapiens
ccaggtagctgaagtggagatcctctgctgcaggtaccccatggcctgtccatcttctatcctggcttgacataaagcctaaggtgcacaggtgacagggggtgttccaggtgtgcaggaggtgagcccacaccatttcccatgtgccagcccaccctcacttcctccccacctctgtgtgctgcctgttgggcagggctctgcagtgacctctggtcaactccataaaagaaggcccctgaaaactctaatmtccttatgctagtaggattcccagttggctacccattgaaatcagctgggatgctttgaaaaatccccatgcttgagctccagcccagagatcctcatttgctttgtctggcatggggcttaagcagcagcattgttttgtgccagccagctatgtgagaaagacctccattgctagtcacccccaagcagggctgtccaattggccaagtgcactttccagctcttggtctttcctttctaatccattctgattcccagttacccaagcccatgcccatgaaatctttatgacccaactcaacaccattcaataaccatca

SEQ ID NO: 329966 - DNA, 575 bp, Homo sapiens
ccaggtagctgaagtggagatcctctgctgcaggtaccccatggcctgtccatcttctatcctggcttgacataaagcctaaggtgcacaggtgacagggggtgttccaggtgtgcaggaggtgagcccacaccatttcccatgtgccagcccaccctcacttcctccccacctctgtgtgctgcctgttgggcagggctctgcagtgacctctggtcaactccataaaagaaggcccctgaaaactctaatctccttatgctagtaggattcccagttggctacccattgaaatcagctgggatgctttgaaaaatccccatgcttgagctccagcccagagatcctcatttgctttgtctggcatggggcttaagcagcagcattgttttgtgccagccagctatgtgagaaagacctccattgctagtcacccccaagcagggctgtccaattggccaagtgcactttccagctcttggtctttcctttctaatccattctgattcccagttasccaagcccatgcccatgaaatctttatgacccaactcaacaccattcaataaccatca

SEQ ID NO: 329967 - DNA, 558 bp, Homo sapiens
ctaaatagacaaatcctttaaaattagacttattctaattttaatcattccattctgattaatttggaaataaaaaaacactgcttttacagaaatttttctccaactgattatctgtgtacaaaattcaaaagtacatattaaattgttcaggaccacaaaaattgggagtcaggagaagagggagtttgtattctattttgctatgctgtttagytttaatgccaaattgttttatgaaaattacactgtcctgaatcattcatgtggtgtctatttggttgtaggtcacactgttttacattattttcatttttgaataaatcagggttttttcagtggtttaatagtctatcttaaagaagaattgttctaaatatacctcaaaggttcataggaatatcatttttcgtgtgtgagatatttatttgtgttagtttgcatggatatagcaatgatttgaatggggaaatgaggagatttgttaaagcatccatctctggtgagcatggtaatgaatgttttcttaattatctttttccccgtagtaaacataga

SEQ ID NO: 329968 - DNA, 588 bp, Homo sapiens
cagtaccatgtcctggagaagcagaacctccccatttcacttagatacacagcttttacccaatcaggttcagtctctgtaaagatgtcttttatactcaagaatggtaaataggtcccagacaggcaattgagcttcccctgtgactatgtgctctttgcctttgagctgtgatgagtctttgagaagtgaagctaaaccgccaacacctgatggaagtaaagaaagtattttattggcctggtactcattcattaacctgaaagcaacacctttgagcttccttgacatggcaacatcacatgcctcaccaattactctcttctcttcatatcacctacgcctctgacctcaactgaactggcaaaactgtcagggaaagcaccttaattatwactgtggtatgaaaagtatggctagggagatgaaggagggaaaagaggcattcagaattaggtcatttttcttagagtttctcagcactttatcaagtttgtagatgttgctgttaattgattcagcaagcctgctctgatggcttctgattccttttgcttgcctaatctgtacctagcgcggtgttattag

SEQ ID NO: 329969 - DNA, 588 bp, Homo sapiens
ttgtcatcattatttggcgttcttacttggctgccaaggcacgtttatataagtggattgccaattgtctttcactttaactgtcatcgtcagcttattcaaaagtatgcagttgtttctaactcaaaaaattctttctggcatttccaaccataatgttttgtaataacaagtactttgatacatattttctcagcaaaaagccattgcagtcaatctttgtgatttaatgtctggcatgatttatttttccatcttgcagcttcctaaagtgtattaggaataaatagatgttaagaaactatgaatttagttttaaagattaatgtgtagtagtagtgttagcaataagaatgtgcgtaaatatcatggtctataaaagacttgtgtcgctataaagattggcacatatgaatttttatgtcactgctgaatgcttcttcmacaacagcagtatgtcatttaatacagtagcaacatgaaactctgtagggggtgagtgttagaatactttatgttgtctcctcttcgtatctttttcatgttacctacatgctgagtagcagctctctgttcaacctgtcataa

SEQ ID NO: 329970 - DNA, 574 bp, Homo sapiens
atttccataaaagcaagccactttctagcctgtcccttccctctctgtcaacagaaatcatatttatttgttattcacaattccaagtatcaaaagaaagacaatgatcttttatccttgtcatattattaatactatataccaaggtggcatatttttgatgagaaggataaatttcaaataattattttgatttacttcataaatctttgtcttttatgttgamgcacataacaacttcatctctctgagtggtctggcgctgacgtttcaccacttcaacggtttggctcgtgattcagtcatgacagagtcacacagagctattctggcaagagcaagaatagaatctgcaggataagcccagagagctgtgtgcccaccacacaataggggacaacttgccagtgagaagtcaagccctggtttattgtgaggcatgaaatatcaacagctgaaatttttgctctgccaactagaaatgaggcaagacatgttaaaaaaaatttttttttttttttagtaagactgggaatgtagaaatgcagcagcctggacaaacaagagggaagag

SEQ ID NO: 329971 - DNA, 574 bp, Homo sapiens
atttccataaaagcaagccactttctagcctgtcccttccctctctgtcaacagaaatcatatttatttgttattcacaattccaagtatcaaaagaaagacaatgatcttttatccttgtcatattattaatactatataccaaggtggcatatttttgatgagaaggataaatttcaaataattattttgatttacttcataaatctttgtcttttatgttgaagcacataacaacttcatctctctgagtggtctggcgctgacgtttcaccacttcaacggtttggctcrtgattcagtcatgacagagtcacacagagctattctggcaagagcaagaatagaatctgcaggataagcccagagagctgtgtgcccaccacacaataggggacaacttgccagtgagaagtcaagccctggtttattgtgaggcatgaaatatcaacagctgaaatttttgctctgccaactagaaatgaggcaagacatgttaaaaaaaatttttttttttttttagtaagactgggaatgtagaaatgcagcagcctggacaaacaagagggaagag

SEQ ID NO: 329972 - DNA, 367 bp, Homo sapiens
tagctgtaaatcctcattactaacagagaaggcagttatcctctaacagctgtgaacgaccccattgttgctattgttcttccacatcctgtatttgttttctcctgccagcttcatttaaaacgttttgttcccargctgaggacttcatttgaagtattgttcaatctctagcttagctcttagtgtcaacaccttcaagcttttacctgcagatagcaaactcacttcacagtgacttgattaaagcaaagttcggagtagtgacaaggaaatcctcattcctcatcagaatttctgtagaatgattttaattaaaagagatttaaaaatcaagagtaatctctaaggggcctcatcagcacct

SEQ ID NO: 329973 - DNA, 543 bp, Homo sapiens
gtccctcatggactggtcttgcacaggaacagaaccccaccaatctgcccagacaatgattctggagtcttcttccaactctttccctccccagggagaagtaagcagctgtgctttttgtccacttgctctatgctgaattgtggattggggtttgggtagagttatcaaaaccaaagtctctgtcctaggcagctagactgtgccaaacccatcagagtttcaggattgatgaaagaaatgccagttcttcatgcagccctggagaagttggtcagtgggatgcatggatcaagtctttcccttcccagggagtagctgagagctgggattttaaaattttctcactctgggctaagcatgggggaggatctttggcctctaccagttcaaactatgatctctgttctccttcaggtagctagattatgccagatctgtcagagctccaamgctggcaagggagaagccagtgctcttggagccccctcagaaaagttggggctctagacatgtgaaccaagccctgcctttcctcaaaaa

SEQ ID NO: 329974 - DNA, 590 bp, Homo sapiens
agtccacatcacaccccctatgttttgtcaataaagagtatttataacttctcaaaatgctttcttcttatatcttattcaattttttatgtcttatttaaaagttatttaataactttgtgatttgttccacttaacaaattgaacaactgaggtttagagaagcctcagttggctggcccaaggtcatatagctactgagaggcaagttttattcatactctagagctctttcccagcgtccaagatgaccttcagtgttggtcatttaatagctgtctttataacacatctatagacactgcaaaacacaaggcttctaaaaagtccttagagagaccttctatgaaagtctaataktgcaattctttcccttggctatctaacacattagtgacttgaaccctatagaatggaaacagcttaatatgtcatctgttcgcatatgcaccaggaatatggcttgagaggagattcagctgttctcacactaagccatcaagtccttaaaaaaaccataaaggaataaatgattattcacggtgccaaaagcacatgtattttgaacaagaaaacactatgttaaagaa

SEQ ID NO: 329975 - DNA, 579 bp, Homo sapiens
atataattttcatattataaaataaaccaattttcagggactacttggatgagttccagcaagtgcaattaaaactctcagctatttgtgtctccaagaacaacttcttgcctgttttgctgcacatagttccacctgccccaagatccttcatgttttctggtctctttattcaccttccctcaattttaaatcagggttctctctgggttagtggagagggatgagtggggaaggggaagaaagaggcttcattactcaccactagagatgttatttcattgcttatcaaaagacagctttgctccctaaaagggtcttcctctctcttacaccrtagaaataatttggatcttttcagtattcagtcttcctattcatgaacctggtatgtttcagcatggttttatttctttttttccagagacaaccattttttaatttccttttaactcctacatcacagactcactgttgccatcttctgagtcacaatcctcatcttaataccattatgagttcctgcccagaataatactaatactgctgcagctgatatttaggatatagtgcttgtaa

SEQ ID NO: 329976 - DNA, 582 bp, Homo sapiens
gaccttgctccccaatgtggaactgtgtcytgctatgcctgactgttgtgtgaagttttcccacaataccagccaagagtacaggcaagatgctctgtagccacaaatgctccttgtgctgatggaacatctttcccatcagaacaattttggttcaataataaaatgaaggggactctagaggatctttcatggccagcaaggtggaagaggtgttttagcccagtatctactcaggaagtggcataaaaggagttgaaaccatttgccaacatattcaggataataagtaagattctcatttaaggaataacttattaaagtcaaatgcataattggggaaatcctctcaatttccccatctcatttcccaatatctaaaagatatggagaaataaattattttttattaataataacaataaattattttttctttttctccctgagtgaataaatttgttcatgggaaattttgtctattcaacaataatgatagcaataactaatagttacagagcacttagtattttttctcagatattgcaccaagaactagaagaaatcttcacaactatttca

SEQ ID NO: 329977 - DNA, 585 bp, Homo sapiens
tgcaggacacaaggttaatatacaaaagttaatcacctttctttataacagcaatgaacaagtggaatttgaaataaaaaaaacatttatattagcacccccaaaaatgaaatacttaggtataaatctcacaaaatatatacawgatctctatgaggaaaactacaaatctctgataaaagaaatcaaagaggctgggcatgatggctcatgcctgtaatcccagcactttgggaggccaaggtggatggaacacgaggtcaggagttcaaggccagcctggctaagatggtgaaaccctctgtctactaaaaatacaaaaattatctgggtatggtggtgggtgcctgtaatcccagctactcaggaggctgaggcagagaattgcttgaacccaggagacggaggttgcagtgagccgagattttgccactgtactccagcctgggcgacagagcaaggttccatctcaaaaaaaaaaaaaaaaagaaagaaagaaaaagaaatcaaagaactacacaaatggaggtatattctatgttcatggataggacaggatagaaatattgaaagtattgtcaagat

SEQ ID NO: 329978 - DNA, 585 bp, Homo sapiens
tgcaggacacaaggttaatatacaaaagttaatcacctttctttataacagcaatgaacaagtggaatttgaaataaaaaaaacatttatattagcacccccaaaaatgaaatacttaggtataaatctcacaaaatatatacatgatctctatgaggaaaactacaaatctctgataaaagaaatcaaagaggctgggcatgatggctcatgcctgtaatcccagcactttgggaggccaaggtggatggaacacgaggtcaggagttcaaggccagcctggctaagatggtgaaaccctctgtctactaaaaatacaaaaattatctgggtatggtggtgggtgcctgtaatcccagctactcaggaggctgaggcagagaattgcttgaacccaggagacggaggttgcagtgagccgagattttgccactgtactccagcctgggcgacagagcaaggttccatctcaaaaaaaaaaaaaraaagaaagaaagaaaaagaaatcaaagaactacacaaatggaggtatattctatgttcatggataggacaggatagaaatattgaaagtattgtcaagat

SEQ ID NO: 329979 - DNA, 579 bp, Homo sapiens
cagacactaaatatatattttttattacgtcacatgctcagaaataaaccagcatagtcaactgatctttaacaaaggggcaaaggcaattcagtgaagaaaaaaatagtctttaaacagatggtgctagaamgactaaacatcaacatgcaaaaaaataaatctagatacagacctcacacctgtaggggagggaaaagtggctcttcaccaccctcctaggttctttggctgggctacagctcttaaattgacataagacagattaaacgtataccataataagtatttttaaagatatgtgcagaatctaaataaagaaactcacatagtaaaacaaaagaaatacaaaactatacaacaataaaataatatttgcctataaaaaaagaaatgaaagccatttttaattacatgcacacacatagaagtcccacaaaaatataaaacttgaagaagggctagatgactgacatttatatagcatcttgagctacagaaagaaatagggcttggggctcagaaggagcagtggtggagacaaattacgggaaggtgggtggagaaaatgtactatga

SEQ ID NO: 329980 - DNA, 558 bp, Homo sapiens
tggatatcttgcaaccaagagcagaattccagttcatactcttgacgactgaaatgccctgattcacttattgtactacagaatacctattctatgtcagaactgtgctaggtactgggctatttgggtataccagatagcagagttgctccagtacctagggacctctgaaaatagaaaaacctgacttgtattaacaaggattaatcaagattcttctctgccttggccatcatgtctggcagttctatgaaatgctgcgattgcctatggacttaactgtaataaatttggaaagagagccactgagtccctgattcattcatttayttgaaatatttgagtaccaactttggaccaggcactgttctaggtcccagggccattcttcttgcagaacctgcactccatatccttaaatttaatagcattttatcaagatgattttctacagactcaacagaggttgaaaagacctctgttgtctgaagccatgaactgttatttgtactgattgtattagtgatatctattggcacatatagcataaggaaaaat

SEQ ID NO: 329981 - DNA, 546 bp, Homo sapiens
cgattgcctatggacttaactgtaataaatttggaaagagagccactgagtccctgattcattcatttatttgaaatatttgagtaccaactttggaccaggcactgttctaggtcccagggccattcttcttgcagaacctgcactccatatccttaaatttaatagcattttatcaagatgattttctacagactcaacagaggttgaaaagacctctgttgtctgaagccatgaactgttatttgtactgattgtattagtgatatctattggcacatatagcataaggaaaaatcatttaggaagccatccttctgctttctgagacttatggatgtatagttccattgactgaggcttrgttatgtgccagtggaaatatccaatttgaagaccgaagccagtcctgcagagtcaccagaggacttcatcatgggcaaggccatctctctgcgaggcctccaagagctccagctacccctgctcccaaacacacacgggtctgctccagcactgaaacatgggataggaagctgtgacaaa

SEQ ID NO: 329982 - DNA, 538 bp, Homo sapiens
ttcaatcattctactaactaatgaccatgttctgtgtgaaaggcactgtttcaaggaggacaactgacatcaagatttgtgttatcacatagtcatttaattccagatctgtaatatttttaggtaaagctttgaatcaattgcttaccaaggatatttgaagaaaaaaacagattttcttctatacttcctatgtatgtccaatttcttttgtttgtttgtttgttttgttttgcttttctgagactgagtcctgctctgtttcccaggctggagtgcagtggtgcgatctgggcccactgcaacctccgcctcctgggtacaagtgattctcctgcctcagcctcccaagtagctgggactacaggtgcgcgccaccacgcccagctaatttttgtatttttagtagagacggggtttcaccatgttggccaggatggtctccatctcttgaccttgtgatctgcccgcctcggcctcccaaagtgctgggattacaggcgtgagccactgcaccyggcctgttcaatttgttttt

SEQ ID NO: 329983 - DNA, 578 bp, Homo sapiens
catccatttttttgctactcctgctgctctgagctaaatkcttttaccttctgagaactgaccaaattttcctttttaagatgttccttgcctttgtaataatcatttttctgttaatttccctcttaaatcactttaatatactgatttcaaactttataaatttataatttttgcctccctcaaatcaaaggccaatctgtcatttacataacaaaagtgttacgtttatgtttggatcctatttaccttcctattacatcaaggagtatcaggtttgttactttaaaaatatcattctttataagcatgttattttcaagttttgaatcattaaatattttgtttcatactttgcttgaaagtatgaggcaaatagttaatttgtcatgaagaagctgctatttgacttaagttcaacttgtatttcaaaactttcagattaaaaatatcatactccattaagaggctgcctggatggatggatggagaaatagatggatatctctttttaaaatacagcagattcggtaaacaaaaagaaagtatagttaagaaactccaagagctatatgaat

SEQ ID NO: 329984 - DNA, 578 bp, Homo sapiens
catccatttttttgctactcctgctgctctgagctaaattcttttaccttctgagaactgaccaaattttcctttttaagatgttccttgcctttgtaataatcatttttctgttaatttccctcttaaatcactttaatatactgatttcaaactttataaatttataatttttgcctccctcaaatcamaggccaatctgtcatttacataacaaaagtgttacgtttatgtttggatcctatttaccttcctattacatcaaggagtatcaggtttgttactttaaaaatatcattctttataagcatgttattttcaagttttgaatcattaaatattttgtttcatactttgcttgaaagtatgaggcaaatagttaatttgtcatgaagaagctgctatttgacttaagttcaacttgtatttcaaaactttcagattaaaaatatcatactccattaagaggctgcctggatggatggatggagaaatagatggatatctctttttaaaatacagcagattcggtaaacaaaaagaaagtatagttaagaaactccaagagctatatgaat

SEQ ID NO: 329985 - DNA, 578 bp, Homo sapiens
catccatttttttgctactcctgctgctctgagctaaattcttttaccttctgagaactgaccaaattttcctttttaagatgttccttgcctttgtaataatcatttttctgttaatttccctcttaaatcactttaatatactgatttcaaactttataaatttataatttttgcctccctcaaatcaaaggccaatctgtcatttacataacaaaagtgttacgtttatgtttggatcctatttaycttcctattacatcaaggagtatcaggtttgttactttaaaaatatcattctttataagcatgttattttcaagttttgaatcattaaatattttgtttcatactttgcttgaaagtatgaggcaaatagttaatttgtcatgaagaagctgctatttgacttaagttcaacttgtatttcaaaactttcagattaaaaatatcatactccattaagaggctgcctggatggatggatggagaaatagatggatatctctttttaaaatacagcagattcggtaaacaaaaagaaagtatagttaagaaactccaagagctatatgaat

SEQ ID NO: 329986 - DNA, 590 bp, Homo sapiens
gattcgtacaataatatttgtgtttctttaattcttggtctggaactatatagtatctctgaatttctaattataataagctgttaaatatttaaattttcttaatgaagaattttatttttataccaaaatgaaaacagactaggtgttgttttaagtctgttgcctggccacacttgaggaagccctagcacttttgcgtgtgtgttctaacccgatgtactatatgtacataggtaacacatgaactgcaggtaaaacatctagggggattcgacggtctccaaatgagctggctttatgggacagcaaattttaatgacagacaaataaaagaaggaataaactcatactattttcaatgagacagcaatctgcaaatttttctgtttttcaatgctagtkaaatcttctgggcaacagagcaagactccatctcaaacagaataatcgaacaattcttcaggaacccgatctcagtgctgtacgtcatacatataatccaaatgcttatatcaataaaaatccaggtaatatgctttatacctaacaaagtggtctcgatttctgtaaaacctaaagcaatttca

SEQ ID NO: 329987 - DNA, 590 bp, Homo sapiens
gattcgtacaataatatttgtgtttctttaattcttggtctggaactatatagtatctctgaatttctaattataataagctgttaaatatttaaattttcttaatgaagaattttatttttataccaaaatgaaaacagactaggtgttgttttaagtctgttgcctggccacacttgaggaagccctagcacttttgcgtgtgtgttctaacccgatgtactatatgtacataggtaacacatgaactgcaggtaaaacatctagggggattcgacggtctccaaatgagctggctttatgggacagcaaattttaatgacagacaaataaaagaaggaataaactcatactattttcaatgagacagcaatctgcaaatttttctgtttttcaatgctagttaaatyttctgggcaacagagcaagactccatctcaaacagaataatcgaacaattcttcaggaacccgatctcagtgctgtacgtcatacatataatccaaatgcttatatcaataaaaatccaggtaatatgctttatacctaacaaagtggtctcgatttctgtaaaacctaaagcaatttca

SEQ ID NO: 329988 - DNA, 590 bp, Homo sapiens
gattcgtacaataatatttgtgtttctttaattcttggtctggaactatatagtatctctgaatttctaattataataagctgttaaatatttaaattttcttaatgaagaattttatttttataccaaaatgaaaacagactaggtgttgttttaagtctgttgcctggccacacttgaggaagccctagcacttttgcgtgtgtgttctaacccgatgtactatatgtacataggtaacacatgaactgcaggtaaaacatctagggggattcgacggtctccaaatgagctggctttatgggacagcaaattttaatgacagacaaataaaagaaggaataaactcatactattttcaatgagacagcaatctgcaaatttttctgtttttcaatgctagttaaatcttctgggcaacagagcaagactccatctcaaacagaataatcgaacaattcttcaggaaccygatctcagtgctgtacgtcatacatataatccaaatgcttatatcaataaaaatccaggtaatatgctttatacctaacaaagtggtctcgatttctgtaaaacctaaagcaatttca

SEQ ID NO: 329989 - DNA, 458 bp, Homo sapiens
ttttctactgtcttttaaaaatggcttaaaaaaaaagagaatgtctcatgcctctagattaygaagcattaaaaaacctattttccctcacatttttattgattaaaaataaaaccatagttttgatcagctttaataataaacaggccaggcattacagctcatacctataatcccagcacttggggaggctaaggtgggaggatcatgtgagcccaggagttcgagaccagcctgagcaagatggcgagaccgtgtccctacaaaaaaattttttaaaaacattagctgggcatgatggcatgcgacgatacttccaaatacttgggaggctgaggcaggaaggattccttgagcccaggggttcaaggctgcagtctgctgtgattgcaccaatgtattccagcctaagtgacagagcaagactgtctcaaataataataataataatttttttc

SEQ ID NO: 329990 - DNA, 573 bp, Homo sapiens
gttaatcacctctcaaatataattaaatggatttactaagaatctttttaaaataaaagggtattctctatcgtttaacttatataaacartactgagaataaaggaaatgggaaagaaagattcagtcctaggctgtctataaaatgggagaagggtctcttttcttttatctaccctgaacctctttggatctcacttttcttctagttatttagcacactcttcccaatcacccatccccacaacacacacacacgcacatgcacagcacacacacagatattgaagtgatgtaggcttcaggctttgttttctctttctcttttccctaagtcttttcccatgctgtgaatggtaatggactatgatctgttagaaatgggaacatagcaataactccaaaacagagcctcacaagtttgaagaattgagccaagctgcatgattttctaaacattccactgaattaataccttgtaagtccagggggaccttcatctaaatctctccaaacacttgcctgagtttggttaatcctcagtgtagccttggtgaaacattcccacatttt

SEQ ID NO: 329991 - DNA, 621 bp, Homo sapiens
ccacatgaagttcacagtttaaaacattcagataatgggaaatgtttccatccagaatgtctaggaagacttgatggaggaattgatstttaagcttgacttttgataacaatatgggcagaactgaagacctgaggttagagtctcaggggcaaaatggctcaagagcattgttcatacaatgttatttgtttatttgagacagagtctcactctgtcgcccaggctggagtacagtggtgcagtcttggctcactgcaaccccctcctcccgagtagctgagattacaggcatgtgccaccacacctggctaattgttgtacttttagtagagatggggtttcaccatgctgactaggcttgtctcaaactcctgacctcaggtgatctgcctgcctcggcctcccaaagtgctgggattacaggcatgagccactgcacccagctcatactattaaaagccatctaatttagtgatcccaaatttgtctatacatcacgatgagcttagggattttcccccacatttataaaatattttaaatatttatttttaaattttatgtacattctacaacatggataaatcttgatacattatggtaagttaaacaagttag

SEQ ID NO: 329992 - DNA, 621 bp, Homo sapiens
ccacatgaagttcacagtttaaaacattcagataatgggaaatgtttccatccagaatgtctaggaagacttgatggaggaattgatgtttaagcttgacttttgataacaatatgggcagaactgaagacctgaggttagagtctcaggggcaaaatggctcaagagcattgttcatacaatgttatttgtttatttgagacagagtctcactctgtcgcccaggctggagtacagtggtgcagtcttggctcactgcaaccccctcctcccgagtagctgagattacaggcatgtgccaccacacctggctaattgttgtacttttagtagagatggggtttcaccatgctgactaggcttgtctcaaactcctgacctcaggtgatctgcctgcctcggcctcccaaagtgctgggattacaggcatgagccactgcacccagctcatactattaaaagccatctaatttmgtgatcccaaatttgtctatacatcacgatgagcttagggattttcccccacatttataaaatattttaaatatttatttttaaattttatgtacattctacaacatggataaatcttgatacattatggtaagttaaacaagttag

SEQ ID NO: 329993 - DNA, 621 bp, Homo sapiens
ccacatgaagttcacagtttaaaacattcagataatgggaaatgtttccatccagaatgtctaggaagacttgatggaggaattgatgtttaagcttgacttttgataacaatatgggcagaactgaagacctgaggttagagtctcaggggcaaaatggctcaagagcattgttcatacaatgttatttgtttatttgagacagagtctcactctgtcgcccaggctggagtacagtggtgcagtcttggctcactgcaaccccctcctcccgagtagctgagattacaggcatgtgccaccacacctggctaattgttgtacttttagtagagatggggtttcaccatgctgactaggcttgtctcaaactcctgacctcaggtgatctgcctgcctcggcctcccaaagtgctgggattacaggcatgagccactgcacccagctcatactattaaaagccatctaatttagtgatcccaaatttgtctatacatcaygatgagcttagggattttcccccacatttataaaatattttaaatatttatttttaaattttatgtacattctacaacatggataaatcttgatacattatggtaagttaaacaagttag

SEQ ID NO: 329994 - DNA, 596 bp, Homo sapiens
gttagctaccatgtcatgaagagactcaagcagccctatgggaggcccatgtagtgaggaaatgggattcctttcaacagccaatgaggaactgaggcctcctgtcaatagctttgtgagtgagccatctgagaaatagatcctccagcccagtcaagcattcagatgactgcagccccagctgacatattgactgcaattttatgagagtctctgagtcagacccagttaagccactctgaattcttggatgcatagaaacagttgagattaatacatgtggttttaagacagtaagttttgagaggatgcgacatttgaacagaggccgaaagaagggaggaagcataccatgtggctacctaatgatagaacatataagatccagggaatggcaagtgcaatgggcctaaggtgggagcatgtgtgtcmtgcttgaggaccactaggagcccagtttggctaaagtgttgtgagcaagagggaacaccgataggagatcagttggaggggtaggttgagggaatgctttgtaggttaaaataaggatttagaataatagccaaagtataatgggaatcagttggagagttttg

SEQ ID NO: 329995 - DNA, 629 bp, Homo sapiens
gtgtgataaaacatttatccaacttgctttttcctcccattttatgaatttacatcatcttgtctgcttaaacaggagcagttggacatcatggagacaacttagtagagaagatcatttcagcacttccccagctcccaggccacacaaatgatgtgatggttaacatgatagcgctcactgcactccatactgaggaggaaaattataatgtggttgcaccaggctgtctttcacaatccaggtaagatatatagtttttgtcatcttatctttctctgtcttcccctttctttttctcctagactgagtattcccataggaaaaaagcaatgargaattggtctggttgaaaatttcacagtgggtagcatttagcaaaaagcattttttcttaattttgaaataaccacatccactaaacataataatccagaaagtatggaattttatagaactgtcatttacatgtaatataagcttgttcccaggattggttaagtgaatcagtttatgtatctccatttcacagatagtttcacatggaattgagtctagtcttcctcagtttctttttcccagttgactttttcacatcactaaaaagcaactcaaacagcaatgaaacc

SEQ ID NO: 329996 - DNA, 523 bp, Homo sapiens
cctgggctcaaacaatcctcccaccttaaccttctgagtagctagactaccagcactacatccagttaacttctttcttttttagagacggagtcttggtatgttgcccaggctggtctcgaactcctggcctcaactgatcctcctgtcttggcctcccaaagttctggaattacaggcatgarccactgcacccagccagttttctcatttctaaaagcagaaataaatcagggctttggtttctccatacaataagcacatgaaagtgtgctcagtatccttgaagcctgtgtatttggaggaaaagaaaaaaagagagaaaatgtgctcagtatcattagccatgagggaaatgcaaattcaaaccacaatgagataccacttcacactcaaaagaaggactaaaatttaaatgatgggtgtattagtctactccagttgccataaaaaattaccacaaacagggtggcttaaacaacagaaatttattttctcacagttctggaaactagaagtccaa

SEQ ID NO: 329997 - DNA, 581 bp, Homo sapiens
gttggttatctctggaacttgcattatatattttagctttcttttttgttctgcagctaagcaatatcttayagctgtccatattcttagtagaggatattaagtcccttgcccttctctttatttcttctttccctctttcgtcttttaaatcatcagtatttgtatttttacctagtcaagattgatagcatttctattttattccataaccatagtaaattacggtattactaaactattatgtgctttttctgtagtttgattctaaaagttcaaaatcagtaaatagcatttacaacatcataaactgtataacaattctattctcctgtactttgaagattcacagtgattgtgtctaatttagagctttttcaaacttttattgtaggttcaggggtagaggtgcaggtttgttatgaggttaattctttctacttgcttctcagtaagcctatttaatttgaatacagttttcttctgtcttttgggaaagtttcacattctttcatgctaattgctctctgtcttttgaaactactaatagttcatgggccttctagattgcttctgtatgt

SEQ ID NO: 329998 - DNA, 576 bp, Homo sapiens
tgtacatttgtagaaaaatcatgtacatcatatgtagataccgctaagtcactttttctgaatttggattgttaaaatgtaaacatcgtgaaggcaggaaccgtaattgtccagctcctcatactttttcctcagcctagaaccatacttgacatggtttggtgctcagtaagcattacatgaattaatcagcctatraaatgattatttcaagttggtgacgatagtactgcttgacagtagtaatatttggtccactttgtaatttttgcatttctagctgtggagctacagttatttgatacaattaaacattttattgaatttacatttttcttttttaagtagaaaagaaaagtgacagtgcaaatgtaactaaacctaagtcttaaatgtagtacatcagagacaaaagatggaagtaattattattagacccaaagcagtgaatctgaagtccagatggctgaagttctgagagaaaagaaccaaatatataacatgaatataatgtgagaaatatatcattataaacatctgtgacttgaggtcttactgatatcttttttttttttt

SEQ ID NO: 329999 - DNA, 577 bp, Homo sapiens
gtgcctctaaataaattcccacctacagtcatgggccttctccccatatcattctctcaggatttaaaaactgctagccatattatcatgttgaggatcccttatattgagaaaatttaagaagactgataagaaagatggctgactagagttgcctcatgttcatctccccaacaaaaaagaaccaaaacaataaaaaacaactaaatttcaagcagaatgactaaaggagagcgctgaagtacagtacagcaagggagtggtggaaaccatgtggggcacaaaaactcagaggatgtcacataaagaaacaccttcccattcccctagtcaggatctgctcagaaccagaatggacttctccttgaggggaaagggtaagctggaggcctccagcagcccccayaaccactgcagatatctgcaatctttgctaccagagaacattgcagtcctcacaggtcatgagcccagttagggagctgcctagagttcacatggctgtactacttcagaaaaggaactcacattctgtcccaccacccaccacctccccacaaccccgtggcccaagctg

SEQ ID NO: 330000 - DNA, 577 bp, Homo sapiens
gtgcctctaaataaattcccacctacagtcatgggccttctccccatatcattctctcaggatttaaaaactgctagccatattatcatgttgaggatcccttatattgagaaaatttaagaagactgataagaaagatggctgactagagttgcctcatgttcatctccccaacaaaaaagaaccaaaacaataaaaaacaactaaatttcaagcagaatgactaaaggagagcgctgaagtacagtacagcaagggagtggtggaaaccatgtggggcacaaaaactcagaggatgtcacataaagaaacaccttcccattcccctagtcaggatctgctcagaaccagaatggacttctccttgaggggaaagggtaagctggaggcctccagcagcccccacmaccactgcagatatctgcaatctttgctaccagagaacattgcagtcctcacaggtcatgagcccagttagggagctgcctagagttcacatggctgtactacttcagaaaaggaactcacattctgtcccaccacccaccacctccccacaaccccgtggcccaagctg

SEQ ID NO: 330001 - DNA, 538 bp, Homo sapiens
aatcatcactgacattgatcacagctgaagaagctacacagagagtctgtacccgcccagaaccagagtcaatgcaccctgcacaagttacaccctaaaactcacctgcaggtgaaagtctctccctacaaaagccactctataaattgggaagagacaaccattctaccagatacrcagacatcaccacagtgacactaaaacatttaaaaagcaagtaaacatgatgccaccaaaggaaaacaattgttctccaataattgactccaaaaaaatggaaatttatgaattgcctaaaaagaaattcaaaatagtaatcttaaagagacttagcaagataaaagagaatataaatagacaattgaattaaaccagaaaataattcatgatctgaattagaaattcaacaaagagataaaaatcataaaaaaggaccaaacagaattcttggagctgcagaattcaatgaattaaaaaaatataattgggctgggaaaggtaggtcatgcctgtaatcccaccactttgggaggccaag

SEQ ID NO: 330002 - DNA, 558 bp, Homo sapiens
atggtggtgtgtaaatatttcaaacttctactatgaaagttaaaagtcaaaatattcaaaaacaaaaatagttacaccaacttgttaagaaatacacaatattaaaagatgcaaattctgacatcaaaaatataaattgtgggggatagggagtaaaagtccagactacttttatgtgaccaaagttaaaccattatcaagttaaaataaatggtctgactgggcatggtggctcatgcctgtaatcccagcactttgggaggccgaggcaggtggatcccctgagatcaggagtttgagaccagcctgaccaacatggtgaaaccctgtatctactaaaaacacaaaaacttagccaggcatggtggcaggcgcctgtaatcccagctactcgggaggctgaggcaggagaatagcttgaacctgggagacagaggctgcagtgagccaagatggcaccattgcactccagcctgggcaacaagagtgaaactcagtctcaaaaacaaacaaacaacaacaacaaaaaaaatsgtcttattatgacagcaagatgtt

SEQ ID NO: 330003 - DNA, 549 bp, Homo sapiens
gttgggcatgcacataaaatggaacaaaggtagggactgagagctaaatgcagagttggggatcaggtctggaagaacttggagggaataagcacagagactgtcttagtttgggctgtcacaacaaaaataccatagactgggtgacataagcaaagaaagtttatttctcactgttctggagactggaaagtacaaaatcaaggtgctcacataattcatttctaatggcagccctctctctggctcaccaatggctggccacctttgtgctgtattctcagttggtgaaaagcaggcagagaggaagcaagctctcctgtcttttcttatgaragtccaaacccctctccattagggaggacttaattacctcacaaaatccccatatccaaacaccatcacattgaggattaaggtttaggcatatgaactttggagaaacacaaaaatttagactatagcagtgatatgagggaaaacattaaaagatttgacaaatgatgactaagaatgaggtgatacagacacccctaaaagttgtgcaat

SEQ ID NO: 330004 - DNA, 542 bp, Homo sapiens
gctacattttgagtttcttgaacatgccaagtatgcttctacctcagggcctttgcacttcttattcctctgtttgatagtctgtcaccccgaaatccacggggctcacctcctgtctccattcaagtctcttgtatcacttcatcagagtagctttccctgaccactccatataaaattgcaccccatcacttcattttatattgcttactcttttcacaattcttrtcatcatgacatatcatacgttcatatgtttattatctgactctcttattagaatcaaagctccacaaaagaaagaactttgttttattcactgttgaatctacaagtggaagagttcctggcaacaaatgggaagagataaatgggattcaggaaagatttcacaaaggtgattatacccccagagagtttagaaggatgcaagagattatcataaaaagataagggagctgggaatagctggcagaagtgtgttcaaaggtaagaaagattaaaaccacatggtttgtttaaataatgtgagatattggttg

SEQ ID NO: 330005 - DNA, 579 bp, Homo sapiens
gagcgcggcgtgcgcgtgcccccagtccccgcggcggtctcccgcctggcccacgcccaccatgcgcatccacccctgtggcggccgggccgggytggggggctgtgaccggtcctggcccccggcttcgctgtgctttccccgaggcgtctcgatcgcctagctgctgcgctctttacccttgtttttttctgtcgattctgaggtggtggtttttggtgtctgtttttgccctgtggccttagggtgcccttcctgtcccttctttcagaaacagtcattctgtaataatagctaaataaagttaatgctgtacaactaacgtcttgtttcttgatggtcagtttgtatggaatgcacctgcaagggtacctccttgtctgaaagtcgtgctttaaaaataattaattaagagagagagagagaaagatggcccataaagaaaactctgaatgtctcctgtattaaggtgaagttattcttttttaagagactaccgtttaacctacatcatggaggtatctcatgacccttcggcttatagttttcagtgtcatctcatgtatttgtttttctcaa

SEQ ID NO: 330006 - DNA, 579 bp, Homo sapiens
gagcgcggcgtgcgcgtgcccccagtccccgcggcggtctcccgcctggcccacgcccaccatgcgcatccacccctgtggcggccgggccgggctggggggctgtgaccggtcctggcccccggcttcgctgtgctttccccgaggcgtctcgatcgcctagctgctgcgctctttacccttgtttttttctgtcgattctgaggtggtgktttttggtgtctgtttttgccctgtggccttagggtgcccttcctgtcccttctttcagaaacagtcattctgtaataatagctaaataaagttaatgctgtacaactaacgtcttgtttcttgatggtcagtttgtatggaatgcacctgcaagggtacctccttgtctgaaagtcgtgctttaaaaataattaattaagagagagagagagaaagatggcccataaagaaaactctgaatgtctcctgtattaaggtgaagttattcttttttaagagactaccgtttaacctacatcatggaggtatctcatgacccttcggcttatagttttcagtgtcatctcatgtatttgtttttctcaa

SEQ ID NO: 330007 - DNA, 535 bp, Homo sapiens
tcacaaatcaccaccaaaaaaacttactcatgtaaccaaataccacctgtaccccaataacttatagaaaaataaaaagtaaaaataaaatamcccctttgtgtccataagtaagtattttggaagtgcagccatgcccattcattcacaagttgtctgcaaaaggtttctcatgctcaactgcagatttgagtctttgagacagagaccagttggcaaatctgaaaatactgaccactgcgcctttatggggacagtttccagcccctgttttgagggttgtctggtgagattccaggctctgtgtcaaatatttccccactcagggcctgctgtggtctccactggtgtgtctggaaagtgggggtgccatgaagctttctgtggggttgttgagttctgctgagacccattttcagttgcctgcctagggtcatctgactcacccacagaggtcccagagcctgagcagggcctgcagaagcaattcgcatttggcagcaggaacaccatggaactgatggggtaacctgcc

SEQ ID NO: 330008 - DNA, 419 bp, Homo sapiens
ctcgtagacttgtgtaaagtaaaaacaacacaaaagtgttttctttgatattcctacaagtatatgactggtgactgtgcacctaagttgctattatggactaacggatgccagattcctctgggaagggattgtgggacacttaattgagaacgctttaaaacattttccagggagtcctcatatttgggtctggatcttgggccttccctggtcttttgggtctctttcaagactccactgtgcccactttcaccccagactaaccctgcccatggttgttggcatggtgcatgtgctctttgccaaatgarataaagtagcttaactcatcaaacagctcctcatggatcccctgcatggagctctgcaaagagagtgcctggaagcctggccaagaggtgtcagtggcatgcctg

SEQ ID NO: 330009 - DNA, 580 bp, Homo sapiens
caagactccttgcactctcatgggcaactccagaccccagcatgctgctgcggatgtctgagtacccatggagctttgtgagtgtggtgggcatggggagatgccccagaaatgcttctcacactgcaggaggcgaacgttggagcttctaactcatcaggttaatttccaaacacatgcaacactcccaatggggaggggccagggcacaggaatctgtggctatttaacttcatatctcaaggttcctataaaaacagatcttcagataaaatggggaggaaaggaccagcaaaggcaactatacaaagggtgacttaggttgaagctrtaacttctccatagtccagagtccttaagaccttaacagtggccaattatttcaaaggccaaatgtttgtcccttaaaaagggactgaaactggcagatagcttctaaaaagctataaagatatttattgtactgtgtcattctaatagtacacttgtaagaggtttgccaaaaaacaatcagaaaaatgcttttcagtttatccaggaggttattacaacaataacacatcaagacctacccatgaat

SEQ ID NO: 330010 - DNA, 623 bp, Homo sapiens
ggtgcaatgccggctcactgcaacctccacctcccaagttcaagtgattctcctgcctcagcttccctagtagctgggattacaagcacacaccaccatgccctgctaattttttgtatttttagtagagacagggttttgccatgttggccaggctggtctcaaacacttgacctcaggtgatctgcctgcctcagcctcccaaagtgctgggattayaggtgtgagggattacaccacgcccatcctcgccttttcacttctctatattccactttagatggtagggttagggacaacgagaaccttattttatcttgttaattacgcagaacattactttatcttgttaatcaccacatctctggaccagcaaaggtgttattccaggtaccaatagattgcctctcaattccagatctaccctctttttgtcttgccttgtgaaactcaagctagactccataaatatttctcctttgatagctggtcaatgttaggctttgtcaagagaggacttttcaagacactgggaaggaaggaaattcttttcctagttctcatatgcttttttctttcctatgacatggaaactggtgccatgtggaaggcccagtgacact

SEQ ID NO: 330011 - DNA, 623 bp, Homo sapiens
ggtgcaatgccggctcactgcaacctccacctcccaagttcaagtgattctcctgcctcagcttccctagtagctgggattacaagcacacaccaccatgccctgctaattttttgtatttttagtagagacagggttttgccatgttggccaggctggtctcaaacacttgacctcaggtgatctgcctgcctcagcctcccaaagtgctgggattacaggtgtgagggattacaccaygcccatcctcgccttttcacttctctatattccactttagatggtagggttagggacaacgagaaccttattttatcttgttaattacgcagaacattactttatcttgttaatcaccacatctctggaccagcaaaggtgttattccaggtaccaatagattgcctctcaattccagatctaccctctttttgtcttgccttgtgaaactcaagctagactccataaatatttctcctttgatagctggtcaatgttaggctttgtcaagagaggacttttcaagacactgggaaggaaggaaattcttttcctagttctcatatgcttttttctttcctatgacatggaaactggtgccatgtggaaggcccagtgacact

SEQ ID NO: 330012 - DNA, 575 bp, Homo sapiens
tacatggctctgtggatttgaccacagctctgtttctccttggggcaacagtgccaccagggtattgattggtgtagaaccagactgtcttctttcaactactgccttccacttgatgtttaaaacttacaatgctgaatggctcgtgattagactccctctttatcctgaatcctctcatatggggtgtaaggtgcccctccatctttcagatgtgtgtgtgtgtgtgtgtgtgtgtgtgtgtgtgtgtacacaggcatacatataccacatgcatacatataccacaccacataccacacgcatacatatacacactgcccttggggacagggttcagatcacgcctgtctcccatcccaccccaaccaagagcctcctcaggctgtcaatgagctcatgcagatagacaagaggagggctagtgcccactcsacaaactggatctatcttaatttcatcaccagcccaaatagggccctggaaatcagtaccatgagttaaaaacaagcttgtttcaaatgctgtgtggaaaccctgataaatctgatattttctgtactatttaccaaaga

SEQ ID NO: 330013 - DNA, 592 bp, Homo sapiens
tgggataaagcaaaagcaatgctaagtggaaagtttatagtactaaatgcctacttcaaaaagtctgaaagattacaaattggcaacctaaagccatacctcaaggaaccagggaaataagaaccaactaatcccaagctagcagaagaaaagaaataacaaagatcagagcagaactaaatgaaattgaaattaaaaaaatacaaaagatcaatgaaacaaaaagctggttctttgaaaaaataagcaaaattgacagaccattagttagattaaccaagaagacagacaactcaaataagctcaactacaaatgaaactagagacactacaaccaacatcacagaaatacaaaagatcatttaagactactatgaacacttctatgcatacaaactagaaaacctagagaaaatgaayaaattcctggaaacatacaatctccctagattaaatcagtaagaaatagaaaacctgcacagaccaataacaagcagtgagattgaattagtaatttttaaaatgctaacaaaagcccagggccagacagattcacagctgaattctaccagacatttaaagaattggtgtc

SEQ ID NO: 330014 - DNA, 589 bp, Homo sapiens
tcttgttaaccatgctcaattgtattttatgtaaaatttgtattttatataaataacattattaaatgaggtattataygaagaagtgaataaaaatcataagataattcaagaaaataacagtgaaaaatatataagtagcaaaactagaaggaaaaacaaaataaatactgggtactcataacctcaatagcattactgcaaaaggagaaagggacaaagaaaaaggactgatagtgaattggaagaataaaaatgtaggattgtacagccaaaggagacatttaaatatttctaagaaggttatcaaatgtcaaaattataatttataactgaaatattaaaaacataataaaatgaaaatgtgccagttcagaataactccaaagacccagaacttgaaacaaattaatctaggcctggaataatcagcagatagatcaattatttagaacccagttcagttcagtatttgccagtcttctgacatcacctaaagtcaaaggcactgtgacagacacgcatagaagagaaggaagggattttgactaaaaggtttgttgaaccagtatactacaggattttttag

SEQ ID NO: 330015 - DNA, 553 bp, Homo sapiens
ggctgcacaacaattaaaaccraacctaaaccattagagtgacactgaggaacaccaaagacaaacaaacattcagagaaaattcaaattacctataaagatgtattgacacatcctaaattgccccacgataagactcatcttcgcttaatctcctccctttgtgcataggctgaatttgtgacttccttctagtcaatagattatgacaaagatgatgagtgatgggaatatgacaaagggaattgtgatcacttttttgataaggttacatttcataagactcagtcttaccaaattggaatgagagactctcctttgctggctctgaagaagtagagtggcatttgaaagagcctgtgaaagagtcacatggcaattgcaggggcctgtgggagctgatagcagcctctgactgatagacagcaaagaagcagacttcagtcctacaatcctacattcacgaggagaattgtagtcccagaagccctacaaacacaaggagctgaattctgttaacctcttgaggttaaaaaagaacatactctggaaa

SEQ ID NO: 330016 - DNA, 553 bp, Homo sapiens
ggctgcacaacaattaaaaccgaacctaaaccattagagtgacactgaggaacacyaaagacaaacaaacattcagagaaaattcaaattacctataaagatgtattgacacatcctaaattgccccacgataagactcatcttcgcttaatctcctccctttgtgcataggctgaatttgtgacttccttctagtcaatagattatgacaaagatgatgagtgatgggaatatgacaaagggaattgtgatcacttttttgataaggttacatttcataagactcagtcttaccaaattggaatgagagactctcctttgctggctctgaagaagtagagtggcatttgaaagagcctgtgaaagagtcacatggcaattgcaggggcctgtgggagctgatagcagcctctgactgatagacagcaaagaagcagacttcagtcctacaatcctacattcacgaggagaattgtagtcccagaagccctacaaacacaaggagctgaattctgttaacctcttgaggttaaaaaagaacatactctggaaa

SEQ ID NO: 330017 - DNA, 548 bp, Homo sapiens
cacaacaattaaaaccgaacctaaaccattagagtgacactgaggaacaccaaagacaaacaaacattcagagaaaattcaaattacctataaagatgtattgacacatcctaaattgccccacgataagactcatcttcgcttaatctcctccctttgtgcataggctgaatttgtgacttccttctagtcaatagattatgacaaagatgatgagtgatgggaatatgacaaagggaattgtgatcacttttttgataaggttacatttcataagactcagtcttaccaaattggaatgagagactctcctttgctggctctgamgaagtagagtggcatttgaaagagcctgtgaaagagtcacatggcaattgcaggggcctgtgggagctgatagcagcctctgactgatagacagcaaagaagcagacttcagtcctacaatcctacattcacgaggagaattgtagtcccagaagccctacaaacacaaggagctgaattctgttaacctcttgaggttaaaaaagaacatactctggaaa

SEQ ID NO: 330018 - DNA, 553 bp, Homo sapiens
ggctgcacaacaattaaaaccgaacctaaaccattagagtgacactgaggaacaccaaagacaaacaaacattcagagaaaattcaaattacctataaagatgtattgacacatcctaaattgccccacgataagactcatcttcgcttaatctcctccctttgtgcataggctgaatttgtgacttccttctagtcaatagattatgacaaagatgatgagtgatgggaatatgacaaagggaattgtgatcacttttttgataaggttacatttcataagactcagtcttaccaaattggaatgagagactctcctttgctggctctgaagaagtagagtggcatttgaaagagcctgtgaaagagtcacatggcaattgcaggggcctgtgggagctgatagcagcctctgrctgatagacagcaaagaagcagacttcagtcctacaatcctacattcacgaggagaattgtagtcccagaagccctacaaacacaaggagctgaattctgttaacctcttgaggttaaaaaagaacatactctggaaa

SEQ ID NO: 330019 - DNA, 548 bp, Homo sapiens
cacaacaattaaaaccgaacctaaaccattagagtgacactgaggaacaccaaagacaaacaaacattcagagaaaattcaaattacctataaagatgtattgacacatcctaaattgccccacgataagactcatcttcgcttaatctcctccctttgtgcataggctgaatttgtgacttccttctagtcaatagattatgacaaagatgatgagtgatgggaatatgacaaagggaattgtgatcacttttttgataaggttacatttcataagactcagtcttaccaaattggaatgagagactctcctttgctggctctgaagaagtagagtggcatttgaaagagcctgtgaaagagtcacatggcaattgcaggggcctgtgggagctgatagcagcctctgactgatagacagcaaagaagcagacttcagtcctacaatcctacattcacgaggagaattgyagtcccagaagccctacaaacacaaggagctgaattctgttaacctcttgaggttaaaaaagaacatactctggaaa

SEQ ID NO: 330020 - DNA, 553 bp, Homo sapiens
ggctgcacaacaattaaaaccgaacctaaaccattagagtgacactgaggaacaccaaagacaaacaaacattcagagaaaattcaaattacctataaagatgtattgacacatcctaaattgccccacgataagactcatcttcgcttaatctcctccctttgtgcataggctgaatttgtgacttccttctagtcaatagattatgacaaagatgatgagtgatgggaatatgacaaagggaattgtgatcacttttttgataaggttacatttcataagactcagtcttaccaaattggaatgagagactctcctttgctggctctgaagaagtagagtggcatttgaaagagcctgtgaaagagtcacatggcaattgcaggggcctgtgggagctgatagcagcctctgactgatagacagcaaagaagcagacttcagtcctacaatcctacattcacgaggagaattgtagtcccagaagccctrcaaacacaaggagctgaattctgttaacctcttgaggttaaaaaagaacatactctggaaa

SEQ ID NO: 330021 - DNA, 505 bp, Homo sapiens
tttgatgacagtctactggattctccactaagccttgttcttgttaaaatcaatgtcttttttggggaggatggaaatggagtcttgctctgtcgcccaggctggagtgcagtrgcgcaaactcagctcactgcaacctccacctcctgggttcaagcaattctcctgcctcagcctcccgagtagctgggactacaggcacacgccaccacgcttcgctaattttttgtattttagtagagatggggtttcaccatgttgcccaggctggtctcgaactcctgagctcagacaatctgcctgccttggcctccccaagtgctagaattacaggcataagccacggcgcccagcctaaaatcaatgtcactgacattatagataatgtgtaactcaaatttgaagacagcaaacagtttgaaaagatagccaataacctggaaaacaggataaagactcaaatattggagatttatacctgagtacactaaataagaataaaata

SEQ ID NO: 330022 - DNA, 550 bp, Homo sapiens
acaagagacccttaaaggcttgctatacataagtcttactatataagttttcattcattagaagacttatttgggtacttgggaaggttttttctgtcagtcagatacaagaaatactttaaaaattggcttttaattgtatgaatgcagtttaaagtgtttatgggatgttaaytgactaaatttgaaaatgagattatacactcaaagggtcccttgaaattttctgcatgtataaatagaaaaaataattaaattgaccttaaaagcttaagaactatggccaggtgcagtgacttatgcctgtaatcccagcactttgggaggccaaggtgagaggatcacttgagtccaggggttcaagactgcctgggcaatacagcgatacctcgtctctatatataataatgctttttaaaaaaattagctgaacatgatggtgcgtgcctgtagtcccagctacctgagaggttgagatgggaggattgcttgagcctgggaggtggagactgcaatgctataattgcaccactccactccagcctgggca

SEQ ID NO: 330023 - DNA, 532 bp, Homo sapiens
gagtctgaattggcatatgttatgagtgttagattttgatgacttagtacaaataaagtgtacaacatattattaacactttttcatactggttacatatgaaaatgatatttttagtatattggattaaataaaatacagaaatcaatttcatctatctcttttcatccttctaatgcaggtcatagagaacattaaaytatatatgatgtttatgatatttctattagacaatgttattctaggttgttatagtgataatattttctctttttccttaaaataattatgatgtatcctcacagcagttttaagattttatttcttagtgaaattaagtagttttaagaatttatttaattctaccaaattctgaccttatttttactgttcagtctgctcttagctaattcctttttctttgtagataattcagctttctttttctctctgactgctttaaaaaccttctccttgtttatggtgtcctgtatttccaatcccattaatctacgtgtagaattttttttaa

SEQ ID NO: 330024 - DNA, 575 bp, Homo sapiens
ggttccttgaactttctgcacaggacatgtttattcctttttgactttttttgagacaaaatctcacttgatgcccaggctgggtgtagtgcagtggagcaattacagctcactgcagcctcaacctcccgggctcaggtgatcctcccacctcagcctcctaactgggactacaggcacacactggcatgaccggctaatttttcgtatttttttgtagggatgaggcttcgttatattgtccagcctggcctttttgacgtttatcaaaatgtgtgagcaatttccagtgctactgacaacacaggagcccataaaggggaaaaagccattcaggctagaagttcactacattgaatcctttaacctattaagaastatgtattgtaagacaaagagtgtactgtaagttatgttaactagctaagtcatcctttaggaaggtgaaaccatttgctaagatccctaccccacgtgctgaccaaggatttccatttccatgacaaatggccaccctctcttatctccttggatgaagatccctggctacagcttctatcacccttggatctggt

SEQ ID NO: 330025 - DNA, 541 bp, Homo sapiens
ttattgctgcgtttttcatcgcagcccatcagcaagtgagtaaacaagttcaccacagtctgggttttgggttctttttttttttttggagacagagtctctgttgtcgaagctggagtatagtggcatgatcatgactcactgcagcctcgacctccgcaggctcaggtgattctcccaccttagcctcccgagtagctgggactacaggcgtaagccattacactcggctagtttttatatttttttgtagagacaaagtttcaccatattgcccagggctggttttaaccttctggactcaagtgatctgcccacctcggcctcccaaagtgctgggattacaggcatgagccactgcgctcggcagtgtgggcatttttaagcagatgtgaccaaactgccgccttggtcattaaaatatactaatgttgctaaaaattycaggaaaccagctatagtcctggagatctgaatgcatacagtgctcccagaggccatacccccacctcaccatcaagaaggcaaagggttgacgctc

SEQ ID NO: 330026 - DNA, 564 bp, Homo sapiens
taaatcatctagggctcaaaatgtagagaaaattttggtctatccatcgctctatccacagtttctcttgatatcaatttctctcattccaaaatgaacctaagagacttakacaaatgcatacacacaaacacatacacacattcgtttctatggaaaaactggaagatgatatatataggtatatagataagcatagaaataagatgggaagactatacaccaagatgttaactaatgcaatctccccagggtgggattctagattattcttattttcttcttgtttctgcaatgaatgtgtatcatattttaaacaagagaataagttactatataatgaataatttttaaaaataatttcttatagaatcttataaaatgagaaatagcaatgtgttcaaagttacatatatccactcaataaaacaaaaaaaattttaaaagagaaaataagaataggaaaggtaaaccgagaagaaggctgagtttagccataaagaggcaggctgagaagtgtggtaacttggtgaaggtggggcctcaaatgtgttgttgatggtg

SEQ ID NO: 330027 - DNA, 527 bp, Homo sapiens
agggtatgatcacagacactggatgctggggggaactggggacatcttggtayataaagagtcactagggaggttggggccagcagctggagggcagcagaatttgatttacccatccagaacacttaatactggagcctggggagctcaaagtttgaaatagatggtttgaagcccaacaaaaggaagtgctactttgcagatagtgagtaaaggaaagttctcatcttgaagaggtcaaggtgtttgcacataagtccgtcatttcatcaagtctttaccaaaaccttaggaagtttgtgtcatccccatttcacagctgagattctgaagctcagcagaatgaagaaaactgcctaacatctgagtagaaaatacaggagcagacttaaaaccctagccttactgagctttccacatagtctctagcttcttctgattctccctcccacctcctctcctcacccacaactcattagctggaaagaaaatgtagacgtcctagtctcactgaatgaatatgctgt

SEQ ID NO: 330028 - DNA, 514 bp, Homo sapiens
ataaatgttgatgaagagctgggccctggtccgtggtggtcactcagccatgcaggagcaacacctttgcccaggtaactctgtctgtacctagaagggaaatggtaacctcttgagggactcaaatgagaattcagaaaatcactctgatgtttttaccatcactgtcatatcttcctttatgggcaattttactgaaagccaagtcaactttatcactaaggtggtccatgaaagtatggaaggtttacttcaagcttttctttgggggaagtgtaaaaatttcccctttcccatgaagtgacatgagagccttttgttatttccagtgaaaacggaaggtcaggagattgggagaccttggtgaagtatcctaacatacatgatggagaactcctcaaacttcacgaattttaagaaccattagattgttttcttctgttctttgaacttgmatttgcattgactcagctcaggcatttaaacagatttagaaagacttccaaacatgtaa

SEQ ID NO: 330029 - DNA, 571 bp, Homo sapiens
ttgttaatccaaaaatatagaaggcctctgcttagccttctcataatgtgcccattcactttgctgacacaggctcaaaaacctatttttccgtcttggaaaatgatgaaaaagtttgcatggattttactgtggatcctggtccacaagagatgcagacagcagggggacggtggcaggtggcctcagtgcaagcctcgtcataacttgctggcttgtttcactgtgctgcttcttcattgcccccacaatgctttcatgcctctgtgagagaaaaccaccctccctgagtcacggaaacaaggcctgggaatgcttttgtgtggtcttatctgcttcagtctcccccttactacctgtagcttaaacatgacaggaacaacccaataaaattagcttcgtgggatgagacaggaagaaaaatgtcaagaaggcagtccctctccccaccttcttctcaatctgggtgaacacaccccrgcttcaggagtttttagcccactagacaaaatgctcttgggctcttactagtttaatgaacagaacaaactcttggggacaaaaaaggaca

SEQ ID NO: 330030 - DNA, 571 bp, Homo sapiens
ttgttaatccaaaaatatagaaggcctctgcttagccttctcataatgtgcccattcactttgctgacacaggctcaaaaacctatttttccgtcttggaaaatgatgaaaaagtttgcatggattttactgtggatcctggtccacaagagatgcagacagcagggggacggtggcaggtggcctcagtgcaagcctcgtcataacttgctggcttgtttcactgtgctgcttcttcattgcccccacaatgctttcatgcctctgtgagagaaaaccaccctccctgagtcacggaaacaaggcctgggaatgcttttgtgtggtcttatctgcttcagtctcccccttactacctgtagcttaaacatgacaggaacaacccaataaaattagcttcgtgggatgagacaggaagaaaaatgtcaagaaggcagtccctctccccaccttcttctcaatctgggtgaacacaccccggcttcaggagtttttagcccactagacaaaatgctcttgggctcttactrgtttaatgaacagaacaaactcttggggacaaaaaaggaca

SEQ ID NO: 330031 - DNA, 397 bp, Homo sapiens
taaggtttgggtcatttttgtcatgtgccttttagaccagtcaggtggaacacttaactatgttaaatcattttttcaagagttatgactaaacgattggcaaaggagctggagttggaggtaaacactgaagaaatgtggtcaaaggcaatttgaagttgacctggtggtctaaagtgcaatgaccaaactattcagctctcaatgattgatgtgtggacttcacacaaaagcaaatgtggaaattgtgattccaatctcaacacaaatccagtcagttgcyagtctaacctgttgggttatttttaagttttaaaacattgttgataattaaaaccacaatgggctgccaggtcaaacccatgagaatggccaagataagagaactgtacaatac

SEQ ID NO: 330032 - DNA, 524 bp, Homo sapiens
ctgccagtgagagagagccctcagacaagcagctgagtctgagaacaccattatggtggatgccacagcrgggagggtagggcaccgacaacattcactccccggcctaagtcctccttccccttcaagtcttaacctcagtgtgactttctctgggtaagcttccttgactccgccactctgacttaggcagcccttgactggattctcatagcaacactctgagtcacggcacttgcctgatcacattgtagcttcccctctaaataataagttcctctcgggagggagtcgtacctaactcacgttcatatcaccagtgtagtccctggcacgttaaagaaactcagtagattgatacattccacaaatatttattgaggacttaccatatgccagaaactattctagaagccaggggctagagcagtgagcaatatattctactcagggaccttataatggacagaggtaggaaaaacccatatacccaaattgacataatatgttcaggtgttagtaaa

SEQ ID NO: 330033 - DNA, 624 bp, Homo sapiens
actttcagttcagttatttctacttcacaatcctgggaggcaggctgagcaagggacaccaaagctgagggcagtaaaacgatttggggaagccacacacagcacacgccagagccagaacttgaacccgcatctgtgaattctataatcattccactccacaccacattgattaaaacggctcttaattttttatgtagaagagaccaaatcttcagaaacccaattactacctatttagttatgaaaagtcatttatcctttgctttttagcatttcttaggaggtagggaaggtgaggatatattaaacacagtttcttctttctgaggtttctcattgtttttagcaactaaaaccatgggattttagactaagatcttagacatcatttgcccagagcatttcaaactgtttgtggcagcagaatccctttttttccccaaataccatctttgtatatacaaccaatatattgacacagataaaagcagacccttctgatggagggggctgaggcactgccacagaacccgttttctgaaaaccactgtgttcatcaaagygtttattaaacagctggaggaactgaggtccagagaggtgaggacacaagggaagtac

SEQ ID NO: 330034 - DNA, 600 bp, Homo sapiens
acccgttttctgaaaaccactgtgttcatcaaagcgtttattaaacagctggaggaactgaggtccagagaggtgaggacacaagggaagtactcatgcaagataatagmagacctggaatacacctacagtaatcttgaccctctgccccatgctctttccacagcatcatggtccctaatgaaatcaacctagactatgatgcagttaaagagccaaatagaggtgagagtgtttgtgcaaaattaccagcaacaatacaggaatgtatggtcataaggcaggacagcctagtgtacaaagcaagaggtgagattcagaggcaagagacttaagaaaaagatttgtctctgtcctacaggctcttcatttccattccctggggcccagattcctcatttgaaaatggtgttgatatctcacagaattgtattaagaaccaaacaagaatcaaggaatgtgccctttcaaaagtattttatcacactgcattgcaattgcttgtctgtttctgtcactggactctcagcattattccgagataatgtcaatgttttactatctattcatcctcagtctagagttgctgctcaaatagca

SEQ ID NO: 330035 - DNA, 557 bp, Homo sapiens
ttaaaaagccttctaggcaaaagaacgtctttctgcatcagtgaatagcagtgctcatcagaatttcctaataacacaaaaacaaaggcaagtctgtacatttgatcagatgtcaaagaaatgggaggtagactattatctcagccttagtcagagctcctgctggcttcttcctacatactgttcaccratttgagtaaagtggactttgtgagagaatagtgtttgatggctaggatgtcttttgggcatttcttcctaagtggaatacacaacatataagcgagtaggggaaataatagagggaagctactctttccagctcagaaggagttggtgatgccaatatatgcattagagaagcccatgggatcctctagctgtggatagtggctaatacggtcatccagaattgacactgtggactgcagcagcattttcctgtacagctccaaaaactctgggtagggatttacaggatccaatggcccatagataacaatgaatggagatagtttcagaggcaagagctcccacctagtgctttctaaactgcc

SEQ ID NO: 330036 - DNA, 636 bp, Homo sapiens
ctgcacagataaagccaattcactgagatagcagtgttgcagtagagaaacagtttaatagtcaccagaccagccaagtggaagaatgggagatgttgctcaaatccacctcctcaaaagcttgtaggctagggtttaaaggataatttggcaggcagggggctaggaaatgggtgctggtgattggttggggatgaaatcataggagggtccaaactgtcttcacgtgctcagtcagtttctgggtgggagtcagttccttggtatgagccacgggtctgggtggagtcagttggtaggcagaatgcaaaggtccaaaaatatcttgcatccaatcttaggttttggcaataatgatgttatctgtaagagcaattaggaaagttacaaatcttatgacctccagaacaatggatagttgtcattcaactacacctacattttaacaaaattcaggcccctcccataatcctaacctcatgaactttcactggtcttacaaaggcagtcttagtccctgagcaaggagggrgttagttccgggaagggactgttgctattttgttttaaagtaaacaaaggcagttagcttgtgagacagaattagaacccagtctcctgctatgaaggttgatt

SEQ ID NO: 330037 - DNA, 555 bp, Homo sapiens
tgtcctccaaaaatgttacatttaagtcctaatcttagtatctcagaatgtggccttatttggagataggattgttgcagaggtaatcaaattaaaatgaggtcgttaaggtggccctaatctactatgacttgtgtccttataaaaagggrtaatttggacacagaggcatgcccagagggaggactatgtgaagaggcatagggagaatgccatgtgaagattggagctttgctgcaacaagccaaggaactccgggggctagaagaagctgcaagagacaaggaaggaacttctcctttcaagtttcagagggagggagcaagaccctgctaacatcttgattttgggtttaaaaaagcgtctaaaagtacatttctggcaatacatttctgttgttctaagccacccaatttgtggcactttgtcatggcagccctaagaaactaatacattatttatttagttttaaattcactgtgttttatcaatttccaaaagtatgacatgatttgtttccaaatgtattttttattatagggtgtcttgttcttg

SEQ ID NO: 330038 - DNA, 572 bp, Homo sapiens
aacagggtgattacagtcaacaataacttatcgtacatgttaaagtaaccaaaagtataattagaatgtttataacacaataaatgataaatgcttgaggtgacggataccccacttaccctgatatgattatgcattgtatgcctgtaacaaaatatcttacataccccataaatacatacgcctactatgtacacataaaaaacaaagtaaaaaatataattcccaatgtaagttgaaaaaacatatcttagatgtcttttgctgtcatggataaaagtccattttcctcctacaattaaacatttatattttaaaaagtcatagtgcagccccagcttatgcaaagatacaagtgagtgtctggaagtgcaagtgacaatattgaaaatatatggagcctcactccrtaagaggtacttttctaccagtcctgcaggtattaacctctggattcctcacaacccagtgcagtaggcacaattaccaccaccccaactttacagataaatgaaggcagaagaggataaagctccccaaagccattcagtcctacagataaccaggccaca

SEQ ID NO: 330039 - DNA, 515 bp, Homo sapiens
ttcattatgtattctttccatgtctgtgaatgtttaaaaatgctcctattaaaaacttaaaataatcagccacatatcttctattttcaccttgaacaatttgattcatagacttgtagggctgccaaatactgtgaaggccatttagtccctatccttgtactctgctgaagaggaaactgaagatacgatagtaaaggacttccaaaagttaattgtaacagagctgatgcaagaagccaaccatcataagggacttaattttttatggctgtggctatttcagggatggcacctttggtgttatttcaaatgtgtgagtgaatagctgggaaagcactctagtcaacrttgcagccctctggtgtaccacacaaaatgaggcagctgtcataataagtaaatttagaagtgaaagtgagcttaaatatccggataattgagggaaatggtttttaatgtagtctcgagttttcttctagttgattttaggatattagattgagatggtttat

SEQ ID NO: 330040 - DNA, 552 bp, Homo sapiens
actgactgaagagaaagcacgaatatctctatctgtgcttggacctcagcctataatcctgggtgtgaattttcaacagcctgcgaagtgtccatacctggttgcctctatggcacctaaactgaattcatcagaaactcaactcattcctttctccctgcaaacttgctcctcctcctgtgcacccagcacacacagtggcaccttcagcttctctgtcaccttggggttcatcttgtgaccaccttactctctgtttcccactctgccccatccccagatacagacacttcttttgtccattctgtggaccatgatgcaccacwgagggacctttgaaagctttggggaggcttcagagggtagagtggaggggaataagtggattcaaagttggagcctcccccacctttacatagaactgctgttttgtttgtttgtttgtttgttttgtttgtttgtttttaagtatctaggccaggggtggtagctcatgcctataatcccagcactttgggaggcctaagtggtagaatcacttgagcccagggt

SEQ ID NO: 330041 - DNA, 632 bp, Homo sapiens
  misc_feature (1)...(632): n = A,T,C or G
tggtatttcttgtaagaaggatctgcacagcaggagttaggattctatgactccattcaagcaaaacttccacattttgaatttcgcttccaggcagtcactctagagaataccaaaccaatgtcatccaagaggatggaactacttttacttgggtttaatgccttaagtttacttgacttctcctgagctcccaaagccctcctaactccctccagtcttctgtgcaatgaaaatcagaggctaagaatggaagccctgccttccaggccttcttccatcacattgtgcctgttcgtctgctgttgccatctgaatatttcctgtgacaacagcatatactatcagtattttattaagcaaaagcargtatgtttttcctctttgctctgttatttatttatcnaccatctggctggatcagaagatgaagtctggaaggaagtttttacttcttctttggctaatgagaatctggcagagagacagaatgagccagggcctagaggaaaatttctagaaccaggtagagggaattctacccatccctgatgtgactggtcagcctcccaaaggcaacctgcacggtcaacaggcggttaggagggctacatttgggatgatgggaagcc

SEQ ID NO: 330042 - DNA, 566 bp, Homo sapiens
caggctgattttaactatgtgacttgtaggatataaaagcccctcaagtcaatttgcgtcttggaattcctgagaccaaagcatcccacatgtattggttgttgataaatcaaagaggttgcagattctgtaagactgaaaaaggaaattggaagctatgtctagaaatctgagatttctctcatgttttcttcgtgcattctttttcctgctgtatcgtatccttcaccttcattaaagctttacgtgttgtgtatattcctttggaatctcataagtttttcacttagccaacactttgtaattgctkcacttagtcataatgtaccatacttgttatttatccttggatttggcttgctaatattttggttaggatttttgaatctttacttatgggaaagatttggctgtcattttcctttcttatgtttttatcatgccaggttttggtatcggatccttctggctttataaaaatagttgggatgttcctttttttattctttgaaatattttgtataagactggttttacttcttccttaaatattaagtagaacccac

SEQ ID NO: 330043 - DNA, 456 bp, Homo sapiens
attcaatccttcttcctttttaatgacaagtaagtaaagcctaaagcagtgaaatgtaacttttatttaatcatattgactttctaaaaatcaaagctgagttttcaaacttccttattgtgttaggttgggattttgctagtgttatattttctcttttaaaagtatttatgcatgggaaaaaacaatacataactggaaattgggcacaatttcaaatccatttccaaatatccaaatgttctgattttaacttagcaggttataatcaaatattgatcctatcattgataataaagaaccrccttaacaacaatagttttattaatgaatacacaaaatacaatatgaggaagtggtttaagtactataatttcttttacaaaatagatttctttatctaattttaattaaaaatgactaacttttataacagttaagttgatttttaaatgg

SEQ ID NO: 330044 - DNA, 651 bp, Homo sapiens
tatcaggaattctattgtgagaggagacataaattaggctttacttagtttattctgagtttctcttgggcagagttttggtgaaataatctttgaaaatttaaaaaacccttcacacgatggtagcataatcaagtttctccttcactacctcatttgacacccttctggggaaaaagaaattgctattttaggcaggaaacaaacacaagggaaagaagggatgttttgggtgacattggggacagataagaactccatgtgctttggtgaaatgtagctgctgggtgcaccaattctcaaccttccagcttcctctacttttccaccctttttgactctcccayctgcaaggtcagctgctctaaggagcaatttataaagttgcagctcatattgtgcttgcagttccagaactgacatgaaattaaatcagtcttgagtgctgcaggatacaaaagctaccttcctagtttactgagcccttcaagactcctaataaatcttggaaaggtagcattccaccagtgactgcccagtttctcccctcacaaaaagaccttgaaatggaaacaacgaaattttcttcgaagccatatttcatgccatggagagaaagacatacgtggaagccacattcttaagctccct

SEQ ID NO: 330045 - DNA, 278 bp, Homo sapiens
gcaaaattgaatcaattataaaaatttctaagaaaaagtacatcccagaggactacttggtttcactgytgaattctacaaaacttataaaaaactaacaccaattctcctcaaattattctaaaaaattgaagaggagggaattctctctagctcattctataaggccagtattactctaataccagaaccagacaaggacacaaggaaaaaagaaaactacaggttaatatccctgctgaacatggacataaaaatccttgacaaaatactagcaa

SEQ ID NO: 330046 - DNA, 505 bp, Homo sapiens
atatccctgctgaacatggacataaaaatccttgacaaaatactagcaaaccataactgagagcacatmaaaaagttgatacaccataatcaagtgggttttattccaggaatacaaggatagtttaatatatgcaaatcaataaacatgatacatcacatcaactaaatgaaggacaaaaagtatatcacatctcaacagatcagaaaaagcatttgatgaaattcaaccttcgtaataaaaatccaacaaatgaggcatagaaggaacatacctcaacataacaaaggccatatatgacaaaacccacagcaaatatcatactaagtgaggaaaagcagaaagcctttcctctatgaactgcaatgagacaaggaagcccaatttcatcactcctattcaacataatactgttaagtcctacccagaggagccaggccaaagaaagaattaaaggcatccgaattagaaaagatgaaatgaagttagccttgtatgcagataa

SEQ ID NO: 330047 - DNA, 505 bp, Homo sapiens
atatccctgctgaacatggacataaaaatccttgacaaaatactagcaaaccataactgagagcacatcaaaaagttgatacaccataatcaagtgggttttattccaggaatacaaggatagtttaatatatgcaaatcaataaacatsatacatcacatcaactaaatgaaggacaaaaagtatatcacatctcaacagatcagaaaaagcatttgatgaaattcaaccttcgtaataaaaatccaacaaatgaggcatagaaggaacatacctcaacataacaaaggccatatatgacaaaacccacagcaaatatcatactaagtgaggaaaagcagaaagcctttcctctatgaactgcaatgagacaaggaagcccaatttcatcactcctattcaacataatactgttaagtcctacccagaggagccaggccaaagaaagaattaaaggcatccgaattagaaaagatgaaatgaagttagccttgtatgcagataa

SEQ ID NO: 330048 - DNA, 568 bp, Homo sapiens
gtaaaaattttgatgacctttttgacttttgcagaaaatgaactgtggatgtgattttgcagaaaaatgagccaggaaaactttatgatcaatcaaggtaccacattaaagagtattcttatttattgcattatataaaattatgacaccaaaatatatctttgcaatttgtatgtttatgcttttactcatgttacccctattatgttatgtaattaataaaatattttaaaagaaaagtaaatttttaaaaattactttaacatggtaactatagttgttttaaattccccatctgattgttygaacatctatgtaatgtctttgtctggctctgttgactcctttatcaagttagactacttttttgcctttttgtatgcttcataaagcttttgttgatggttggacatatgcaaggtgacagatattgatatacatattgttatgtactatgtactcccccaaaattcatattttgaaactctaacccacaatgtgatagtattaggaggtggaactttgggaggtaattaggtttaaaggaagacatgagagtagagtactc

SEQ ID NO: 330049 - DNA, 568 bp, Homo sapiens
gtaaaaattttgatgacctttttgacttttgcagaaaatgaactgtggatgtgattttgcagaaaaatgagccaggaaaactttatgatcaatcaaggtaccacattaaagagtattcttatttattgcattatataaaattatgacaccaaaatatatctttgcaatttgtatgtttatgcttttactcatgttacccctattatgttatgtaattaataaaatattttaaaagaaaagtaaatttttaaaaattactttaacatggtaactatagttgttttaaattccccatctgattgttcgaacatctatgtaatgtctttgtctggctctgttgactcctttatcaagttagactacttttttgccttwttgtatgcttcataaagcttttgttgatggttggacatatgcaaggtgacagatattgatatacatattgttatgtactatgtactcccccaaaattcatattttgaaactctaacccacaatgtgatagtattaggaggtggaactttgggaggtaattaggtttaaaggaagacatgagagtagagtactc

SEQ ID NO: 330050 - DNA, 297 bp, Homo sapiens
gctcccttcccttcccctccaacccagctggtagttgggtatactcactgcatccagtttggcagcaacgtgccacgggttacagacccttatctccaatggtagtctgtaaagggttaacaacaggggctctgggggaagaccaggtttgtgacatttgctgatttcastgatctaagtataatcaccttacctgattttaagtacggttgtttgtttgcaacaaccggctggcaaaattcctgaaaatttcacagttgcctctggggagcctgtgccagtgggctccagtacact

SEQ ID NO: 330051 - DNA, 627 bp, Homo sapiens
cctgccgggtggcttcttcaatcccgtctccttcccaagctcccggctttttctaatcaggcaggcgtctgtcaaccctctccacttctgggctgaagcctccccaagccccgctgcgccaacctgtgtggggtcttcttcgggcctccctctccgccccgctcctgctcctacctgcagcacccccagctccgactccagactctctgcatcaggtctccccactccacgctccgggcgccccaactccaacaccacgtcctgccgcgcaggttcttccccgcgcggaggagcgcgcagggtgggcggcttaccatagcaagtgatcctgcgatagggaacgcgcccttgccccgaggctgcactaccacaggaaataacatatgtaaataaatttatttttttatgaataataaaacgcgctgtaaaaaccgtgtgccccttggaggtgtcaggatgtggtctttgttgccctttactaagagggtttggctgtagaagttaacttttaagggctgatctcctctggtcagggcggtgggtcattgcgggaggaatggtggcgatcacttttggatcactccatttccaaacgtyattctttattaatctctatgattctgctgc

SEQ ID NO: 330052 - DNA, 555 bp, Homo sapiens
ggggttggggtggggagagtgacttcctgttttgagttaaaccaaccaaaatgctaaagaactgctttctgacaagattgtcttgggcttttattcataacctgggacggaacccgccctggggatccagtctaacatcagtggtgtctgtggcattaggggctttctgacaagagggaacctgaagtaacctgtggcaggaaaccctaccaagcacttcagcggtgagtcctgggtagaaagcttcttgaggaagagtgtctgctgaaggccagatcttagtcaaggtgacttccaaaaagtccagcaaattaggctcttttcaaggaaaggaggcagctcagtgtaagtwggttaaagggaacctgagtgtctaaagaacccagcttgaaattcaagctttgccacaggattagtgagcatgtgcaagttacattatgaacacctctgagcctcagtttcctcttccgtagaatgggggtcatcacagtgcctacctggaatattgccttaggaataaatatgataatgtatttaaacaaatcatttaatatg

SEQ ID NO: 330053 - DNA, 510 bp, Homo sapiens
atgggggtcatcacagtgcctacctggaatattgccttaggaataaatatgataatgtatttaaacaaatcatttaatatgcaatgagcagtgcactaaatgctggtcactaaaggaaatccagaggcagagggaaccacttccgcaaagggggatactttaaacaggtgtgacattcgcagagtccagtctttaaggttggatcttgttttgagatgcctggattacaaccgtgaaagagaaatgtcccacaagagtggacaaacagaaatacagaaaaacagaaagaatagctatatttgyagtgaatacaaataagaacaagcatttgaataaacaaggaaatatttgggcaaatttccacaagtgaaagaataatatttaaaatatgtgtttctataattatattccttctggccaactcaggagtaaactcacagattttctgtctctaacccccaattaaggtgatgcttgtcactgactcacatgtacagggagtgttgcact

SEQ ID NO: 330054 - DNA, 635 bp, Homo sapiens
tggtcaaaattctacaaaaactcgggcccaatgaaaaagaaataaaaaattaaaaagaagctcttggtgttaaaaggcaggaatctgcttttctatctactttttaaagaaggggacagcagaatgtattacactagacttggggttcagatacatctgggttagacgtctaacactttatatactgtctacaagcactttttctagcctcaaaaaccctttactttgctcattttaaaataacgataatactcaacttgcagataaattgtgactatcatatgagaaaatatcacatgtgatatgtgcacacacaagactagccttgaaggcctcttgttctgaggaatatgggaacacagaaataaattttccagaaaagaaatcaacaaatacttgaagtcatgcaattacaaaaggagaaatgtcaaatgatcttcaaaatgacgaagtcatacgaccattgcctcaaacycacatgcttgtctgttagtttgtcttcactatataaatggaagggactgttgcaaaaacataagcaataagaatgaagagctttcattagtgacagcgattttatttatttatctttttgctgtctctgccttcttggttattggtctttttactaacag

SEQ ID NO: 330055 - DNA, 439 bp, Homo sapiens
agaaaaacctggaacctaatggcttcactgccaaattctatgaaacatttaaagaagaactagtatcaattctgctcaaactattcaaaaaaatagaggagaaggraatacttccaaacttcttctatgaggcgagtattaccctgataccaaacccagacaaagacacatcaaaaaaaaaaaaattacaggccaatatgtctgatgactattgatgcaaaaatcctcgaccaaatactagcaaaccaaattcaacaatacattagaaagatcattcaccatgaccaagtgggatttattgctgggatgcaaggataattcaacatatgcaaatcaaccaacgtgatacatcgtatcaagagaatgaaggataaacaccatgtgaccatttcaattgatgctgaaaaattcaacatcccttcatgatacaaatcataaa

SEQ ID NO: 330056 - DNA, 474 bp, Homo sapiens
aacttcactgctagcataaccagcatgtgagaaaaccagaacactaaacaaaactacaactaaggactcccacagagtccacttccctctcctgccacctttaccagatcaggtgctggtatccaaaactggaagatgtgaagacggatcacatcacaggactcttggcagacattccccagaaccagtctggagccccgtatctccacttggtgtctagacccagaggggcaataacactcactgcagtctggctctcaggaagccccatygctcggagaatggggagagcaccacatcaagggatcagcccgtgggacaaaataatctgaacagcagcctttgagtccctgatgtttccattgaagcagtctacccaaaaaagaagagaccagaaaagaaattctggtaatatgacaaaagaaggttctctaacaaccccccaaaatcacactagctctccagcaatggatc

SEQ ID NO: 330057 - DNA, 471 bp, Homo sapiens
ctgtctcctgttaattatgagtgcagatgggcttgtgttcatgtgttggtgagagttttcaatcatcaaatatttatttttgttaaatggaaaaaaaataatttgagagagtatctcgccctgtcaccagcacgtagtacagtgttacaatcatggctcactgcagtctcgacctcccagactcaagcaatactcacacctcagtctcccgagtagctcgggctacgtgtggtgctcccatgcctggctacgtttaaaaaattttttgtagcaatggggcctcactatatatcccactctggtcttgaactcctgggcttaagcaattctcctgctttgkcatcccagagtgctgggattacaggcatgagctactgggcctggcccatcaaatatttaggtagtacctttcatgagttgctagacactagggatatccctatgaacaagacacagcctccgccttcatta

SEQ ID NO: 330058 - DNA, 593 bp, Homo sapiens
gtaactaaggtagacaagagtgatttaacaacatggaaacaaatactaaactgagagaatgatacattttatatcttacatatgttcagaaggaaaacatatactataggggcaggagaggctctggtgagaaaccagaaatttatggctagatagaattagctggggggaagctgttagctcagttctactcartctgatgaaattagctcatttcactcatccatttattttctggtacttagttcctgcctttgctgagccagcatcttgcatgctgcaccagaaagaaaagtcagtgactgctcttggggagctcaaagtccagtaagctctatgagacaagggatctgtcaaggtctccactgtatgcccagtgcttagtatagagcagggtacataataggtaaacaaaacagtcacagaatgaatgaagacagggagaatatattgtagggcttgaaaactagctctgagaactggatatagtcaggaaataggtttcactggacaggataatattgttttggtttttaatttgcaagtgttcagatgggtgttctctccaatttacattgacccccatcaaaacc

SEQ ID NO: 330059 - DNA, 561 bp, Homo sapiens
tgttccccatgctaaatcaatttcatcttatagaatgcactttaatggctacaagatcaacagtattttccaaaaggatgtgacaatccatatttatgaataattaaaattagtctcaggccctttcaaccctaaattaacttcctctcaactgaaactgttaaagcttcattattgaagcttaagattttactttttattattgagaaaacacttcaataaaaagcaaatttagtcatttatacctcagtatcaataaacttcaaagatcttttcctaagcaaggtttgaaaggtagggagcagagaaagtttctaaaagaaaacgattttcacatattggcacgtataaaggaatgcctcacrggtgggtgagtagctttaaggggtcaatagaaatggtgctgaaaaggaaggggaagggcactggagccatgtgcctttgtattgatttttttgaaatatctagccctcaaattaataataatgaaattgggcatcaataattcattaaatcatgagactattgagctaaaagtggttctgtgacatcaagccaatc

SEQ ID NO: 330060 - DNA, 579 bp, Homo sapiens
tcagagaaatgaagtgttctgaatggccaggtcttagtcagcagacttcccaacagccttgggagagggccagccccacttttgccacgtggaatgagagtggctgctcccagatggaagcctagtactgttcccatcgtaataagtggagggtaaatgctacaaagaagaaaacaagccttcaaaggggaggaagaaagaaatacatattccttatttatacaacataaaccatgcttatgacctgatattatcttgattatctaaatcagtggtgtaatttaatatttataggaaattacattaaacaaatttataatcttcmtctcctctacatccattctgctctcccctcccctgtttaagagcaaactcccttgggtccccagaggacccagtgttcttatgctgctttctggcagcccagggcccccaccaaagtcctacccacctggtgtgggttctattttctgaaccaattcctctttctgagaattagtcaatttctgagctagtgaccaacctgcccttggccccttcttactataaaatgaggggaatatttaagtgacctttaag

SEQ ID NO: 330061 - DNA, 579 bp, Homo sapiens
tcagagaaatgaagtgttctgaatggccaggtcttagtcagcagacttcccaacagccttgggagagggccagccccacttttgccacgtggaatgagagtggctgctcccagatggaagcctagtactgttcccatcgtaataagtggagggtaaatgctacaaagaagaaaacaagccttcaaaggggaggaagaaagaaatacatattccttatttatacaacataaaccatgcttatgacctgatattatcttgattatctaaatcagtggtgtaatttaatatttataggaaattacattaaacaaatttataatcttcctctccyctacatccattctgctctcccctcccctgtttaagagcaaactcccttgggtccccagaggacccagtgttcttatgctgctttctggcagcccagggcccccaccaaagtcctacccacctggtgtgggttctattttctgaaccaattcctctttctgagaattagtcaatttctgagctagtgaccaacctgcccttggccccttcttactataaaatgaggggaatatttaagtgacctttaag

SEQ ID NO: 330062 - DNA, 557 bp, Homo sapiens
atggctccagagacatcttccacatttacatatgagcaggtgtctttgacaaggccaaattgttgaagcagaggtaaaacgttgctggtaaacatgttccaccataggatgagaaactctggataagttatgttgggatcatgggaatcacttttgacactttttgttttgggatcatatatataattccatggtttgacttgtcccaggaaatgcacaactttggcacttacaccaaacactttaaatgctgggagatgggagtatatagagatgctgcttaggttataaataaatggcaagtgttttctgatatctgttgttgcccagctgctaaaaaatgtgttcaggctgggtgcagtggctcatgcctgtcatcccagcactttgggaggscaaggcgggtggatcacctgaggtcagaagttcaagaccagcctggccaacatgatgaaacccagtctctacacaaatacaaaatttggccaggcacggtgtctcacacctgtaatcccagtgagaggtaaggccagctggacttcctgggtcaagtgggg

SEQ ID NO: 330063 - DNA, 625 bp, Homo sapiens
gatatctgttgttgcccagctgctaaaaaatgtgttcaggctgggtgcagtggctcatgcctgtcatcccagcactttgggagggcaaggcgggtggatcacctgaggtcagaagttcaagaccagcctggccaacatgatgaaacccagtctctacacaaatacaaaatttggccaggcacggtgtctcacacctgtaatcccagtgagaggtaaggccagctggacttcctgggtcaagtggggacttggggaactttcttatcttacaagaggattgtaaaatgcaccaatcagtgctctataaaacgcaccaatgagcactctgtaaaatgcactaatcagcactctgtaaaacgcaccagtcagcactctgtaaaatgcaccaatcagcaggattctaaaagtagccaatcatggggaggattggaaaaagggcactctgataggacagaaatggaacatgggaggggacrataacggaataaggactggacaccccagccagcagtggcaacacacttgggtccccttccatgctgtggaagctttgttcttttgctcttcacaataaatcttgctaccactcactctttgggtccgtgccatctttaagagctgtaac

SEQ ID NO: 330064 - DNA, 622 bp, Homo sapiens
aacagagcaaaactctgtcacacacacacacacacacacacacacacacacacayacagtggcataattagcacatggtacaaaagagccaaaggaggagagggaagtgggggccaagtagagtaggagccttgctggaagaggggaatgcaaaaggatcttgcagcatggagagattttagacatacgtttggagggaattcagtgcaacccaccaggagaagggccatggtgtgtgactggccacactcctaagtctcctcctcacatgtggcaattatcccaatttcccgaaagtcactttatattagcatttggcagagcatgtttctcaagagagttaacatacactccagactaaaacacaaacaaacaaacaacaaatgaaattgaaaatgtggttaaacaggtgcctttattgcagaacttctcagaacccaaagtacatctgtaaatctctcccagatgattaggtcatagatcctattttcccaaaagaatctcaaagaactggtattttgggaagcaccactttaaacctcccagctattgctagtgggtggaaaagggcagccaacccatggtaagcagcacggtggaaagtaccgaaccaaaacagctg

SEQ ID NO: 330065 - DNA, 496 bp, Homo sapiens
agctttacctcctacagccccatgagattctcggggtatagacaggagaaaattcccctaatttcccacaggaggaagaaaaaagtaaccaatttgaaatatgccctaagcattctattctcctaaacaaaaacctaccctcaagggaaactattttatcagagcttaaccaccttggttttaccagaacctaacccatctacgggaagggaaatacccagtytcagtcccatcaagccttcctgtctcaccttgggggggaactgagaagcacttgtgcagttgatagcccaggagcacaggctcactaaaaagactgagctgggtaagggagacaaaaatattgatagatgtcagaggaaaaagaacaccttacctatagaggaacaaaggtatgaattaacatcccacatctcagaaaccatgcaatcaagcagagtggagtgaactgtttaaagtgtcaagaggaaaaaaaaaaaaccaacctagaatcctg

SEQ ID NO: 330066 - DNA, 558 bp, Homo sapiens
ttcttctcccagccagtagtcatttcatttctcttttttgtttgtgaaattgcctgaagcagaaattaccactgtgcttatcaacttccgtaatctatcttgcgcatgaccactaaactaatcttttgcttaaaccatcagatataattttgacaatttaagaaaattaaagcgtactcaatttactcatatttttactgtttctcytgtttttctttcttagtattccaagatttttttcttgtatttctttctgtttcaaaaacttccttcggctattcttttagggtaggcctgctgttgacaaattctcatagtttttcttcaactgagaatgtcttgatttcctcctcattcctgaataatattttaactggatatagaattttgagttgacagttttttttttcagtctttgaaaaatgttgggccaatgtcttctgacctctgtggcttccaatgaaagaaatctgctgccattcaaaaatttgttcattattggtaaggcatcatttctctctggctgcttgcaatatttgtttctttgtctttaattct

SEQ ID NO: 330067 - DNA, 616 bp, Homo sapiens
aactataatagctgagctatgcaagtttgctgctttttagaaaaactgaggaaattttctgcctgtgcttagcttgtgtgggaaaaactgaagtctttctgccttarttggagtcccataggaaatgagagataaaggggtcgaaaattatttgaagacagtggcagaaaacatcccttatttggttaaaaaaaaaaaaaacaaaaaaacacccagcatagtgaaaccctgtctctactaaaaatacaaaatttagccaggtgtggtggtgcacgcctgtaatcccagcctcctcgtgtggctgaagcacaagaattgcttgaacctgggaggcagaggttgcagtgagttgagatcacaccactgcactccagcctaggcaacagagcaagactgtctcaaaacaaacaaacaaacactagcttacagatccaggaagatcagtgaccacaaagcagggtaaatacgaaggaaaactacacctaggcacattatagataaactgctaaaatgtcaaagataaagagaaaatcttgaaagcagcctggaaaagatacacatattaaatacaggggaataatgagataattaacacttgacttctcagtaaaaataa

SEQ ID NO: 330068 - DNA, 612 bp, Homo sapiens
gctcttttcttcctagcttaaggtgaaagcctcaatcactgattattttaccttacttttctaatttaagaatttaaagctgtaagttttctcctaagtacttctttatttatattccctaagttgtaatatgttgtttccatcatctttcagatcaaaaaacttccaagttacccttatgaaattttttcaactcattagttacatatacattttatttttcaaatatgtgagggtttcccagatatatctgttaattgatttgcatttaattccattttgatcagacaatccactaaactttcaatcatctgaatgaccatcctgatacctgaggttagggacattaaagtaggcactgtcagcatggtgagggtaatttaggtggagtaagccctcagcccttccctggcaattgctgatccttcatcttgctgatgcacrtcatattctcaatcatcccaaacaggactgaaggccaaaagaatgggttcaaattaaagttagattcttcttttctacccctgctctccttctgccatctgattccttctttctagggctcctgtcatttctggaagtgagctgtagctcatgctccccaaaacttca

SEQ ID NO: 330069 - DNA, 561 bp, Homo sapiens
cctgggggttggggccccctgtcttctgtgcctaatttataaattaaactttgtcataggtatgtatgtataggaagaaaagacgcaggccaggcacccctataatttcaccactttgggaggctgaggtacgcaaatcatttgaggtcaggagttggagactcacctggccaacatggtaaaagcccatctctactaaaaatacaaaaattagccaggtgtggtggcacgtgcctgtggacccagctgttcaggaggctgaggtggaagaatcacttgaacycaggaggcggagtttgcagtgagctgtgatcgtctgggagacagagcaagactcctccaaaaaaacaaagttcaaggaaaaaaaccatatatatatgtatatatagatatagatatagtatatagatatgtattatgtagaatgggatatatatgtgggtttggtattatttgtggttggcatcttagaatgtatcccccatgaataaagtggaagggggctactgtagttgaaaaagagagcctttgtagttaaaacaaacctgagttaaaagttat

SEQ ID NO: 330070 - DNA, 516 bp, Homo sapiens
ttaaagaaactaatctaggcatggtggtgagacaaagcagtcacagatacaaaaatacccatttttaaatggcagtgccacagtttattagatgaaatagaaaatagtttggtggttgtagtaatgttgattgattttttaaaactctacataataaattagtgtattttaatatcctgagctcttatacagaatactttaacacataatattcttgaattatttttgactagctgattatcagattagctgttgaaaggcgtgattgtttagtgataacttcttcaatttacaatttgaatggagtctgactagaactcactgggtgttttttcctcaactggtccccttcagctgactgcyaaaccaagtgcagtggagtttaaggcctaagcattctttctccaagcaatccatcaaggggggattactggtaataatgagaacagagtatgtttatcgaggtatcttttgagtaagaaatgatgttaagcttggttatacttctctttttga

SEQ ID NO: 330071 - DNA, 598 bp, Homo sapiens
catttgattagtgctttacattttacaaagtactttcactgtagcccgtagacaattaatcttcccatatcttgcattcccatagtcctttgcacataccctgcattgtactgaatccctttgcccctacaatctccacctcagtgctcatggcgaactgatttgtgtgccctgtggagtgggagtactgcaacattgagtagtggggggctcaggaatacctcccagaagcacaggagagtactatatagaatttgaatctggcggagttaagaagaaaaaagttaaaatcagttatgcttttaaaaaatgaggcttgaatttacagcatagtgtagtgggtgagaagcatgggatttggagtcagcagaactgaatttgaataacttgctkctttcatttaccagacatttattcattctcaaaggaacccatatttctcctttatagtacttactacaactctaactaaatatttgtttaatgattatactttctactaggatataagtttaattaggaaagagactgtcagtattgttcagttttattctctgtacctagtacagctactagtgtggtttagttgttcagtcaa

SEQ ID NO: 330072 - DNA, 618 bp, Homo sapiens
catgcagaggcttataggctttgctaaggattttgcactttattctcctactgtagaaataggaagctatctaacagttttgatggaagagagccatgattagatgttccttttgatattttgaaatgactgctctggctgccatctagtggagactggattggaggaagggaagagtggatgttcggaaattattaaaaggctattgcaaaaaactaggtgagagaagatggtggcctggacaaaagtagcaaacgtggagatgaagagagttggaataatataagaaatatttaatagatcatcaagacttgatgattgattagataagaaatgaaggagaggtcaaagtatgacgactaggtttctgactgcacagctgggtggatggaggttgccatttactgatacgaggaacattgaaggaacctgaaggacasattttagggggagatgatgaatgttgttttagatatgttgtaattgaagtgccgatgagacaataaagagaatgattatgggaagttgggtgtatgggtttgaacttcaggaaaacatattgtactccatgactgttccatatcaagatggaaagcactaccttgtttttttcatgac

SEQ ID NO: 330073 - DNA, 615 bp, Homo sapiens
tcacattcaatttaaattgacaattgggttttgtttttgtttttgttttgagttggagtcttactgtgtcacccaggctggagtgcagtggcacaatcataactcactgcagcttcaaactcctgggcttaagcaatcctccagcctcagcctcccaagtagctgggactacaggtatgcaccaccatgcctagctaatttttaaatattttggagaggcggggtcttgctttgttgttcaggctggtctcgcactcctaacttcaagwgatccttccacctcagcctcccaaagtgttagggttataggcatgagccactgtgcgtggcctcagttgataattgttgtagggaacacctacatcagtctcatttgtctgtgtattcctagtacctaggtcctgttagtggacatgatttgaattccgtaaccaaaaatatttcccctaatggctggtcacaatgctaaaatttcacaattcaaatttgtttcctttaggtctatatttatcaggattcttttgatggcaaatgacagagacccaactttaattagtgtgagcgaaaagaggaatttatcggctcagcaaggaaaatatgaacagctaaacaatg

SEQ ID NO: 330074 - DNA, 596 bp, Homo sapiens
atgttgactaatagtggtgacagaagacatctttacctcattctcaatcttagggagaaagtatggtttcttaccattaagtacaatataggctttttttgtaagatgttctttaataagttgaggaaattcacctttatgcctagtttgctgagaatgtttatcatgaatcaaygttgcattttgtcagaggctttttaagcatcaattcctagccttcaaatatcttaccatatatttcttctgttctttctttgccttctcatataattgcacatcttatacctattgaaaatatctcacattcttaaatgttctgttgctgttttaaactctatttttctctttgcctttctgagaagtttcactgacatatgtattttcaagcttctttccttggctgtgtccagaatagcccatcaaaggcattcttcatttttgttgcagtttttacttatagcatttgcttttcattcattcctacagtttccatctctctgcttacattatccatctgttctttcatgttatctactttttccatcagagcgtttaccatattaatcgtagttactttaaatgtcctgcttgttaat

SEQ ID NO: 330075 - DNA, 497 bp, Homo sapiens
agaagtaaattactgttgtcttatatcacacaaacatacaaaggttaatgactggaataactcattctaaaaaaaattctgagttctgattcctttagtagtcctatatatacacacagcataatagcatatcttaatttaatgtctttaacaatacagctgggaatcattcagaaatcatctactgtcattaaagggatcattaatttgtgggaaakaaaacatatttatgctaaattgttaagataatcaacttacatcagaaatctattgtttcaaaaacatgcaaatggtctaccaaatcaacctccagatggcctacttatctacagtgtccttatagacattgtaggtaagaaacttaaagtgaagaaataaatatggacatttgaaaaggacagggatcaaattctaggtatgtgcatttgttaaaaaatgtagattctgatggagaagggttggggaatgggaccacagaatatatttttaaagtaggc

SEQ ID NO: 330076 - DNA, 497 bp, Homo sapiens
agaagtaaattactgttgtcttatatcacacaaacatacaaaggttaatgactggaataactcattctaaaaaaaattctgagttctgattcctttagtagtcctatatatacacacagcataatagcatatcttaatttaatgtctttaacaatacagctgggaatcattcagaaatcatctactgtcattaaagggatcattaatttgtgggaaataaaacatatttatgctaaaytgttaagataatcaacttacatcagaaatctattgtttcaaaaacatgcaaatggtctaccaaatcaacctccagatggcctacttatctacagtgtccttatagacattgtaggtaagaaacttaaagtgaagaaataaatatggacatttgaaaaggacagggatcaaattctaggtatgtgcatttgttaaaaaatgtagattctgatggagaagggttggggaatgggaccacagaatatatttttaaagtaggc

SEQ ID NO: 330077 - DNA, 512 bp, Homo sapiens
cctgtcccttagccagtctggctgtgtctttcagagaaagccaaatgccatggccaggtgtggttttggggccttccaagcccttggaggtggtagttgtttataaccgcaatttcctcattagcttctgtttttcacaggcctctagccactacctgagggaatacatctcaacctctatcctaggagtcatcaatcattcagagctctttgtggtctggccatgacctacctctgtattttatttcccagtgtctccttcatgtgtcctatattttctcccagaatgctgtgaatttctcccccttccttctcatcttcgcctgttaaaattttacttatctttccagatcaagcttaaatgacaccttcttcaagaagcctttctgaatttccamccttgcgcaatccccctctgttatagtatcataactttttagtctcatcggccatcattccttgccttatattttaggtacagtaactttacacataccatagtgtttctcact

SEQ ID NO: 330078 - DNA, 512 bp, Homo sapiens
cctgtcccttagccagtctggctgtgtctttcagagaaagccaaatgccatggccaggtgtggttttggggccttccaagcccttggaggtggtagttgtttataaccgcaatttcctcattagcttctgtttttcacaggcctctagccactacctgagggaatacatctcaacctctatcctaggagtcatcaatcattcagagctctttgtggtctggccatgacctacctctgtattttatttcccagtgtctccttcatgtgtcctatattttctcccagaatgctgtgaatttctcccccttccttctcatcttcgcctgttaaaattttacttatctttccagatcaagcttaaatgacaccttcttcaagaagcctttctgaatttccaaccttgcrcaatccccctctgttatagtatcataactttttagtctcatcggccatcattccttgccttatattttaggtacagtaactttacacataccatagtgtttctcact

SEQ ID NO: 330079 - DNA, 585 bp, Homo sapiens
agatcgcttctgaaaggactacaaaaagtagatattcttcaggaaacaggaaattgaatccaaaaggaagtagtgacgtgaaaaaatcaaaattgagcaaaaaatgttggtaaacctatgggtaaatctaaagcaaaacaaaataaaaatagaaaaaacttgactgtacaaagtaataaaaactgacraattcagggaatataaaaatgaggtgaaattaaaacattgcctaataatatgtgacataggaggagagtaaagagagaaggggaatgaccagtcctaaagtatactaaaactagggaggagagtagagctactgattaaagttatgtttaggtaagtaaagtatgtcctttttttagaaaagaagttaaggctaaccacaaaaagaatagaaataaaatgtgtaattactagaaaattaaagagaaatgacttgtgcaagggacccctgtacaagaaagatgaactcagcattacttgcaataagaaatttcagagtaaactaaatgtccatcataacagataaataaattgtgatgtattcaagtaataaaaataaataggccagggttttgtata

SEQ ID NO: 330080 - DNA, 585 bp, Homo sapiens
agatcgcttctgaaaggactacaaaaagtagatattcttcaggaaacaggaaattgaatccaaaaggaagtagtgacgtgaaaaaatcaaaattgagcaaaaaatgttggtaaacctatgggtaaatctaaagcaaaacaaaataaaaatagaaaaaacttgactgtacaaagtaataaaaactgacgaattcagggaatataaaaatgaggtgaaattaaaacattgcctaataatatgtgacataggaggagagtaaagagagaaggggaatgaccagtcctaaagtatactaaaactagggaggagagtagagctactgattaaagttatrtttaggtaagtaaagtatgtcctttttttagaaaagaagttaaggctaaccacaaaaagaatagaaataaaatgtgtaattactagaaaattaaagagaaatgacttgtgcaagggacccctgtacaagaaagatgaactcagcattacttgcaataagaaatttcagagtaaactaaatgtccatcataacagataaataaattgtgatgtattcaagtaataaaaataaataggccagggttttgtata

SEQ ID NO: 330081 - DNA, 498 bp, Homo sapiens
tgatttttttttttcctagttaatttgtagaccctttgttcctcttttctcttgctgtcctccgttgtgatttaatgatttcctgcagagggatactttgaatcctttctttttatcttttgtgtatctactaggggggtttgcctcatgggtaccgcaaggcttacataaaacatcttgtaacaggctattttaagttgggaacacctttgatcacttacacaaactctaaacttttactccttcttccattttatgtgtgtggggtcacatctaacatctttttataatgtgtgtcccttaacagattattgcagctatataatatttcaaccttcatataagagatgtaattgattttccactgtcatcacagaactagaatattttgaattttactatgtgattactcttaccagagagttttgtactttcatgtktttgtgttactgcttattaacattttccttcagcttgaaagactccctttatcatttt

SEQ ID NO: 330082 - DNA, 532 bp, Homo sapiens
gctctatgtgttttgtggagaacgaggggaagaggcattaaacagtctcctcctctacagtaaagattctcagaggcatttatcatattttggagagggttcccctttgttgattacaaatgtggctgtgagctctaaaatctagggcatactytatttatttatttttgtttttttgagacagggtctccattctcttgcccaagctataatatattggcaggatcatatctccctgtagcctcaccttcctgggctgaagtgatccccctgcctcatcctcacgagtaggtgggactacaggcatgcacaccatgcccagctaattttttattttttttgtagagacagggtctcactatgttacccaggctggtctcgaactcctcagcttaagcaatcttcctgccttatcctttcaaaatatggagattatatgcattcaccaccacacccagcccgtctaaagcattcttgattggagtctaacctcaggaggaaacaaacgtcattgtagtgtcaatattaccca

SEQ ID NO: 330083 - DNA, 532 bp, Homo sapiens
gctctatgtgttttgtggagaacgaggggaagaggcattaaacagtctcctcctctacagtaaagattctcagaggcatttatcatattttggagagggttcccctttgttgattacaaatgtggctgtgagctctaaaatctagggcatactctatttatttatttttgtttttttgagacagggtctccattctcttgcccaagctataatataktggcaggatcatatctccctgtagcctcaccttcctgggctgaagtgatccccctgcctcatcctcacgagtaggtgggactacaggcatgcacaccatgcccagctaattttttattttttttgtagagacagggtctcactatgttacccaggctggtctcgaactcctcagcttaagcaatcttcctgccttatcctttcaaaatatggagattatatgcattcaccaccacacccagcccgtctaaagcattcttgattggagtctaacctcaggaggaaacaaacgtcattgtagtgtcaatattaccca

SEQ ID NO: 330084 - DNA, 532 bp, Homo sapiens
gctctatgtgttttgtggagaacgaggggaagaggcattaaacagtctcctcctctacagtaaagattctcagaggcatttatcatattttggagagggttcccctttgttgattacaaatgtggctgtgagctctaaaatctagggcatactctatttatttatttttgtttttttgagacagggtctccattctcttgcccaagctataatatattggcaggatcatakctccctgtagcctcaccttcctgggctgaagtgatccccctgcctcatcctcacgagtaggtgggactacaggcatgcacaccatgcccagctaattttttattttttttgtagagacagggtctcactatgttacccaggctggtctcgaactcctcagcttaagcaatcttcctgccttatcctttcaaaatatggagattatatgcattcaccaccacacccagcccgtctaaagcattcttgattggagtctaacctcaggaggaaacaaacgtcattgtagtgtcaatattaccca

SEQ ID NO: 330085 - DNA, 532 bp, Homo sapiens
gctctatgtgttttgtggagaacgaggggaagaggcattaaacagtctcctcctctacagtaaagattctcagaggcatttatcatattttggagagggttcccctttgttgattacaaatgtggctgtgagctctaaaatctagggcatactctatttatttatttttgtttttttgagacagggtctccattctcttgcccaagctataatatattggcaggatcatatctccctgtagcctcaccttcctgggctgaagtgatccccctgcctcatcctcacgagtaggtgggactacaggcatgcacaccatgcccagctaattttttattttttttgtagagacagggtctcactatgttacccaggctggtctcgaactcctcagcttaagcaatcttcctgccttatcctttcaaaatatggagattatakgcattcaccaccacacccagcccgtctaaagcattcttgattggagtctaacctcaggaggaaacaaacgtcattgtagtgtcaatattaccca

SEQ ID NO: 330086 - DNA, 579 bp, Homo sapiens
aaaccgaccccactccttttggaaggataagaggtgtcagcctccctatgcggaggtgagaacgaaaggagtcatcccaatcacgcgcgcacacacgcacacaagcacgaacaccctgtagtgaggaggaaaagaaccacctcctttcccaacgctggggagaaagatgtcatctccccagcccccagaagagggggaagggaataatccgctgttactaacacacacacacacacacacrcgcgcgcgcgcgcgcgcgcgcgcacacacacacacacacacacacacacacacacacacaccctatggtgagacaaaaaagaaatacctcttctagggaggaaggcagcctccttactccaaggcgagggagaggaaaggggagaaacagatcctctctactctgtcatggaaggaggggtggggtgtgttttcactcctgcacttctagggacaacaacagtatgtacttctctccccctcctcactgaccagtgagagaaaaccaagagaagactggagacatggtctccaccccaagagggatatctaaggatcccccaaccccaccgtgtttct

SEQ ID NO: 330087 - DNA, 561 bp, Homo sapiens
atgaaacaggttctgatttggaaacagatatgtctgaatcgctggtttatcacttaatagcctaatatgtaacattctggagaatattttattttgagtctgtttcctcacatataaaatgaagaggttggtcccagctactcaggaggctgaggtgggaggatcacttgagcctgagaggtcaaggctgcagtgagctgtgatcatgccactgcactccagcctgggtgacaaaagtgagacctcagaaaaaaaaaaaagaggttaggatgacctatgagattctatgtgaagattttgttgtgaaggtataggtgaaggtataggtatagcatctctcctgggaatctgaggatttgttttaaaaagaaaagaaagaggtgccctcctctttactggtgagatggcataagatcatggtaatcaccactattattaagcatcctctatgtgctaagcactggcacatgctacacattcggtctctcatctaatcctggcaacagccctatgacktgggcatcattttcccaaatttgcagtaaagaaggttggaaaact

SEQ ID NO: 330088 - DNA, 563 bp, Homo sapiens
ctccttgcttaatgattcagccaacccctccatcatgaacccgtcctgggaatcctaaagtcaccttgaacagatcaataataatgatgaatgcatatattgccttgaattcttacrtcatttatacaaggtagggatcacactgtcatttaaacaaatgaggaaacagaagctcaaagaggggaagaggctcccccaaggccacacatccaatgacagaagagctgagattcaaactctaattttcgagtttaagaggaaaagttgaacactcactggccacttgcttttccaacaggccatagtgagcacttggaacatgctggggattacagagcatggcagccaagggttccagaaaatcagcccctgtgtcatcgctagtgtacctccacacctttgcccaggctcttccttctgcttggggtaaccttcccctgccttgcagcatggtgcaatggaaaaacaacagagctgttttggaatcctgattgtatcacccacagctttataatctcaggcaatgcatctcatttccctaaggtttttttttcctcctctgt

SEQ ID NO: 330089 - DNA, 576 bp, Homo sapiens
ttcttgcccgctttcttctcctctgtgccttgaatatagatgtgatgtctggaactgcagcagccatttatgtagactctcctgtaggtaactccctaagcaaacaacaacaaacaaatggaaattttctatttgtttatgccactatagtcaggttttctgtcctttgggcgagaaagcctttgataatgaacacgtgtaaagaatacctgctgtaggatcctaaraactgtcggatttgggagggaagagggctctacagagaactctggtgttctgcatagcaattttgatggcagcatagtagttaagaaatgagctccaaagcaagaaatattaataagaggcctcatcatcagaaaggaagcaacaaatatgtcatcaattgttgatattgtataatgattgtgtacgtaaaccatccaaaagaatatatacaaaaactattaaattagtaagtgaatttagcaaggtcactggatacaaggtcagtatacagaaattttttgatttctcaatactggcaacaaaccaaaaaataaaaaataaaaaaatctatttataatggtataaaag

SEQ ID NO: 330090 - DNA, 301 bp, Homo sapiens
gtaagtcatattgctcctcttatatatcatttttaaaatacagatgggatctcactatgttgcccacactagtcttgaactcctgagctcaagcaatgtgcccactttcacttcccagagtgatagaattacaggcgtgagccaccgcactcactggccagcattctttagagtacagtaccatattccagaagcctccacatgagtcatctcggatgggaatgacctctccggatgmccattagcatctgaactaagcagagaattacattatgcagcctgattacagtgacattattac

SEQ ID NO: 330091 - DNA, 522 bp, Homo sapiens
aaaaagaacagagtaatcccaaacttagcagaaggaaggaaataacaaaaatcagagcagawatagataaaatagagtgtggaaacactatagaatatctctataaaactaaaagttgggtttttgaaaagatacacaatattgacagtattttagctagactaacaaagaaaaagagaagatgcaaatataccccagatgatggaagagtggacattatacctgataccacagaaatacaaagtagcacaagagacttctatgtaacaaattgcataagcagaagaaataaattcctaaaaacctagaacctattaagatgaatcaagaagaaatagaaaatctgaacaggcaataatgagtaaggagattgaataagtaataaaaagtctcccatcaatgaaaacccaagacctgatggtttcactgctgattctaccagatatttaaagaactaataccaatccttctcaaactcttccagaaaatggaagaggagggaatacttccaaactcgtttta

SEQ ID NO: 330092 - DNA, 522 bp, Homo sapiens
aaaaagaacagagtaatcccaaacttagcagaaggaaggaaataacaaaaatcagagcagatatagataaaatagagtgtggaaacactatagaatatctctataaaactaaaagttgggtttttgaaaagatamacaatattgacagtattttagctagactaacaaagaaaaagagaagatgcaaatataccccagatgatggaagagtggacattatacctgataccacagaaatacaaagtagcacaagagacttctatgtaacaaattgcataagcagaagaaataaattcctaaaaacctagaacctattaagatgaatcaagaagaaatagaaaatctgaacaggcaataatgagtaaggagattgaataagtaataaaaagtctcccatcaatgaaaacccaagacctgatggtttcactgctgattctaccagatatttaaagaactaataccaatccttctcaaactcttccagaaaatggaagaggagggaatacttccaaactcgtttta

SEQ ID NO: 330093 - DNA, 522 bp, Homo sapiens
aaaaagaacagagtaatcccaaacttagcagaaggaaggaaataacaaaaatcagagcagatatagataaaatagagtgtggaaacactatagaatatctctataaaactaaaagttgggtttttgaaaagatacacaatattgacagtattttagctagactaacaaagaaaaagagaagatgcaaatawaccccagatgatggaagagtggacattatacctgataccacagaaatacaaagtagcacaagagacttctatgtaacaaattgcataagcagaagaaataaattcctaaaaacctagaacctattaagatgaatcaagaagaaatagaaaatctgaacaggcaataatgagtaaggagattgaataagtaataaaaagtctcccatcaatgaaaacccaagacctgatggtttcactgctgattctaccagatatttaaagaactaataccaatccttctcaaactcttccagaaaatggaagaggagggaatacttccaaactcgtttta

SEQ ID NO: 330094 - DNA, 573 bp, Homo sapiens
ttggtgtgtaccctcatcagaaatgttaaaaacagtcaattctagtgtgtgaagggcccaaaggcaggctagtcctaaaagaaatggcataagccaggcacagtggcatgtgcctgtagtcccagctatttgggtggctgaggcagcaggatcacgtgaggccaggagttcaaggacagcctgagcaayattgcaagatctttcctctaaaaaattaataaacttaaaaaaaaaaagaaatggaacagtcaacccaaccctccttctcctatatttacagagagaccacatacttaaacaaatataagcatgcttaacaatgcaatgagacaagtaaccagagggaagggtctgtggaagtggaccagcagccggccatgtgtgttgggggcagtgaaggtcactcctaattttgtattaaaataaaatatgagtaaagatttttaaaaatgtatgaaattatgttgagcatttttccatacatagctagttactagaaaaacaaaaagtattgatttttttgtactattagaattaagtgtgtttattccaaattctcttctcatcctcccc

SEQ ID NO: 330095 - DNA, 508 bp, Homo sapiens
aattgaagccaggaaactagcaagaaggtagcatacaagttcagatcttagactctgcaataacacctgaggttgaaccttgtgtctgtcatttgctaggtttctgaccttttgacatttacctaacctctcccagcctcagtatttttcatctgtacaatagagataataatgtaactaattaatgagcttaaagtatatgatgttcctacattgtctaaattctagaagacagtaaatgctcaataagttgaggtaacttgggtgcccatgaaaagacagycagaaaagggaaaccatataaacaattccacgttattgagcacgcgttacaaaccaggcactatgccaggcactgggtatataatgaagacagaacatgtagaagattagccttcaaggagcttagagtgtggtcacggagaaaacaatatataagcacaagcagtatataattaaaatgtgtgataagtgctataaaagaaaacagaatgccatgaaagggaat

SEQ ID NO: 330096 - DNA, 573 bp, Homo sapiens
caaacagggtgaaaccagagaaatttccacttttcaaactgtagaaagttaaggtcaaacttcatgtacacacaccatatttaaacaaactttactacatgcctcctgtatgtgaggcasttttatgtgttctattttactcaattcccttttatattgtgaagtatttatcttcatttgtaccttaaaagtgagaagcctgaggctcagaaaggacaagtggccaagcataaaacacaaagctgagaggcaaacccagttctctccaattctgagagctggctcttcccagtcaccacggttgcccttctgggctcttcccagtcaccacggttgcccttctgcatcactctagggcacaagcacctttccttattctgggctgaaagagccaaaatatgtgtatgtcagaagcctccaggtaaatgcctcaatcgctgcggctcaatcatacatggttggcaacttacacaattctgtgtttcccaggactttgaaacaagccctgaaatcacctcgtctttgtcagtcaactgagcagtagataataagagagaggagtattgatggttg

SEQ ID NO: 330097 - DNA, 572 bp, Homo sapiens
atcctctccctcctccccccgcaccccccgccccccctctggtaggcaccaagtttccctctatgtgtccatgtgttctcatcatttagctcttgcttataagtgagaacatgtggtgtttgattttctgttcctgtgttagcttgctaaggatgatggcctccagttccatccatgtccctgcaaaggacatgatctcattccttcttatggctgcgtagtatgccgtggaacacccaccaaatttcttatcctggccattgagtttttaccagccgttgcttcagtcttgaatgcttcctagggctgcttcctccttgctattcaggtctcagttgaaagggtgctttccatccatccccacctaaagcagccatcccacttcctgccccaacattccctatgacatcaccgtcttttattttcattaaatattattcagtagcatgttcttctatatgtgtcaatgtacttgtctctcaccagaaagttagactcacaaaataagaaacgtmtctgtcttgttcaaccttgcatgcccagtgcttgacacatagttggagttcaacaaa

SEQ ID NO: 330098 - DNA, 333 bp, Homo sapiens
tcaatgattttttaaaataactacgcacccacagaaatacatccaagtgatttttgacaaaggtgtaaaaacaattcaacggaggaaggatagcctttccaacaaatgtcgcaggagcaattaaatatctataggctaaaaaaatgaacctcaatctaaactttctactttatatacagttaactcaagatggatcagagacttaaatgtaaaatatgaaactcaaaaacctttaggaaaaaaaatcatagaaaatctacagggcctaggactgagcaatgagttcttgracttgacaccaaaagtgtcacgatccacaagaggaaaattgat

SEQ ID NO: 330099 - DNA, 491 bp, Homo sapiens
ctggctataattttgtatcacagttatgcaagttgttaccactgggggaaactgagtgaagggtagatggaatctcttcatatatttcttacaacctcatgttgtaaagaaatasaatgatgttgagaagtttaataaaagatgcttttgaaagctggaaaaaagttctccaaataaatgtacttaaaaggtattaattataaaaacaagtaaacccatagctagttaatggtattttagatagatcctgtttaggtgatccatgtgttcttatgtgaaatagtaataatttttaaaaagagaacttctcagatttgtatagcatgttcatccatgttaattcatttctttttttttttttttttttttgagacgtagtctcgctctgtcgccaggctgtagtgcagtggcgtaatcttagctcactgcaacctccacctcccgggttcaagtgattctcctgccccagcctccttagtagctgggactaa

SEQ ID NO: 330100 - DNA, 589 bp, Homo sapiens
ccttaataaagctggacaggggagaagaaaaagaagcttctgtgaggaatggatgatctgagcaaccactgtgttattctctgaaacgggcacatcttggccttccagttcaggtcataagcataaggaatccaaattccacctgggtccatgcataaacctaagatcattgaagtcatgtattttaggaggcaccatctatacagaacacaatgtgatctactgtacaagcagtaaaaatattcttgatttatatcattagaaaccaaggctcagagaataatttgaacaagaacacaaggataaagtaagggctagaaccttgctcagtctgcccactgatctttctacctgaccktatattctcttgtggcctgacataaggctttacatgcaggaagcactccataaatgtaaaatggaactggggccttctggaggctttccaaatatctagggccttctgaaggccatgactcagccactgggaaaaagagagtgcaagcagatcttcagaagaattgggagtttttggaacaaagcccaaaccagcaagtgagagactccaagctgcccggttgcccagctt

SEQ ID NO: 330101 - DNA, 581 bp, Homo sapiens
agaccaacctggccaacatggagaaaccccatctctattaaaatacaaaaattagctgggtgtggtggcaggcacctgtagtcccagctatttgggaggctaaggcacgagaatagtttgaaccctagaggcggaagttgcagtgagctgagattgcgccactacactccagcctgggcaacagagtgagactctgtctcaaaaacaaaaacaaaacaaatttaaaaaaacgagaggaggccaacatggccaaagagcagtgggaaatgcagtaccggcttaggctgaagaggtggacagtggccaccggtgcaagggctactctaagttaccataaaacgggtgggtttcattagattttaattctacacgtaaaaktaagatctcaaaaactaaaattaaaaagagagctaaatccttatcttccatagtgggaagtaaacatataacatctaaaccaaaaaaataggaagtaacattataaacgttatttagagataagtacatttctaaagaattaaacaggtttaaagtggtccctccagggaaagggaaatgggggtgttccttctacccccagg

SEQ ID NO: 330102 - DNA, 496 bp, Homo sapiens
attctttcctcccaggcctctgggcttgtgatgggaggggctgcctcaaagatctctgaaatgcgtttgagacctttttcccttggatrttaacacttggctctcttttagtcatggtaagctgtctagcaagtggttgctccatatactgcttggattctttctctaccacagggccacactgcaaattttccaaacttttatgctctgcctcctttttaaataaataaaaaaaattaatctcaaatagtcacaagagtggcaaattaaactcaatgaagctcaggtcataagcagtgtctcacacctataatcctagcactttgggaaaccaaggtgggaggatcacttgaggccaggagttcaagaccagcctgggcaacatggcaagaccctatctctacaaaaaaaaattaaaaattagccaggcacggtggtatgcacctcttgtcccagctactaaagtggctgaggctggaggattgcttgagcccag

SEQ ID NO: 330103 - DNA, 496 bp, Homo sapiens
attctttcctcccaggcctctgggcttgtgatgggaggggctgcctcaaagatctctgaaatgcgtttgagacctttttcccttggatattaacacttggctctcttttagtcatggtaagctgtctagcaagtggttgctccatatmctgcttggattctttctctaccacagggccacactgcaaattttccaaacttttatgctctgcctcctttttaaataaataaaaaaaattaatctcaaatagtcacaagagtggcaaattaaactcaatgaagctcaggtcataagcagtgtctcacacctataatcctagcactttgggaaaccaaggtgggaggatcacttgaggccaggagttcaagaccagcctgggcaacatggcaagaccctatctctacaaaaaaaaattaaaaattagccaggcacggtggtatgcacctcttgtcccagctactaaagtggctgaggctggaggattgcttgagcccag

SEQ ID NO: 330104 - DNA, 496 bp, Homo sapiens
attctttcctcccaggcctctgggcttgtgatgggaggggctgcctcaaagatctctgaaatgcgtttgagacctttttcccttggatattaacacttggctctcttttagtcatggtaagctgtctagcaagtggttgctccatatactgcttggattctttctctaccacagggccacactgcaaattttccaaacttttatgctctgcctccyttttaaataaataaaaaaaattaatctcaaatagtcacaagagtggcaaattaaactcaatgaagctcaggtcataagcagtgtctcacacctataatcctagcactttgggaaaccaaggtgggaggatcacttgaggccaggagttcaagaccagcctgggcaacatggcaagaccctatctctacaaaaaaaaattaaaaattagccaggcacggtggtatgcacctcttgtcccagctactaaagtggctgaggctggaggattgcttgagcccag

SEQ ID NO: 330105 - DNA, 528 bp, Homo sapiens
ggacacaagaagatattgtaatatttatgagtagggtcaggacataactctattcaaagaacgttcattgggaaagattttgcactaagcagatggctggaactgtagtattccctgagaaagctcttgctctcaaagagctaacagtcctttggaagaaatagcccatagaattcaaacaaagcacagtagagacagccgaagaacaagaattttaacagagcatcagaaagaacttcctaaaggctatggcacttgaattaggccttatagaggggtggaaatggaagaatagacaatggggcctgcttcygagctaagggaaggtggcatttagagaagattacccagtaattgtgtactggctgggctattaagcagtctctaacacgttgagatttctgggggagagatgcacttaaggccagaaatctatctacacaggtagcagttcgtgtgaaaaagacataggagtcttagcattcagcaagttcaatgggagaatggagatgcttcagtgtcaaagga

SEQ ID NO: 330106 - DNA, 528 bp, Homo sapiens
ggacacaagaagatattgtaatatttatgagtagggtcaggacataactctattcaaagaacgttcattgggaaagattttgcactaagcagatggctggaactgtagtattccctgagaaagctcttgctctcaaagagctaacagtcctttggaagaaatagcccatagaattcaaacaaagcacagtagagacagccgaagaacaagaattttaacagagcatcagaaagaacttcctaaaggctatggcacttgaattaggccttatagaggggtggaaatggaagaatagacaatggggcctgcttctgagctaagggaaggtggcatttagagaagattacccagtaattgtgtactggctgggctattaagcagtctctaacacgytgagatttctgggggagagatgcacttaaggccagaaatctatctacacaggtagcagttcgtgtgaaaaagacataggagtcttagcattcagcaagttcaatgggagaatggagatgcttcagtgtcaaagga

SEQ ID NO: 330107 - DNA, 496 bp, Homo sapiens
attctttcctcccaggcctctgggcttgtgatgggaggggctgcctcaaagatctctgaaatgcgtttgagacctttttcccttggatattaacacttggctctcttttagtcatggtaagctgtctagcaagtggttgctccatatactgcttggattctttctctaccacagggccacactgcaaattttccaaacttttatgctctgcctcctttttaaataaataaaaaaawttaatctcaaatagtcacaagagtggcaaattaaactcaatgaagctcaggtcataagcagtgtctcacacctataatcctagcactttgggaaaccaaggtgggaggatcacttgaggccaggagttcaagaccagcctgggcaacatggcaagaccctatctctacaaaaaaaaattaaaaattagccaggcacggtggtatgcacctcttgtcccagctactaaagtggctgaggctggaggattgcttgagcccag

SEQ ID NO: 330108 - DNA, 612 bp, Homo sapiens
aagttcaatgggagaatggagatgcttcagtgtcaaaggagctatgctaatcttcagctgccttaaaagacgttcagtgttgcacatccagatcccagactatatctggagaattttttcagttttggtggccatgctctccaccttatggttcacaactgggggtgtttttgaccctcaggacattggcaatgtctggagacatttctggtagtcacaattggagcragtgctactggcatctagtgggcagaatgcaaaggttttgctaaacattctatagtatgcagggcagcccccactccccatgacaaagaattacttaggtcaaatgtcaatagtgccaagcatgagaaacccttctctagttgatgaggcaactagagcatggttagtggagggaacagtttttaaaacagtgttactaggaaaaattgaagaaactggtgattatcctggagatttagggacctgagaaatatcttagaaaagtgaaagaactgaaccatccagagcaactgcccaagtttctaccaacattcaccctaaccactgtgataaggtccaatcagatccaatgtttggaaaactaagaaagtcaattttaatagc

SEQ ID NO: 330109 - DNA, 632 bp, Homo sapiens
tgggacgagcagggatagtgtgaggctatttaatgtcaaggttccatggyccatacatttcatagagtctgcttagtcataatttaaaaaaaccatgaatatagtgccttgcacaaaaccagaaaagccaccacacactcacagactgcactgagaatagaaccgcagctcacctgatggttaattccacccaggaaggatttcatcttaaaacaattgcctgaattcgttgcagggaacactgtgagtgttttccacagagggggtggcatctgcctagcaattagaaaggctagagggctggcagcactcagaatctgcctgcagtggattcttaaacatgaaattgtggccaaaaggatgtcagacaggaagagaccagagaactgcttggattatatgtgatggcagtaggtacaaagggcactgggagacttgggtaggggccactaactgcctacttggtggcgagtgatcagagaaacttagggaggggatatttgagctggatcttgatggatgaatagaagtctgccaggtggagaaagggggcgggtatatagacaggagagaacaacaatactacaaatttttgtgacctgggagaacatggcactcctgaaattctttgt

SEQ ID NO: 330110 - DNA, 632 bp, Homo sapiens
tgggacgagcagggatagtgtgaggctatttaatgtcaaggttccatggcccatacatttcrtagagtctgcttagtcataatttaaaaaaaccatgaatatagtgccttgcacaaaaccagaaaagccaccacacactcacagactgcactgagaatagaaccgcagctcacctgatggttaattccacccaggaaggatttcatcttaaaacaattgcctgaattcgttgcagggaacactgtgagtgttttccacagagggggtggcatctgcctagcaattagaaaggctagagggctggcagcactcagaatctgcctgcagtggattcttaaacatgaaattgtggccaaaaggatgtcagacaggaagagaccagagaactgcttggattatatgtgatggcagtaggtacaaagggcactgggagacttgggtaggggccactaactgcctacttggtggcgagtgatcagagaaacttagggaggggatatttgagctggatcttgatggatgaatagaagtctgccaggtggagaaagggggcgggtatatagacaggagagaacaacaatactacaaatttttgtgacctgggagaacatggcactcctgaaattctttgt

SEQ ID NO: 330111 - DNA, 632 bp, Homo sapiens
tgggacgagcagggatagtgtgaggctatttaatgtcaaggttccatggcccatacatttcatagagtctgcttagtcataatttaaaaaaaccatgaatatagtgccttgcrcaaaaccagaaaagccaccacacactcacagactgcactgagaatagaaccgcagctcacctgatggttaattccacccaggaaggatttcatcttaaaacaattgcctgaattcgttgcagggaacactgtgagtgttttccacagagggggtggcatctgcctagcaattagaaaggctagagggctggcagcactcagaatctgcctgcagtggattcttaaacatgaaattgtggccaaaaggatgtcagacaggaagagaccagagaactgcttggattatatgtgatggcagtaggtacaaagggcactgggagacttgggtaggggccactaactgcctacttggtggcgagtgatcagagaaacttagggaggggatatttgagctggatcttgatggatgaatagaagtctgccaggtggagaaagggggcgggtatatagacaggagagaacaacaatactacaaatttttgtgacctgggagaacatggcactcctgaaattctttgt

SEQ ID NO: 330112 - DNA, 642 bp, Homo sapiens
actaaaccattaccacttagttttggggtattttgttatgcagcatcacataactgagctagaacccttacagtaagaaaaacataggcaaaacacttgaataagtacttccsaaaagcagtatacaaatggcaaataagcatagaaaaatattttgaacttcattagtcatcaaaggaatgcattaaaaaaccataatataatacaagtaaacatcctcagaatggctaaaatcaaaaagactagcagcgtatcaagtgttgacaaggatagagaactctcatacgctgcaggttaggctataaattgctacaaacactatcataactattttgcaagatctaatgtagctgaacattcaaaacacctatgtcccagcaatttcactcttacacatattctcaacagaaatgtgaacatatattaactaaaagtcacatacaagaatgttcataaaaaataggtcgaagatctgtataaaagagctaaaagtataaatttttagaagaaaatacaagcataaatctctgtaaccttggagtaagcaatagtttcttacatatgacacctaaagcacaagcaacgaaagaaaaaaagataaattgtactttatcaacatttaaaattttagtgcttctttcc

SEQ ID NO: 330113 - DNA, 642 bp, Homo sapiens
actaaaccattaccacttagttttggggtattttgttatgcagcatcacataactgagctagaacccttacagtaagaaaaacataggcaaaacacttgaataagtacttccgaaaagcagtatacaaatggcarataagcatagaaaaatattttgaacttcattagtcatcaaaggaatgcattaaaaaaccataatataatacaagtaaacatcctcagaatggctaaaatcaaaaagactagcagcgtatcaagtgttgacaaggatagagaactctcatacgctgcaggttaggctataaattgctacaaacactatcataactattttgcaagatctaatgtagctgaacattcaaaacacctatgtcccagcaatttcactcttacacatattctcaacagaaatgtgaacatatattaactaaaagtcacatacaagaatgttcataaaaaataggtcgaagatctgtataaaagagctaaaagtataaatttttagaagaaaatacaagcataaatctctgtaaccttggagtaagcaatagtttcttacatatgacacctaaagcacaagcaacgaaagaaaaaaagataaattgtactttatcaacatttaaaattttagtgcttctttcc

SEQ ID NO: 330114 - DNA, 642 bp, Homo sapiens
actaaaccattaccacttagttttggggtattttgttatgcagcatcacataactgagctagaacccttacagtaagaaaaacataggcaaaacacttgaataagtacttccgaaaagcagtatacaaatggcaaataagcatagaaaaatattttgaacttcattagtcatcaaaggaatgcattaaaaaaccataatataatacaagtaaacatcctcagaatggctaaaatcaaaaagactagcagcgtatcaagtgttgacaaggatagagaactctcatacgctgcaggttaggctataaattgctacaaacactatcataactattttgcaagatctaatgtagctgaacattcaaaacacctatgtcccagcaatttcactcttacacatattctcaacagaaatgtgaacatatattaactaaaagtcacatacaagaatgttcataaaaaataggtcgaagatctgtataaaagagctaaaagtataaatttttagaagaaaatacaagcataaatctctgtaaccttggagtaagcaatrgtttcttacatatgacacctaaagcacaagcaacgaaagaaaaaaagataaattgtactttatcaacatttaaaattttagtgcttctttcc

SEQ ID NO: 330115 - DNA, 563 bp, Homo sapiens
aaaaaaaaaaactggaaggatagataccaaaatgttttctttaggaaggtgggagtaaggatgattttttttcttaaacctactttctaattaacatgtgttacttatatcatctttaagacttttttatgctgtgcttggagttggcactgctaggagagaatgagcatgtaatgtgcaggtgggtgggagrgagtgtgggggctgggagcttgtcagagacactccaatccaccagcactgatattggctactccacctgctccccagcctggccccttctaaatgtgcactgaaggaaaaactggctgtcactaatttgcccctctccaaatggctataaaaagcaagttgatttaggattccatgaatcctacctactctaacatatgctgaacatcttttttgtgtgcttttgttaaaaatgctttctaaatgagctggtgcccatatgtctcaggatcctaaaatgtggctaggtaggctggcacaagtcatgtttctataattcacttccgtgggtttctaatgagctcagttaactacagcaggagtttcccagc

SEQ ID NO: 330116 - DNA, 591 bp, Homo sapiens
ggcctccacagtcagaacagtggaaagtgcctcagtagtaggcactggaattgtgctctcccctgatgcyggcctgtggtgggaggaaagctgctactgctgcagtttctcctgatgacaatacttgcagccaggaccagcttgacaacctggaactgctctgcatgtgtcattgctgggtgccccaatatgctcccctgagatcatgctatagcagggccctctctgctccatgcctagaaactagaattctggcgccatgaaaaatctgaatgtagtgacaccaccaaagggtcacactagctctccagcaagagttcctaaccaaaagggaaactaagaaatgacaaagaattcaaaacatggattgcaaggaagcttaatgagttccaagacaaggttgaaaatcagcaaaaagaaacttctaaatcaatccatgaaatgaaagcggagatagaagtcttaaaaagaaatcaatcagagctactggaattgaaaaactcacttaaggaatttcaaaatacaattgaaagctttatcaatagactggaccaagcagaagaaagaatttcagagcttgaaattcttcta

SEQ ID NO: 330117 - DNA, 591 bp, Homo sapiens
ggcctccacagtcagaacagtggaaagtgcctcagtagtaggcactggaattgtgctctcccctgatgccggcctgtggtgggaggaaagctgctactgctgcwgtttctcctgatgacaatacttgcagccaggaccagcttgacaacctggaactgctctgcatgtgtcattgctgggtgccccaatatgctcccctgagatcatgctatagcagggccctctctgctccatgcctagaaactagaattctggcgccatgaaaaatctgaatgtagtgacaccaccaaagggtcacactagctctccagcaagagttcctaaccaaaagggaaactaagaaatgacaaagaattcaaaacatggattgcaaggaagcttaatgagttccaagacaaggttgaaaatcagcaaaaagaaacttctaaatcaatccatgaaatgaaagcggagatagaagtcttaaaaagaaatcaatcagagctactggaattgaaaaactcacttaaggaatttcaaaatacaattgaaagctttatcaatagactggaccaagcagaagaaagaatttcagagcttgaaattcttcta

SEQ ID NO: 330118 - DNA, 580 bp, Homo sapiens
gacatgaacataatgcagccaagttctttgctatgatgtaacatcggcaatatttactccagctcccaataaattcctcatttccatctgagaccttgtcagcctggacttcactgtccatatctctatcagcattttggccacaaccatttaaccagtctctaagaagttccaaactttccctcatcttctgttttcttctaagccctccaaagtcttctaacctctgcctgttacccagttccaaagctacttccacattttcagttatctttatagtaacgccctactcctcagaaccaattttctgtgttagtccatttgtgttactgtaaaggaatacctgagactgggttacttataaagaaaagaggtttaattcgttcatggttctgcaagctgtacagaaagcatggtgccarcatctgcttggcttttgtgaggtcttcaggagcttacaatcgtggtggaaggcaaagcagtagcaggcatgtcacatggcaagaacaggcatgagagagagaaagggggaagtttacactcctctaaacaaccaggtctcatgtgaacaccaggtccc

SEQ ID NO: 330119 - DNA, 550 bp, Homo sapiens
ttagatacatgagtgaagaatggcattcaatgatgaatgaattttatgggttggctggacctaacattgtttctatggtgaaatgtttcaaatacatarcaaccaaatccccaagatgagaaaatgtcttcatttactaggtgaagaaagacacatataacccacgcccctgccatttgaactgacgccacgtgggaacctcagcattcctgaatcttgtagaagctgcccttgcccttctttcacgtcttccattttgaggagactaaacctgctctcctttggcagccgagggtgtttggaagtgactcatgtagggaacccactggttacccagtagcatgagcacatcagtcaaacgattagacccctgcctcatatgtagaccaatgaccctggaaattgttctgtcagactccttccagttctctgacaatctgataggtgctgggaacacactgcctggaggtgagttgtttacttggtttaagtggttcagctgaagatttcaacagagctctgctgagttcgtacggcaataccagtagcc

SEQ ID NO: 330120 - DNA, 550 bp, Homo sapiens
ttagatacatgagtgaagaatggcattcaatgatgaatgaattttatgggttggctggacctaacattgtttctatggtgaaatgtttcaaatacatagcaaccaaatccccaagatgagaaaatgtcttcatttactaggtgaagaaagacacatataacccacgcccctgccatttgaactgacgccacgtgggaacctcagcattcctgaatcttgtagaagctgcccttgcccttctttcacrtcttccattttgaggagactaaacctgctctcctttggcagccgagggtgtttggaagtgactcatgtagggaacccactggttacccagtagcatgagcacatcagtcaaacgattagacccctgcctcatatgtagaccaatgaccctggaaattgttctgtcagactccttccagttctctgacaatctgataggtgctgggaacacactgcctggaggtgagttgtttacttggtttaagtggttcagctgaagatttcaacagagctctgctgagttcgtacggcaataccagtagcc

SEQ ID NO: 330121 - DNA, 532 bp, Homo sapiens
gttttggctgaaagatgcctctgtcgctacttttaatttctttgcagaaactgggggtttcctgttaggcaagaattccagagaaggatattgggcaatgtttaattgacaactttcatcaccatgtacatgcctggtcccccagataatggtggagcatttttggcaggtttctgaccacctctatacctgtcatagatttgctgataagtagaggaaatgaaagatgctgaattttcctgacatcatttcaaattgcatcatttsaaaacagtatgaagtgtatgactagaagcattacggaatacagaaaatcaacttgcagctaactggcaatcaggttacctctaaattaatggtggattgggctgagtgtgaattccattccaccacgaaagaatgaatggacattcaataaatatttgtggaactctgaagacgtcctgaaatgtaaacatttgttctagtttacactgccacctgcagtctttgggggaaccagcctcactgaatctccacagcattaagtgtt

SEQ ID NO: 330122 - DNA, 607 bp, Homo sapiens
atttctgggctagcagggaatataagtcaataaacaagtttacaatccagtgagatggttatcataataaagggaagtattaagtgtgatgggagcggagaatggccaaaatttgtctgggaaagtgaggaaagtcatcagaaaaaggctttgatttgaatagagactttaaggacagggagaagagatgaactggggtggaaagcaaatgrgctctgcatctggaagctgaggttgctgtgcctataggtcctctgtacctccaaaacatctggagtttgtgcacttagctggaataaccccagcttacctttatcaaagaaaacaacatatcttaaagacaagaggtaccagattcttctgacaatactctactaatatctgctaataccctattcccctttctgcctaatgctctatttcaatggttctcaaagtgtggtccttgaaccatgagcagtaggagcaacagcacctgagaacttgttagaaatgcagattcctagactctactccagatttactgagccagaaactctttgaatggggcccagcaatcagttttaaagagccctccaagcgattctggtgcatgcaggagtttgga

SEQ ID NO: 330123 - DNA, 482 bp, Homo sapiens
taccatttctgctatagaaagtgaacgccaaaccattctggctacaaagagagtcacacccatttggagtgaaagctttcatgagtttacatcactgcttagaaggacaggccaaaaaatacagcaggaggacaatgagagtttaccttcatccacgaacaataaaacgagaacaatgtagaagagaaatctggttgttcatttctcctcatttttatgtctcataagagaaatcatttgggttttctctgtaaaaaaacaraacaaaaccaaaaaccctagttttagcagcaaaactaatcacaacaaaacgatattctggtgtcattttataaattctgaataaaagctggaggtattcaaatttctaaaccctgcagcacaaaaggcagctttccaaacaggactaggccacgctaactgttgaataggaaaactaattagcatcctgtgtgaactatcttgtctttttttaggaccgg

SEQ ID NO: 330124 - DNA, 533 bp, Homo sapiens
gccctgccatggaggaagagcggaagctgactggtgtttttctcgatccgccattagacctattcgtgtacagaggccaggctgaggtgagggtggggtggaggaggaacagtgtcctaaacaagaatcctgtctcatctgcttgccctgacttgcccctctgtccatcygtcacgcagtagtcagtcatctttctaaacgcagctctcagatcacctcctctcctgaaagcctttgagggaaccctccctgaatacacacctacagaaattccaaaattcttcataggccatccaaggcccttcactccttgactttctgcctaactttcagattcattaccagccactccctgagcttctaaccacatttgcctgctcattatttcctgaaaacattgtgtacttttagctctgctttctttattcatgctgtttcttctacctggaatcccatcgcctactgactgcctcctgctcagccctgcagtgcgcccccccacatctcacctctttttgcaggagtgctcctgg

SEQ ID NO: 330125 - DNA, 517 bp, Homo sapiens
gaattgaaaaaaaaaaaaacaaaacatttccttggattcagctgaaaaggcaattgcagtaatttgaattgtgcaatttccattgtgtcgcctttgaaaaacagtttcacttttcctcctactaccgatgactcattcctggggcagataacacacatttctgaggtgcagaacttcactacatcaaatcttttgaaaatctgtttttgagtgttcttgtctaaagagaaaaacatgatgagctttcgtaatccctcaactcagcactgagtgatggaatactaaagatgttttggaaaccctttgattactgcaaagcatacaaagaagaacgggtgggtgaatgataaaaataaaacgctagcattggctacatgcactgatcgcttaacaaatggtagttaatgtcaggcatttggctaagtgattagccccattttctcactcaatacacagaacaccttacgaggtcaccctgattgtcyccactcagacagggaaattgagaatcagaaaa

SEQ ID NO: 330126 - DNA, 560 bp, Homo sapiens
ggaactcagagaagaggttgagtctggaaatacaatcatctaggtcctctacagatatctgaagctgtgggtgaggatgtgatcacctaggaatagattacagagtaagaaaagggagggacaccagtatttgatgatgagaatgggacgtgtaagcctgcaaaggatacaggaaaactagggaagacaccaggagaacatttcatttttaaagccgagggaagaacgtttccagtaggagtaaatgatcaacactggcagtctctgctgagaaggcgaggaatatgaggccagaaaaatgtcccttaaatttcatgacatggaggtcatcagtgaygtgacctggagctgttttggtgactgtgggaccagcagcctgcacaaaattgctgaggggagagggagagaggacgaaaaatagagacagtaaggagagacagctttttggaggagcttcacagggaaggaaatggaagaaacagatgcaaaggaagaccataagagaggtgctccagtcttccgtggcataaaggtggtggtgggcaggaagatgatggcaa

SEQ ID NO: 330127 - DNA, 571 bp, Homo sapiens
agagcaccagattaggagtcagatgacctgcattttaggctgcttctgctgcttagtcaccatatagccaaagcaaatcacttaatgtctcaaactgagcctgactccttatctgtggaacaggtataacaattcctgttgagcccttttcagtgtatgtgtgatgcttgtgtgagctaaggaaagaayaggcattttgaagctgtaaagttgctttctggctgcagggagcagcagtgcagttttaatagtgaagatgtactggcccttacaggaatagcctaggagaaccagaagaaagttcccctacctccagggcatgtttagggaatctggcgctgtccaccaggtgggtgctgatgtgtactactttattggatagggccatgttttttgtttatttgtttgtttttattatactttaagttctagggtacatgtgcacaacacacaggtttgttacataggtatacatgtgccatgttggtttgctgcacccattaactcatcatttacattaggtatatctcctaatgctatccctctcccagccccccagcccctgacaggc

SEQ ID NO: 330128 - DNA, 538 bp, Homo sapiens
aaagctcagatacattataacccttacaccaaagagagatattaactatctagtttttaccttttcatatgcagttttgttaatacagccaaatctttctatggtgcttstccatcttttagcatataaattccacagagattgttggtgtgaagggataaatctgaaaacatggccacttccttttcctgccctgtggcatgcaaacctcttctgcaaatagcagacaaactcgtaagtagtcatcattttataaatcatttgaaatggattcttcaaaacaccatctgttgatctgcttaactttcttatgaaaatagggcttcagctcagatattctggaggtgccaggaggtaaataccaacctgaattcaaatgtattaaatatttagagacttacagaacttcaaaagagaggaacctttgagatcacctagttcaaccgtcttactttccatcagaggcaaacacaacctagaaatctttaataacttgccccgactggaacggccatgagagcccaagcctaaactagaa

SEQ ID NO: 330129 - DNA, 595 bp, Homo sapiens
tagttactgacagggacatgattagaacccggatctcctgactccgaagtcaaagtgttttgtaccacccaatagccccaaatctattattccattattatatgtaggttattttccttgaaaatgcattagctgtgttattatggccctatcacacaaaactagagaatcaccatgtaaattgtacccattgaattgcagcacataggctaaaaattgaccttagtttcatttaaagacttagagattcaacattcatgctgctttctaagtcttgtaggacatatctaagaaacatcagttccagccgggatccccacaggactctgacaattatgccaattactcaaaggatgtaacctcaccctgttcaagtgcaagtctcctaaaagccccgtgacttaggctcatcatttgtaaaataggaaggaaaataacctcttccttgctcccctcataaggttattgtaagaattcaatgaagcaatatatgyaaatttctttgcaaacctctaagtgccttgctcatagaagatgctattgttattgctgcatttttttaatccagtgtctgcttatttctattcttgtgttt

SEQ ID NO: 330130 - DNA, 579 bp, Homo sapiens
ctggttgggaactgaatccctctgggagagaggcggcatttcatttgtttcacaaagcattttattttgctgatgcaggccacagcagaagcgtgatagttctggagccagcaggtgcagatgcagagatggcctcctgattgtgacaggagcagcaggcyccttgagatcttgatctgcagtgtggctttgggtgtcattcctggaagctcaaccaggagtctgtttcttcagtcctgccattgtttctgtaaatttaatacccttccacccagatagatggagagctcctctttctgcaattgaacactgacagttgtattatgtcttcacataccagggggcagcatagttaagattcaggggagcaaggtgggttgagtttacttctctacctatgccggtgctttaattttcttgctctatttggtagtggagacagtctgaggaccctcatctagacttctggccccatatttaataatatagaattcaatacctgcttactttctactgctgtttgcctgggaagatcatcgtcacccacatctactcagacagagtcgcttaaatgaagag

SEQ ID NO: 330131 - DNA, 579 bp, Homo sapiens
ctggttgggaactgaatccctctgggagagaggcggcatttcatttgtttcacaaagcattttattttgctgatgcaggccacagcagaagcgtgatagttctggagccagcaggtgcagatgcagagatggcctcctgattgtgacaggagcagcaggctccttgagatcttgatctgcagtgtggctttgggtgtcattcctggaagctcaaccaggagtctgtttcttcagtcctgccattgtttctgtaaatttaatacccttccacccagatagatggagagctcctctttctgcaattgaacactgacagttgtattatgtcttcacataccagggggcagcatagttaagattcaggggagcaaggtgggttgagtttacttctctacctatgccggtgctttaattttcttgctctatttggtagtggagacagtctgaggaccctcatctagacttctggccccatatttaataatatrgaattcaatacctgcttactttctactgctgtttgcctgggaagatcatcgtcacccacatctactcagacagagtcgcttaaatgaagag

SEQ ID NO: 330132 - DNA, 645 bp, Homo sapiens
aatcatttgaaaatcatttattgaacatctgttttctgggttttgggaatataacaacaatgcagataatatagctgctctcctaggattacaattaaacagaaaagtacatatatagtttgaaaaaataaattaatcctgaatgaaaactgcattttggtgctgtacagaacaaaagcacagtactctaatggtattaagctgacgatcctctttttcaatacagtgtatagtctcagaatatttgctgatttgcacacttgtgaggcattggcagatcyctggattgttccttccttactcaagacgcaggcagcctgcaggccctcggttttcctgaggaattccttttattgttgaattaatagcattgagtctagtagatgcagagtgacatatgttaacatattcaaatagacaggtccttaacatacctaacttcccatatattaataaagaattattagtgtgataagttacagtaattagaaataaatgtttcttggaattatgctgctgtaaaattggggaaaaaaaaacatctagccaccagcagaacagacttcctttctcgtcatttaatatagacatctgatagccatagaaagggacaatctagacacaattttgcaatgcagtttgcct

SEQ ID NO: 330133 - DNA, 601 bp, Homo sapiens
gctggcttgttttacttgtttgtatacttaagagcaaaatattagaaattttgatgctgatatcatgatcacagtaagcagaaacattgaaaagagaactcaacatactacactaatgcttaaacatactaacacacacccagagaagctggaaagttctagcctgcacacctgcatgctaaggggttgcctgtgggttaacgtattgatttactatgtgataggactctgttaaactgacagcctcttgtctgtcagcagtgtgcttgaagtctctggtgccactggagaactgtatccaccccagaagaaaagccactctattaggagacacatttgttacaaacgccttcagattagagccaaacacaaatttataaatgcaacaaacaatcacatatcttaaagatttgcttgcgtgtttggatgatataaaaattaattgattaaacaaaggcaaaatgttkttaatcatacctgaccagcatctatctgacttcaaaagcatttgtacgttattcttgccttttggaattttggactctaaaagaaagtcagtgtgcctataatgttaatttttgaaatttagaaagcttggact

SEQ ID NO: 330134 - DNA, 601 bp, Homo sapiens
gctggcttgttttacttgtttgtatacttaagagcaaaatattagaaattttgatgctgatatcatgatcacagtaagcagaaacattgaaaagagaactcaacatactacactaatgcttaaacatactaacacacacccagagaagctggaaagttctagcctgcacacctgcatgctaaggggttgcctgtgggttaacgtattgatttactatgtgataggactctgttaaactgacagcctcttgtctgtcagcagtgtgcttgaagtctctggtgccactggagaactgtatccaccccagaagaaaagccactctattaggagacacatttgttacaaacgccttcagattagagccaaacacaaatttataaatgcaacaaacaatcacatatcttaaagatttgcttgcgtgtttggatgatataaaaattaattgattaaacaaaggcaaaatgtttttaatcatamctgaccagcatctatctgacttcaaaagcatttgtacgttattcttgccttttggaattttggactctaaaagaaagtcagtgtgcctataatgttaatttttgaaatttagaaagcttggact

SEQ ID NO: 330135 - DNA, 557 bp, Homo sapiens
ctccaatcctaatcatcaggaaaaggattcatctagtactgagaaaccattagtctgtcagtttctcctagcaaatcaaggaaagattctacagaaccaaagacatgtataggaagtatggaaaagaaaacagtttagttcagaatggaaatgaacgttctgatgacactgtttaaaatataagcttgttagaccaaaagatggctgacatagagccaaattctgaaaataattgtagtagtcatgatttagttaatggacacagtgaaacagagcaaacacctttagttttatcagatcctgctttgaaaattgatataaacagaatcaggacagaaaatggttccattttacctagtgttgtaccacaaraacacaataccttaccagtatctcaggcaccttccaaaccaaatctgacaaatgaacatacttcgtatggcttaattttaacaaaaccagttaccttcacgaacagtatcttagtatgcccaaacatgcataatttctgactgatacctgtcctgatcaagataacatgtataggaaattagtga

SEQ ID NO: 330136 - DNA, 424 bp, Homo sapiens
cctttgctcagtcttgttttctttactgccttacagctgttcctgagtgcacttccaataaagttcctgcatgaaatctctgtcttagaaatctgtttccataggagagaatccagatcatttaaatgtttctaaatggtgcttactctgatgtacttgaaagccttagagatctccaggatacctgtatttctccttggtagttcctaatgaaatagaacacaaccagcttggcagagttgtgtttgatcactttatgactataacttttctaatataaaaaatgacccaattaattttagaaattagctatttggctaacgttttaaagtcaatattaatacaatcaatactctgctacacattttagtgtaaagtaacagaacwatggttttacagaactaattgattcccgattttattc

SEQ ID NO: 330137 - DNA, 521 bp, Homo sapiens
tttttttcgaatttttagtggagatggggtttcactgcgttagccaggatggtctcgatctcctgacctcatgatccgcccgtttcggccgcccaaagtgctgggattacaggcgtgagccaccgcgcctggcccctaccctattatttcttaagcaacacttggtggcaacgaggataaatgtagtagggagagaacaggaggacagagggacaaatggacaaacaagccttctcaccttctaagaccatctgtcatagagtggcagagcagaaaccattgcggggaattttggaggggagtgaaaatgcactgcacatttggttcaacacatatggaagcctaatgatgacacggctccacacgaggaacacacatcctgtcttcttcactcgattctcacaggggaaggctaggctggcmaagctcacggaattaagaaagaaagaaaatatacaggttctttcccaaacatggctacattttgtttcattttgctaaagaatgcactgtaatccata

SEQ ID NO: 330138 - DNA, 570 bp, Homo sapiens
ggctggtttcctattttatgagcacacagacattatgcatttaaggtaagcccaaacagtgctaaataatcttcaccaactttttgttgggaactaatgaattgggacaattgggagacctgggatatatgaacatataaatatttcaaagatgaaagttcagtgtcatctagctatccttgtgatcctttagcatcatgactgaaaatgatttgacatttgttttctcacgtcagcagataaagaagaaaacatatacattacacatgtgtgtgtgtatatatatatatatatatatatggagagagagaaccttgacaacataacatatacagaattttgaagacagaacatatatagaatcagaatatatatatatataaaatcttaatgatagaacatctgtatacaacttggtttactaaatattttaagtccactgttgaaacctactgctcagataaaaagattagtttcaaaatcatgctgtttgctgacaatgcccctggtcacccaagagccttatggagatgtataaagwaattagacattttcatgcctgttaacaca

SEQ ID NO: 330139 - DNA, 378 bp, Homo sapiens
ttttcttctaaaaacaagaaaaatgtcctgaaaggaatctggcttgagccccaaaaagctatcatagaatttatgttttagtgcctttttttcctacctcaaaaggactacacattcttatcatgactcagacttaagtagctacctggggttgtttttttaaggatctaatccaagttctgattctcatttcctcctctttggctgacattctctgtgtgatagttaattttatgtcaacctaactaggcmaagggttgcccagatagctggtaaatcattatttctgttgtttctgggagggcgtttgtgggaaagattagcatttaaatgggtagactaagatcactctgaccaatgtgggtgagcatcatccaa

SEQ ID NO: 330140 - DNA, 628 bp, Homo sapiens
aggccaagggttgcccagatagctggtaaatcattatttctgttgtttctgggagggcgtttgtgggaaagattagcatttaaatgggtagactaagatcactctgaccaatgtgggtgagcatcatccaaactgtggaggtcccaaacagaacaaataggtgaaggaaaggtgaatttgctaactcagcttgagtggaggcatccctcttctccttcttgcaacattggcacttctggttttccagtcttcagatttagccacgcttgctgccttctcaggcctttggactgagactggatgttacactaccagcttgcagacagcaagtcatgagacttttcagcttctgtaaatagcataagccaattcctataatacagtatgggttaagcgaaaagagtttttataagcaaaacttgtctctgtgtcattgaagtaaaagtcatgaacagcaacccttcccccaaatcctaatttctcttctataaaacwtttattatcgactagctacataagaggctttgtacaaataaaagttaataatacactctcaaataatttacattatactgacagtaaaagtatttcttgagtgtatatcagtgaagttgttattttatgttcc

SEQ ID NO: 330141 - DNA, 586 bp, Homo sapiens
aaatcagagggtttggaaatatggatctgggatgtaaaagagaatttaaaaagagagaacaaattaaagacatagatttttgagtccacctgcttagaagagctaattgaagcataatcttggaaaaggtcactcagcagggaccacaaatgaacaggataataaaatcttgaaggtgtcaattttacaggagagaagagtctctgttgaattctattctgaaaacaccagcctagcatgtgctcttctcaaatatctyacaatattcttttggcattatgtatcagcttcatatttttaaaaccaatatatgatcaccttaaaaaactataaaaaattctgagtatctactcaatatgtatacataggacacctacaatgtacaaggcaatgctagatgatataatgttactatttattccttagagacaagcctcggctcttattacactccaggtatctaaatggaaaatattatccaggttttccagctacttgctcattcttgcaatgaacagaggtgacagattgaagtactgagtgtggctgtgaaagacgcagagtgtaatgtctcatagattggatt

SEQ ID NO: 330142 - DNA, 590 bp, Homo sapiens
atcaagatggctgactagagatgcccaacactagcctcctccacaaggaagaatcaaaacaacagatagatacmcacacattaaatagagcatctaagggagaatattggaattcagcagcaaaatgacactctgaggcagagaaacttgaaatgtcagcctagaaacagaaatgaaacagccagagggattggcttagtatcaagtgagattctccattacagggaagaagtgagagaccttcagcactccacatttccaccccaggtgcctgcagttctatctcaggagagccccttattcctcacaggccatgcaccttttgtaaggagctgcctggagtgcatgtgactgcattattccagaaaggatatttacactaaatccctgtcattcccccaggactcaaactgatctaaccttaatcctattttttttgtgtgtgaaaatgcagaagtatacataataccatgtacatctccatgtgcaacagtgaatttttttgttgtggtggtcacaaccaaaatatagcatagaacctttctgagaccagagccacaagagtatcgcactctaaggcccaataggcc

SEQ ID NO: 330143 - DNA, 544 bp, Homo sapiens
tgaatgaagaagaacaaaaacaaataaatgaatgaaggagtaaatgaattaacaagtgaagcaattttagaaaagcatgttaacataacagattagcaagcgacacttccctcaggcctcttatccagtaatatgagccccacttaacagggagcccacatacatacatacayaaacatatatgcagtacgtatgcacatttataaaacccacctagaccagattacccataactaaggagaccatatattccggtttgcctgagacagttctggtttatgcctgtcgacctagtgaaattactaacagcgtccctttctcaatactcccagtttagccaataaaacatacggtgatatttctaccccaaaccaacatggtttatgaaagacatgatggtaaatgcccacatgagcctataagacaaccctaataatgccaacaaacaatgacaaaggaaaataaaagggtaaatgagatcctacagacagggtcacattccatgaagggtatcttgttaaacaaaggcaagttttaagctcac

SEQ ID NO: 330144 - DNA, 622 bp, Homo sapiens
gggagaacaaacactggttctgaagaagaaacctcatcagttttgcattccagcatttatggcttttatgtgtttgcatagaggggggtgacccgccaggcccagggaaacctggacctggggtggggtagaggaaagcaaggctgttaaacactggaatctgtaccagctcccagtctgtcctcacaccgtgttatgagagaagagtcacaaggtgtaactcaagcaactgaacacatgaaagtctaaagtccactcttgacatgtaagtgcacatgtgttgattcttgtccttgcctgscacaggggctgctgcaaggtgaaactgcaaagcctgcgactgcaatgcctctaccgcggccttcagtcagctgaaagcattggtctcctcctccagttcctagtggttttccaccaccttgcacttctccctcctggtggacccgcttcaggtgctcaaactcctcgtggagctccctttccttctctttcagctccagctctgtggggaggagtggtgtcggggaagggggtgttcaaaaaggataaaaagcaaataaataaataatgaaagtgagaattttcattattctgaaaaagaaataaattccatcagttttgc

SEQ ID NO: 330145 - DNA, 622 bp, Homo sapiens
gggagaacaaacactggttctgaagaagaaacctcatcagttttgcattccagcatttatggcttttatgtgtttgcatagaggggggtgacccgccaggcccagggaaacctggacctggggtggggtagaggaaagcaaggctgttaaacactggaatctgtaccagctcccagtctgtcctcacaccgtgttatgagagaagagtcacaaggtgtaactcaagcaactgaacacatgaaagtctaaagtccactcttgacatgtaagtgcacatgtgttgattcttgtccttgcctgccacaggggctgctgcaaggtgaaactgcaaagcctgcgactgcaatgcctctaccgcggccttcagtcagctgaaagcattggtctcctcctccagttcctagtggttttccaccaccttgcacttctccctcctggtggacccgcttcaggtgctcaaactcctcgtggagctccctttccttctctttcagctccagctctgtggggaggagtggtgtcggggaagggggtgttcaaaaaggataaaaagcaaataaataaataatgaaagtgagaattttcrttattctgaaaaagaaataaattccatcagttttgc

SEQ ID NO: 330146 - DNA, 595 bp, Homo sapiens
gaatcaattgacagtttattgtaataaaaaatgaaattgtttttataaataggctcttcgaaaggcaaaactttttgctgttaatgatttcatgtacaactacctccagttattcaaaatttgmatctctgagttcctaatcctgtgatattgagtttcactgatacaacaaatatagtgtgcacattttcatttccttttacagagcctactgttgattcattaagagtgtaaaaaatctgcagagaattatctttaaagtccccggataaaaagtttggcaaataacagctgatataacctatgaataagtctgtcagtttgaaagcatataaagcttaaatgtcaaaaggaaggtttccttgtaaatagaaaaaaatagaagctattttgaaagtctatttacattacaggccaatgggttcttcctgcttactgcatagcaaaaccaatgcactgagagcaaccagttttgcagccaaggaagagtttagtaatgacagggccaaccaagtaaaaggacagaagataattctcaagttcacctccccaagaattcagagactaggaattttcaatgacagtttggctgtca

SEQ ID NO: 330147 - DNA, 555 bp, Homo sapiens
tatttcttgtaattaccataaagtagaatgttgctttttatttagtctgaaaggtcccccatttatttgcatatatggccttttacatttaatgaaattattgatgtggttggggttaaatacaccaccttgctatttattccttcttctttgtgattcttttataaattttcctttcttttggattaacatggtatttttactattaaattcatttccactcattaactatacttccttctgaaaaacacgtattcttattgtttgctataaagtttaccatatgcatccttaacttaccacaatctaactttaaccaatattatacatcatgaaaaatctatgcataatagtatatgtataatagtacacatccattttctgccctttcctccattgtgctgctattattcactttacttgcacatatattataaaatacaacytactgtatttttgctttcaaaaatatatattaaattacagaaacaaaaaataggaaaaatctttcatgtttactcacatacttactattcctggcactctccagtcctt

SEQ ID NO: 330148 - DNA, 562 bp, Homo sapiens
tactctatgtctaaaataaaatttctagaataaagtttttaagttgcatcatgggtatgagacattctgaggttagagtaactgtccttcaagatgccttatataccacaaaaagctattaaatggtcctgcattcttaaataggtacaatgcatgtgtgttggaaataaaaagtaggaaaaaaaaagagcactccaatttctctactagttatccttctgtagataactctccctgaagtataayattctgcaggaaccgatgtctgatttccaggggtgtactgtgctcttattaagacaacacagtaagagttacactaaacctaaaaccatggctgcttcatggtcatctggaagactttattccaataaacagacctaacaaggacttctattctaccatcaacatgagtatcacaaggcttcttactccacaacgggtacaacgtcaactatctgaaaccaaggagaagccccaggggtgtgtatacttgcctccatgcttggtgataaccaggaatgtgcaactgaagaaactccttagcaagggcaaaacacta

SEQ ID NO: 330149 - DNA, 562 bp, Homo sapiens
tactctatgtctaaaataaaatttctagaataaagtttttaagttgcatcatgggtatgagacattctgaggttagagtaactgtccttcaagatgccttatataccacaaaaagctattaaatggtcctgcattcttaaataggtacaatgcatgtgtgttggaaataaaaagtaggaaaaaaaaagagcactccaatttctctactagttatccttctgtagataactctccctgaagtataatattctgcaggaaccgatstctgatttccaggggtgtactgtgctcttattaagacaacacagtaagagttacactaaacctaaaaccatggctgcttcatggtcatctggaagactttattccaataaacagacctaacaaggacttctattctaccatcaacatgagtatcacaaggcttcttactccacaacgggtacaacgtcaactatctgaaaccaaggagaagccccaggggtgtgtatacttgcctccatgcttggtgataaccaggaatgtgcaactgaagaaactccttagcaagggcaaaacacta

SEQ ID NO: 330150 - DNA, 562 bp, Homo sapiens
tactctatgtctaaaataaaatttctagaataaagtttttaagttgcatcatgggtatgagacattctgaggttagagtaactgtccttcaagatgccttatataccacaaaaagctattaaatggtcctgcattcttaaataggtacaatgcatgtgtgttggaaataaaaagtaggaaaaaaaaagagcactccaatttctctactagttatccttctgtagataactctccctgaagtataatattctgcaggaaccgatgtctgatttccaggggtgtactgtgctcttattaagacaacacagtaagagttacactaaacctaaaaccatggctgctkcatggtcatctggaagactttattccaataaacagacctaacaaggacttctattctaccatcaacatgagtatcacaaggcttcttactccacaacgggtacaacgtcaactatctgaaaccaaggagaagccccaggggtgtgtatacttgcctccatgcttggtgataaccaggaatgtgcaactgaagaaactccttagcaagggcaaaacacta

SEQ ID NO: 330151 - DNA, 604 bp, Homo sapiens
ttgcagaaaagtaaagcaagcatagaattttcagtatctatgctaggacaattgagcatcatctgaaaaaccaaaaagaaagatacctgtttctgaataattcaattccaaatggaccaagaatttaactgagtagaaaaccttaaacattttaaagagagaatataggacaatacctttattgcattttcaaggaaagtagggggaatatatttcatagacatgtcccaaattttgaaaatcaaaaggaaaagactcacagtgggagaagacatttacaacacaggatcaatagccagaacacattaataattccagtgactcaacaagaaagtagaaaaaaatccaaaggaaaaatgggcaaaaaaaaactattattttggaaacttgagtggcaagcaccaataaaaaatactcctaatccaaatcttgtggcctcacagtatacatgcagtgttttaaatctaytgctgtaatggtttaaatcacttgctttctttgctttttgctgaaaacttcagaagtaaatgaggttccactacgtagacttgctttatagaaattatatagtgggaaaaattcttatttttaaaataaaaatgtg

SEQ ID NO: 330152 - DNA, 516 bp, Homo sapiens
caacactcttcaactgttacaactttgggtcaagttcttctaggtgcctttccaaagcttacaagctgtaaacctcggcagcaccacccacatcatggcttttaataggcccagatagagcttgtgctgcatctctggaaggtgcaagcagcaagctttgttggtgttcacagggtgcagacacacagattgcaagagctatgcagacatggtttcctacacgtagatttcaaaggatgttgcagaaggcctgtgggcccaggcagaaacacactgcaggcatggggcctccaaagagagtctccactagaatgcccagtggagttatgggggcgaggctgccaccctcaggattcagaactgtacagtcattggcagtgtgcaacacaagcctggaaaaactggaggcaccagkgtgcaactgcaacctctgagaacagccatttagactgagcccagcaaagccatgggagcagggcttcccaaggccttgggggcccaaccttcaccccagtg

SEQ ID NO: 330153 - DNA, 444 bp, Homo sapiens
cagtattgcgggatctggccagcagcccgcagtgcaacggggctctctcttttttcccaggcagatcgacaggtcaagaaataatagacacacacaagatagtgaaagctgggtctagtggggtcaaccgccttctggtcctgcgatgccaccaatgtactggatataccagtatttaagtttagcgagggcrggggtaggttagtgagggatttagggtcttttgattatgaggtgagatggtcacatggggatgaagtagttctttaacataacatctgtatgcagcagtacagtacatggatataagaatttacaatatagtgtgtatatcagtaatttctaacagagccttaaaacagaaacacaatctttccataacctatgattagcaagatattaatcagcagtaacagttgcagcaaaacctggttacgagcaatc

SEQ ID NO: 330154 - DNA, 547 bp, Homo sapiens
tggttacgagcaatccatagaaacaggacgtgaagctagacagccggttagactagaaattctcagaagggagtatgccttaaccctaaagaggcctagaagagccgtggcaagatgagggcctttatagycctatcttatccatatggacaggcgcccctcatgcattgacttataggctctccacaggggtcgcattccattcccagagctatgaacatctgcttttctgggatgggaatcttggtgatgtgaaacctccctgactgcatgtccgttcataggctctctgcaggaggaagcacatcacgcgctattggctcatcctggcagcccaacctggcattgtctttacacaatcctgcatgcaattttgtatttacaataatcaggagcatttcatcttttattccgtagcaatagtttccaggggtctccctacacaacagaaagggtcaggaaagtagaaagaaattttattgacatcaacttaaacaatggtgagactttcccaaaacttaatgacagcagataaagacaatgaaaa

SEQ ID NO: 330155 - DNA, 547 bp, Homo sapiens
tggttacgagcaatccatagaaacaggacgtgaagctagacagccggttagactagaaattctcagaagggagtatgccttaaccctaaagaggcctagaagagccgtggcaagatgagggcctttatagtcctatcttatccatatggacaggcgcccctcatgcattgacttataggctctccacaggggtcgcattccattcccagagctatgaacatctgcttttctgggatgggaatcttggtgatgtgaaacctccctgactgcatgtccgttcataggctctctgcaggaggaagcacatcacgcgctrttggctcatcctggcagcccaacctggcattgtctttacacaatcctgcatgcaattttgtatttacaataatcaggagcatttcatcttttattccgtagcaatagtttccaggggtctccctacacaacagaaagggtcaggaaagtagaaagaaattttattgacatcaacttaaacaatggtgagactttcccaaaacttaatgacagcagataaagacaatgaaaa

SEQ ID NO: 330156 - DNA, 295 bp, Homo sapiens
aacatctaaactgttatttgagaaataagtcaacaactgatttcagtgatcttttccctaaataaatgaactgaacttaggcacagggtgtacattcatcatgatcaacttagatttgaagaaaatcacttcttctggttttctaaactgggtttggaagagattttagtgaaattaatttgtrgatagattccatacaaaaactagattaaaaaaaaaacaaatttaatgtgaacttagtcaagtacagaagaaaaatcaataagcatgtattaaaaactagtatatctttctc

SEQ ID NO: 330157 - DNA, 514 bp, Homo sapiens
tctttttaaggagttgcacacttttgagattttattctgcctcttgtttcacccacttgcatacatcttcattgtaattaacttcagaatttatccaataaagtgtaggggaagcaataaaatttaacatatatctaagaatattatggaggtcagttggtccacatcttgaattttcaacattaaattaacaagttaataaatgttggcatctggctttttctagttaaaatttgagttttatagagaattcctttccagctatgatgatcaataaaggacaactaggaaagccagataaaaatctaaaatacatctgtttggggacatcaaagggcagtcaaggttgccaggcatctaggggcaaakaacctgaaaaagaaggtactggaaaagagtgacagcattttgcaggctccctcagcctttgaggcatttgctgattttctgaacatggaaagaggctgagaaccctggaagaaggctgctgctaagaagcagaaatcccataagc

SEQ ID NO: 330158 - DNA, 508 bp, Homo sapiens
tatattttttgttttcattctgtttttaatcattctctcagtgtccaattgttggaagagaagcagtatgactgcagctttccaaaatctttcttccagggcatggaataaaatcgactctactcttgagtcttgaaatttcgaagattttcattgtgttccctcctcctcccaggtttatcctctactcctggrtagtgggccatagaggaatcctccttacaattcagttttttccagttttcttcctactaatgcacagattctttctagtccagagtaaggtgtgtggagcaggttaatttgaaatgaattccattcctccacacttccttgtgaatattctatgcctcatatggaagtgattgacttcaagaattgtgtgtccttctttttatggtgcacatgggtagtaacagaggacaagaacacagaatttgaattgtttgataaatatgaattcttcactaatttcctgccattatctctttgttctccattctattat

SEQ ID NO: 330159 - DNA, 510 bp, Homo sapiens
tatgcataggaatttgtgtaatataattttaaaggacaaccatattttcttattttccacatcagttgcttctaaaaacatatatttagactgtaaatatgacacacatattattattttttgttttgttttgttttgttctgttttgttttgagacggagtttcgctcttgttgcccaggctggagtccaatggcacgatctcggctcactgmaacctctgcctcccagattgaagcgattctcctacctcagccccgcaagtagctgggattacaggcatgcaccaccacacccagctaattttttgtatttttactacagaccacatttcatcatggctaggctggtcttgaacttctgacctcatgtgatccacccacctcggcctcccagagtgctgggattataggcatgagccaccgtgcccggccaacacatattatgatttctaattacaatctggatttctgaaaacatacaccttgaaatgttcaagatcacgtttagt

SEQ ID NO: 330160 - DNA, 620 bp, Homo sapiens
agatgagaggcacaagtagacaaagctttctgctttcctgaagtggaattaattttcaggatggtagagagaatggacacataggatgcagatattgtgataagggacaccatcagggtggaaccagctaaaatgtgtatcatgatttcaatgtcgtatgtgtccatgcaggacagagctaaaattggagacgtgtcgcagaaaaagtgacgaactacatttgagtcgcagaaatgcagtctgctcatccaaaccacattgacaaaggagttgataaagctaatcacatagggcccagtgacaagagcgcaacacagccttttggacataataactgggtaacgtagaggactgcagatagctacgtagcgatcataggccattgatgaragaagaaaacattcagcagctcccaagaagacaaaaaagaacatctgggcaaagcagcccatgaaggaaatatagttggaagtcagtaagttcgctaaggttttaggtgtgatgacagttgagtaactgaggtcaataaatgacaagtgagtaaggaaaaaatacatgggagtgtgaagctggaggtccaggcggattatcaatatcatccccacattgcccagcatagt

SEQ ID NO: 330161 - DNA, 613 bp, Homo sapiens
gaaataaaagtgagagcaaaaggacacaatcagccctgagaccaataaacattttataatgaatttagttgcttaaaacttacttcctccatatataatcaggtcaaattttttcttaaatatgggttaaaagtatatagaaattgagctgaactattgtacagagaactatttgcccaagatggggaagcaaaggaagagtctggaagaaaacacagtgtgaatcagggtaaaatattaatgtggttttgtgttaagtaatgataataaaatcaattttcatgtmaatttaaaagtgagtctagaaggaagcatgaccataatctagaatttcaggagataatttgttggtatgtataaagcggctacttttgtatgtatttattgtacatttgatgagtttttggaagagcaattctgttcatcagaaatttagtgatcctgagacaggctaatgtggagattaaaaagccagaatcacaccctttgacaataggtatcattaggttttaagccaaataagaggcaaaaagtgactttttacgtcaaggccacctcaatagacttggtgattgcaaagttgccatgaacaaggggttttcttgctcatgtt

SEQ ID NO: 330162 - DNA, 534 bp, Homo sapiens
ttttggtgtaccaagtcattaattagacatggaatgataataaatcaaataaagctcaaggttttaactctgggaagaagtttgagaatgtataaatactaaaggaattttatataggttggcagcattatttttcaactactcatgattataattgtaagcagaatgtgtgttttgtggttattagggaaaacaacggtgtccaactaagtctggaatattataaactttttgtagaaaagaatgtaatgtttgaaaaccatctatattttatctatgacatcaaatagctgattttagacacctattattgtcattctgcattttttaatcacacaattatattagtaaatgttagtattcataaaaatgttagtacttcattcttaaaaygttagtatttcattaaaaaaatgaacaaaagaggaaacaccacttagaaaaaaataacattgcatggcatttattctcattaaaatattttaaaattataatttatgtatgcaaaatatttacccaacaacacattattag

SEQ ID NO: 330163 - DNA, 534 bp, Homo sapiens
ttttggtgtaccaagtcattaattagacatggaatgataataaatcaaataaagctcaaggttttaactctgggaagaagtttgagaatgtataaatactaaaggaattttatataggttggcagcattatttttcaactactcatgattataattgtaagcagaatgtgtgttttgtggttattagggaaaacaacggtgtccaactaagtctggaatattataaactttttgtagaaaagaatgtaatgtttgaaaaccatctatattttatctatgacatcaaatagctgattttagacacctattattgtcattctgcattttttaatcacacaattatattagtaaatgttagtattcataaaaatgttagtacttcattcttaaaacgttagtatttcattaaaaaaatgracaaaagaggaaacaccacttagaaaaaaataacattgcatggcatttattctcattaaaatattttaaaattataatttatgtatgcaaaatatttacccaacaacacattattag

SEQ ID NO: 330164 - DNA, 523 bp, Homo sapiens
tacttataaattttttaggtgattttaacttcctctttacttgaaatatctaaacatcacattcaactctcacaaaacaaataggtataggtcatctgttcaattcataggatttaatgctctctaacaccatattagtccagagaactctgattagcagagatgatatgccaaggcttggagtttgcaccctctgaagccatggtctgagctgtaccttgggcccttttagccatgactagaatggctgggacataaggcaccaagtccctaggctttacacagccaggaggcctgggcccaacccaggaaaccacttttttctcctaackctctggtcctgtgaagagagggtctcccacaaaggtctctgatactctggaaatattttccccattgtcttggtgattaacatttgacccctaattaattatgcaaatttcttcagccttcttgaatttctcctcagaaagtgggtttttcttttctatcccattgtcagggtgaaaattttctgagcttt

SEQ ID NO: 330165 - DNA, 543 bp, Homo sapiens
atttctgttctgatcttttttgtttccttctgataattttgggattgatttttttttttttattttaaatgttgttttctggggcagaatgttaggcaatttctttgagatctaaatctgacccccacaggccacaagtacctgttattattatttcatatattatatcatgtgtcctagtgttttagctgggacttaaagaatatacaaatastttcatcctcatcagggaacttataaaggtaagattaactaaacatgatgtcaacctatgctcaaatatgacatactggaaaatggggaaaacactatatgccactgtgaacgatgtggtcctcattgttccaagatgcatcaatcacatatactggaaattagaatatagttcctcctgtttcatgatgtctgaaacttctctaccttgtggcatgcctgttcagctcaatagtaatttactctgtgtccagggagtctgaggatttgccaaattgtcatcgtccttcctcatcttttcctaggagggtcccttcccctattaagaaa

SEQ ID NO: 330166 - DNA, 532 bp, Homo sapiens
tcattcctctgtgactaagacctgtaggtcagtaaagcttaaagtcaatggagcaggaagcagaaattttgacagtgggtcactagggttaatagtgagtggtgtcttgaatgttaaatgacgagttaatgggtgcaacacaccaacatggcacatgtatacatatgtaactaacctgcacattgcgcacatgtaccctaaaacttaaaggataataaaaaaattaaaaaattaaaaaaaatagtgagtggtgtcactcatasttccatctcttcattcctaggctactagatccagtctatggcaaaaaaacagcacaatatactggagactaattcaaagcatatatagctttcttgcaaacttttccccagctattcaaattattgccatctagctgaattgtaattaaaatttcaaagccagtttctttgggatgttgggcagcatggtgagtatgactagtgaattccatgatcatggacacattgctgcacttctttatctgtgaagtgagtttcttgatatatgt

SEQ ID NO: 330167 - DNA, 532 bp, Homo sapiens
tcattcctctgtgactaagacctgtaggtcagtaaagcttaaagtcaatggagcaggaagcagaaattttgacagtgggtcactagggttaatagtgagtggtgtcttgaatgttaaatgacgagttaatgggtgcaacacaccaacatggcacatgtatacatatgtaactaacctgcacattgcgcacatgtaccctaaaacttaaaggataataaaaaaattaaaaaattaaaaaaaatagtgagtggtgtcactcatacttccatctcttcattcctaggctmctagatccagtctatggcaaaaaaacagcacaatatactggagactaattcaaagcatatatagctttcttgcaaacttttccccagctattcaaattattgccatctagctgaattgtaattaaaatttcaaagccagtttctttgggatgttgggcagcatggtgagtatgactagtgaattccatgatcatggacacattgctgcacttctttatctgtgaagtgagtttcttgatatatgt

SEQ ID NO: 330168 - DNA, 540 bp, Homo sapiens
tatggaagtaatatattaagaaaatttatcctcatggttcagtgtataatatgcaattggtagaggttcataaaatacagatattcaggtgtcaaacctagaggctgaaaccatgcctgacttgaggctctgcaaaaggagaaagtgaagcctttggcagaactgtaagctgcctgagcatttgtttgagtccatttttgcttctatarcagaatacctaagagtggacaatttataaagaacaaaagtttgttttttgacagttctacgcgttagaattttcagaaaaaaaagtactgtagaaaatgattgacttaccaaaggagaaaatcaaaaaagcatttttttttttctgaaagaatcaaatagaaaatctggagttaagaaacaaaataactgaaatgaaaaatttacttgttagatgcaacagaagattgagaggcagggtgaagaatcaaccaacttaaaaagaggtaaatagacaatatccattctaaataaaatagaagaaaggtcaccaaaaaatcaagacatccttgg

SEQ ID NO: 330169 - DNA, 540 bp, Homo sapiens
tatggaagtaatatattaagaaaatttatcctcatggttcagtgtataatatgcaattggtagaggttcataaaatacagatattcaggtgtcaaacctagaggctgaaaccatgcctgacttgaggctctgcaaaaggagaaagtgaagcctttggcagaactgtaagctgcctgagcatttgtttgagtccatttttgcttctataacagaatacctaagagtggacaatttataaagaacaaaagtttgttttttgacagttctacgmgttagaattttcagaaaaaaaagtactgtagaaaatgattgacttaccaaaggagaaaatcaaaaaagcatttttttttttctgaaagaatcaaatagaaaatctggagttaagaaacaaaataactgaaatgaaaaatttacttgttagatgcaacagaagattgagaggcagggtgaagaatcaaccaacttaaaaagaggtaaatagacaatatccattctaaataaaatagaagaaaggtcaccaaaaaatcaagacatccttgg

SEQ ID NO: 330170 - DNA, 540 bp, Homo sapiens
tatggaagtaatatattaagaaaatttatcctcatggttcagtgtataatatgcaattggtagaggttcataaaatacagatattcaggtgtcaaacctagaggctgaaaccatgcctgacttgaggctctgcaaaaggagaaagtgaagcctttggcagaactgtaagctgcctgagcatttgtttgagtccatttttgcttctataacagaatacctaagagtggacaatttataaagaacaaaagtttgttttttgacagttctacgcgttagaattttcagaaaaaaaagtactgtagaaaatgattgacttaccaaaggagaaaatcaaaaaagcatttttttttttctgaaagaatcaaatagaaaatctggagttaaraaacaaaataactgaaatgaaaaatttacttgttagatgcaacagaagattgagaggcagggtgaagaatcaaccaacttaaaaagaggtaaatagacaatatccattctaaataaaatagaagaaaggtcaccaaaaaatcaagacatccttgg

SEQ ID NO: 330171 - DNA, 536 bp, Homo sapiens
atcaatatagagggggagcctagatggtcgagtggacacagccagaaataacatttcccagttcctgagacattgggaagactggcacactctgaatggatcttcagagagaaggcattgaaagtagacaaagagaaagtgcagacactgggctaaaggggtagaaagycgagaaccctacacaggcctgccgagcactgggacccactcctggaccccactcactcctggcgaatgggtgagtcaaacagacaaagaataacctgctttatccatgggcctccagaatcctagttgcaggagaaccaatgatcccccatggacacttgagctggcaggaattgctgcttagaaaagtaatgggggcaggactccagattttacagagcacagagggtttggtgcaggaacagcttcagtggagcatggccagggatacccattccccaaggatcaccaagctcctctaggaggcttcagcctttaggagacttacagacctggacagaacagggtgatcttgtctgtgtgatggg

SEQ ID NO: 330172 - DNA, 592 bp, Homo sapiens
ccatctttttcacatgtttaagacatgaattaacattgtagttcctattcctagcctttggtaaggtgccagatatccaagtgtcatgatgtaaagtcttttctgattctgtgaatgagccaccctagagtacactgcacctacaggaacatcactgaaataggcaagttttgatcgttcaccacctccatcacatccttgtagaacttaccattgtagctgactgaaaagataacccgattccttctcttcaactgtttaatattgtgtggtgtcccatctcccagctccatccagctacctttcatcctccccacctgctgaggcttttgttatcaccaatagcaactcagtcatagttgctgccctcagctcaagacactcaaccacacaagatggcctcctcacccgggcagggagctgagcaggtgacagaggcagtgcgtccctaagtctcctgaggggggtgagagtgtctcgcaccactgygctggtgccactgcttctccacacatgcaaatggggctcttggctctaaaatgaagattttctgatctataattaactttgaaattttccacttgggcccata

SEQ ID NO: 330173 - DNA, 563 bp, Homo sapiens
gaagaccgaagccattttgtcagtatctaatgaatgattactccttggttgcaaatacatgaaaaggagagtcccatagaacacaaccacagctatcatgtgagaagcacaggtggaaaaggctttttgtcgtccttctgaggaacgtatcctcaaaatggtaataacaatgttgaagtaggatatcagaacaacgatcatggagaaaagcaagttggtccctgaaaagataaagactgctgtttctggaatgtaggtatcagaacaggacaatgctagcaaagggacatcatcacagtaaaaatggttgataatgttggaagaacagtatgacacagagaacacacaggaagagacagtcagtgctgtgataagactctgaaggtatgtgagggacaccagcagacgacacacctttggagacaccactacggcgtagagcagagggctccaaatagccacatagcggtcataggccattgcagccagcrtgaaaatctcagccacaatgaaaaccaagaatccacccagttgggctgcacatccatagtatgatatggttt

SEQ ID NO: 330174 - DNA, 583 bp, Homo sapiens
ttcttaaaaaaataagctatttgaattacagaatcttaaaatgtagtttyctgtgtatgatcttttggggagaatgttctggaagaaaatttaatatgcttcaaaaatgtgtctaaataaatagctgtctcacaaaatttaaaatttctgcagaattccagaatcatttatttttttgagggtttttcaaattatggtgtcaaaattgttaggtaacgttttagtcaaggttgctatctctttttttgttttgtttctctttcaaattagcaaaaatagtcattctttgagaaaggaataggcgagcattaggtaaaatgatgcactgacatatgcctaaaaatatctggttaacaatgcattcaacaaactcattcagaacttgtcaagttaaccatcatgaaaagttcactatctctctttttatcctaatcgattagaaaacaaatggtgtgaataagcagtctcgaatgacctgctatttgttcaggtcaaggtgagaaaaatggtatatttaactctcaagtcaatagaacattttgttacatatctcagctcaattacctttccccccaaaagaatg

SEQ ID NO: 330175 - DNA, 480 bp, Homo sapiens
caaggagtataggagcaagtgggaataaggtccagccactccacacagccaggcacactggytgctgcagctgagcaggcagctccaggtgcaagcacaggtcctggctctgtgcgaggctgtggctggatcagatgtatcacaagcagcttccactgtgggtacctgcatctgaacagggggagtgtggtggtgtctgaaagcttggaaatgtcagaaaccatagagccccaaagaggacgttatagccctggcctggggagacactaggtctgggctccccaaagggctgcagctcctcctctaaatcattgcctgcaatgtggtggttggggggatggggggtagcagggggcatgtttctgccctgtttgtgttacagctctttcagtcccatcatttggtggtcccaagttcttgtcccacatccaggaagaatgaggcacattgacaactggagggtgaacaaggcagagaaga

SEQ ID NO: 330176 - DNA, 580 bp, Homo sapiens
aggtccttaagtgggaaaatggcataaaataggtattttggaaaaattatttcaacgatgctatgaagctgacactgaagaaggcaggttatacgtagtaaaaccaattaaaagaccagrccatcttttatgcagaagtgaaatgttgggtgatggtgaaggaccctaaatagaccttgcaagtaaggaggtagaagcaggtaggttcaggtgtcaaggtttaagggctgcatgacaatgaagctgtttcagggcctcagaactgggatgatgaagaatggaaaaactgaagagctagctgaaagactgaattggacttggggacaatactagatggccttataagacagaaggaagcttggccccaaaagaaggaaacttggccccaaatggcagtttcctcccattggcaaacttggaaaacagggatggtgccatcaacagaaatgggtaggccattagtagaacccatgccaggcaggatacaggggaagacaccagtttgtttatagactcgttgaatctgacctgatggtgggttttttagtttgctagggctaccattaacaaagtgtcacag

SEQ ID NO: 330177 - DNA, 485 bp, Homo sapiens
ctcttccagtgttcaccagaattgccttcctggtttttccatgcctctcaaagaaaattctctcttgattgcatttctcagggcaattcattcattagatatacctattgaacacctattgarcactcagaacaggaaatgttctgagtattggagatacagtggtgaattagagagtggaggtattatcttattgaactcacagtctagtgtggagagacaggtgataaatgttaaaaatacattttataatttgagatttgagtgctttgaaaaagcaatgcaggtgtcttagtcattagggctgctgtagcaaaataccataggttgagtggtttataaagaacagcaatttctcagtgttcatgaggctgggaagttcaagatcaaggtgccagcagattggttgtctagtgaagacccactttctggttcatagatgacaccattttgctgtatccttacatgataaaaggggcaaggga

SEQ ID NO: 330178 - DNA, 500 bp, Homo sapiens
tggagaaaagatgaacacagctgtagcacttgggcctgtgagagctccaaatcactgtatctaaagcagcctcaaggctgaggtcagtcctctaagatgggctgccctgacagaagcaaatctgccagatttattgtgtctcatggcccaccagtcctggaacaaaagtttaaaggtgaaatatgtttttctctttctttttaaaatgcttttttatgtgaatcaaaacaaaaacaaatctctgagcagagatcataagtggaatgtaaaacatcacatttgggctcgcaagacttaagtgtctgcctgttaaatttgaagaaaaggaaggagttgcctggtccaggagcctagagagaacatgagaaagttgctggtttcttgctgaagacaaacacccattcagtgagataytgtggaagtcccttagtcttaacttgttagtctgttaattgggaatggcagaagaagtgaattactctgtggaattttgtgaaaat

SEQ ID NO: 330179 - DNA, 447 bp, Homo sapiens
aggactcacaagactcagaatacagtcacactcacagctgtgatttattgcagcaaaacaaagcaaaatcagcaaagggaaaagcacatggagcagaatcatgatacatgataaatgacagtagactaccaccaatgacgtgctggtaaacatttcacaacggsctctccaggggtcaagggacgatcgctatatagcatttgccaatttccagagtataatgttcccactataggtttaacaaccagctcacaaggctcctaaaaattgaacacttggctcttacaggttagtgtgggcctgctttagcaccaaaactgtcacagccttaaccaaagagaagtctcaatggcagctgctatgccaatgtggtatctttactagaacaaatggtttgaatgtgtctcctccaaaattcagatattatattaagaggtggagacttta

SEQ ID NO: 330180 - DNA, 447 bp, Homo sapiens
aggactcacaagactcagaatacagtcacactcacagctgtgatttattgcagcaaaacaaagcaaaatcagcaaagggaaaagcacatggagcagaatcatgatacatgataaatgacagtagactaccaccaatgacgtgctggtaaacatttcacaacggcctctccaggggtcaagggacgatcgctatatagcatttgccaatttccagagtataatgttcccactataggtttaacaaccagctcacaaggctcctaaaaattgaacacttggctcttacaggttagtgtgggcctgstttagcaccaaaactgtcacagccttaaccaaagagaagtctcaatggcagctgctatgccaatgtggtatctttactagaacaaatggtttgaatgtgtctcctccaaaattcagatattatattaagaggtggagacttta

SEQ ID NO: 330181 - DNA, 527 bp, Homo sapiens
tggagactttaagtggtaattaggccatgagggctcctccttcatgaataggatcagggcactaataaaagaggcacagtgtttggccagtttgcctgtctgcattgtgaggacacagcattcctccctccaraggatgcagcaataaggcaccaccttggaagtagagaaccgcctttatcagacaactgaacctgacagcaccttgactttggacttctgagcctccagtactgtaagaaaataaatttgtattctttataaattacctaatctatggtattttgtctagcacaaaacagactaagacaagtttcatcatcatagccataactatgtagttggctaactttttgtttccttttccatctgaaagaagaatcagaaagcagttcacattcatatgggatggttaacaatacactattatggtcttcccacagggcttcattaacggagttaactctctgttaactgccctcacagccgctgtcataagatggtccaaagggacttggacatttcac

SEQ ID NO: 330182 - DNA, 572 bp, Homo sapiens
ttcacattcatatgggatggttaacaatacactattatggtcttcccacagggcttcattaacggagttaactctctgttaactgccctcacagccgctgtcataagatggtccaaagggacttggacatttcactaaacaccatattggtccacaatatcaatgacattatgctaattggacttgatttgtaaaaaatgacaagtgctttgtagtatctcggtaagagatatgagctccaaagaagaaaagccctatgaagatttaggaatcccttatattaatgaagagtttgtagggaccaagctgactagagcatgttagatcatcccttccaaaacaaagacaaatcattagatttaaaaagtagcattatgcaggtacaaccccagcactgcgacatggaccaaagatccatcacagcatctgtgacaggaaaaaaawaaaaaaaaaaaaaaaagaacaccctgcaaagttggtgacacaatatcccactggaaactggcactgccttgtccaaggctgctctcccctcgacaagaggacaccccaaaccaatgttgctgatgtat

SEQ ID NO: 330183 - DNA, 572 bp, Homo sapiens
ttcacattcatatgggatggttaacaatacactattatggtcttcccacagggcttcattaacggagttaactctctgttaactgccctcacagccgctgtcataagatggtccaaagggacttggacatttcactaaacaccatattggtccacaatatcaatgacattatgctaattggacttgatttgtaaaaaatgacaagtgctttgtagtatctcggtaagagatatgagctccaaagaagaaaagccctatgaagatttaggaatcccttatattaatgaagagtttgtagggaccaagctgactagagcatgttagatcatcccttccaaaacaaagacaaatcattagatttaaaaagtagcattatgcaggtacaaccccagcactgcgacatggaccaaagatccatcacagcatctgtgacaggaaaaaaaaaaaaawaaaaaaaaaagaacaccctgcaaagttggtgacacaatatcccactggaaactggcactgccttgtccaaggctgctctcccctcgacaagaggacaccccaaaccaatgttgctgatgtat

SEQ ID NO: 330184 - DNA, 531 bp, Homo sapiens
agccttctgctttttaagggtactaataatctctgtcttcagatgctaagtatataagagctggtattatttcacaggataagaataaggggaggtggcttagaaaataaatggaatttggctgggtgcagtggctcacacctgtaatcccrgcactttgggaggccaaagtgagtggatcacttaaggtcacttgaggagttcaagaccagcctggccaaaatggcaaaaccccatctctactaaaaatacaaaaattagctgggcatggtggcacatacctgtaatgccagctactcaggaggctgaggcagaggaatcacttgaacccgggaggtggaggttgcagtgagttgagattgcgccactgtactccagcctgggccacagagcaagactctgacagaaaaagaaattcacctggaaatttttacatggataaagtcactgctacttttcagttaattcaactacaagagactgaacatttgtgcctcctccccccatcaaattcatatgttgaaccttaat

SEQ ID NO: 330185 - DNA, 569 bp, Homo sapiens
agaactctaaacttcaatatttatgtaccctgcaaggtacatattcctgccctgtaatcaggaataggccaaggtggccttttggcacagcttgactcagcaggtttrgagcacgggcacacaactccacatgttatgtaagcatgccacatgaggctcattaggtgatcacccgcatgagctcgtgcttgggttggagccactattgtctgtaaaaggtataattaccttgctgatgctgtacatacagctcacacctagacttggcacccatggcttgcttgtgcccaccactcagtcccaggcttgctcgtacccaaagagatagtaaaagccatgtggaaactacgattcctcgaggttttttccagctacctgccattcatccatccactctccttagtcctcagcttgggctggaacctgacatttggcataacatagcccccaaacagtgtttcaggccaagtttgttatctttctgccatcagtgaaaatgcaaacaccagagacacgcaaaaaccaataaagaaaatgaagagcatcaccatctcttcatctaagcatcc

SEQ ID NO: 330186 - DNA, 569 bp, Homo sapiens
agaactctaaacttcaatatttatgtaccctgcaaggtacatattcctgccctgtaatcaggaataggccaaggtggccttttggcacagcttgactcagcaggtttggagcacgggcacacaactccacatgttatgtaagcatgccacatgaggctcattaggtgatcacccgcatgagctcrtgcttgggttggagccactattgtctgtaaaaggtataattaccttgctgatgctgtacatacagctcacacctagacttggcacccatggcttgcttgtgcccaccactcagtcccaggcttgctcgtacccaaagagatagtaaaagccatgtggaaactacgattcctcgaggttttttccagctacctgccattcatccatccactctccttagtcctcagcttgggctggaacctgacatttggcataacatagcccccaaacagtgtttcaggccaagtttgttatctttctgccatcagtgaaaatgcaaacaccagagacacgcaaaaaccaataaagaaaatgaagagcatcaccatctcttcatctaagcatcc

SEQ ID NO: 330187 - DNA, 601 bp, Homo sapiens
gtcccctaattttctttctcttcattctcatctttttctttggcttttcaaggagagttactcaaccttatcttccaagtgttctattgaatattttttatcttggctaattcattttttcactccgattatactttttaattgcatcttattcttgtttcatgaatgcaatactttctcaaaactttcagatgacaataatatctatagggttgtttgtttttgttatttatttttctgctccctctattgtctctatgtcttctcagccttccaaaaaaagtttatttgttaagttctcttttttcatagttgaggtcttctacaaatgtctggtgatccttaaatgtttatttatgattaagaagtggtacactaaaaagctaagargagactttatgtgcatggggtggcttgcccctcagtaagcattatcaatagatgagtgggcttacttgattgatgaagaacgtttcagatgaagtctctgtggatcttgtcccaagggccagtcagtctttttggagaattatccttcattttcatgcctggaatgtatacatctgggcactcgtgttctggaagcagagacagaaagggc

SEQ ID NO: 330188 - DNA, 601 bp, Homo sapiens
gtcccctaattttctttctcttcattctcatctttttctttggcttttcaaggagagttactcaaccttatcttccaagtgttctattgaatattttttatcttggctaattcattttttcactccgattatactttttaattgcatcttattcttgtttcatgaatgcaatactttctcaaaactttcagatgacaataatatctatagggttgtttgtttttgttatttatttttctgctccctctattgtctctatgtcttctcagccttccaaaaaaagtttatttgttaagttctcttttttcatagttgaggtcttctacaaatgtctggtgatccttaaatgtttatttatgattaagaagtggtacactaaaaagctaagaggagactttatgtgcatggggtggcttgcccctcagtaagcattatcartagatgagtgggcttacttgattgatgaagaacgtttcagatgaagtctctgtggatcttgtcccaagggccagtcagtctttttggagaattatccttcattttcatgcctggaatgtatacatctgggcactcgtgttctggaagcagagacagaaagggc

SEQ ID NO: 330189 - DNA, 601 bp, Homo sapiens
gtcccctaattttctttctcttcattctcatctttttctttggcttttcaaggagagttactcaaccttatcttccaagtgttctattgaatattttttatcttggctaattcattttttcactccgattatactttttaattgcatcttattcttgtttcatgaatgcaatactttctcaaaactttcagatgacaataatatctatagggttgtttgtttttgttatttatttttctgctccctctattgtctctatgtcttctcagccttccaaaaaaagtttatttgttaagttctcttttttcatagttgaggtcttctacaaatgtctggtgatccttaaatgtttatttatgattaagaagtggtacactaaaaagctaagaggagactttatgtgcatggggtggcttgcccctcagtaagcattatcaatagatgagtgggcttacttgattgatgaagaacgtttcagatgaagtctctgtggatcttgtcccwagggccagtcagtctttttggagaattatccttcattttcatgcctggaatgtatacatctgggcactcgtgttctggaagcagagacagaaagggc

SEQ ID NO: 330190 - DNA, 584 bp, Homo sapiens
aggactgccaggttgttatatctgctgtgcagcaacagactaatacactgagacagcagggtttgcagcagagaaagagtttaatcattgcaagtctgccaaaggaggtaacaggagcgattctcaagcctcaaatccatttcatcaaagggttctgggcaagggtctctaaggagatcatggagggcaaggagctagaaaattggggtcattgtttggtcatggtaaggggatgaagtcaacaggatgtggaaactgcattcttccatgggtcagcttcctactgggctcttcagaycagctggcatgggtagttttgttggaatacagaactaaaggagaaactcaaacagaaagcttatcatctcacaatgtcttagattttatctatagaacaaagaatattgtgacaagggctacattatcctggaggtcttcctggagtagtaagtagtaaccagctacaaggaagtgagacaaagggcaagctggcttaataattacctctgattgagctgcaagcctagctgaattttattttttcccttaatctattttataaaattttcttggggacggtttca

SEQ ID NO: 330191 - DNA, 619 bp, Homo sapiens
ggaaatcacgaagggtttatcagtatctgtcagtgtggtaaatagtcagatgaagtttgcctctgaagtactagatgacagctgatcaatactctaatgaaaaagaccaaggtgacaaaattttaaaagggaaatatatcaaaagactggtatgtcttacacagtcttmgaggaagaaatgaaagaggtagaaaaaattaactacatacatttgcaatgctttataacttgcaaaatattttcacatataacattttattaattcttacaaaaatacaaccaaatacttaaattactgcatgatgagaactattagtagatcaagtattgttaaaccaaaatgcatgtgcctgggcgtctttaaaagagcatttctcaacctggactcagggatcctgagaacatgtaacaatctttgtagtcttatttgtgcttttttaaatgtcatgttttcattctgatgattatctaaaaaaattaacccatgtaaaacctggatcatgtgaataagtaatttataattgagtacaactatgagatttcagaatctcactggcattggagaattcttcttggtaaattcttgttgatgagctaaagagaaaaaaattgagatgtc

SEQ ID NO: 330192 - DNA, 619 bp, Homo sapiens
ggaaatcacgaagggtttatcagtatctgtcagtgtggtaaatagtcagatgaagtttgcctctgaagtactagatgacagctgatcaatactctaatgaaaaagaccaaggtgacaaaattttaaaagggaaatatatcaaaagactggtatgtcttacacagtcttcgaggaagaaatgaaagaggtagaaaaaattaactacatacatttgcaatgctttataacttgcaaaatattttcacatataayattttattaattcttacaaaaatacaaccaaatacttaaattactgcatgatgagaactattagtagatcaagtattgttaaaccaaaatgcatgtgcctgggcgtctttaaaagagcatttctcaacctggactcagggatcctgagaacatgtaacaatctttgtagtcttatttgtgcttttttaaatgtcatgttttcattctgatgattatctaaaaaaattaacccatgtaaaacctggatcatgtgaataagtaatttataattgagtacaactatgagatttcagaatctcactggcattggagaattcttcttggtaaattcttgttgatgagctaaagagaaaaaaattgagatgtc

SEQ ID NO: 330193 - DNA, 614 bp, Homo sapiens
ttccttccacttaaaaaaaaattatccactacatcaaggtaaagattgtattttgaatttcatttttggaaagatttttttgggagtatatagtttgaaattttctatttgttctaagcttctgcaagrattataagcataaaaatgtataccaattttgactttgtatatttaaaattactttattatatacttatatttattgtataatcattttatattttaagttattttcttgtaatctcacataaaaattgagtaagaaatgggtatcagcaagtttgaagacattgctttttgaaatagaaatgtttctcaaacttgtttgtaaattttttaaattaaatctcttgtggtgacctagaagagatgattaaaagaattttgtgaattcttttttaagtgagtaatctttttgcacttgaaccatcaccaggtggtcttgtctactttctatgtttagattgtcatataaccatattttcctgaagtggtacatctgacacagtgaaattagtgaaaggagaatcaggagagagacagccaaatccagaggaaaatgcccatgacatattgtgaaagctgaatatacgatcagcctataagttaaagaa

SEQ ID NO: 330194 - DNA, 567 bp, Homo sapiens
tgaaaacaatttacagttcttcttgtcgattataattactggkttgcttaaacagagatatcgatctgtttcactctctgctttggaaagtaagaaatgcaagtctaaatttcacaagtgtgtgaatcacacatatagaacattttactcacactacccaaggtgggttcaatagtttagcccaaaagtttccatgaacttttttcttgtgctgttttcttccatgacaaagatccacggattagagcatgatatgtcagaactaactgggatcttaaagatcttctcattgtaggtaattgctttatcagcacctgtcttctgatggtgttgatttttcaaagacaacattcttgttatgcactgtgtcaaatagtggttgtgtcacttaagatgctctcagtgccaagtaacacaaaccccaactgaaagtggcttatacactgagagaactgtgttacctgatgtagcaagaagtctgaaggtggccacttcccaagagcagggtgctctgcatctttccattctgctgtgctcagcaggttgataaagctttcgtctgtgttt

SEQ ID NO: 330195 - DNA, 567 bp, Homo sapiens
tgaaaacaatttacagttcttcttgtcgattataattactgggttgcttaaacagagatatcgatctgtttcactctctgctttggaaagtaagaaatgcaagtctaaatttcacaagtgtgtgaatcacacatatagaacattttactcacactacccaaggtgggttcaatagtttagcccaaaagtttccatgaacttttttcttgtgctgttttcttccatgacaaagatccacggattagagcatgatatgtcagaactaactgggatcttaaagatcttctcattgtaggtaattgctttatcagcacctgtcttctgatggtgttgatttttcaaagacaacattcttgttatgcactgtgtcaaatagtggttgtgtcacttaagatgctctcagtgccaagtaacasaaaccccaactgaaagtggcttatacactgagagaactgtgttacctgatgtagcaagaagtctgaaggtggccacttcccaagagcagggtgctctgcatctttccattctgctgtgctcagcaggttgataaagctttcgtctgtgttt

SEQ ID NO: 330196 - DNA, 567 bp, Homo sapiens
tgaaaacaatttacagttcttcttgtcgattataattactgggttgcttaaacagagatatcgatctgtttcactctctgctttggaaagtaagaaatgcaagtctaaatttcacaagtgtgtgaatcacacatatagaacattttactcacactacccaaggtgggttcaatagtttagcccaaaagtttccatgaacttttttcttgtgctgttttcttccatgacaaagatccacggattagagcatgatatgtcagaactaactgggatcttaaagatcttctcattgtaggtaattgctttatcagcacctgtcttctgatggtgttgatttttcaaagacaacattcttgttatgcactgtgtcaaatagtggttgtgtcacttaagatgctctcagtgccaagtaacacaaaccccaactgaaagtggcttatacamtgagagaactgtgttacctgatgtagcaagaagtctgaaggtggccacttcccaagagcagggtgctctgcatctttccattctgctgtgctcagcaggttgataaagctttcgtctgtgttt

SEQ ID NO: 330197 - DNA, 614 bp, Homo sapiens
acaggtctgatacttgttgtgtgaccttgaacttgagcactgttgaaatctcatgatgcctatgcagggttgtggtcatcaggattggcaagatagcatatgaggaactcagcaaagcagctggttcactgtsaatatccagtaactcctggaaaagaaatcaaggcaatgagttaaataacatgctctataagtgacatctaaaagtgacatgaaagtgcgccttaaaaaagtcatcagtataaggaaaagctgtgttctgacaaaacgtaaccggaaacctattggataatagaatgaattaaaggagctcagcaaatccagggatctaattgtcatactaagagattaagcttttacttctgtgacatgctctgaattaggaagtttcattgattaccttcttaagaagatagctttctgaaggcccatttaagatttagtagcaacattattgaagagttagtgtcctgttcccttttggtgttttggggtgaactacaaatcttacattgggagtctttcaaataaaaagtatttttaggtgttaatttggaggcctttccaggcaaggatgccaactttcttacagcaacaatgcagaaaccaggcca

SEQ ID NO: 330198 - DNA, 542 bp, Homo sapiens
tattattcttaattcacttgatgtcagcatcatctgcccagacacccagactcaaaagccacgtgtttcttctccctcacatgtcacatctaactgaatcatcacgtcttcatttggtcctccaaatacattttttgaaatctgtttcctctttctcattcttgttgccactgtcctgtatattttaatgggtcctccagtatgtctgtgggcttcttgagagcatattgaggaaaagggcaagygatatattcattcaagcattcattcactaattaacttcacaaaaaattgagacatatgtcgcagctactgagaaacactgggttgaatcttttgagaaaattgaacttgacctggaaaccttatagttttttctcatcctgtctaggttaattaaccctgtattacatagctctcaggccttaacaatttcacgctggatatctagctgttgtctagccagagagcaaagattaaatgacagttcttatcaatcattcccaaagtacctctctcaaaaccataagattctgccaagt

SEQ ID NO: 330199 - DNA, 554 bp, Homo sapiens
acacagcactaggtaatcaaaagaattggctcgtaccacccaccatttcccctgaaggaaagtttactttggaaaccaaatcgactaatgaatcagagaatcagggcagaaagaaatgttctcaacgagatccaggactacatttctcaggcttcgcacttgatctgggaatcgtctcttcttgccggtctcagaaggcattgccctcaatttttctcctcatgagtgccattttcccattgttataaggtggtcttgttagttcttctgattactctaagttttacatcagattacaaccgttttgtgtcaggcaactagtaggcactcaacaaggtcatttgacgaaaatataaggaactcctgcattgccgtgctaggcactgtggatgcaagaacaaatatgtcatggtccctgccctcaaaaagcttataatttattaygcggagaaaagtcgtgttcaggtaattataattcaaccctatgccatgatggtttcctgagacacatgagtgattatttccggcttggtagaagatttcctagtgagaat

SEQ ID NO: 330200 - DNA, 622 bp, Homo sapiens
cttggtagaagatttcctagtgagaatgatatcaggccttggcctgggagggtgagtaggagctcggcaggaagggaagtttttcagagtcatcctactagagggagtactgagaatgaaagtccctgagcttgggaaactacaaggtatgaggccggggcatagcgagaatgagggmagatgggattggaaaggtagcctgtggtctgattatgccagtttttttggatactcactccttagccaatgagttagaagtttgtcttgttgaaattggtgagctttggaaggttgaggtgagaggagatcacatctgtgttcctatgtcatgggttgtggaccgtctttcccgtcttatcacatgtactgggactctttgttaatataaagttgatattgtaggaaaggcacaaatggatgagtaactcaaagcatgaccctagaggaaggtggcttgatgacccaaggagtagcttatcactttaccagttaagaatagagagaattaagatctagtgttaaataggtcagtagggtggccatagtttgcaatactccattgtatattttaaaatagatagaagagaataattcaaatgtttctagcataaagaaaagacaa

SEQ ID NO: 330201 - DNA, 546 bp, Homo sapiens
tcagccttccagtttctggatgaaactaggggcagtaatattagaaacccgagtggaccctttgcctgagaaacatgttcatctcttagtaatttggactagagagcatgcaaaatatgcatcaatataaaatcaactaacacagattccagggtcacaagcccaaataacagtaagatctgtaaatatcaaggaaaacgtagatttaaaatttcagatcagattcattcctccactcacagcttatacatattgtggtcagaagctggaagtaagcctatgctctaattaactctgctctgggaggcgaggctctcacgagagagaggagagagatgggggtggggggtggagaggattgggagcacttcagagaaaagatctgagagaaaagcctgggactctgccacccagctccctggcccctgggagaagccatggcagatatttgggatgagrcagcatgctggtccctcagcagcatccttatcacgtcagctgtggtaagtgatattcttgatacttgctgttttgccagaagttaga

SEQ ID NO: 330202 - DNA, 563 bp, Homo sapiens
ctcaatgacagttacttagagaaaaagaattcttttttttttgacagagtcttgctctgttgcaaggctggagtgtrgtggtatgatctccgctcactgcaggctccacctcctgggttcaagcaattctcctgcctcagcctcccaagtagctgggactacaggcgtgcaccaccatgcccagctaatttttgtatttttagtagaaacggggtttcaccatgttggccaggatggtctcagtctcttgacctcgtgatctgtctgccttggcctcccaaagtgctgggattacaggcatgagtcaccgcacccagccaaggaattatttcttagccttttattctactcaagtcttgaatggatttgatgaacccaccacattagggaggacagtccattttactcagtccactaactcaaacattaatctcatccagacactctcacagacacacccccatttagtcaaatgtctgggtatcccatgacccagtctagttgacataaaatttaaccatcacattcacctaataactgcttagcttaaatgagtgcagggc

SEQ ID NO: 330203 - DNA, 563 bp, Homo sapiens
ctcaatgacagttacttagagaaaaagaattcttttttttttgacagagtcttgctctgttgcaaggctggagtgtagtggtatgatctccgctcactgcaggctccacctcctgggttcaagcaattctcctgcctcagcctcccaagtagmtgggactacaggcgtgcaccaccatgcccagctaatttttgtatttttagtagaaacggggtttcaccatgttggccaggatggtctcagtctcttgacctcgtgatctgtctgccttggcctcccaaagtgctgggattacaggcatgagtcaccgcacccagccaaggaattatttcttagccttttattctactcaagtcttgaatggatttgatgaacccaccacattagggaggacagtccattttactcagtccactaactcaaacattaatctcatccagacactctcacagacacacccccatttagtcaaatgtctgggtatcccatgacccagtctagttgacataaaatttaaccatcacattcacctaataactgcttagcttaaatgagtgcagggc

SEQ ID NO: 330204 - DNA, 424 bp, Homo sapiens
tcagaagaaaattaaatcctctctacaggcagacgtcatccatagcatctacaattttttggcaggcattataatgtctgccatttggtcacatttgccaagcatgccagaatacaagatcaaattaccaaaaacaacagtttaaaaaaacagactttagaaacaggctcaaaagcaaatatttaagttcaaattattggacataaaatttcaaataactataaataacataatcaaaatagacaaaaagatggaaaatttcatcaaactactgaaatccrttaacatcatcagaaaatgcagagtttaataatacaacactgaaattaaaaattcacttggatggcaattcagttggatttaaaagcacattagatatagcagaagaaaaaattagtgatctggaatgtatatcagtagaaaa

SEQ ID NO: 330205 - DNA, 547 bp, Homo sapiens
aaaaataaaggctaagcagacagtttcaaatgagcacttaacaagcagggacaacaacaacaatggcacaaggaaaatgaccctagatgaaaacatgttattgcaagtaaagacaggctagagggaattttgtagtcttaaacgcataaactagaaatgaaaaaaaaaaacttaccatctctaacacaggtattcacatcaagttagcaaaactgcaaattaacccaagagaaagaaggaggtaggtaggagaaaaatagaaataaaaacaaaaattattgaaatagaaaggaatcatctaatagaaaaaaaggcaacaaatctttgaaaatactattaaaattaataaatayttagcaaggactaatcaagaaaaaagagaatgagacacatatgactaatactaaaaacaagaaagaggctatcactacagattctggaaatatttaaaaagaagttaatacaaacaaacttatgatcctaaacttgactaaatttactggctacatttatgactgtcactttgcagaactgttggacaatatag

SEQ ID NO: 330206 - DNA, 508 bp, Homo sapiens
ctgtacatttttaaaaagttaattttatatatgctaaatttttaaatgkttaataattttttagggtagaacattctgctttttatttgcattgttcaaagcgaactgaacacattagtggagcttcaatggctattgattttagccaatggatatttaaggatactaatttacttcctctcatagtcattaagaaattcaaaaaataaacccatggaacaaagaaataaaatgtcaaactttaagcttcagctctctctgagaactgtgttttggcattgaccatatcattacctacctagttatgagctcatacttctgcacagttcattagaatttacctttaattctatagcaaaccataattgcaaagcccacctgttctagtcaacatttattgcactggcatatttctttcaaggccatatattaaagaaaactaaagagacagagtctctccaaagttcttaggattaagactcttggtgacactttaaaatatttcatt

SEQ ID NO: 330207 - DNA, 508 bp, Homo sapiens
ctgtacatttttaaaaagttaattttatatatgctaaatttttaaatggttaataattttttagggtagaacattctgctttttatttgcattgttcaaagcgaactgaacacattagtggagcttcaatggctattgmttttagccaatggatatttaaggatactaatttacttcctctcatagtcattaagaaattcaaaaaataaacccatggaacaaagaaataaaatgtcaaactttaagcttcagctctctctgagaactgtgttttggcattgaccatatcattacctacctagttatgagctcatacttctgcacagttcattagaatttacctttaattctatagcaaaccataattgcaaagcccacctgttctagtcaacatttattgcactggcatatttctttcaaggccatatattaaagaaaactaaagagacagagtctctccaaagttcttaggattaagactcttggtgacactttaaaatatttcatt

SEQ ID NO: 330208 - DNA, 563 bp, Homo sapiens
gatattcaaatcccaaaagaaaattgccttaatctacctttctagatttcttctcttgtatccaagctctcttccccagctatgctatgctctaaccagagaccagtcacaactcaacagcctcctaactctgcccgttctccttccacacctttgctcaaggtgttccttgtgcctggaacagccttcacccatatcagcgatcaaatctgaccctkgggcctaaacatcaccttctctgtgaggcatttgaatatcccttcttccaaacactttaatggtctctcatagggctctattttacctgtgcctgcatcactagattgcaggtagccttattgaatgtgctctatctcccatgaccatttttttgcagtattatactgtgctggctgtaaaggaaaccttcattctgcacctgtccatcctcaactctcctgtgccaggcacctcttactctgtacccatagtcactcccaccactacacttttccctgtgaacagcagcattgggagtgattctctaactctcccctaatgccaactatcttccttctcaaata

SEQ ID NO: 330209 - DNA, 563 bp, Homo sapiens
gatattcaaatcccaaaagaaaattgccttaatctacctttctagatttcttctcttgtatccaagctctcttccccagctatgctatgctctaaccagagaccagtcacaactcaacagcctcctaactctgcccgttctccttccacacctttgctcaaggtgttccttgtgcctggaacagccttcacccatatcagcgatcaaatctgaccctggggcctaaacatcaccttctctgtgaggcatttgaatatcccttcttccaaacactttaatggtctctcatagggctctattttacctgtgcctgcatcactagattgcaggtagccttattgaatgtgctctatctcccatgaccatttttttgcagtattatactgtgctggctgtaaaggaaaccttcattctgcacctgtccatcctcaactctcctgtgccagscacctcttactctgtacccatagtcactcccaccactacacttttccctgtgaacagcagcattgggagtgattctctaactctcccctaatgccaactatcttccttctcaaata

SEQ ID NO: 330210 - DNA, 453 bp, Homo sapiens
agataatcttcctgtggtctatatgcctgtcagaagaaaattaaatcctctctacaggcagacgtcatccatagcatctacaattttttggcaggcattataatgtctgccatttggtcacatttgccaagcatgccagaatacaagatcaaattaccaaaaacaacagtttaaaaaaacagactttagaaacaggctcaaaagcaaatatttaagttcaaattattggacataaaatttcaaataactmtaaataacataatcaaaatagacaaaaagatggaaaatttcatcaaactactgagatccattaacatcatcagaaaatgcgcagtttaataatacaacactgaaattaaaaattcactcggatggcaattcagttggatttaaaagcacattagatatagcagaagaaaaaatttctgatctggaatgtgtatcagtggaaaa

SEQ ID NO: 330211 - DNA, 453 bp, Homo sapiens
agataatcttcctgtggtctatatgcctgtcagaagaaaattaaatcctctctacaggcagacgtcatccatagcatctacaattttttggcaggcattataatgtctgccatttggtcacatttgccaagcatgccagaatacaagatcaaattaccaaaaacaacagtttaaaaaaacagactttagaaacaggctcaaaagcaaatatttaagttcaaattattggacataaaatttcaaataactctaaataacataatcaaaatagacaaaaagatggaaaatttcatcaaactactgaratccattaacatcatcagaaaatgcgcagtttaataatacaacactgaaattaaaaattcactcggatggcaattcagttggatttaaaagcacattagatatagcagaagaaaaaatttctgatctggaatgtgtatcagtggaaaa

SEQ ID NO: 330212 - DNA, 609 bp, Homo sapiens
ggggccatggtagaggtcaataccacaagctgccctcatcctgctgcttggagttgtcctgttgatagtgggcataattaaacattacatgaaatcggttgattagatttggccctggtctctgtcartcagattaattagagtggccagagatttggcatactcatggaaaaatcaccagaatccaagatggtgtaaaaatcaggggtgaatattgttgggggaaaattcttgacatatcgctaatgcttctgcacatcccgtgaataatgcagtaattgtctttctccaggactatctataaagcaaggacatttataaagcaaacagatagagacagcgttttccttcagaaaaaaaaaagataatttgcttatattttcctggagcaaagggcaggcatgcttattgtccattgtaaaagatttgggttccctaaactctggaatgctttcctgtagcatatccatctggggcaatccccatcatttctatgggacttgagaggaagggaaacttatgcaaacacactgatgctcatgctgcttgctgttctgtgagtaatgagaatccattttctctgacccaggaatctcctatcttctgtca

SEQ ID NO: 330213 - DNA, 609 bp, Homo sapiens
ggggccatggtagaggtcaataccacaagctgccctcatcctgctgcttggagttgtcctgttgatagtgggcataattaaacattacatgaaatcggttgattagatttggccctggtctctgtcaatcagattaattagagtggccagagatttggcatactcatggaaaaatcaccagaatccaagatggtgtaaaaatcaggggtgaatattgtygggggaaaattcttgacatatcgctaatgcttctgcacatcccgtgaataatgcagtaattgtctttctccaggactatctataaagcaaggacatttataaagcaaacagatagagacagcgttttccttcagaaaaaaaaaagataatttgcttatattttcctggagcaaagggcaggcatgcttattgtccattgtaaaagatttgggttccctaaactctggaatgctttcctgtagcatatccatctggggcaatccccatcatttctatgggacttgagaggaagggaaacttatgcaaacacactgatgctcatgctgcttgctgttctgtgagtaatgagaatccattttctctgacccaggaatctcctatcttctgtca

SEQ ID NO: 330214 - DNA, 609 bp, Homo sapiens
ggggccatggtagaggtcaataccacaagctgccctcatcctgctgcttggagttgtcctgttgatagtgggcataattaaacattacatgaaatcggttgattagatttggccctggtctctgtcaatcagattaattagagtggccagagatttggcatactcatggaaaaatcaccagaatccaagatggtgtaaaaatcaggggtgaatattgttgggggaaaattcttgacatatcgctaatgcttctgcacatcccgtgaataatgcagtaattgtctttctccaggactatctataaagcaaggacatttataaagcaaacagatagagacagygttttccttcagaaaaaaaaaagataatttgcttatattttcctggagcaaagggcaggcatgcttattgtccattgtaaaagatttgggttccctaaactctggaatgctttcctgtagcatatccatctggggcaatccccatcatttctatgggacttgagaggaagggaaacttatgcaaacacactgatgctcatgctgcttgctgttctgtgagtaatgagaatccattttctctgacccaggaatctcctatcttctgtca

SEQ ID NO: 330215 - DNA, 611 bp, Homo sapiens
tgcgtcagcctcctgagtagttgggactacaggtgcccaccaccatgcctgactaatttttgtatttttagtgtagagagggtttcaccatattggccaggctagtctcgaactcctgacctcaagtgatccrcctgcctcagcctcccaaagtgttgggattacaggcgtaagccactgcacctggcctaatatttggattaagtccccctgttgaaggtctatgtaccattggagagtttggtaaaaggtcttcttgagggggaaaaagggtttttgagccattatttacattttaactctgggaatagaaggcctttgcttttaagatgtcattctttaatagctttagctgttagaaacaagttttgggggatgtgcacaattgaagattttccgcccttttttggcctaatttactaataaagagctaatcttattgcccagctattctttattaaggccagtaagtccagaaatattttgggttatgggaacgttttagactgcatattaaagatttttaaattggcattttgacccaatttgtcatttcttgatggtattgaactcttactactttactttcatatgacaggagctggtcatag

SEQ ID NO: 330216 - DNA, 611 bp, Homo sapiens
tgcgtcagcctcctgagtagttgggactacaggtgcccaccaccatgcctgactaatttttgtatttttagtgtagagagggtttcaccatattggccaggctagtctcgaactcctgacctcaagtgatccgcctgcctcagcctcccaaagtgttgggattacaggcgtaagccactgcacctggcctaatatttggattaagtccccctgttgaaggtctatgtaccattggagagtttggtaaaaggtcttcttgagggggaaaaagggtttttgagccattatttacattttaactctgggaatagaaggcctttgcttttaagatgtcattctttaatagctttagctgttrgaaacaagttttgggggatgtgcacaattgaagattttccgcccttttttggcctaatttactaataaagagctaatcttattgcccagctattctttattaaggccagtaagtccagaaatattttgggttatgggaacgttttagactgcatattaaagatttttaaattggcattttgacccaatttgtcatttcttgatggtattgaactcttactactttactttcatatgacaggagctggtcatag

SEQ ID NO: 330217 - DNA, 611 bp, Homo sapiens
tgcgtcagcctcctgagtagttgggactacaggtgcccaccaccatgcctgactaatttttgtatttttagtgtagagagggtttcaccatattggccaggctagtctcgaactcctgacctcaagtgatccgcctgcctcagcctcccaaagtgttgggattacaggcgtaagccactgcacctggcctaatatttggattaagtccccctgttgaaggtctatgtaccattggagagtttggtaaaaggtcttcttgagggggaaaaagggtttttgagccattatttacattttaactctgggaatagaaggcctttgcttttaagatgtcattctttaatagctttagctgttagaaacaagttttgggggatgtgcacaattgaagattttccgcccttttttggcctaatttactaataaagagctaatcttattgcccagctattctttattaaggccagtaagtccagaaatattttgggttatkggaacgttttagactgcatattaaagatttttaaattggcattttgacccaatttgtcatttcttgatggtattgaactcttactactttactttcatatgacaggagctggtcatag

SEQ ID NO: 330218 - DNA, 608 bp, Homo sapiens
aaacctcacttctttgaaagtagattttacctatgaaaatagacatgaaatattttcaatcatgtttgatgaataatcaagttaagattttggtcaagattaacatatgactatgatgagactaattcttttgagtgacttacaaatgatctcttcaggctattttcaaagatgagtttcaaaagaagttttagcaatggcaaccttaatttttttaaaaagctacaactttgcaaggtttctacttggaaggacaacagtcatcctaatgcatagtctcatttctatatagtacaagtctgcaattactgaagagacaactgcttaagatcagtgaaactacttacatcagttaccttcaacctttaattttcataagggaaaacgaaaagctttctaaaattttcagttaaacataaagatccttcatataaggagaaaaatatagccaacctaytcaattttgtatttgaggaatggagaataaacaattacacagttttgacaggatcccataacagcaatcaaataatgatgagaagcagttacacagaccttttagagagaagtttgtgctaatagaaatatgcaatgtattttaattaaat

SEQ ID NO: 330219 - DNA, 480 bp, Homo sapiens
agcggctcaatacctataatcccagcactttgtgaggctgaagccaggaggatcgcttgaggccaggagttcaagaccagctgtgcaacatggcgaggccctgtctctacaaaaaatttaaaaattagctgggcctaatggtgtgcacctgtggtctcagctacttgggaggctgaggtgggaggatcgcttgagcccaggagtttgagactacagtgagccatgtttgtaccactgcactctagcctgggtgacagagtgaaacactgtctcaaaaaaaaaaaggggggggggacagaaaaagaaatttcctacagctatttgctttttatccccaakgaattttacaaactgattctcatactgaatttaaaaagcaggccaggcatggtggctcatacctgtaatcccagcactttgggaggctgaagcgagagaattgcttgagcccaggagttcaagacgagcctggacaacaca

SEQ ID NO: 330220 - DNA, 553 bp, Homo sapiens
tatatatttgcaaatactattttcttccattctgtaggttgccttttcttctctattgattgttttgctgcatagaagttttaaagtttgatgtcccatttgtctgtgtttacttgtgttgcttgtgctttttacatcatatacaagaaatcattgataaattcaatgttgtgaatccttttccccacgtgttttcctccagtagctttatggtttcaagtctagtcattttatggtttcagggctacatttaggtctttaattcattttgagttagtttttgtatatggtgtaaggtgagggtccaacttctttcttttgcatgkaatatttttatatagtgttttttatcactaacaattttatgtgtttgatattatagctactcttcagtttttaaaaattctttagggtttttttgttgttcttgttactgttggcgtggtgtgtcttctttctatccaattcctttaacctatttgtgtctttatacttaaagtaggtttttttcttgtacgcatttgatagttgggttttgctttttcttatccaa

SEQ ID NO: 330221 - DNA, 358 bp, Homo sapiens
gaacactccaagtcaccgagaaaccaacacaactggattgcatatttgaggttcacatggtggcaataycacttgcagtgtttgaaggaaaacccccaacacgatgctattctgccgttacacctccttccaatagaatgacacaaaataaaggcacaggaaaataccttacatccattaatcctaagtgggacccaaaacaaaagagacaactggctcaagaacaggaggggaaaaaaggtactgccataattgatcctagcatcccttcatggctgcaatgcgtaactctcacttttcagtgagaaaaatctatactcttgtgtttctaaagaaagcacaaaatattcttgcaaga

SEQ ID NO: 330222 - DNA, 358 bp, Homo sapiens
gaacactccaagtcaccgagaaaccaacacaactggattgcatatttgaggttcacatggtggcaatatcacttgcagtgtttgaaggaaaaccccyaacacgatgctattctgccgttacacctccttccaatagaatgacacaaaataaaggcacaggaaaataccttacatccattaatcctaagtgggacccaaaacaaaagagacaactggctcaagaacaggaggggaaaaaaggtactgccataattgatcctagcatcccttcatggctgcaatgcgtaactctcacttttcagtgagaaaaatctatactcttgtgtttctaaagaaagcacaaaatattcttgcaaga

SEQ ID NO: 330223 - DNA, 358 bp, Homo sapiens
gaacactccaagtcaccgagaaaccaacacaactggattgcatatttgaggttcacatggtggcaatatcacttgcagtgtttgaaggaaaacccccaacacgatgctattctgccgttacacctccttccaatagaatgacacaaaataaaggcacaggaaaataccttacatccrttaatcctaagtgggacccaaaacaaaagagacaactggctcaagaacaggaggggaaaaaaggtactgccataattgatcctagcatcccttcatggctgcaatgcgtaactctcacttttcagtgagaaaaatctatactcttgtgtttctaaagaaagcacaaaatattcttgcaaga

SEQ ID NO: 330224 - DNA, 618 bp, Homo sapiens
tatcactttcctttagctgcagaattttctttagcccagggatcagcaaactttggaagcctatgggccaaatgtggtccacctgtttttaatcaataaagctttattggaacactgctttgctcatttgtttatgktttttaatgactgcttttgcaccgtagtagtagaattgtgcagttgtgacagagactgcaaagcctaaaatatttactcttcgcccttttacagaaaatgttagccaatccctgctttcggatatcttccagtgtatgtctgctggtgactgattatctcaggttattataaaaaatgattttagtttacctttattctggaaggatatttttgctggatatagttctgttttttttttctttcggtactttcaagatatcgttccacttctgacctctctcctttatttttctctctctttttttaatgctctctctcagcaaaatcatctccatcgtttctgatgagaagtcagctttcctttgtatttttgttcccctgtatataatgtgttatctttttctggttgctttgaaaattttactatatttggttttctgaagattgactttgatgtgtctggatttagttttatttgta

SEQ ID NO: 330225 - DNA, 506 bp, Homo sapiens
aatggaattaatttttttggagtagaatgttaactgttagttttcataaatgccctttatcatggtgagaaagatcttctatatttccagttttctgagtgcttttcctatgaaaggctgttgactttgtcaaatgcctcttctgtgtcatttgagatggtcatgtgtgtttttttaaaccccttcattctattaatgtgstggtattacattgctttattttagtatgctgaaccatgtttgctttctggggataaatctcacttagtcatattgcataatccttttaatacgctgctggatttagtttgctcatattttgttgtggattgttgcatctatattcataaggggtataggtctcagttttcttttcatgtggtctgtttgcctgcctttgatgtaaggttaatattcataccatagagtcagctaggaagtgttctcccttctattttctggaagagtttgagatgaattaatttcaattcttcttgaaagatttg

SEQ ID NO: 330226 - DNA, 581 bp, Homo sapiens
agttagttcttcttgttgaattgattgatccctttgccattatgtaatggccttctttgtctcttttgatctttgttggtttaaagactgttttatcagagactaggattgcaacccctgtctttttgtgttttccatttgcttggtagatcttcctccatcgctttattttgagcctatgtgtktctctgcatgtgagatgtttttctgtacttattccatttactgtgtctctaatctttgtcatttccttctttctgttggctccacatttaatttactctttttccctctagtttctgaagatatcatgacccccaaatatctgagaaaggtctcagttaatttaggaaacttattttgccaaagttaaggatgtgtacccgtgacacagcctcaaaagtcttgataacatgtgccgtaggtggtccaagtgcagcttggttttacacattttagggagatatgagacagcaatcaatatatgtaagttgaactttggtttggtctggaaaggcgggacaacttgaagcaaaggcgggacagctcaaagtggggagggagcttctaggtcacaggta

SEQ ID NO: 330227 - DNA, 574 bp, Homo sapiens
ctgatttacttttgtaccatttccaaaaataaattggcacatttgtttaggcctacgtttggttgttgttattatgttttattgatcttagtctgtcttttcacaaatactacacaatcttgattatcagtgctatacagtaattcttgaaattgggtgaactcattttccctactttattcttcgttttcaaaattgtagggattctaggttttttgttttttgcttttctatataaattgtgggataatcttgtcaatatctacaaaagtttgcttagattttcatagaaaatgctttagatctgtgtatcaatttggggaaaatggacatctctgtgatgttgggtcttmcaatttgtaaacataatttatattttcatttattcaggtcttatttgttttttattagcattttgtaatttttagcatatgaatctatatatgttttgttagatttataccacctacgtatttcactttctttgggtgaatatagatggtactgtgtttttaatttttggtttccatatgttcattgctagtatgtagaaatataattaatgttcaatgtt

SEQ ID NO: 330228 - DNA, 605 bp, Homo sapiens
atttataccacctacgtatttcactttctttgggtgaatatagatggtactgtgtttttaatttttggtttccatrtgttcattgctagtatgtagaaatataattaatgttcaatgttgattttgtgtcctgcaatccagctgaactcacttattagttttaatagttttagaaagacttcttgggattttctatggagacagtcatgtcatctgcacatagaaacaattttatttctctctttctgatatatatgctatttagtttcttttcttgccttactcactgaccagaatgtcaagcattctgttaacaaaagtggtgacagcacacttccttgtcttgttcccacttttgggagcatgtatttaatctttcaccattaagtataatttacctttagtttttaaataagaaagttgaccacacagtgatatgattcttattattcatcaagaaaagtgagactggtaagttgaattaatgagctttaaaaaatgtctaacacagccaagcatggtgacatgtgcctctaagtcctacctacttgggaggctgaggcaggaggatcacttgagcccaagagtgtgaggctgcagtacac

SEQ ID NO: 330229 - DNA, 606 bp, Homo sapiens
agcactgtaatcataacaagatttragtatgaaccaattcatagtcccaccaacagtttatatgagttcttatcattctgcatcctcatcaatacttatatttctgcaaatctggggcataaaatggcatcacatttactttgcattttcccaattaaagataagcaatttttaatgtttattgtccatttgtgactttgtaaccacccagtgggttcttcctgtccactgcacagatgaaaccaattcactgtgaccatggcattgcaataaagaaagagttaattgacatgaggctggacatgccacatggaagatggtattattaatcaaattagtcttccccaaaattcaaaggctagggtttttcaagaatagtttgataggccagggagtccacttctgggtggggccacaggactgatttgggggtccgggtggagccattgttcactggaagtgtaaaatcctgaaaagacatctcaaaaggccaatcttaggtcccacagtaacaatgtcatctgtaggagtaattggggaagatacatatcttgtgacctccaaaataatgactagtgattatttatgtctacagcttagcagaat

SEQ ID NO: 330230 - DNA, 353 bp, Homo sapiens
ggaacactcatacactgttggtaggaatgtaaattagtacaaccactatggagaagagtttggaggttcctcaaaaaactaaaaatacatctaccatatgatcccgcaatcccactgttgggtatatggccagaagaatctgcactcccaaatttgttgcagtactgttcacaatagccaagatttggaagcaatctaagtatctatcaccagagaaatggataaagaaaacatsgtatattacacaatggaagactattcagccatttaaaaaaggaggagatcctatcattttcaacaacatagatgaaattggaaatcattatgttaagtgaaataagcttggcacaatc

SEQ ID NO: 330231 - DNA, 475 bp, Homo sapiens
agagccaaagtaataaaaaatcaaattaagttgaagaggtgaattggagactattttgagtaggtaataaagcagataatatgtataacctacactcctgaacaagggctctttatttaaaagttttgaagctcatgatacagtgacattaaaaaagggcttggtatgacagaaaagtcagggagagggaccttctgatatctacagtctacgctatctgtagcccaaatctactgtcatccaaaacttcaaggagctagatgtgactattttccctggcatamacatatttaactctgggaagatttgaggttatgcatagaaagtttaagttttatatttaacttggtattttatgtatttataattttaagtacaattaggcttatcagagcatatagttcgaatttaaaatgtaaaatagaataactggattcaaatttatgatcttaaagtaaaatctaagtttataaac

SEQ ID NO: 330232 - DNA, 589 bp, Homo sapiens
caatgattctcatttttgttatattatgtgtctttaaaatgtatataagaagtgactttttgaaagtcaaagaactaactttatgtgtcactgtgtgcagacacgtgtgtatggggaggtattcccatgaaacaaaaacattataaagtcttaataaaagtttgccttttgaaaataatcttcaatgcatatttccagaatttgacttcttcctaaattttaattttgttccttttcttcataattaatatagtcagccagtttaattcattaagcatctaattgaggctaaaaagtcactgcttcagctcatctaatgatgrtctcaattaagttgagtttataacaaatgtgctgttaagtgctgaggctagcacttttatagctcctattatacaatctacttatttttctaaaattttaagagcaaaagtcattgaaatatccagataattatacaaacactgctaaataaatatacccagccatgtgatagctcaaaatgcttatcagctgaggaccaaagtttgaattttgacaaaaggcagtagagtatcaatatacagtgtgtgaaagggcaggtgttcaa

SEQ ID NO: 330233 - DNA, 561 bp, Homo sapiens
cagaacagagttgccagtctaagatgggccagctcacccgggctgagacagagaggcaaacagcagggcttcagcccagagtcttgtgaggggcgcaggaatatttggcctcttcctgtgtggaaggagctggagtctgagaggagatagagtgaaacaaaaatgggcagtgtcaataatttacgtaatatagttgctgtctcggcatccatttttaggcttgacataagttatttgaaaccgagtagtacctcgtcacctttggcctagttaaaacttcctctccctaagaagttgtttttttgtttttgttttgatacggagtcactctgtcgccctggctggagtgcagtggcgcaatctcggctcactgcaacctctgcctcccgggttcaagcgattctcctgcctcaacctccggagtagctgagattacaggcttgagccaccccacctagccagctrttttcaatataagctcatttgtttcttatcccaccgacccaaacccagcacgcccaatagctgctggccaggatcaaatctgatggttaacaccag

SEQ ID NO: 330234 - DNA, 640 bp, Homo sapiens
ggaataattcaggctaattaaaagtttatcacctcacatacttatttctttttgtggtaaaaacatttaaaagctactcttctagcaattttgaaatatgcgaagtcatatttcattagccagaccaagctacattgtcaagactggtatcagtgatggcacatgactgatacagtttatcacagtatgaatctttcaatgtaaatgtttataaagaacttctaataatactatgagtgtcttatagtgttagagacacatgaaaaatatgctaatatattatgtaaatgcaaatttggtttttaaaaggctcagaaaatatgtataagccaaatgttcacccaagcatcatggttacatctaagatatatgattataataaattttcctgatttttttaaaaaaatttaaagctgtatttaggaacaattgagcttcaataaatttcacatgtttaaagtttataacctgataagttttgaygtaggtatacttgatggaaccatcaacaatcaaagtaaagaacagatgtggtacatccacctccactgaagggcaaccagtgtgtctgctttatgtaactgtagattcctttgcattttctagaatgttacataaatagaatcatactagctaaata

SEQ ID NO: 330235 - DNA, 640 bp, Homo sapiens
ggaataattcaggctaattaaaagtttatcacctcacatacttatttctttttgtggtaaaaacatttaaaagctactcttctagcaattttgaaatatgcgaagtcatatttcattagccagaccaagctacattgtcaagactggtatcagtgatggcacatgactgatacagtttatcacagtatgaatctttcaatgtaaatgtttataaagaacttctaataatactatgagtgtcttatagtgttagagacacatgaaaaatatgctaatatattatgtaaatgcaaatttggtttttaaaaggctcagaaaatatgtataagccaaatgttcacccaagcatcatggttacatctaagatatatgattataataaattttcctgatttttttaaaaaaatttaaagctgtatttaggaacaattgagcttcaataaatttcacatgtttaaagtttataacctgataagttttgacgtaggtatacttgatggaaccatcaacaatcaaagtaaagaacagatgtggtacatccacctccaytgaagggcaaccagtgtgtctgctttatgtaactgtagattcctttgcattttctagaatgttacataaatagaatcatactagctaaata

SEQ ID NO: 330236 - DNA, 608 bp, Homo sapiens
atcatgttctccaatttcatccatgttttcacaaatgacaatttctttttagttgttgagtagaatttggtgggattgctggatcctaaggcacttttgttttttaggttttttttttttttgaggaacctctatacagttttccattatagctgtactaattgacatttccagcagcagtgtacaagggctcccttttattcacatcctcactaacacttgttatcttcctctttttgataataaccatctgacaggtgtgagatgatatcttatggctttaattcacatttccctaatgactagtgatgttgagcatttttawaatatatcttttggtcatttagatgtcttcttttgagaaatgtgtattcagtcctttgccaatgttttaatcaaattatttttctatagaaaaaacttgagttccttatatgttttggataataattccttatcagagctatggcttaaaaatatttccccccaatctgttaggttgtttcctttgtgcagaagctttttattttgatgtaatctcatttgcctatttttgcttttattgcctgtgcttttggtgtcaaatctaaaaattcgttaactaatgt

SEQ ID NO: 330237 - DNA, 585 bp, Homo sapiens
aagagaagtggagacatttcgagaggactttccttgtataaagccatctttggcaaaagcaatctcaggtaccttagtatttgcctcctaggctcttttctcaaatagttttcctgctgtggaaatagtactttaaagctgctatttaatatctgctatccragtagaaagagcatgagcactttcactgatgtgttcttcagtagttttcaggctccttttctacaataggtgctcagaaaatcaatttggaatgaggctaagaaggcaattctttaaagcccaggaaggcattggcaggacagagaatctgaaacaaacaaagccttggtaagtttatcatcagtcaagacactcaggacttgttcataagtgggttacaaagcaaagcaaaagtttctgagtaaaactctactggtgaatccacgtacacctcatctgagtccttctatattcaatcataactttaaattttggttagattatgtttaagcaattgaaaaagcgttgtggggactatgtttacagggtaatatgcatttactttatgaggaagatgaaatatttgcaaatattagacaagat

SEQ ID NO: 330238 - DNA, 635 bp, Homo sapiens
acaacttacttacaacctacttagggcattccttttctttttttctttttctttttctttttttttctttgagacagggtctctctctctctctctctctctgccaaaccaggctgagagagtacagtggtrcaatcatagttcactgccacatggaactcctgagctcaagagatcctcccatctcagcctctggagtagctagcactacaagtgcatgccaccatgtgcagctaaattttttttaactttttgtagagacggggtcttactatgttgcccagatccattctttgttctaataacaagtgtggtttctctctcctgcttggacccagactgatgtacctctgaaatggtcgtttcaatgaacaaatagatacttgggatgtaccaaacgttaataactgattttttggagctgggtgattctgctaagccatgtggtacttgtgagtcaccagcagtggcagtggctaaaaaatgctacagtgaaatggagtcacaccaccttaaaaaagcctttcaagtcatacaatatttgaattgtttacttacccgtaactactggactgcaagctctatgaggtgaatgatgatgtcctgttgatagttttatcttcagtttcaatgtg

SEQ ID NO: 330239 - DNA, 562 bp, Homo sapiens
tgaatgaggtatcatggcatgttcctgagtaagatttagtaaaaaaatgattaagcctctccaattaacatataaatttaatttcaaaagkgtatcttatataactatacaaaatgataataaagattagagttgataagccatatggaagaattgacagttttgaaaatattaaaacctgtaacttccagtaatgaaaaaaatgacccagaaatagataaaaatagatcagtagaacagatcagaatgtctaaaaacagatctaagtaacttattggatgaaaaagatgaaatttcagttaaatagctaattagtcaatccaaaaattgactaattaatgagtcaattcaaaaaatatttgtagagtgcacactaagtgccaggtactagaatacaatagagaacaagacaagctaagtctttcctcagggaatgctcattttagtagatgagaaagacaatatacgaagacagtcacaagttgcttatctgtggggatatgttctgagaaatgtgtcattaggtgattttattgtgtgaacatcatagtgtacttacaca

SEQ ID NO: 330240 - DNA, 562 bp, Homo sapiens
tgaatgaggtatcatggcatgttcctgagtaagatttagtaaaaaaatgattaagcctctccaattaacatataaatttaatttcaaaagtgtatcttatataactatacaaaatgataataaagattagagttgataagccatatggaagaattgacagttttgaaaatattaaaacytgtaacttccagtaatgaaaaaaatgacccagaaatagataaaaatagatcagtagaacagatcagaatgtctaaaaacagatctaagtaacttattggatgaaaaagatgaaatttcagttaaatagctaattagtcaatccaaaaattgactaattaatgagtcaattcaaaaaatatttgtagagtgcacactaagtgccaggtactagaatacaatagagaacaagacaagctaagtctttcctcagggaatgctcattttagtagatgagaaagacaatatacgaagacagtcacaagttgcttatctgtggggatatgttctgagaaatgtgtcattaggtgattttattgtgtgaacatcatagtgtacttacaca

SEQ ID NO: 330241 - DNA, 562 bp, Homo sapiens
tgaatgaggtatcatggcatgttcctgagtaagatttagtaaaaaaatgattaagcctctccaattaacatataaatttaatttcaaaagtgtatcttatataactatacaaaatgataataaagattagagttgataagccatatggaagaattgacagttttgaaaatattaaaacctgtaacttccagtaatgaaaaaaatgacccagaaatagataaaaatagatcagtagaacagatcagaatgtctaaaaacagatctaagtaacttattggatgaaaaagatgaaatttcagttaartagctaattagtcaatccaaaaattgactaattaatgagtcaattcaaaaaatatttgtagagtgcacactaagtgccaggtactagaatacaatagagaacaagacaagctaagtctttcctcagggaatgctcattttagtagatgagaaagacaatatacgaagacagtcacaagttgcttatctgtggggatatgttctgagaaatgtgtcattaggtgattttattgtgtgaacatcatagtgtacttacaca

SEQ ID NO: 330242 - DNA, 562 bp, Homo sapiens
tgaatgaggtatcatggcatgttcctgagtaagatttagtaaaaaaatgattaagcctctccaattaacatataaatttaatttcaaaagtgtatcttatataactatacaaaatgataataaagattagagttgataagccatatggaagaattgacagttttgaaaatattaaaacctgtaacttccagtaatgaaaaaaatgacccagaaatagataaaaatagatcagtagaacagatcagaatgtctaaaaacagatctaagtaacttattggatgaaaaagatgaaatttcagttaaatagctaattagtcaatccaaaaattgactaattaatgagtcaattcaaaaaatatttgtagagtgcacactaagtgccaggtactakaatacaatagagaacaagacaagctaagtctttcctcagggaatgctcattttagtagatgagaaagacaatatacgaagacagtcacaagttgcttatctgtggggatatgttctgagaaatgtgtcattaggtgattttattgtgtgaacatcatagtgtacttacaca

SEQ ID NO: 330243 - DNA, 635 bp, Homo sapiens
acaacttacttacaacctacttagggcattccttttctttttttctttttctttttctttttttttctttgagacagggtctctctctctctctctctctctgccaaaccaggctgagagagtacagtggtacaatcatagttcactgccacatggaactcctgagctcaagagatcctcccatctcagcctctggagtagctagcactacaagtgcatgccaccatgtgcagctaaattttttttaactttttgtagagayggggtcttactatgttgcccagatccattctttgttctaataacaagtgtggtttctctctcctgcttggacccagactgatgtacctctgaaatggtcgtttcaatgaacaaatagatacttgggatgtaccaaacgttaataactgattttttggagctgggtgattctgctaagccatgtggtacttgtgagtcaccagcagtggcagtggctaaaaaatgctacagtgaaatggagtcacaccaccttaaaaaagcctttcaagtcatacaatatttgaattgtttacttacccgtaactactggactgcaagctctatgaggtgaatgatgatgtcctgttgatagttttatcttcagtttcaatgtg

SEQ ID NO: 330244 - DNA, 593 bp, Homo sapiens
gtttttatattcttactctataagcctttatcttttttaaaaaaattatttactttttatacttttttgtttaaaaactaagacataaacatacatattagcctaggactacatgggacaaggatgatcgatattcctgtcttccaccaccacatcttaggcattggaygagggggactggtaaaatagggaaagcagtatcaaattttattaagagtttgaagtttgatttagggcagttctttcaatgcaggaactgccagattaggtgtgagtaaggatcatgagataacagtttaggatttgtggaaatagcaagatgaggattttgaggtaagaagtgtgaagagtcaggttaatgtttactgttgaagagttgatgggtctttgggggaaattcttgtaattaatgaagttatttgctgggcaactgtcacctgataaaactatgttaattaagacaatagcacagtaaagtcatgttaacatagacagtaagctgtgggggatggatggttttggttttcagtgttcaagatacatgttgaggctaggttggctctcagcaatgtaaagtaaatgacattgatgag

SEQ ID NO: 330245 - DNA, 593 bp, Homo sapiens
gtttttatattcttactctataagcctttatcttttttaaaaaaattatttactttttatacttttttgtttaaaaactaagacataaacatacatattagcctaggactacatgggacaaggatgatcgatattcctgtcttccaccaccacatcttaggcattggacgagggggactggtaaaatagggaaagcagtatcaaattttattaagagtttgaagtttgatttagggcagttctttcaatgcaggaaytgccagattaggtgtgagtaaggatcatgagataacagtttaggatttgtggaaatagcaagatgaggattttgaggtaagaagtgtgaagagtcaggttaatgtttactgttgaagagttgatgggtctttgggggaaattcttgtaattaatgaagttatttgctgggcaactgtcacctgataaaactatgttaattaagacaatagcacagtaaagtcatgttaacatagacagtaagctgtgggggatggatggttttggttttcagtgttcaagatacatgttgaggctaggttggctctcagcaatgtaaagtaaatgacattgatgag

SEQ ID NO: 330246 - DNA, 635 bp, Homo sapiens
acaacttacttacaacctacttagggcattccttttctttttttctttttctttttctttttttttctttgagacagggtctctctctctctctctctctctgccaaaccaggctgagagagtacagtggtacaatcatagttcactgccacatggaactcctgagctcaagagatcctcccatctcagcctctggagtagctagcactacaagtgcatgccaccatgtgcagctaaattttttttaactttttgtagagacggggtcttactatgttgcccagatccattctttgttctaataacaagtgtggtttctctctcctgcttggacccagactgatgtacctctgaaatggtcgtttcaatgaacaaatagatacttgggatgtaccaaacgttaataactsattttttggagctgggtgattctgctaagccatgtggtacttgtgagtcaccagcagtggcagtggctaaaaaatgctacagtgaaatggagtcacaccaccttaaaaaagcctttcaagtcatacaatatttgaattgtttacttacccgtaactactggactgcaagctctatgaggtgaatgatgatgtcctgttgatagttttatcttcagtttcaatgtg

SEQ ID NO: 330247 - DNA, 582 bp, Homo sapiens
gattctgctaagccatgtggtacttgtgagtcaccagcagtggcagtggctaaaaaatgctacagtgaaatggagtcacaccaccttaaaaaagcctttcaagtcatacartatttgaattgtttacttacccgtaactactggactgcaagctctatgaggtgaatgatgatgtcctgttgatagttttatcttcagtttcaatgtgtacttgttgaataagtaaataaatgaatgaaaaatttaagcatttaatgtagttttagatgatagcaaatttaaccacatattcaaggacctccttccgcaataaaagtttaaaaatcaggttaaaatggaaaagaatccctttataaatttaagggtgaactttccacattcctttttattctacaatttctgctctccctcagtttccagacatcattgtgagctctttaggccctcggttctttcaacatttttaattaccttaaaacatccttcaactctagcagtcttggcaatcttattatctcgaagggacaaggagcaaagattagtagattagttgttttatcatttaagtaatgagaattttac

SEQ ID NO: 330248 - DNA, 595 bp, Homo sapiens
aagaaaaagccctgtattcattagcagaaactcttcattttctcactctcccaacaccaccaagccccaggcaagcatgagtctgctttctgtctttcatggtgtcttagtccattctgctataaaaaaaaaaataccttggattggtggcttataaayggcagaaatgtatttctcatggctttttaggactggaagtctgagatcaagatattggcagatttggtgtctggtgagggtccacttcctggttcataatggtctttgccttgcatcctctcattgtagaagaggcaagggagctctctggggcctctgttactggggctctaatcccattcatgagggctctgccgtcatgacctaatcacctctccaaattcccaccttaaactgggggttagatttcaacatctgaattctggggaatgcaaacatccagtctataacatgtgagtttgctagttctggacatgttatataaatggaattatatgtggtcttttgtgactggcttcttttagttcatataatgtcttcaaggttcaccagtgtagcatgtttcagtacttggttcctttatattgacaaataa

SEQ ID NO: 330249 - DNA, 580 bp, Homo sapiens
gcagttttgttacataggtaaatgtgtgccacggtggtttgctgcacaggtcagcccatcaccttggtattaagcccagcatccattagctattcttcctgatattctccctcctcatgcctccaccagagccccggccaggtcccatctcagaatgtattgtygttaagtgacacatggccgtagttgcactgaaacagctgatactctctctaccgggtctttctctccctgtgatttcttttcctctctgcagagaaaagcaactagccaggtttgtttagaagccagcggtgacctaaaagagtgaaagtcaaggcaagttctctgaaggcttagccttgaggacgcatgacattgcttctgttgcattctattggtcaaaacaagtcatgaggccaggccagattcaaggtctgagaaaatagatttcacctcctgttggaaggggcatcagtcatgttgcaaaagggcttggacaccaagaagcaaatatgttaagggatattattaaaataatctaacccaaactcccttttacaaaatcagtattatatttttctccttaataatttaagtc

SEQ ID NO: 330250 - DNA, 558 bp, Homo sapiens
tgtcattcctccactgagagatggggattacattccctccatttgaatctgggcggctctgtgtctacagcagaagtgatgctatgtgatctcccaaggctaagtcgttaaaaaattcttcaacattctccagttcacttcctggkcctcatggaagtttgcccttagaactcaatcaccatgctgtgagggagccatgaaaaaatcatgtgtatgtatctggccatagcgccagtagctagtgaggctttaagattattctatcctccacccttggagccaccctagctgactgagtagagcaggaacaagttgtttctactgagcactagccaaatgcaaactcatggatgaaatacatgttcctgtcttaagctactaagttttcaagtggtttgttgttagcaaagataagcagaaagagtgtcattcaaggtgcattgtactacatataatggtcaccttaaggcattagagcttattttttattcaaaaccaattgagtacagtttggacaaataatggttgttattaaacacattattttcttctacagtg

SEQ ID NO: 330251 - DNA, 579 bp, Homo sapiens
cacttatgtttcatatacattttatacatataccccaaaggtaattttatataatattttaaagaattttgtgcatgaaacaatgtttgcgcacactgaaccatcagaaagcaaaggtgtcactatcttggccacccatgtggaccaaaatacgacaatatgtggtatcacattggcaatcaaaaaggttcagatttgggggtgttttggatttttggattagggatgtttggatgctcaacctgtatgtagtttattgtacagtaaatattaggttcaattttagaacaggtaaggtaaaagaactgcatggtttgtataaatttgtgctaaaagttacactttcaaatattgtatccccaagattcttatgtttgcataagaagagtctgtattttctattacaagttgtttcatgccaaatcttattttgatttttcacatagataatacaatctaactctactgatcttacactataaarataggtcactttgagatcaaaatttcagaatctcttatatcagttggtgataaggctgagattccaagatctaaaattagtctagtaccttaatt

SEQ ID NO: 330252 - DNA, 558 bp, Homo sapiens
tgtcattcctccactgagagatggggattacattccctccatttgaatctgggcggctctgtgtctacagcagaagtgatgctatgtgatctcccaaggctaagtcgttaaaaaattcttcaacattctccagttcacttcctgggcctcatggaagtttgcccttagaactcaatcaccatgctgtgagggagccatgaaaaaatcatgtgtatgtatctggccatagcgccagtagctagtgaggctttaagattattctatcctccacccttggagccaccctagctgactgagtagagcaggaacaagttgtttctactgagcactagccaaatgcaaactcatggatgaaatacatgttcctgtcttaagctactaagttttcaagtggtttgttgttagcaaagataagcagaaagagtgtcattcaaggtgcattgtactacatataatgrtcaccttaaggcattagagcttattttttattcaaaaccaattgagtacagtttggacaaataatggttgttattaaacacattattttcttctacagtg

SEQ ID NO: 330253 - DNA, 589 bp, Homo sapiens
aagatgactagtcatggggatatttccaagagaagagtgatgtaatctgagctgtgctttaacaccagaacatttgagattgtgtggttgagaaccaataagaatgggaacaagggtggaagcaggactctagttagatagtggctgcattcacaatgacttcaatcraggtagtggtagtacggatagtaaaaggtacctcaatgtattttgaatgcagagaaaatatgactttctggtagactggatataaagtgtgagaggagagaagtaaacaatgattccaaaaattttagactgaactacccgctggggaacaggggataacactaagtggttctagattgtagtacttctgctatttgctcaaatacttcctttaatgatttgttgttattgcttatttagttgtctattttcctgataagctttaatgatagtctatatgtcatgctaagtggtatttactaataacaataattaatgctacttattgcttagatctccccaaacttcaaggtgcttaatagttgatataaacaacaaaattctgtcataagaatgaagggtggcaggatttggtagtaga

SEQ ID NO: 330254 - DNA, 589 bp, Homo sapiens
aagatgactagtcatggggatatttccaagagaagagtgatgtaatctgagctgtgctttaacaccagaacatttgagattgtgtggttgagaaccaataagaatgggaacaagggtggaagcaggactctagttagatagtggctgcattcacaatgacttcaatcaaggtagtggtagtacggatagtaaaaggtacctcaatgtattttgaatgcagagaaaatatgactttctggtagactggatataaagtgtgagaggagagaagtaaacaatgattccaaaaattttagactgaactacccgctggggaacaggggataacactaagtggttctagattgtagtacttctgctatttgctcaaatacttcctttaatgatttgttgttattgcttatttagttgtctattttcctgataagctttaatgatagtctatatgtcatgctaagtggtatttactaataacaataattaatgctayttattgcttagatctccccaaacttcaaggtgcttaatagttgatataaacaacaaaattctgtcataagaatgaagggtggcaggatttggtagtaga

SEQ ID NO: 330255 - DNA, 618 bp, Homo sapiens
ctcttttttttttttttttttggagagccagtttttaaacatttgccagcagaacactgggtgtatccatgtagttgcataaatcaaatagtcattgtttgaatttctgagtagcattccaattttatggatataacaaaaatttatcatttcacctcttgaatgttgagctgtttctagtttttgactcttaaaaattaagttgctttgaacattcacaaataagtatttgtatggcatatgctttcgtttctcttgggtcaatattcacgagtgatatagtgggcaaatatgttaagtatatgtttaaccttataagaaaaagctaaactatcagcaatatctgaaaattcaagttgttcctgatccatatcarcacttggtaccatttggctttttaatttaagctataaaccaatcaagctagtgtgcagggctagctcattgtgattttaaaaaattgtttttactgatatataattaatataccatcaaagtcacctctctagagtgtatgatttagtgggttttaatatattcacaaggttgtacaagcataaccactaattccagaatatttttatcaatcccccaaaatactctggatccatgcagtca

SEQ ID NO: 330256 - DNA, 589 bp, Homo sapiens
ttgtgaagtagcagtttcatcttccctaattaatttgggaacaaaaggtggatggcacatcccaaatggtaataatctgaacaaattcagcagctgcctttgtgtacaggctgtgtacacaaagtccgatggaaagatttttaaaagagcagtaaatggcaattcacatggataatgaactggattaatgtagcaattaaartttattaaaatgaagtattacccttagacagaacctggcaatgatgtaaaagctgaggatctgcttacaaaaattgaggcttagcaaaggaaatttaaattcccaagtggttataaagtccattgtgaatatgcataaccatgctgagacagttgaggtttaagaagtaatcttagaagagtgaaggatttagagcaagaataattacatatctctcatctagaagataggctttctttagacaaagggtgccaagttttctgctgataaaggaatctctgggagctaatgttttgttcttatcctgtcttgagaaagacatttgtgaactgtaagtacctcacctgaatgcaaaaaccaaagaaaaatggtagtggaacagggaag

SEQ ID NO: 330257 - DNA, 589 bp, Homo sapiens
ttgtgaagtagcagtttcatcttccctaattaatttgggaacaaaaggtggatggcacatcccaaatggtaataatctgaacaaattcagcagctgcctttgtgtacaggctgtgtacacaaagtccgatggaaagatttttaaaagagcagtaaatggcaattcacatggataatgaactggattaatgtagcaattaaaatttattaaaatgaagtattacccttagacagaacctggcaatgatgtaaaagctgaggatctgcttacaaaaattgaggcttagcaaaggaaatttaaattcccaagtggttataaagtccattgtgaatatgcataaccatgctgagacagttgaggtttaagaagtaatcttagaagagtgaaggatttagagcaagaataattacatatctctcatctagaagataggctttctttagacaaagggtgccaagttttctgctgataaaggaatctctgggagctaatgttttgttcttatcctgtcttgagaaakacatttgtgaactgtaagtacctcacctgaatgcaaaaaccaaagaaaaatggtagtggaacagggaag

SEQ ID NO: 330258 - DNA, 589 bp, Homo sapiens
ttgtgaagtagcagtttcatcttccctaattaatttgggaacaaaaggtggatggcacatcccaaatggtaataatctgaacaaattcagcagctgcctttgtgtacaggctgtgtacacaaagtccgatggaaagatttttaaaagagcagtaaatggcaattcacatggataatgaactggattaatgtagcaattaaaatttattaaaatgaagtattacccttagacagaacctggcaatgatgtaaaagctgaggatctgcttacaaaaattgaggcttagcaaaggaaatttaaattcccaagtggttataaagtccattgtgaatatgcataaccatgctgagacagttgaggtttaagaagtaatcttagaagagtgaaggatttagagcaagaataattacatatctctcatctagaagataggctttctttagacaaagggtgccaagttttctgctgataaaggaatctctgggagctaatgttttgttcttatcctgtcttgagaaagacatttgtgaactgtaagtacctcacctgaatgcaaaaaccaaaraaaaatggtagtggaacagggaag

SEQ ID NO: 330259 - DNA, 499 bp, Homo sapiens
gtgttcattatttcacaagatactgatattgtcctctatgttcacactgactggtgatagggtttaggacacactaccttacaatttggcaccttgrtatttgagaaaacagcagaaacaggaaggtcttgctgactttttcctgctgttctcccctgttctagaccataaaataattatctgaccttcctctaaagtatatcataaaactcccattccagagtgatcttccctatacctggaggaaatgaattaatatacagaaatgccaaaaagcgtctgaaaaagaaatcatgcattactaagttcttcccagtttattatcattaagtcataatcttctgttttccaatcatacttctggatgactatcacaaatacataggcttccttgttttggggggtcttcaattctgaaggcttccatgtcacataaaatttatatgaaatgaattttttatgcttttatcttgtttctcttgccatgaatctagtgata

SEQ ID NO: 330260 - DNA, 566 bp, Homo sapiens
ttaaaaaatattcattggaaatttttaaactaaaaaaatgcaataacaaattaaaaacacagtgggtggatttaaaagkatattagacatggttgaatagagatttaatgaactagaatgtgggtcagatgtaagtatcctgaatgaagcacagagaaatcgatgaatgaaaacgcaaaaaaaagagcataagagatataggggatacagtgaggtcaaacataaaggtaattagagatccagataggatagaatgagcatagtaatacttgaatatgtgatatggacaattttccaaaccaacaaatgccatcaaatcacaaattcaagaagcatttctatccccgagcagtatgaacacaagcaaattaaacacatcaaggcatatcatggtaaaattgctgaaacaaaaatagaaaaaacttctaagcagccatggaaaaaaaatataaatgagcatcaaagaagtaacaatctctttcctcagaaatcgtataaaagatgcactgtgagcaaaatacatcttatgcacaaggctattcattgtggcattatttgtgataaac

SEQ ID NO: 330261 - DNA, 566 bp, Homo sapiens
ttaaaaaatattcattggaaatttttaaactaaaaaaatgcaataacaaattaaaaacacagtgggtggatttaaaagtatattagacatggttgaatagagatttaatgaactagaatgtgggtcagatgtaagtatcctgaatgaagcacagagaaatcgatgaatgaaaacrcaaaaaaaagagcataagagatataggggatacagtgaggtcaaacataaaggtaattagagatccagataggatagaatgagcatagtaatacttgaatatgtgatatggacaattttccaaaccaacaaatgccatcaaatcacaaattcaagaagcatttctatccccgagcagtatgaacacaagcaaattaaacacatcaaggcatatcatggtaaaattgctgaaacaaaaatagaaaaaacttctaagcagccatggaaaaaaaatataaatgagcatcaaagaagtaacaatctctttcctcagaaatcgtataaaagatgcactgtgagcaaaatacatcttatgcacaaggctattcattgtggcattatttgtgataaac

SEQ ID NO: 330262 - DNA, 566 bp, Homo sapiens
ttaaaaaatattcattggaaatttttaaactaaaaaaatgcaataacaaattaaaaacacagtgggtggatttaaaagtatattagacatggttgaatagagatttaatgaactagaatgtgggtcagatgtaagtatcctgaatgaagcacagagaaatcgatgaatgaaaacgcaaaaaaaagagcataagagatataggggatacagtgaggtcaaacataaaggtaattagagatccagataggatagaatgagcatagtaatacttgaatatgtgatatggacarttttccaaaccaacaaatgccatcaaatcacaaattcaagaagcatttctatccccgagcagtatgaacacaagcaaattaaacacatcaaggcatatcatggtaaaattgctgaaacaaaaatagaaaaaacttctaagcagccatggaaaaaaaatataaatgagcatcaaagaagtaacaatctctttcctcagaaatcgtataaaagatgcactgtgagcaaaatacatcttatgcacaaggctattcattgtggcattatttgtgataaac

SEQ ID NO: 330263 - DNA, 566 bp, Homo sapiens
ttaaaaaatattcattggaaatttttaaactaaaaaaatgcaataacaaattaaaaacacagtgggtggatttaaaagtatattagacatggttgaatagagatttaatgaactagaatgtgggtcagatgtaagtatcctgaatgaagcacagagaaatcgatgaatgaaaacgcaaaaaaaagagcataagagatataggggatacagtgaggtcaaacataaaggtaattagagatccagataggatagaatgagcatagtaatacttgaatatgtgatatggacaattttccaaaccaacaaaygccatcaaatcacaaattcaagaagcatttctatccccgagcagtatgaacacaagcaaattaaacacatcaaggcatatcatggtaaaattgctgaaacaaaaatagaaaaaacttctaagcagccatggaaaaaaaatataaatgagcatcaaagaagtaacaatctctttcctcagaaatcgtataaaagatgcactgtgagcaaaatacatcttatgcacaaggctattcattgtggcattatttgtgataaac

SEQ ID NO: 330264 - DNA, 508 bp, Homo sapiens
gaaatcacctgtttccttctgtcacctgttttacttctttaaatatatatgtttaagcagagtagacagaaggaaacaggtgattaggctgctaatttattatatayatatgcctctcagtgtacctgttttagctactttgaaagaaaactgtatcttcaaagtcaattccttggatctgtcaatgtgaattttgcacattccatatggtttatacattgaggacacattttctgaacataccctccatctttgaatacaatctccctaactggttttacatgatgtggtaacagatcaactgacacgagcttcattttcttcatgtcgttttgattctaacaacaagcccatggtaaaggcaccgatatccccattttaccaaggaggaaacaatagttcagcaagattaaacaacttgtccaaagtaatgccctgggatttttgtgaataaaatcagttttcttcccccactcccaccaacagtaccctccaatgcatcccctaa

SEQ ID NO: 330265 - DNA, 562 bp, Homo sapiens
agacattcaggcttttcttggacactttaggaaagcagaaaaattatgcaagatgtttattcacataaaacaatttttatttatgaaaagctaattgattcaaatgagtgtaaaatttcaaattttagcctcattattgaacagaactggaccagtttgttttaataaagatatggtttatgaacacatcaaccattttagagtaatcaatcacaatttatagattttgaattactgtaattgcacaaaactttggaggaaatataatgtgaattatytgaagtcttcctaatatatctccttttctgcattaattgaacacagggtgtttgttcatagttattaataaaattttagtttcatccaaatacttcagcccaacagtgtcttatgttttgcctgttaaagatattaaagagggaattgggtcataataatttaattcagttaaggagtattcaaagaacttctatatacacaaaacattgtgctaatataatagtgagaatgccaaaaatacttgtccctgcttctactgtgagcatttatttattggagactt

SEQ ID NO: 330266 - DNA, 562 bp, Homo sapiens
agacattcaggcttttcttggacactttaggaaagcagaaaaattatgcaagatgtttattcacataaaacaatttttatttatgaaaagctaattgattcaaatgagtgtaaaatttcaaattttagcctcattattgaacagaactggaccagtttgttttaataaagatatggtttatgaacacatcaaccattttagagtaatcaatcacaatttatagattttgaattactgtaattgcacaaaactttggaggaaatataatgtgaattatttgaagtcttcctaatatatctccttttctgcattaattgaacacagggtgtttgttcatagttattaataaaattttagtttcatccaaatacttcagcccaacagtgtcttaygttttgcctgttaaagatattaaagagggaattgggtcataataatttaattcagttaaggagtattcaaagaacttctatatacacaaaacattgtgctaatataatagtgagaatgccaaaaatacttgtccctgcttctactgtgagcatttatttattggagactt

SEQ ID NO: 330267 - DNA, 563 bp, Homo sapiens
gtgaaccaccacacctggcctgtattttttataagagctattactttagctctgcaagattcaccaaaatctaaggaaccaaaaatactgttcagttgagtgayagacattttagtatcctatgaagttttttgcagctctattcttgcagcaaacaaattctaagagctgaggcttatatttttgatagttatttaaaaagtcatatcaatgaaaagttatatatttagaggagaaacaagataaaatggaaaacatttttagaaaaatatatttaaatatgtactttaaaggaatatatttaaatgtatatatttaaatatattcttttaaaaatatgtttatagggcttgctgttgacattacaagatcagctaggaagggaaaagcatggacgaatacacatggaacgtttttgtgggccgtgtctggaaatgtcacgcatcattatgtttacattccattagagagaacttaattacatgggtatacataatgtctagggtggctgggaaatgtagtcagctgggtgctcaaaaacagaagaggatggagggctagct

SEQ ID NO: 330268 - DNA, 620 bp, Homo sapiens
ctctgtcaggaaggcggctacagagcacgcaaagtgcgagactgcatttgacctttgggagacacacaaaaagaaaayagtactataatacgaagaatatttaattcaagaaaaatcagtcatttcacctcaattttgaccctcttacacactaagcatcttaagagcaggaagtatacatttcatgtttttgtttatggcacttgcttttactggagctcaacacacatttattgagtcagtgactaaaaattgtttccagacaacttaatcatcagatttgtctcccaatgattttagattgctcccagaatcaaacccatccttaaagaatgagtacatttccatcattgaggatagttggagaaggctttcttcaaaggttctcatggaaacttgtaaaagaaatttcaaacatctcagcaaggttgacatcattggactgcgcctccatgtgatcactttgaagaaaacaaatcctttggttgtatagtccttcaatcaaaaaatctttgggggccgggcacggtggctcacacctgtaatcccagcactttgggaggccgagacgggtggatcacgaggtcaggagatcgagaccgtactagctaacacggtga

SEQ ID NO: 330269 - DNA, 620 bp, Homo sapiens
ctctgtcaggaaggcggctacagagcacgcaaagtgcgagactgcatttgacctttgggagacacacaaaaagaaaacagtactataatacgaagaatatttaattcaakaaaaatcagtcatttcacctcaattttgaccctcttacacactaagcatcttaagagcaggaagtatacatttcatgtttttgtttatggcacttgcttttactggagctcaacacacatttattgagtcagtgactaaaaattgtttccagacaacttaatcatcagatttgtctcccaatgattttagattgctcccagaatcaaacccatccttaaagaatgagtacatttccatcattgaggatagttggagaaggctttcttcaaaggttctcatggaaacttgtaaaagaaatttcaaacatctcagcaaggttgacatcattggactgcgcctccatgtgatcactttgaagaaaacaaatcctttggttgtatagtccttcaatcaaaaaatctttgggggccgggcacggtggctcacacctgtaatcccagcactttgggaggccgagacgggtggatcacgaggtcaggagatcgagaccgtactagctaacacggtga

SEQ ID NO: 330270 - DNA, 620 bp, Homo sapiens
ctctgtcaggaaggcggctacagagcacgcaaagtgcgagactgcatttgacctttgggagacacacaaaaagaaaacagtactataatacgaagaatatttaattcaagaaaaatcagtcatttcacctcaattttgaccctcttacacactaagcatcttaagagcaggaagtatacatttcrtgtttttgtttatggcacttgcttttactggagctcaacacacatttattgagtcagtgactaaaaattgtttccagacaacttaatcatcagatttgtctcccaatgattttagattgctcccagaatcaaacccatccttaaagaatgagtacatttccatcattgaggatagttggagaaggctttcttcaaaggttctcatggaaacttgtaaaagaaatttcaaacatctcagcaaggttgacatcattggactgcgcctccatgtgatcactttgaagaaaacaaatcctttggttgtatagtccttcaatcaaaaaatctttgggggccgggcacggtggctcacacctgtaatcccagcactttgggaggccgagacgggtggatcacgaggtcaggagatcgagaccgtactagctaacacggtga

SEQ ID NO: 330271 - DNA, 595 bp, Homo sapiens
tttgcatcagtcccatgaagaagatataacactaccttaaatttcatttgatcttcaaatcgcacttggaaatgagaattataatccacattttatacataaacaaaactaaatgcagaaggaacaacaaaagtgatgggcctagcttaagactggcaggctgctgacctaactccaagtctagggttcttgcctcaatataagagctgactcaccagtttcctcattattatagatattaaactgtgaaattgcagacatttctgattgcagctatgtgccaagttagaagtgccatgtttgcttttgggtctaagataattgtatcaaatgtctcttatgtataaatgccaataaacccttactggaagttacaaagagctgaggtatattaacatcttcaatagcaattcaagctacaaatacgttgaaaagtttgcaaataaagaaactctgaagggaagtgtcttgaaaygtgaaaagctaactttgatgggctctttttaagcttatatttactttaatttttaaaaactagtgttttgtttgggttataaaagcaatacatcctcattacagcatttgaaaaatgtaa

SEQ ID NO: 330272 - DNA, 642 bp, Homo sapiens
atgtcatgaggcctattttagagacaaggtgactaaggcaaacaaggttaatgactttctcattgttaatggggtgggcatttgaactagaartctggcttcagagactttcttataaccatgaagctattaatgtgctcaactgacaacacaaactattgtcctgtgaaccacggatggcttgtgttgagttcttaaaattttgtaattagtctgaaacaactaacaatcagtagaatacattttaaaattctgaactctggcctttattgaaaaatcagaatatttatgctggcagtactagtccaaggacatccatggcaaccgacactggatgtgagtagagccatcaccttcagatgagtcatgcgttcttttgtttgtcagtttcccttactctctattactttccaacacttagactaagagcttatgctattgctttgactatggtaaatgaaagaacccacatctctatctaagagagtcaatataatacagtggttatgcccattgattcaggaggtgactgcttaaatttaaactccaaatcaaacatttactagttgtatgatcatgagaagatactttatctctctatgccttagttaccccatatttaaaatgggagtaacgataaaa

SEQ ID NO: 330273 - DNA, 575 bp, Homo sapiens
ttaactcatttaatccttatgccaataatttgaaggatgcatcctcacttatgtcatgaggcctattttagagacaaggtgactaaggcaaacaaggttaatgactttctcattgttaatggggtgggcatttgaactagaaatctggcttcagagactttcttataaccatgaagctattaatgtgctcaactgacaacacaaactattgtcctgtgaaccacggatggcttgtgttgagttcttaaaattttgtaattagtctgaaacaactaacaatcagtagaatacattttaaaattctgaactctggcctttattgaaaaatcagaatatttatgctggcagtactagtccaaggacatccatggcaacygacactggatgtgagtagagccatcaccttcagatgagtcatgcgttcttttgtttgtcagtttcccttactctctattactttccaacacttagactaagagcttatgctattgctttgactatggtaaatgaaagaacccacatctctatctaagagagtcaatataatacagtggttatgcccattgattcaggag

SEQ ID NO: 330274 - DNA, 642 bp, Homo sapiens
atgtcatgaggcctattttagagacaaggtgactaaggcaaacaaggttaatgactttctcattgttaatggggtgggcatttgaactagaaatctggcttcagagactttcttataaccatgaagctattaatgtgctcaactgacaacacaaactattgtcctgtgaaccacggatggcttgtgttgagttcttaaaattttgtaattagtctgaaacaactaacaatcagtagaatacattttaaaattctgaactctggcctttattgaaaaatcagaatatttatgctggcagtactagtccaaggacatccatggcaaccgacactggatgtgagtagagccrtcaccttcagatgagtcatgcgttcttttgtttgtcagtttcccttactctctattactttccaacacttagactaagagcttatgctattgctttgactatggtaaatgaaagaacccacatctctatctaagagagtcaatataatacagtggttatgcccattgattcaggaggtgactgcttaaatttaaactccaaatcaaacatttactagttgtatgatcatgagaagatactttatctctctatgccttagttaccccatatttaaaatgggagtaacgataaaa

SEQ ID NO: 330275 - DNA, 642 bp, Homo sapiens
atgtcatgaggcctattttagagacaaggtgactaaggcaaacaaggttaatgactttctcattgttaatggggtgggcatttgaactagaaatctggcttcagagactttcttataaccatgaagctattaatgtgctcaactgacaacacaaactattgtcctgtgaaccacggatggcttgtgttgagttcttaaaattttgtaattagtctgaaacaactaacaatcagtagaatacattttaaaattctgaactctggcctttattgaaaaatcagaatatttatgctggcagtactagtccaaggacatccatggcaaccgacactggatgtgagtagagccatcaccttcagatgagtcatgcgttcttttgtttgtcagtttcccttactctctattactttccaacacttagactaagagcttatgctattgctttgactatggtaaatgaaagaacccacatctctatctaagagagtcaatataatacagtggttatgcccattgattcaggaggtgacwgcttaaatttaaactccaaatcaaacatttactagttgtatgatcatgagaagatactttatctctctatgccttagttaccccatatttaaaatgggagtaacgataaaa

SEQ ID NO: 330276 - DNA, 575 bp, Homo sapiens
tttggttgtctttttatgcccaaatcatctcaattaaaacattattgaaatgggagaattccctgatccccttatgggatggtgtggctcatttattcggccaccatgtgctcaaatcccttacaggaagggaagtatgcaggtgagcaggtgcaggagctgggatgagcacttttgggctccagccccacagcactgtctaggggtcttacagtgctcytttagccctgctgtccagggatggcttgagtgttaaacagctctgtgaagagtcagtgtgacagcctttttcggttaccacacccagtgtgtcccaaattcttgtccagcatccaggaagaatcaggtcacacagacttgaaggatggtgaatgcggggattttattgagtgatggagctggttctcagtgggatgaggagctggagaggggatggagtaggaagataatcttcccctgggatttggccatcccatggctgatctccaccacaacctcccccagccaaactcctctcaacattcagacacttctctcttcttcttctctgccatgctgctctgccactctgctac

SEQ ID NO: 330277 - DNA, 590 bp, Homo sapiens
aataggtcaacggatacccagacctatatctctctcataaataatgtgattaataraggtagatgaatacttttgagggatcagaaagtcaaaatcaaaattaaagtgttactataaatgttgagatggagccgcttaagaggtttttgaaagcaattcttgctgagatgcccccaaacttctctttaaccctgctaactaacttggagaatggaggctcatccaagcaggaaaaatattcagtgtgttcttgactcataactcaagctaaaaatagaacaaaaaacattgcattacatatcaggtgtctgagttctatgagctcccaggaatggaaaagtatagaatgtcacagctgggcctgagtttaaaccgcaactctgctatcacttgctagatcacagcaacacataatgtaacctctttgagtctgtttcttcacctgtaaaattagagtgatgataaatacctcaaagggttgttctaagaatttagacaatatacaaataagtatgtaacacagtgttaggcatatattaagttctcaactcattgtagctgatacaattattattaccattgttaaatgc

SEQ ID NO: 330278 - DNA, 590 bp, Homo sapiens
aataggtcaacggatacccagacctatatctctctcataaataatgtgattaatagaggtagatgaatacttttgagggatcagaaagtcaaaatcaaaattaaagtgttactataaatgttgagatggagccgcttaagaggtttttgaaagcaattcttgctgagatgcccccaaacttctctttaaccctgctaactaacttggagaatggaggstcatccaagcaggaaaaatattcagtgtgttcttgactcataactcaagctaaaaatagaacaaaaaacattgcattacatatcaggtgtctgagttctatgagctcccaggaatggaaaagtatagaatgtcacagctgggcctgagtttaaaccgcaactctgctatcacttgctagatcacagcaacacataatgtaacctctttgagtctgtttcttcacctgtaaaattagagtgatgataaatacctcaaagggttgttctaagaatttagacaatatacaaataagtatgtaacacagtgttaggcatatattaagttctcaactcattgtagctgatacaattattattaccattgttaaatgc

SEQ ID NO: 330279 - DNA, 590 bp, Homo sapiens
aataggtcaacggatacccagacctatatctctctcataaataatgtgattaatagaggtagatgaatacttttgagggatcagaaagtcaaaatcaaaattaaagtgttactataaatgttgagatggagccgcttaagaggtttttgaaagcaattcttgctgagatgcccccaaacttctctttaaccctgctaactaacttggagaatggaggctcatccaagcaggaaaaatattcagtgtgttcttgactcataactcaagctaaaaatagaacaaaaarcattgcattacatatcaggtgtctgagttctatgagctcccaggaatggaaaagtatagaatgtcacagctgggcctgagtttaaaccgcaactctgctatcacttgctagatcacagcaacacataatgtaacctctttgagtctgtttcttcacctgtaaaattagagtgatgataaatacctcaaagggttgttctaagaatttagacaatatacaaataagtatgtaacacagtgttaggcatatattaagttctcaactcattgtagctgatacaattattattaccattgttaaatgc

SEQ ID NO: 330280 - DNA, 590 bp, Homo sapiens
aataggtcaacggatacccagacctatatctctctcataaataatgtgattaatagaggtagatgaatacttttgagggatcagaaagtcaaaatcaaaattaaagtgttactataaatgttgagatggagccgcttaagaggtttttgaaagcaattcttgctgagatgcccccaaacttctctttaaccctgctaactaacttggagaatggaggctcatccaagcaggaaaaatattcagtgtgttcttgactcataactcaagctaaaaatagaacaaaaaacattgcattacatatcaggtgtctgagttctatgagctcccaggaatggaaaagtatagaatgtcacagctgggcctgagtttaaaccgcarctctgctatcacttgctagatcacagcaacacataatgtaacctctttgagtctgtttcttcacctgtaaaattagagtgatgataaatacctcaaagggttgttctaagaatttagacaatatacaaataagtatgtaacacagtgttaggcatatattaagttctcaactcattgtagctgatacaattattattaccattgttaaatgc

SEQ ID NO: 330281 - DNA, 635 bp, Homo sapiens
cctcaaagggttgttctaagaatttagacaatatacaaataagtatgtaacacagtgttaggcatatattaagttctcaactcattgtagctgatacaattattattaccattgttaaatgctattattgttatcttcattctgaatcaccattctcattgcacttccttacctcatcttttctactttctctagttttcaaattaatttgcctaaaattcattttaattatcctgccaatttccagccctctataatcctctttaagggattttgtcaaattatgtgtgacagtatttttatacacaacatgaagattagaaaaacaaagctgtttttaaacaagttttatcatccaattatacacatactacaatgagttttcagtgctatcgcagtatacaagctaataaaaatttatagagaaatcttaaaaagacttgagacaaggttrctgcaacaaccttggagcagactccctgggataaaactctctgactagttctctaacattgtacaagttgattaacctctgtgtgcctcagttttctgatttttaaattggatataataataggacctatcttatggggttcttatgaggcttagataagtaaaaagtacttagaatagca

SEQ ID NO: 330282 - DNA, 571 bp, Homo sapiens
tgaaaggctgacagctgatatacaatctcagattttacagccaagcccaacaggcactacctttaaaaccacttttctgtattcattaactatcctgttaaatgttttttcccaaattaaaattttatatctaatacatagaaattaaatgcatgatttagcaatataaaaaaaytgttgatatgtgagtatgcaaagaacaatgttacacatttgtgaaaaaagagaatacgatgaatgaattaagagtcccaaatcctggcttaagccccagatttacaagagattcactgaatgaccttgacctaatcatttgtctcctgggtctcagttgtcccagctgttgaaagaaaaatgtaggtaggtcagtgctttccaagctttagccacccataaaacccttacaactattgccatatccatgtgtatattcaccctatataataatatccttgaaatcatgcttttcttgtactattcaacattttttgtaatgcatacaaaaataaatgtttgcctatttataatttttaaagttaaaaaataattatttcatgtacagtctagaatc

SEQ ID NO: 330283 - DNA, 614 bp, Homo sapiens
agttacctttttagagcttttggaatactttaattacttatggcatggaaaatgtcagtctctataccagtgtcgtagaaaatccagggaaaagctaaactcacarctggatcccaggaaagaagccttcacagttttgttctttctgctcagcttcctcttctgccactgcagtgagggcttgttcttcccctctagagaattgttcttattcttgaatataaaatttgctaataacagctcacagattattagtttgaaagatgctctgaagacttatgagtgtattttcctggtagtttttttcctaaaattagtcaccccaaatcctctgatagtatatgtaaggaataatatgcatatcctagactaacaagagacttcaagcattttccatatgtgggggtgcccaacatttttgtgagaggtacgttttagtttcccaacgccttgaggtacccatgtgagtataactccaaagtgcacattggtgatgttggacttgtacatctcagaggggctccacatcacctctgtctgcctccaccagaaacattcatgagcccccaaggaggagaattcatctactgactgtggatgcctgtcatatttca

SEQ ID NO: 330284 - DNA, 529 bp, Homo sapiens
gaggatgcagttttattcctctacatgtggcttgccaattatcccagcaccatttgttgaatagggcatcctttccccactttgtttttgtttgctttgttgaagattagtttgtaagtatttggttttatttttgggttytctattctgtctatgagcctatttttatagcaatgccacctgaaaccatgacgattctataagataacactgagaaaacccttctagacattggcttaggtaaagacttcatgaccaagaagccaaaagcaaatgcaaaaaaaaccaaagataaatagatggtacctaattgaactaaaaagcttctgcacagcaaaagaaataattagcagagttaacagacattccacagagtgggagaaaatcttcacaatctatacatctgacaaaggactaatacccagaatctacaaaggactaatacccagaatctacaaagaactcaaacaaatcagcaagaacaaaacaaacaatcccatcaaaaaagtgggctaaggacatgaataga

SEQ ID NO: 330285 - DNA, 537 bp, Homo sapiens
caaggcatttgttttagaatagtgtcttatcttataagtactatatatgtgttagcttaataaaatattgagatagtgagttatggtttaagaaaagacaatggtagttgcagtgtgtcaggaaatggaagaagagtaagaatatataaccctctttccaattcagttccttaggctcagtggtctaaatattagttgctcctatcagctaacatttccatttggaagtgactatactgaaatgattctaataagtttggctttgaaatattcatgacaaatataacaaaaatggcacaatgatatgatcctattgggatatcrattattagaaatatggcaattgtactaaataactatattttataaacccttgagggccagctacttgggagaccatttaataagtaaaagtagaagcaatatatggattctctctcagtgtcatctgtatttccttcaggttttcaatcatatatatgaaaataaacccaatctacagccctaacctaaactgtccaacacagtagacgtcag

SEQ ID NO: 330286 - DNA, 564 bp, Homo sapiens
agctgtgtcagtgttgtttggcttgttcacagacacctgtgtaaaaaaaaaccaacttggagaaacattacttctcattccatctgcctttcctaacctacctttgttgtattcattattttatgattttttaaatgtttaattgacaaagaataattgtatatgtttatggggtgcaacgtgatgtttcaatacacgaaaagataaaatcaggctaattagcatattcatcacctkttcttctctaaattacaaatgagtgtccaaggtcaatgctcagaggctttctgctcttcctcggagggcaagcatcacatctgtggctgagttagagaaacggctaactagggtggcacaaaatcacagagatacaagaaacagaggtgaacacagtgacctcatttatgatgctcacaagcttcacaaatgctcacatagagcaaccactatagacatcacaggaacagaggctgccaactctttgaagcttattttttgaatctcctgtggcaaggataatttggcaagcctaacagcaagcaccagctcctttgtgtactgttc

SEQ ID NO: 330287 - DNA, 560 bp, Homo sapiens
tccttacctcctcttatttatcaccacactgtttccagaatattattttgtaaatcactacaggatcctgtcaactccatggtttaatcctttagtagctccacctgtgagccatgttatcttggtggcacagtaatggggtatcagaaagcaatttatggaagtaagcgtggatgggtaggtggaaagaaagattatagattatatccaaactccttaccatagcatataagagcctgcctcatctcctttgacaatctcatctcttctctaccttcctcctccatgaaggtcaaccacacaaaaatattgttttcycctaaatttgtcatgctggctcaaaataaatgttgattgaatgaagattgttaaataaatagctgcctgggcctgaagccccatgccccgactatgaaagatttttttgcatataaaaaatctcccccagaaagtcttcctgtgagctggtcttactcatcatgtcagaattatgggtcctgctgtgtgatgctggggctgcaggagtaagcctcactagcagcatggtacaattattgttg

SEQ ID NO: 330288 - DNA, 531 bp, Homo sapiens
gtatttacatgcactatttataataaattcatctataaatattatgtcatcataaccacattttatgagccaacctccttgagggcatatagtgagctatttcaggtttggttaacaaaattatagtacagagttttattttaaaaatccttaactcatttgatgggcatttggctagattccctttttaatataataaaaaatgcctttaactttgtgatttctctcaccaaccttatctccaattgttttattgatgaatgatgattgcatattttcaaatgttcccttggagtcatgaattaaaaagcaattactatgaagtgatttcacatttttaagcaaagatccagatttggtcatgacacttattagatcatctccaaatttgtatcttttcaagttcaagacttttacatcttacaatcaaatactaaattccaacccaatctgtataattcccgaagtaatagatctaattttaaaaaaakttttgccaaatacattctctcatgtctcctacatcttgga

SEQ ID NO: 330289 - DNA, 541 bp, Homo sapiens
agaagaatggataaatctggtaaaagggagggattatttaaagattaaaaagtatatgtttggctctagcatggaatttttaagcaaaagcaatatgttgtgcccaagtgagtcaaaacatatgccacactttgagacaaattaagagtcctttattaagctggctgccaaagagacggctaatgctcaaaattctctcagccccaaggaaggggcttgattaacttttatacctaggtttaggaaggggagggggacttaaatgcaataattctacagaagtaaaaacatgcaagaatcaaaagaagcaaaatggttacagagagataaacaacttaaaagacaaatggttataagaagagcaatggtaccaggtgcaaggttctaaatctttcattataattagatatagggtctatgccggacggacacgaactcaaggctttatgttgttatctctttgagaaaaatcctgggaacttcatacrtagatggtgttagtaccttatcagttaattgggctcttttaaaatgctgagga

SEQ ID NO: 330290 - DNA, 605 bp, Homo sapiens
atgatggtttctagcttcatccatgtccctacaaaggacatgatctcattcctttgtatggctgcatagtattctatggtgtaaatgtaccacattttctttatccagtctgtcattgatgggcgttagagttgattccatgtctttgttattttaaatagtgctgtaataaacatatgtgtgttttgatcatcttcctcttactttcatgccaaggaagttgtacctatgattctcatattgtaaagaataagtttgaatatcagtgctgctacctgtaactattacaatatcatttacttaatttatgcatcactataaatttaagacaaatttaactaattattgtccgtgctttgtctttgtgtttgtcttaggcagactacagagagataaaccatgggaagaggtggttatggaggtttctaaatgagctgaggtattgaacattttttmttctattggtaagttaaactcacttatttgaataacatatgtgttctacaaattagttaaaacattttaaaatgaagaaaagagaacggttcatatatctatacttttaaaagtattaaaaagtataagtattttatacttgaaaaagt

SEQ ID NO: 330291 - DNA, 540 bp, Homo sapiens
atttatttaaaagtttagttattataactaaacagaaataatgaatatattgtataataaaatcttcaaaaaaggaaaagagataaaaccaacaatgtgaaaattaatgaaaatataataattgatcatgatcttctttccacatgttatatactaacttcatgagaaacgatttgagaaagtaaggtttctctgtgtttttactcagtaatggatttgagattatgctcgttggaccaaaattgtgaaaagagaagcatattaaattaaataataggagatgaaattcaaggggatagactttctgaaatactataaacttacacagrggggtattatttagaaacaccattaaaactacaagaaacctagaagtctttgaatatttgttactcaaactatcaattgttaggaaagttttcccaatagctttagcttgtaatattaaaaggcaacaaaaattaatttatcaggtctagcaagagcttagattgtggataatttctccaacaatcactaaataaccctattcaagcaaat

SEQ ID NO: 330292 - DNA, 326 bp, Homo sapiens
tgtctaaataaataaataaatcataaaaagtataactagctaggacattacattatttcatcatttaaattgaaagagatttaaaatctctggtcagaattaggtttcagcaatgatttagtaaatgggaaaataattttyctgccatgataaacaactctgaacctgaacaaaatggttttcaatgttagaaaaacatcaagcaagaaaatcccttgctctcggagattttacgatcaccaagcctattgaggtagttttgacatagtcaccttttgcctcttatttggcttaaaccctaatgttatctattgttaaagagtgtg

SEQ ID NO: 330293 - DNA, 562 bp, Homo sapiens
tttccttcacgggctgctttgcccagatgttctgttttgtcttcttgggtactgctgaatgttatcttctctcctcaatggcctatgatcgctatgcagcgatctgcagtcctctacactacacagttattatgyccaaaaggctctgcctcgctctcatcactgggccttatgtgattggctttatggactcctttgtcaatgtggtttccatgagcagattgcatttctgtgactcaaacataattcatcactttttctgtgacacttccccaattttagctctgtcctgcactgacacagacaacactgaaatgctgatattcattatcgctggttccaccctgatggtgtcccttatcacaatatctgcatcctatgtgtccattctctctaccatcctgaaaattaattccacttcaggaaagcagaaagctttctctacttgcgtctctcatctcttgggagtcaccatcttctatggaactatgatttttacttacttaaagccaagaaagtcttattccttgggaagagatcaagtggctcctgtgttttatac

SEQ ID NO: 330294 - DNA, 589 bp, Homo sapiens
ctcctgtgttttatactattgtgattcccatgctgaatccactcatttatagtcttagaaacagagaagtgaaaaatgctctcattagagtcatgcagagaagacaggactccaggtagttaaaatagcagaaatggaacatttaatctcatcttttctttcattcctattgggtattttcttagtctctctataaaaacaattgaatcctttaatttatttgcatttctgttgtgctactctttgcttgactaaacatgatttaaaacatttcaaggcatatgtttttagaaatccaaatggtaattagaatcataatatgtgtgtcatgttttgaagcaactgatgtggaaaataagaaaataaggttgtcatttttaattatattattcaaattcttatgtatgcttcaaytgtagataaatttattatggaaagaatatttgagacacggtgataatagttttagatgttattccatttattatgtggggaagaatcatagcagagtgggtaggagtacttactttggaataaaattttccaagagttagattctaaatatgctacacttttagctgtgtagcca

SEQ ID NO: 330295 - DNA, 613 bp, Homo sapiens
aagaatcatagcagagtgggtaggagtacttactttggaataaaattttccaagagttagattctaaatatgctacacttttagctgtgtagccattaatatgttacctaaagcttaagcctcctttccctaagtgcgcaagataaataactccaaatctgatcagagggtagttgtagagtatttaaagcgataataattaatgcttcccattatcattagaagacctacattactgcacagtgcgttttttcaagaatgtaaactcgtgtttcacaaattacttttggttaatttaattgacagaactaaaaagaacaaaaatcagcagctcacaattttggatttcagaagtaaaatatttcagtagaattatgttatagaaaaaatagcctatattaatataatgttagagaaaatttgaaaatattataaaatattgaagaaaatagaaatcctctacaaatattgagttttggctgctcttcctgtggagtagccattcttttgtttatttacttctctaataaacycgttttcagttttagaaaaacaaatattgagttttgtgcatgttcttctagatcaatagtttcaaatacgtgcacatata

SEQ ID NO: 330296 - DNA, 613 bp, Homo sapiens
aagaatcatagcagagtgggtaggagtacttactttggaataaaattttccaagagttagattctaaatatgctacacttttagctgtgtagccattaatatgttacctaaagcttaagcctcctttccctaagtgcgcaagataaataactccaaatctgatcagagggtagttgtagagtatttaaagcgataataattaatgcttcccattatcattagaagacctacattactgcacagtgcgttttttcaagaatgtaaactcgtgtttcacaaattacttttggttaatttaattgacagaactaaaaagaacaaaaatcagcagctcacaattttggatttcagaagtaaaatatttcagtagaattatgttatagaaaaaatagcctatattaatataatgttagagaaaatttgaaaatattataaaatattgaagaaaatagaaatcctctacaaatattgagttttggctgctcttcctgtggagtagccattcttttgtttatttacttctctaataaactcrttttcagttttagaaaaacaaatattgagttttgtgcatgttcttctagatcaatagtttcaaatacgtgcacatata

SEQ ID NO: 330297 - DNA, 613 bp, Homo sapiens
aagaatcatagcagagtgggtaggagtacttactttggaataaaattttccaagagttagattctaaatatgctacacttttagctgtgtagccattaatatgttacctaaagcttaagcctcctttccctaagtgcgcaagataaataactccaaatctgatcagagggtagttgtagagtatttaaagcgataataattaatgcttcccattatcattagaagacctacattactgcacagtgcgttttttcaagaatgtaaactcgtgtttcacaaattacttttggttaatttaattgacagaactaaaaagaacaaaaatcagcagctcacaattttggatttcagaagtaaaatatttcagtagaattatgttatagaaaaaatagcctatattaatataatgttagagaaaatttgaaaatattataaaatattgaagaaaatagaaatcctctacaaatattgagttttggctgctcttcctgtggagtagccattcttttgtttatttacttctctaataaactcgttttcagttttagaaaaacaaatattgagttttgtgcatgttmttctagatcaatagtttcaaatacgtgcacatata

SEQ ID NO: 330298 - DNA, 602 bp, Homo sapiens
gtgacacttccccaattttagctctgtcctgcactgatacatacaacaccgaaatcctgatattcattattgttggttccaccctgatggtgtcccttttcacaatatctgcatcctatgtgttcattctctttaccatcctgaaaattaattccacttcaggaaagcagaaagctttctctacttgcgtctctcatctcttgggagtcaccatcttttatagcactctgatttttacttatttaaaaccaagaaagtcttattccttgggaagagatcaagtggcttctgttttttatactattgtgattcccrtgctgaatccactcatttatagtcttagaaacaaagaggtgaaaaatgctgtcatcagagtcatgcagagaagacaggactccaggtaattaatatagcaggaatgctgaacatttaaactcatcttttctttcattcctgttgggtattttcttagtctctctataaaaacaattgaatcttttaatttgtttgcatttctgttgtgctaccctttgcttcactaaacatgattttaaacatttcaaggcatatgtttttagaaatccaaatggtaattagaaatc

SEQ ID NO: 330299 - DNA, 595 bp, Homo sapiens
actccttgcgggggggacatggtgaccatatacaaaggaggrttacaaatgaccaggtattgatcacaggccatgaaagctagagcaagcactcggtggtcatgaaggtgagagagcagcctatgtgcattgaaggttaattttttttgtttgtacaagaaacttccaaacattttggatgtaatgactgaagcataacagaaacttaaaaagccaagttgctcagagaaaaagtactcgtatgcttcctgcatcatttttttaaatgagcaaattaatttatttccaagaaaaaagacaattgacgtacaatccacaagctgaatccacatgggaagtcctcttccagaaaaacccgtgtctctaaatttaaagcatcccactcctactgcaataaagtaatgattatttttggcaggcagaaaattcatcatgacatggatttcaataaatatttatttggcacctctggagagtggggatgtttctttaggaaaattaagacacctatgtggataaatgtaaaaatgtttccaaatcctttggggtaagcaggatatgaagcaaaatggtggaaagcaagatatgcactttg

SEQ ID NO: 330300 - DNA, 595 bp, Homo sapiens
actccttgcgggggggacatggtgaccatatacaaaggaggattacaaatgaccaggtattgatcacaggccatgaaagctagagcaagcactcggtggtcatgaaggtgagagagcagcctatgtgcattgaaggttaattttttttgtttgtacaagaaacttccaaacattttggatgtaatgactgaagcataacagaaacttaaaaagccaagttgctcagagaaaaagtactcgtatgcttcctgcatcatttttttaaatgagcaaattaatttatttycaagaaaaaagacaattgacgtacaatccacaagctgaatccacatgggaagtcctcttccagaaaaacccgtgtctctaaatttaaagcatcccactcctactgcaataaagtaatgattatttttggcaggcagaaaattcatcatgacatggatttcaataaatatttatttggcacctctggagagtggggatgtttctttaggaaaattaagacacctatgtggataaatgtaaaaatgtttccaaatcctttggggtaagcaggatatgaagcaaaatggtggaaagcaagatatgcactttg

SEQ ID NO: 330301 - DNA, 569 bp, Homo sapiens
ctttattttaaagttcacaattaagttccagaaagttaagaatatattatcacacagatctgaattttaaaagcccagagctattcagtttctctccttctaaaagagatagaatagaaagagaaacaaatgattattctacagtgagaaaaaataaagaagtgactacttwaaaaaaaaaacagagaaataacaccaaaatgactcctaacgttgttggatatctggtaccagtttgtttgatgataccaagcataaatttttcctgtgggttctgtgaattatcctcttattttccacatatttatgaaaattctactttgttccaggctatgttcgagcttcagataaattacctgaccctcagatcgtgaatatgttattgtaatgatagggaagagaaaaatctgttaagaaggcatataaacacaataattgcagatttaaataagcataataggtaaaacaaacaagataatatactaggataacctgggagagtactatcacatagaatattaatattaatacttttacaaggaaggctcttctgagaaggtggcatttga

SEQ ID NO: 330302 - DNA, 569 bp, Homo sapiens
atttatattattgtaacaggaataaacaccttcattttgagggtttttatgataattatgttgcatgtatttgccatagattcagcgtgctattttagtatggatgaacactttcctagagttgtatattttaatcatgattatttgcccctaactaagtgaattcatgtcctgttggagtcacaattgatagttccagtggtgggcacctggtccaaataagtcttatcatatagttctttattttaaagttcacaattaagttccagaaagttaagaatatattatcacacagatctgaattttaaaagcccagagctattcagtttctctccttctaaaagagatagaatagaaagagaaacaaatgattattctacagtgagaaaaaataaagaagtgactactttaaaaaraaaacagagaaataacaccaaaatgactcctaacgttgttggatatctggtaccagtttgtttgatgataccaagcataaatttttcctgtgggttctgtgaattatcctcttattttccacatatttatgaaaattctactttgttccaggc

SEQ ID NO: 330303 - DNA, 569 bp, Homo sapiens
atttatattattgtaacaggaataaacaccttcattttgagggtttttatgataattatgttgcatgtatttgccatagattcagcgtgctattttagtatggatgaacactttcctagagttgtatattttaatcatgattatttgcccctaactaagtgaattcatgtcctgttggagtcacaattgatagttccagtggtgggcacctggtccaaataagtcttatcatatagttctttattttaaagttcacaattaagttccagaaagttaagaatatattatcacacagatctgaattttaaaagcccagagctattcagtttctctccttctaaaagagatagaatagaaagagaaacaaatgattattctacagtgagaaaaaataaagaagtgactactttaaaaaaaaaacagagaaataacaccaaaatgactcctaacgttgttggatatctggtaccagtttgtttgatgataccaagcataaatttttcctgtgggttctgtgaattatcctcttattttccacatatttatkaaaattctactttgttccaggc

SEQ ID NO: 330304 - DNA, 614 bp, Homo sapiens
cttcttttagcatcatcttatccctgattacaatgattgatacatttgtaggcacggtgcagtggttcacgcctgtaatcccaacactttgggaggccgaggcaggcagatcatgaggtcaggagatygagaccatcctggccaacatggtgaaatcctgtctctactaaaaataaaaattagatgggcatggtggcaggcacctgtaatcccagctactcaggaggctgaggcaggaaaattgcttgaaccagggaggcagaggttgcagtgagccgaagtcgtgccactgcactccagcctgggcaacagagtgagactccgtatcaaaaaaacaaaaaaacaaaaaactgctgatttctctggagggcattgtcctcacaaaatttttgtaaagcatcggtaattccaccattcttccactcacatttgacaaaatttattgctttagcagaattcatgttgctctgacaggggctcttttcaaagtaatggcttatccttcttagtgtatcagactaggtcttgtttagacatctcatatttccatgaactttacgaagaccctccgtattccattgtatgtatataccacctgtttttgttgtcctttc

SEQ ID NO: 330305 - DNA, 614 bp, Homo sapiens
cttcttttagcatcatcttatccctgattacaatgattgatacatttgtaggcacggtgcagtggttcacgcctgtaatcccaacactttgggaggccgaggcaggcagatcatgaggtcaggagattgagaccatyctggccaacatggtgaaatcctgtctctactaaaaataaaaattagatgggcatggtggcaggcacctgtaatcccagctactcaggaggctgaggcaggaaaattgcttgaaccagggaggcagaggttgcagtgagccgaagtcgtgccactgcactccagcctgggcaacagagtgagactccgtatcaaaaaaacaaaaaaacaaaaaactgctgatttctctggagggcattgtcctcacaaaatttttgtaaagcatcggtaattccaccattcttccactcacatttgacaaaatttattgctttagcagaattcatgttgctctgacaggggctcttttcaaagtaatggcttatccttcttagtgtatcagactaggtcttgtttagacatctcatatttccatgaactttacgaagaccctccgtattccattgtatgtatataccacctgtttttgttgtcctttc

SEQ ID NO: 330306 - DNA, 549 bp, Homo sapiens
cctctggcacagcacgacttccctggccctccccctgcagaccagtgaacctcgcccgagaactcactaaagaagatttttgccctctttgtctcgcctcttggccttattgatccacggtgcccctccattgcctttcaagaaccattcccccattacctacagtggctgcagcaagcccaacgcaaggatagtctaagcccagacttgcctaaccttgtccccagataatggtatttctctacccaccctggtagctgaacacaaaacattgaaactcttgagagctttatggcccctcctactacctaagaaaccaaaatacttaccctggccaacttagggcaagcttagttccccctacaactactgtagctggtgctctcttgaaagcaccacctcctggctggaggccaactgtgatgattaatattgtcaayttgattggattgagagatgcaaattattgttcctgagtgtgtctgtgagggtgttgccaaaggaaattaacatttgagtcagtggactgggagagacagaccatccctc

SEQ ID NO: 330307 - DNA, 548 bp, Homo sapiens
tttctctcgtcctggatgcttcctgcccttgaacatcattttccagattcttcagcttttggtctcttgaacctacaccagtggtttgccaggggtgctcaagactttggccacagactgaaggctgcactgttggcttccctattattgaggttttggaattcagactggcttccttgctcctcagcttgcagacagcctgttgtgggacttcaccttgtaattgtgtgagtcaatacccattaataaactccccttcatacatacaaccatcttattagttctgtccctctagrgaatcctaatacaacaagcaactcatgacagaataacctcaatctcagggaaaagaagacaacacctaattccattgcatgcaaattcctggttaaccagaggtcctgagtctgtccatgtgacaattttactgctagcataaccggcatttgagaaagccagcacactaaagagatctacaacaaagaactcttacagagtctacttcactccctgccaaccccaagaaagcaggtgttggtatccgcagc

SEQ ID NO: 330308 - DNA, 548 bp, Homo sapiens
tttctctcgtcctggatgcttcctgcccttgaacatcattttccagattcttcagcttttggtctcttgaacctacaccagtggtttgccaggggtgctcaagactttggccacagactgaaggctgcactgttggcttccctattattgaggttttggaattcagactggcttccttgctcctcagcttgcagacagcctgttgtgggacttcaccttgtaattgtgtgagtcaatacccattaataaactccccttcatacatacaaccatcttattagttctgtccctctagggaatcctaatacaacaagcaactcatgacagaataacctcaatctcagggaaaagaagacaacacctaattccattgcatgcaaatkcctggttaaccagaggtcctgagtctgtccatgtgacaattttactgctagcataaccggcatttgagaaagccagcacactaaagagatctacaacaaagaactcttacagagtctacttcactccctgccaaccccaagaaagcaggtgttggtatccgcagc

SEQ ID NO: 330309 - DNA, 609 bp, Homo sapiens
aatacctgggtgataaaataatctgtatgacaaacccccatgacacaagtttacctatgtcacaaacctgacatgtatccctgaacttaatataaatttttttaaataaaaaaagtcttcaaaacaacaacaaagaaaatgtgaaaaaatttgacaaacatgtagccacactaagaaacaattctatatctagagaactccatagtcttggcccaaaagctccttcagctgacaaacaacttcagcattttcaggataaaaaaaccaatgtataaaaatcaccagcatttctatacaccaaacagttaagccaagaaccaaatcaggaacacaatcccactcacaattgccaaaaagaataaaatacctagaaatacagctaaccaggaatatgaaacagttctataatgagaattataaaacactgctcaaagaaatcaaagatgacacaaatagaaaaatatttcatggtcatggatargaagaatcaatatcattgatatagccactctgcccaagtcaattgacagactcaatgctattcctatcaaactaccaatgactttcttcacagaactagaaaaaaactattgtaagattaacatggat

SEQ ID NO: 330310 - DNA, 609 bp, Homo sapiens
aatacctgggtgataaaataatctgtatgacaaacccccatgacacaagtttacctatgtcacaaacctgacatgtatccctgaacttaatataaatttttttaaataaaaaaagtcttcaaaacaacaacaaagaaaatgtgaaaaaatttgacaaacatgtagccacactaagaaacaattctatatctagagaactccatagtcttggcccaaaagctccttcagctgacaaacaacttcagcattttcaggataaaaaaaccaatgtataaaaatcaccagcatttctatacaccaaacagttaagccaagaaccaaatcaggaacacaatcccactcacaattgccaaaaagaataaaatacctagaaatacagctaaccaggaatatgaaacagttctataatgagaattataaaacactgctcaaagaaatcaaagatgacacaaatagaaaaatatttcatggtcatggataggmagaatcaatatcattgatatagccactctgcccaagtcaattgacagactcaatgctattcctatcaaactaccaatgactttcttcacagaactagaaaaaaactattgtaagattaacatggat

SEQ ID NO: 330311 - DNA, 454 bp, Homo sapiens
gtagcatggctaggaatttgcacagatatctgcctcttaaagtaggggaagaggaggatgggtagaaaaactatcaaaaattaatagctaaagacaacagatacaaaagaaaaaaatacattttaggaaataatgtacagaaatattcatattataaaatataaacatattagagaactaaatattcatattmtaaaatataaacatattagagaactatataacttttataatttattcatggcaatgaatgcctctaaaaagccaaagatagtcagaacccagtatattttttgcttactcaatttttactaaaataaagtgatacaaaacattagaacaaagcactaattttatagaacattgtatttactcttccatttccctgaaactcactttctccaggtattttttatggctctctatttcacttatttcggtatgggcctatcac

SEQ ID NO: 330312 - DNA, 454 bp, Homo sapiens
gtagcatggctaggaatttgcacagatatctgcctcttaaagtaggggaagaggaggatgggtagaaaaactatcaaaaattaatagctaaagacaacagatacaaaagaaaaaaatacattttaggaaataatgtacagaaatattcatattataaaatataaacatattagagaactaaatattcatattataaaatataaacatattagagaactatataacttttataatttattcatggcaatgaatgcctctaaaaagccaaagatagtcagaacccagtatattttttgcttactcaatttktactaaaataaagtgatacaaaacattagaacaaagcactaattttatagaacattgtatttactcttccatttccctgaaactcactttctccaggtattttttatggctctctatttcacttatttcggtatgggcctatcac

SEQ ID NO: 330313 - DNA, 538 bp, Homo sapiens
ctacacaatcgtgaatttgagtttttttctgtattaatgtctgtaagttttcagttttataaaaaataaaaattatccgtaaatctctagctaacttcaggtcattaaattttactttccatttgtaaaactttcatgattggagtctaagtcaaatttgattatagggcctttagatttgaatccttctctaactttccttattgttattcagcaggtaagtcaaaggcctgagttgatrtaaatggctggcaacaatttcactgaggttaccgtcttcatcctctctggatttgcaaatcaccctgaattacaagtcagtcttttcttgatgtttctcttcatttatctattcactgttttgggaaacctgggactgatcacgttaatcagaatggattctcagcttcacacccctatgtactttttcctgagcaatttagcatttattgacatattttactcctctactgtaacacctaaggcattggtgaatttccaatccaatcggagatccatctcctttgttggctgcttt

SEQ ID NO: 330314 - DNA, 513 bp, Homo sapiens
agcataagaaacatagtttaaaatataatgaactaagtctgtgcacatctgtaatcccagcactttgggaggccaaggcaggaagactgcttgagcccaggagttcgagacaaacctagacaacatagggagaccccatctctacaaagaatataaaaaattagccgagctggtggcgagcacctgtagtcccagctacttgggaggatgagtcaggaggatggcttgagcccaggaggtggaagttactattagccgagatagcacaactgcactcagcctgggcaacaaagcgagactctgcctctaaataaataaataaatcataaaaatataataacctagaacgttacattatttcawcatttaaagagatttaaaatctctgatcagaattaggcttctgtaatgacatagtaaatagtaaaataattttcctgccattataaacaactctgaacctgaacaaaatggttttgaatgttagaaaagcattgagcaagaaaactcctt

SEQ ID NO: 330315 - DNA, 638 bp, Homo sapiens
gcatagcataaaattttggttattaaatgagcaaaagacactgaatatatagtacaataattgttatgcaatctttcagtacatgtacaaataagcaataaatgaacaaaggaaaataattaggaaaaattataattttaaaataacgacagttttgaattgtgttcatttacttttatgaatcttgttaccttctgattcttttctaattaattgttttacttctataatagtatcatactgttaaaatttattttttaatttattatttttcagtatttattaaaaataaatcaaaataatttattatttatgattatgatttttaattatttttaataattgtgaaattaaaattgcacaattaaatatttaaaaatttaattgtgaaaaatgtattattccatctttgatggtgtcagtcatagagtaactattttttctggaaatgccttctccaccacscctgtaaaatattgagaacatcacaagaaaacaccaagataggctacatttagtccttgaacttttgtgcttggaaacatgccaaacaatctgccttggcaaatggtccccagggcctaccaaaaggtgcattgtcatcagcctctggtatatgagatcctctggaattatcc

SEQ ID NO: 330316 - DNA, 498 bp, Homo sapiens
ttatttgctcttctaaaaaatctgagttcacaaagaaggctggcttctcttttcggtacatttagaagattccttgccatttggctggagaaaggaggttctgaggttatcaggcatgatagagacaatagatctcataatttcccttagttactcactacgttactcaccatagacacttctcacttccaaatgatctarcttcctgcttaatattccattcgcattgtattttatttaaaatcatctcagcttttcttgttcttgattattttttcatttttccatacaatgtttgtccttacagaaccagtttagaagtccaatcgcatatgcagcccttcaaaacatactaatgtttctggaacctcacaccaaacagtgcttacttcagagattagaaagtaaactaaatcttgaaaaagaaagcaacaatgatagggcatgagtaaaagatttagtatgccaaacaatacatttgtatatagcacacacaca

SEQ ID NO: 330317 - DNA, 578 bp, Homo sapiens
actgaccttctatttgattccttagaagagagaataaagatacttttggttcatccataactcaagttaactcacatctgctgatactacctaggtccagtgggaaaaacaagaaaactaagatgttggagagtaattacaccatgccaactgagttcctatttgttggattcacagattatctacctctcagagtcacactgttcttggtattccttctggtatatacattaactatggtcggaaatatactcttaataattctagttaatattaattcaagccttcaaattcccatgtattattttcttagcaacttatctttcttagacatcagctgttctacagcaatcactcctaaaatgctggcaaacttcttrgcatccaggaaaagcatctctccttatgggtgtgcactacaaatgtttttcttcgcttcttttgctgatgctgagtgccttatcctggcagcaatggcttatgaccgctatgcagccatctgcaacccactgctctatactacactgatgtctaggagagtctgtgtctgcttcattgtgttggcatatttcagtgga

SEQ ID NO: 330318 - DNA, 553 bp, Homo sapiens
actgatcttttattctgtaaatttacaatgcaaggcaattaaagtataaacaatttttactctgtaatcgattttgataattaaattatcagattttttgtggtttattctgatctttcagtctgaagtctctatttactttttgtcttattttgacaaagttaaagtgatacaccatgtacatgtgaaataaaaaagtgtgcattttgtaataattatgaaaatataaatggttggattagttatattgaatttaaccttggacatggagacaataagatagcacctaatgaaatggattgttttgagtattaagtaaagttatatatgtaaaattactggtatatgtatatgatttgaaaattaaataatctaatatttatagacataccatgaagatactgtgggttctcttctagatcactacaataaagcaactgaygcagtaaagtgtcacacaaatttttagatttctcagtgcatatcatagttatgtttggtggctggcaagatggtcaaataggagatgctccagtctgctgctcccagcaag

SEQ ID NO: 330319 - DNA, 579 bp, Homo sapiens
attccctccaaaccaatgccctctctttgatattagacatctttcaatgctgagaattgaactctccttataagtcagtcaatcaaatgatgagaacttttcttgattttcagcaatttcagctttgtggctacaggasagattttccttcaggatgtatttagaagctcttaagctatttatgtagagctaaagccaggaattcaaaaccctgagctcatccacttctttcctccctttgtctagcagtaacaaaccaatgtctttatattccttatttttccacaaatgtatgaaagtatcatacatgaagttaccaagttccttgactcttaaaaggagttgattagaagtatgcaatgcagatattttccatatctctgtgaacaattcatgacatggattgtcagtgctctctgtgctattggaagtagagtccttagcatttttatgcctcattagagagtcaattccacaaacctcaaaattaactggttaaactcatccttaaaattctgtttctccaagcaatagggaaagggctatttaataaatggtgctgggataactggctaacca

SEQ ID NO: 330320 - DNA, 503 bp, Homo sapiens
ttttttaagttatgattcaagttgccaaatatattattctaattatataacaagcagatctttacaatcactttcgcaagggctcaaagtttcctaatgcatacaatctttaattaaactcaatattttaaattgaatttataaatcccttttaattttcttcttaagctttttatgtatctgaccaagaaaaaatatcaacacaagaatataagtactttttgtatattaaatacattaatctataaatatggtaaatttcacattatcktaattacttcaatactgtttaaaaacacaataaatcacattatatttttaattcaaaaataacccagctctaaatcaatttctgaattatatatttgacatttgtttcacaaatatgatcagtctgatcatctatctaccaaattctcttacaggcaatgtctctcaaaagaccgaagttgtgtatctgccaagagattcctggctagcgtacaagattttcttcttacaat

SEQ ID NO: 330321 - DNA, 531 bp, Homo sapiens
gtatttacatgcactatttataataaattcatctataaatattatgtcatcataaccacattttatgagccaacctccttgagggcatatagtgagctatttcaggtttggttaacaaaattatagtacagagttttattttaaaaatccttaactcatttgatgggcatttggctagattccctttttaatataataaaaartgcctttaactttgtgatttctctcaccaaccttatctccaattgttttattgatgaatgatgattgcatattttcaaatgttcccttggagtcatgaattaaaaagcaattactatgaagtgatttcacatttttaagcaaagatccagatttggtcatgacacttattagatcatctccaaatttgtatcttttcaagttcaagacttttacatcttacaatcaaatactaaattccaacccaatctgtataattcccgaagtaatagatctaattttaaaaaaagttttgccaaatacattctctcatgtctcctacatcttgga

SEQ ID NO: 330322 - DNA, 681 bp, Homo sapiens
acactcaagatatggcacagattttgaaattgtcagacttggaatttaaaatgattatgatcaatatgtcaaaggatttaatggaaaaagtggacaacatgcaagaacagatgggtaaatgtaaatggagagatgaaaactctaagaaagaaccaaagggaaatgccagaaatcaacatggtaacagaaatgaacaatgcctctgatgggctcataagcagattaaacacagctgaagaaagaatcagtacatttgaagatatattaatagaaagttctcaaactgaaaagtaaacagaaaaaagaatgaaaaagataaaggaataactaagaacagtgggacaatcttaaaaggtgtaacatttggaatcataatgggaacaccagaagaagaaggaaaggaacaaaagaaagatttgaagtaataatggctgagcattttccaaaactaaagacagacaccaaactacagattcaggaagctcagaaaataccaagcaggataaayaacaaactatatacatgtacatcatattcaaactgcaaaaaaaatccagcacaaaacatatgcatgactgtggtcacatatggtagcataaggttagcatttccctcttctcctttgggaattcacccaaaagcaacaagaaataaaatcccaaactctgaaaaaagttaaga

SEQ ID NO: 330323 - DNA, 610 bp, Homo sapiens
ttaggttggtcatgtttattgcatagaacctcagtgtttcctttatagaactgatttcagttgtaaatcaactcatttattgattattttacyattatctatctccccaacattagaacaggagccatgtctgattttgttcacctatttattccagtacctggcccacaatactgctcagttaattggtggactgattagtacttgatgaatgaatggatgggtcaatgaatgaaacatagtttcttccttccaacagctcatagcatagtataggaaaagaagcatagctgggcagggaaagtagatgagactggaaaggtaagtatgggataaaattataaacagcctggctaaggtgttttcacattattttgttggaaagaagatgccaacgagatgtggtttagacaaaggcaacagctgcagagcagcaggagcgcaggagctgagtcagagcacctcacacatccctctgcttccttggaagagtaatcagcattgcaaggaagaccctttaaaagattatctccttcccatagagtggggcctggcttacagaaactccctgacccaggggacccacatgacaaaaatagacttgaaccaa

SEQ ID NO: 330324 - DNA, 616 bp, Homo sapiens
gttgtaaatcaactcatttattgattattttactattatctatctccccaacattagaacaggagccatgtctgattttgttcacctatttattccagtacctggcccacaatactgctcagttaattggtggactgattagtacttgatgaatgaatggatgggtcaatgaatgaaacatagtttcttccttccaayagctcatagcatagtataggaaaagaagcatagctgggcagggaaagtagatgagactggaaaggtaagtatgggataaaattataaacagcctggctaaggtgttttcacattattttgttggaaagaagatgccaacgagatgtggtttagacaaaggcaacagctgcagagcagcaggagcgcaggagctgagtcagagcacctcacacatccctctgcttccttggaagagtaatcagcattgcaaggaagaccctttaaaagattatctccttcccatagagtggggcctggcttacagaaactccctgacccaggggacccacatgacaaaaatagacttgaaccaagggctgattcaaacttggttttgacacatgtggccatacagcagagtaacaagttgctatttttc

SEQ ID NO: 330325 - DNA, 538 bp, Homo sapiens
tgaaacatagtttcttccttccaacagctcatagcatagtataggaaaagaagcatagctgggcagggaaagtagatgagactggaaaggtaagtatgggataaaattataaacagcctggctaaggtgttttcacattattttgttggaaagaagatgccaacgagatgtggtttagacaaaggcaacagctgcagagcagcaggagcgcaggagytgagtcagagcacctcacacatccctctgcttccttggaagagtaatcagcattgcaaggaagaccctttaaaagattatctccttcccatagagtggggcctggcttacagaaactccctgacccaggggacccacatgacaaaaatagacttgaaccaagggctgattcaaacttggttttgacacatgtggccatacagcagagtaacaagttgctatttttcttcccagccatttttcagacagtttcagcaagattggaattccaggtgtagtcagacagtcaacaatatttattaagcactggtcatgtaccaag

SEQ ID NO: 330326 - DNA, 538 bp, Homo sapiens
tgaaacatagtttcttccttccaacagctcatagcatagtataggaaaagaagcatagctgggcagggaaagtagatgagactggaaaggtaagtatgggataaaattataaacagcctggctaaggtgttttcacattattttgttggaaagaagatgccaacgagatgtggtttagacaaaggcaacagctgcagagcagcaggagcgcaggagctgagtcagagcacctcacacatccctctgcttccttggaagagtaatcagcattgcaaggaagaccctttaaaagattatctccttcccatagagtggggcctggyttacagaaactccctgacccaggggacccacatgacaaaaatagacttgaaccaagggctgattcaaacttggttttgacacatgtggccatacagcagagtaacaagttgctatttttcttcccagccatttttcagacagtttcagcaagattggaattccaggtgtagtcagacagtcaacaatatttattaagcactggtcatgtaccaag

SEQ ID NO: 330327 - DNA, 590 bp, Homo sapiens
tgtgggctcacattggtgtagctcatgtgtcccaggtgacacgtggtcccacaggacatgtgctctaagatgtcaacccaatgaggagagttaatcaagggagaagggggaagaagaacacatcaggcaaagggaccaaagtatgcaaaaactcacagacaagagagaacattgcatgtgagaggaagggagagggattctggagcatggtgtggaggagaggagyggcaggaaggcacaggggcaaaaggtgagggagaatctgtagagttcggcaggacaagatcacacagtgccttgtaatccacgtcaggagtgcaagctttatggtgagaacaatgggaagattagaggtgatgggagtattaaagagatgatggttacaacatggtggatgtactcgaggagcaagaaatgggaggaaagacagttccaaggtttgggcatgaatctgggggggaaatgatggcagtcccacactcaggtagtggcaaaaaggatgaagagtaatgtggaggtatgagagatatttaagaggtcgattggttgggctttggggactgattggatgataagggaagaagagatga

SEQ ID NO: 330328 - DNA, 590 bp, Homo sapiens
tgtgggctcacattggtgtagctcatgtgtcccaggtgacacgtggtcccacaggacatgtgctctaagatgtcaacccaatgaggagagttaatcaagggagaagggggaagaagaacacatcaggcaaagggaccaaagtatgcaaaaactcacagacaagagagaacattgcatgtgagaggaagggagagggattctggagcatggtgtggaggagaggagcggcaggaaggcacaggggcaaaaggtgagggagaatctgtagagttcggcaggacaagatcacacagtgccttgtaatccacgtcaggagtgcaagctttatggtgagaacaatgggaagattagaggtgatgggagtattaaagagmtgatggttacaacatggtggatgtactcgaggagcaagaaatgggaggaaagacagttccaaggtttgggcatgaatctgggggggaaatgatggcagtcccacactcaggtagtggcaaaaaggatgaagagtaatgtggaggtatgagagatatttaagaggtcgattggttgggctttggggactgattggatgataagggaagaagagatga

SEQ ID NO: 330329 - DNA, 590 bp, Homo sapiens
tgtgggctcacattggtgtagctcatgtgtcccaggtgacacgtggtcccacaggacatgtgctctaagatgtcaacccaatgaggagagttaatcaagggagaagggggaagaagaacacatcaggcaaagggaccaaagtatgcaaaaactcacagacaagagagaacattgcatgtgagaggaagggagagggattctggagcatggtgtggaggagaggagcggcaggaaggcacaggggcaaaaggtgagggagaatctgtagagttcggcaggacaagatcacacagtgccttgtaatccacgtcaggagtgcaagctttatggtgagaacaatgggaagattagaggtgatgggagtattaaagagatgatggttacaacatggtggatgtactcgaggagcaagaaatgggaggaaagacagttccaaggtttgggcatgaatctrggggggaaatgatggcagtcccacactcaggtagtggcaaaaaggatgaagagtaatgtggaggtatgagagatatttaagaggtcgattggttgggctttggggactgattggatgataagggaagaagagatga

SEQ ID NO: 330330 - DNA, 578 bp, Homo sapiens
aacttgtttaaaaaaccaggctagctcctgggctttgtcatcaaaagttgtgtgcatcttcatgtgggtcattttcacatgattccttcccaatttatgtcactgtcttcatttctgaagttgtgtttgtaacaacccaaaatgtgtaacccaactccacatggaaaggggtttcctgtgttgtggggagtggaaaacctctcaggtgttcagaagatgactggcggctctccacttatgaaaatacatgaggtggatgaaataactaacttcagggaaaaggccacaagatttacatccattccaacattcatagcctttatgagacaagtcacaaaaaaggtgcacatattccctacagtaaccttagtgcctcagttcagctatacaaagtggtaactagcttttattcatatatatatatatatatatatatatatgagtaatatataatatgatatatagggtttatatatcctatatatgtaaaagatgtatataatctattatgtcttgcagtgttytgagcagtttagataatttaacctctacaacaactttatcatgtagtactagga

SEQ ID NO: 330331 - DNA, 583 bp, Homo sapiens
ttctaaatgtctctggttgcccttgacagacacttcccagccagtctggagttccaggatcagacctggtcttatcagatcagatgttcgtatctcttctgcagtactcagatgttactttggttctccagatatgacacttttcaacaaacatttcatgaatatatcattgtttgaattctctcttgtgacatgtcagttggttgatgttgagattgtactttgaatattgtactttcctaagttttgactaggagaaagagttcagaaaggagaaatggggaaaaggatgtgtcttagtacattcaggctgctgcaacaaataccatatactgagtaacttataaatgacagaaatttatttctcacrgttcttgaggctaggaagtccaagatcaagacaccagcagatttagtgtctggtgagggctcatttctttgtttgtagatggtaccttctcactgtgtcctcacatgtgatctctcctgggcctcttttataagggtactcatcccattgatgtgggctctaccttcaagacctaatcacctcccaaagcattcccccattctaatacagtca

SEQ ID NO: 330332 - DNA, 614 bp, Homo sapiens
tgtaggtctatcactgacaaactgattgcattcgaccaagtgaggatccctagcttgaaattacagaaatattttaaacttctacataggaagtaagaaatttaaacatgaaaatgtttaggctatatgtgaaaattatctggacatttgtcataatatrctcggtgtatttttatctgtagactaaatatcaatggtggttaaattttgctttgataatcagatattattgcagacatatgtcttcatctatgaagactatttgttgaatatatgcagtaatgttagccactatttaaaagcacttacgaggtactagatatatttaagctctaatctcaatgctatcacctctattacctgaagagtagatgcctcgtagccagatgagcaatagaattgagatttgaatccaaaatgtgacctataagctaatattatagtttaaaactattgagtcaattattttaaaattaattacttaagttatatataacttaagtcatgtaagatcactagatctcaagtcatgtaagctcaataaacatttacttaatcaaaaattgggtcttttttcttattttgagacaaatcatataatgaaaaaaacccac

SEQ ID NO: 330333 - DNA, 614 bp, Homo sapiens
tgtaggtctatcactgacaaactgattgcattcgaccaagtgaggatccctagcttgaaattacagaaatattttaaacttctacataggaagtaagaaatttaaacatgaaaatgtttaggctatatgtgaaaattatctggacatttgtcataatatgctcggtgtatttttatctgtagactaaatatcaatggtggttaaattttgctttgataatcagatattattgcagacatatgtcttcatctatgaagactatttgttgaatatatgcagtaatgttagccactatttaaaagcacttackaggtactagatatatttaagctctaatctcaatgctatcacctctattacctgaagagtagatgcctcgtagccagatgagcaatagaattgagatttgaatccaaaatgtgacctataagctaatattatagtttaaaactattgagtcaattattttaaaattaattacttaagttatatataacttaagtcatgtaagatcactagatctcaagtcatgtaagctcaataaacatttacttaatcaaaaattgggtcttttttcttattttgagacaaatcatataatgaaaaaaacccac

SEQ ID NO: 330334 - DNA, 614 bp, Homo sapiens
tgtaggtctatcactgacaaactgattgcattcgaccaagtgaggatccctagcttgaaattacagaaatattttaaacttctacataggaagtaagaaatttaaacatgaaaatgtttaggctatatgtgaaaattatctggacatttgtcataatatgctcggtgtatttttatctgtagactaaatatcaatggtggttaaattttgctttgataatcagatattattgcagacatatgtcttcatctatgaagactatttgttgaatatatgcagtaatgttagccactatttaaaagcacttacgaggtactagatatatttaagctctaatctcaatgctatcacctctattacctgaagagtagatgcctcrtagccagatgagcaatagaattgagatttgaatccaaaatgtgacctataagctaatattatagtttaaaactattgagtcaattattttaaaattaattacttaagttatatataacttaagtcatgtaagatcactagatctcaagtcatgtaagctcaataaacatttacttaatcaaaaattgggtcttttttcttattttgagacaaatcatataatgaaaaaaacccac

SEQ ID NO: 330335 - DNA, 673 bp, Homo sapiens
gtaagaaatttaaacatgaaaatgtttaggctatatgtgaaaattatctggacatttgtcataatatgctcggtgtatttttatctgtagactaaatatcaatggtggttaaattttgctttgataatcagatattattgcagacatatgtcttcatctatgaagactatttgttgaatatatgcagtaatgttagccactatttaaaagcacttacgaggtactagatatatttaagctctaatctcaatgctatcacctctattacctgaagagtagatgcctcgtagccagatgagcaatagaattgagatttgaatccaaaatgtgacctataagctaatattatagtttaaaactattgagtcaattattttaaaattaattacttaagttatatataacttaagtcatgtaagatcactagatctcaagtcatgtaagctcaataaacatttacttaatcaaaaattgggtcttttttcttattttgagacaaatcatataatgaaaaaaacccacatatttagaaaccartatcaatcaatagtctatcaataatgttaactttgcttaaatattgaaggatttcatcagaagtttaaaataatgtcctggccaggcacagtggctcgtgcctataatcccagcactttgggaggtcaaggcaggc

SEQ ID NO: 330336 - DNA, 592 bp, Homo sapiens
attttcctcagtctgtaatgccctttatcccttttctgtgtagaaacctccatgaatcctttaaggcctccctctcaaaaaagatttatgattagcattatcctgagaccaaataaaacayttttccaacaggaaaaagaagagtgttatagaatctgaatagagccataaatactctggtgtaaaaattcaaaacattccaagtattcaaaatctgttttttctccctcaagttttcatgaattatcttttcaaagagctaaaaactgataaggagaaaagtgaggacttctttccactttctttctttttttttttttttttttgagacagagtcttcttctgtcacccaggctggagtatggtgacgcaatctcggctcactgcaatctccatctcctgggttcaagtgattctcatgcttcagtcacccaagtagctgcgactacaggcacacgtaaccacacctgactaatttatttttattttttggtagagacaagatttcaccatgttggccaggctggtctcgaactcctcacctcaagtgatccgtgcgccttggcctcccaaagtgctggggttacaggca

SEQ ID NO: 330337 - DNA, 592 bp, Homo sapiens
attttcctcagtctgtaatgccctttatcccttttctgtgtagaaacctccatgaatcctttaaggcctccctctcaaaaaagatttatgattagcattatcctgagaccaaataaaacatttttccaacaggaaaaagaagagtgttatagaatctgaatagagccataaatactctggtgtaaaaattcaaaacattccaagtattcaaaatctgttttttctccctcaagttttcatgaattatcttttcaaagagctaaaaactgataaggagaaaagtgaggacttctttccactttctttctttytttttttttttttttgagacagagtcttcttctgtcacccaggctggagtatggtgacgcaatctcggctcactgcaatctccatctcctgggttcaagtgattctcatgcttcagtcacccaagtagctgcgactacaggcacacgtaaccacacctgactaatttatttttattttttggtagagacaagatttcaccatgttggccaggctggtctcgaactcctcacctcaagtgatccgtgcgccttggcctcccaaagtgctggggttacaggca

SEQ ID NO: 330338 - DNA, 592 bp, Homo sapiens
attttcctcagtctgtaatgccctttatcccttttctgtgtagaaacctccatgaatcctttaaggcctccctctcaaaaaagatttatgattagcattatcctgagaccaaataaaacatttttccaacaggaaaaagaagagtgttatagaatctgaatagagccataaatactctggtgtaaaaattcaaaacattccaagtattcaaaatctgttttttctccctcaagttttcatgaattatcttttcaaagagctaaaaactgataaggagaaaagtgaggacttctttccactttctttctttttttttttttttttttgagacagagtcttcttctgtcacccaggctggagtatggtgacgcaatctcggctcactgcaatctccatctcctgggttcaagtgattctcatgcttcagtcacscaagtagctgcgactacaggcacacgtaaccacacctgactaatttatttttattttttggtagagacaagatttcaccatgttggccaggctggtctcgaactcctcacctcaagtgatccgtgcgccttggcctcccaaagtgctggggttacaggca

SEQ ID NO: 330339 - DNA, 575 bp, Homo sapiens
aggtcaggtttaacaccaagatgggaatttatgtgcaaataatttatcatggaagtggtcccaggtgtgacaagagaggaagtggaggaagcaggacagggaaggggaggagaccaagcaaaggtgactctcactgattccacagaactctggaagtgtacatttcaccacagagctgtcccatgaaggcaagggagctagacttcatactcctgccccaccggtcattggtcaggggcctcccagggagaagacaatgcccaagcacatcttctgtgctcttgctggtgatttgccagcgtctctcgggcctttggccacaaaggttgtatttttggcttcctattttgaggttttgggactcagacargtttccttgctcctcagcttgcagacagcctattgtgggacttcatcttgcgattgtgtgagtcaatactccttaataaaccccccttcatatatacttcatatatatataactgatctatcctattagttctgtccctctagagaaagctaactaatacagcgctcctatgagaatctaatgccacactgatctgacaggggga

SEQ ID NO: 330340 - DNA, 507 bp, Homo sapiens
cttatattttcttgagtgattttttaaagatagtcaacattcaattattcaatacatattttgttcttctttgttagacaccgtgctaagtactagggacacaggactaataagatagggtccctcccctcaaagagcttacagtcatcattacaggatggcagacagttgatgcaatgtggccattcctttcctgcccscttccctcactcatgtcagccattaatcatgtgttccttgccactgacccaggatgtaacctcagggtacaacacccaaatcaaccactaccaggcagtcagagctgctaatcccaaaactattcagatagacaaaaaacctgatgtctccctccataattttacaatcattactattatggcagctaatgttctttgaaagcccattatatgacagacactgttctaagagctttataggcactcctagctccttcaatcccgtttctctaagtggttggttaacagaaatcttatgtggtcctca

SEQ ID NO: 330341 - DNA, 633 bp, Homo sapiens
tgacatttcctatggagaattatagaaattaattcaatttttactctatagtggtggataaatatttttattattatttccagtttataaaagkgttttagcccctaccgtttcacaactagttttcggcagtaccgcttctgccacttcctccagagcttcccgcttaggttgtgctttgtatgcctcagaaagttcagtcatttgatctttttttaatataaaaacttcatttattgttattctttacatttttgacagcaaaattagtcatgttttattgtatcttaagagtaaaagaaaaattaaccatgtactacagtctactgttccactataagtgatgtctactcaaatatacattagtttttagatgcactatatttggggttgttcaaaatcatttttcttaaaactataattaaaaatgaaaaaattttaaagtggtttaaaggtattaaaatgtgaaattcccttaacttccagccatgtggcattatcatatctctttctctctcttcttgcgctctctcttctcctcctccccacattttctgtcaaataagtactatttactcatttagttgcttatcaagtacttattcttggtttcaaaaaaattaatggtaactg

SEQ ID NO: 330342 - DNA, 633 bp, Homo sapiens
tgacatttcctatggagaattatagaaattaattcaatttttactctatagtggtggataaatatttttattattatttccagtttataaaagtgttttagcccctaccgtttcacaactagttttcggcagtaccgcttctgccacttcctccagagcttcccgcttaggttgtgctttgtatgcctcagaaagttcagtcatttgatctttttttaatataaaaacttcatttattgttattctttacatttttgacagcaaaattagtcatgttttattgtatcttaagagtaaaagaaaaattaaccatgtactacagtctactgttccactataagtgatgtctactcaaatatacattagtttttagatgcactatatttggggttgttcaaaatcatttttcttaaaactataattaaaaatgaaaaaattttaaagtggtttaaaggtattaaaatgtgaaattcccttaacttccagccatgtggcattatcatatctctttctctctcttcttgygctctctcttctcctcctccccacattttctgtcaaataagtactatttactcatttagttgcttatcaagtacttattcttggtttcaaaaaaattaatggtaactg

SEQ ID NO: 330343 - DNA, 633 bp, Homo sapiens
tgacatttcctatggagaattatagaaattaattcaatttttactctatagtggtggataaatatttttattattatttccagtttataaaagtgttttagcccctaccgtttcacaactagttttcggcagtaccgcttctgccacttcctccagagcttcccgcttaggttgtgctttgtatgcctcagaaagttcagtcatttgatctttttttaatataaaaacttcatttattgttattctttacatttttgacagcaaaattagtcatgttttattgtatcttaagagtaaaagaaaaattaaccatgtactacagtctactgttccactataagtgatgtctactcaaatatacattagtttttagatgcactatatttggggttgttcaaaatcatttttcttaaaactataattaaaaatgaaaaaattttaaagtggtttaaaggtattaaaatgtgaaattcccttaacttccagccatgtggcattatcatatctctttctctctcttcttgcgctctctcttctcctcctccccacattttctgtcarataagtactatttactcatttagttgcttatcaagtacttattcttggtttcaaaaaaattaatggtaactg

SEQ ID NO: 330344 - DNA, 448 bp, Homo sapiens
taatgtattgtttctcttcagaaatttgacctttggtttatagtcttaacatgagcactgggggctggaacttaatgtgccatacttaagcatatgttgcctstatgttgtggaaaatttaaaaaccaggggtttgtgcactctcaattgatgcttaaagattatgtaaaaagtagatactatttttaattaatggtaaattttagatttttgtaatcaagaatatataaaattttaaccaagtagggagaattttagtagacagtaagtagcccaaaacgtcattcaaagatacaatagctagcagtcaaagcaaatactaggtactttcttagttaaataaactttttctcttttgagaattttaaaaatttcttttcaggttggataaaagaaaatccaagtcattccccaccttcccaagaattagtgtggtgattgtcaagta

SEQ ID NO: 330345 - DNA, 493 bp, Homo sapiens
aaccaatgctggcttttgttttgtgaaatatcaaattatgattacattataccagtttgttattgttattggacttttacgtcaacagcttacccaagcaaatcctcttgcactgtctgatgcaaggaagaaaacttaggcatggcttktgtgtgtgtgtgtgtgtgtgtgtgtgtgtgtgaaactgtgtttttaagaaatttgctatgccttggaagctttgacacaatagtattgacaaactgttttggcgacacagatccttcctttcatatgtcttgacaatagtaggaagttagagaagctaaggtagttggagtgaaccctgccaccacttgctaatccagaggcttggatccagaaaattcctttcaacatatcaagagcacatttatttttagagagagttaagtgatacatacaactagttttcatgtttcaacatactctacctcccttatcccattcattgctttatttctggccaatattt

SEQ ID NO: 330346 - DNA, 476 bp, Homo sapiens
acatatcaaatgttatgacataatatttgtaaatcttagaaacttagagccttttccaaggctccaattttttaaaaatattagttacagatactaggagcatcagaatataaacgactttctacaaataaaaagatgtatgattaacatgagaaatctaatagctactatatgccctacctattatatcactttctatttttttggacwgaaagtttataaactgaggaaagcctgcccttcaacatggcaaaataactttcaggcaagatggccccaggtgaaatgaagtggccaggttctttttttgttgcttgctctcaacaatgtaccaacaaatgtaagtatacatactccagactaactgcatgtaacgagactgtgtgtcaggacataatcacctaaattaattttaaaaagaaaccaagtactaacagatgctacaacacggatgaacctggaaaacactacactag

SEQ ID NO: 330347 - DNA, 476 bp, Homo sapiens
acatatcaaatgttatgacataatatttgtaaatcttagaaacttagagccttttccaaggctccaattttttaaaaatattagttacagatactaggagcatcagaatataaacgactttctacaaataaaaagatgtatgattaacatgagaaatctaatagctactatatgccctacctattatatcactttctatttttttggacagaaagtttataaactgaggaaagcctgcccttcaacatggcaaaataactttcaggcaagatggccccaggtgaaatgaagtggccaggttctttttttgttgcttgctctcaacaatgtaccaacaaatgtaagtatacatactccagactaactgcatgtaacgagactgtgtgtcaggacataatcacctaaattaattttaaaaagaaaccaastactaacagatgctacaacacggatgaacctggaaaacactacactag

SEQ ID NO: 330348 - DNA, 521 bp, Homo sapiens
tgaaaattttataattgttgaaatatcatacatgatttatattgttaatgtgtaaattttgcctattttcagtagctttttaaaaatgttctcatgatttcacagtattttttgtgaaaattggaagtcaaaagttggtcagaatttcacattctcaaattgacttttaatatattgatattaattcactcttctttgtcacctaaatcaatatcaagatctaaatcatcaatttaactttttctgcagcttcttctgtggttagaacttagattattttcagtaatttttgttttttctagttctttattaaacagaataatagggacttcttcgtttctacattttgtgcagacttcacattcataggcacatagtctacacattatgtgataagaatccttcactgacwtttataaataaacatttaacacatttttttaggttttgataatggtttgtgtttttaaattttattaatgcatgccattcaggaacttctttacagagttgacatattc

SEQ ID NO: 330349 - DNA, 551 bp, Homo sapiens
aagaaataaccaagatcagagcagaactgaaggagataaacatgaaaaacccttcaaaaaaaaaaaaaaaaatcaaagaatccaggagctagtttttaaaaaatattaataaaaatagactactaactagactaataaagaagaaaakaatcaaatagacacaataaaaagtgataaaggggatatcactggcgaccccacagaaatacaaacaatgatcagagaatactataaacacctcaatgcaaacaaactcgaaaatctgtaagaaatggatatattcctggacacataaaccctcccaagaatgaaccaaaaggaattggaatctctgactagaccaataacctgttctgaaattgaggcagtaataaataactaaaaaaaaaaacaaaaaaaagcccagaaccagacggttttacagctgaattctaccagaaatataaacaggagctgatactctttcttctaaaagtattccaaacaactgaaaaggaagtgctcctccctaattcattctatgacgccagcatcatcctgataccaaaacc

SEQ ID NO: 330350 - DNA, 302 bp, Homo sapiens
acaggcaacagtccgaacacagggactatgaggacatgaacgaagaaggtctgccggagcagaggaactgaaattgaaaggtgaacagggatgccgggccgggtctgccagcagcggatataaggtcagtgccctaatgaggtactgggagtagtgctttaaggaagtgctgggaaccggaagttttctgaatcaggctaacaaggggaagaatttgtctgttgaagacaaacatyatgtgcagctgcttaaagttctgttgagacagtctggagctcaggttaattcgcaggcactaacta

SEQ ID NO: 330351 - DNA, 618 bp, Homo sapiens
acgcagcccaaaagtagtactgctgggattagaaccatgtctgttgggcttaaactgctccttcaaacacacttctttcctgccttgcatgccccctgccgactttcctcactttccagtttggctcagcctgagatgccagcctgaagatgctcctggccagtgtggaaaaccacagaaccttcaagaacagggtggcagcaggggcacactgcatactcaggcctctgcagggctgtctccgggcgaggaagcggagggtcagggccctaaggccygtggtggcaggaaaggggggaattaaggggaagccagttccaggtggggtgaagacaaattgacacccaacagaacaatgggctacttggacaggaagtgagcaccccagcctcggaggtatagtatgaaggggacagacagggagacaggagatctatacgtcttggtcccaaccaaatctgcacacccgagtttccaggagccccacctctcctgggaaaaaccattcctagccacctgccactgaggtcggctccaggaagtgtcaaggcctgcctgggggatctgttgccttccaggggttcctcctcagacgtttccagccccttgaaaacagca

SEQ ID NO: 330352 - DNA, 600 bp, Homo sapiens
acagttcagtgttgccaaatcttctaccagttttgaaacactgacgatatggtttggctctgtgtccccatccaaatctcatgttgaattataatccccagtgttggaggtgatgcctggtgggaggtgattggatcatggggcggacttccccatttggtgctgtttttgtgatagagttctcacgagatctgattgtttaaaagtgtgtggcacctcccctctctcttcctcgcactctggccatgtgaagtgccttgttcccccttcgccttccgccatgattggaagcttcctgaggccccccaagaagcagatgctgctgtgcttcctgtacagcctgtggaaccatgagccaaataaacccattttctttataattacccagtctcaagtatttctttatagcaattcaagaatagactgatacagccgatagttatttttacataaaaacctctccttccaggcaaataaagcayatcaacagatttatcactggagcccaggactctgggaggctctgctttaggtccttgttggtctgcatgcttctgggtgcttggagtcatgcatgacaagggtggtccttagcggaca

SEQ ID NO: 330353 - DNA, 633 bp, Homo sapiens
ctaggttccaactcggagtttgtcagctgtggctgtgtggcctcagatggtctcctgccctctctgggccctggcttctctgttaaatgaggggcagcatcagatgatttctaaacttctctgctggcaaggcccctccagacggccgctctctaaataaaaccctctctcctgcatgccagcctgtgatactgcgcctcaatccacacaaatagctgagctgggcayattcagctctcctcagctttctctgcagacctcttcaagcacatgtctgggtcttctcctcctgggtccaagggtagatggtctgagttccccgcagacagctcacaggctcccccatggggttcaggagtggtcggaagggcaggaatcagctccacccgtgacacccccgcccactgccgctgggatgcccctccacacctccacccatccatgcagtgctggacctggggcaccttccacctccccactacttacttttgagacttccctccccatcttgcacctgtagctctgtctgcattgctcagtttaaaaaccgttaacatttgattgctttactccaagtcacaggagggcaggactgcatctaattatctgtgtagctggcacacaccaccatcc

SEQ ID NO: 330354 - DNA, 633 bp, Homo sapiens
ctaggttccaactcggagtttgtcagctgtggctgtgtggcctcagatggtctcctgccctctctgggccctggcttctctgttaaatgaggggcagcatcagatgatttctaaacttctctgctggcaaggcccctccagacggccgctctctaaataaaaccctctctcctgcatgccagcctgtgatactgcgcctcaatccacacaaatagctgagctgggcacattcagctctcctcagctttctctgcagacctcttcaagcacatgtctgggtcttctcctcctgggtccaagggtagatggtctgagttcccygcagacagctcacaggctcccccatggggttcaggagtggtcggaagggcaggaatcagctccacccgtgacacccccgcccactgccgctgggatgcccctccacacctccacccatccatgcagtgctggacctggggcaccttccacctccccactacttacttttgagacttccctccccatcttgcacctgtagctctgtctgcattgctcagtttaaaaaccgttaacatttgattgctttactccaagtcacaggagggcaggactgcatctaattatctgtgtagctggcacacaccaccatcc

SEQ ID NO: 330355 - DNA, 484 bp, Homo sapiens
aagagagaaagagtggaatttaagaactacaaatcagacagaaaacaattaacaaaatggcaatagtaagtccttacctgtcaataactattttaaatgtaaatgaattaaactcaccaatcaaaagacaggacacataaatttttaaaagaggatccaaatatatgctatctataagaggcccactttagatttagggccacacaattagctgaaagtgaaggaacaaaaaaaaatatttcttgcagatggtgaccaaaagagatcagagatgctgatacttatattagaaaaaaaatagactttaagttaaaaactgtcacaagaaacaaataatgtcatcacctaataataaaaaggtcaattccaygggaagttattgcaagtataaatatgtatgcatccaacatcgaagcatctaaataaaataaagcaaacattgacagatttaaagagaggaaaaaaacaacaataaaataataga

SEQ ID NO: 330356 - DNA, 592 bp, Homo sapiens
aatccaataaaatgtaccaaaaagattgtagaaacagagagatcagagagattgtagaatatgagatcaactgcaaaaattaagtggatagttatggggatgcattctgaaaaatatgtcattgggtgattttgtcattgtgtaaacatcatagactgtactcacacaaacctagatggtatagcctacacacatctaggctatatggtagagcctattgctccttggctacaaacttggacagcatgttactatactgaatgctgtaggcaattgcatcacaatggtaaatatttgtgtattaaacatagagaaggtacggcaaaaatgtataaaatattaaaaaatggyatacctatataggacatttgccatgaatggaacttgtaggactcgaagttgctctgagtgagtcaatgagtgagtggtgagtgaatgtgaaggcctaggatattactgtacactattgtaggctttataaacactcaacacttaggctatactaaatttataaaatatttttctttcttcaataataaattaaccttagcttattgtaacttttttactttataaactttttaattttgtt

SEQ ID NO: 330357 - DNA, 466 bp, Homo sapiens
tttcttggtttgtaactccagaggagccacagggttccaatttctcacagacgattttttctacccgggatgcccattgtgactgctgtgtcttttggtcaaaggaaagaattctagaacctgtttaaaaggcaatacagcctttcccaacttctggcttaggcaggaggctcactttcagacacacagaacccttggccttgacttccaaccaacccctcccattgtttgtaaaattctagcctcttaggcctatagcaagtttcttctytttttttttttcttcaacttttaagttctgggttacatgtgcaggatgtgcatgtttgttacataggtaaacgtgcgccatggtggtttgctgcacagatcatcccatcacctaggtattaagcccagcatccattagctattcttcctgatgctctccctcccccggcccccctcagacaggccccagtgtgtg

SEQ ID NO: 330358 - DNA, 528 bp, Homo sapiens
ccacattctgtaatgagaactccatggattttactttatggtaactacactaaatataaaaataatcaacagatacaatgttttctgatataaaatagtcacatatactttatgtcactttttcaccacacactgtatggaattacaaagtccttattaatcctgcctcttaaaaaaattaaagtccaaactgtttctccatcctccactattctggtccaatctatcatcagctctggcagggactactgtaatagcccttgtcagcagtcactgcttcctctcggcccccacacaccatcacagtccattctgcacacagcagccacagtagtccttcagaagcacaaaccagatcatgctgctcctgccttaaaacccttcagtggcttcccaacacactaggaatgaaatgcaaatatgatgcatagggcccgcargcctctgcatgtttggtctcctgcctactccccaggctaactccttacaattctcccttggctcatacattcccaccacactcatgtc

SEQ ID NO: 330359 - DNA, 535 bp, Homo sapiens
gtctatagatttaaatgctaatctcttccataaacacccctacagacacacccagaaacaatgtttaaccaagtatctgggcatcccatggcccaatcaagttaacatataaaattaaccttcacaaagggaagattctagaaagtcacatccaccctcttctttcagaaggacaaactgctaacaaagaagaaaacaaagttcagaatcagattctttcactattttcttcctactatatttatgaggcacctgtcattgcagcacacctcatatgatacctggttgccatcatcttgcagtagaaataaccatcatcctgtagtcagtctacattgagtcactggcaacaggctccatgtgcagcaccccagtcagwtcacagggctagatggacacattaggtttgatatggagaatgctggaaatcctctacaccacattatattagatgttgcttctacaaatttataggcagtatggcttctcactttgtttttttgtgtgttttccaataatatctagtttcattgga

SEQ ID NO: 330360 - DNA, 508 bp, Homo sapiens
ggaaacaggagccagtttgaaggggctctcactagccaaaccagagacaatttcagcaccaaagaaacttaagctcagaaatacattatgaacaattgaaacaaaaaggaatccatgagcccacgtggatagtaattagataaataaggggttatttagatagttagatattaaataagtaaataacttttgtagtagaataatgagggccaactggtatttcaatatctttttgacagattgtgaatatttcaaaaccagaactgcttttttatctaaaaaaggtccctttggaccttaaactgctctagttatcagatcaatcaatcaatgctaagtaattctgttttcatgaattgagygaataaataaatgaatgactcacagccttcctagaaaattgtttgtattttacacttttcaattgatacgctagtgctggagttggaaaatcatcattttgccgccattatggtaaagattgaatcagacaaaaaaatcctcaacg

SEQ ID NO: 330361 - DNA, 579 bp, Homo sapiens
tttattgagtcacagttctggaggctgggaagttcactatcaaggtgtcagcattttgaaatggccttcttgctgcatcatcacatggtggaaagtgaaagggtaaggaagggagacmaagggcggccaaactcaccctttcataaaagcaccaatctcacccataaggatggagccttcatggcctcatcacttcttaagggtcccattccttaatactcttacaatgacaattacatttcaacgtgagtgttggagggaataaacatttcaaccatagcactcctcagttaaaatcatgtcataattccccattacctgtaaagtctaaacttaacacaacatacaaggtcctttgtattctgtataatattcccctttcttatttcaactttcaccattattctcatgcacatgacatcacaactacaacaagatagtttgctcttactccatcaggccatgtcctttgatacatttatgctttggcatttgtcaagcatgtcctttcttgcctacctctttggaaaacaactactctaatttcaagacacatttcaaaacatatgcgttgttaaa

SEQ ID NO: 330362 - DNA, 575 bp, Homo sapiens
ctgcttttagcagagtctagcctatagcaaaagtaatcaattggatggttatactgtcctttaaagagataaattctggcattgtcaggcaatgaaatgactgggtcccaaagggaaattgtaacagattctgaagactttaatcataaattcagggatcaggtaggtcacgaagtggtataaattggctatagctaatgattagggagtaatgagggcagcaacaaacttatgggaatatcttccctacttaacagtgatctcaaaactatttaaaacaaataaaagcacactgtatttgtattartctgttttcatgctgccaacgaagacataccagaaactaggcaatttacaaaagaaagaggtttaattagacttacagttccacatgacagggaggcctcacaatcatgccagaaagcaaggaggagcaagcaagcacatcttacatggatggcagcaggcaaagagagcttgtgcaggaaaactcccccttatattaaccatcagatcttgtgaaattcactgtcacgagaacagcacaggaaagacctgcccccatgattcaatta

SEQ ID NO: 330363 - DNA, 528 bp, Homo sapiens
aaaataaactaaaataacaaactgtttctaaaatgcactgaaatattatggtgtctctccacatgcaactcaagatttttttaaaatactaaattataaaataagtgtaaagaccatcagagctgtgatctttcccataatggaatgttttgttktattgcatttgaaatacagtaaattccttaaaaaaaaaaaaaaaaacagaacctgattcttaagagatgtctttgaaaagctgcataacttttctgagccttaattatcttatctgtaaaatgggaattctaatatctacttcacaaagttgctgagaaacggaatgaaagctgcaactgcaaaaccagcacagtgtctggcacatgttaagtactggataaatgttatttaagtctgaagatgaaagttgtgcacttacatccaaaatcagtaaaagagcccagcacatgtatttcttttgcaaaaaaaaaaatgcagtaaatgggatgatatttgcaaaattatttgagttcctttacaaatgttggagaa

SEQ ID NO: 330364 - DNA, 528 bp, Homo sapiens
aaaataaactaaaataacaaactgtttctaaaatgcactgaaatattatggtgtctctccacatgcaactcaagatttttttaaaatactaaattataaaataagtgtaaagaccatcagagctgtgatctttcccataatggaatgttttgttttattgcatttgaaatacagtaaattccttaaaaaaaaaamaaaaaacagaacctgattcttaagagatgtctttgaaaagctgcataacttttctgagccttaattatcttatctgtaaaatgggaattctaatatctacttcacaaagttgctgagaaacggaatgaaagctgcaactgcaaaaccagcacagtgtctggcacatgttaagtactggataaatgttatttaagtctgaagatgaaagttgtgcacttacatccaaaatcagtaaaagagcccagcacatgtatttcttttgcaaaaaaaaaaatgcagtaaatgggatgatatttgcaaaattatttgagttcctttacaaatgttggagaa

SEQ ID NO: 330365 - DNA, 522 bp, Homo sapiens
gaacaacaagtgcaaatatccagacaagatattggtgaacaaatcagtatgtcagtagcagaggacatatgtgggtgggggttagtaataggttctgatagggaggtatcaaattaggaacaactataawaaatcaagctgaagaatctaaacaaagaaaaattcaggatccatcctttggttattgagtagaggaatgaataagaacatggaactttaaaataatggagagaatttcagcaagatatcttggggtttatagctgtattagaaggggaggggagagactggagccagggaaagtagtgagaaggctattgatattcaagtttgaagtggcaagggtcagtaccaagaaagtgaaaatttggaagatttttttttaaggagaaaaataataaaacttgcacagagcagttagaggggaacatagaaaggaaagagccaagagttttttaatttctaatgatttccaagaatttcgagcttggaaggaaagaatagtgatgacattaataaaaa

SEQ ID NO: 330366 - DNA, 522 bp, Homo sapiens
gaacaacaagtgcaaatatccagacaagatattggtgaacaaatcagtatgtcagtagcagaggacatatgtgggtgggggttagtaataggttctgatagggaggtatcaaattaggaacaactataataaatcaagctgaagaatctaaacaaagaaaaattcaggatccatcctttggttattgagtagaggaatgaataagaacatggaactttaaaataatggagagaatttcagcaagatatcttggggtttatagctgtattagaaggggagkggagagactggagccagggaaagtagtgagaaggctattgatattcaagtttgaagtggcaagggtcagtaccaagaaagtgaaaatttggaagatttttttttaaggagaaaaataataaaacttgcacagagcagttagaggggaacatagaaaggaaagagccaagagttttttaatttctaatgatttccaagaatttcgagcttggaaggaaagaatagtgatgacattaataaaaa

SEQ ID NO: 330367 - DNA, 568 bp, Homo sapiens
tattgttttgccactaatcttgtttcttaggtctagtagtaactgttgtataaatttgggagctccagtgttaggtgcatatatatttaggattrtaatattttcctgttggactagtccttttatcattatataatgtccccctttgtcttttttaaatgttgttgctttaaagtctgttttgtctaatataagaaaagctactcctgcttgcttttggtgtccatttgcatggaatatctttttcaatccctttaccttaagtttctgtgagtccttatgttttagatgagtctctcaaaggcagcagatacttggttggtggatacttatccattctgccactttgtatcttttaagtggagcatttaggccatttactttcaatgttagtcttgagatgtgagatactatcattatgctagtttttgccagaataccttgtttttcttttcattgtgttattgttctataggtcctgtgagatttattatttaagcaggttttattttggtagatttgtttcaagatttcaatgatttgtttcaatattagagctccctttagt

SEQ ID NO: 330368 - DNA, 633 bp, Homo sapiens
caagtcaaacttcttagaaaggaagttgcaatctctataaaagtaagtcaaagccatctaaagaggaagaaaaaaaaaaagcaagagaagacagaattcagtgtaaacagagaagggytccttttaaattctatttacttctagctaacagcaaaagattttaaatgcacaaaacagatggatgaatgctttgcccattgacagatgcaagtcctagctcttgagaatgcccccagatgtagaattccttaaaaacaacaacaaaaacaacaacaaaaacaggtttgctgcattttattgattgtcaaatgccttgggcccaattcaattccaaaaacattgaataaggacacactaagtgccagaagttagatgctaggcatccaaaaataaataaacagagaaaaatgagtttatgacttgaaagggaaataacagattaatataccactaaatataatgcaagtggagatgccacaaaatcaatgtgaaatacaatggaagtacagatgaaataataatttactgcttggcgcatgagggactcttcactgaaaaagcaacatttgctttggcctggagcactgattaggggtaggcaaggcaaaggagagagggatatccacacagcag

SEQ ID NO: 330369 - DNA, 496 bp, Homo sapiens
atattttagcagttgtcttctggaaagataatgcattgggctgaaagagtgactccaatagaggaaatttccagcatgttagtaacttaaagtcagggcaggagtggaggagatgaacaattcagaggagagagccaccctcgcaccaagcaccaagcagatagatacacttcccattactttccttattcgcagctatgtgtaagcagtggctatacgaaaaagaaaatttatcactgattctagacacccataaaagggatataaagggtaaaaccttttcttgttctgtttaaatgtatgttcacaagttccatatgggkctgggaagattgggtgcgtttgatgtgttgcatgaagctcagcattcagatttaaaaaatgtgttttacattttccactgctgtgatggctaaggtgttacaagcagcatgcctaattttgagtggggatactcggtgaaaccatggttgtaaatgtagtgttcagaaaaagt

SEQ ID NO: 330370 - DNA, 608 bp, Homo sapiens
ctgaatggccacctgcccttagaaaaatctcttctcatattgattgtgaaaacacaaagggatggaggaaatattttaagtataaaagaaaaataagactgttcaaaccacttcaaacttattatgactggcatgccaattacatttacataatcagcaaatatgtactgaatacctatgatgtgcaagacaagaggtgtcaaaagtgcatcctccttagttcgctcccttagagaatttcaagctaattgaagcacccagaaaatataggaatagaaaaattaacaaaggtagccttctcagtatagcagaaagaatattacagtagaaaataaaagaatctggactcaaattatgagtttgatacttatttgctgtgtgacctcttggacaattcattaagctcatttactcatctataaaataagagggttcaaatatatttagcatggaaaatagatttcaggttacrtgctgctgactctaaccaatcagcgacttccaggaacaatgtgctgatatggattctaaaactacacctggggaaaaagtgccctttttgattagcaatgactaccatgagcttaaaaaggaaaaatattagaagg

SEQ ID NO: 330371 - DNA, 611 bp, Homo sapiens
aagcaattaattctggagcaaacagaattggctagaaagagcaggtgacatttgagctaggttgaaaagagcagagtagacaaaaaaagccactgcggtgcaaaagtacaaagttgcggaaatgcagggctagggtgaggatggttgaaacagctgtacctgtagcactgggtaccacggcagggagagattggattatggttctggaatgtaggcttggacaagatggttgaggacctagggtagggtaacatccaaatcaggacacatttgagagtggaagggagagcaaygatgctaggaccataggctataaagcaggactgtcttgtgcatactaagatgcatggccaccctagcctttgagatcttatcatgattgtttttctctaagtcagcaggaatcatcaaatatttttgaacccagaagtaatagcggtcgtggctgtggattagactggtcactgtgcagcagtatagggcagaggctagagagaggctagaaaagaaggccattgtcatagtttgggcaaaaaatgagacctcattggtagagaagcaacaggtttagaggaggaaagttataggaggtattgcacaggggtggattt

SEQ ID NO: 330372 - DNA, 642 bp, Homo sapiens
ctaaaaataactaggagtgtgagataaagcaaggtgaacaaaactcaggagaaaccataggcaaaagaaaccatacagagaytccagatgtttgaattaacatatagtcaaacattaagataaacatgcttactatattcaaagaaatagaagacaaaattaaaaatcctggcaaatatatagaaagtataaaaagaaatagcagatttgaaaaagaaagctaaatagaaattctacagctgaaaaatacataagttgaaattaagaacacaatggatagatttaacagtctgttggacacatctgaaaaagataatagaatgtaagatagattagtattaatatccagaatgactcattgagaggcaaaagcatggaaaacacagaagagatgctaagcaacagcagatccagccagaaattctaacacataattggaatctcagaaagacaggagaggtagaatggagaagaagcaatattttaaaagatattaaatttttttttcaaaactgataaacagcatcaacttgcaaatggatgaagcaccataaaaattgagaggtaacatttaaagaactctacctctagcacaaatgagaagattagtgaacatcaaagacaaagacaaaaatgtaatga

SEQ ID NO: 330373 - DNA, 614 bp, Homo sapiens
ataatctgttcacctcccactaggcccctactccaacaaagggggttatcattcagcatgagatttggaccgggacataaatccaaaccatatcacaaccaattttagacttgtgacctctaggacaatgacagaatacattcatattgttctaagccaaaacatttgtggttatttgttatagcagcaataggaaatcaatatacctcccaacctgagactgtgccccacccatgccccagctcctctattccatccttctgggttcttctttttgtatcctttgctgctatcagactgtttctaatttctttgtggatttgtttacttgtgtattttctgtctctcctgactagaatgtgagctcccctagggcagagacctcctatgttatgattacctctgagtactcttgcctttgaactaatgcctgacacatagcaaatgctcactggtataaataaatggttgaatgaagaaaggcatgacagacaagtagctctttgaaacattcacttatagccaattggatatcatctgaaaacttwtagggaaaaagtacaccccaaatattaatagatgaaacggacaacattgacagatacagatattgg

SEQ ID NO: 330374 - DNA, 575 bp, Homo sapiens
ctgccaatctctctgcccatctccagacagtatgactctgattctaagcccaaatttagtgggaggctctgccgccacatcttatgtgctgctgggcttggtgaaggttagcagtcactgtctcwgttacatgcatatgtgacaaggaaaaagtgatttacagcttctctttccctcttgtcttctagggagaagagaacttccgtccaattttatcctgggccttatttttccaatcagagtcatggaatggggatgaaggagaagaataaaaagaagcaagaccatttggttggtttccattggagaaaccagactcacaggaggggaaatgctagatctgtaagataaggggtgggtgagaaaaatataagaatcagaaagcactagggttgaaaaaaaaaagttctgggaaacttcctttttttttttttgagaaggaggagtgattaaggcagctgtcatattatgataggtggaattttgaggagatagatagataaagagatttttcagaaaatctgccgtaagctgtggatggaactcttcctttagcattttctgaaagactgtaa

SEQ ID NO: 330375 - DNA, 523 bp, Homo sapiens
tgggagaaagaaacaaactgtacctttcagtgcagattagatycattttcctggggctatgtccagccatccagggactgtcaaaaccaaagatatttgagattttgcttatgtttctttgctttgctttttggccccttttcaaaacaacaagaagaatgtaaaagttgacttgaatttttttactctgtgagccctgaacaaaagtccagaaaaataaagcagaggcaaatattattgcttctggttttctaaaagatatgacaataacagctcagaaaactgtagcccatgattccaccaaaggttagaggttcagaacagggagcagcacgtggatggcgtagaaaagggacccctttaagtcctactcgcagtttagttctgacacgaaccttcaacagttacttcaactctctgagccttggttttcttacccaagatagcagatattaccgtctttcatctctgttacagggtgggtgttcacccatccgttcattctgttaatccatccattcaa

SEQ ID NO: 330376 - DNA, 402 bp, Homo sapiens
gaagattagtatgatcatcatggcactagaggacaattgggctgatgatgaaattgggatgggtaatacttgaggcccacagtaggagacttgctcagggtcacagccctgggaagcagcagaatcaatactagaactaagcattctgtgtctgcaagttcatgactgtggggggcaacctggaaactcctgggtaaggaagaggagtaagtttttaagtgaaaggttgtctgacgtaggaagccatcaacactcttcagggattgagggggcaagagagagccaggccactgagagaattcagctgcttttctgttccacactccttggttccttatcagaaagagcattcatscctttgcagacaaacaccagaggtcctcagtgtcacatgccagccaa

SEQ ID NO: 330377 - DNA, 584 bp, Homo sapiens
tcaattctagaccctaatttctggcatttcattatgtttagctgcagtgccaagttgagrcaatggcttaacatggctccctgacatggtgttaatattgaaggaatcaatatttagctggagaaatgaatatttagctggagaactcagccaactgttttgagtctgagctatcagcctcataaggcagaagagcttagggagaaggctgaggtttttgccagaccatgtcccatctcttcctgcccttacatttgcttatgaggtcctcacagtggctggtggcctataagggggcccttctgtagaactctgtgtgtgccagaagaggcagctttggccctgtgcaagacactctggagcattaagtcttggcatcagccatgcaactcttgataccagtgcctgttttctagaggcaaaataaggacacttcatgagaagaaaggagtaatcaaatgtcggagacttgaaagactgcaggagtctgggagattggcagggcttagctctggaagctgaagccaggcctcttctctcttcagctattcctcctgcagctatgagttgggattctgcttccc

SEQ ID NO: 330378 - DNA, 584 bp, Homo sapiens
tcaattctagaccctaatttctggcatttcattatgtttagctgcagtgccaagttgaggcaatggcttaacatggctccctgacatggtgttaatattgaaggaatcaatatttagctggagaaatgaatatttagctggagaactcagccaactgttttgagtctgagctatcagcctcataaggcagaagagcttagggagaaggctgaggtttttgccagaccatgtcccatctcttcctgcccttacatttgcttatgaggtcctcacagtggctggtggcctataagggggcccttctgtagaactctgtgtgtgccagaagaggcagctttggccctgtgcaagacactctggagcattaagtcttggcatcagccatgcaactcttgataccagtgcctgttttctagaggcaaaataaggacacttcatgagaagaaaggagkaatcaaatgtcggagacttgaaagactgcaggagtctgggagattggcagggcttagctctggaagctgaagccaggcctcttctctcttcagctattcctcctgcagctatgagttgggattctgcttccc

SEQ ID NO: 330379 - DNA, 471 bp, Homo sapiens
ttcccggaaataccccttacagaatctcttctgcatatatgtgtgacaatagtatctgctctgccatttgtattcacagtcttgtgttaaagggtctttcctttatagtattagatgtagttttgacagtgacagcaaccatccatggttctaaagaattcagaagagtgttacagacagaaactctgggtgtttttaggargcttcatgacaatacccttttttctctcctcacaaagtattatgtgattggtggccaaagtcataaacagctttcctatctattgactctgtgatttgttaagacattgaattaattaagaatgaagaaatgcatactaagtataccttgtttggatcttgatttgagcaaaacagttgtgaaaatatatttatgagttaggaaaactggacaagaaataggatagtagcagtagtctttaatgatcatggatgtgagtatcttcttaa

SEQ ID NO: 330380 - DNA, 599 bp, Homo sapiens
tggttctaaagaattcagaagagtgttacagacagaaactctgggtgtttttaggaagcttcatgacaatacccttttttctctcctcacaaagtattatgtgattggtggccaaagtcataaacagctttcctatctattgmctctgtgatttgttaagacattgaattaattaagaatgaagaaatgcatactaagtataccttgtttggatcttgatttgagcaaaacagttgtgaaaatatatttatgagttaggaaaactggacaagaaataggatagtagcagtagtctttaatgatcatggatgtgagtatcttcttaaagagactttatttttagagcagtttgaggttcacagaaagattgaacagaaattacaaagagcttccacataccccttccccccactctcccactatgaatatcccccaccagagtggcacatttgttataatcaatgaaccaacatcattatcacccaaattgcatagtttatgttagggttcactcttggtgttgtgccttctacaggtttggacaaatttataaacacatgtatctaccatgatagtattatacagaacagtttcactgc

SEQ ID NO: 330381 - DNA, 540 bp, Homo sapiens
tgatcatggatgtgagtatcttcttaaagagactttatttttagagcagtttgaggttcacagaaagattgaacagaaattacaaagagcttccacataccccttccccccactctcccactatgaatatcccccaccagagtggcacatttgttataatcaatgaaccaacatcattatcacccaaattgcatagtttatgttagggttcactcttggtrttgtgccttctacaggtttggacaaatttataaacacatgtatctaccatgatagtattatacagaacagtttcactgccctcaaaatcctctgtgctccacctattcacccttccctcccccaagccccaacaaccactgatctttttaaattatgttttctaaaagagttatttctcagagatgcaaactgatgtatatatgcaaaaacaagcatatatctgtagactgtgcatatattttttaacggttggggagacagatgcagataaaacaaaattggccataggctgataattattgaagctcagtgacgggg

SEQ ID NO: 330382 - DNA, 524 bp, Homo sapiens
ctcagcccttgcctttaactggtaaataaatcagccaagagtacactgaccaggaaaaacaccagttatgcaatgcgagggctctggcccagcaaacacagctgcccctcggccgacgtttccctactttctcccagatagagctgctcgtggrtgcctcgtcagttaggaaaattccagagggaaaaagtgggacagcacccagcagtttcccgggagtgtctaggctaggctcgtagaactttcaaaaataagaccaagaaaggccactttccttacgacagaaaactaacgctgttactctccttacataagggctgcaccttgacacacagaaagctactttcagggatgatagatttatattccaaagggctactaaacttgtaaccatagtaacaaacaaagctattacataaaatggctttgccacgtaaaagcaataattatattaaccagatgggaggaaaaaggagaaggaagtctgatcaatgtggaaggcaccagtaaattggattgaaaat

SEQ ID NO: 330383 - DNA, 524 bp, Homo sapiens
ctcagcccttgcctttaactggtaaataaatcagccaagagtacactgaccaggaaaaacaccagttatgcaatgcgagggctctggcccagcaaacacagctgcccctcggccgacgtttccctactttctcccagatagagctgctcgtggatgcctcgtcagttaggaaaattccagagggaaaaagtgggacagcacccagcartttcccgggagtgtctaggctaggctcgtagaactttcaaaaataagaccaagaaaggccactttccttacgacagaaaactaacgctgttactctccttacataagggctgcaccttgacacacagaaagctactttcagggatgatagatttatattccaaagggctactaaacttgtaaccatagtaacaaacaaagctattacataaaatggctttgccacgtaaaagcaataattatattaaccagatgggaggaaaaaggagaaggaagtctgatcaatgtggaaggcaccagtaaattggattgaaaat

SEQ ID NO: 330384 - DNA, 620 bp, Homo sapiens
cctaagggtgatttatggcccaggtttggaaatgaatagagaaagaaatatttaaatgtaaccatttaaaaaccaagctgttaggtttaggactgtcttcaaaaaattgaggcatctttcttttgttggagttgtccatattaatcaaaataaagtggtatggctttaaattttttttttwaaaaaagaaacaaaacatttaggttttaaataggacatgtaagggttttccttcctgttttattttttctggaacacagaacccagaatgaaacctccaggaaactgtacatactttcttaggtcttctctcagtgtcttatcttttgaggctaagcagtaaatgaaaaccttaattgatttcttgccttattgaatctgggcaaagattttcatctctgtagacatagaaatatttgaaaaagacaacaacaggtgaatattatttcaaaagtaaagaggagtaaaagacataagccaccaggctcgtgacatgcacatacacacatacaccccacgtatacacatacacacacatgccacatacacgcacataaacacacacacacacattatgccttaaaaggcaaggttcttccttcggaacatggaagccagat

SEQ ID NO: 330385 - DNA, 620 bp, Homo sapiens
cctaagggtgatttatggcccaggtttggaaatgaatagagaaagaaatatttaaatgtaaccatttaaaaaccaagctgttaggtttaggactgtcttcaaaaaattgaggcatctttcttttgttggagttgtccatattaatcaaaataaagtggtatggctttaaatttttttttttaaaaaagaaacaaaacatttaggttttaaataggacatgtaagggttttccttcctgttttattttttctggaacacagaacccagaatgaaacctccaggaaactgtacatactttcttaggtcttctctcagtgtcttatcttttgaggctaagcagtaaatgaaaaccttaattgatttcttgccttattgaatctgggcaaagattttcatctctgtagacatagaaatatttgaaaaagacaacaacaggtgaatattatttcaaaagtaaagaggagtaaaagacataagccaccaggctcgtgacatgcacatacacacatacaccccacgtatacacatacacacrcatgccacatacacgcacataaacacacacacacacattatgccttaaaaggcaaggttcttccttcggaacatggaagccagat

SEQ ID NO: 330386 - DNA, 561 bp, Homo sapiens
tctcccattttagtcaaagaaagctaaatggaacttgcaactcaaactatgtaatgattcaccccatggtaataaagcagccctggaaaactccctggcgggattaatcttaatcggcaattaagataaagtctgggcacatgctaatccagggcttaatcggagacattttaatgtgctgccatggtgtggatataagactaggattccactaattgagcctggaatgtgggtgtgaggaggaggaatcgcagtgcaggggttgcctgtagatccagcagtgaaatgaggttttgcaggagtgttgggcagtctgggctaggacggccccctacgtgtggctcaccttgccattcatgaacgctccatcttttctgtagagcaacaggagcaaaaaggcaaagcaagttcctaacaagatatacagtagacgtcttgctttacttatcacgttttgaaagccctggtgcatgagatgatgactcacacaaggtaggtgtgggkacccatacgaggaaaagcaaaatagttttttaaagagaaacatttaaaacagctttt

SEQ ID NO: 330387 - DNA, 547 bp, Homo sapiens
gctttcaaatgcctcctcgccatctgaaaatcaggcagcaggcatcgcctacatatttcacagcagtctacctgtctgggtgtttgggcttgacagcaggaagctctttgaaatgaggctgaggcatttcaaacacttctgcttgaatatccagtttgtatattctgtcgawggctttttaaattggctttattttactttattatatttttttttactaattttggaatctcttattaagtcgaaagtctgcaaaagagcaaattacaaagccaggatgccttttgacgatctcaagtgaatgatacagacacaggctcgcaggctcacaggctcacacacaattccatataacaaggaaggagagaagttacattcacagagcagaactattttcaacaacagtccagtgaaaagtgccaaatgtttgaaccttttgactcctgcccagataatatcataatggttcagagagggatgtttacagctttctatgcgtaataaataatttagaagccattcattaaaaccttctaaattacagaca

SEQ ID NO: 330388 - DNA, 547 bp, Homo sapiens
gctttcaaatgcctcctcgccatctgaaaatcaggcagcaggcatcgcctacatatttcacagcagtctacctgtctgggtgtttgggcttgacagcaggaagctctttgaaatgaggctgaggcatttcaaacacttctgcttgaatatccagtttgtatattctgtcgaagsctttttaaattggctttattttactttattatatttttttttactaattttggaatctcttattaagtcgaaagtctgcaaaagagcaaattacaaagccaggatgccttttgacgatctcaagtgaatgatacagacacaggctcgcaggctcacaggctcacacacaattccatataacaaggaaggagagaagttacattcacagagcagaactattttcaacaacagtccagtgaaaagtgccaaatgtttgaaccttttgactcctgcccagataatatcataatggttcagagagggatgtttacagctttctatgcgtaataaataatttagaagccattcattaaaaccttctaaattacagaca

SEQ ID NO: 330389 - DNA, 575 bp, Homo sapiens
ccaagttctctgacagggagccctgttcagggtttatcaggtctatcaaacatctttctctttctacctcatccctaaggactggaatgtggtggaaagaacgttggaccaggcaatgggagaaccaggatctaaacatatcttcattaattttaccttgaatttatctggcctcttatttcctcttcacagcatcaactttcttgtaaaagtggatgcctactactgttccccaaaggaagaggcaaggtaaaacaaagtctccacaatactagcaataccaaatgtgraacaaatcccagtggtagtgttacttggtgctctgtgactttggaacctaaagcttcactagaccgttgcaattactaagtgagtaaataaagcacatagcacaaaggcctggcactgagatgcccaccctcttcatggggctcctgtcttcttccttcctgatagatcatgtgtaagttcatatgtatctataagggacatgaattatccagaattccttatagtcagaatgtacagtgatataatgttcctgagttacttacccatttccactgggtaagtca

SEQ ID NO: 330390 - DNA, 505 bp, Homo sapiens
aagctctgggaagggaagctgttctattatgacttcactgaaataacatgaaaattcatacaagygcttctttttcttttttacccaaaatacacctcccactctccatttctttcctttagcttctgggagtgtgatcctttggtaggagcggatgcaatttgccaatccagtagtgtctgccatattgctttcaacacttttctacagtgccctccatcagtgccttgatccacaagactaagggtctgagatagtctggtctgatactctcatgctaggatgctagcctccctctttactgggtaattggcttccttgcctaaattttagttttactttctcttgcccacttttccttgtccatctatacatctaagctaagaattttagcacataaacggttctgagattcccttagctttttcctctatcctcttgtcctgacctttgcaggcaagagggtactgttacctgtaagaggtaaccttgtgagaaggagtga

SEQ ID NO: 330391 - DNA, 552 bp, Homo sapiens
tgcccaagttcctgtgtcacaaaatcaactgtttccatgtgttagaagcatacacttcatctccactagcagcagcaaagaatgatcacctatctttgtaggggagcaggggtttactgcaatagagaaccagggtagtggggcccacagtgctgagtttcaatctgttgctagttgctaaccaggtggccttggagaagttttttttttctttttttaacctttccaaacctcagtttgytcatcagtaacatgagaataattatggtacccatacatcataggactgttgggtagagtatatgagataatatatttaaggcctttaacagagccaggcacacaatcaatgctagaaatattagctgctcgtgttagtgttacttagagaagggaaagcaaataactgtcaaaagtcaataaaatgatactctaaacatctaattaaatgcaacctgataatcatagaactgtacatttatatgatttgaagcattttttcctaaaaagaacagttagtttctatgattaattatttagattacagaaaca

SEQ ID NO: 330392 - DNA, 538 bp, Homo sapiens
cactttggttagaaacatgattggaaatctcctgttgatagagtctctccaaatagactcttatcaacaggagattgccagtgggcaggtctgatggcacrcaatgtccggcatgtggctggtcacataacaggtattataaacatttgttaaaagtttaaatttgccccagctgctctcaagtaatggcttttacaagtcccagacttctaggatcgaaaaatgcataagcaagtgaccactcctccctctccccttggaaaaccataaaatggacaagaaagtgcataagcgatgctagccctaaggggaaccctggccctgacacgttttgccatcctcctcttgttccctctggcttggtagtgcatcactgttcttgcttcctccacacttatgtcccagaggaggcaacttgactaggatacattgcaccactcagaattcataataagatcaagaagaagtgacttgaggactctttgtgttccttggttgcctgcttatcttttctcactgtggttgactgggccaagga

SEQ ID NO: 330393 - DNA, 623 bp, Homo sapiens
ttggaagactcatgtagaaggaggattaggtttctcctgctcaggcccatgagccaatagaatggaatcttcagagaaacactttacttcaaaatgaggaagaccttccccaaatctgagctttcccaatgacatcatcaactctggaaaattagaattcagcttaagtttgaaattctcaacattgacaaaatcagtactagttgacaacagatttagctgcccaagaggccagtgtgttcctgggcttcactacagccctgyagacactctgccctgaactgatcagactgtgcttggacaaccaccgacagttcccatctggaaattgtaaaagggacacggcaaaatggaatgtgctcagcatcacatgctaagattagacccataataaaaatatttatataatcatgttatttaacatatggatttaactgattttaaatttttagaatgaacctacagacaagctactaaagacttagttacatgtacagaatagaatgtaaacttggacaaggtaaataaaataatatggtaaaaaccgggaagtatatagaaagaagaggctaaaaattaggggacattagaagttctcaaggggcagggcttcaagatgatgg

SEQ ID NO: 330394 - DNA, 632 bp, Homo sapiens
gggtgactaatacaatgtatgattcactaagcagaatatttatggttcccatttcctcctgarttttcatttttgcttactccaaacattcataagatttcaacaataagagttccttttcagtgttcaactatccatttcttttagtctgaagtagaaaagacttagggaaatgggacaattatagtcaagtcttaaaattgttccttcttgcacagatattgaggttagactatgatggccttaatatgctgaaaaatgcatttttatatgaagctaataaggaagattcaagaagaaaagcataagggaaattcagtcaatgaaaaggaagtcatttcagttactcagaaatataattcagatatttatttttatgagactgacccactccctatggcactaatgagggaactcagatatttattgatttattatttactaattattattgtcattattatttttagagtcaaagtcttgctctgcacacagcctggagtgcagtggcgtgatcgtggttcactgcagtctctaaactcttgggctcaagcgatcctccagtctcagtatcctgagttgctgggattacaggtatgggtcaccatgcctggtttagacagttattttta

SEQ ID NO: 330395 - DNA, 617 bp, Homo sapiens
taaattttagtgttgatgaaggagtaatctttttatgtgtctgtttttcttgattgtaaactcttttttaatttttattttatttttgagccagggtcttgttctgttgcccaggctggggtgcagtagtgcgatcaaggctcacaacagcctcaacttcctgggctcaagtgatcctcccacctcagcctcccaagtagctaggactacaggccatgcctgggtactttttgtgttttttgtagagacggggttttgccatgttgcccagtctggtcttaaactcttgggctcaagcgatccacmcacctctgcctcccaaagtggattgtaaactgtcaattcttcattatgagcagggtcaatctccaattcatttttgtatcctctgtccctcctacagattctcaaaacactgactattgagatggtggctgaagtactgatggaagcattggtgatgatggtaggagtaggtgcagtggtgttgacaccaaagcaaattccaaaagttacaaagaataacgatagctaatattgatatgcacttattctgtcagacactctcttgagtgccttacatttattaaccgtgaaatcctcaaactacgttatgc

SEQ ID NO: 330396 - DNA, 617 bp, Homo sapiens
taaattttagtgttgatgaaggagtaatctttttatgtgtctgtttttcttgattgtaaactcttttttaatttttattttatttttgagccagggtcttgttctgttgcccaggctggggtgcagtagtgcgatcaaggctcacaacagcctcaacttcctgggctcaagtgatcctcccacctcagcctcccaagtagctaggactacaggccatgcctgggtactttttgtgttttttgtagagacggggttttgccatgttgcccagtctggtcttaaactcttgggctcaagcgatccacacacctctgcctcccaaagtggattgtaaactgtcaattcttcattatgagcagggtcaatctccaattcatttttgtatcctctgtycctcctacagattctcaaaacactgactattgagatggtggctgaagtactgatggaagcattggtgatgatggtaggagtaggtgcagtggtgttgacaccaaagcaaattccaaaagttacaaagaataacgatagctaatattgatatgcacttattctgtcagacactctcttgagtgccttacatttattaaccgtgaaatcctcaaactacgttatgc

SEQ ID NO: 330397 - DNA, 353 bp, Homo sapiens
aaaaaaaaaaaaaaaaaaagaaaaagaaaaagagacagaatgtaggagtgattagaaataggacagtgggatatagatttaaggcttttggcaaagttgaaacttgttctcttgtgcctatcccctagaattcctgaaaagttatgcatttgccagatkgtaaagctaggtggcttgggctgaattctggatctcagaggagctatacagccttgagagatctgggggcgcctgaagatgttaagtaaagctccatgggcctcagagaaatttagcatctctcagaatatcttcctttaatgtgggttgcttgcaatctggagttcttaagagggaattctgaatccctttcc

SEQ ID NO: 330398 - DNA, 577 bp, Homo sapiens
catgtgccaccacacctgggtaattatatattttttgtagagacggggtttcgccacgctcaccaggctggtctcaaattcctgacctcgagtgatccacctgccttagcctcccaaagtgttgggattccaggcatgagccaccacgcctggtctaaaaactagttctctatcagatgttttcctaggaaaaattaaataatataaacaagcctagaaaaagttactttgaaacatgtgtacttttaaaatctttttctaaactagcctttttaaaaaaagatgaaagattaagactataatacaatagtatgattcactgttctcatgactccttaaaccaagtaagttgtaacgtttattatctatttcaataaacaaaacatatgcttactttgtcccatcctkatttatataaatgtaactatttcaaatttacattttttactcaataagcaaaacttcttttattctagaagtctttgttggaatctttaattaattcacgctttatttatctattttattgagacagagtttcactccggtgctcaggctgcagtgcagtggtgcaatt

SEQ ID NO: 330399 - DNA, 523 bp, Homo sapiens
aattaggtatattgcttttgctttttgaagaaatcatatagcttacacttgtaaatctgtcatttttggacattaactttttttttttttttttttttttttttctgagatgtagtttcactctgtcscccaggctggagtgcaggggcacaatcttggctcactgccgcctccgtctcctgggttcaagggcttctcctgctgagtagttgggattacagtcatgcaccaccacacctggcttatttttgtatttttagtaaaaacagggtctcactatgttagccaggctggtcttaaactcctgacctcaaatgatatgcctgccttggactcccaaagggctgggattacaggcatgaaccactgtgaccagcccggacattaactcacgatggcagggttattgtccttcctctatgcaaacaattcccaccagcatcacagagattcaggagaaacagattctgcatagcaggagaagaggtatggcttttgaggcagggccaatgagttgtccatc

SEQ ID NO: 330400 - DNA, 523 bp, Homo sapiens
aattaggtatattgcttttgctttttgaagaaatcatatagcttacacttgtaaatctgtcatttttggacattaactttttttttttttttttttttttttttctgagatgtagtttcactctgtcccccaggctggagtgcaggggcacaatcttggctcactgccgcctccgtctcctgggttcaagkgcttctcctgctgagtagttgggattacagtcatgcaccaccacacctggcttatttttgtatttttagtaaaaacagggtctcactatgttagccaggctggtcttaaactcctgacctcaaatgatatgcctgccttggactcccaaagggctgggattacaggcatgaaccactgtgaccagcccggacattaactcacgatggcagggttattgtccttcctctatgcaaacaattcccaccagcatcacagagattcaggagaaacagattctgcatagcaggagaagaggtatggcttttgaggcagggccaatgagttgtccatc

SEQ ID NO: 330401 - DNA, 523 bp, Homo sapiens
aattaggtatattgcttttgctttttgaagaaatcatatagcttacacttgtaaatctgtcatttttggacattaactttttttttttttttttttttttttttctgagatgtagtttcactctgtcccccaggctggagtgcaggggcacaatcttggctcactgccgcctccgtctcctgggttcaagggcttctcctgctgagtagttgggattacagtcatgcaccaccacacctggcttatttttgtatttttagtaaaaacagggtctcactatgttagccaggctggtcttaaactcctgacctcaaatgatatgcctgccttggactcccaaagkgctgggattacaggcatgaaccactgtgaccagcccggacattaactcacgatggcagggttattgtccttcctctatgcaaacaattcccaccagcatcacagagattcaggagaaacagattctgcatagcaggagaagaggtatggcttttgaggcagggccaatgagttgtccatc

SEQ ID NO: 330402 - DNA, 583 bp, Homo sapiens
aaataggtaaccagaacagaccaataacaaataaagagatttaatcagtaatcaaaaacacccccaatgaaaacaagcacagcaccagatggcttcacagctgaattctaccaaatacttaaagaatgaataccaatcctttgtgaactcttccaaaaaatagaagagtaaacacttccaaactaattttatgaggccagcattaatgtgatactaaagccagtcaaagacatcacaaggaaaaaaccacaggccaatttccctgatgaacatagatgcaaaagacccaaaaatattagaaaactaattcaacagtacattgaaaggatcatacagcatgactaagtggtatttattcctagaatgcaaggatggttaacatacacaaatcaatcaatgtaatataccacattgtgatataccattaacaaaatagaagataaaaaatcacrtgatcatctcagaaggtacagaaaattttttttgacaaaattcaacactccttcatgttaaaaagtttcaacaaattagatacagaaagaaacttacctgaacaaagaaggccatatacaaaaatcccaca

SEQ ID NO: 330403 - DNA, 469 bp, Homo sapiens
ctttggtatcttcaaagagcagagaaaaggttgggggttttattagagaaatgttatgtattgttttgtaagaaaactcattggcattaggaaagtttttgggagctcataagctctgattggtgagtaatgatgggtaggtaaaactaggcttaaagtcatggcagttcatcttagcagctactaggtaaaaatagtcttaaggttgtagcagatcattttggcagttggcttaggagacagtccctgggcaggcacttgtgccctgagtgcttttctttycttttcttcccctggtctcctgactctaatttaattgggcatgataactccaattcatataatcaattctcacagtgtttggttgtggatttgtttgggatttttcctgtttgagattcactgaacttcttgaatctgtaagtttatatcttctgcaaaatatgggaggagttttttgctgttattt

SEQ ID NO: 330404 - DNA, 622 bp, Homo sapiens
tacagtaatcaaaacagtgtggtgctggcacaagaatagacatatgaatgtacttaataccactgaattgtacactgaaaatggttaagagtaaattttatsttacatatatatagcaacaaaaaatgaaaaaaatctgccatacctataggtttatttctggattctcagttctattccatttatctatatgtctattcttgtgacagttcatctccagaattcttgcatctagtaaaagtgagactctatacccgttaagtaattactgtacattgcccactttccctatcccctggcaatcacaattctattttctacctgtttaattttgactattctaatacctcataaaagtggaataatgtagtatttgtcttttttgtgactggcttatttcacttagcataatgtcctcaaggtttattcatgttgtagtatatgtcagaatgtacttccttttcaaagctgaataatactccgttttgtatatccattcatctgttgatggacacttgggttgtttccatattttagctattgtgaatgatgctgctgtgaacttgagtgtacaaatatctcttcaagaccctggttttaatttttgcgtgtaagaaagagt

SEQ ID NO: 330405 - DNA, 622 bp, Homo sapiens
tacagtaatcaaaacagtgtggtgctggcacaagaatagacatatgaatgtacttaataccactgaattgtacactgaaaatggttaagagtaaattttatcttacatatatatagcaacaaaaaatgaaaaaaatctgccatacctataggtttatttctggattctcagttctattccatttatctatatgtctattcttgtgacagttcatctccagaattcttgcatctagtaaaastgagactctatacccgttaagtaattactgtacattgcccactttccctatcccctggcaatcacaattctattttctacctgtttaattttgactattctaatacctcataaaagtggaataatgtagtatttgtcttttttgtgactggcttatttcacttagcataatgtcctcaaggtttattcatgttgtagtatatgtcagaatgtacttccttttcaaagctgaataatactccgttttgtatatccattcatctgttgatggacacttgggttgtttccatattttagctattgtgaatgatgctgctgtgaacttgagtgtacaaatatctcttcaagaccctggttttaatttttgcgtgtaagaaagagt

SEQ ID NO: 330406 - DNA, 597 bp, Homo sapiens
ttaatttttgcgtgtaagaaagagtgaagctatataaaaataaacccagtgctcttgctatagtctagaaagaggaattgctgtggttaggatccaggcttcccaattttaagcctttaagggttaaaactaggacagctattgacctagaacatcctaacacataataggcattcaatgaagggccgattgaataacttaacttgagaaaggcaataggataggctgaaagtagcagcttgatgatgaatgttgtggctttcagaagcatggttactgatgccaagttattattgatacattaggataaatttaaaacctaattctcgaggctacctgatgccactagcagaaaacaatcagtcctttcctaggatagatggtgggaacctttaccactaaaacattattttcagactaaacacaaggcttctaaacctacttccagattacaacatcaataaataaaaagatatgaatttattgctggattcaaccaacaattaaactcctgtagtagttaaacacactatcttatcctaaatgccaaaartgttttcaggatgaggaagatgaagcagcatgggtttaaaactt

SEQ ID NO: 330407 - DNA, 568 bp, Homo sapiens
cctttccagtagagtttttgggactttgatgcaagtgcaaagggaatttccatattttgaaattaatttaacggtgaaattgaggagcttccacctaaccgtttaactagaaagtgattaacctgcaatgtaatgacatgctaaaatgagattctgtaaatgccttccaaatgatgagtatgttcaataaaagtcacawgagtggctcaatattagtattttatagtagttactgtgtataaaaagatatttttaatgatgaaatacataaaagctcatcacaaattagcattaacatataaacagttgcaaatgatttttatgatagggaacactaactatgaatcccaatttagcaaaaatattatccctgccattaaaaaaaaaagttcagttcttctcactagtagacaactataacaaaaatttgtactcaatttttattatattttgattttcatcaattaaaaatttgtggaaatttgttttccctcttgttacataaaaatctgtacagtatcttcaattttgcctgttggcccacagagtccaaaatatttactatcac

SEQ ID NO: 330408 - DNA, 622 bp, Homo sapiens
gtctttcatttctttaagtttattcctaggtattttacttttttgtagttattgtaaatgggatcactctcttggttgctttttcagattgtttgctgctggcaaatagaaatgcgactgatatatctatgttgattttgcatactgcaactttactgaatttatcagttctaacagattttttttctttggtggagacttyaagcttttttaagatgtcatctgcaaacagggctaatttgtcatcttcctttacaatttacataccctttatttctttctctgattgattgctctggctagggcttctagtactatgttgaacaaaagtgatgaaagtaggcatccttgtcttgttccagatcttagaggaaaagctttcagttattcctttttagtatactagctgtggatttttagtatatggctttatcatgctgaggtatgttacttctgtactcaggttgtttttatcatgaagtaatattaaattttatcaaaggctttttttggaatgtattgaaatgatcatgtgggttttgtcctttattcttttgatgtgatgtattatagttatttgtctattttaaactgttgtcgcatttctggaatgaatctcatt

SEQ ID NO: 330409 - DNA, 565 bp, Homo sapiens
catagggaaaaaaacttattgacgtttgctttggtaatgatttcatggataaaacaaccaaaagcacaggcaacaaaataaaaaaaataagcaggattacatcaaacaaaagagcttctgcacaacaaagaaaaaaaaatccacaaaaggaaaaggcagtctatgaaatgggggaaaatatttgcaaatcatgtatttgataaatggttaatatccaaaatatatatagaattcctataactcaatagcaaaaaaaarccccacaaataacccaatttaaaaacgggcaaaggaactgaacagacattcctccaagaagatatacaaattgctagcaaatatatgaaaatgtgttcaacatcactacttaccagaaaaatgcaaatcaaaaccacaatgagatatcatcttacacttattatgatggctgttagcaaagaaacaaaagatcacaaatgttggtaaaaatgtggagagaaaggaaacattgtacactatcggtgggaatgtaaacttgtatagccattatgaaaaccaatagtttcctcaaaaattaaaaaaagaa

SEQ ID NO: 330410 - DNA, 565 bp, Homo sapiens
catagggaaaaaaacttattgacgtttgctttggtaatgatttcatggataaaacaaccaaaagcacaggcaacaaaataaaaaaaataagcaggattacatcaaacaaaagagcttctgcacaacaaagaaaaaaaaatccacaaaaggaaaaggcagtctatgaaatgggggaaaatatttgcaaatcatgtatttgataaatggttaatatccaaaatatatatagaattcctataactcaatagcaaaaaaaagccccacaaataacccaatttaaaaacgggcaaaggaactgaacagacattcctccaagaagatatacaaattgctagcaaatatatgaaaatgtgttcaacatcactacttaccagaaaaatgcaaatcaaaaccacaatgagatatcatcttacacttattatgatggctgttagcaaagaaacaaaagatcacaaatgttggtaaaaatgtggagagaaaggaaacattgtacactatyggtgggaatgtaaacttgtatagccattatgaaaaccaatagtttcctcaaaaattaaaaaaagaa

SEQ ID NO: 330411 - DNA, 593 bp, Homo sapiens
tacattgcactggtaatttgatagaacctgacctgagatcccttagtccccttagtgggtaactttagcaacattcctaatacaactgttgctcactttctgctctaatccaacccaatcatgggctactagatggtaaaattgctctgtattatctgttggttaaataagaaaatgtatgtgctatggatactacacgctttacctggataaattcctctgaggaaactgagacccatatatacaaaataagaaaacaggccacatggttatattagatcccacctagttccctatggtcatttcctttattcaattggttgcctttaagcctaggttcatggctaaaaactaccaayacttgttaaatttctacagatgtacaacttctgacacaataatgctggccctgtactttgagatggtagcaatgcctacggaacagacgaaaattgaacttaacaatgaactccatgtaaacttagcctgagagtcccttcctccaaacctcccttgttgcttaaatatggcttaaagagcattgacactgactcatagttgccagctactacctagaacatgggaccagagca

SEQ ID NO: 330412 - DNA, 513 bp, Homo sapiens
ttgacaaagacatcttatatttcacttgcctgttatttagttcaactagtgagtaatggagataaatttatgaattaaaaatccccaaatcagtaaaacctcaatcatttggcacactggaaaaattaatctttccaggtttaattttctgggatattttaactgtcaaaaggttaaactaatttttaaaatagaaatattttggatgtatcttaaatatgttttaaacaagtactctgaatgcagaactcagaattatcatataaatgttatttaccggacagtctaatagatgactgtagaaatagttttgctcaactacttgctttcttgatgtcaatttatgttgatattacttaatgattgtttgcctctttttgagtgtaatgaagtgaggtagatttgrcatttatcttttgaatactttgtcttgaatggcgcataatataagtgaaatccaggcagaagtatcagccttcttccaagcagctttcttttgtaccatagaaagtt

SEQ ID NO: 330413 - DNA, 472 bp, Homo sapiens
tgaggcagatctcaaatgaaaagaagaaaataatccaagtgaaatttcaatatttgatggaagtgaacctgaggtgtacagtgagtccagtcaaatggaaaaatctttagaatcctagtaatgtgagcataccaaaatgacttcttcaaattggattgtcagcgtattgcatcagttctagaggtactgggagagaaagatttccttgataagtaactgaagctaatttgcaaatattcttaaaggccatatgacccaatcacctgatttggatttatcctttctgcctattctccttatctgggatccaatcacrtgagtgtgtttaaatttgactatgataaccattccctacagatatctactgccatgagggttttctgatttcagtctatgcttcccacattggtaactgggtagtattatctaaaacaaaatcaaaacccaaaaacttgtgcaacagtttaaattc

SEQ ID NO: 330414 - DNA, 557 bp, Homo sapiens
tttaatgtcggtgtccaaatgagcacagctaccatggtcttttgaaagtcattcagccttataatgaaaaatgtcagctgattaatttttgtagttatgcctctcactttgtaacaccgcagatgtttccttcgcctcaatttaaacactaaacattctgcaaagcgtaaacatatttgttttccaatgtgcaattaaaactgcctgaactctagagacgataagcaatattatttgaccttgtatggactgtagctacaatattcaccaaccaaattacaataagacaaataagaggttaatgaaattgctttgcttctttcaaattaacaataaagtataatgctaatcaaatgttyctttctacttcctttcccattccttctcccattgtgtgctacatttacattgtccttaagactcatttttttcaatacactttgcattagtatctctatcatatgtttgtgtgtatgcttcatataattttttttagttttttcattaatatgtaatttttactattaatattacaaggacctcacatgcaaggattc

SEQ ID NO: 330415 - DNA, 460 bp, Homo sapiens
cattttgagttaatttttgtgcatagtgtgaaatatggacctaagtttattcacgtattttgcatgtagatatcaattgctccagctactgaattgcctttacacatttttgtcaaaatcaattgaccatgattgattccacacatttcagtgtgggaatgttcttggagtctgttctattttctttcactgatgtatttgttggtcttcacgccaattccrtagtgccttgatgactgtcccactgtaataaatgttaaagtcatgtagtgttagtcctcctgttgacattttacaaaattgtttggctatttcaggtcctttgaatttccacatgaatttaaatgtaagtgtataactaatttttaaaataataaagattatgcataatatgcatctaatagtgcaggtacacacaaagtaaaaactagactataaacactagtggcataatttcaaa

SEQ ID NO: 330416 - DNA, 460 bp, Homo sapiens
cattttgagttaatttttgtgcatagtgtgaaatatggacctaagtttattcacgtattttgcatgtagatatcaattgctccagctactgaattgcctttacacatttttgtcaaaatcaattgaccatgattgattccacacatttcagtgtgggaatgttcttggagtctgttctattttctttcactgatgtatttgttggtcttcacgccaattccgtagtgccttkatgactgtcccactgtaataaatgttaaagtcatgtagtgttagtcctcctgttgacattttacaaaattgtttggctatttcaggtcctttgaatttccacatgaatttaaatgtaagtgtataactaatttttaaaataataaagattatgcataatatgcatctaatagtgcaggtacacacaaagtaaaaactagactataaacactagtggcataatttcaaa

SEQ ID NO: 330417 - DNA, 584 bp, Homo sapiens
catgtcagccaccaaacattcttactcattaacccaatagtgacagatactgtccaagatccagagccactcttctgtagctatgcccttttctgctaatcccctccaaatgacctttagatagtcctgttacagtgcttcccagattattctccagtgtatgatttttagggtgtamttgtcacatcactgagaagtttgctagtaagaaatatgtttttcagaacagcaagtacagtacaaataagaaggtagcagaacaacaacacttccatctctagaagttcacatttttgttaacctgaggaaaatattgttttgccaaaattttattatggtataaatcttgctatgtggtaattgatgtgatgtaacagaagactaaaaaaattacgtaataataatgtggtaatataggttgagtattaccttatgtaaaatgcttgaaaccaaaaatgttttgggtttgggattttcccacatttttaatatttgcatatacctaatgagatatcttgcggatgagagccaagtctaaatgtgaaattcatttatgttatatatacaccttattatacacatag

SEQ ID NO: 330418 - DNA, 444 bp, Homo sapiens
aggagaaacagaaagaaggtattgctattaaaataagatagtgaattctatagttcaatgaggttttaatcctagggaagaaaacttcagttttctagctttcatttattaagttrgacattcaccatgtctaagatgctatagcacaaaagttaaaaacatgtaaaaaccaggaagaccacagtatgaaagaaaatctttttacttcatcctataaaagctagcattgaagcagggggcaaacatttatctgtagaacccctccccagcatattatgtataaaacataaatagatatttgttagcgagtgaatcctatgaatcgtgacatggggatcagttctcaggatggtgtgggagttcaatcacaggggacagaataaagaacttaaagagactgaagtggctaaaatatgattaaatttcataggggaagcaaggtag

SEQ ID NO: 330419 - DNA, 589 bp, Homo sapiens
tttgtgctgacctcctatctcatcctgtggcttagaatgccttaaccgtctgggaatgcagcccagtaggtttcagcctcattttacccagctcctacttaagatggagtctctctggttcacatgcctctcacatatctaccctttcttttataagagaatgctgaaacctaagggtggcagagcgacaaagatccatcttctgcaacttcttcaggctgtataggggtgatgatattcctgcctaactatgagggtctcttgcattcagggtagagaagtgctcggtcagaaagcgtcagtacggcaagggccattcatgactcttgagtttcgacaagaggtgatatctggaagattaataactgtttagttaagaaaacattcagtaagcttgttctgtattcccacacaaagaacacaacagcaatatattccacaagaataaagcaaaataagtaaagttattctgagtaaactaaattagaaggcttttcaygaactgggaaactgttggaactaagctgatagggggttgttagctgattgtaatgtgcccagaattagaataccgatccagattttcaca

SEQ ID NO: 330420 - DNA, 567 bp, Homo sapiens
tactgaccagcttgttgtctttttgaagagcaggcttacaggtgttctaagcccttgttttatcctaaagtatccctcaacacagaaaaatgaactcatagcacaaagtacaccaggttaagactagcattagaattttttttgcattaatcaaaactttaaagaggagataaacactgattctttttttccattcattcaaccayttgcacagagagagagaatccagaaatctgatgtaagaaattcttatgtttttgccagcatgccaggcttctgggttccctttccctgagcggccctagtgatttcgcttgcagcatcatcaccctgggagccaagccacatcataaaggaaaaatttatttattttttcattctggccagagcaaaatacatgtgataaaacacagacgttaaccactctgcttagcacccagtatcaaaccagcaaggcttaaatttgcccccagatgtgccccatcatctttaatccaacctccttctaggagtttcaatgcgtggtctctgggcaagatggtcaccctgagtaatacaaaatctttt

SEQ ID NO: 330421 - DNA, 595 bp, Homo sapiens
gggtaaaggaatacattttctgtacaaaaattgtaagcaataattacatttactaactcatggtctacattttattctcaccatgtgctcacaattttcatattgccagcaagaaattacccttccaaatcttttcttagtctaattttgaaatattctacacaattactgtagttattgttgagttttaattagacatgtaaacatacacatgcctcatattagcatttatattatgtatcattagtagtattttataattgaaagttagagaattctgttacacaactgggctgaaaacatgcagactcagctacacatgttgcttgtaagaattttatggtttggctgtgtccccacacatatctcatcttgaattgtagttcctataatccccacatggattcatatattttaaaagtattaatccatttacttttgttatatttttatttttactggamtagttatgcttcaaacttcaataaaatactgtctaaatgtattttctgatcattagtgttactcattaaatatatatttgtcatgtaaataaaggagatgttaacaaatgagctgttctagacctctggcc

SEQ ID NO: 330422 - DNA, 538 bp, Homo sapiens
actcagagaagcatcaagtagattggtggctgtcagggcttagagggaggggaactggaaacttcttcaatggataagaagtttgttatgcaagataaatatgttctaaacatctaatgtacaacatagggtttataatttacaatactgcattgcacacttaattttttaagtgggtagatctcatgtcgttacacaatataaaaakatattatgaatgtttttaaaaatcagtatttgtatttacatatattcatatttatatcttgtattttcacgaaccagctgtcagtaggaggtttccttggaggttggagagcacaggaaaaatttaatcagcttaaaacacacacacacacacacacacacacacacacttgctaatgtgatgtgtgtgtagtttctttaatgagttccccttaactcaccttctttgcacttcatacttttttccactcagccacttacagaacaacattgctactctgtttattctcagaactggctaaatcaatttccactaagaacaggggtgttc

SEQ ID NO: 330423 - DNA, 538 bp, Homo sapiens
actcagagaagcatcaagtagattggtggctgtcagggcttagagggaggggaactggaaacttcttcaatggataagaagtttgttatgcaagataaatatgttctaaacatctaatgtacaacatagggtttataatttacaatactgcattgcacacttaattttttaagtgggtagatctcatgtcgttacacaatataaaaatatattatgaatgtttttaaaaatcagtatttgtatttacatatattcatatttatatcttgtattttcacgaaccagctgtcagtaggaggtttccttggaggttggagagcacaggaaaaatttaatcagcttaaaacacacacacacacacacacacacacacacacttgctaatgtgatgtgtgtgtagtttctttaatgagttcccctyaactcaccttctttgcacttcatacttttttccactcagccacttacagaacaacattgctactctgtttattctcagaactggctaaatcaatttccactaagaacaggggtgttc

SEQ ID NO: 330424 - DNA, 353 bp, Homo sapiens
aatgcacaatcagaataaaaatttctggagggcacatgtcaaaagtattatatgtttaactcacccacagtttctaatcatgaacatgcttgataaatgtttgttgcatgattaaaccaagtaaagaagcttcatcctagtaaattagccaggatcrctagacataaaagcattgaggggcttaaaggtgccacattcaatagtatgaaagtagttatggcagccttattacaacagttatggaatctacattaagtggctcagcagttatatttggccaacagtcctaaagatgggtcattggaaggtacacctcttattctgccctaattatcatgcttacctgtaactgg

SEQ ID NO: 330425 - DNA, 540 bp, Homo sapiens
accctaagcaggaaactaagctttcattcccacaaaagtcaatctcctattttaatatatatatatacttttgagtctggtgttctttgcataacccatgcatctgcacaaaacacacacacaattgtggaaataaggaccaaacaaatgagaaaagcaatgcctatttattctgagactgatgtagcaagagagtcagccaccgtcaatagcatttagcgaagactgaaaggcagagagagaagtataagctatatagtgggaaatgaaacagaggcttcagatatgccctgattagaggttgttggcctggagaagytggatgctgactaactggaagcagaacatcatatgtgattggtcctaagctgaaaccaaggacaaaaattagtaaagttgtcagttgttaatcaagatctggccatttggaatcaattgttacagaagttgttgagctttcttcattgtcaatattgtcaataaaggcaacaatttggtttcttgaaagtctgtcttacaccatgctgggcttctgattat

SEQ ID NO: 330426 - DNA, 540 bp, Homo sapiens
accctaagcaggaaactaagctttcattcccacaaaagtcaatctcctattttaatatatatatatacttttgagtctggtgttctttgcataacccatgcatctgcacaaaacacacacacaattgtggaaataaggaccaaacaaatgagaaaagcaatgcctatttattctgagactgatgtagcaagagagtcagccaccgtcaatagcatttagcgaagactgaaaggcagagagagaagtataagctatatagtgggaaatgaaacagaggcttcagatatgccctgattagaggttgttggcctggagaagttggatgctgactaactggaagcagaacatcrtatgtgattggtcctaagctgaaaccaaggacaaaaattagtaaagttgtcagttgttaatcaagatctggccatttggaatcaattgttacagaagttgttgagctttcttcattgtcaatattgtcaataaaggcaacaatttggtttcttgaaagtctgtcttacaccatgctgggcttctgattat

SEQ ID NO: 330427 - DNA, 479 bp, Homo sapiens
gatttcagactttcaaggggcctatatagcccctttattttggccaattcctcccatttgggaggagtatatttactcaatgcctgtaccctcattgtgtctaggaagtaactaacttacttttgattttacaggctcatagggagaagagatttgccttgtctcagttgaaactttggactgcagacatttgaattaatkgtgaaaggaattaagactttacgggactgttgggaagtcattattggttttgaaatgtgaggacatgagatttgggcgggtggacataattgaatcatggggggtttcctccttacttttctcatgggcatgaataaatctcatgagatctgatggttttatagatgggagttcccctgcacaaactctcttgcctgccaccatgtaatatgtcccttccttcatctcctgccatgattatgaggcctccccagccatgtggaactgtgagtccacta

SEQ ID NO: 330428 - DNA, 629 bp, Homo sapiens
tgtgtagacatactatgtatatgtatgtgtgcatgtgtgtgtatatatatatagtatgtgtatactatgtgtgtgtgcatgtatcaatatagtacacacatactatacatatgctacatatatatcatgtgggtatgtatttgtatatgtgtatgtatgtacatacacatatacacatatatatatatacagacacatacagcaaggattaaaatattcaaaggcaataaaatagtgccctctggtctctggcccttagtgaagagcaaagaaaaactaagttatctctctaggaacaatccacagtttagactctcaaattttcaacatattagagtcaatgaagtaaaacaaagagcaagtgacaaaagactacaaaatgaccagggagagtttaaatataataaaatgaaacttttagaaataaaatatttattgttgaaattaaaagctaaaatgaatatctctgcttcagaagtagaaagctgtaaaaaatgttgcacttgttcctaataacaaaagtragctatataaatcacatatttttagttattgtcattattttttctcatcattcattacataataaaatataaatgaactaaatgagcaaaactccagagaatgaa

SEQ ID NO: 330429 - DNA, 581 bp, Homo sapiens
atggtatcttcaaggaacattttattattaatcattaagtttttaattgagaaataattcacatattatgatatgcacaactcctaaatattcaacttgatgtgctctgataattgaacctttgcagccaccatcccagtcaagatacagaacacatctgttacccaggaatatccctctagctcagtttcagttaattcaaggccacctccacaaccacccaaaacaaattatttctcacttatcaccagggattatttttgcctattttcaggtattatttaaaggaaatgtatctggtaacttttgctcatcaaaacattttaagtcttcaatttgtttctagtttttgatatttcaatgattttatttctttctgcatgcagattcaatatacttattgatacttatttctagttgtcacttggatcttkgaactatggtaaacttgttttactttgtacatttgttactttatacagacaatttatttcaccatttcattcattaagctaatttttaatcaattttaaatttttacattaagttaaaattaatttttaattaacattttggttttt

SEQ ID NO: 330430 - DNA, 591 bp, Homo sapiens
ggatatatagacatgatagatagatagatagatagatagatagatagatagatagatgatagacagatagatagaaagatagataatctattataaaaaaaagttaactcaagcagttattttggctgacatatcccaagacctgtagtcagcaagctggaaaggtaagakagccagtcttgtagttgtagtccgaaggccagtagacttgatacccagagggagtcaacattttggttgtccaaacatttcagagtccaaaggcaggaaaaatccaatgtcctagctcaaaggcacttagacaggaggaattccttcttacttgaggaagggtcagccttcttattttatttaggcttttaaaggattggaaaagcctcactcatattaaagagaccaacgttttactaagtttatccattcaaatgtgaatctcatccagaaacaccctcacagacacacacacaatgtttcactaaatgtctaggcaccccatgccccaatcaagtggatgcgtaaaattgaccatcagctaggtcatgttaagttgcagagttgaagatttctctgctgtagaacaacttagagccc

SEQ ID NO: 330431 - DNA, 408 bp, Homo sapiens
cagaggaaaaatgtgggtttggacccttcacacagagtccccttctcactactccattaggcagtgggacactacctagaggagctatgagaagagggccaccatcctccagtccccagaatgtagatccaccaacagcttgcactgtgtaactgaaaaggcctcaggtactcaatgccagcccatgattgtggcagtagggcctgaatcctgcaaagccacaggaatggagctgctcaaggccgtgggagcccactctttgcgtcagcatgccctggatgtgagacatggagttaaagaagattattttgstgctttaagatttaatgactaccctgctggattttggacttgcatggggcttgtagcctctttgtttcggccaacttctctcattcggaatgggaa

SEQ ID NO: 330432 - DNA, 652 bp, Homo sapiens
taaagtgggtaatatgtaaattttgcaaataaagaaaacagggttcactgtagttaagatcttttgccatcacaaaagcaagaagttggtgaagcttaaattttaatccacccaygtcatactgcacaggataataaaagagggagattctcaattctagttctcatctgcatgtaacttaaaattgtaaagtattggcctcccccttacagccccattttatggataaaacagaagttgggttattgtaataaacaggcatctctgtccaagggaaattacattctttggctccatccaaattattccagtctattgtcactcaaatgagacaggactgatttggaggtatttgttaccagaagggttaaaatggagctggaaaggtgtatataaacaaataaacaaatgcttgcttttaaaacaattgtgagtgacagcattatgaggggttcaagcaaagattatgaccacagaatcaaattgccagagtacatgtagacaagatcagagctgagcagcggatggtaatggtgaactttctagatccctactgaggggggaaaatcttacttctccagttgttctgagtgctactgcctgatggctctctgctgccagccctctctggaagttgccctttgttggagaa

SEQ ID NO: 330433 - DNA, 577 bp, Homo sapiens
gtttttcttttcactgaattgaaaagaaattgcttcttttatctcatctgatttgactgaaatacttatattgtaaaaatgctgacagatcagttctccacaaaaggaatgttaagccttttattctttttgtgaaagtgctgtggagagggggatttcactgttgcaggattaattgatttgctataactgaacagacagaattaacaattaatttcrgagcagttataacatttatacataaatccaggttgttggaaatatttcattcagacactgagtttgtaagacaattttaatggatcatataaataaaaaatgcatgataatcagtgtgcttatatctacagaaaagtaaatgaaaatactgtaacactaaacatgtactgtttgaaggagaatttttcagtcttcaaggtaaagtgaaatgtcttttcattcctttcataatttttgatgcctcatgggccatactcaactacagttttttttctgtgatatttaatttttgaccttttttgttttcttttctagtctccagtcataagatattcagtaatttttttcaaaagtggaa

SEQ ID NO: 330434 - DNA, 238 bp, Homo sapiens
atcaaatctattcatttctttccatttctgctagcattactctagactaaagtactagtgtctcctataayaggctgataatttgtcttactattaaccttttgcagtcctcattttccatgcctatttaaatccctacaaacttaaatgcattttctgcaaagcagccacagtagaaaacataagatttaattctagtcatgtcacttctcttcataaaactatttattgcctttct

SEQ ID NO: 330435 - DNA, 611 bp, Homo sapiens
gtagttttttctaattctctgaaaaatgttgttggtagtttgacaggaatagcattgaatctctaaattgatttggacaatatggccattttaacaatattgattcttcctatccattacatggaatttttttaatttttttgcatcatctctgatttcttttagcagcgttttatatttcttgctgtagaggtctttcacctccctaattagctgtgttcccaggtaattatgtgtgtgtgtgtgttggggtgggmggtttgttcttgatttggctctcagcttgggtgtaattggtgtttagaaattttactgattttatacattgattatgtatcctgaaactttcctgaagttgtttactagatctaggagcctttgagcagagactatggtattttctaggtatagatttatatcttctgtgaagggaaacttcttggctccctctcttcctatttggatgcctttgacttctttctcttaccttattgctctggctagaacttccagtactatgttgaatagaaatggtgacagtgggcatccttgtcttgtctcagttctcaagaggactgcttccagcttttccccattccatatgatgctga

SEQ ID NO: 330436 - DNA, 611 bp, Homo sapiens
gtagttttttctaattctctgaaaaatgttgttggtagtttgacaggaatagcattgaatctctaaattgatttggacaatatggccattttaacaatattgattcttcctatccattacatggaatttttttaatttttttgcatcatctctgatttcttttagcagcgttttatatttcttgctgtagaggtctttcacctccctaattagctgtgttcccaggtaattatgtgtgtgtgtgtgttggggtgggaggtttgttcttgatttggctctcagcttggrtgtaattggtgtttagaaattttactgattttatacattgattatgtatcctgaaactttcctgaagttgtttactagatctaggagcctttgagcagagactatggtattttctaggtatagatttatatcttctgtgaagggaaacttcttggctccctctcttcctatttggatgcctttgacttctttctcttaccttattgctctggctagaacttccagtactatgttgaatagaaatggtgacagtgggcatccttgtcttgtctcagttctcaagaggactgcttccagcttttccccattccatatgatgctga

SEQ ID NO: 330437 - DNA, 584 bp, Homo sapiens
tggactcagttcctgagtctaaggaagactgtccaaaagtccatcaacccatggtacatatttttcttctgaaaggttgtttcatctctactccattcctatcagcctatgaatgtgtgtctctctttttcctttctctctagttataagatatatgtatataatatatacacccacacatgtartaaagcttctctctttatgactctagcatatgtaaatatatagacaaaggaagagtagtaacttaaaaggggaagtacattctgttatgttttggtgaaaacgcagaacaaaatacagaagcgaaacaagttttcaaaaaatctctacttttcttcttctgcctagagaaacagatgtacattgtatttatacagatgcaactttcttaaaattagaataatgcataccttaaaatgattgttttaggttatttattagcagcatagcaaacaaatatcaacttaattaataattaacatttttgacagctattttataaaatttatttcttaaaagtgtttttgaaatcttttcatatacattaacatatattcatattttataggctctaaagtatt

SEQ ID NO: 330438 - DNA, 551 bp, Homo sapiens
tctcagccaatggttgcaggggagagggcacagatattctcaagagccagatttcagctgggtatgaagtagaacttaaaaaagatcggaggtgaccactatgaagtgatcttcctcaagctggatgaagacagaattcaggcattggtagggggatgaactgagtaacttyaaactactttatgtgatgtgtagatgtaaaattgttagagaaattcttttttttgatggacctccaatctgttaaatgttacatccattgaatcactggatataccatattgtaaagcaatttaataaaaatacattttgcttattaaataaaaatgattaatgtactgtggaaactactagctaagaactgataatgtaaaatttcatcttgcttactaaaactcatctgtcataataagaaattttaatatagagtccacttttatatcaacatttttctataactaaccatcattaatatactttaaaaatctagtgaaacagatttccactagacacaaaacacatttccctgaaacacgtgcttttcaaaaaga

SEQ ID NO: 330439 - DNA, 479 bp, Homo sapiens
tcatcagccaccatacccagcctttatagtactttaaattcagatttctttgctaatatcactactatacacccatgcaaggatatatttttaccagatgttgtgggtaaagagaatgctgaaatatggatgacctgtttgtgcttttttttccctcaccagagaaatgtttgaatgcgtccttgtgcttcttgaattagtattttattttgactgagataagaamtgttatttaacttttattttcaccgtgtctagcaaaatatttccaataatatgctccattgattctttggtggttataataatcataaaatacaagttgattttaaattcagactttagatcctcagaaacttctggataaacacataggtaataacaagcagggatcccttatagattttttattttttgttagaaatagaaatagttgaaaagagtttctgctctttggacacatgtgcaggacccaatat

SEQ ID NO: 330440 - DNA, 512 bp, Homo sapiens
tggatgacctgtttgtgcttttttttccctcaccagagaaatgtttgaatgcgtccttgtgcttcttgaattagtattttattttgactgagataagaaatgttatttaacttttattttcaccgtgtctagcaaaatatttccaataatatgctccattgattctttggtggttataatratcataaaatacaagttgattttaaattcagactttagatcctcagaaacttctggataaacacataggtaataacaagcagggatcccttatagattttttattttttgttagaaatagaaatagttgaaaagagtttctgctctttggacacatgtgcaggacccaatatgtgctattttcttgaaaaaaggaatggaccgctaatgaacattattaaagttggaccatttattgtcctaggcaaaaattaggtcactgatgtctccggcacaagaatgaaagttgattacctcaaccggaaatgaaaaggagaccagcatgactattg

SEQ ID NO: 330441 - DNA, 577 bp, Homo sapiens
aataaatagaatgtaggtctattcttgaggtctttagaaagcatggcattctagggctacaatccctgagcactacccttctgcctttcttagtagttgtcagaactcagtcacatgatctcacctagatgcaaaggtgcctgggaagtaaaattttgctgagtgcccaggagagaaatgaaatggttatatagatatagtatctgctctgcttcacttaagatttaataattaattattaatatcataacaggttacaagataaaatatcrtatgattatctccacagataaaaatagtaataataaaatgtaacacccattcctgatattaaaatgaaaacaaaacaattcttagtaaattaggaatagaggggaaccccttgaaatgttaaagagcacagtatcttgttaaaaaaaacctccagccatcatcataaccagtgatgacatattaaaagcatccattttactactaggactaagttaagaatatttactatcatcacttcaatttagcattttattaatgaccccttgtcagcacacaaataaataaggaaatctccttcacctga

SEQ ID NO: 330442 - DNA, 462 bp, Homo sapiens
caaagaataagatccctgtgcctattttcaacagcatctacccttaccccaatctcttgtggttttggctcagtgatctggtattaactagatatgagctttctttttaatagtaattttagctgacagcaaactactagtgtggttacraattgtgtcgcttttgccaactcttagctgtcaaactataaaagattttgtttatcatatttcattttgaagttttaaagattcttcataaaaggaatatttcttatcaggaataaaaatacgtataatcccattttgaatgtgctggttaattattgtcatgaaattattgccatatgtgctgaactcttatcaaaaaggttccatttccttgttgtacttgagcctcttctctctgatcatccaaagtttgccatgaggcatactgaacatcaagggataacatgcacttacttagaaaactcaagacac

SEQ ID NO: 330443 - DNA, 537 bp, Homo sapiens
catggatctgaatgttaatttaccttgacaaatttggggttttctatgtatttatttaaatgagatttctkaccccttttctttctctgcttcttctttggtttccataatgtgtatattggttccactgatgatgattcataagtctcataggctttcttctctcttttttattcttttctcttctttctttctttttcctctaggtaattttaaatgacctgtccttgagcttgctaattatttactcttcttgactgagtctgcggttgaatctttttatagaatttttcagttcaggcattggagttttcagctatagaatatctggttggtccttctttatgatttctgtcctttgttgacattctcattttgttcatatgttgttttcctggtatcatttaattgtctatttgttctcctatagctcactaggttctttaagactactttttgaattctttttcagacaacttgtagatttccacttctttagggttggtgactgtttcttcattttgttcttttgatggt

SEQ ID NO: 330444 - DNA, 621 bp, Homo sapiens
tcttctactctttttctgaactttatcacctcatgattcatctatttttgttgtcttaccatmtgttctctgatctctatatagcctcagaccatataaaaacttggcttatattactgtttaaaagaatgaaaaatatatattgatagacaactagcagcttctgccacacataaagcctgaccttctttttctcaacttaagttatgtgtcacgtaactggagaactgggaacatgtgttgtcccaacctttcttttcttttattggtaaaacaataaagagagatgcttggggcagtaggcatttttctgtattttattggggcaaggcctcagaaccccatttcattggattttatataataacaagaacctaaggtagcttatacatacttgttaaaggtaatataaaagaaaaatatccctgtggactcactgtgttttcagccttttatatcgtgtatacacagtggtgatttagaatttgattttcagttaagaagtatgcagtctagctgccaagtctgcattaattaataacaaattaatgtctaatggcagtgtccaatgaaatgtttgcctctccaagctccattttgctttgcaattgcaattacctg

SEQ ID NO: 330445 - DNA, 283 bp, Homo sapiens
ttgccttgtctcctgagcagaagcttctgctgtgccacaaaccatctcagtcataccamattctcgtcccagtctgtatccttagtaatcagcaccagggcaggccaggaatatggcaaagccttgtaataacttgtctcatctccacctccatcttacctatcatggtggtcttgtatgttcatgactgtacgtcagccctgatttaagaactgctgtgatgatttagctagagaaatcattttgtgctagtcttctaatactttatttagatccaaatacc

SEQ ID NO: 330446 - DNA, 566 bp, Homo sapiens
ggaattcttttctggcttagcttgagatgccagtggttatgaaaaggcagttaaaatcctgtatgtgttttcttcccataatcttaattgtctcccagttttaagaccagcttttctgaaacacaaaatggcaaatccaagggactgaaatcctgcatactcttctgaaatacaaatggaataatatttgtatataaaacagttcaacataatatccataattttccctaggtgttctaaaaaaagaagctattacatcatttgataactagatttttttactacacaattaggagtatgggatccaatttcaagtttacyattactgtttttcaacgttattcaaaatgtccatattttgtttcattatttaactagatatcataatattttaagtccaaatatatttttaaaaaaaattactttaaaaacatataaatccatcgtttgtaaacaaaaagaagatatccacattaaaggaacaataagtaacagattcatgcagtgtactcagtctgtcactgaaaaatgctgtttcttcaaaagcaaagatttcagttttcatt

SEQ ID NO: 330447 - DNA, 566 bp, Homo sapiens
ggaattcttttctggcttagcttgagatgccagtggttatgaaaaggcagttaaaatcctgtatgtgttttcttcccataatcttaattgtctcccagttttaagaccagcttttctgaaacacaaaatggcaaatccaagggactgaaatcctgcatactcttctgaaatacaaatggaataatatttgtatataaaacagttcaacataatatccataattttccctaggtgttctaaaaaaagaagctattacatcatttgataactagatttttttactacacaattaggagtatgggatccaatttcaagtttaccattactgtttttcaacgttattcaaaatgtccatattttgtttcattatttaactagatatcataatatkttaagtccaaatatatttttaaaaaaaattactttaaaaacatataaatccatcgtttgtaaacaaaaagaagatatccacattaaaggaacaataagtaacagattcatgcagtgtactcagtctgtcactgaaaaatgctgtttcttcaaaagcaaagatttcagttttcatt

SEQ ID NO: 330448 - DNA, 566 bp, Homo sapiens
ggaattcttttctggcttagcttgagatgccagtggttatgaaaaggcagttaaaatcctgtatgtgttttcttcccataatcttaattgtctcccagttttaagaccagcttttctgaaacacaaaatggcaaatccaagggactgaaatcctgcatactcttctgaaatacaaatggaataatatttgtatataaaacagttcaacataatatccataattttccctaggtgttctaaaaaaagaagctattacatcatttgataactagatttttttactacacaattaggagtatgggatccaatttcaagtttaccattactgtttttcaacgttattcaaaatgtccatattttgtttcattatttaactagatatcataatattttaagtccaaatatatttttaaawaaaattactttaaaaacatataaatccatcgtttgtaaacaaaaagaagatatccacattaaaggaacaataagtaacagattcatgcagtgtactcagtctgtcactgaaaaatgctgtttcttcaaaagcaaagatttcagttttcatt

SEQ ID NO: 330449 - DNA, 449 bp, Homo sapiens
taaaacgcaaaaatttaagagcagatttgggtggcagttgagagaaggtgatttcaaagctcatagagtgattattcactcctccaccaactattttgttgtgctcaggcaagtrtgttgattggataaatcaataaagcataattctgtttttgggagggagctgtagacatatcattggtgctccatagacacattttcacataaaaaatgtaatgattttgatattccctcctctccacctattgcaataccaccttttaaactcaggtaattcatatattagtctatattcaaattattttattaatctgattccaaattaagaggttaagaatgaaaggaaatagaatagtgatggatgcataagtccagaattatgtaatgcattttctcatacttaattctcagtggttttaattcagctgagttggagaatcaaacagtgg

SEQ ID NO: 330450 - DNA, 559 bp, Homo sapiens
tttctaacctattggtttttctctccactggccatcaagtcacccaaacacactctttctgtggctcaaagaagycctaccatagacaaagacctgcctggacaaactctatttgtaataacagcagctgacatttgtttagtactttgctattttcatagcttgattagattgaaagcccttttcaattattggataaaagaagcaggtgaacacaaatggcctgagaatgcataattaaaaccatatcacaaagaacaatgggaaagatcacatttatttcagcaaataacttctttgtaaatagcttctgttttcaaagtaataaaagacactattggtgtattaatgaaggactcaagaatgaggagagtactactttcttttattaaaaaacattgacacataataattgtacatatttatggggtacttagtgatgttgtgaaatatatataatgtatagtgagtaatcaggataatttgcatatccaccatctcaaatatttatcatttctttgtgtttggaacattcaatatcctccatctagctatttga

SEQ ID NO: 330451 - DNA, 559 bp, Homo sapiens
tttctaacctattggtttttctctccactggccatcaagtcacccaaacacactctttctgtggctcaaagaagccctaccatagacaaagacctgcctggacaaactctatttgtaataacagcagctgacatttgtttagtactttgctattttcatagcttgattagattgaaakcccttttcaattattggataaaagaagcaggtgaacacaaatggcctgagaatgcataattaaaaccatatcacaaagaacaatgggaaagatcacatttatttcagcaaataacttctttgtaaatagcttctgttttcaaagtaataaaagacactattggtgtattaatgaaggactcaagaatgaggagagtactactttcttttattaaaaaacattgacacataataattgtacatatttatggggtacttagtgatgttgtgaaatatatataatgtatagtgagtaatcaggataatttgcatatccaccatctcaaatatttatcatttctttgtgtttggaacattcaatatcctccatctagctatttga

SEQ ID NO: 330452 - DNA, 559 bp, Homo sapiens
tttctaacctattggtttttctctccactggccatcaagtcacccaaacacactctttctgtggctcaaagaagccctaccatagacaaagacctgcctggacaaactctatttgtaataacagcagctgacatttgtttagtactttgctattttcatagcttgattagattgaaagcccttttcaattattggataaaagaagcaggtgaacacaaatggcctgagaatgcataattaaaaccatatcacaaagaacaatgggaaagatcacatttatttcagcaaataacttctttrtaaatagcttctgttttcaaagtaataaaagacactattggtgtattaatgaaggactcaagaatgaggagagtactactttcttttattaaaaaacattgacacataataattgtacatatttatggggtacttagtgatgttgtgaaatatatataatgtatagtgagtaatcaggataatttgcatatccaccatctcaaatatttatcatttctttgtgtttggaacattcaatatcctccatctagctatttga

SEQ ID NO: 330453 - DNA, 564 bp, Homo sapiens
tttggggtaacaaacataattgcatggattttaacttacagaaattaacacaaaaaagaaaaaaagttaagataagggagtgttgtaaaattaaatgcctaagcagcatatttaactggtgatcaagaaagtgactaaacttgatgctaaaacacaattaaaacattcctacattttcatataaaatatatgtcaaatattggcttacattttcaaatgacagcaagttaatgtagccaatgacrttatttattcaacccagaaggagtcacaaatgcagacatgtatggtaaacttttattgctgttgttacattattatcccaaaaactcaaaaattggccaaacttttttctttcccagagacacccatgaatctatctcataactatttatttctcagctggcctattatgtaacacagctgcagtaaccatctaagtaggttgaagttttactaaattaaaaattttacagcctccagacccatgaaatgttccatccaggaaaagttcttctgtaaatgtgcaaaataggtctgtggagttacacaatcatagaaaca

SEQ ID NO: 330454 - DNA, 564 bp, Homo sapiens
tttggggtaacaaacataattgcatggattttaacttacagaaattaacacaaaaaagaaaaaaagttaagataagggagtgttgtaaaattaaatgcctaagcagcatatttaactggtgatcaagaaagtgactaaacttgatgctaaaacacaattaaaacattcctacattttcatataaaatatatgtcaaatattggcttacattttcaaatgacagcaagttaatgtagccaatgacgttatttattcaacccagaaggagtcacaaatgcagacatgtatggtaaacttttattgctgttgttacattattatcccaaaaactyaaaaattggccaaacttttttctttcccagagacacccatgaatctatctcataactatttatttctcagctggcctattatgtaacacagctgcagtaaccatctaagtaggttgaagttttactaaattaaaaattttacagcctccagacccatgaaatgttccatccaggaaaagttcttctgtaaatgtgcaaaataggtctgtggagttacacaatcatagaaaca

SEQ ID NO: 330455 - DNA, 606 bp, Homo sapiens
ctgcacaattataaaggaagataaagagctgtcccaaataaggactgcccaagtgcagagctgcgatagagaatctctgaatccaggccactaaagggaagtgcacttgaacaaaaggaagggcaacagggtagcacagctgctatagactgaacattttytttgtgcaagctcatgcttaccttgttaagggaaagccttctctccagctcgatctatcaaagccatgccacatccactgactagccttgtaaacgtcaaactcacactctcccaagttcagaaaagagaactaagttgaatacctacaagaaatccagcaccctcagagaaagagttgcatatattcaatgtattgttaaagatagggtgctattacaccactatggttgcagaacatcaaatcaacagacatgaagaaaataagcactcagcaggggagataattaattacaaaaagaaaggcagccagcctttgagaatgcaagaattcagcatttcccatttctcctttccaagtgttttcaaataaagttttttccccagtcctcatcctgattgacacttagcatcaaatgtttccccaccatggagaaatccacacaa

SEQ ID NO: 330456 - DNA, 578 bp, Homo sapiens
agaactaagttgaatacctacaagaaatccagcaccctcagagaaagagttgcatatattcaatgtattgttaaagatagkgtgctattacaccactatggttgcagaacatcaaatcaacagacatgaagaaaataagcactcagcaggggagataattaattacaaaaagaaaggcagccagcctttgagaatgcaagaattcagcatttcccatttctcctttccaagtgttttcaaataaagttttttccccagtcctcatcctgattgacacttagcatcaaatgtttccccaccatggagaaatccacacaaccagcttcttcctgtaccaccagagcccagctggaaccaggaatacctctctttttggtttgtgctaaaacagatgagtagccaagctttgcctgctgatgaagagtaataatcacgctggtaatgggaagattctgccttaactcaactgccaagatcagcctgtgcaactccaaccaaaggtaggatgggacggataggtaggaggaggatactgaaatataatcattcttatcagtgtcttcattgtgacatctgtg

SEQ ID NO: 330457 - DNA, 578 bp, Homo sapiens
agaactaagttgaatacctacaagaaatccagcaccctcagagaaagagttgcatatattcaatgtattgttaaagatagggtgctattacaccactatggttgcagaacatcaaatcarcagacatgaagaaaataagcactcagcaggggagataattaattacaaaaagaaaggcagccagcctttgagaatgcaagaattcagcatttcccatttctcctttccaagtgttttcaaataaagttttttccccagtcctcatcctgattgacacttagcatcaaatgtttccccaccatggagaaatccacacaaccagcttcttcctgtaccaccagagcccagctggaaccaggaatacctctctttttggtttgtgctaaaacagatgagtagccaagctttgcctgctgatgaagagtaataatcacgctggtaatgggaagattctgccttaactcaactgccaagatcagcctgtgcaactccaaccaaaggtaggatgggacggataggtaggaggaggatactgaaatataatcattcttatcagtgtcttcattgtgacatctgtg

SEQ ID NO: 330458 - DNA, 559 bp, Homo sapiens
catcttacgcacctccacattacacattttctactcacagctaattccagtgtcctcctttgaggcacatgaagatttgactgcccttcatcttccctggaatcctatactctgcaggtactacaccatgttgggatggagtgggaaatgctgccactcgccttcctgacatgctaacctgaggagactaagctcaaggtggtcagatacagacattttcctctgagagtctcaatagtgtctgtctcttgcttctctcctttaattctcttcacccattacagttcaaaattacattattttgaaaaaccagttgaaagtggaaataaagggtagataagaggaaatatattggttctacccaaytgcactttctatcatatttttagtctgaaggttttaaagattgccattaatttgaaatttttcctctctgcttctacctcccttcgaggagaagagaagatccttttagagccaaaatgtagcatggtcatgagacagtaaggaagcccaggaaaagtgcatcatcaacaccgcagttgatatcatccaatca

SEQ ID NO: 330459 - DNA, 644 bp, Homo sapiens
attataattataatatataataaagcactacatatatcatgagttaagacctatattttgagtatcacagccttcctgaagcttaacagtcccctctaacaagaatgaaaaatctcagtgatgagcctttctttttcatatttttctgatgatttcctaaagtgacaaatttatagagagaattcttagagcacatttgtttaaaggacagccctggaatccagaaatgtgtcttgaggatacacctgagcttttatactgtagaatgttctcaaaattcaacagagccttaaaatatgcagaaaaactcccagtataattttaagacttgaaactaaaatggtgttttaactcatcaagtcttgctttctgaacmtgtcttttctcaatttttttatgagacagtaggattaaataagaattgtctattgcattataagaagccaaccagcccagctgactccagcataagcaacttgacaatcctatgactcaagtctaatttgaggtcccaaataaacagagacttctggttttgtttcagatgccagtaatttttctccttgttccttcatccaagaagcaccacgagcctaaccacacaatgaacagcatttgatacaattaaacatgatgtaagttca

SEQ ID NO: 330460 - DNA, 644 bp, Homo sapiens
attataattataatatataataaagcactacatatatcatgagttaagacctatattttgagtatcacagccttcctgaagcttaacagtcccctctaacaagaatgaaaaatctcagtgatgagcctttctttttcatatttttctgatgatttcctaaagtgacaaatttatagagagaattcttagagcacatttgtttaaaggacagccctggaatccagaaatgtgtcttgaggatacacctgagcttttatactgtagaatgttctcaaaattcaacagagccttaaaatatgcagaaaaactcccagtataattttaagacttgaaactaaaatggtgttttaactcatcaagtcttgctttctgaacctgtcttttctcawtttttttatgagacagtaggattaaataagaattgtctattgcattataagaagccaaccagcccagctgactccagcataagcaacttgacaatcctatgactcaagtctaatttgaggtcccaaataaacagagacttctggttttgtttcagatgccagtaatttttctccttgttccttcatccaagaagcaccacgagcctaaccacacaatgaacagcatttgatacaattaaacatgatgtaagttca

SEQ ID NO: 330461 - DNA, 507 bp, Homo sapiens
acaatatcggctcacttcaacctccacctaccaggttcaagagattcttctgcctcagcctgccaagtggctgagattacaggcacgtgccactgtgcctggctaatttttgtatttttagtagagacagggtttcaccatgttggccargctggtcttgaactcctgacctcaggttatctgcctgcctcggcctcctaaaatgctgggattacaggtgtcagccactatgcccagccatttgcccatttttaaattgagttatttgtccctttattattgagttgcaagagttctttatatattctaaatacaagttctttatcagatatatgatttaaaatattttctcccattcagtgggttattttttcacttccttgctagtatcttatgaagcacaaaagttttaattttgatgaagtccaatgtatctattttttcttttgttatttgtaataaccccattttatatatgaaaaaagtgaggcagagcaatttagcaac

SEQ ID NO: 330462 - DNA, 507 bp, Homo sapiens
acaatatcggctcacttcaacctccacctaccaggttcaagagattcttctgcctcagcctgccaagtggctgagattacaggcacgtgccactgtgcctggctaatttttgtatttttagtagagacagggtttcaccatgttggccaagctggtcttgaactcctgasctcaggttatctgcctgcctcggcctcctaaaatgctgggattacaggtgtcagccactatgcccagccatttgcccatttttaaattgagttatttgtccctttattattgagttgcaagagttctttatatattctaaatacaagttctttatcagatatatgatttaaaatattttctcccattcagtgggttattttttcacttccttgctagtatcttatgaagcacaaaagttttaattttgatgaagtccaatgtatctattttttcttttgttatttgtaataaccccattttatatatgaaaaaagtgaggcagagcaatttagcaac

SEQ ID NO: 330463 - DNA, 598 bp, Homo sapiens
ccttctgcacacaaatttagttctccagaatctgtttgcaggagaaactgacctatggcagtcacagagcttgaacacagcggaactgggattctaattcaaatgggattgactcggacaccattactctttctgttcttccacaatgcctctgccttgcctttgatcagtcatggtgggttagggtctggggatccccaggtgaatatgacacaggccttgtctttaggatatcctattcctctggaagaagcagttcctcaggaacagggtgccaagggcagagcagatgctggaggaacccatgggcagccccactggsataggctatcttgggatctagaccacagcaatgcccctgccaaaggtcaacaagacaggtcctctgctccaggctcagagcctacaacctccagagaggatctcagccagcagggcttacagcaggcactgctacatgagtcccctgcggtaaacatggaccaaaagccacctaggtgtctgtttttttggaaaaggatgtagaattcccagtccctggctgggtccctgcaggctcagcttaattctcagctccttgaaggcctaatatcctctt

SEQ ID NO: 330464 - DNA, 538 bp, Homo sapiens
agagcagttgttgagggaaatgtgaagaaagatcaaatgatagggatgccctatatttatctgttttaatgtctcaggcctccaaagcatcatttagtgtttctccaaacactgtcatcctccaaggcaggtcccttgccttcagttcacagctggaaacactgggcctcaagaaaaagggagaaagctttcctgagtacattccgaagcagcagcaagtgattcagatcttgggcatcctaattgcstggcaatgctgagaccctgggtgtgaagtactaatgggcagattccacccacgtaatgatcagagagtggtgaacagatgcttgcaggcagatcagagccacatcagcaggagcgggagtcactccaggcattcttcacatcccctgctggcttcaggtaagggccgctgggcctcaggagaggcacagtttctgggggaaaccacagccctggtgccttcagggaacagagagtacatgcactctctgctatccagcgctggcttcagaggctaaaaggctgaggccta

SEQ ID NO: 330465 - DNA, 613 bp, Homo sapiens
tacctaggcacaataatagaaatacttttcagtgattttcaactcttggaatcaatctgaaagaactattgtggttacagagtagatgtagatattatcagtttttacagtgtaaaagtagaagtgtagatgacagacagcattaggaggtagaagtgggagaggtgaggtgaagggaaggatgggggtagaaatattctttttgtacaatgtacaaattctctttaaaaagtgcatctgtagaggatggaagatcacaaaagtaaccaatagaagaactaaaaatagagatatggcaggagggatggaggtggtgtgagtgagataaatccttgtctattctagcagtaagtcaatagattgtgtctaaaattgatgaatcaagaaatatcagtagaagcatattatttagaaaaatggaggtaaatataagaaaagacatttaaaaaagttagatgtggctgtctaggggggacagaacagggagtaagaagtattttaacargaaactgtttttaaccttgtgcatatatgactttgaataaaaacagactttgtttttttttaaagaaaaagggatgcaggccagatctaggaggagattataaaacca

SEQ ID NO: 330466 - DNA, 569 bp, Homo sapiens
tcttcccttccaagagctcagggacgtgagtgcaggtcaagggaagtgaatgctccacaaagaaaggcctgatgcctctcttctgtcccctgcagtttgagccttcattcttaccttctcatgagaacatgccgtagatacagggctgggcagtggttaggaacaggggctgagtgctgggccaaagagaggggatgtgtctccagatgcagcccactggcctccctgtgttcctgcayaggaagtgctggggtctaattattaggagcactgatctgtagcgtgcattaggaggaaacaaagggaagttatattttgttcttaatccaattagggaaaaataccaggcatggtaggtttgtctgttacttactggctcagccagccattcacctgggcattctggcttactgcctccagaaaggcacaaggagtaagttagcagcctgagtggctgaagggtgaaccaggaggaaggatgagtgtgcatggtaagggcagggggtcatctccaggatgaatgggaagttgcctggacttcacctttaggcgaccccaacactgacctt

SEQ ID NO: 330467 - DNA, 569 bp, Homo sapiens
tcttcccttccaagagctcagggacgtgagtgcaggtcaagggaagtgaatgctccacaaagaaaggcctgatgcctctcttctgtcccctgcagtttgagccttcattcttaccttctcatgagaacatgccgtagatacagggctgggcagtggttaggaacaggggctgagtgctgggccaaagagaggggatgtgtctccagatgcagcccactggcctccctgtgttcctgcataggaagtgctggggtctaattattaggagcactgatctgtagcgtgcattaggaggaaacaaagggaagttatattttgttcttaatccaattagggaaaaataccaggyatggtaggtttgtctgttacttactggctcagccagccattcacctgggcattctggcttactgcctccagaaaggcacaaggagtaagttagcagcctgagtggctgaagggtgaaccaggaggaaggatgagtgtgcatggtaagggcagggggtcatctccaggatgaatgggaagttgcctggacttcacctttaggcgaccccaacactgacctt

SEQ ID NO: 330468 - DNA, 486 bp, Homo sapiens
agtctattcctacatagcactatctttccgaggtcctggcaaattgtactcgctctctggaaggacaagaacaactttgttctttttctttttaaacagcagaggtcccagaaacaaagccaggattggccccgagaaacttgatgtgcacactgcaaagtytgagacaacagagagttagtcgaaggaaaagcaaaaactctccccaaagccatcattatggggaggattttgaccacaaaagaagaaaagagtaacagttcaaataaagaactccagtccaagtccccaaatcccaaagtgagatccagtgagtctgccctgaacagaaactgcttaccctccctggtcaaggtaaaagccaaggagataggcacccaggcttcccatagggaaaactgagttggaactctgcacccacccaagccatgtctccatcacacacacacacacacacacacacacatgcacgtcatcttccctcat

SEQ ID NO: 330469 - DNA, 611 bp, Homo sapiens
attggtctttcttattcctgaaattactttgcccaggcctttactccctcttccaactagtgaagtcttattcttctttcaagactgatcaaacatgttacttaagatgcttttccttctgccatcagtccctttcttcagcataattatatgcatctatatataattagcacatcctactctaccacatccgtctctaccacatctccttaagaacagaaaccgttatcttgatcatttctgtgtcccarcaactggtacctaagtgacttattttaccattaatattattttgttcattactatgaggatgtgtctctcctcttatacccttttgccctcactggtctcttttcctcactcttgtctatagaaaagggtgcttaatatatactgaaaagatgaatagatctgaacaaccatagacacggggtattcaagtagaacttggatttgaccccatgccttcctggctccaaagcctgtgtcctctccactacaatacattgccatacaaaaaacaaaactacttgttgaatttatggaccaagggtatacagtcttaaggagcagaggagttaaatgctttgtttccaatgagacactaaatt

SEQ ID NO: 330470 - DNA, 619 bp, Homo sapiens
  misc_feature (1)...(619): n = A,T,C or G
tcaggctggtctggaactcctgacctcaggtgatcctgcccacctaggcctcccaaagtgctgggattacaggcgtaagccaccacacccggccttcacttccttttaagaagcttttctagaagtctcacacaatgacttcctctgacatttcattatccagaacttanccctatggctacacctaattgcaacagaggctttaaaatgtagtctttagttaggctcattggcaaaaaaaccagggttctcatgctgagaaggtaggaagaaggacgccagacaggtaaagcagcctcagcctcatctaccctgctgagctaatggaaggggtcagtgatggaatgcaagaaaaatgccaagcacacagyaggatctcatgaatgctcccttgcccctacccacctcacccctgctcatgtgcttcagccaagagtaagatgactgttccttatgggtctgtgtgtagggtgcaagtgagaggggcaccaccaagggatccttccaagggcagtgtctttcccatgttcaaatacttttagctcactgcctgccactaaacaggtacctataagtgccttttgaatgaataaaagagcatgggaaggagagacagaca

SEQ ID NO: 330471 - DNA, 458 bp, Homo sapiens
cctttggaaactttattgctttactttttgcatttatgtctatgatccatcctgaattaatttttgtgtatagtatgatatcagaactaagattcatttctttttcacatggatctccaattggcccagtcttgacagaccctttcagtgtrtagattcaggttattccacgtaggcaattatttgtattgttttttaataatctttacccctttgttttctctgttttggagttcctattattctgatgttagaattcttggaatattcctctgggtctcttttcaacacacacacacatacacacacacacacatattctctctgtctctttctctctaccctctccacacacacacacacacacacacacatatgccctgtgtgaaaacaggaccctgaaactccctctctgtactagatactactatggggaaataaaggaattggtgcagtgt

SEQ ID NO: 330472 - DNA, 492 bp, Homo sapiens
aacattatttgtaggaatgctacattttctaggatttgacatttttggcagtagagaattactatgttttgtaaatagaaataccactactaactawctacgaatgctttaaattgaatgatgtcttttgtttccaaagtcgatagctagagtgatgagaaaataataataaaagcaagatagttcatggcaacgttatctcagggtaaatgctgctgctgcaagcaccaccagtgagtattctcaggacaaatgggaaaaggggttaaattattcctttgctgcaccaaagttttaaagttttatgtaaacccattagtctatttttgcttttactgctgtgcttttggtgtcatatccaataaatcactgacaaatcctatgtcataaagcttttctccattgaaataaactcaatgtcataaagctttacttcttccttttatatctagatgccttttatttatttttcttgaccaattgctttggcta

SEQ ID NO: 330473 - DNA, 506 bp, Homo sapiens
agttcatggcaacgttatctcagggtaaatgctgctgctgcaagcacyaccagtgagtattctcaggacaaatgggaaaaggggttaaattattcctttgctgcaccaaagttttaaagttttatgtaaacccattagtctatttttgcttttactgctgtgcttttggtgtcatatccaataaatcactgacaaatcctatgtcataaagcttttctccattgaaataaactcaatgtcataaagctttacttcttccttttatatctagatgccttttatttatttttcttgaccaattgctttggctaagacttctagaactatgccgagtaggagtggtaggactgggcattcttaccttgtccctgaccttggagaaaaggcttttaattttcaccattaagtatgattttattgtgggcatttcacatatgggctttattatgttgaggtaaattccttctattcctagtgttgagcgtttttgtcatgaaagggtactg

SEQ ID NO: 330474 - DNA, 506 bp, Homo sapiens
agttcatggcaacgttatctcagggtaaatgctgctgctgcaagcaccaccagtgagtattctcaggacaaatgggaaaaggggttaaattattcctttgctgcaccaaagttttaaagttttatgtaaacccattagtctatttttgcttttactgctgtgcttttggtgtcatatccaataaatcactgacaaatccwatgtcataaagcttttctccattgaaataaactcaatgtcataaagctttacttcttccttttatatctagatgccttttatttatttttcttgaccaattgctttggctaagacttctagaactatgccgagtaggagtggtaggactgggcattcttaccttgtccctgaccttggagaaaaggcttttaattttcaccattaagtatgattttattgtgggcatttcacatatgggctttattatgttgaggtaaattccttctattcctagtgttgagcgtttttgtcatgaaagggtactg

SEQ ID NO: 330475 - DNA, 278 bp, Homo sapiens
tctggggaaggagatggggacaaaggaacagaacaagagagtgagagagagattgtacattgtgcaaagasaccttctgcccaagacccctcaaatctgtagtttacaagaaactcacttgtgtctggtgtgagcagatactccctcctaggagtcagtgagggactaaggtctgaccctcagctagtctatgtgatatctttgtacaaattagaaaaggccctcaggtgaaataaattacaaattggtgtaccctctgggtggaggaatcacctaaa

SEQ ID NO: 330476 - DNA, 278 bp, Homo sapiens
tctggggaaggagatggggacaaaggaacagaacaagagagtgagagagagattgtacattgtgcaaagagaccttctgcccaagacccctcaaatctgtagtttacaagaaactcacttgtgtctggtgtgagcaratactccctcctaggagtcagtgagggactaaggtctgaccctcagctagtctatgtgatatctttgtacaaattagaaaaggccctcaggtgaaataaattacaaattggtgtaccctctgggtggaggaatcacctaaa

SEQ ID NO: 330477 - DNA, 530 bp, Homo sapiens
ggagagcaagacttccaatggcctatttaagcaacaaggatgacactaagcttctggggaaggagatggggacaaaggaacagaacaagagagtgagagagagattgtacattgtgcaaagagaccttctgcccaagacccctcaaatctgtagtttacaagaaactcacttgtgtctggtgtgagcagatactccctcctaggagtcagtgagggactaaggtctgaccctcagctagtctatgtgatatctttgtacaaattagaaaaggccctcaggtgaaataaattacaaattggtgtaccctctgggtggasgaatcacctaaaacacccctttctctaaactctccttggaatgctgatctggagctggatttagttgtcaccttgcccagagtctaacctggttctgtgtccagatgaacagctgtcctggctctcagcccaggttgatgaggaaaaaaacagcacaaatgaacaaggaggcaaaagacaaagaaagctattaaagtctaagccccctagaa

SEQ ID NO: 330478 - DNA, 573 bp, Homo sapiens
tgcagtccctgcaagtcaatactccatattgcggccacctgagctttcagaattgtaaacttgatcccatgaccccctcccacctacattaaaaccctccaaggatcctacattgcctgatgagtaaagttcaagttccttgctgtgatgtaaaacaatggttctcgaatgtggtccccaggcctggagcagcattattgggtaacaaggtagaaatgtaaattctaggccctcatctgagacttactgagtcagaaactctgggggtggggtccagaawtctgtgttttaaaaagccctctagatgaatctgatgtaaggtcaagtttaggaaacaccgatataggcaatcactgcccactggcccagattcattgcccactaaacccaagatgcagcctaggacttagcccaaagatggcaaagagagttcaccgaatttcccgattcttttcagagtttagtggctacctgacatgaggtgttgaagataatgaagcctcagtcttagttatcaggataatttgccccataattgattaatgacatgtaagagatagggtaatggctgcc

SEQ ID NO: 330479 - DNA, 573 bp, Homo sapiens
tgcagtccctgcaagtcaatactccatattgcggccacctgagctttcagaattgtaaacttgatcccatgaccccctcccacctacattaaaaccctccaaggatcctacattgcctgatgagtaaagttcaagttccttgctgtgatgtaaaacaatggttctcgaatgtggtccccaggcctggagcagcattattgggtaacaaggtagaaatgtaaattctaggccctcatctgagacttactgagtcagaaactctgggggtggggtccagaaatctgtgttttaaaaagccctctagatgaatctgatgtaaggtcaagtttaggaaacacygatataggcaatcactgcccactggcccagattcattgcccactaaacccaagatgcagcctaggacttagcccaaagatggcaaagagagttcaccgaatttcccgattcttttcagagtttagtggctacctgacatgaggtgttgaagataatgaagcctcagtcttagttatcaggataatttgccccataattgattaatgacatgtaagagatagggtaatggctgcc

SEQ ID NO: 330480 - DNA, 590 bp, Homo sapiens
ttatggtttctaactcatttatttttatcactgaataatattccattatatggatgtattacagttttgtttatccattcacctattgaaggatatcatggttgcttccagtttggggctattatacataaagttgctataaacattcacatgcaggtttttgtgtagatgtaaactctcaaaccagttgagtaaataccaagaagcatgaggcttaattgtatgctaagactttgtttatcttcattaaaaaaaactgccaaatgctcctcaaaastcgctattcctttccttcatttttatagcgtagttttgctggatggagaattcttggctcttttttttttcttttacactttgaatacttcatcccactgctttctggcctctgtggtttttgatgagatattagctgccaaccttattggggacaccttgtctgtgatgagtcactttcctcttgctgctgtccagatccctctccctttttttttggcttgaatagtttgactgtgatgtttctaagtgtaggtcttttggaaattttcctacatggagtccattgggcttcctggatgtgtagataaacg

SEQ ID NO: 330481 - DNA, 580 bp, Homo sapiens
tttgttgttgctgctgtttgtttagtcactttgctgactaattatgtaaaatctatattgttttttatttgcagycacagaagtaccttctcgattagcttagtggtcagctaatgatttgacagagattttcctaaatgacttgaatcaacaaattttccacccttttctgagggattctgtgtgtatattgcagtatgatgtcaacactttggcagtttacaattcttccttcatcttcactgcttgtttatacagagtcttgaggtcagtcagaggcaagagagtagggccatctcagatctttcctgggcatgcacatgtgcatggccttctagactcccaggaaaatgttgaagattttcaaagtcccctattgacctctcattcttcagattttcctttttgaggcacccatctggtaccattgcctccaacaactgtgatgctaagcaattgccactgattattttcaacaaacatcctgggaaaagggaatggcttttcctactaagcaagatatgtgtcaggttaaataaaacaagctctatgaatggggttttcaaggagctgtcagaca

SEQ ID NO: 330482 - DNA, 580 bp, Homo sapiens
tttgttgttgctgctgtttgtttagtcactttgctgactaattatgtaaaatctatattgttttttatttgcagccacagaagtaccttctygattagcttagtggtcagctaatgatttgacagagattttcctaaatgacttgaatcaacaaattttccacccttttctgagggattctgtgtgtatattgcagtatgatgtcaacactttggcagtttacaattcttccttcatcttcactgcttgtttatacagagtcttgaggtcagtcagaggcaagagagtagggccatctcagatctttcctgggcatgcacatgtgcatggccttctagactcccaggaaaatgttgaagattttcaaagtcccctattgacctctcattcttcagattttcctttttgaggcacccatctggtaccattgcctccaacaactgtgatgctaagcaattgccactgattattttcaacaaacatcctgggaaaagggaatggcttttcctactaagcaagatatgtgtcaggttaaataaaacaagctctatgaatggggttttcaaggagctgtcagaca

SEQ ID NO: 330483 - DNA, 274 bp, Homo sapiens
attcatgcattgaaaacttcatgyccagcatagtggtgttggaggtggggaccttttgggaagtctttaagtcatgagggctctgttctcctgagtgaattaatgtcactacaaaaaaaagggcttgtaggagtgggctctctcttgctcttctgctcctctgctatgttaggagcagtgttctcccctccctaccagagagggagcattaaaggtgctatcttggaagcagagactggcccttactagataccaaacttcctgtcaccttgat

SEQ ID NO: 330484 - DNA, 613 bp, Homo sapiens
tagaaaaaggctcaattgatttctgatctcacaaagcaggaagcaaaaataatctatttacatccatcattggtgaacattaaaagtgagaaacatttcagatcacttgtttgataaacttagggatataaacacattgattagctttttttgaacttatgctaaatttgaggtgtgtggacacccacctttgtcaaagttaaaacagcaaacactagttagaaaaccaatggcccctttggaagaaatcagccctgagcccacctcagacggctcctcttggcawtcccagagagccttgaataattgttgttagattcattctgtaacagttttaatttgctatctcctcattggcatttttagattgctaagtctttttgcctggatttcaaaatatttttaagaggaaatagcagctaagcttctccatatttgggctagggctggccagcaggagatctgggcttcgatcccagtttgccactaagcagctgcatgaccctagtcaactctcttcacctcactaggcctcaatttcctgtagctgatctctgaatttcctttcagctttaaaaattattttgacagtgtaatttaattatacaataaa

SEQ ID NO: 330485 - DNA, 573 bp, Homo sapiens
tattgggatttgggggtacagctacaaagaagtcaacaattttgatatagaactgtgttggagggatgcatggagctcaagggaagcctaggaaaggctatgcgactcacatagaaagagtcacaggagggtcccttgagaaagtgatgcttaaattgcatttgtggaatgagcaggggctagaaaggcaaagaagagacataacaggccatatagaagcataaagaaayaaagtagcctggaaagtgcatgggactcagagaatggccaataattattagctaaatgaataaaatgggacaagaacaccaacaactaaactacattctactctactccttcaaggaacattattttctagacattataaatagatgtaagataacagtcttaccagtgaaggaaatctaggaaatgtctgccatcacaatggctaataataaagaattttccttttccacacactcattcataaaacttcaaagttcttaggtgaatagattccctaaacttctgttgcttaaagattttaccacccaacttctgaaattattcacaaaggacaaacaggaa

SEQ ID NO: 330486 - DNA, 541 bp, Homo sapiens
atgggaagtgatgatgtagataccatttagcttgggcctctgggaactttgagaacagatacacatatagatgagtgagtgagtgaatgaatgaatgaatgaatatggagttatctaaagaatgtcaagagcagtcaccactagaagaagaaaataatgctgaaaaatatttttagattcataaaaacatattcttcttggtaagtggcagaaatgtattaaagctaaagctaaaacaaagttttctgaaagggcagttactaataaaaagataagctctgtgggttctatcgttcttttattttccccctccatttattcatctattcaacaaatattctggggtggtttttctgagcccgrcactgtgctggagcactgtttcaagagtacaggaggctgaagtggccaggttgagaaggactcagccatgcaaagaactagagagggagcactccaggccaaggaaacagcaagggcaaaggcactgaggtggagacaggaaggaggctggtgtggacggagcattggtggaaggtgc

SEQ ID NO: 330487 - DNA, 454 bp, Homo sapiens
gtcatcttctcctggtgtcttcacgttgtcttccctttgaacacgtctgtgaaagtgtccacatttttcccttttataaggatatgagtcatattgagttagagctcaccttaatgacttcattttaacatgattacctttggaaagattctagctctaaataaggtcacattctgacatggtggatgttaggattccaacatatattttttgtaaggacacaattcaacccataacactcagttactasggattatattcataaaacactgtctcagaaatctttcttttagttgctttgaattattttatttggaggaagccagaccattaaagatcctggaccatattattgtggccacttttacatttgttgttggtgaggcagttcaggttcttgagtttgttgtgcaaaacaatttgagagtgagtccaaagtaagagtaggacaaga

SEQ ID NO: 330488 - DNA, 574 bp, Homo sapiens
ggtatttattccagttttgaagtttgcctttgtgttgctctttcttcagtgggcctgtccagaaatctaagcagactgactgttatgagagcccataatcgctgaagccatttcagcactagtgggtatcctgaacccatrtttgctgtgagtcttgcaagggctctaagattgatgcagcaccttggcctagatggacctggggaagatgcaaagggtgtacccaggctgtgtaggaaaacgcccaggggtccaagtgtgaaagcctgtactattggcccagacaggcatgcatttcatggcaggtctctgaacaggtgggacagttctttgactgtaccctcatgataaactgtgggatgggaatcagtgggcttagcctagtggccctgacgtgtatgcttgtgagcattcttctgctcaggcaaggtctccttgattgtggaaagagagtggaaactggccccttaggatctgctgtgggacagacaactgtgaggcttctccagtagcccagccaagtgtgcattccccagcagttccccacaaagttgggcgagctccctgagtgcag

SEQ ID NO: 330489 - DNA, 572 bp, Homo sapiens
ctttcccaattagatcaaccgatgtgtaacagattcattggcagcagatgagttggtgacatgagactaaagcatgaagggtaaagaagttacttaaaatcaatttatcttggccaaaatttttacgaggtttaaatattttttatgataatatctcaaaattcaaagcatggtggtagagaytttggtcatcttatgtacggttctgtttctggctggaatgttaactctaacaggcatatgatccacctcgccccaggtatttatattaaataatttctggagaggatcttcaacagaagataagttaagaatgcccacatccattttaaagcatcaacgctatataaagtttgtcatagattaatttcggcatcagtagccattattcatttaagcattgatttttacaccaaatctcattttaaaggggtataatacaacgttattaccatgtaaataaatgtagaaaaagtaataaaaggaaattaaggttaggaaaatatttgaaatccagtgcaaggttagtacattaaaatataattcagttgctggaaataggtaacaaaatt

SEQ ID NO: 330490 - DNA, 572 bp, Homo sapiens
ctttcccaattagatcaaccgatgtgtaacagattcattggcagcagatgagttggtgacatgagactaaagcatgaagggtaaagaagttacttaaaatcaatttatcttggccaaaatttttacgaggtttaaatattttttatgataatatctcaaaattcaaagcatggtggtagagactttggtcatcttatgtacggttctgtttctggctggaatsttaactctaacaggcatatgatccacctcgccccaggtatttatattaaataatttctggagaggatcttcaacagaagataagttaagaatgcccacatccattttaaagcatcaacgctatataaagtttgtcatagattaatttcggcatcagtagccattattcatttaagcattgatttttacaccaaatctcattttaaaggggtataatacaacgttattaccatgtaaataaatgtagaaaaagtaataaaaggaaattaaggttaggaaaatatttgaaatccagtgcaaggttagtacattaaaatataattcagttgctggaaataggtaacaaaatt

SEQ ID NO: 330491 - DNA, 581 bp, Homo sapiens
catgtaataatctgcagtgagggttggttctgaaaacgctgttggtggtggtggttttcacaccaaatagctagccatataaggtcaagttctttcacatggtatgtagtttttcataaatcatgtaaatagcttactcatgttagttagaaaagtactttgagttattcattcatttttggacattgtgataggtagtatgtatttcaattttaacttctgtacattgaattgtattttataaacattagggcaatatgtttttgaaaggatactttgtagatccttttgtgtggtgggtctgggagaaaaaatatttatattccttgggtgaaagaaatattccactataatagtggacaatctttttatttattgaaatcaagattcttcgatgytattattataaagtccttccctttttttcaaaataacaatatttttttcttatcatttgttaagggtacactctgtatcataatatttttcaaaggacattttcaaagaacaaaatatcaaaggacagtttttaaagaattgatataataattaatgacaatattctttaatttactcctcaa

SEQ ID NO: 330492 - DNA, 538 bp, Homo sapiens
tctatagtgtcctcctagagggttttgaagactagctatggaatatatacttatattcagggaagtctatagtctcataaactcatgaaattaaaatgaacaaaaatatggttgaaatattttattttgcccagcattaacttcacatcttacagatggtgacataaattctgactttggtttttgccaacattttctaaaacatatcttgaatccttcacctccctccatctttaattccactacactacaagctgcttgcagccctacagcctctcacctggatgactgcaaacaactgaaacagtctcccacatagtggccttctagcccctcgtttcctggttaaaagctgcaaatctggaggcattactctgtcttgctacatagcctttcaggactttctaatgctctgtagataaattcctgcyctcttatgtgacctgcaaggcttcagatgacttcaccagcccttctcagttcctagaatgctccaccctcttggctttagagccctcacatgtgctgtgttttccac

SEQ ID NO: 330493 - DNA, 591 bp, Homo sapiens
attcaatcaaaatatatttaatggttgcctacaacaggcatagtgtggagttggacattagatgttgtaagaggtagaaaaagtctccggcatagttcctgttatccaagtacttacagtctactatgggagacaatacttacacactgtacttcaagggagaaagtagcaagtattgttacagaggcatagatgcaattccatgcatcctacatgttttctctctacgtttagayaagggcattatttcttccagttaggaatatcttgaaagattctgggaaaaggtaagatttgaaactggctacaaggatagcagatttttccacttttgctaattaatttattttacttgttataaagaaacaaatatatgtagacaataccaataagagaaaaggagcaaacaaaaacctaataaatatcaccacacagagataatctctagtaacagcttttcttctgtgtatattgatgtgtttgttttgcaaatttggcatcatgcactgcataatgtttataacctgcttttctcatttaacagtttatcatgatcatctccccatatctgcttgtcagttgacacatgat

SEQ ID NO: 330494 - DNA, 537 bp, Homo sapiens
tttagaacctaaccccagttagagtggtactctgttatgtttatcaatgcttaggttgtaaacttctgtttttgcattttgtttatttggttgtgtgttttaccttccagatccacctctcaggataggttgtaatcttccagagggtggggactgtattatatttatctctttgtccacctacctcccaaatctgctcccaggctaattcagtgtttgttcaattgaatggttttgtagttattaagsatctgttgcataaggcagcatttctagagagctctgagaacagtttgttgctgccaaaggcttgcatgctaaggtgtgtagaactcattcaaaacatatattttttaattgaaaaataaatatttatttaatatattatgttaatatattaatactatgataattttatatatatatatgtatatatatatattctttctggggtttccttctttgcaaggaaaccccagcaagtgccttgggtgcacattttccttgccaattaaatcagcacaattttctctgact

SEQ ID NO: 330495 - DNA, 530 bp, Homo sapiens
caggacacccagttaaacttgaatttcagacaaacaatgaataattcttagcataagtatgtcctgtgcaatatttgggatgcacttgtacttaaaaattatttgttgcttatccaaaattcaaatctaactgggtatcttgtatctggaaatgataagtgtagatttcagcacccccagwcaccacagaacagttcagagtgggtagggtacttcaggatctctcttagtaggggataagattgctcctattgtcaagtgagtaacctcttttcccctccctccctcaaagatggtatcatatgatcttctaacccatatatagaagaagggaaataatgtacaaatgttaaacaaaattatgggaggccactgttctggactgagctcctgtactgggccctaacagaccaaatcaaaatgcagccactcatgctaaatgcaacatagtcaaactgaaactttaaggaagcagatagatctcaacacagacaagttgtttatttgtctcctgaagacagataatttca

SEQ ID NO: 330496 - DNA, 599 bp, Homo sapiens
aacctcaaactggaaacaagaaaagtttaaacaccctattatttttctggtaaactcctagattcatagtaggcacttgataaattgtgttgaatgaatgaatattgctgtctctttcttcaaaggttgttttgttttgttactgtgttttractctgactaaattttaagattctccaggatagattatgccttgcacagaacagaaacacaatgtgtccaagcttctgaaagtgtggtcctagttctaccagcaaaaagaaaaaatatggatacttgtttaaaatgcagaatctgggatctataccatattaacagcattgaagcaagaatgtgcattgtaaataagttcttccagggatgtgtgttgacactagggacaatcctgggcacaggagatgaaaatatttggagattagggaaggagccaataaggactaggggacacagccttgtcagaagttgtaatgctagttattttcacaatgtgtttcaaaggaagtttcattgtgagttgtcatagcaaagtacaactagtttccttgcgtttttattctatttccaagaacaatttgtatttttcatgttgttgaagaaac

SEQ ID NO: 330497 - DNA, 599 bp, Homo sapiens
aacctcaaactggaaacaagaaaagtttaaacaccctattatttttctggtaaactcctagattcatagtaggcacttgataaattgtgttgaatgaatgaatattgctgtctctttcttcaaaggttgttttgttttgttactgtgttttaactctgactaaattttaagattctccaggatagattatgccttgcacagaacagaaacacaatgtgtccaagcttctgaaagtgtggtcctagttctaccagcawaaagaaaaaatatggatacttgtttaaaatgcagaatctgggatctataccatattaacagcattgaagcaagaatgtgcattgtaaataagttcttccagggatgtgtgttgacactagggacaatcctgggcacaggagatgaaaatatttggagattagggaaggagccaataaggactaggggacacagccttgtcagaagttgtaatgctagttattttcacaatgtgtttcaaaggaagtttcattgtgagttgtcatagcaaagtacaactagtttccttgcgtttttattctatttccaagaacaatttgtatttttcatgttgttgaagaaac

SEQ ID NO: 330498 - DNA, 582 bp, Homo sapiens
agacacatgagtaatgtgttgtgctgtaatgtgacagctatgatagcactggttgataagaatttttcagcctcgttataaccttatgggaccactattgtatatgcagtccgtcattcactgaaacataattatgtgcatgactgtggatgcatcccctattctcagatgtgtatatctccagcatagcctttatcacaaattaccagtcttagtccatttgggctgctgtaacagattactatagaccaagtgacttataaaccacatatatttgcttctkacagttctgggggctgagatgtccaagatcaagatgctggcagatttggtgtctggtggcagcccatttcctggctcataggtggagccttctcactgtgtcctcacaaggtggaaggagagaggtgcctctctggggcctcttttataaggttgctaattccattcatgagggctctgcccttatgatctaattacctctccaaaggcctcactacctaataccattgtcttgggggttaggatttcaacatacacattttagggggacacaacattcagaccatagcagtactataa

SEQ ID NO: 330499 - DNA, 536 bp, Homo sapiens
cataataagcatggctcatgggcccacccccttgtccagggaggagatgggtggcttaattgacatttccaccaagactgggtccaatgggaagaggcctggttacccaacactggatcaggtgctgctatcagaataaggggaacatggagccagcctctcactcggagatagtgaagcccacagtcttctctgctatgagaagctcatcagccaaaaagcytaatcaaaactgagtgtgtgccagccggcagcattgctccctccaggtggttctcagtaaggagtcttgtaataggaggtctaagtcataatgacatttgctttctgcagctaggagttgcctaagctccttgaagcatggcagagctaacagggagagccctgggataaaaatcttgccaggagttcccacagctggacccaaactaatgctttttccaagtgcagaacagcaaaatctgagttgtggctatcattggcaatggttgtcaaacaacagcatgcactagagtccctggaagggcttcttatga

SEQ ID NO: 330500 - DNA, 547 bp, Homo sapiens
ttgcccaggcaagtctcaaactcctgggttcaagcaawcctccaccttagcctcccaaaatgttgagattacagacaagagtcaccgtgcccagcagaattgagtttttgatttggttctcagcttgaaagttattagtatatagaaatgctattgatttttatacattgatttcttatcctgaaacttgactgaggttgtctatgaagtctaggagtcttttgaaagaatctttagggttttctaggtattaaattacatcatcagtaaacagagatgatttgacttcttcctttcccatatggaagcattttatttctttctcttgcctgattgttctggctagcactttcattactatattgaatagaagtggtgagagtggacatccttgtatcattccaactcataggagaaatgctttcaacttttcctcattcagtatgatgttggctataagattgtcatatatggctcttatcattttgaggtatgttccttgaatgcctagtttggtgagggtttttatcataaaaggatgttcgat

SEQ ID NO: 330501 - DNA, 547 bp, Homo sapiens
ttgcccaggcaagtctcaaactcctgggttcaagcaatcctccaccttagcctcccaaaatgttgagattacagacaagagtcaccgtgcccagcagaattgagtttttgatttggttctcagcttgaaagttattagtatatagaaatgctattgatttttatacattgatttcttatcctgaaacttgactgaggttgtctatgaagtctaggagtcttttgaaagartctttagggttttctaggtattaaattacatcatcagtaaacagagatgatttgacttcttcctttcccatatggaagcattttatttctttctcttgcctgattgttctggctagcactttcattactatattgaatagaagtggtgagagtggacatccttgtatcattccaactcataggagaaatgctttcaacttttcctcattcagtatgatgttggctataagattgtcatatatggctcttatcattttgaggtatgttccttgaatgcctagtttggtgagggtttttatcataaaaggatgttcgat

SEQ ID NO: 330502 - DNA, 515 bp, Homo sapiens
tcatctttcctagttaatagtttataagttttgtccattgtttttcaaagaaccaacttttgtttttactgatttcttctattggtttttctacttttggtttcatgttttctctttctctgatttttctttgtaattatttgggtttggttggctgtttcctctacctccttgaggtagaatgctcagttgttgattttgaatctttctttcttctaatataattatttgaggatacaaaatacttgctaagctttacattaggtgcatctcataaattttgatttggtgtgttttcatttatgtttttttcttcaactcacaaattacttttggaactgcatttcttaattttcaartatttgagaatttcccaaatctcttcctgttgttaatactcagttcaatctgttatggtcagggaacatactttctatgatttcaatttatgtaaatttaattgtagaattgtttaaacatgttttgttgttaacatatggtctgtcttgtagatt

SEQ ID NO: 330503 - DNA, 497 bp, Homo sapiens
acatacacaaacagacccacttcccacacatgcacactcacaccatgtttgaactataaactcattagtttgaagcttgaacaccagttttaaatgctatgtattttggtattaaatcattagtgttgcaaatgtcttttaggcagttcagccatgaaacaaagcagattaggcattgtcaccacattttctgtgtccgtttcttcaaaagaacactgcrcttcactttgctgcaagggaaggccatgccaaagcctttgcacttctgagccacaatgctgacatagtcctgaacaaggagcaggcaggcctcctttttgcaccttgcacttcacaataagaagaaggaggtggttcttatgaccatcaggagcaaaaggtacactgtctgcctgtccactgtcatttagtgttctctggtgtcagggatgattcgaagtctgagagaaaagaaatgagtttcagccattaatcacaattttaaaatatcagttgtt

SEQ ID NO: 330504 - DNA, 573 bp, Homo sapiens
aagtaatttttttgcttataatatgacagaattctataattgtctatatgttgacctttaccagagagttttatacttttgtatsattttgtgttgctgtttaacatttttttcatttcaatttgaagaactctcttcagcatttcttatagggccagtctagtggtgatgcactttctcgccctatgtttacctgggaaaatcttatttctcctttatttttaaaggaccgtttttaccagttataatattcttggttgtcagtttattttctgtcagtagtttgaatatatcattccactctcttctagcctgcaatgtttctgcctagaaatttgctgataatcatattggagctactgggtatgtgatagcttgcttttctcttgctgatttcaaaattgtctctgtctgaattttgacagtttgattataatgtgtctcaggatagctcactttaaatttatgctagttgaagttctttgagcttcttgaatgtgtgtgttcatttcttttctcagattagggagattttcagtcactatttattcaaataggctttctaatcctcca

SEQ ID NO: 330505 - DNA, 628 bp, Homo sapiens
gccaggcgcagtggctcacccttgtaatcccagcactttgaaaggccgaggtcggctgattgcttgagaccaggagtttgagaccagcatgggcaacatggcaaaatcctttctctacaaaaaaaatgcaataatcagccaggtttgatggcacacacttgtggtcccagctacttgggaagctaagacaggaggatcacctgaacctcggaggtcagagttgtagtgagccatgatcacacctctgcactccaamctgggtgataaagcaagatcttggatccaaaactagataacattaatagtaagaaaaaataaatttgattaacacattgaaaatgagatatgattattcaattaatgttttctttttcaaaataattggcctcaatgatctcatctatgaaatctaatacctgatttaatacacgatggtttcgctgtatggatacactttgaccacaaaagtgagtatatattttattttttcattttcctagatttgagaattgtggaattttcattgttatattggaggtaatttttaaaactttgttgaggtctgcagttgtatttttcttccttcttttggcttttggactcagcttttacgtcctcctgaatttac

SEQ ID NO: 330506 - DNA, 563 bp, Homo sapiens
atttttaggtggaccattcaactgtagtgatttaattttgtgtcatacttcagattggtttggcagttggtgacattgctgaggtccagaaacatgcatcattgaagaggatagctatgcaggtaagtgcmgtgcctccccacttatgacagtgttatcttctggtaaacccacaataagttaaaaatattacaagtcaaaaatgggcattttgtaggaatatgccagttataaatttacaccacttacactgtaaagttgggctattttccctcctgatcatgtggctgactgggttctgtggctcgctgccactgtccagcatcccaggagagtaccacataccgctagcccagaacagatcaaagtttaaaatttgaagtttagattctactgaatgtgtatcactttcacaccatcataaagtcaaaaagacatgagttgaaccatcctaaattaggcattgtctgcattacatctatttaaacctactgaaattaacacaattataattacttccttttctgagagcacagttatttagcaatggatgttttcttaat

SEQ ID NO: 330507 - DNA, 625 bp, Homo sapiens
ttgcctgagcatcttttgttatgttaacctgtggccacccaggtagctagccgcttgatcaagagcatcactggcatcctagccccgctgttttaaggagctgcttctattttgtgcagggaatcacagggtccccacagcaagatttatattgaagttttaactgaatctatgtggttttgttctcttgtgacatgtctcttatttttatggacaatttgatgtaaaatgtggtgtcaaagtttcttggctagktccttggctattgaatattgtgagttacttttctgtaatacaacaccaagttatttacctgttcttgactggattgtctttaaatttcaaattcaagtgggcatttttgatgcttcaaggatatttgttgaccagtttactatacgcattcagaaactttggccagtttgagagatagaaaaatcgtgttatgttataactttctattcactcttgtctcctcttcactcttatttgtcacaattttcttctctgttattccttcagccatacattagcatttatttattgaaaaacaatgtttcaatacatagagtgtacaaagtgcagcatcccaggagatgctgggatgcttagcatgagagcccag

SEQ ID NO: 330508 - DNA, 625 bp, Homo sapiens
ttgcctgagcatcttttgttatgttaacctgtggccacccaggtagctagccgcttgatcaagagcatcactggcatcctagccccgctgttttaaggagctgcttctattttgtgcagggaatcacagggtccccacagcaagatttatattgaagttttaactgaatctatgtggttttgttctcttgtgacatgtctcttatttttatggacaatttgatgtaaaatgtggtgtcaaagtttcttggctaggtccttggctattgaatattgtgagttacttttctgtaatacaacaccaagttatttacctgttcttgactggattgtctttaaatttcaaattcaagtgggcatttttgatgcttcaaggatatttgttgaccagtttactatacgcattcagaaactttggccagtttgagagatagaaaaatcgtgttatgttataactttctattcactcttgtctcctcttcactcttatttgtcacaattttcttctctgttattccttcagccrtacattagcatttatttattgaaaaacaatgtttcaatacatagagtgtacaaagtgcagcatcccaggagatgctgggatgcttagcatgagagcccag

SEQ ID NO: 330509 - DNA, 612 bp, Homo sapiens
tgtatgacatggctgtatattattacagagatacagmgtgattggaacatttagagaacaaaaacaattaaatgattatcaggtacagaaaaaaatgcaaaaataagggaatgctacatggagggggtgagatgagtcagtgttgaaagatggttgggatttaacaggacatcgataccgtcccgaaaggaggggccagtaagagccaaaggccacatcagaacagggaaaatggccaaggcactggcccaaggcccccttgcctggaaggatcattcatgttagtgggtgactagattgctccagatgacaggggggtttattcaaaactagcagagaaaaaccttagcaaaagggcagtaaattatgaagtgcttcaagttactttgtaagttagtggagagttattattagctcttccacaatgaaaatggtgcgtatgtgatctgctgttatcttggtttagtggggaaagatcagaggtaggaagagctaatgacaggttgttagtgtcacaaagatggggtttaggactccaggtatgtttatatggagaggggatgtataaacttcttggcaggtatgtcagcaatacctcataaatgccctaat

SEQ ID NO: 330510 - DNA, 612 bp, Homo sapiens
tgtatgacatggctgtatattattacagagatacagagtgattggaacatttagagaacaaaaacaattaaatgattatcaggtacagaaaaaaatgcaaaaataagggaatgctacatggagggggtgagatgagtcagtgttgaaagatggttgggatttaacaggacatcgataccgtcccgaaaggaggggccagtaagagccaaaggccacatcagaacagggaaaatggccaaggcactggcccaaggcccccttgcctggaaggatcattcatgttagtgggtgactagattgctccagatgacaggggggtttattcaaaactagcagagaaaaascttagcaaaagggcagtaaattatgaagtgcttcaagttactttgtaagttagtggagagttattattagctcttccacaatgaaaatggtgcgtatgtgatctgctgttatcttggtttagtggggaaagatcagaggtaggaagagctaatgacaggttgttagtgtcacaaagatggggtttaggactccaggtatgtttatatggagaggggatgtataaacttcttggcaggtatgtcagcaatacctcataaatgccctaat

SEQ ID NO: 330511 - DNA, 347 bp, Homo sapiens
tcatgttttgggtggctcatccatagcatctgtgttaaatacacactgtccctgtgagagcagatgggtgggggaccaaccttaccctttcagtatcttttattacagcaaagatatacttcatttgtttttcctagtcacatgtcacttacatttgtgtgcagatatatatgtgygtatgtacagctaagtgtttataatatacaataaagaacacacatttacacacacacacacagtattaatccattttcacactgatataaagaactgcctgagattgagtagtttataaaggaaagaggtttaattgactcacagttgcacatggcttgggagacctcagg

SEQ ID NO: 330512 - DNA, 535 bp, Homo sapiens
aaagaggccaatgtagagctcataccatggcttcagagggtgtaggccccagccctggcagcttccacttggtattgagcctgcaagtgcacagaagtcaakaattggggtttgggaacctccacctagatttcagagactgtacgccaatgcctggatatccaggcagaagtttgctgcatgggtggggccctcagggaacacctctgttagggcagtgaagagggaaatgtggagtcagagcccccacacagattccctactggggcaccacctagtggagctgtgagaagaggaccagtgtcctccagaacccaggttggtagatccactgacagcttacaccatacacctggaaaacctgcagaaaatcaatgccagcccatgaaagaagtcaggagggaggctgtactctgcaaagccataggagtggagctgcccaaaactatcaaaacccaacttttgcatcagtgtgacctggatgtgagacatggagtcaaaggagatcattttggagctttaagatttaactgcc

SEQ ID NO: 330513 - DNA, 595 bp, Homo sapiens
ataaatacatgtatcccttactctgttttaattacttgtgctgtctcatttaatacactgcaagagacatactattttcctaatttttgaagatgaagaaactaaggctcagagaagttaagtaacttgtttaaggtcagaataatattgtgctgtccagcaatatgcctaagagttatacaactgcatacttttcatttgcttattgtatgctagtttctttcagtagtttcattcactgcacagttcaaattgctcaaggctggaaaatcttgcagaaactttgaaatcagatraaacactaccaactcaatattagctcaatttttttaacactaaacatgtatccacttacgttttgcataacaacaataatttcacattttaattatgccattacattgaccaaattttgattatgattatgattgcctaaaataaatacatatgtgagtggcaatttgtgagattttgggtagaaaatctccttgggtccatggctgcccatcagatagtctcacaaagaatggtatatttgctatagttaagttaatcaaagtcccttggaccactcatgaatctagaaatgctgtct

SEQ ID NO: 330514 - DNA, 534 bp, Homo sapiens
gcaccaatataatgtgctgaaaaaggactgcttatagttaaatatatggagacatacctaggaagaaaatcagaggatttaagaaaaacttagaataaacagcagggcctacttttagattcattcttatgaagaactaatttggtrccaaaatcaagatgtcagacaagaaccagggcagaaataaatagatgagaaatataaatggagtcagaagttggaagtgaatgttatgtgtttgcatcccaaaactatgacctcaagccactgtaaaagtccaagtaagagaagcctctaggccaatacagagaagtttttgaaacattaaaggcccggaatgttctgctttcttatatgaagaacataggtcattgtttaacttcctgattggcaagtgacctaaaagagaagataatatcgaacatccacctgttgggtcctgatgggaccaggcacaggctgtaagcccctggtctatggtaagattggaacaccagaaagttctaaacatacactgagaactataggatattc

SEQ ID NO: 330515 - DNA, 534 bp, Homo sapiens
gcaccaatataatgtgctgaaaaaggactgcttatagttaaatatatggagacatacctaggaagaaaatcagaggatttaagaaaaacttagaataaacagcagggcctacttttagattcattcttatgaagaactaatttggtgccaaaatcaagatgtcagacaagaaccagggcagaaataaatagatgagaaatataaatggagtcagaagttggaagtgaatgttatgtgtttgcatcccaaaactatgacctcaagccactgyaaaagtccaagtaagagaagcctctaggccaatacagagaagtttttgaaacattaaaggcccggaatgttctgctttcttatatgaagaacataggtcattgtttaacttcctgattggcaagtgacctaaaagagaagataatatcgaacatccacctgttgggtcctgatgggaccaggcacaggctgtaagcccctggtctatggtaagattggaacaccagaaagttctaaacatacactgagaactataggatattc

SEQ ID NO: 330516 - DNA, 664 bp, Homo sapiens
attacccagtgcgcaaaaaaagcacctgaatgtttgattccaatatcatgtgttaagaattttgataaagccatatacaaggaacagtaggaaagcagaaagtggctcctctaatacccttcatgccaaatgtaaaggagccaaggtctcagaaggctgagagaaaaggtttttgggctaaagagagccagaaactcatgcatctctttggcgatttatagagaagttggttttcttgtggcttaccacaaatagccaaatcatcatttgcaataatatttctacaagaaaatttattgtaagttccaaataagcctaccttagaaatgaacttctggaacatgatccatttgtaaactccattcttcatcagttaarcatgtttgtattctagtgtgtctgacagactttgagaggtagtttaaaagccatggcctaatttttaccctttagcaattttccaggatttcctctacttgatcaaacttattgttacaccttgaaaaccaataagatgtctcccaatggtattgtcatgtcttcagcgaactaatctaacaggccatacactctaactaaaacagcaagtcatacttatgttttctgctttcactgaggctctcaataccttcttcctttgtcattacatcagtcaggtaaaaga

SEQ ID NO: 330517 - DNA, 624 bp, Homo sapiens
caatgttgcagtgttattgggacaataatattaaatcgtgtcttcaaagatcacagyggagtgcctggcctgtaggaatggctcagaaaatgttaataagaaaaaagacacaccactaataaaccacaagactagaattcgagcttgagtccctgatgccacaccggctttccatatatttctacaatacgatatatggcactatttatcctgtgagctcagcatacaagtaataggtcctttcatcctgcaaagtcctatagctattctaaaatggacatatcaaccttgtaaattagtggcagtgttatctttatgtccacaaaaggagaaaaagtattgtctcataaacatgatttggggaccatctatggtacttggaaccatgtagccacattttctgtttctctcctttttaaaatatatctctccactatttccttttattcatctaagtgcttcattctaaacaacacacatacatgcatggacacacacacacatctcttgactgttccgtctgatcaagaagaatcactccattcatcattccatttggcaccaaacttaaacagggatctatatttacaaactcccattcactaattaaataacttgaatttc

SEQ ID NO: 330518 - DNA, 624 bp, Homo sapiens
caatgttgcagtgttattgggacaataatattaaatcgtgtcttcaaagatcacagtggagtgcctggcctgtaggaatggctcagaaaatgttaataagaaaaaagacacaccactaataaaccacaagactagaattcgagcttgagtccctgatgccacaccggctttccatatatttctacaatacgatatatggcactatttatcctgtgagctcagcatacaagtaataggtcctttcatcctgcaaagtcctatagctattctaaaatggacatatcaaccttgtaaattagtggcagtgttatctttatgtccacaaaaggasaaaaagtattgtctcataaacatgatttggggaccatctatggtacttggaaccatgtagccacattttctgtttctctcctttttaaaatatatctctccactatttccttttattcatctaagtgcttcattctaaacaacacacatacatgcatggacacacacacacatctcttgactgttccgtctgatcaagaagaatcactccattcatcattccatttggcaccaaacttaaacagggatctatatttacaaactcccattcactaattaaataacttgaatttc

SEQ ID NO: 330519 - DNA, 624 bp, Homo sapiens
caatgttgcagtgttattgggacaataatattaaatcgtgtcttcaaagatcacagtggagtgcctggcctgtaggaatggctcagaaaatgttaataagaaaaaagacacaccactaataaaccacaagactagaattcgagcttgagtccctgatgccacaccggctttccatatatttctacaatacgatatatggcactatttatcctgtgagctcagcatacaagtaataggtcctttcatcctgcaaagtcctatagctattctaaaatggacatatcaaccttgtaaattagtggcagtgttatctttatgtccacaaaaggagaaaaagtattgtctcataaacatgatttggggaccatctatggtacttggaaccatgtagccacattttctgtttctctcctttttaaaatatatctctccactatttccttttattcatctaagtgcttcattctaaacaacacacatacatgcatggacacacacacacatctcttgactgttccgtctsatcaagaagaatcactccattcatcattccatttggcaccaaacttaaacagggatctatatttacaaactcccattcactaattaaataacttgaatttc

SEQ ID NO: 330520 - DNA, 640 bp, Homo sapiens
ttgtgtggatatactatattttctttatccatttaccagttattggacatttaaaatatttccagtttgggtctagtataaataatgctgctatgaacattttcatacaaatctgtggacatacatttttatttctctygtttaaatagatacccagtagtggacttgctgagtcatgggtaagtatgtttttagctttgtataaaatttccaaattgccttccaaagtggatgtacctttttatatggcctccagcagtgtatgaggattctacttctccacagcctcacaaaacttactattattaatcttttttattatactcattttagtggtatataccattgaggctttaattagcatttctgtagcagctgatgatactgtccatgttatcatgttcttattaaccatttgtgtattttcttgatgaaatgtttattaaattattttgcctctttttaaattggattgtcttcttactattgagttgtaagagttctttattctaaatacaactctttaatcagatgaataatttgcaaatattatttcagaatctgttacttttctttattttcttaatagtaccttttgaaaagcagaacttttaattttgataaaactctaatttgttaa

SEQ ID NO: 330521 - DNA, 555 bp, Homo sapiens
tatatggatacaaaattaaaagccaccaagtcactttcctactgtaaggaaaggaagccaataagcaacatgctcacagaccagggaactgcagagaaacaggggtggagcaatcagatcaagctgatcttaaagcccactctactcagtgacttcctagttaaatgaggatacattttctctccatttwaacctgctagagtcagttccctatcacggccaaatgcatcccacttatttgagagtgttagccttccatgcctccacttacattggaacctgcctggaatccaccttgccccagctccctcccatgtgcagtggatcctgtcctttatgtctcagctgctttcctggaatggggatgcagttgtttatctggacattgggctttgcctctgcctgagcctcccacttcttatattttctctgtggaaagggaccaatttggaagtgaataccagcctgaatcaaagtctacctggtcgtttattggattttctgcttctttgtttacccagctacatttctgtctctagcccctacaactaccct

SEQ ID NO: 330522 - DNA, 582 bp, Homo sapiens
cgtgcgattggagtgatgcctttacaagccgaggaatgctgaggattgctcgcaaacaccagaagctagaagtggcaaagaaggattcacccctagaaccatcagggagagcacagtcctgcagacacattgatttcccacttctagccttgagaactgtgagacaagtgtctattgttgtaagccacccagttcttgatacttttataaggcatccctaggaaataatayatgcattaatcgagatttatttattatttattgtatgatgtctgtctcattagacttttagctttatgagagtagggtatgtttacttatcataattatttacagcaacacagaggatggtgtctggcacctattagtagtggagtatttgtggaattagtgaattactgaataagtggatgcatggataatattttaatgcaaggtccttcaaaagaatttagaatctcagattgttcaaataaaccacttaaaagcaacactaatttaatcttaaaatcagtaatcataatgcttcaagtaggaaaagaaaatttctgatgcctaattatcaaacacttcatttaacca

SEQ ID NO: 330523 - DNA, 582 bp, Homo sapiens
cgtgcgattggagtgatgcctttacaagccgaggaatgctgaggattgctcgcaaacaccagaagctagaagtggcaaagaaggattcacccctagaaccatcagggagagcacagtcctgcagacacattgatttcccacttctagccttgagaactgtgagacaagtgtctattgttgtaagccacccagttcttgatacttttataaggcatccctaggaaataatatatgcattaatcgagatttatttattatttattgtatgatgtctgtctcattagacttttagctttatgagagtagggtatgtttacttatcataattatttacagcaayacagaggatggtgtctggcacctattagtagtggagtatttgtggaattagtgaattactgaataagtggatgcatggataatattttaatgcaaggtccttcaaaagaatttagaatctcagattgttcaaataaaccacttaaaagcaacactaatttaatcttaaaatcagtaatcataatgcttcaagtaggaaaagaaaatttctgatgcctaattatcaaacacttcatttaacca

SEQ ID NO: 330524 - DNA, 633 bp, Homo sapiens
aaatacctgatgagcataaaatcttataaactatttttagtgactcactgggaatgttaaactttgcttctaagacttttctttcatctttacatattcctttccataaatacatatatgtatatgcatgtacatttatattttaacacccaaacaaatctatggcattttcatcacttcatcgatgaggatactgaggctcactaaaataaaaaaagtcctcaaggtcactcagctaaaagtcagaagtcatgcctgtccaaagcccatccccttagccaccatgtgatgcctacataacaagttgatatckccataggtaatgacaccacactgttgacagaaacagctaatagaaaatttactttcattcgaattattatataagtcaaaataaaatataattatatatttctgtggtaataaagtaaaataactagacatttacctaataataataatgatacttattattatagaatatgtaaaagccacaccttcccatatatttattttaaaactggaaattcccatattaagccatataaagctgttgtgcttctacttttcacctctaatcaaaaagcaacttttagagagagtaccatgataattacatctttctcagtaagc

SEQ ID NO: 330525 - DNA, 633 bp, Homo sapiens
aaatacctgatgagcataaaatcttataaactatttttagtgactcactgggaatgttaaactttgcttctaagacttttctttcatctttacatattcctttccataaatacatatatgtatatgcatgtacatttatattttaacacccaaacaaatctatggcattttcatcacttcatcgatgaggatactgaggctcactaaaataaaaaaagtcctcaaggtcactcagctaaaagtcagaagtcatgcctgtccaaagcccatccccttagccaccatgtgatgcctacataacaagttgatatcgccataggtaatgacaccacactgttgacagaaacagctaatagaaaatttactttcattcgaattattatataagtcaaaataaaatataattatatatttctgtggtaataaagtaaaataactagacatttacytaataataataatgatacttattattatagaatatgtaaaagccacaccttcccatatatttattttaaaactggaaattcccatattaagccatataaagctgttgtgcttctacttttcacctctaatcaaaaagcaacttttagagagagtaccatgataattacatctttctcagtaagc

SEQ ID NO: 330526 - DNA, 593 bp, Homo sapiens
tccctctgccattttgatatttaacttttaatttctaaacaatctgtgaccagaacttaatacaggtaaatcyaaaggcaaatgtatgtataccctgtttcatccatcacactaggaacagaccgttttgggaatactgatgaaaaaagaagtatttccattagaatgtgatgaaattaaacaggaaatgaatgacctctggaacatttcacttccctgtatatctgagattttctgatattaatagttagtgacagattgttgctgtttaggccttaatctttctgctaagaatccctgatcatttaagggctccaacttcttgattttgttttactggactgatgtgccaaatctgttaaaagttttccactcaggaaaaaattcaacaaacaattggagctataaggatctctggaagttatacaaaagagaaacaatgatccctccaaatttatacatttaagatggaggacacaatataattttgtaacatttagaaatgtagtacacttggggaaagagttaaaaacatcacacactgatagaaactgctgtgaaaaacaaaatttgcaatatggcacagcgatgct

SEQ ID NO: 330527 - DNA, 593 bp, Homo sapiens
tccctctgccattttgatatttaacttttaatttctaaacaatctgtgaccagaacttaatacaggtaaatccaaaggcaaatgtatgtataccctgtttcatccatcacactaggaacagaccgttttgggaatactgatgaaaaaagaagtatttccattagaatgtgatgaaattaaacaggaaatgaatgacctctggaacatttcacttccctgtatatctgagattttctgatattaatagttagtgacagattgttgctgtttaggccttaatctttctgctaagaatccctgatcatttaagggctccaayttcttgattttgttttactggactgatgtgccaaatctgttaaaagttttccactcaggaaaaaattcaacaaacaattggagctataaggatctctggaagttatacaaaagagaaacaatgatccctccaaatttatacatttaagatggaggacacaatataattttgtaacatttagaaatgtagtacacttggggaaagagttaaaaacatcacacactgatagaaactgctgtgaaaaacaaaatttgcaatatggcacagcgatgct

SEQ ID NO: 330528 - DNA, 537 bp, Homo sapiens
tttatatcattcaaaatctgagatttatgggaaattcattttagatacttgaatttacttagggttgttaccagaataaaaaattatggagagatagaaaatgatctttccagttctacctagttaaaaaacaaaacaaaacaaaacaaaaccatggatctgttccataatctctagcccactaacatgaaactcctaggtcagttcacatctctgcctttcctgcctcctaactagtctcatcatgtccagtgttgcctaactcygacccatgtacagtcagagcaatctttccaaaaggcaagtctgatccggtcagtttcctcctgaaaactactcaatggctcccatttcccttaaaggtaaaagaataaatttataatgcactcttcagcctaatctttcaattcaacactaccttcactccttcttcctccaaaatggaacctcagttatctgaacatgttctctctcccttctacacttttgtgcatgtgttttctctgctccaactccatttctcacactcttatctgg

SEQ ID NO: 330529 - DNA, 537 bp, Homo sapiens
tttatatcattcaaaatctgagatttatgggaaattcattttagatacttgaatttacttagggttgttaccagaataaaaaattatggagagatagaaaatgatctttccagttctacctagttaaaaaacaaaacaaaacaaaacaaaaccatggatctgttccataatctctagcccactaacatgaaactcctaggtcagttcacatctctgcctttcctgcctcctaactagtctcatcatgtccagtgttgcctaactctgacccatgtacagtcagagcaatctttccaaaaggcaagtctgatccggtcagtttcctcctgaaaactactcaatggctcccatttcccttaaaggtaaaagamtaaatttataatgcactcttcagcctaatctttcaattcaacactaccttcactccttcttcctccaaaatggaacctcagttatctgaacatgttctctctcccttctacacttttgtgcatgtgttttctctgctccaactccatttctcacactcttatctgg

SEQ ID NO: 330530 - DNA, 674 bp, Homo sapiens
taaggtaaactgggtttactagggtatatgggaattctcttatatcacattcacaaatttttgtatgaattttgtgaacctattctaaaataaagtttacttaaaaataatgcttattatattaaaatttttaaaaactgtttttaaagattagtcagtgcatcttcttcttgctgaactgcctgaatgtcacagaagacttcctttactatccagacttcaacatcatctattgtttgttatcagttactcataaaaatgcctaaaatctacttggcagcctctctatgaatattcatttacatattaagaactagacatygttggccgggcgcagtagctcacgcctgtaatcccagcactttgggatgccgagatgggaagatcacgaggtcaggagttcaagatcatcctggctaacacggtgaaaccccgtctctactaaaaatacaaaaaattagccaggcgtggtggcgggcgcctgtagtcccagctactggggaggctgaggcagcagaatggcgtgaacccgagaggcggagcttacagtgagccgagtgcaccactgcactccagcctgggcgacagagagagactcagtctcaaataaataaataaataaataaaattaaaaactagacattgttgagagagttgatgaaaaattaagaata

SEQ ID NO: 330531 - DNA, 674 bp, Homo sapiens
taaggtaaactgggtttactagggtatatgggaattctcttatatcacattcacaaatttttgtatgaattttgtgaacctattctaaaataaagtttacttaaaaataatgcttattatattaaaatttttaaaaactgtttttaaagattagtcagtgcatcttcttcttgctgaactgcctgaatgtcacagaagacttcctttactatccagacttcaacatcatctattgtttgttatcagttactcataaaaatgcctaaaatctacttggcagcctctctatgaatattcatttacatattaagaactagacattgttggccgggcgcagtagctcacgcctgtaatcccagcactttgggatgccgagatgggmagatcacgaggtcaggagttcaagatcatcctggctaacacggtgaaaccccgtctctactaaaaatacaaaaaattagccaggcgtggtggcgggcgcctgtagtcccagctactggggaggctgaggcagcagaatggcgtgaacccgagaggcggagcttacagtgagccgagtgcaccactgcactccagcctgggcgacagagagagactcagtctcaaataaataaataaataaataaaattaaaaactagacattgttgagagagttgatgaaaaattaagaata

SEQ ID NO: 330532 - DNA, 576 bp, Homo sapiens
aagttcctgctttagggggatagggacttcccttcggctccacatgtgcaggtagccttaaactttaacttataattgcccctccccctcattttaatactaaaagtcacacagccagtagtggagatttaaaacggtaatattacatgtggtgtatgaagaaacatgtagagccattgcacaagtgctagaaaaaaccctcctatacatgccctgatgaaatccttccctatagaaagtccgcataaaacaaatccacatactaccctccaggagcagcctgcccttttccttttgtggtgccgacttccttgtgcacaagctaaaataatgctttctctttctctatgctgctatatctagtgatctctcttgatttctattgtcatctttcttgagacattacaagaacaragggcactgataacacctgtatgcagcttcagaatcaggcttaactcagcaactcagtggatagggaaggcacgattggctcaggctggaatcaggtggacctatcttccttatcagcagatgagcaattatatgagaagtcatgatttactctaatgacat

SEQ ID NO: 330533 - DNA, 579 bp, Homo sapiens
tataaaccacttgaggatacacaagttaggtctatgtatccagtgcaacatgctatcagttgtttttcaattctaaaataatgatactctggttacttttctcaagacatatgcagactttggctctctaagacctttgactagctgtgttaggacacattagtctaccagactgtgtggggcaagcaacatatcatgcagcaccctcgtttaatagtgattacagcagtttcacccagctcatgtaaatgcctaagacagtcctggctattggcaatactgtagaatattagaatgaccttgcctttcgtctgggtcatacactgattttatatacatatatgrgttttctgtgttggttccttattacagaccttcttgccttcttttcagcttgttggcatttgagccaatgctatggcccagccatgttataaaatcataatgattcccaattacctaatatgtgaagtgttgggtactttttcccttcagggtttttcatagctagtaatgtaataaactatgttcaatttggcccattcattgtacttgaagaggatgatatatattccatac

SEQ ID NO: 330534 - DNA, 579 bp, Homo sapiens
tataaaccacttgaggatacacaagttaggtctatgtatccagtgcaacatgctatcagttgtttttcaattctaaaataatgatactctggttacttttctcaagacatatgcagactttggctctctaagacctttgactagctgtgttaggacacattagtctaccagactgtgtggggcaagcaacatatcatgcagcaccctcgtttaatagtgattacagcagtttcacccagctcatgtaaatgcctaagacagtcctggctattggcaatactgtagaatattagaatgaccttgcctttcgtctgggtcatacactgattttatatacatatatgagttttctgtgttggttccttattacagaccttcttgccttcttttcagcttgttggcatttgagccaatgctatrgcccagccatgttataaaatcataatgattcccaattacctaatatgtgaagtgttgggtactttttcccttcagggtttttcatagctagtaatgtaataaactatgttcaatttggcccattcattgtacttgaagaggatgatatatattccatac

SEQ ID NO: 330535 - DNA, 579 bp, Homo sapiens
tataaaccacttgaggatacacaagttaggtctatgtatccagtgcaacatgctatcagttgtttttcaattctaaaataatgatactctggttacttttctcaagacatatgcagactttggctctctaagacctttgactagctgtgttaggacacattagtctaccagactgtgtggggcaagcaacatatcatgcagcaccctcgtttaatagtgattacagcagtttcacccagctcatgtaaatgcctaagacagtcctggctattggcaatactgtagaatattagaatgaccttgcctttcgtctgggtcatacactgattttatatacatatatgagttttctgtgttggttccttattacagaccttcttgccttcttttcagcttgttggcatttgagccaatgctatggcccagccatgttataaaatcataatgattcccaattacctaatatgtgaagtgttgggtactttttcccttcagggtttttcatagctagtaatstaataaactatgttcaatttggcccattcattgtacttgaagaggatgatatatattccatac

SEQ ID NO: 330536 - DNA, 587 bp, Homo sapiens
gctatttacttttatgatagcattcaacatatctttttagattttttatttttccttatattcgcttgggatcttaaagtagatggggaccatgtgttcatttatatagaaccactactctagtgctgaaactacaaaataggaggcatttattaaaatattttcatataaataaataatttcatgactctttagtaataaagcataaggactaagaggtaggatttggaaaacaaaaagaattgagttcaaattccatatctgatatttttagctgggaaattttaagcaagtcaaattacctgccttggccttagtttcttctttgaaatatactattaagaaaatgaagaggaaatccagagsctgcaagaaaatatttggaacacatatgcagatgctcctcgatttatgatggggttacagctcaataaattcatagtaagttaaaaatattgaagtcaaaaatgcactttagtacactcaacccacccaacattatagcttggcctagcctaccctaaatgagctcagaacattagcctcttgttgggcaaaatcatctaacacaaagcctattttataat

SEQ ID NO: 330537 - DNA, 587 bp, Homo sapiens
gctatttacttttatgatagcattcaacatatctttttagattttttatttttccttatattcgcttgggatcttaaagtagatggggaccatgtgttcatttatatagaaccactactctagtgctgaaactacaaaataggaggcatttattaaaatattttcatataaataaataatttcatgactctttagtaataaagcataaggactaagaggtaggatttggaaaacaaaaagaattgagttcaaattccatatctgatatttttagctgggaaattttaagcaagtcaaattacctgccttggccttagtttcttctttgaaatatactattaagaaaatgaagaggaaatccagagcctgcaagaaaatatttggaacacatatgcagatgctcctcgatttatgatggggttrcagctcaataaattcatagtaagttaaaaatattgaagtcaaaaatgcactttagtacactcaacccacccaacattatagcttggcctagcctaccctaaatgagctcagaacattagcctcttgttgggcaaaatcatctaacacaaagcctattttataat

SEQ ID NO: 330538 - DNA, 619 bp, Homo sapiens
cagaattttgtccctgacctacagatttgttgagctttgaacttgagggagatgacttacagtatctrgcagaagaaatttctaagcagcaaaacattcaagaggtgatgggtgctgttaaaagcattcagttttaaaagagaaacagagcataaaatttcagaaaatttacaggctgacaacctgataggaaaaaaaaaacattttctgaggagaaattaagcaggctgcagaaacttgcataagtaaagaggagccaaatgttaatcaccaagacaatggagcaaatgtctctgggcatgccagaggtctgcatggcagcccctcccatcacaggcctggaggcctaaggagaacaaatggttgcatgggctggggccagggcctgttgctctgtgcagcctagggacttggtaccttgcatcccagccgcaatagccttggctaaaaggggccaaggtacagctcagacaatggcttcagagagtgcaagccccaaaccttggcagcttatacatggtgttgagcctgtgagtgcagaagtaaagaattgaggtttgggaacctccacctagatttcaaaggatgtatggaaatgactggatgtccagaaagaagt

SEQ ID NO: 330539 - DNA, 653 bp, Homo sapiens
cttttggttttacaggcttatagtcagaagggacttgccttgtctcagataagactttggactgtgaacttttgagtaaatgctggaatgagtcaagactttaggggactattggaaaggcatgattcrttttgaaatgtgaggacataagattcacgggggtgccaggggtggaatgatatggtttggctgtgttcctacccaaatcttatcttgaattgtaggtcccataattcctatgtgagtgggagggacccggtgggagagaattaaatcatggggtagttttccccatactgttcttttagtaatgaataaatctcacaagatctgatgattttataaggagtttcccattttgcttagttctcattctctcttgcttgctgccatgtaagatgtgctttcgcctttccactatgattgtgaggcttccccagccatgtggaactgtgagcccattaaacctctttttctttgtaaattacccagtctcagatatgtctttatcagcagcacgaaaacagactaatatactgtatgatcagctcaatagatgcagaaaaagcttttgatagaattgtgcatctcttcatgttaaaaaatccctgaaaaaacagcagaaaaaacatacctcaaaataataaatgtca

SEQ ID NO: 330540 - DNA, 585 bp, Homo sapiens
gctgagaagcaatttaaggaggcaatcccacttaaatagctacacacacacacacacacacacacacccctagggatatatttaccgaaggaggtgaaagatttctacaagggaaactayaaagcatggataaaagaaactgtagataagacaaacacataaaaaatattttgtgctaactggtcagaagaattaatatcactaaaataatcatactgcccaaagcaaactacagattcaatccaacccctttcaaaataccaatgccattttaatggaattagaaaaaaaatcttaaaattcatatggaaccaaaatggagcctgaatagccaaagcaattctaaacaaaaagaacaaagttggagacatagcatcacctgacttcaaattatactagaaggctatagtaatccaaacagcatagtactagtataaaaatagagacataaaccaatgaaacagaatagaaaactcagaaataaagccacatatctatagccaactgttctttgacaaaggtgacaaaaacatatgctggggaaaatataccctttttaataaacggtcctggaaaattggattg

SEQ ID NO: 330541 - DNA, 585 bp, Homo sapiens
gctgagaagcaatttaaggaggcaatcccacttaaatagctacacacacacacacacacacacacacccctagggatatatttaccgaaggaggtgaaagatttctacaagggaaactataaagcatggataaaagaaactgtagataagacaaacacataaaaaatattttgtgctaactggtcagaagaattaatatcactaaaataatcatactgcccaaagmaaactacagattcaatccaacccctttcaaaataccaatgccattttaatggaattagaaaaaaaatcttaaaattcatatggaaccaaaatggagcctgaatagccaaagcaattctaaacaaaaagaacaaagttggagacatagcatcacctgacttcaaattatactagaaggctatagtaatccaaacagcatagtactagtataaaaatagagacataaaccaatgaaacagaatagaaaactcagaaataaagccacatatctatagccaactgttctttgacaaaggtgacaaaaacatatgctggggaaaatataccctttttaataaacggtcctggaaaattggattg

SEQ ID NO: 330542 - DNA, 473 bp, Homo sapiens
aaagtcagcagtgaacaaaacggataaggttcctgccctaaggacatgttgtgtcattagtgcctgtctagtctaaggtgctgtccactgtacccctctggactccttatgaattatctcttcacattattataacaatttaatctcatatttcaaatagctagaagaagwtacaatctgccctttcaaaacctggaagataaataaatcagctatatttaataaataaattcattctatctagtagtaaagtttgcaaagcggtttttttttcttttgggccccagcatgacacttagtgaattaattttggctgttcatcaaatgacatagcatacaacaaggtaagcaatgaactcttatttaatgtaacattgctttgcattaatcttgcatttctaaattattaaaatgctttaaacactccaggcctgatacttctggtgttaagcaatttgcaaaatgatatacta

SEQ ID NO: 330543 - DNA, 546 bp, Homo sapiens
ttgtaccccttatatttatataaataaaaaacccttaaaactcacaacctaataaaaaatgggcaaatgatgacttgagaggctgaggcaggaagatcacctgagctcagaatttctaggctgcagtgtgccatgatagtgcagctgcacttcarcctgggcaacagagtgaaatcccacctctaaaaaaaatggtctaaggatttgaacagatacgtttacaaaataatatatgtgaatggcaaataagtacaggaagaaatgtttcacatatttaggcagcatgaaaatgcaaactaaagctataatgagctaccactacatataggttagaatagctacatttaaaaaataatagagagtctggccatatcatatgttgttgaacatgtagggtaagtggagatgttattcacgatttttgagaatatagaatggcatcacaattttggctaacagtatagccaaaactattagtttcctaaaaagttaaatatgcattcaccatacacacagacattccattctcagatatttactcaaaag

SEQ ID NO: 330544 - DNA, 546 bp, Homo sapiens
ttgtaccccttatatttatataaataaaaaacccttaaaactcacaacctaataaaaaatgggcaaatgatgacttgagaggctgaggcaggaagatcacctgagctcagaatttctaggctgcagtgtgccatgatagtgcagctgcacttcaacctgggcaacagagtgaaatcccacctctaaaaaaaatggtctaaggatttgaacagatacgtttacaaaataatatatgtgaatggcaaataagtacaggaagaaatgtttcacatatttaggcagcatgaaaatgcaaactaaagctataatgagctaccactacatataggttagaatagctacatttaaaaaataatagagagtctggccatatcatatgttgttgaacatgtasggtaagtggagatgttattcacgatttttgagaatatagaatggcatcacaattttggctaacagtatagccaaaactattagtttcctaaaaagttaaatatgcattcaccatacacacagacattccattctcagatatttactcaaaag

SEQ ID NO: 330545 - DNA, 541 bp, Homo sapiens
tagaaaatgtaaactaatttatagtgatagaaagcaaatcagtagtttcatggaaatgggagtggaggaggaatggattacaaagagacatgaggaaatttggggggatgatgtatgtattcactttctttattgtggtggcaatttcacaagagtatgcatgtatcaaaacaaattaagttatatacattctacatgtgtgcttgttttatactttaattttatcttagccatttatgcctagtgttccactattggaatgctaagcatgtgggagctatttatatgctactgctcatggtcatcrccaagctttgattgcaaaaattcaaaaaaattgcaacctcaggcataaatgggttaataaaattatagttatataaaaactatacctatcattagatgataaaaagaagataaatttgacaaatttaaaagaattggcagaaaaaaatattttcaatttttttctaattttttaattatcctcctctccaattactcaagacaaactggaatttgatggtcatcagtgctgacc

SEQ ID NO: 330546 - DNA, 569 bp, Homo sapiens
tgcctgtctagtctaaggtgctgtccactgtacccctctggactccttatgaattatctcttcacattattataacaatttaatctcatatttcaaatagctagaagaagatacaatctgccctttcaaaacctggaagataaataaatcagctatatttaataaataaattcattctatctagtagtaaagtttgcaaagcggtttttttttcttttgggccccagcatgacacttagtgaattaattttggctgttcatcaaatgacatagcatacaacaaggtaagcaatgaactcttatttaatgtaacattgctttgcattaatcttgcatttctaaattattaaaatgctttaaacactccaggcctgatacttctggtgttaagcaatttgcaaaatgatatactaatgacctttcaaaaagttattrccacatctgctctttgtcaagtgcaagagcctagtatatagaaaataatattaagctccaagtgaatacaagataaaggaaaggaatattgggaaaaggttcagcagggttcaaaagaaggagattctcatgga

SEQ ID NO: 330547 - DNA, 644 bp, Homo sapiens
acacaatgaacttcaagatagaaatcgcatttgtttcactgttgtaaacctggtggctggaacatagaatttctcagtgttaacttgtcaaaagaaaaagttacaatgataaacactgtatccaattatttttctaataaccttgttatatttaacttaacactagaaaggcacagtgtagagtgaagtcgtaactaaacgaatagggattttcattcactcttgctgttctatcattcatagttgggtgagttttgagaagtcaaacttgctgagacttaggctcttcatgaataagatataaattacaataatagtcttacttcacatgttgaagattacttgagacatgtatgtgaaaatgtttgtgataggctatataagtattaggtttgttcttatcacttaaaaaaaaggtcacacatcaggaggcatgaaatccactttcraaagtaagtatgcaaagatccccaaattcgtttttttgctaaaagtgcttttggtaaattatcctctatatcatcatcaacaaatatttactgaactcatactggaaataaaatttctttccttgcatcaaaaacatttgcattttgggtgaaagcacaggaggcttggtattgtcaaatgcatttttcaattaa

SEQ ID NO: 330548 - DNA, 323 bp, Homo sapiens
gacatgatgggagtaacagtaataggatctaagtcacattggagtgtcctaatgtttcctagtggaagtaatcactgaatgcagactaaaagatgagcaaaaggtagatcccataaatctctgcatgtttgtgaaaggtcaatgtgaggaagtayagtgtagtgatcaagaactcaggctcaggacttctgttgctgacccagagggtataacagggactggaaaggctcttttgcctcaatcaatcaatcaatcaatcaatcaatcaggtagatactatatatataaagcaatggttttcaacaccctggaaatcaggcaac

SEQ ID NO: 330549 - DNA, 625 bp, Homo sapiens
agatgaaggcagagattggggtaatgcttctacaagccaaggaatgtgaaagattatcagcaaaccaccagaaagtgggcaagaagcatggcacaatagattctctctcacaaccctcagaaaaatcaacccttccaacgaatttatcttagatttatagtctccagaaccatgagacaataaatttctgttgtttgagccacctagtttctggtactttgttgtggaagccctcaaattaatstaatatctttctagttaagtcttgcacatccaagttacaggctatcttgcttttaatgttctattatgacttaagttctccagttgcgtttagtgtttggctacctaaccactctctaaaagagaaaataaatctattttctttggatttcacatatcattaagctgtacgtagtgcaagtggtcaaaaaatgcttaattgtatacactgtataaaatagtcttgtctcttctgtgattgagtaccttctgcatatgcttgtttgatgattaaatgagacgacttgtgaaaacaaaaagctagcctagagaaatctctccataagtgaaatttgcaaagacacagttgagtttagtgcaaaagaaatatgaaattagacaa

SEQ ID NO: 330550 - DNA, 625 bp, Homo sapiens
agatgaaggcagagattggggtaatgcttctacaagccaaggaatgtgaaagattatcagcaaaccaccagaaagtgggcaagaagcatggcacaatagattctctctcacaaccctcagaaaaatcaacccttccaacgaatttatcttagatttatagtctccagaaccatgagacaataaatttctgttgtttgagccacctagtttctggtactttgttgtggaagccctcaaattaatgtaatatctttctrgttaagtcttgcacatccaagttacaggctatcttgcttttaatgttctattatgacttaagttctccagttgcgtttagtgtttggctacctaaccactctctaaaagagaaaataaatctattttctttggatttcacatatcattaagctgtacgtagtgcaagtggtcaaaaaatgcttaattgtatacactgtataaaatagtcttgtctcttctgtgattgagtaccttctgcatatgcttgtttgatgattaaatgagacgacttgtgaaaacaaaaagctagcctagagaaatctctccataagtgaaatttgcaaagacacagttgagtttagtgcaaaagaaatatgaaattagacaa

SEQ ID NO: 330551 - DNA, 497 bp, Homo sapiens
atctctgcatgtttgtgaaaggtcaatgtgaggaagtatagtgtagtgatcaagaactcaggctcaggacttctgttgctgacccagagggtataacagggactggaaaggctcttttgcctcaatcaatcaatcaatcaatcaatcaatcaggtagatactatatatataaagcaatggttttcaacaccctggaaatcaggcaacaaaggatagtggtccctgggrtggggtggggaagagtaagctccatgattaccccagtgttatggactgaagctctaattctagtacctcagaaagtgactatatttgcagataaggcctttaaagaggtaattaaggtaaaataaggtcatgtgggtgagccctaatccaatatgactggtgtccttataagaagaggaaatctggccacagagaggaaaccagaaatgtgagcaaggaggaaaaatcatctgaggacacagcaggaaggtgggcatctgcaagccaag

SEQ ID NO: 330552 - DNA, 625 bp, Homo sapiens
agatgaaggcagagattggggtaatgcttctacaagccaaggaatgtgaaagattatcagcaaaccaccagaaagtgggcaagaagcatggcacaatagattctctctcacaaccctcagaaaaatcaacccttccaacgaatttatcttagatttatagtctccagaaccatgagacaataaatttctgttgtttgagccacctagtttctggtactttgttgtggaagccctcaaattaatgtaatatctttctagttaagtcttgcacatccaagttacaggctatcttgcttttaatgttctattatgacttaagttctccagttgcgtttagtgtttggctacctaaccactctctaaaagagaaaataaatctattttctttggatttcacatatcattaagctgtacgtagtgcaagtggtcaaaaaatgcttaattgtatacactgtataaaatagtcttgtctcttctgtgattgastaccttctgcatatgcttgtttgatgattaaatgagacgacttgtgaaaacaaaaagctagcctagagaaatctctccataagtgaaatttgcaaagacacagttgagtttagtgcaaaagaaatatgaaattagacaa

SEQ ID NO: 330553 - DNA, 385 bp, Homo sapiens
gcttgtttgatgattaaatgagacgacttgtgaaaacaaaaagctagcctagagaaatctctccataagtgaaatttgcaaagacacagttgagtttagtgcaaaagaaatatgaaattagacaacatgggtttaaactcttattaaytataaccttgagcaatgtacacaatctctctgtgttcatggagagattatatttcttcaagtttccttgtaatgattttgtgacatgttttaaagattattgtgtaatataagaaaatctattagcatagtgattaccacataactagtattcaataaggaacagttttatttttacccatttagtatgaaaatactatgctagatactgagtgggaattgagcatgtaagaagttt

SEQ ID NO: 330554 - DNA, 589 bp, Homo sapiens
caatgcatggcatgcagttatgcaaaaaatctgccaggttgtgaaagcattttctaagagctaataaacacaaccaaataacttatagctggtcccagatcaaggcagggggaactatccaaagggaaatatgygatagctagcattaatttatctatgagctaaatgttctgtattaaagtaagtcaatagaaaatgctttgctagaggacttagatttgggttcaatatgaaaataactcactgtattaccatattaatttttatttaaaattatattatcctaacagaagagcagagtttatgttatttcctgggtaacttttaaaattatataatctgccaggtgtggtgtctcatgcctgtattcgcagcactttgggaggctgaggcaggaggactgctggagcccaggtgtttgagaccagtataggcaacatagggagacctcctgtctacaaaatttttcaaagtttagttgggcatgctggtgtgcacctgtagtcccaactactcaggaggctgaggagggaggattgcttgagcccaggagattgaggctatagtgagctacgatcatgccactgca

SEQ ID NO: 330555 - DNA, 591 bp, Homo sapiens
gtccaatttgtttaatcctgtttgttatacaatcaaagacttatgtatttaggaagaaataggttctggcagtaaaacaggagcctatctaagtggttctaagcatttagtgaaaggccaccatttccacggcagggaaaggaagaccttttaccaatacagaaaaagtacatgatagtttacaaattccaaggcagaaaacataaggtttaggaatgaattgcctaaccaatggtaagaggggaaacaaaataaacygtaggcatattcataagagctataaccagtagcttatcccaagagctccagatattagaattaataattaaggcccagaaactagcagtgcagaggtaagcataataatttcatggttatcacattttatataactgactttccaaattgctctaatttttaaataaaagaaagtttcttttatttaaaagaatggaaagtgatgaaatcacagagtggcacacccattttttgtggctgaagagtttcctcactcatgttccttcaaaggctattttttgtaagtaatgataaaaaattggtacatctgtaattttatctgcaaatattatt

SEQ ID NO: 330556 - DNA, 591 bp, Homo sapiens
gtccaatttgtttaatcctgtttgttatacaatcaaagacttatgtatttaggaagaaataggttctggcagtaaaacaggagcctatctaagtggttctaagcatttagtgaaaggccaccatttccacggcagggaaaggaagaccttttaccaatacagaaaaagtacatgatagtttacaaattccaaggcagaaaacataaggtttaggaatgaattgcctaaccaatggtaagaggggaaacaaaataaaccgtaggcatattcataagagcyataaccagtagcttatcccaagagctccagatattagaattaataattaaggcccagaaactagcagtgcagaggtaagcataataatttcatggttatcacattttatataactgactttccaaattgctctaatttttaaataaaagaaagtttcttttatttaaaagaatggaaagtgatgaaatcacagagtggcacacccattttttgtggctgaagagtttcctcactcatgttccttcaaaggctattttttgtaagtaatgataaaaaattggtacatctgtaattttatctgcaaatattatt

SEQ ID NO: 330557 - DNA, 591 bp, Homo sapiens
gtccaatttgtttaatcctgtttgttatacaatcaaagacttatgtatttaggaagaaataggttctggcagtaaaacaggagcctatctaagtggttctaagcatttagtgaaaggccaccatttccacggcagggaaaggaagaccttttaccaatacagaaaaagtacatgatagtttacaaattccaaggcagaaaacataaggtttaggaatgaattgcctaaccaatggtaagaggggaaacaaaataaaccgtaggcatattcataagagctataaccagtagcttatcccaagagctccagatattagaattamtaattaaggcccagaaactagcagtgcagaggtaagcataataatttcatggttatcacattttatataactgactttccaaattgctctaatttttaaataaaagaaagtttcttttatttaaaagaatggaaagtgatgaaatcacagagtggcacacccattttttgtggctgaagagtttcctcactcatgttccttcaaaggctattttttgtaagtaatgataaaaaattggtacatctgtaattttatctgcaaatattatt

SEQ ID NO: 330558 - DNA, 660 bp, Homo sapiens
tacttgttctattagttatttttaggagagagctaagtctccatttataattgtgaatttgtctatttcccccttcagtttgatcagtttttgtttcaygtattttgaggctctattattaagtactctgaaattccagttcttcagatcaaaaatgaagagtcattctgggatatctctatcttattccacacatccaaattgtttttattttgtttgctctaactttaaaatatatccaggatctaattattttttaccaccttcactgttacaactatgtctaaattaccattatgtctcacttgcattgctgcaaaacctcctattgggccctcgatttctatcttggcaaggtagaaatgtttaagcttagtgaagaaggcatattgaaagttgagaagggccaaagctaggcttcttgcaccagttagccaaattatgattataaaagaaaatgtattgaatacaattaaaatgctactccagtgaacatataataatacaaaagcaaaacagctctatggccaatatggagaaagtttgagtgatgtggatagaaaatcaaactagccacaacactttcttaaggcaaagcttaaaccagagcaaagccataactctcttcaattctatgaatgttccagagaagtgaggaaa

SEQ ID NO: 330559 - DNA, 660 bp, Homo sapiens
tacttgttctattagttatttttaggagagagctaagtctccatttataattgtgaatttgtctatttcccccttcagtttgatcagtttttgtttcatgtattttgaggctctattattaagtactctgaaattccagttcttcagatcaaaaatgaagagtcattctgggatatctctatcttattccacacatccaaattgtttttattttgtttgctctaactttaaaatatatccaggatctaattattttttaccaccttcactgttacaactatgtctaaattaccattatgtctcacttgcattgctgcaaaacctcctattgggccctcgatttctatcttggcaaggtagaaatgtttaagcttagtgaagaaggcatattgaaagttgagaagggccaaagctaggcytcttgcaccagttagccaaattatgattataaaagaaaatgtattgaatacaattaaaatgctactccagtgaacatataataatacaaaagcaaaacagctctatggccaatatggagaaagtttgagtgatgtggatagaaaatcaaactagccacaacactttcttaaggcaaagcttaaaccagagcaaagccataactctcttcaattctatgaatgttccagagaagtgaggaaa

SEQ ID NO: 330560 - DNA, 541 bp, Homo sapiens
ctacagaatgtgcataattatcatttaatgcctacataatattctatgtaattggtaaaccataattcatttaacagttctcctattgctatgtatttaggtttttgctatcacaaataatactgctacaatcatctttgtgattattaaattatattacttttggagacagattcacaggaatgaaattactgrgtcaaggttattcgcattttagtggctcatgaaatgtaatgccaaagtgctttccaaagggatttacactgccagcagaaatatatatttgcatcagaaatattacattcttgccagaattaggcattttaatcttttctgtgtgttataactgaattgttacaaaatttattttgagtctttcatttttgatgctggaatacacacacacacacacgcacacacacacaccaaaatttaaaaataattgccatgagtttatatcaggatatacacagtataaacaattctctgacaacatctggattaacctggatgtaagagaatttagcttactattgcttct

SEQ ID NO: 330561 - DNA, 517 bp, Homo sapiens
tgatattcttttatagcagcctgagttgacaaatacaatagcagactggaagtaggtgagcaagtttctaagatagttttcaagacaagaaataatgagaattaacagcagagggcagataaagccataaaaaaaggtgaacagaaaaaaaataaacaatcatagtttctgagatgctttagatcaaaggactcaactcccctatatagctctttataactttcaagaacttcattagagtaccaacaaatgattcatgttcaaaaggtgtggtgggttaaattatgtgtgtatgtgtaccaagccagaatgtgagcaatataattttaaaagatggttaaaatattaaatacaggccaggagcggtggctyacgcctgtaatcccagcactttgggaggctgaggcgggtagatcacctgaggtcaggagtttgagaccagcctggcccacatggcgaaacctgtctctactaaaaatacaaaaagtcagccaggcatggtggcgaacgcctgtaa

SEQ ID NO: 330562 - DNA, 517 bp, Homo sapiens
tgatattcttttatagcagcctgagttgacaaatacaatagcagactggaagtaggtgagcaagtttctaagatagttttcaagacaagaaataatgagaattaacagcagagggcagataaagccataaaaaaaggtgaacagaaaaaaaataaacaatcatagtttctgagatgctttagatcaaaggactcaactcccctatatagctctttataactttcaagaacttcattagagtaccaacaaatgattcatgttcaaaaggtgtggtgggttaaattatgtgtgtatgtgtaccaagccagaatgtgagcaatataattttaaaagatggttaaaatattaaatacaggccaggagcggtggctcacrcctgtaatcccagcactttgggaggctgaggcgggtagatcacctgaggtcaggagtttgagaccagcctggcccacatggcgaaacctgtctctactaaaaatacaaaaagtcagccaggcatggtggcgaacgcctgtaa

SEQ ID NO: 330563 - DNA, 569 bp, Homo sapiens
agtcaagtgccacatactgatgatgtttcaatcagtgagagacgacacctataacgctggtcccataagattataataccatatttttaccataacttttctatgtttagatacattagatgcacaaatacttaccattgtgttacaactgcctggagtatcaccagtccagtaacatactgtacaggtttgaagcctaggagcaataggttatatatcttatagtctaggtatacagtaggctctagcatctagatttgtgtcagtacactccatgatgttcacatggcaaaatagcctaatgatgtgtttctcagtacgtccctgtccttaagtgatgcatgactgtattttagccactcagtctatggtagtttgtcactacatcccaagctaagacaagtttgaacagcgtttaccatcaccttcttgtcatgtaacttaggatatggggcaarcatcttctctgtgtctacgctaattgccatatccttttctacatttggatccattactaattaattttttatcctttgtattttcagtgttgtgaaatatctccaagaatt

SEQ ID NO: 330564 - DNA, 589 bp, Homo sapiens
aaaataaaaacccccatgactttcaaagtccacttcaaattaaatatggcatactgctgaatagatatatgaagattaaaaaaataactagcccaaaatagaaggttttcatacacaaatacgatttatgtagagatttcttttaacataattgcaatgattctgtgagaaactaaagtgaatgttttatttaagaattttkttcatttggtcatcacatttttgttgaacacctactttgtgctaggctttgttgtaagtgctggggacacagaaaaaaaaagacaatcctgccctcgaggagctcacagtctagtgggggaaacagataggttgacattgattttaaaattataaaaattattaaacaactttataaacttcacttgcaatcaaacaaactttgggtgttatgaatggatggtaaaaagggatgatgtccaatgcagtgaaaaaccatctgcttcgatatcatgtgacttctgcgaaggcagtgatgtggttctgcaaaaagaaaaaggaatgacaaagtgagaggcttgggaacattagctttgtaaaatatgtagtacctttacaaataatcatt

SEQ ID NO: 330565 - DNA, 537 bp, Homo sapiens
atcttctctctttttttatgtattagtcaagctagtggtctatcttactaattcatccaagcaacaaactcctggattcattgctcttttgtatggtttttcccatctcaatttccttcagttcagctctgattttgcttatttcttgtcttatgctagctttgaggttggtttgctctcatgtctctatttcctctagttacggtgttagattggtaatttgagatctttctaactttttgatgtgggcatttagtgctataacctgccctcttaacactgccttagcygtgttgcagagattctgatgtgttgtgtcttagttttcattagtttcaagcaacttcttgatgtttgcattaatttaattattcacccaaaagtcctttaggagctggttgtttaatttccatgtaattgtatggttctgagcaattttcttagtattgatttctattttcattgcactgtggtccaagagtgtggttggtgtgatttcagtttcttaaatttgttaatgattgttttgtgtccaat

SEQ ID NO: 330566 - DNA, 537 bp, Homo sapiens
atcttctctctttttttatgtattagtcaagctagtggtctatcttactaattcatccaagcaacaaactcctggattcattgctcttttgtatggtttttcccatctcaatttccttcagttcagctctgattttgcttatttcttgtcttatgctagctttgaggttggtttgctctcatgtctctatttcctctagttacggtgttagattggtaatttgagatctttctaactttttgatgtgggcatttagtgctataacctgccctcttaacactgccttagctgtgttgcagagattctgatgtgttgtrtcttagttttcattagtttcaagcaacttcttgatgtttgcattaatttaattattcacccaaaagtcctttaggagctggttgtttaatttccatgtaattgtatggttctgagcaattttcttagtattgatttctattttcattgcactgtggtccaagagtgtggttggtgtgatttcagtttcttaaatttgttaatgattgttttgtgtccaat

SEQ ID NO: 330567 - DNA, 605 bp, Homo sapiens
tgaatccgatctggcaaaacaagtatttggtgtaatttgtgagcaagaagagtatatttttacttgacttcaggagagcagcagatcactgcaacttattctgaacagtctctaaacattattgactagtacttagtattgtaataatactatgcataccaacctggaggtttgtaactgaggaccttgttcctttctttaactgtcttttttctctaatttttttacccagtgtggtatttctgcaatgagagtgaaatgcctaatttgttattgaaataaagtactgtataactttattataaacaactggcagattcttaccagtacaggcatacctcagaaatattgtgggttcagttccagaccaccacaataaagggaatatcaccataaagtgagtaataaagttttttgttttctcagtgcatttaaaagttatgtttaccctatactacagtctattaagtgagcaatagcattatgtcaaaaaatgtgcataactttaatttaaaatactttattgctgaaaatgctaatgatcatctgagtctcagggaatcataatatktttgctggtggagggtcttgcatcgatgttgctg

SEQ ID NO: 330568 - DNA, 620 bp, Homo sapiens
tggaggcataggaagcaaatttgaggaacaaaaattctttacatactcctgaagagaatttttaaatttttatatttatttcttaaactatgaataagtccaatttaaattacatttaatcaatttttaagctatgtattgaacaaatgaaacttaccaaagtttaactatttcatgacattatgactattccagaaaaattagaatacatatttgtcatataaataataacagttgtttaaggcactacttacagctaaaatggtgagtggtcaggtgacatgcgacccatgatgtgttacttcctattgactctggaatggctggttttacaaattaaagagagggctcctaggtaataatttctcattagtctttgttgatagattgtctagatttctttgaataaatgaaggcttctgcaacattgccctgcaggtagaaggcacttggcaaatcctcttcagatgatatattatgggatctacacacaattgccattttccagttctactttttttagactattaacctggagaaatagaataaatkgtttctacagacaaacatccaggttatagcttccattcacatttaagataaagtctaaacatatgcag

SEQ ID NO: 330569 - DNA, 484 bp, Homo sapiens
tttcaagaattactaacatttccaagactgtggcagcagagcattaaaccaagtgtcgggccctggtaagcctaggaacctgcataacgaaacaggtcacatactgtgtccaaagacctggattcacaatttatttgtgaattcaggaactgatttgctaagttagcttgtctccatggtcccatccagaatttagaattccacatcatgacagtataacatcttatgtttcttatatggaaaaggttataaccttcacttgctgtaacagaatttgatgatgtttttctctaaaagtgaattactcmccaaaatatcttccagtatttatagcatccttgccttaaagaaaaaaaaacaataatctcataaacgaaatttttgatttctatcacatatttctaaagaaacacgaagtaatcttgtctgttagaatttgcataagtccttctagaaggaaaaaaaatgcagctattacgtattt

SEQ ID NO: 330570 - DNA, 574 bp, Homo sapiens
cagaccagtagtcttcaaactagcctggggctacagaagaaaatttccagaaagtactctggtatgggtagtgtttttggttatcagtttctagatactaaattcctaaatctattcttttctaaaactgtccgcttgagaatattcctcctttctagaagtcatacctaattttctttctttccgttttacagtagatgctctctcactttaaaaaagagaggcatagctcttacacatctggaattttrctatggctaattgcctaagagtgcaaatccactagtcgctaaacaaagagaaaattaaaatgtttctcatatatatatatggggtgtgtgtttgtgctgtgtaattacaaatgctgcattcttgtcaatgttgcaatgttcagaataattttgggtgaggtagggtttatttcattttcatttagtgacctcaatctcatctgcctctggaagatcatcaaagaatgctttgctccagtgaccgtgtctcatgagagcaaagcaataagtctgttaagaaatgcggaaagttgtgatgctttattttatgcaaatgacaagct

SEQ ID NO: 330571 - DNA, 574 bp, Homo sapiens
cagaccagtagtcttcaaactagcctggggctacagaagaaaatttccagaaagtactctggtatgggtagtgtttttggttatcagtttctagatactaaattcctaaatctattcttttctaaaactgtccgcttgagaatattcctcctttctagaagtcatacctaattttctttctttccgttttacagtagatgctctctcactttaaaaaagagaggcatagctcttacacatctggaattttactatggctaattgcytaagagtgcaaatccactagtcgctaaacaaagagaaaattaaaatgtttctcatatatatatatggggtgtgtgtttgtgctgtgtaattacaaatgctgcattcttgtcaatgttgcaatgttcagaataattttgggtgaggtagggtttatttcattttcatttagtgacctcaatctcatctgcctctggaagatcatcaaagaatgctttgctccagtgaccgtgtctcatgagagcaaagcaataagtctgttaagaaatgcggaaagttgtgatgctttattttatgcaaatgacaagct

SEQ ID NO: 330572 - DNA, 574 bp, Homo sapiens
cagaccagtagtcttcaaactagcctggggctacagaagaaaatttccagaaagtactctggtatgggtagtgtttttggttatcagtttctagatactaaattcctaaatctattcttttctaaaactgtccgcttgagaatattcctcctttctagaagtcatacctaattttctttctttccgttttacagtagatgctctctcactttaaaaaagagaggcatagctcttacacatctggaattttactatggctaattgcctaagagtgcaaatccactagtcgctaaacaaagagaaaattaaaatgtttctcatatatatatatggggtgtgtgtttgtgctgtgtaattacaaatgctgcattcttgtcaatgttgcaatgttcagaataattttgggtgaggtagggtttatttcattttcatttagtgacctcaatctcatctgcctctggaagatcatcaaagaatgctttgctccagtgacygtgtctcatgagagcaaagcaataagtctgttaagaaatgcggaaagttgtgatgctttattttatgcaaatgacaagct

SEQ ID NO: 330573 - DNA, 314 bp, Homo sapiens
ggaggtccagccccttctgttcacaccccacacatcacagtcacctcatgaactatactcatggaggctcccttatagaccagagaaactgcaytggtctgagcaagacctttccttcctaacatcagtattcttttccagctacacggaagttgtatgttctaactgtgagtgggtgacaaatgcaggtctgaaataaaatagaatgattttgcaccatctaatcatgctatttgtctccccactctccccaccccccctttttttttaaaagattaatgggatagaggtgcagaaccgtgaagaggctgtgg

SEQ ID NO: 330574 - DNA, 512 bp, Homo sapiens
taaactgtggtacattcaaacaatggaatactattcagcactaaaaaaagagctgtcaggccatgaaaagatgtggaagaattttaaatgmatattactaagtgaaagaagccaatctgaaatggctacataccatatgattccagctacatgatgttctggaaaaggcaaaactatgaagatagtaaaaacatccgtggttgccaggggttagagggagggcagaggtggagcacagaggattttttgggcaatgaaactactctgtatgatactatagtgataaatacatgtcattatatatttgtccaaacccatgaaatgtacaacaccaagagtgaatcctcatgttaactatggactttgggtgctactgatgtacatattgatgtaggctcatccactgaaacaaattgaccactctggtgggggctgttgataacagagaacactatgcctggggaggggcagggaatatatgagaattctctgatcagttttgctatgatcct

SEQ ID NO: 330575 - DNA, 552 bp, Homo sapiens
aggtgtggccaagtctgcagtcaccagcagcaggggacagatgcaaaactcagagactgagcattcaccagaacgacagcccagcccatctcagccacaccacagcaggcaccagtccaggcacagagggtctcccatcacccagctgtcccgtgaggtggttagcctgctcctcaaccagataccactcaggggtaatagaaaggggaagagagaagagaatcaacatttattcaaagacacagttaccctgagagcagctgtttgaaaccagaagaggcacagcaacatttacttggcaagtctgtttctttggcctagtggaataagcaggtgcaaacactacaattttttcaactttctcggtaacagaatcctggttttcaactggrtacattgccttcaaaccagaagattggatttcccaacctctcttgctgcttaggtatgaccaggtaattaagttttggccaataagatgtaaagagatcccaatagctttgttctttttgcttaggattgcagtggctatttgggctcttttttggttcc

SEQ ID NO: 330576 - DNA, 552 bp, Homo sapiens
aggtgtggccaagtctgcagtcaccagcagcaggggacagatgcaaaactcagagactgagcattcaccagaacgacagcccagcccatctcagccacaccacagcaggcaccagtccaggcacagagggtctcccatcacccagctgtcccgtgaggtggttagcctgctcctcaaccagataccactcaggggtaatagaaaggggaagagagaagagaatcaacatttattcaaagacacagttaccctgagagcagctgtttgaaaccagaagaggcacagcaacatttacttggcaagtctgtttctttggcctagtggaataagcaggtgcaaacactacaattttttcaactttctcggtaacagaatcctggttttcaactgggtacattgccttcaaaccagaagattggatttcccaamctctcttgctgcttaggtatgaccaggtaattaagttttggccaataagatgtaaagagatcccaatagctttgttctttttgcttaggattgcagtggctatttgggctcttttttggttcc

SEQ ID NO: 330577 - DNA, 628 bp, Homo sapiens
gtacaatgttcctgatgtaatttctctgagttgataacagcaatgtgaaggcctgtgcattttcctcatcggagctctttgattcctccaaactttaataagttcaggggagtcagtgtcctccccaaggtcacaccaccagaaagctgtggagytggcatctgaaaccaggtgcgtttcattccagaattcacatttgtaattacaatgctatagtgcaggggcaggcaaactacagtttgcaggggccagatccagaccaccttctatttctataaagttttactggaggccaggcacagtggctcatgcctgtaatcacagcactttgggagactgaggcgagcagatcacttgaagccaggagtttgagatcagcctagccaacatcatgaaaccccagctatctctacaaaaaaatacaaaaattagtgggtatggtggtgcatgcctgtaatcccagctacttgggaggttaaggcatgataatcgcttgaaccggggaggtggaggttgcagtgagctaagatcacaccactgcactccagcttaggtaatagagcgagactctgtctcaaaaacaaatacataaataaagttttattggaacacagcctcaccatttgtg

SEQ ID NO: 330578 - DNA, 628 bp, Homo sapiens
gtacaatgttcctgatgtaatttctctgagttgataacagcaatgtgaaggcctgtgcattttcctcatcggagctctttgattcctccaaactttaataagttcaggggagtcagtgtcctccccaaggtcacaccaccagaaagctgtggagctggcatctgaaaccaggtgcgtttcattccagaattcacatttgtaattacaatgctatagtgcaggggcaggcaaactacagtttgcaggggccagatccagaccaccttctatttctataaagttttactggaggccaggcacagtggctcatgcctgtaatcacagcactttgggagactgaggcgagcagatcacttgaagccaggagtttgagatcagcctagccaacatcatgaaaccccagctatctctacaaaaaaatacaaaaattagtgggtatggtggtgcatgcctgtaatcccagctacttgggaggttaaggcatgataatcrcttgaaccggggaggtggaggttgcagtgagctaagatcacaccactgcactccagcttaggtaatagagcgagactctgtctcaaaaacaaatacataaataaagttttattggaacacagcctcaccatttgtg

SEQ ID NO: 330579 - DNA, 585 bp, Homo sapiens
ttgggcataatctctgttgctcaaaaaccaaagctgtcacatcctcctcttttgtgtaacagctgcctgcaaacaaactagagaccatgggtcatcgctatagaagctcctctacttatgagttttcaacctgtgaacacaagtattcaccaaaaccacctcatgccagcgtcgcagtccatcaataattccctctaccagagggcatctgcagttactttgcagcaggggttggcaaacccatgactcaagggccaaayctggtccactgcctgtttttttagatgaagttttattgaaaatcagccatgccttttatttatatatggcctatggctgcttttgcatgacagtggccgacttgaatagctgggacaagcactgaacagcctgcaaagcctaaaatatttactatctggccctttataggaaaagtttgccaacttttgctttacagtcattttagccttcagaacaactggacatatatctacccacagaacctaagcaaatagacctatttgtctattaaaactctccaaatcaatcattaagaatgaggctattgtccaacctatgtaatgg

SEQ ID NO: 330580 - DNA, 585 bp, Homo sapiens
ttgggcataatctctgttgctcaaaaaccaaagctgtcacatcctcctcttttgtgtaacagctgcctgcaaacaaactagagaccatgggtcatcgctatagaagctcctctacttatgagttttcaacctgtgaacacaagtattcaccaaaaccacctcatgccagcgtcgcagtccatcaataattccctctaccagagggcatctgcagttactttgcagcaggggttggcaaacccatgactcaagggccaaatctggtccactgcctgttttttyagatgaagttttattgaaaatcagccatgccttttatttatatatggcctatggctgcttttgcatgacagtggccgacttgaatagctgggacaagcactgaacagcctgcaaagcctaaaatatttactatctggccctttataggaaaagtttgccaacttttgctttacagtcattttagccttcagaacaactggacatatatctacccacagaacctaagcaaatagacctatttgtctattaaaactctccaaatcaatcattaagaatgaggctattgtccaacctatgtaatgg

SEQ ID NO: 330581 - DNA, 585 bp, Homo sapiens
ttgggcataatctctgttgctcaaaaaccaaagctgtcacatcctcctcttttgtgtaacagctgcctgcaaacaaactagagaccatgggtcatcgctatagaagctcctctacttatgagttttcaacctgtgaacacaagtattcaccaaaaccacctcatgccagcgtcgcagtccatcaataattccctctaccagagggcatctgcagttactttgcagcaggggttggcaaacccatgactcaagggccaaatctggtccactgcctgtttttttagatgaagttttattgaaaatcagccatgccttttatttatatatggcctatggctgcttttgcatgacagtggcmgacttgaatagctgggacaagcactgaacagcctgcaaagcctaaaatatttactatctggccctttataggaaaagtttgccaacttttgctttacagtcattttagccttcagaacaactggacatatatctacccacagaacctaagcaaatagacctatttgtctattaaaactctccaaatcaatcattaagaatgaggctattgtccaacctatgtaatgg

SEQ ID NO: 330582 - DNA, 589 bp, Homo sapiens
aacttttgctttacagtcattttagccttcagaacaactggacatatatctacccacagaacctaagcaaatagacctatttgtctattaaaactctccaaatcaatcattaagaatgaggctattgtccaacctatgtaatggatttgcattgcatartacttttctgggatagcaccttagctcaacagtaacttggtgacagccactgcttgatacacacaaaaccatcctcctctcatctccacggcagacatcactaatcaattgtggcactctttcttgccaaggccagggatgacctctgaatccttctcaacacagcggttcagtcatctactaccaataaatcagagttatccaaagaaagaaacccgcctgtcattatgggttgtgatattggagcaagactttgagagatgttttgagtgttgctagctaatttcttcccttgaatcccataacttgggcccatgtccacacttaaggccaagagctgacttgattttcacgtttggttcagagaaggtggagagaggctatatttgtcccatagtgcttcctcaaagtctgtacttagatttgagaa

SEQ ID NO: 330583 - DNA, 589 bp, Homo sapiens
aacttttgctttacagtcattttagccttcagaacaactggacatatatctacccacagaacctaagcaaatagacctatttgtctattaaaactctccaaatcaatcattaagaatgaggctattgtccaacctatgtaatggatttgcattgcataatacttttctgggatagcaccttagctcaacagtaacttggtgacagccactgcttgatacacacaaaaccatcctcctctcatctccacggcagacatcactaatcaattgtggcactctttcttgccaaggccagggatgacctctgaatccttctcaacacagcggttcagtcatctactaccaataaatcagagttatccaaagaaagaaacccgcctgtcattatgggttgtgatattggagcaagactttgagagatgttttgagtgttgctagctaatttcttcccttgaatcccataacttgggcccatgtccacacttaaggccaaragctgacttgattttcacgtttggttcagagaaggtggagagaggctatatttgtcccatagtgcttcctcaaagtctgtacttagatttgagaa

SEQ ID NO: 330584 - DNA, 667 bp, Homo sapiens
gggtcttgttaaaatacagagtctgatttcttcagcctggggtgagacctgagactctgcatttctaaacaaatgggatgagatgtcaaggctgccagcctgtagaccacactttctatggcaagaatttagaaaacagaataaaagcatccctctgaagctaccatagaagtggaggcccttgaatcactttctcaaacacgactgacgtagaaacccaggaccccgggcctggcttcctgactgatgttgaaagaaaccatacttaacaacaaacaagggaattatacttcacaagcctcattatatttcctgttattttaactatcattgtaattaaactcaaagatttaccacacacagctcactttggcacattgtacacactttgattttcagcatattcaacctactctggtgcccttgaaattcatttgtcaaacaaagggatgtcactggctataaatcataagagcactttattaggcaaagctcccaactctcttgtgccaggtttgtcaagaaacagagcatttcgatatgttctaaattgtatgttgttctcatgctcctggccactggcatctgccgcacagaagacttaaaatcaacatggaatgatagtgccttggagctrgcagggatcttgtatttctcggctccaaac

SEQ ID NO: 330585 - DNA, 578 bp, Homo sapiens
tgccttggagctagcagggatcttgtatttctcggctccaaacccatttattgacagacaaagaggttgaactcagagaggttaagtaagccacacagctcacttttttgagagccacacagcaaggtacatgcaggtactagaattggtgattcctgaattctgagcctgaaagctttcatttttcaataatgattctcaaactgtggcccatcctggcactggttcatgaactattttttacctgtctaaaacgagatcaataaagaaaytgagaatatgtttactaacttttacagcaagttgacactgctgagacatctgagcatagggtctgtggcgtgtctcaccaaaccaggtataggtcatttggggtgcttgctccctggtaaatttggtgtggcccaagctgcgttggaagtaaggccatgaacagatctatgatgaactggaaataaagcctagtactggccaggcggggtggctcacacatgtaatcccagcactctgtgaggccgatgcaggtggaccacctgaggtcaggagttcgagactagcctggccaacatggcaaaacc

SEQ ID NO: 330586 - DNA, 590 bp, Homo sapiens
gaaaaagttaattggccagttctgaatcaatgaattctttctgaaactttggaccaaatcagcctattttccaggaggatcatctaatcctgagggatgtggggtacatgggtgggtgtgttggggtggggaagacaatcagcagccagtaaggttttttccattttctcttccctcaccatttcttagtctacatgcatccccccaggatatgcctcttgtcaacatactactccatctggggttgattggcttctccacatgaatttcgtgtgtaacttgggtttactaattcaaaggaattcttgctatttctggagagagttaatatgcaatgaatcaaaaaggaaaaaccatgtcctttccctgaaggtagkgaaataatccacaggcaatgctagctctctttggcagacagtatatttaaaagaataagaaaagaggtgacttaaaggtggaaggaaatttattttggagtttctccaagtggagtcaggagattgaactagaaaagtcagaagtggatgttgaaaactctggatgtttttgttacatgggtctcgtcccttgcagcccagactcacagctgc

SEQ ID NO: 330587 - DNA, 627 bp, Homo sapiens
caaaaatgtgatagtttcataatttcaggattagttgatcaccaaggaatatatcaaggaaaagctgctctagattcaatcccttttaatataaatttgtattcattccactgcatcaatatgcacttaaaaacatactttttctataggtaatttcttccaatctaatcatagacttggatgcaaggcagattcataacccctcccatatctctactaacacttatgtgttcttaatccacagactgagatttagaagtgaattcttgtcacaaagaagttctaaaatgaagggagttccagaagaarttacttgaaagttagctaaagcaaatagtcactctctgtacaactaactaaaatcaacaacaatcaggcaagtgtgttcagctaggtacgtattaatgcttattctgtccgcaaaagacaagttgccacttagttggccgaaagatttatttgtcattatgaaatgcagtatctcagcagacaccctacgggtcaagtcttgattgagactctactatctgtccctatgcaatgagaaagcaggaagaattataataggacatggtggcaaaggctgataggttatttaaccataacctgattctactgctcccctga

SEQ ID NO: 330588 - DNA, 627 bp, Homo sapiens
caaaaatgtgatagtttcataatttcaggattagttgatcaccaaggaatatatcaaggaaaagctgctctagattcaatcccttttaatataaatttgtattcattccactgcatcaatatgcacttaaaaacatactttttctataggtaatttcttccaatctaatcatagacttggatgcaaggcagattcataacccctcccatatctctactaacacttatgtgttcttaatccacagactgagatttagaagtgaattcttgtcacaaagaagttctaaaatgaagggagttccagaagaaattacttgaaagttagctaaagcaaatagtcactctctgtacaactaactaaaatcaacaacaatcaggcaagtgtgttcagctaggtacgtattaatgcttattctgtccgcaaaagacaagttgccacttagttggccgaaagatttatttgtcattatgaaatgcagtatctcagcagacaccctacgggtcaagtcttgattgagactctactatctgtccctatgcratgagaaagcaggaagaattataataggacatggtggcaaaggctgataggttatttaaccataacctgattctactgctcccctga

SEQ ID NO: 330589 - DNA, 617 bp, Homo sapiens
actctgttttttaaatttttgaaataattttagatttacctaagaatttcaaagacaatatagagagctcctgtatgccatttacccagctttccttaatgtcaatatcttatatttccatgatgcagttcattaacaaattaataatgacaaaacaccattagctacactacagactttattcagatttcactagtttttccaacaatgtcctgttttctcttctagaatcaagccaggaaaccacactgcatttaatcattatgtttccttaatctccttcagactatgacaattaatcagtctttcagaaggatcctttaattctcacaatccaaacaatgtgggtttttccaaattataaacccattctataggtgaaaaaactgggtttcagaaataagaagtgaatactgagggtcacatttaactagaactaggataagaacctgtgtctgctgyctaatcaggaatcattctatcatgccacatttatatcttttctcctcttcatttggactctttcccatcccttctcttctatcatttattttctgatgttttcctttatctgctcactttctccatgtttaaggcttcttccctaccatatgtag

SEQ ID NO: 330590 - DNA, 633 bp, Homo sapiens
atggtctagacacacagatttacttgccattttccaaacttattccatcttttgcacctttagctctctgctcacctcatctctatcagttaacattgaaaatctggcctttcctattgaaccatcaattccctgttcaagcgtcactctccctacgaagtcttctactttcttctttcctctgaaaccccaatgttgaattaattcttccctccctatcaaagtgtgagtctcaatattctgcagcactttgcttttactctctcttcccaactagattatacatttcttgagggcagaaattttgtcttactggtatttgtatatctagcacccagcacaaagcaatgactaataaaggtttattgaatttttaratagatatatggctcattatacagatcgatatgtcaaatctctacttgacttgttgtccaaagctttaccagcaatgatttaaagctttaatggcagcttggaaaatggtaataaggttgttttaaatagcatagttgttgaggctacttgtcttccatagctaatgtcattgagggctttcatagacccatttattccacaggttcaccttgaaaactagctcatgtcaacaaagtgctagtacctaagtaaaat

SEQ ID NO: 330591 - DNA, 527 bp, Homo sapiens
atgagccagccaaggaatgcagggagcttctgaagctagaaaaggcaagaaaatggattctctcccacagcctgcataaggaactcaccctgccaacgccttgaaactgattctagacttcttgcctccagaactgcacaataataaactgcattattttaagccaccargtgtgcagtcatatgttacagtaagcagaagaaattaatgcaatccttattgctctttgagccaattaaaatctttgagaatttaagtgttaagcctttcttacagtctttttttcttttcttctttctaaaatagagtaatggaatcctaggaaatgggacctcaaacagctctgcagaggttgaaaactattttacagatgtgggaatagagcccatacatggttttatgagttgcccaaacccagctcagattaggatttaggcctcctgacttccagcacaaagacctttccactacattttcctgcttccagaaattcactgtttccctcttttctattccttaacatttgg

SEQ ID NO: 330592 - DNA, 587 bp, Homo sapiens
ctgtttagtcaaacaagcattccttagctaaaggaatcccccccaaaatctcacaaaaatcatctccttatctttgctagtttgttgcaagaatgctaagcctgagtctcttaagacctgagaaatatattatttctttcaattttttttttatcagcctcaaagtcaactgaggaaggrgatgacgtaaggcaggagggaaaaggcaatgaggactaaaagaggaagcaaagatcactgtccataaaaagctattcagatcactagggaggcaagattttaaaacaaaaaaagaaaaagcataagttacataagaacataacacaaagtcacattaacacagaggacaaagtatagcacttgagtggtgcatattcaatagcagtagcttatagatctgggtctggtctggctttagctgattatcctgtgatttcagctccatttcttgccacacactcactcatagactacatcctcccaccttatcaaagtacctgtatgtccctcccgaccaccttctctccccaccatgccctctctttcatttgtaatgtggatccttctgcctggatttcccttcatct

SEQ ID NO: 330593 - DNA, 630 bp, Homo sapiens
agtaggtactttacaaaatggtcccttaattctattgcatcttatgttatttgctttatcgtgaatgcttattttttaactttttcttcacgataaatctgtccttttctttaaatcatgaaccataaagtttcccctcatgcattctctgaagtgcttgattcagtgctaagcttgtgctgtatgtccaccattaatatggtgattaattatttcagaaaagcaaaggtcccttatcccackacttgaattccttaagcatttagaactcagcgattaatttcttacaggataggaaatatataacacatcataattctcattgggtgcttatattttagtttgaatgagttatctgattctatctgttctacgaaaatatatggtatatattagtctgttctcacactgctactaaagacaacctgagacgaggtaatttataaaggaaagaggtttaattgactcacagttccacatggctgaggaagcctcacaatcatggagaaaggcaaagaaggagcaaagtcatgtctgacatggcagcaggcaagaacatgtgcagaggaactcccctttgtaaaaccatcagatctcataagacttattcactgtcacaagaacagcatg

SEQ ID NO: 330594 - DNA, 595 bp, Homo sapiens
gaggctgttcttcagttgtgagaaaggtgaagtagtagagttcactagaatttctataatgaggatgcacagattccccccactccaaaaattgtttttttaacttactaatttaaatgttaagtgctacatttcctatattgtttaatggttcatgtttttctttgacgtaatttggacaagtactgttgacacatgttctcatattatttggtttcctggaatacctagccttctcattgaacaaaggcatttctgatacaatgttttaccttcaaatcataaaatactaatgtgtattttatatgctattaagctgtattacaatgcagtacatctgaagcttttcttatacgtgcatatcatatacattcatgaaatcatctctctacatagctaactctaccttgtcatttatgactcaatttgatatcattttcaccagaagtctyccctgaccccccgtcccacctgtattgcatagcatgttttctttaccccggtgatctctcttccacatgtaacatggtgtgatcatcatcttgtcctagatcctggtctcccccacacctagcataggagctccccaaaagca

SEQ ID NO: 330595 - DNA, 547 bp, Homo sapiens
agacaaaattcagactatctttgcattctaaaacaaaattctccactggaaagttctcacaaaagaatttctttaaagagatrtaactaatataagagatttgtggacaaatttgcatatttatttttttctttgttccaaaacgtttcttatgggacactttgtagtaccctatgatcaaggagtttagattgcagtggtcactatctgacttttgtttaaaggatatttttttaaaaggatgtatcagattttcaagcataaaaataatgagaaaatccagttttggcagagattggggaaatggctgctctcaaatactgctgttagaaatattaattagtacaatctctctagaggacaatttggcaacacgtatgagaagctataaaaatatgcattccctgccacccattaattccaattctaggaatgtaaatcaaataatgaattagacaagtatttatgcaaagttgtatataaaagcatgttcaactcagtaatcttagttctagctaaaactcaaagcaatgtcatcaattacaga

SEQ ID NO: 330596 - DNA, 534 bp, Homo sapiens
tggagtatacataactctgacttagagggaaaaaagtttattcataagagggaggagagttttggaagatgagattcccagggcctgaaggcagttgagaaccacctatccccttaaagttgggaggataagcggggtagaggaagctgatattttttttcttcacaggtggagtatgatgagtgactgcccaacagatgtgtaatgggactctgccacatgatagacagcagaggagacagggaagcatgggatgtctaggaacttccagtatcacaacccacaagtggcatgggagaaattcagaagtgcctgcttgccaaagagatacatgtagattagttgacaaaaaggcttgagtcacaggcccaggatgtcacgtgatcaggagaggtgcggtctccccaagtggatgtggagggtattattgctggctggttccatagctaaaaatgtctgaggaagaygagcacagtggagagtgctgtgtggaaacggaaatagcttctcagcgcagccaggcagaggccgagg

SEQ ID NO: 330597 - DNA, 575 bp, Homo sapiens
ctgggtgtcagctggacctgcaagccccctggcttatgctccttgtcctgccagatttcgctacacaacaccaattcaaaggtaacattattatgaatttcaagagagtgtccacagagcgttataccccaagtcttctgagagtgggatcttacgttgctgccttagttgtatgtccatgaaattgacactggccttaatatcaataacctcaaaagaattgttctaagctagtggtttgggtcagtttttgcaartgactagactatagacacaaatgtgattggattttctgagtattagttgagtagtatcagtttcaaaaagggcaaaacaaaaccacaaaaatcaaacaacatacacacacatacaaataaaccataaaactacacacacacacacccctattaacagtaggagcaactactattatttgggaaaccacttagtgtggtttaattaagattaagataaccaccccccaccaacacccacattctgaattctataattcttcttggttctctgtacagaagttttatgtctctcacttttttctcccaaattttctcaac

SEQ ID NO: 330598 - DNA, 544 bp, Homo sapiens
tgtgtgagaacaaaaatcattagtttccatttgcaaacagcataaggaatctcctctctgactcttgtggtttaaaggtaaacacacaatggtgatgttagtgacctgccagctagcgtacattttttcatttatcaaatcattaagtcatagctatggagagaggttggactgttggtccacttaggtcattccatttcccatccctgctcctcctgacttgtacaaagccatcccctccctcttctaacggattgcccggctccctgaacgcctggcttgctggcacctggctgtgcccattagttcccaggcctaatggatccttgttcatttgatttgggatgaccccactaaacttgaatgttagataaattcttgtgttcagaaccattgctcaagtgtgtacagcataatcagaaatagatctattaaggacaataaatcacccaaagtcactcttgacyttatttctgggcattgtttcactatgtccccactggctatgaagcggggttcttcattattgtccctttttttgtgg

SEQ ID NO: 330599 - DNA, 518 bp, Homo sapiens
gagatctgtccagagggggtaagccctatggcagtgaagggagaggggcatccaccaaggtcgcctcttttggcagtctttctatgatcagaggctgagcagctaggcttgaaagctaataaagctttgagagaggagaagttaaatgttaagtcatacttttcatttaaaggtgcttacagtagagagacgcaattaccattatcctcgttaacaggtggcacaggcagcccccacgacaatgtttttgtaccagccctaaaggcaatgatagagtgatattgaacttttccatttctgaaagagagagagggtgtgtgtgtgtgtgtgtgtgtgtgtgtgtgtgtgcgtgtgaaaaagaagtttgtattttgtttgataattttggcttarggactgaacaaattatctcaacccacaggatccctcataaattctttgtgtgtgtgaatatatatatatatatatatattaattattataaattttaaaaatctttgtgggtagatagctaataa

SEQ ID NO: 330600 - DNA, 541 bp, Homo sapiens
cttgccgagggctctcctggctccttagccttccctggcggaggactcctcacgcacagtcttcttcccttcctcctcagcttatgtggtgtttcctgcttctgacaagagcccaggtgtctgggcttctctttaacacccctgacccacttgccctgtgtggctgcttgccaggttactgttgagtttcagtgacactctcaccactgcagggggctccctgcctgctggctgttcacacagcactcttggcctgcccagacccagctcacttgacacactgttgaaatctcttctgcttactttgtagatttactccctcccccgctctgaagtattgaccctctgtggaagttctgaagctctcaacattctgattaacaaagccaggctgagaaaaaaaactctaacaagctcaagaaaactaaggtgctgccattcatgggctatttctcccacctgctcagatcstctttggcctggccatgctgtgccttgttagaggggctgtagcttcttcatggcttccaacagagcagga

SEQ ID NO: 330601 - DNA, 581 bp, Homo sapiens
gtgtgtgtatgagcgagtggtgaggatggtgagctagaagaaagatggacttgtggcaactctcctcctccttcctamaacagctgtgtctgacatttccttgcctggtttttacctctcctccatatcccaaccttcccctcagatgatcaggactttagatcaccttatttgagaaatggacgtaggttcaacacaggatttgatgagtgattgcattcatgccgtttggtgttattgtagatttactacgccaaaattttacattctattactctgaaactgatctgcaattataattataaaaaataatattctcatccttattccaaacaatttgcttaaaataacactttcagtatgtcatatctattgatcaatatatagacaacataataatggtgaagactgtaaacttcttgacatataatctatatctgattcacatttgaagtcattaaagcacacagcacaatgacctacagaaaatataatttcacactgagatctattttttaatcaatagtaaatcattactaaatataaaccatgacatagcacatatactttcaaagtattat

SEQ ID NO: 330602 - DNA, 627 bp, Homo sapiens
gcacatatactttcaaagtattatcatgtagagtctcatacaatcacctcattttatacattcccttctactcataacaaattaagtgaataatgtgttttaagggcaaagatgtctaaaatactttgagataaacagctcgtaattcatccaatgtacctttccatcaccatcttggcatgaaggaaaagcatgaaaggacttatttttgcagaggaagaaatttaaagatcaaattctgtgccaaaaattgtacacaaagaaagagcaccctaaaaccagatgcctattttctgtatttcattatttttattgataaggatagattacatgacatctacctcttacaaatgtttaaatgcccaatataatataattaactataaaccgagattgtacagcagatctctagaacttattcatcttacataasagaactttatactccttgaacagtgactcctcatttccccctccctgataacagtggtttgactctgtcagcgtctatgagtttaactcctttagattcctcatgtaagtggaatcatgaagtatttgtcctgtgagcagcttacttcacttagcatcatgtgattcaaagacatctctcactactatgtctat

SEQ ID NO: 330603 - DNA, 603 bp, Homo sapiens
aagacacatgcacacatatgtttattgcagcactatttacaataaccaagacttggaaccaacccaaatgcccatcaataatagactggataaagaaaatgtggcatggagtcttgacattcatatatttaagttagggagagatggaaaggagaggaggagyggggagagagagattttaagaaaccatttaactgtttacaacatttatagttcattttactcactagtgacaatgagaaagaaaataaaaatgctcccatctgggattgagcatagttgaacatactgtgttttcctaaacccactgttaattcaagggtagttttgtatgtttacaccttttccttggtgagctatctctatagcctaaatcttttgtgaagataaaacatcctggtgttccactaatgtccctttaagcatgctccttctctgtttctacacaactactgagcagttgcctttcatgttttctacgacttcgagtaaaaatcccccgcttcttccatcaaggtctgcgtagctcctctctcccgcagcctctgggtgtcccgttctcattttctctcttccctcaatcttactcctctttgctataaa

SEQ ID NO: 330604 - DNA, 603 bp, Homo sapiens
aagacacatgcacacatatgtttattgcagcactatttacaataaccaagacttggaaccaacccaaatgcccatcaataatagactggataaagaaaatgtggcatggagtcttgacattcatatatttaagttagggagagatggaaaggagaggaggagtggggagagagagattttaagaaaccatttaactgtttacaacatttatagttcattttactcactagtgacaatgagaaagaaaataaaaatgctcccatctgggattgagcatagttgaacatactgtgttttcctaaacccactgttaattcaagggtagttttgtatgtttacaccttttccttggtgagctatctctatagcctaamtcttttgtgaagataaaacatcctggtgttccactaatgtccctttaagcatgctccttctctgtttctacacaactactgagcagttgcctttcatgttttctacgacttcgagtaaaaatcccccgcttcttccatcaaggtctgcgtagctcctctctcccgcagcctctgggtgtcccgttctcattttctctcttccctcaatcttactcctctttgctataaa

SEQ ID NO: 330605 - DNA, 603 bp, Homo sapiens
aagacacatgcacacatatgtttattgcagcactatttacaataaccaagacttggaaccaacccaaatgcccatcaataatagactggataaagaaaatgtggcatggagtcttgacattcatatatttaagttagggagagatggaaaggagaggaggagtggggagagagagattttaagaaaccatttaactgtttacaacatttatagttcattttactcactagtgacaatgagaaagaaaataaaaatgctcccatctgggattgagcatagttgaacatactgtgttttcctaaacccactgttaattcaagggtagttttgtatgtttacaccttttccttggtgagctatctctatagcctaaatcttttgtgaagataaaacatcctggtgttccackaatgtccctttaagcatgctccttctctgtttctacacaactactgagcagttgcctttcatgttttctacgacttcgagtaaaaatcccccgcttcttccatcaaggtctgcgtagctcctctctcccgcagcctctgggtgtcccgttctcattttctctcttccctcaatcttactcctctttgctataaa

SEQ ID NO: 330606 - DNA, 574 bp, Homo sapiens
gctccatgtggccacagccctgattctgcatgagctgcaatatctgtcctgacactacctcctctgcaggtggcacctgcccaccttcagtgtcctgtctttcttcctttactttttttttttttttttttgagatggcttcttgctctgttgcccaggctggagggcagtggcacaatcttggctcactgcaacstctccacctcccaggttcaaacaattctccggcctcagcctcctgagtagatggcattacaggcacataccaccacggctggctaattattttgtatttttagtagagacagggttttcccatgtttgccaggctggtcttgaactcctgacctcaagtgatccgcctgccttggcctcccaaagtgctgggattacaggcatgaaccactgtgcctggctacttcctttacttcttagtcatgttcttcctcaagtatcatctcctttctgccacaccaacaccagccatgctgattcttctcatttgagtctttccacaaaggagtattgccagttaatggagatacagaggaggggctttaataggcaaaaccga

SEQ ID NO: 330607 - DNA, 585 bp, Homo sapiens
agctgctgctggcggttatggtgctaaactcagaggctgacatgagggcaaaagactcttcaggatataggattaaaccttattttttttttttagcatattggaatwtaacgattaagagaagattacccactagtgtattttatttgttcataaattattccaaacttaagacaactaaaactacgaatattataattataagtagataaatacaagtggaaaattattttctgaagtatattttgcaaaatggttcaatcagtcagggtatttacaaaagacaatccaaacactctacagttataattacatcattaagtatatacagtaattgagacatcactttatgtggccttctaaaaacagagatacaagttttaaaatctgcccttccaaattatgcctgagccacaacaaaagccagagggagatggaaccactgtgtgtcgttatgaaggacaagagtccatcagttgcttttcattaactgaactgtctctttggaaactaggggcgaatatcattctgttttgcttcaggtctcttttttttttcttttcagggtaagaaaacattgattgc

SEQ ID NO: 330608 - DNA, 585 bp, Homo sapiens
agctgctgctggcggttatggtgctaaactcagaggctgacatgagggcaaaagactcttcaggatataggattaaaccttattttttttttttagcatattggaatttaacgattaagagaagattacccactagtgtattttatttgttcataaattattccaaacttaagacaactaaaactacgaatattataattataagtagataaatacaagtggaaaattattttctgaagtatattttgcaaaatggttcaatcagtcagggtatttacaaaagacaatccaaacaytctacagttataattacatcattaagtatatacagtaattgagacatcactttatgtggccttctaaaaacagagatacaagttttaaaatctgcccttccaaattatgcctgagccacaacaaaagccagagggagatggaaccactgtgtgtcgttatgaaggacaagagtccatcagttgcttttcattaactgaactgtctctttggaaactaggggcgaatatcattctgttttgcttcaggtctcttttttttttcttttcagggtaagaaaacattgattgc

SEQ ID NO: 330609 - DNA, 585 bp, Homo sapiens
agctgctgctggcggttatggtgctaaactcagaggctgacatgagggcaaaagactcttcaggatataggattaaaccttattttttttttttagcatattggaatttaacgattaagagaagattacccactagtgtattttatttgttcataaattattccaaacttaagacaactaaaactacgaatattataattataagtagataaatacaagtggaaaattattttctgaagtatattttgcaaaatggttcaatcagtcagggtatttacaaaagacaatccaaacactctacagttataattacatcattaagtatatacagtaattgagacatcactttatgtggccttctaaaaayagagatacaagttttaaaatctgcccttccaaattatgcctgagccacaacaaaagccagagggagatggaaccactgtgtgtcgttatgaaggacaagagtccatcagttgcttttcattaactgaactgtctctttggaaactaggggcgaatatcattctgttttgcttcaggtctcttttttttttcttttcagggtaagaaaacattgattgc

SEQ ID NO: 330610 - DNA, 585 bp, Homo sapiens
agctgctgctggcggttatggtgctaaactcagaggctgacatgagggcaaaagactcttcaggatataggattaaaccttattttttttttttagcatattggaatttaacgattaagagaagattacccactagtgtattttatttgttcataaattattccaaacttaagacaactaaaactacgaatattataattataagtagataaatacaagtggaaaattattttctgaagtatattttgcaaaatggttcaatcagtcagggtatttacaaaagacaatccaaacactctacagttataattacatcattaagtatatacagtaattgagacatcactttatgtggccttctaaaaacagagatacaagttttaaaatctgcccttccaaattatgcctgagccacaacaaaagccagagggagatggaaccactgtgtgtcgttatgaaggacaagagtccatcagttgcttttcattaactgaactgtctctttggaaactwggggcgaatatcattctgttttgcttcaggtctcttttttttttcttttcagggtaagaaaacattgattgc

SEQ ID NO: 330611 - DNA, 498 bp, Homo sapiens
tccctgaaaaacattcattgtacaggaagtgagacattcacagcccctgtgtggggaagagacggcctcacagagggatggaaagaccagagcagggccttagtccatggaatcttacctcactacttttttttttattgttaatgatgtcagtatccaatatgtggcattaatcatggtttgccagctttgtctttatttgtgagggaaagcaaaaggcgacaaaatcgtatgttaaataagctttagaaaatataccatcattttaaatcctctattttgtgttccttttttcctttttttttttttttttttttttgkgaataatgtcctcaaaagttgtaatgattcaggactctgagaaagccttaaaaaagttagactgaagttattgcagaaggtgctcagacagaccggttctctgaatctgcacatgtaacatgcaatgggtgatcacttgactggggtacattgccttttccagactttccacttggc

SEQ ID NO: 330612 - DNA, 498 bp, Homo sapiens
tccctgaaaaacattcattgtacaggaagtgagacattcacagcccctgtgtggggaagagacggcctcacagagggatggaaagaccagagcagggccttagtccatggaatcttacctcactacttttttttttattgttaatgatgtcagtatccaatatgtggcattaatcatggtttgccagctttgtctttatttgtgagggaaagcaaaaggcgacaaaatcgtatgttaaataagctttagaaaatataccatcattttaaatcctctattttgtgttccttttttcctttttttttttttttttttttttgggaataatgtcctcaaaagttgtaatgattcaggactctgagaaagccttaaraaagttagactgaagttattgcagaaggtgctcagacagaccggttctctgaatctgcacatgtaacatgcaatgggtgatcacttgactggggtacattgccttttccagactttccacttggc

SEQ ID NO: 330613 - DNA, 586 bp, Homo sapiens
tgtggaaactaattctgattaaggttagcaaaaaacacaagcactgagtgaatccctgacacagatggggagagagcagcaatcctaagagattagcagccccagaagctaggtttccccctcaccacatctgcaaaccttgatcacctggaacttctacttcgatggatacactgagggcaaaggatacagcagatacagcctacagccactcaaaatggaaactggaaactcacacaaatagacaaagatatgatacacaaatatataatatttatacataatatataatatatagaagatgatgtatataaaaatatgtattaaayggtgaaacccccaagaagtcacatacactcttaaggacttgactaatagtaaattcactgtgaaaaagagatcagaaagagtgaaaagaacttgctctttcccaccttggtgctgtggggagaaagaagaaatcaccgcaaagaatttataaccttaagtccactttcccatgagtttataacctaaatttatgatacctatatggctctaaagacctctaaaattcaagagatattcccaagtagtgacccaagca

SEQ ID NO: 330614 - DNA, 586 bp, Homo sapiens
tgtggaaactaattctgattaaggttagcaaaaaacacaagcactgagtgaatccctgacacagatggggagagagcagcaatcctaagagattagcagccccagaagctaggtttccccctcaccacatctgcaaaccttgatcacctggaacttctacttcgatggatacactgagggcaaaggatacagcagatacagcctacagccactcaaaatggaaactggaaactcacacaaatagacaaagatatgatacacaaatatataatatttatacataatatataatatatagaagatgatgtatataaaaatatgtattaaatggtgaaacccccaagaagtcacatacactcttaaggasttgactaatagtaaattcactgtgaaaaagagatcagaaagagtgaaaagaacttgctctttcccaccttggtgctgtggggagaaagaagaaatcaccgcaaagaatttataaccttaagtccactttcccatgagtttataacctaaatttatgatacctatatggctctaaagacctctaaaattcaagagatattcccaagtagtgacccaagca

SEQ ID NO: 330615 - DNA, 586 bp, Homo sapiens
tgtggaaactaattctgattaaggttagcaaaaaacacaagcactgagtgaatccctgacacagatggggagagagcagcaatcctaagagattagcagccccagaagctaggtttccccctcaccacatctgcaaaccttgatcacctggaacttctacttcgatggatacactgagggcaaaggatacagcagatacagcctacagccactcaaaatggaaactggaaactcacacaaatagacaaagatatgatacacaaatatataatatttatacataatatataatatatagaagatgatgtatataaaaatatgtattaaatggtgaaacccccaagaagtcacatacactcttaaggacttgactaatagtaaattcactgtgmaaaagagatcagaaagagtgaaaagaacttgctctttcccaccttggtgctgtggggagaaagaagaaatcaccgcaaagaatttataaccttaagtccactttcccatgagtttataacctaaatttatgatacctatatggctctaaagacctctaaaattcaagagatattcccaagtagtgacccaagca

SEQ ID NO: 330616 - DNA, 588 bp, Homo sapiens
gatttgtgtatttagttggatgaaatgtggtagataggacaattctaacagaagagaacacggtgaattcatcgctgttgtttcaaaaacaactggaaacaaacatttgaaacacaaggaatcaaagcttccaacttttatctttaagaaagtgctccagggcagcccttctacaccagaaacatcaccatcacctgggaagttgttatcaatgcaaattttcaaaatgttaggcccccaatgtagacttactgaatcagaaactctaggggcggggctcagaaatctatttcaataaactccccaggtcgttgaggtgacactaacagttgagaaccattgctgttagagaatttaaacaacaacactgcctgtgatcaattttgctgaaagcataggtcttagaggcaaatggccttgtgtcatgtctggctctaaaatcagcaggtgcgagtgagaccctggagaagccctggaagcctcgcayttacagtttcctcaccttaaaataggcacggtagaaagaaaagagagcaactctatgtgctccttggacatcaaggcttttgctctgattagcaaaaagaa

SEQ ID NO: 330617 - DNA, 532 bp, Homo sapiens
ggggttgaagctcggcttcgggtgtctgggtaccttctggtctcagaggaaggggaaagacagcaaaccttaaagcagacatttactaactgaaaatgggacagtggaagaaatggggaaggggaaggaaggggaggatgtgtggtcagaggtgaagctgcaggagagatcatgggaagtgtcagtcttctgcaagggatcatgggaagagtcagccttctgcaagggatcatgggaagagtcggccttctgcatttgtagaaatcacagggagccacygctacagcagagactacggcattgcctttgaaagaactttacttggctctgcaaggaacatggaagctgctggcatctggaggcaaaagttaggttattataagaaaaggtgagaaaaacagaaaacataccaaaacaaagctgtctattcaaatgacactgggctacaagaagaatcactccattgtttaaataatgtttttatatacatagggcaaattacatatgaatactataattttctaaatgtttc

SEQ ID NO: 330618 - DNA, 532 bp, Homo sapiens
ggggttgaagctcggcttcgggtgtctgggtaccttctggtctcagaggaaggggaaagacagcaaaccttaaagcagacatttactaactgaaaatgggacagtggaagaaatggggaaggggaaggaaggggaggatgtgtggtcagaggtgaagctgcaggagagatcatgggaagtgtcagtcttctgcaagggatcatgggaagagtcagccttctgcaagggatcatgggaagagtcggccttctgcatttgtagaaatcacagggagccactgctacagcagagactacggcattgcctttgaaagaactttacttggctctgcaaggaacatggaagctgctggcatctggaggcaaaagttaggttattataagaaaaggtgagaaaaacagaaaacataccaaaacaaagmtgtctattcaaatgacactgggctacaagaagaatcactccattgtttaaataatgtttttatatacatagggcaaattacatatgaatactataattttctaaatgtttc

SEQ ID NO: 330619 - DNA, 635 bp, Homo sapiens
tactttaacgtttgttttctccaaagaaaatcaatgtcttacaataactgtactaaaactttcaaattcacaaaatttgwttgaatgctttaatcacatggcagcataccacatttcaaatgttgccagtggttccaacatgctgtgtttttctttatgccgtatttctctttatgctgtatttgtctctatactatatttctctttatgctatatttctctgatatacttctctctgtgctatatttctttttatgctgtatttttctctatgctgtatttctctatgtactgtatttctctttatgctgtttttctctttgtgttctatttctctttatatttctttctatgctgtatttcactttacgtgatatttctctctctgccatatttacctctctcctggccaaggatacaacccaggctcacacatgacattgggtggttctgccaccctggtctccttttatctgagttgttactcatcccttgctgaagtttcacagcatagatatttttaaagagtgcaggttttcacatgtgcctcttgaacttgagttgcaccggaggaccatccacccctacaagcttacattcctatgatttattccttcctgggattttcattgcca

SEQ ID NO: 330620 - DNA, 643 bp, Homo sapiens
accactaatacaattgtccattgtattctgatgccattkcatctgtatttgacttctaaattgggaacagacttgtattatacatatgttagatattatttgcattatcctgccgggagtagcaaccattcactgtgaagtcttgcctagtttgcaaacttgtcagtctcaagaaaatatggcaggaccaaagacacctttgacacagtgcacctctgagtcttatgtatgacacgatgcacttctgagtatgcattttccacataattttatgtggtacttctcagtgtcagagtaatttatgttatatccaatgtagacattttaagttatgttttatttgagttctgtgagaaaaggtgtgttcatcatatatgatgtttaatgatttactgtctataaattcttggtaacataaagttagagaaataaatgttaaaacaatgacgtcagcaactatttaataaattagtgttgggagtcaacagggcagactctaacactaaaagtatcagttagtaggacactcactgaggaaacatatctctcaggtgcgagagcacccacttttcaaagtgttattaaagtgtaatttatacttctgaaatgatcattataattttgaagccccttgcttcatttt

SEQ ID NO: 330621 - DNA, 643 bp, Homo sapiens
accactaatacaattgtccattgtattctgatgccattgcatctgtatttgacttctaaattgggaacagacttgtattatacatatgttagatattatttgcattatcctgccgggagtagcaaccattcactgtgaagtcttgcctagtttgcaaacttgtcagtctcaagaaaatatggcaggaccaaagacacctttgacacagtgcacctctgagtcttatgtatgacacgatgcacttctgagtatgcattttcmacataattttatgtggtacttctcagtgtcagagtaatttatgttatatccaatgtagacattttaagttatgttttatttgagttctgtgagaaaaggtgtgttcatcatatatgatgtttaatgatttactgtctataaattcttggtaacataaagttagagaaataaatgttaaaacaatgacgtcagcaactatttaataaattagtgttgggagtcaacagggcagactctaacactaaaagtatcagttagtaggacactcactgaggaaacatatctctcaggtgcgagagcacccacttttcaaagtgttattaaagtgtaatttatacttctgaaatgatcattataattttgaagccccttgcttcatttt

SEQ ID NO: 330622 - DNA, 594 bp, Homo sapiens
ttcaagggttcaacatggtgctgagtcccattctaggtcacatcaatgattcccatgcttttcagtctcatctcttggaagaaagtgaataccatgtttctctaagagatctcggctctctaatccagacacacatgcatataaccaacagaccaactgaggtttcctcttggttgcctgtggggatctgagatcagcaatggaactcttgaccttccaaatcgtgatgtgttcttctattgctttagccaccatggtgagtgctaccaccgttggctcagtggcttcagagaggcaactccatttccctcaattcttggaagcaaaccactcacacatttctctcacattttttctcgaacgcaatgaaatctgtctgctgcccttcaaccctcactcagcatgccagccsaacacttcacccttctgtctgaatgacttcaacatcctcctctccttcttcctctaattggctttgcctgggtctgtaggagtagcgacgatgaactgtttaacatataaattggaccttctcatctaagcatctttcatgctttctccttttcttctttcttgttctcaagtttcagtggt

SEQ ID NO: 330623 - DNA, 383 bp, Homo sapiens
ttaaatattttaccttctatctttaaacattaaaagaattggaatatgacatttacatggtttggctctgtccccacgcaaatctcatctggaactgtagcatccataatctccacatgtcatgggagggaccggtgagaggcaattgaatcatggggtcagttaccctcatgctgttctcatgttagtgagtgagttctcatgagatctgatgsttttttaagaggattttcctccacttcgctcattcttctccttcctgtcaccatatgaagaaggatgtgtttgcttccccttctgccatgattgtaagtttcctgagacctcctcaaccatgctgaactatgagtcaattaaacgtctttcctttataaattacccac

SEQ ID NO: 330624 - DNA, 383 bp, Homo sapiens
ttaaatattttaccttctatctttaaacattaaaagaattggaatatgacatttacatggtttggctctgtccccacgcaaatctcatctggaactgtagcatccataatctccacatgtcatgggagggaccggtgagaggcaattgaatcatggggtcagttaccctcatgctgttctcatgttagtgagtgagttctcatgagatctgatggttttttaagaggattttcctccacttygctcattcttctccttcctgtcaccatatgaagaaggatgtgtttgcttccccttctgccatgattgtaagtttcctgagacctcctcaaccatgctgaactatgagtcaattaaacgtctttcctttataaattacccac

SEQ ID NO: 330625 - DNA, 588 bp, Homo sapiens
aaactggtgtcaatttaagatactgccatcattgtaggatgttatatgttatctccatggaaaccataaagaaagtatctatagaatatgtaaaaaagaaaagagaagacaatcacaacgtgacactacaaaaatatcaactaaacatagaggataacagtaatgggacaaaggagggacaaaaatgctgaaagacatatgaaaattgaataacaacaaaatggtaaaagtcagagctacmctttaaataattattttaaatataaattgatttaacgccctgttttaggctgaattatgtccctcctccccgcaaagggttacaccttgaagttctaaacaccagtacctcacaattgactgtatttggagatagagactttaaagaggtaattaacttaaagtgtcatccttaaggtgagccctaatccaacatgactggtgcccttctaagaagggtaagttagcagaagaatacataaaggaaagtccatgtgaagacacaagaagagagtcatccacaagacaaggagagagcgcttagaagaaaccaaccctgcccaaaccttgatctcaggcttctaccct

SEQ ID NO: 330626 - DNA, 562 bp, Homo sapiens
gctatgaattgttaatattaaacccattttataagaaagaaaactgaggccagagttaagaatgagctgactccagggccgggcgtgggggctcatgcctgtaatcctagcactttgggaggccaaggcaggcagatcacctgaggtgaggagttcaagactagactgaacaacatggagaaaccctgtctctactaaaaattaaaaaaattagctgggcgtgctggtgtgcatctgtaatcccagctactctggaggctgaggcaggagaatcgcttgaacccgggaggcggagtttgcagtaagctgagattgcaccactgcactccagcctgggtgacagaacaaaactccacaaaaaaacaaaacaaaacaaaaaaaaaacctttctgtactctgsccataattaccttatgagacattatgcgttgaagggctttgtaaactaaagagacacttttggttaataaaaacttatttttatttcttaaaagttgccttcctttcataaaatttaattaataataaaaatacactgagcatccaaaagaaaaatgaagag

SEQ ID NO: 330627 - DNA, 494 bp, Homo sapiens
acttctctctagctaagagaaataaaacgaaagagaaataaaaacaaagagttgtaagtgaatgttcatagcagtgttattcataatatccaaacagtgaaaacaacccaaatgcccattggtggatgatgactggagtagcacaatgtggtctatgcaaacaatggaatattattcagccataaaaaggaatgaaactttcctttttcatctatgatacagcatagatgaaacttgaaaacattgtgccatgtgaaagtagtcacaaaagatcacatactgtatggactctctagatatgcaatgtccagaataggcaaatccacagagacagaacagtaggtaattgactgccaggrgataagggtgttggggagaagtagagagtgactaataaagggaatggggttttcttttaggtaatgacagtaaacattgattatacctaaattgattgtggtgatagttgtagaagtctgtgaatatactaaaaa

SEQ ID NO: 330628 - DNA, 564 bp, Homo sapiens
gttagttaatgcctgaacttcctcccaaccttaagcttgtgtgtttctgtcatacatgcataaaacacacacttgtgtcatggctaataacctcaaatgccacctaaaaaatctgcagcatgggcctggtgtggtggctcatgcctgtaattccagcactttgggatccaggtggattgcataagctcaggagtttgagtccagtctgggcaacatggcaaaacccaacatttatgaaaaatacaaaaattagctgggcgtggtagtgcacacctttggtcccagctacttgggaggcttagcagaaggatctcttgagcttccttggaagctcaaggctgcagtgagccatggaaggtcaaggctgcagtgagccatgattgtgtcactgcactccagcctgggggacacagtgagatcctgtctcaacaacaacaaaaaatctgcagcatggacatacactcattcttcaaacaaataggctgtaatgtaatagtttacattacaggacatttatgatcrttcaatatgcaacactgaaaatacattttagagataatgttt

SEQ ID NO: 330629 - DNA, 565 bp, Homo sapiens
aatacttgataaactgaagtgaatccatgtacaccaacggaacttgttaactctttgcagccttttggtgacacaattggttagtatgtcatatttaacttgattacaatcttagaagacacggtaatattctttggagtagaagactacatcaatttggggtctaattcctgaaaatttcttggtaaatagtacaggataatcagggttcatgaactgccttttctcatctcayctccaatactctttatccacaaagaagtaggtcttgtagttaagtgaattaaaaacggcaccatcaaatcttttcacagagacaaggaagctcggagaatgtatcctcttgtgatagtctggttttaaacaactgattaaccagtactttcatctttaaaaagaagaatttgactcctggatccaattttataagcagcttgaatgccagatgacaagatcagccataaggaagaaattaaactaacactgctctttgatagttcaggaagcttacaccaaaagaacctgtctttaaagaaaaagatttttccttcaattatagtgacag

SEQ ID NO: 330630 - DNA, 601 bp, Homo sapiens
ggattacaagtgtgtgccaccatgcccagcctatatggtaatttataacattgttattattcttatcttttatttgctgtccaggttcttgtaaacaattccaaatgaaaaagaagtacatcaagccaaatagaagcctaccagttctactctttcccctaaagtaaacatttttcatggttttgaggggacgctcttgtatcyttttcttaccactcaaaatatgtatgtgacagctacagatgtgtatccattttacagatgcagaaaccgacactcagagaggttgagccagtgaccaagttcaaacagtaggcatatagtggagctgggatcagaatttgggtctaaaaatgcccggcccacgttccaacctctctagccaacatttggtcctaacacaagggccaaacaaaacattgcgcttgggtcagttgttggcttaactctcacatagattccttgctctcagatgaactgctaggataccctgtggacttcagtttgttaatttgagaaaagaatacaaacatgccttcacccgacttcaaccacgatggggctgagagaactcattaaataacgtctgcatagcatgctg

SEQ ID NO: 330631 - DNA, 520 bp, Homo sapiens
ggccactgtactccagcctgggagacagagtgagactctgtctcaaaaaaataaaaataaataaataaataaaatgaaagtcttattctcctagtggattgtaactatgttaaaggcaagaatgatattttatttctttgactcctaaagctgctaacacagcttcttatacttagtggttgtctaatatttgattgctgaatgaacaaatgaaatatttttagagaaaacatttaaagtagcaatgatatgagtttggtgaaggctgacaccagagagtgccaaagaattttatctgattagttgtgatctgttaaattcctatccactgatggacccatcaagctaytgatgtatatcaatcctttgaacaaatgctccttgagcaactcctagggcaagatgctgtgcaagcttctttagcaaggaactttgctgatcctgagtccacggagtctttcctgctcaggtttctgggcagagtgaaggaggttgtattagtgtggagtgggctctgatc

SEQ ID NO: 330632 - DNA, 565 bp, Homo sapiens
aaagtcaaatggataaagagaggataatacaatagctcctgttctgtctgactcccagaagtactggaggcaaagtgcaatgaaaatgtgaaaacattttgtcttctctaagagcactatgaaataaatacatgtaagcatacatgcatacatgcgtacattaatatataaatacgtatgtgtgtgtgtatatatatattttttgtttgtttgtttgagaggaggtctcgctctgttgcccaggctaaagtgcagtgctacgatctcggctcactgcaaactctgcctcctgggctcaagtgattctcccacctcagcctcctgaatagctgggattacagctgtctgccagcacacctggctaatttttgtattcttagtagagacagggcttcaycatgttggccaggctggtcttgaattcctgacctgaggtgatctgcccacctcggcctcccatagtgctgggatttcaggtgtaagccaccatgcccagcctatacatatatatttttaaattaaggaatgcaatgtgtcgtatacatccaacaaattataaacagta

SEQ ID NO: 330633 - DNA, 600 bp, Homo sapiens
cttgagttgtggtttgaaaatatgactagaaaaattttaagattccaataggaaaggttcacgtgctgctaaatcaccaaaagaacaatttatatgacactccagttggttatgcaccaaagcaaccaccttcagaaagcatctttggcttgggacattcctcaactgtatgacattcttcttaatattaaacctgccttttagtagttgaaacttctattgcatgtcttctctgatttccatttggctcaagtttttttttttttttttttttttgagacggagtctcacactctgtcgcctaggctggagtgcagtgacgccatctcggctcactgcaagctccgcctcctgggttcactccattctcctgcctcarcctccggagtagctggggctacaggcgcccgccaccacacccgggtaattttttgtatttttagtaaagacggggtttcaccgtgttagccaggatgatcttgatctcctgacctcgtaatccgcccacctcagcctcccaaagtgctgggattacaggcgtgagccactgagcccggcctggctcaagttttaaaagctgatttaataattttttttatg

SEQ ID NO: 330634 - DNA, 600 bp, Homo sapiens
cttgagttgtggtttgaaaatatgactagaaaaattttaagattccaataggaaaggttcacgtgctgctaaatcaccaaaagaacaatttatatgacactccagttggttatgcaccaaagcaaccaccttcagaaagcatctttggcttgggacattcctcaactgtatgacattcttcttaatattaaacctgccttttagtagttgaaacttctattgcatgtcttctctgatttccatttggctcaagtttttttttttttttttttttttgagacggagtctcacactctgtcgcctaggctggagtgcagtgacgccatctcggctcactgcaagctccgcctcctgggttcactccattctcctgcctcaacctccggagtagctggggctacaggcgcccgccaccacacccggstaattttttgtatttttagtaaagacggggtttcaccgtgttagccaggatgatcttgatctcctgacctcgtaatccgcccacctcagcctcccaaagtgctgggattacaggcgtgagccactgagcccggcctggctcaagttttaaaagctgatttaataattttttttatg

SEQ ID NO: 330635 - DNA, 620 bp, Homo sapiens
ttttattattatttatcatccctgagttgtggtttgaaaatatgactagaaaaattttaagattccaataggaaaggttcacgtgctgctaaatcaccaaaagaacaatttatatgacactccagttggttatgcaccaaagcaaccaccttcagaaagcatctttggcttgggacattcctcaactgtatgacatttttyttaatattaaacctgccttttagtagttgaaacttctattgcatgtcttctctgatttccatttggctcaagtttttttttttttttttttttttgagacggagtctcacactctgtcgcctaggctggagtgcagtgacgccatctcggctcactgcaagctccgcctcctgggttcactccattctcctgcctcagcctccggagtagctggggctacaggcgcccgccaccacacccggctaattttttgtatttttagtagagacggggtttcaccgtgttagccaggatgatcttgatctcctgacctcgtaatccgcccacctcagcctcccagagtgctgggattacaggcgtgagccactgagcccggcctggctcaagttttaaaagctgatttaataattttttttatg

SEQ ID NO: 330636 - DNA, 604 bp, Homo sapiens
agacctagacatccaaatataagaagtacaaagaacacatgggaaattcmttgcaaaaagatcatcgcctaggcacattgtcatcaggttatctaaagttaagacgaaggaaagaatcttaagagctgtgagacagaaacaccaggtaaactataagggaaaacctgtcagattaacagcagatttctcggtagaaaccctacaatctagaagggccctatcttcaccctccacaaacaaaacaattatcagccaagaatttcatatccagcaaaactaagcatcatatatgaagaaaaaacacagcctttttcagataaacaaatgcctggagaatttgccactaccaaaccaccactacaagaactgctaaaaggagctctaaatcttgaaacaaatcctggaaacacatcaaaacagaacctctttaaagcataaatcacacaggacgtgtaaaacaacaaacacaattttaaaagcaaaaacaaaaaaccaaggtacacaggcaacaatggcatcattaatgcaatggtacctcacacctcaatactaacactgaatgtgaatgggctaaatgctccacttaaaagatacacaactgcgg

SEQ ID NO: 330637 - DNA, 604 bp, Homo sapiens
agacctagacatccaaatataagaagtacaaagaacacatgggaaattccttgcaaaaagatcatcgcctaggcacattgtcatcaggttatctaaagttaagacgaaggaaagaatcttaagagctgtgagacagaaacaccaggtaaactataarggaaaacctgtcagattaacagcagatttctcggtagaaaccctacaatctagaagggccctatcttcaccctccacaaacaaaacaattatcagccaagaatttcatatccagcaaaactaagcatcatatatgaagaaaaaacacagcctttttcagataaacaaatgcctggagaatttgccactaccaaaccaccactacaagaactgctaaaaggagctctaaatcttgaaacaaatcctggaaacacatcaaaacagaacctctttaaagcataaatcacacaggacgtgtaaaacaacaaacacaattttaaaagcaaaaacaaaaaaccaaggtacacaggcaacaatggcatcattaatgcaatggtacctcacacctcaatactaacactgaatgtgaatgggctaaatgctccacttaaaagatacacaactgcgg

SEQ ID NO: 330638 - DNA, 604 bp, Homo sapiens
agacctagacatccaaatataagaagtacaaagaacacatgggaaattccttgcaaaaagatcatcgcctaggcacattgtcatcaggttatctaaagttaagacgaaggaaagaatcttaagagctgtgagacagaaacaccaggtaaactataagggaaaacctgtcagattaacagcagatttctyggtagaaaccctacaatctagaagggccctatcttcaccctccacaaacaaaacaattatcagccaagaatttcatatccagcaaaactaagcatcatatatgaagaaaaaacacagcctttttcagataaacaaatgcctggagaatttgccactaccaaaccaccactacaagaactgctaaaaggagctctaaatcttgaaacaaatcctggaaacacatcaaaacagaacctctttaaagcataaatcacacaggacgtgtaaaacaacaaacacaattttaaaagcaaaaacaaaaaaccaaggtacacaggcaacaatggcatcattaatgcaatggtacctcacacctcaatactaacactgaatgtgaatgggctaaatgctccacttaaaagatacacaactgcgg

SEQ ID NO: 330639 - DNA, 438 bp, Homo sapiens
catatgactggactagagggggtggatgggattcatgaaaaatgtgactagaatgagagactggagccaaagtatataggaccaagtgtgctacgtaggcagtattttatttaytctaaacacaccaagaagatcaccattaatgaattttacactgggaagtgattaaatgaggtttattttgtttccccaggaaattattttgttatttgggcatttaaggatattctaggataaggacaagacacatgaagttatataaagggcatacaaaccaattcttatagaagaaattaaagaagttaatagcaagcctcattatatctcccaaattgccaaattcacaaacctatgtgattttataagtgaatatgaacaaactctcaaaattacacaatttcaataccatttaaaattttttagtaaagagaacaagga

SEQ ID NO: 330640 - DNA, 586 bp, Homo sapiens
ctgggacgtattaacaaaatgtgacaaaaccagtattaaaaaacaactaaaaatatatactcatgtatatattcaaatttattttaaataacagaaaagaaaatctggtagtatatccacatcatgacttatataattcattctagatttgtaagaacagtagaatattagaaagtctataaatataaatcattaataagtcacagaagaaaaagataatgttatctccatagctgcagaaaggcatttaattatattcaatagccattagtacaaaaaactcacacgaacacatacacaaaaacaaagacaaaaatagcaactaccaaaaatactagtaaaatagacataaatgaagatatggaaactgctgtatcatgatgactgtgtgtatgcatgtataaataaaatgccatsagtattacctactgctgaaattttagaaggacttccattaagtcaggatataactaccacattattatttaatatttttctaagtgatgcagttgggaaagcaaagggaagcagaaagcaaattaatcaatgttcatcagaagaaaattaataacttaattgtgaaaca

SEQ ID NO: 330641 - DNA, 586 bp, Homo sapiens
ctgggacgtattaacaaaatgtgacaaaaccagtattaaaaaacaactaaaaatatatactcatgtatatattcaaatttattttaaataacagaaaagaaaatctggtagtatatccacatcatgacttatataattcattctagatttgtaagaacagtagaatattagaaagtctataaatataaatcattaataagtcacagaagaaaaagataatgttatctccatagctgcagaaaggcatttaattatattcaatagccattagtacaaaaaactcacacgaacacatacacaaaaacaaagacaaaaatagcaactaccaaaaatactagtaaaatagacataaatgaagatatggaaactgctgtatcatgatgactgtgtgtatgcatgtataaataaaatgccatcagtattacctactgctgaaattttagaaggacttccattaagtcaggatataactaccacattattatttaatatttttctaagtgatgcagttgggaaagcaaagggaagcrgaaagcaaattaatcaatgttcatcagaagaaaattaataacttaattgtgaaaca

SEQ ID NO: 330642 - DNA, 591 bp, Homo sapiens
tgagtcataagacttgacgactaaatttttagaagaactattctataaaaagttaatcacaaatagttcaaagtgaaggcaattaaacttttaaaggcatggtctagaatagcaatactggtttacaaatgaaggggtgtagatcattgcttctaaacattagtaggagtatggcctttaatggtctctaataaaataggttaattatatttctacattcgcttagggcaaaactcttctctcattatacaggatacaaaatctgaaaccaaagtagatccatggatttcatttaagatttctgaattggaggatgtttttgaatgggttaaggaagaattttgtttctgatgagacagagaagcagagatgatgaaagaaataaggtacttaaaacaaaaataaagtgaataattgaacattagccattgaaattagcataggcttctctccagattgtgaggctaaaataaayagtcttcattcacaaatcatcttaaaggcttaagtccatatggaattttaagtataaataatgcagattgatttacactgaatgaataaatttttaactctttatttttttacatg

SEQ ID NO: 330643 - DNA, 573 bp, Homo sapiens
atattatctttcatgctttcttttttgtaaaatatagaaagtttaattttgcattatggtaattttaaaaataaccttcaattgtgttttattatgatttctttctttaaaacaaattaatttttataccttactgtatatagcttacacaagttaaaaaaagtatgtaattttctaaaagagtattactggtgaaatttctgctattatatttacttactgcagattaacatgtctgaaccttggcatttttggcatttagggccagataattcttcgtgtgcagaagacaatgtaggatgcacttagggatgtatgtaatgtttagcaacatccctgacctttatccamttgatgtcagtaacatcctccaccaaccccaagttgtgataattaaaaatgtctccagacatttgtcctctggaagagaaaattgttcttgtctgggaaccactgttctacatttaagaaaaatttcaggtctactcagaattgaaatcaaactattaggataaaaatcactataagatgatttataatccattttgggtattttgagtatttaattatatg

SEQ ID NO: 330644 - DNA, 572 bp, Homo sapiens
tgtggtataaacaaggccaggagcccatatcatccaaagtagtaatgacgccaaaataatactgacttgatgatttcttgccaagttattttcctaaagttgtcyatcttatgcatagaatttaattccaacattgaaaatgaactgttttcccatatacagatgggctccttaatgcaccatcattctctatgccttgcctccacgtttttaccaatatatgaggacagagtggcctttgttggggatactaatgaagaagtaactcatataattcaatttccacgttcttctaagcccttttactaaagtgccagtgaactgctgttctagataatctacatcacattcattgtcatcttgctatcttgcctagtggcaaaattgttttaaaagtacaaacgtattgagatatgtactgttaataattaatgctatgacatatacaataattactatgcaaatcaaaagtttctcacttattagataggtttttaattaatgtttttctaaaaattttaactcttttacaaaacaaatacagttatctcttagcattcaccaggaatttg

SEQ ID NO: 330645 - DNA, 572 bp, Homo sapiens
tgtggtataaacaaggccaggagcccatatcatccaaagtagtaatgacgccaaaataatactgacttgatgatttcttgccaagttattttcctaaagttgtccatcttatgcatagaatttaattccaacattgaaaatgaactgttttcccatatacagatgggctccttaatgcaccatcattctctatgccttgcctccacgtttttaccaatatatgaggacagagtggcctttgttggggatactaatgaagaagtaactcatataattcaatttccacgttcttctaagcccttttactaaagtgccagtgaactgctgttctagataatctacatcacattcattgtcatcttgctatcttgcctagtgrcaaaattgttttaaaagtacaaacgtattgagatatgtactgttaataattaatgctatgacatatacaataattactatgcaaatcaaaagtttctcacttattagataggtttttaattaatgtttttctaaaaattttaactcttttacaaaacaaatacagttatctcttagcattcaccaggaatttg

SEQ ID NO: 330646 - DNA, 623 bp, Homo sapiens
ttaagggagcctccagggccccttgagcaggtctaccttgaggttctacaaagcatatcaaagctatcctgctaaataattcagaaaacaggagaagtgggtccaaagaccacttggaggaagatatagaaaggcccaaagacaggaactagaagggccttgagaaaaaaataatgaaagatttttaaataaagttatatgtgctttctacgacttcacaaacattcagtaactccttcaaaactaaagataggctgggttcagtggctcatgcctgtaattccagcgcttttggaggctgaggcaggcagatcacgtggtcaggagatcgagaccatcctggctaacacagttaaacccmgtctctactaaaaatacaaaaaattagccgggtgtggtggcgggagcctgttatcccagatactcaggaggctgaggaaggagaatctcttgaacccgggaggcagagattgcagtgagccgagattgtgccactgcactcctgcctggcaacagagtgagacaccatctccaaggaataaataaataaaaataaaaataaaatagaaaaattaaataaataaaacatacaaaagttagccaggtgtggtggtgggcacctg

SEQ ID NO: 330647 - DNA, 475 bp, Homo sapiens
agaaggtattaatgacttctaccacgaatgtagaactatttgtttcccctttaattctgttaattttttgcttcatgtatttcaaatcttagttgttagtgcatatactttttcaattagctgtatgtattctttacatgtttttatgtttttattgtaaaagtccctctagttttggtaatttttaaaatttttgtctagaatctattttattttatcttatattaaaataccacatcaggaaacctggttgcagttccaatgtatgaagtgctgggaagtcaatatatctttattacaaaaaactaaaattaaaactaaacaaattgtaaatcagtgacatttttggaccagttatagaactgaggtttatgacaaatcaccaccctgaaatctggagagacaagaaaatccagagtcagaacttatctggaggtgaaaagactagaartataagcttgcaggaacatgtaaa

SEQ ID NO: 330648 - DNA, 574 bp, Homo sapiens
agaatagttaaataaattaagcaaaaattttctgctatacacaggaggcaacttttaaatataagaatactaaatgtttaaaagatagaaaaatatatcccatacaaatagcaaacaacaaaaaactaacatagctatattaataccagccaccatatatatacagacaagaagtatagaacagagaaaaaaagaatcttaataacagcatgtgataaacaaaaagtatctstatcagaatcttgtgccaaaattctatagaagtacaagtgatacaaaagtggggaagggaagcgctgggaaggaaagggcatggtacctttaaatgatacagaagttgggtagggcatgatccctggctagggctccacccccgggcctgtgcccacgaacctaggtgagtacaggcatttttgtttttctggccaaaggttgcatttcccaagaccaccctcgcctgccatgcccccatcctgtgcctataaaagcccctagaccttaacaggcgtctgcgccttcgggaggcggctggacttcgggaggagcacatcagcagaggcacacacgggcagct

SEQ ID NO: 330649 - DNA, 574 bp, Homo sapiens
agaatagttaaataaattaagcaaaaattttctgctatacacaggaggcaacttttaaatataagaatactaaatgtttaaaagatagaaaaatatatcccatacaaatagcaaacaacaaaaaactaacatagctatattaataccagccaccatatatatacagacaagaagtatagaacagagaaaaaaagaatcttaataacagcatgtgataaacaaaaagtatctctatcagaatcttgtgccaaaattctatagaagtacaagtgatacaaaagtggggaagggaagcgctgggaaggaaagggcatggtacctttaaatgatacagaagttgggtagggcatgatccctggctagggctccacccccgggcctgtgcccacgaacctaggtgagtacaggcatttttgtttttctgkccaaaggttgcatttcccaagaccaccctcgcctgccatgcccccatcctgtgcctataaaagcccctagaccttaacaggcgtctgcgccttcgggaggcggctggacttcgggaggagcacatcagcagaggcacacacgggcagct

SEQ ID NO: 330650 - DNA, 574 bp, Homo sapiens
agaatagttaaataaattaagcaaaaattttctgctatacacaggaggcaacttttaaatataagaatactaaatgtttaaaagatagaaaaatatatcccatacaaatagcaaacaacaaaaaactaacatagctatattaataccagccaccatatatatacagacaagaagtatagaacagagaaaaaaagaatcttaataacagcatgtgataaacaaaaagtatctctatcagaatcttgtgccaaaattctatagaagtacaagtgatacaaaagtggggaagggaagcgctgggaaggaaagggcatggtacctttaaatgatacagaagttgggtagggcatgatccctggctagggctccacccccgggcctgtgcccacgaacctaggtgagtacaggcatttttgtttttctggccaaaggttgcatttcccaagaccaccctcgcctgccatgccccyatcctgtgcctataaaagcccctagaccttaacaggcgtctgcgccttcgggaggcggctggacttcgggaggagcacatcagcagaggcacacacgggcagct

SEQ ID NO: 330651 - DNA, 323 bp, Homo sapiens
tgagaatattcaaaagcagaagtcaaataaaaattcmttcaaagtagaaatttgtctatttttaataatggcgttagtagaccatacaaactgtcatggtgactaccatgaagaattatacttacttaaatttgcaaaatattattgtctaagatgttactatatttatatattatcttatttgtggttttatgtactctttagtaattacatgagccttcaaatttccagagattctttcttggttttaaggaataacaataattttcaccaaaaaaggatttaagttcattacttctggctcacatggaaacatcctggat

SEQ ID NO: 330652 - DNA, 323 bp, Homo sapiens
tgagaatattcaaaagcagaagtcaaataaaaattcattcaaagtagaaatttgtctatttttaataatggcgttagtagaccatacaaactgtcatggtgactaccatgaagaattatacttacttaaatttgcaaaatattattgtctaagatgttactatatttatatattatcttatttgtggttttatgtactctttagtaattacatgagccttcaaatttccagagattctttcttggttttaaggaataacaataattttcaccaaaaarggatttaagttcattacttctggctcacatggaaacatcctggat

SEQ ID NO: 330653 - DNA, 326 bp, Homo sapiens
atatatagatagatgtagatataatgtacgtatttctgtctctatctatagatatctrtatctatatctatatatagagtctattatacatgtgtctatgtgtgtgcttgtttctatatgtataaatacacatatatattctctattacttcagaaatttgttctctttattctcttttgatattcttaaagaaaaacaaaaccaaactttggtttcccaattaatataaggtcagaattcattgtctcaaaatagaatctgttacaatttgaagaaataatgtagtagaagttggtcttctgggtataagctttgtgtgggtcct

SEQ ID NO: 330654 - DNA, 516 bp, Homo sapiens
atgcactcagtttctcctgctttgaaaactcaaatagttttctaactatattacttgactctatccttatccttgtccaataagtatgttgccaaaataacctaacaaaacatatctgtgcatgtcactacctgctgatcaaagatgtaatagctttcatctttttcagaatataagttaaactaatcatgacctatggtgcattttatgatctaaaggagtgctataaaataagaaaataacactctaaacataaaattatcacaaactagaaatgctatgttactaaaaaacctattgattataaacaaagtattataaagattactaacttactaaataagtaattactaaattactaaataaaataaaagtgaatatatcaattgtgaaatggtgagatatcgctaatgcagtattaaaaaaatatttaggtatggccgggmgtggtggctcccttctgtaatcccagcactttcggatgccgagatggttggatcacaaggtcaggagacc

SEQ ID NO: 330655 - DNA, 490 bp, Homo sapiens
aaaaaaagaaaagaaagaaaaattattgagctattctcaatcttaattgactagattgtcatttacatatttttgatttgacccaattccatgtagggattaagttgtattagagaaaatgatatcaactaaataattagttaaatgatgtgatgagtatatagaacttttagaggaggagttaaggaggaagaagaaaactgtattgtatattagggtttcctcattttcatttgatgtattttagtccagatttgattgccttttagttttaaatcaccttcactgcatttaatgtttcttgttcatttaaaaactatattttgmacacaactgtaaaatattctgttcatgtaagaacattatattagattaattattgtttattactctaacaatattctaaatgaatacattttctacaataagactgaataatgacatatccctaatttttttcacatcctccattagacaaggatctcattat

SEQ ID NO: 330656 - DNA, 490 bp, Homo sapiens
aaaaaaagaaaagaaagaaaaattattgagctattctcaatcttaattgactagattgtcatttacatatttttgatttgacccaattccatgtagggattaagttgtattagagaaaatgatatcaactaaataattagttaaatgatgtgatgagtatatagaacttttagaggaggagttaaggaggaagaagaaaactgtattgtatattagggtttcctcattttcatttgatgtattttagtccagatttgattgccttttagttttaaatcaccttcactgcatttaatgtttcttgttcatttaaaaactatattttgaacacaaytgtaaaatattctgttcatgtaagaacattatattagattaattattgtttattactctaacaatattctaaatgaatacattttctacaataagactgaataatgacatatccctaatttttttcacatcctccattagacaaggatctcattat

SEQ ID NO: 330657 - DNA, 565 bp, Homo sapiens
gagatatgtaatgctttaatattttttaatcttatccattttatttcaacatggcaactatatttaataacaatgtattcttgatagtcacaaacagagtatattttaaatgatcttactgaaaaaagaaatatgtgaggtgatacctatgtaattaactaaatccagcaattccacaatgtatacatatttcaaaacataatgtccacaataaatgtatagaatttttattaaatataattctcagttcttagattcaattcttcagtccatttgtagttaattttttatggtgcaagataaggatctaattctatattttttggcatttggatatccagttttcctaaaaccatttattgaagaaattrttatttctccattatgtatttgtggcagctttatcaaagattagtttgccaatatggggggcttatttattggctttctattgtgttccgttggtctgtgtgtccatttttatgccaataccatactgatttgattactatagctttgtaatatagtttgaaatcagaaagccatatttctccagcttggttct

SEQ ID NO: 330658 - DNA, 578 bp, Homo sapiens
ctaactcttcctaatttcagtgtaagcaagtataccagttgtttcaaccaattaatatttacagaattcttatgtacatgatgagctagtataggagtatttaaagctgtgtataatgtcaatacttgatataatttacaacctgttatagcatgttttatgcaatgaatatgtttgcaaattaatgagaaaaaatatgttactgatagttgatttacaaaatgttaagaaagatggaaagatttgaattacaaatggtataaaattttaggtagcaggaaatttatgaggttggcagtagattcaatgcgtgcaaggaaaaagggctctgatcagctttgatctaaaaggagtaaaagttaaatagtgggacaggcacggtggctcatgcctgtaatcctagcattttgggaggccgaggcaggtggatcacctgaggtcaggagttcgagaccagcctggccaacatggtgaaaccccgtctctactaaaaatacaaaaattagctgggcatsgtggcgggtgcctgtaatccctgctacttgggaggctgaggcaggagaattgcttgaacctgg

SEQ ID NO: 330659 - DNA, 539 bp, Homo sapiens
tgatataccaaggtgtaaaatatgatttcttataatgagtgggtaatacatataattctggctaaaatccaatttgtagtgagtcctgtgagtctgcagagatactcaatgattaytgtctcattgagtgtacaacttggattaacatacttggtagtaagaggaaccctacatggtctatggcttctggagtaagctctgtcatactggagaaggccaagtggaagcctctgaaactgttgtacacttagctaagaaaatatatatatatatatattttaattatactgatttcttgaagttgtggagatcaacatcaccatttagtacataaaaaatgcaggactgaggctttttttttttttactgtaagttctgggatacatgtgcagaatgtgcaggtttgttacataggtatacatatgccatggtggtttgctgcacctatcaactcatcatctaggttttaagccctgtgtgcattaggtatttgtcctaatgctctccctccccttgcccctcaaccccttacaggcccg

SEQ ID NO: 330660 - DNA, 565 bp, Homo sapiens
gagatatgtaatgctttaatattttttaatcttatccattttatttcaacatggcaactatatttaataacaatgtattcttgatagtcacaaacagagtatattttaaatgatcttactgaaaaaagaaatatgtgaggtgatacctatgtaattaactaaatccagcaattccacaatgtatacatatttcaaaacataatgtccacaataaatgtatagaatttttattaaatataattctcagttcttagattcaattcttcagtccatttgtagttaattttttatggtgcaagataaggatctaattctatattttttggcatttggatatccagttttcctaaaaccatttattgaagaaattattatttctccattatgtatttgtgrcagctttatcaaagattagtttgccaatatggggggcttatttattggctttctattgtgttccgttggtctgtgtgtccatttttatgccaataccatactgatttgattactatagctttgtaatatagtttgaaatcagaaagccatatttctccagcttggttct

SEQ ID NO: 330661 - DNA, 565 bp, Homo sapiens
gagatatgtaatgctttaatattttttaatcttatccattttatttcaacatggcaactatatttaataacaatgtattcttgatagtcacaaacagagtatattttaaatgatcttactgaaaaaagaaatatgtgaggtgatacctatgtaattaactaaatccagcaattccacaatgtatacatatttcaaaacataatgtccacaataaatgtatagaatttttattaaatataattctcagttcttagattcaattcttcagtccatttgtagttaattttttatggtgcaagataaggatctaattctatattttttggcatttggatatccagttttcctaaaaccatttattgaagaaattattatttctccattatgtatttgtggcagctttatcaaagattagtttgccaatatggggggcttatttattggctttctattgtgttccgytggtctgtgtgtccatttttatgccaataccatactgatttgattactatagctttgtaatatagtttgaaatcagaaagccatatttctccagcttggttct

SEQ ID NO: 330662 - DNA, 608 bp, Homo sapiens
gggatctactcagtctttatatgtctagaaattattgtgagggtcctgttggtcactactatctatattcttttctagaaaatcttaacatcttaaatggtcacaaattatgtattccctctttgtcacactgtatctaaagagaaaactgaaaactctacaatggcaaacaaggcaaacgataaattctaaaagttaaaggcacagatcaaactacttttagagataagtggtcattgtaagagtaaacaatattatctgaagaatatgtaagatcaacaatctagaatcctggtagcatttacaatatagaaaattgcaaatttatataataaaagaaataaacagcatcataatccatttcttagtgattttgctaagtacccaatatrttttaatctaaattatttgtattccagattttatataacatgtaagtttcataatttgtggaatctggaaaataattataccagagttattctgatgagcaacatctgaattaggactctatggcttagattctgaattgaagttctacaaataatttttctggcaagctcagttccaatcaatatgcatttcttgaaatttcaaaacctgagtta

SEQ ID NO: 330663 - DNA, 608 bp, Homo sapiens
gggatctactcagtctttatatgtctagaaattattgtgagggtcctgttggtcactactatctatattcttttctagaaaatcttaacatcttaaatggtcacaaattatgtattccctctttgtcacactgtatctaaagagaaaactgaaaactctacaatggcaaacaaggcaaacgataaattctaaaagttaaaggcacagatcaaactacttttagagataagtggtcattgtaagagtaaacaatattatctgaagaatatgtaagatcaacaatctagaatcctggtagcatttacaatatagaaaattgcaaatttatataataaaagaaataaacagcatcataatccatttcttagtgattttgctaagtacccaatatattttaatctaaattatttgtattccagattttatataacatgtaagtttcataatttgtggaatctggaaaataattataccagagttattctgatgagcaacatctgaattaggactctatggcttagattytgaattgaagttctacaaataatttttctggcaagctcagttccaatcaatatgcatttcttgaaatttcaaaacctgagtta

SEQ ID NO: 330664 - DNA, 568 bp, Homo sapiens
gtcttagagaattgctcttcctcttatacaagaaaaagcattcccttccataaacatatatttttcagactataaaaacatattttttcatttctttacttccattaaacatgtccttaaaattcatcacataaatatcacttgatattctccaattaatcaatatatactggcctrtataaactggcctacagtattcaataattttctaacttactctagaccctataatccatcacatagattacattctttttatccttagacttgaacatttttttacagtttataactttttccagattctgccttagaaagattttcttcaaaaacactgtcaagagtaactattctcagcatttgagaaataggaaaaatatcatgtcaaagatagattcttggttgacaaaattaaaggaaagcctaggaatatttgtactacaataatgtatttgctttcacaaatacaaacctcatcatgtcacttaaatgtactattgcccttagttttgtgtaattattttctctgtgcagatactaacatagtaactgatatacattacagtat

SEQ ID NO: 330665 - DNA, 614 bp, Homo sapiens
ccacctttaagagctgtaacactcactgtgaaggtccacggcttcattcctgaagtcagtgagaccatgaacccaccagaaggaagaaaccgcagacacatctgaacatctgaaggaacaaactctggacacaccatgtttaagagctgtaactctcaccatgaagatctgcagcttcattcttgaagtcagcragacgaagaacccaccggaaggaataaattccagacacattttggcaaccacgaagggactatcacctatcaccaagcagtgagtaccattggacccctttcactcgctattctgccctacttttccttagaattcgggggctaaacactgggcaccttttggccagttaaaagtgactagcacagccaccagactaaagacatgggtgtcaggctttctgggaaagggctctctaacaaccctgactctttggagttgggagcattggtttgcctggaaccagcttctgcttttcctgtatttctgggctgagatgagggtcaacagaaaggaaagcaattcagctccggggtcccgacaacaactcggtagatcctgcggccataagtggaactctcaaagtcacattgcccaagcaa

SEQ ID NO: 330666 - DNA, 457 bp, Homo sapiens
gctacagatagtaagtatgcttatctaatcctatatgcccatgctgtaatgtggaaagaaaggaagttcctaacctctgggggaacccccattaaatatcacaaggaaaccatggagttattgcacacagtgcaaaatcccaaggagttggcaacagcagcataagcggctgccagaagcagggaaagaccagcagagcgacaaagaaaagagagagaaagagagaaagagaaagacaggaagtcaaagagaaggagayagagagaggaagagacagagacaaggagtcaaagagagagacagagacagaaagtcaaagagagacggaaagagaggaagagacagagaaaaagcaggagtcaaagagagagagaaagacaggagtagtaaagaaaaaacagtgtaccctattcctttaaaagccagggtaaatttaaaacctataattgataattga

SEQ ID NO: 330667 - DNA, 457 bp, Homo sapiens
gctacagatagtaagtatgcttatctaatcctatatgcccatgctgtaatgtggaaagaaaggaagttcctaacctctgggggaacccccattaaatatcacaaggaaaccatggagttattgcacacagtgcaaaatcccaaggagttggcaacagcagcataagcggctgccagaagcagggaaagaccagcagagcgacaaagaaaagagagagaaagagagaaagagaaagacaggaagtcaaagagaaggagacagagagaggaagagacagagacaaggagtcaaagagagagacagagacagaaagtcaaagagagayggaaagagaggaagagacagagaaaaagcaggagtcaaagagagagagaaagacaggagtagtaaagaaaaaacagtgtaccctattcctttaaaagccagggtaaatttaaaacctataattgataattga

SEQ ID NO: 330668 - DNA, 457 bp, Homo sapiens
gctacagatagtaagtatgcttatctaatcctatatgcccatgctgtaatgtggaaagaaaggaagttcctaacctctgggggaacccccattaaatatcacaaggaaaccatggagttattgcacacagtgcaaaatcccaaggagttggcaacagcagcataagcggctgccagaagcagggaaagaccagcagagcgacaaagaaaagagagagaaagagagaaagagaaagacaggaagtcaaagagaaggagacagagagaggaagagacagagacaaggagtcaaagagagagacagagacagaaagtcaaagagagacggaaagagaggaagagacagagamaaagcaggagtcaaagagagagagaaagacaggagtagtaaagaaaaaacagtgtaccctattcctttaaaagccagggtaaatttaaaacctataattgataattga

SEQ ID NO: 330669 - DNA, 570 bp, Homo sapiens
gttgaatagtcagtttggagagttttttaaaaacagacaaagcaaaaatatttaacatagattatgtcacctttcgtgatactatgatcacataattgctaatatatgcaggtaaaataaaaaattaatactcaataataataaataaaaactggtagacaaattctatttctgagaaatatacagcaaatcctagcaggctatcttaaaaaaaaattgtatctttaaaggcattagagagctgtgaaaaaaatgaggaaaagaagtaaatttaatgaaaaaaaggactgtcctgagataagctttttattgcaagtctcttttccttaaggacactgtcttttgtctcttcagacttgggagaggatttggtctagaaagcgtaaatagaaatcattagcatgagcagttttctccacagaatatctgctatgtgtaggtgcttcacaggaaacaagtgggctaggtcaagagattcyataagaagattgaaatatcctttaggttcacatgcatcaaaaatagcacatacatatatattttttattgaaacttaagaacatttaaaaa

SEQ ID NO: 330670 - DNA, 468 bp, Homo sapiens
catgtatgtgcagtaagtcatcagtcccattgtgaatggtacaatctatttatctaagagcattattttgtttagagagagatcccatgatcactacatctttaatctcgaatttggagaagctgtgaaagtattacccaatcttctcgccataagccttaaacatcttgttacagtcagaaatacatctgcatagcacaggtgttgttggtcttcctcttgttcttcaccaatacgtcagataaataacagaartgtataattatacatgttaactgtttaaagaagatttttcaaaacaaaggctattgatttcaaggtggtttaacagataccaaaataacaaaatttcctaattctgaagacaatggaaaattctcaagaaaatcagcctcaacactgtcatcatagtaacctacgaggaggtctctctgatgtgatagttgctcatctttccacactcacttt

SEQ ID NO: 330671 - DNA, 569 bp, Homo sapiens
atttattaaatttgtgatgtttgttcattaatcagagaaattcatataaaaacggactatgtgtggataggtagatacacacacatacacatgcacacagatgcatgcatgcacacacacacacaccagtgaacagttgcactgaagtcttcatttttctcttaacctgatgtctgttatagttgaattgaaaataatatatggcagaaaatgcattttccaaatagaaaatctcttggtagaccttaaagctatgaaaaatttagggcatcatttagcacatcataagtttaagtattgataacaaatacactttaggttacagattaacctacatatgaaaaaatgttttagatgattatagcacacatggtgttaaattcctttagttgacttgaccttgaagattttgcaatagccgraagttactgagatttcacaaggaagattctgcctgcatcctcttgttcaatgcagtccatttgctatgacttctcatttagtcactctggtttgattcatgaaggatacataaagctgtttgaatatgcataggaggccttgtattc

SEQ ID NO: 330672 - DNA, 569 bp, Homo sapiens
atttattaaatttgtgatgtttgttcattaatcagagaaattcatataaaaacggactatgtgtggataggtagatacacacacatacacatgcacacagatgcatgcatgcacacacacacacaccagtgaacagttgcactgaagtcttcatttttctcttaacctgatgtctgttatagttgaattgaaaataatatatggcagaaaatgcattttccaaatagaaaatctcttggtagaccttaaagctatgaaaaatttagggcatcatttagcacatcataagtttaagtattgataacaaatacactttaggttacagattaacctacatatgaaaaaatgttttagatgattatagcacacatggtgttaaattcctttagttgacttgaccttgaagattttgcaatagccggaagttactgagatttcacaaggaagattctgcctgcatcctcttgttcaatgcagtccatttgctrtgacttctcatttagtcactctggtttgattcatgaaggatacataaagctgtttgaatatgcataggaggccttgtattc

SEQ ID NO: 330673 - DNA, 530 bp, Homo sapiens
catagggagaccctgtctatacaaagaatttaaaaattatctgggtatgatgacacatgcctctaatcctggctactccagaggctaaggtaggaggattggttgagcctagaggtcgaatctgctgtgatcgtgccactgcactccagcctgggcgagagagtgagaccccaactcaaaaaaaaaaaaaaactggatggaaaactattgcttgataaaaccaaggttcactgagaaaatgtgactttctcaaaatcacacgcttatcagaggcagatgagtaacaaaacccttttctcctttcttccaaagatgtcaccttttgtgtataaacacatatcaaacttcatgcaggcaactactgatgtgctacagaargtcctgacaccattttgaccatcagaagcaagctggctgtctcaagacatcctactcagcatgtgagaatctgtgcagcagccaatgagctatgaggaacgggaaaaaattaaacctactaataggtagcattggaataaagtccattcctt

SEQ ID NO: 330674 - DNA, 560 bp, Homo sapiens
catctaaaaaaaaaaaaaaaagaaatgtgataaaattcgagactatttggatgccctagatgtaaagagcttttggttgtgatcttaaaaagtgaacggtagcatcgtctgtgaaagtgtagggggcttgaaacaggatatctgggttgaaatctgggctctaccagtcactagctgcataattttgatgctgagaggtagtaaataagtctctcaaaaaaatagctgcagttcttctttatycaaggattatggttaggtttagataaatatcaacatgcctgatacaaaataaatatttcatccaatgggtgtcttgtcttctccaagtacttttcttataatgagctttatagttaagatcagaaaatttgtcatatcatcaaaaaactcagttcaattcaatctatgattttccatggaagatactgattctcacaaaggggaaataaaattgttgaatgtgacatctgtgagtggccaaatgagcattagaaaacagacatcacatcaccatgttagggctcccataagctccacctttcaaattatccttgagg

SEQ ID NO: 330675 - DNA, 585 bp, Homo sapiens
tttaaaggggatgtctgtgtactgttagggattaaaattaagatctgatttaataagcataagttcatttgccagtcacctccagttcttctgtgtccatccctaaatccaacttctgaagtccagacccacatttcagaagactgatagatagcacacccaakatgttccattgtacaaaactgaaagagtcatcttttcttaaaaaattcagaaattcctcctcactttttcctccaaccatggaaaattcccagtggttcaagttcaaaatcataatgttctctttgcatgtaggtgtcaatctatcttcaaacctgatcatttttacttttgtagtcttttctcacttgattccccttgggtcctctataatacttcttatcaagtttaaagtgctgtggtctagtttggcaaagcgctttttatatggagtctcatccttctgtttctcttttttctaatccaatttatatattaaagaagattaatctttttaaagtactgctttgatcctttctctgtcaaaaacacttagtgtcttccaggtgtctatgaaataaattccacaggccaagggaacca

SEQ ID NO: 330676 - DNA, 593 bp, Homo sapiens
tgttaggtcaggtaagttttgatttcattggcaaataaatagccgycaaattttacatagataaagggcaacagtttgaaataatacttattgaggattcagtgaagaatatgataacaacccattgcactcagtagtctataatccccaccaataattcagccagaccagtaaactgttacatattgagctagactttcttactcctccatccccaccccctcctacagaaaggaacaacagtgtcttacattgaattttaatttaatatggtaccatcagcctatatagaagaatgctacagggagctgctttatggaactcaccatggttactgcaaagatgttgtgaatattgttgataatgctatgcattatattatatagtgtctttcctgagccctcttgggagaataccctacctcatttgaccgtctcttcctcaatagtttgttttgatattctgaatatcatgaatgtcatagctgattaaattttttcaacatgggttgctgaaaattttagaaatagtagcaagtatataaaactttctgaaagtatacttctattttgccctatttctggttctccatc

SEQ ID NO: 330677 - DNA, 593 bp, Homo sapiens
tgttaggtcaggtaagttttgatttcattggcaaataaatagccgtcaaattttacatagataaagggcaacagtttgaaataatacttattgaggattcagtgaagaatatgataacaacccattgcactcagtagtctataatccccaccaataattcagccagaccagtaaactgttacwtattgagctagactttcttactcctccatccccaccccctcctacagaaaggaacaacagtgtcttacattgaattttaatttaatatggtaccatcagcctatatagaagaatgctacagggagctgctttatggaactcaccatggttactgcaaagatgttgtgaatattgttgataatgctatgcattatattatatagtgtctttcctgagccctcttgggagaataccctacctcatttgaccgtctcttcctcaatagtttgttttgatattctgaatatcatgaatgtcatagctgattaaattttttcaacatgggttgctgaaaattttagaaatagtagcaagtatataaaactttctgaaagtatacttctattttgccctatttctggttctccatc

SEQ ID NO: 330678 - DNA, 653 bp, Homo sapiens
aagttccactaagttgaagataggtgtaggggggaaaagagccctttcctaagattttgctgagatgtgaaatgcagaataagccatgacactcaattgaagaattaaccaaggcacaatttagcatgcacctattctatttttacattatcctttactgacaaaacaatgtacagatattgaaaagctttttgaatgttttacaacagattttttttcaaatgcttacaattccatctaaattctgataatctgttgtaggcttcaaaacaacacatccagtatcatgtccctacactaataacaagcagagcatattaaccacatcacaaaactgtaatgaaaaaagattatgatcactttcagtcagcacaaatattttaaataatgcatagcaaagatgttatatgaaatccattattcatgrcttttctcatacatatatttgaaaatggaatggtacttggttgccctgggtatttttgtcacagtatgtaacgtagttcataactttctactctgccacatttttgccttaaaagaattctctaactggatcgttagtcatttagacattaccttttgcctacctggcagatgatatgctccctttaaccatttttcttccccatttcagctgttcgactgccttt

SEQ ID NO: 330679 - DNA, 548 bp, Homo sapiens
  misc_feature (1)...(548): n = A,T,C or G
acatgtgagacttaaccagctgcctgctgactgatccctctggaggccctttatatgaatcccttgatttcaagactggtctataaaaaagaactaaggtatttggggagctacactgacaaatgtatgtatacagacataatagagatcacttagaatctagagaggttaagtttgagttattttccagatagtggcctttcaggtatgagtatgcattggaaattctaagagatatggggcttgattatatgccatggaaaatgtcatccgcctattccccactgtcagccccgcaaataaagagaggcccactgattacaaagcagcaggtstgtaaggaacttttgacttttaggccatataaccccttcttttgggattnaaatnctgaaatttagaaatgtgaagtgatttacaaaactgtgcacagctacttagtggcagagctgggagcagaatccagtacccttgatcccattccaaattacttcaatggaacacactggcatttatttttctatggactttttgtatcagatatattg

SEQ ID NO: 330680 - DNA, 411 bp, Homo sapiens
caagggagctttggatgagcaatgagcttcaaccagcatgctttttgcttggcaagttaaactaatccagttcaagactagaggcatgttggcttagaattatggatgaaagcaggtaatttattattttctatattttacttatgatgtcaaaaagtctcacccaacaagacctattttggagtgacaaacagtaggatattcaaaatctctgcagtccaacacaatgatagaaaaaaatatctcaagacaaaggacaggttcttgcttaatatcaccagtctctgcasaaaatgtgttcttcaccttctcctgtgtgtggtttcagtgcttattggagacgaactggtagtagaagccttgttcattcatcatttatgaaagactttccagtaaaattaaatttggact

SEQ ID NO: 330681 - DNA, 479 bp, Homo sapiens
catataatcctagaactggaaggatgcatagggaaaacttaactttatctcttcatttgtatataagagtgaactaaaactcagagatgtgtatttatattattttcagaaggagctggtttggacgtgttgtctcaatgtaattattaataatgcctcttttctttctcaaagatctcctgatttagaaggtaaattagatattcacctcatctatatctttttggtattgtggattctttagataatattttacaaactcaggcaacccatccataaaaagcatatatatatatatatatgcttttatatatatatatatgcttttatatatatatatatatatatatatatatatatatatatatatatatatatatatataaaacatttggatctaktttaccaccaacctcaagctgcgagcctttgatgtatattttacatacaataaaaacatatagatcaactcctgtgga

SEQ ID NO: 330682 - DNA, 586 bp, Homo sapiens
tttttttttttgccaaagtcaacatgttttaatgttcatatctttctttaacatctggtaaggcaagttctccattatatcacggtcttggaatctttatggctgttattggatgtctaattttccatatctattgtagatttagctgattacattccctccttaattttgccaatattttgaataggatcttattgaatagatagtttgtattagaatgagttcccttctggtaatttcaagaaatgtgtttccagttatttgttaccacaaataaggtggtaataagctttaacatcactagttctctcagaatagaattctaggaatgagattacagactgtgtcaaggggtatagatatttgtgtcaagggttatagaaaagcaaattcacaatatatcgttttccatattgtgaatttgctttcctgaaagattgtagcaggtgcaagacctgtttttctttgccctctgaccagaaccgaatgyctgaacatactatgtctaagtagttcagaaatttcccccaccaaaacacccataaagtatgatggggatgagactcaccagtacagtttggaggta

SEQ ID NO: 330683 - DNA, 510 bp, Homo sapiens
ggaggttattactctataaataatgagctgacacagccacctgaaatgaggcagaatagaagaaagagagataatgttctagctaaattatgccctgcatattcatacaaactcttcattttcttcaaatatcagaatgtgactttgaatttttttstaagttagaaatcttactttcagtaacagaaactaaactttaaattgcttgagctaaaaaggggttttcttgatgtgccacaatagctttgagggaactagttgtctctttatatgttatttctacctctgttccgcattggcctcactattccttgaaattttttctcctcaatttatttagcagaatgatatcaaaaagtcccctggttcacatttcatattgtaatattatttcttcaaaaatgaattcctagtaaataaaaatcttactaatacattatcactcatagtaaacagatagatggagacaaaggtaaggtcagttgacagaagaacaggattaaataatat

SEQ ID NO: 330684 - DNA, 567 bp, Homo sapiens
ggtttgtgcttgttgatttataccaagcctgcaataaaccaaagtcttacttgtaaatgttcctgttgtgttgctgcctgctgcctctatcctgcatttttgtaaataatatttggatacaatctaaatattgtacatttctcctcctgcttatcttargatccataccagtatttttgaatcttggctttaccatttcacataccaatcactcttctattcctttatacagctagagatgagaaagagatttcaataagcttactgacattgatcaataggtaatggctcctttgtgaattgaaaagtattctgaggctgatgaaaataaatattataatcacctagggatcccagcatgggtaggagagatggaaatggctgcctgcaggccattgtcacctaaagagctgatatcaaatacatactgtgtgaaagtttctttggataccatatacactgtcagcttatgccttttgtgggctgctttctgcttttgtcttctactttttgagaagtctcacacaatcaggagacacctcactctacaaatgtccaaatttgaag

SEQ ID NO: 330685 - DNA, 599 bp, Homo sapiens
tctctctctgttccctcccatcattctagacaagggtttctcaacattagcactattgacttttagagcatgtaaattcttgtgaagtctgtcctgtgcactgtaaaatgtttagcatcatcactgtcctctgcccaccagattccagtaacatccccttccctacttttaacaatcaaaaaatgcctccagttattgtcaaatggctactagattgcaaaattggccccagctgagaaaatctgttctagactgaaatcacacctaatgtatcctcataatacttatcacagttttgtatttaacaaataattctatcttccttagttaaatataagctctttagtgtatggctataccacaatgactacacagcatataggacctagttttccttaaaaaaaaaaaaaaaaaaaaaaaagttggttgggtcaatatggagaatactctcaartaatgtatttattaatacatttttaaatgttttaatgatatttcgggcagccaaacagggtattggttttgttttccaggtttcttttaattttggttttgttacatccaaccttaagggaagtgagaagtaaaactaacaaagg

SEQ ID NO: 330686 - DNA, 574 bp, Homo sapiens
gctattctttggttttatgtcataatgtgaatatgctaataactggggataattgacactgtaggaacaaatataaatatgtttaatgaggttattgatttttccctcataaatgttcttacatactttatattataagtatatcaytaatgatgtatgtcttttcattagagttggcataataaagatgacaattaatttttaatgaatctgtttgtgaaatttcatattgaaaaattaataaagcaagcttaatttcattgctgagtctattattagcctttcgtgtattagcaagcaaatttaccaatatgaacgtttatactgggaaacttggctaagaaagctatgctaaattccttttctataggcctgataggtagaaaaataaaatgcagtttggaaaataaaccaaagcctacagctggggagtgttataatcctataggacctatttctcctttgatacagagcattcgtgacagccaaacaaaggtcagcttgttgagtaaaagcttcctgattgtctttaaacgaattgggctgttccaaggaagcctttggattatctgtg

SEQ ID NO: 330687 - DNA, 579 bp, Homo sapiens
tgttgagtaaaagcttcctgattgtctttaaacgaattgggctgttccaaggaagcctttggattatctgtgaagtcttaacacctggcttcatttgacaaggattgtagatagggaaattgttgttcttgttcacttacaccagctactttaatataccaacttatctaagcctgctcacctctggaagatacatatcattatccccattttatagatcctaaaactgagcaccagagatggcattaagaaacatgacatcagttgatagagcccctattctaaaacagctgggtctttcctgcctgctctttctagcttgagaaaccyaggaccttttcctttgtaaattgcatttgagcaaaatgacaaatgtattaagtttctgaatgggatgaattggtcattttatgaaagagaatgttaaactgagaacactttctttgtgtgattaaatctggcacagattttattttataccaattcattcaaagacattttaaacagaggctgtcaggtaggctacacatttttttcttcctccgcacaatacatgatacaagcgtgcctctgatctgt

SEQ ID NO: 330688 - DNA, 586 bp, Homo sapiens
aaatacatatgtaagatacattttttaaacagtgtcaaaatgcagatgacacactggagcattacttacaaatcactaaacagaaagaagactaattttcctcatatrtgaagagcttctagagaccaataaaaagataaactgactttctaaaaattggacaaattatgtaaccaagcttgcgcagaaaaaatgaacatttaggttcttaagtacaaaaagatgctctacctaactcataatgaaaaaaaacaaaatttaaaacagacttggatacaacatgttcagattggtaaatttcttgatgtttgatgagggacaacattggcaatgctgttggaaacaaaccttcacaatttgctgaaagaattgtaacctgaagaaaaacctaatgcataaaatttgtcagtatcaaaatgacaaatgttcttaacttttaaccatcatttagccttcttacaaatattctctatcacataaaataaaacaagcagaattattcattgtggtattgtaataaactttgggaagtaactcaatgtccatcaaaaggaatagataaactgaggtacattcatataatgta

SEQ ID NO: 330689 - DNA, 591 bp, Homo sapiens
gctcatgtgcagctatgactcttcccaagaggactttagtcgtgggagtttgctcgtctcacaaatgcagagcaggcccaaggcctgaggttaatgcccctggggactggccctccatcaatagctgatacaagttgctggacaaatagtccaactccttggtacctcagtgaggataattctgaaatggattttgatctgtctctcaaaatttctccgtggaattgagccttgattgttcaaagcagtagttggctcaataatgtgtttttattggtcccgtttcttccatacctcactgctctccttccataatctgcttcccagggtcacccccaagacaaattacttgcactcatccccttatctcagtgtctaattctagggcaactaaatctaagactcttcttttttccacgatgtttctatataaaaacacacctttgaaatccagatggggttcctgggtaaaaaccatataatragaatttaaaattaagttttaaaagtgtaagctctaaagggatttgcagaccattcagaaagtcgtcagctatgtgctctatgcagttttcccttggcttagtctac

SEQ ID NO: 330690 - DNA, 608 bp, Homo sapiens
aagaaagaatcagctaactcaaaggcaagcaattggaaataatccagtcagaggaacaaaaaaagaataaaaaattgaaattcyaagggacttagagtacaccattaagcaaaccaaatatatattgtgggaatccaaggagaggaaggaaaagagaagagggcagaaagcttatttaaagaaataatggattgcccaggccaagtgggtcatgcctgtaatcccagcacttcaggaggcagattgcttgagcccaggagtttgaaaccagcctgggcaacaatgtcaaaaccccatctctacaaaatgtacaaatattagtttggcatggtgacaggtgcttatagtctgaaaggtggaagctgcagtgagctgtgattgcaccactgcacacctgcctgggcaacagactgagatcctgtctcaaaataaaataaaatttaaaaaagaaagagagaaaaagggaaaagaaataatagctaaaacttcttttatctggggaagaaaatgaacatcaagattcaagaagcccaaaagcctttagctacagtgaatccaaaaaaattcacaatgggatacattataatcaaattgtaaaaaataaaaga

SEQ ID NO: 330691 - DNA, 526 bp, Homo sapiens
atgttgccttagaagacagcaaaaaagaagaaatatcaaggcctagagacctagccaaacttgactaaaaataaaaaaaagatattagaaagtgtctaaccatagcttacatttgcattcaaattagtgttcaaaacaatatagagggcatagagatagtgtcttcccatgcagttgtcttaacatcgagctttcttttaattagcaatttgaaacatgcaatatgcttgtgtatattgtgtattcctgaaaaagaagattactcatatagtgttcctcaaactaaaaatggaaatttggttctcagaccacccattattactaccagaaacagatatacctcttaacacaatctccaaagtgatgctctagcagaatatgctatgctatccacatccatgtggatggagctaaaagtctggaaaaaaatgctgtaatctctggcattgttcctctctgctacataattgtgacgttsactgttctgtactgtttatcagaagctacaattgagggaagaccgtca

SEQ ID NO: 330692 - DNA, 619 bp, Homo sapiens
catggaagacgtcagctgatgtgtgaccaccatgctgagagaacatgatttttgtcacttcatttcacctcttacatgatcttaaatctatttgtcattaagatttatttccttggtattttttgaaccactttaagttcttggaagacaatgagaaatcaatcaattgataaatatatactttatttatttctctttattttgattccacaatcacaagaaaatgttctggtttctaaatttgcctcacaggaactctaaatatatctctggagagagataactattctagaatttcagtttttggaaaggtaggctcccctgtgaaaagctttaaatttgtacctgattatatattcgcattttaccttccctgagcaggaatkagcatttagattgggtcctagacttcatcaggccacagtgctttcctgtattctgtgaagtgtgatcatgtaagtcacccttttgaatggtcacatagctttactgtgagcaaacattgttactagtaagtctgaactgtctatggcaggagagagagatggagataatttttaaatataattacttgttaatatgaaataaaggtttcatatttataatttttgataatatg

SEQ ID NO: 330693 - DNA, 334 bp, Homo sapiens
aaacaaaatccactcaacagagtgaagagaccacctacggaatgggagaaaatatttgcaaactatacatctgataaggggctaatatccacaatgtataaggaacttaatagcaagaaaacaaataacttgattttataatgggctaaagacttaaataaatttttttttaaaaaacatacaaatggctaacagttgtatgaggaagtgctcaatmtcactaattatcagggaaatgcaaatcaacaccacagggagaaaaagtttttaacataagcaattcaagaaattgtaaaaggggcaacttaataaacaaaagaaggtagaaggaaag

SEQ ID NO: 330694 - DNA, 334 bp, Homo sapiens
aaacaaaatccactcaacagagtgaagagaccacctacggaatgggagaaaatatttgcaaactatacatctgataaggggctaatatccacaatgtataaggaacttaatagcaagaaaacaaataacttgattttataatgggctaaagacttaaataaatttttttttaaaaaacatacaaatggctaacagttgtatgaggaagtgctcaatatcactaattatcagggaaatgcaaatcaacaccacagkgagaaaaagtttttaacataagcaattcaagaaattgtaaaaggggcaacttaataaacaaaagaaggtagaaggaaag

SEQ ID NO: 330695 - DNA, 579 bp, Homo sapiens
tagaagagaaatagatgggcattctactaaattctctcctgatccttatagacagaattctaggtcaaatgaactaaagaccaatttgaatcaccaagacagtgtcatggcccctcagtcagttcccagacttgaaccagtttacagacccagaatcccttgaatgacggagaggctgggtccttttgaggaagaaccctattccatcaacaaaaatgtataccgctattacttccagcctttcccaaaaggacttgaggcttcacatcagacactgggaaaaagaaattaatcagattcttcaggaactagtgggtaatactatttccaggagatccaaaacatcactgtggcccagtggtcagagttggggcttacagttttcatgtcatcaatggaattttagttcaggtctatctcatagtggactccgtagttctcaaaacccattcagtggctatttccccagttctggcatgcataattggaatagacatactccacagstggcagcatttctacatggtaatgcttacttttaatacatgatgactctctcacataaaactgaaaatatgt

SEQ ID NO: 330696 - DNA, 603 bp, Homo sapiens
ttttattaaaatttgtgggccagatatgggctagaaataagaattcaaattattataattttcagttctctgcttgcttaaataaaacacataaattatgctcctcaacatattaatagttcttttcagtttcaccacctaacctcttatttttctagcactttttttttttttgagacagggtctcgctctgtctcccagactagagtgcagtagcatgatcacagctcactgcatcatcaaactcttgggctcaagcaattctcctgcctcagcctcccaagtatctgggactacaggcgcataccaccatgcccagctaatttttttttttaatagagatgaggtctcactatgttgcccagtatggtctcaaacttctggcctcaaggaatcaccccgccttagcctcccaaagtgctatgattacaggcctgagccaccatccccagcctagcacatttttttaaaytaacacttgactatgaaaagagcatgtatttgcagtaatcattttacgtgttgcctaacatgtttctcattcccctaggatcatgaccatgatgggaagctgtcttttgcagactatgaactggctgtgag

SEQ ID NO: 330697 - DNA, 595 bp, Homo sapiens
acaggggagcatgccagggagctgtgcattctttcatatgtgattgctgagaagtattctaggcagaatgtgtttccatccctttcccttatctttaactccatctgagtgtacttctctaaattaatacagctcccaataaggaatgggaagatgaggtcaagaaaatgatcctgctagaaacacttgcccagtgcagatgtgcagtaactccaccaggatgacctccccaagtcagaatccgtcaagaaaagaacactgaggtgcaccatcatgtttaatgatgacatctgaggacgaygacttcatgtgactcataaactcagttaattatgttattctatttctaaaatatagtggagaatttgtcaggaaagctctagtatcatatcagaggctagaggttcaaaagttcaggcaaaatcaaaaaggtacttttctttaataataaaaaagatcatgtcaagacagattcaaaaaacatcaagaaacacgtcttaatgtcaagaaacatgtcttgacgtcaagaaacatctattaatataaaagaactttgaggaatataaggaatgtagtgatgcgggatggaaaaaaa

SEQ ID NO: 330698 - DNA, 606 bp, Homo sapiens
attcaaagaccatagctatgatgaaaaggacaatttgtgtagtattattcaatagtgtcttgaaagatgccatcatttttacagttggtgttttaaaatatctttctatatacagagaagtcgattactctgaagatttttatgggaccggtagcctttgtgtttcttcctgctatagctttcagaccatcagcacataacatttttgccaacttattgattacgtttttaaaattagcataaattcttaaaattctttcttcttttgtatccatgtcaaaaggttagcaaaataggatatattcacgtttgtctgcatttgtctaaaaatgccagaaaaaagagatctgtatatttgtgctcttttgaactttgacgatatcacataatcttaaatatcaaactaactcaataggtattataatttttttggrgtattcattttattatcagaaaatgactatatagccctctaccaactaccatacttattacaatgtctaagtagaggctgtaataattttttaataaactgatgcatttcttcctcgaaggctacacagcaaattgctttgaacaacctcccaactcactttaaaaaggttt

SEQ ID NO: 330699 - DNA, 541 bp, Homo sapiens
tgcagccagtccgctgagctttgtgtagctgcggtacccataatgcagacttcctttctcactctccccactggagttagtcaatctgcacatcctttagtattttcttctaattattcccttcagttatgcacctgagggaggcctggctggcggattggagacaacccgtgaacccactacatctgacaggttctgaccattaggcacgctctaagtaaacargggacaaggggctgcacatcagtgaaaggccacttggagtgctgacagcttatctggtccaacataagtaggattccagggaaactgattgcttaatagtgatgaggaatgacaaggatttcctaactcttcgacgaaccccacagcaattgtatgtctagaaacaaagtcatgctgagccactgagctatgagacacacacatggcctgcaggtgaaaaggagacaaaggagatgcatccccctctgaactgatggtctgggaagccagctcctcattgccactcaggtcaccagatgcccacctctccagggtg

SEQ ID NO: 330700 - DNA, 582 bp, Homo sapiens
atgaaacaaaaactaatagagctgcaaggtgattcataaaagaaaaaaaactaataagctggacctcatcagcatttaaagcctttcccttgtgaaaagcactgttaagagaataacaagtaaagccacagactcggagaaaatattttcaaaatacatatttgataaaggacttgtatccaaagtatacaaagaactcttaaaactcatcaataagtaaatgaaaaccccagttttaaaatgggcaaaagaactgaacatttcaccaaagaagatattcagatgacaaataaatatcgaaaagctattcaacatcatctttcacttgggaaatgcaaattaaagcaacaatcaccacacacataataaaatgttctaaacacaaaaaagactaacaataccaatttttggtgaggatgtggaccaaaaaaaacttcaattaattactggtgggaatgcaaatgatacagccactataaaagacagtttggcagtttcttgtaaattaaacagtcttattacccaatctagcaattatgcttctgttcaccctccaaraatgtgtgcacacatgttttagaa

SEQ ID NO: 330701 - DNA, 631 bp, Homo sapiens
atgttgcctctggggcaacagagagatggatttcggagccaggttttagaggtggcttggagctggtcagaccttgtgtagtacagggaagtgggagraagaacattccaggtaaaagctgggaggcatgaaactctagatgttaggagggaattaaaagtgcctggaaccagcctggccaacatggcaaaaccccgcctctactaaaaatacaaaaaaattagctgggcatggtggcgggcacctgtaatcccagctgcttgggagactgaggcaggagaactcaggaggtacaggtttcagtgagccaagatcacgccattgcactccagccagggctacaagggcaaaactctgtctcaaaaaaaaaaagtgcctggaagtggcttggtggctcatgcctgtaattccagcactttggttaggccgaggtgggaggaccacttgagcccaggagtttgagaccagcccgggcaacagacccatcttcccatatgaaagaaaaagaaaaagaaagcgcctggcagtaaattttgtgctatgtacattttaccacttaaaggaaaacttctgtttcctccctaaactactcctactctcagagcttacttctgacactggatgggtgtcc

SEQ ID NO: 330702 - DNA, 631 bp, Homo sapiens
atgttgcctctggggcaacagagagatggatttcggagccaggttttagaggtggcttggagctggtcagaccttgtgtagtacagggaagtgggagaaagaacattccaggtaaaagctgggaggcatgaaactctagatgttaggagggaattaaaagtgcctggaaccagcctggccaacatggcaaaaccccgcctctactaaaaatacaaaaaaattagctgggcatggtggcgggcacctgtaatcccagctgcttgggagactgaggcaggagaactcaggaggtacaggtttcagtgagccaagatcacgccattgcactccagccagggctacaagggcaaaactcygtctcaaaaaaaaaaagtgcctggaagtggcttggtggctcatgcctgtaattccagcactttggttaggccgaggtgggaggaccacttgagcccaggagtttgagaccagcccgggcaacagacccatcttcccatatgaaagaaaaagaaaaagaaagcgcctggcagtaaattttgtgctatgtacattttaccacttaaaggaaaacttctgtttcctccctaaactactcctactctcagagcttacttctgacactggatgggtgtcc

SEQ ID NO: 330703 - DNA, 385 bp, Homo sapiens
gagaatagaaaacgacagctcacttagatatatgttgtagttagactcagtttaaaggtaaaggcactcaaattcctaagagcaagccaaacatacagaccttgccttgtaatcacatatttcaccatagtctgggaaatttcatgctgatattcaaagtatgattatctcaaaggtgcttctataagattgtgccaatgtttttaccactcccacagtaagagcccactgaagaataaacattccttctttataggtcaaaaggtttaaaaaaaaaaaaaaaacccggccaggcacagtggctcacacctgtaatgccagcactttggaaggctgaggyggggggatcacttgagcccaggagtttgaaaccagcctgggcaac

SEQ ID NO: 330704 - DNA, 617 bp, Homo sapiens
cctcacctacaacagtgtatagtaaggtcaaggatgaaatttctcagaaactcgctccccacagcaccacgcacaagaagacccacccattccagccaaccccgtgtgtccaagtcccattcgcccacataagcctctatttgacaaattcctcgagctcctacccttggggtggggacctttcgcctcccgtgaggtgccggctctcccgtgcttcgctgactgccsgcattgggtggggagattcgcctctggtgccgagggaaaactgcgttaggcgagggtggaagctctgtcggacccgtgcgagcacgtgggtgcgcgcgggccgcggagtgagcagcagccaggattcctctccagatcgcgcccccgccgcatttcattgcctgaaacggcccacgccccgcgatggcccagcagacacccggcacagcacagcgtcactgcgcggcccccgcagcgcacggacccccccaccctgcccgaccccagacccgcagccgagcccgtctggtatgtggtgggtggagagggtaccaactaagcatcccaaagtccttcagggagcaactccgcgcagttttctcttcccgacccgcagcctccgcagcagc

SEQ ID NO: 330705 - DNA, 656 bp, Homo sapiens
cttatttaaagacaagtctccacattgttactgaacattctttgaaaatatcacaggtctataactggggctatctgagtagtataacaagttctcttcagaataatattgggttccatgctccatttatttatgtttcatttagaggarcattacagaacaagaacaaggaataacaatagtataaatggtaaaacagttaggtgtaatgattaagtttgcaaaaacgtgagttaaaattctagctctgctacttaccagctatgtgtcctgtcaaatctccaactctcattctatctacccaacaggccattggggtaaaatgaaggcaagttgtgtaaaacacttagtacctgacgtatgtttattgaatgtcctcaatatatggtaaattatattattatggtttttgctgctgtggttagatatttagttatgttttttgatgctgaaggcatggtatatatgaatatgcttgtcttatggagataaaactttaaaactcttaaagtctttggaaaatgcacataaactcaaagagaaattccatttaggataaataagaatattctatttacatcagaaaagaatattctatttacatcagcttagcctcttcaatctaaaattctcaagaatactcaggatttctagtc

SEQ ID NO: 330706 - DNA, 656 bp, Homo sapiens
cttatttaaagacaagtctccacattgttactgaacattctttgaaaatatcacaggtctataactggggctatctgagtagtataacaagttctcttcagaataatattgggttccatgctccatttatttatgtttcatttagaggagcattacagaacaagaacaaggaataacaatagtataaatggtaaaacagttaggtgtaatgattaagtttgcaaaaacgtgagttaaaattctagctctgctacttaccagctatgtgtcctgtcaaatctccaactctcattctatctacccaacaggccattggggtaaaatgaaggcaagttgtgtaaaacacttagtacctgacgtatktttattgaatgtcctcaatatatggtaaattatattattatggtttttgctgctgtggttagatatttagttatgttttttgatgctgaaggcatggtatatatgaatatgcttgtcttatggagataaaactttaaaactcttaaagtctttggaaaatgcacataaactcaaagagaaattccatttaggataaataagaatattctatttacatcagaaaagaatattctatttacatcagcttagcctcttcaatctaaaattctcaagaatactcaggatttctagtc

SEQ ID NO: 330707 - DNA, 489 bp, Homo sapiens
aattattcctcctccaatattgcttctcatttattcttactaaacattttcactgtgttcaagtactcagcaatccacagtgctcatccttccttcttaggatgtctgataattagaaaatgccttctctgtttgaattatgctctttcttgcttcacttaattgartctagttctatgtcatgaaagctatacaaaatgaatttaaactcagttctaataatacttttgatatgtttttgaaaacagctattatatatctcctccccttcgtgtcctctcctctttatatgacatgcttccgagtttaagatggtttctcatcaattcagtctctcagtacctctttaccaaggctgttcatgttttcacataagcagacacaatacctgagtagctcatgataaagaaccccatctggcagccattgctgcatcactgcttcctttcttgtacttttgtcatcactacgtactgccaaccacactgt

SEQ ID NO: 330708 - DNA, 635 bp, Homo sapiens
atatgatctgacccttttctctagcttcctttaagagtttttcatttgcattgaccttggtgaatgtgtcttagggattgtcttcttgtatagtatctcacagggattctctaagtttcttgaatttgcatgtcaccctctccggtgagattggggaaatttttgtggattatgtcctcatatatgttttccaatttgcttactctcttccttctcyctcaggaatgtcaatgagtcatgtgtttggtccctttacataatcttatatttcttggatactttgttcattttttaaaagattcctttttctttatttctgtctgactaagttgattttaaggactggtctccagttctgaaattcttgcctcagcttggtctagtctgttgctagggcttccaactctgttttgaaattcctgtaccgaatttgtcaattccagaagtttagtttggttctttcttaaaatgcctatgtcatctttcaagtcttcactcatttttctatgttctttggattggatttcaactttgttttgaatcttgttgagctttcctgacatccaaattctgaattctgtgtttgtcatttcagacatttcagtcttattactatccatttctagggagctact

SEQ ID NO: 330709 - DNA, 489 bp, Homo sapiens
aattattcctcctccaatattgcttctcatttattcttactaaacattttcactgtgttcaagtactcagcaatccacagtgctcatccttccttcttaggatgtctgataattagaaaatgccttctctgtttgaattatgctctttcttgcttcacttaattgaatctagttctatgtcatgaaagctatacaaaatgaatttaaactcagttctaataatacttttgatatgtttttgaaaacagctattatatatctcctccccttcgtgtcctctcctctttatatgacatgcttccgagtttaagatggtttctcatcaattcagtctctcagtacctctttaccaaggctgttcatgttttcacataagcagacacaatacctgagtagctcatgataaagaaccccatctggcagccatygctgcatcactgcttcctttcttgtacttttgtcatcactacgtactgccaaccacactgt

SEQ ID NO: 330710 - DNA, 635 bp, Homo sapiens
atatgatctgacccttttctctagcttcctttaagagtttttcatttgcattgaccttggtgaatgtgtcttagggattgtcttcttgtatagtatctcacagggattctctaagtttcttgaatttgcatgtcaccctctccggtgagattggggaaatttttgtggattatgtcctcatatatgttttccaatttgcttactctcttccttctccctcaggaatgtcaatgagtcatgtgtttggtccctttacataatcttatatttcttggatactttgttcattttttaaaagattcctttttctttatttctgtctgactaagttgattttaaggactggtctccagttctgaaattcttgcctcagcttggtctagtctgttgctagggcttccaactctgttttgaaattcctgtacygaatttgtcaattccagaagtttagtttggttctttcttaaaatgcctatgtcatctttcaagtcttcactcatttttctatgttctttggattggatttcaactttgttttgaatcttgttgagctttcctgacatccaaattctgaattctgtgtttgtcatttcagacatttcagtcttattactatccatttctagggagctact

SEQ ID NO: 330711 - DNA, 488 bp, Homo sapiens
atggatggattaaaaagtaattatattgagggtaaaaagtcaggccccaaacaactacatacttaataattccattcatatacaatttcagaaaagaaacctaatctttagtgatagaaaaacatagcaatgttttcctagctgcgtgggagggcaggaaagagggagtaagagagtgtggsaggggaaattttcacagggtgtgattgttatgttcatgatcttaattgtagtgatgatatctgcatacatatgtcaaaatttgtcagtttatacactttatatatgaagcagtttattattggttaattatacctcagtagaccaataataccaaaaattaaaccaatacttaagcaaaacccaacaaatcaatgtttaagcaaaatataaaattttaaaattttatttttaaaaaaacctcccaagtttaaagcagacatgagaacagctccagcattttacgtctctttgtattccccagccca

SEQ ID NO: 330712 - DNA, 603 bp, Homo sapiens
ggggaagtgctacacactttaaaacaaccagatctcattaaaacaaccagatctcatgagaactcactatcatgagaacagccagggggaaatctgcccccatgatctaatcctctccacccatccatgatccaatcatctcccaggtccctccacctacattggggattacaattcaacatgagatttgggtagagaaacagaaccaaaccatgtcaaatggtattggaatgtaaatattataattgttttaatctgacatctgaaatacttctcatcccaagtgtatgggataacgaatactcagtctatcatatgatggtccattatcaggactatccctattttagtgatagatacacccgastgaactagcctgacgcttttaagcattaagtttatataagtgatacttcttgctttacttctgtgctcaccaaacactttactggttataacggttcattctttacagcactgccgatgcaaaagtgtattataattgctgatgtaagactgctgtccacatgatagttacatttctccctgagatttaataattgtcataaagttataagccaagagtgtctgactttggtaaaa

SEQ ID NO: 330713 - DNA, 630 bp, Homo sapiens
taactgcaattcagtagccttcgtattatctgagaatcagatccgtgaatcaatggaaaaatactctgcctactcttattgctacaagtcataaactgtctttagtctatgtgccgagagtcccttttcttcctaccagatctatgagactgtggcagactctctaatttattaacttggacacaaacacagagtaaaatctgaatccctttaaaattcttgccacaggcctggcgtggtggctcatacctgtaatcctagcactttgctttgggtgggcagatcgtttgagcacaggagtatgagactggtctgggcaacatggtgaaaccatgtctctacgaaaaaatacaaaaaatagccgggcaaggtggcatgtacctgtagtcccagctaatcgagaggctgaggtgggaggattacctgagcccaggaggtcaagcctacagtgagccatgatcgtgccactgcactccagtctgggtgacagagtgagacgctgtctcaaaaaagcaaataaataaaatttcttgacacaatgttgtyttttgattttcatttccaattggtcacatactgatatttttatataatacaagcttgtggtagatagcttctgaggtaactacc

SEQ ID NO: 330714 - DNA, 610 bp, Homo sapiens
gtcatttcaatcttcatgctcatctttagagagatccagagcacacacgctctaaggcagattctcttacagaggaaacatcattccttgtgtatgtcctcgaaatcaaagattgcctttaaagtcaaataaattatagataacatagcttgggtgttcccctgggaattgaatcagtcattgccgctcgtctttgaacttaatgtaggttccaaactccaagctacagacagtattcctacatccatagcatctgactctggcaaccatttctgacaatcgtcttggcaggctgcaccctccctccaggactgctggttgccttggtgtctgcatagagctgctctattggataawtttttttttttacacttttatcagctctctaaaatgagggttgtcctttttctgggccatgcatgaaagaaacaagcctgcctactcgtgcacagcacaacggaggttctgtctccagactgccgtatctactcatcaagctctggccaaaaatctgctctgtgggccaagaggcacatatcaccttctgtgcatgtcacataaatctgtctcctggcttttgggtcactttccagtttgagaccaggcatag

SEQ ID NO: 330715 - DNA, 629 bp, Homo sapiens
acagtatattattaaatcatgtgcttaccatggtgaatgttatggtatataaattatgcttcaataaagctttaatataaataagtagaattttggataatctactttttatgaacctttttcaacataattctgcacatttttagtattaaatctacagaagtccttcccagcaaaaccattgaatttactcagcttgcaaacctatgtctaattactgttatacccagaattaggcaaactctttctgtaaaggggcaagtaattaatattttaggctttgtgggtcaatgtctctgttgaaactactgaattctgttattgtagagtaaaagcagccacacatagtacataaatgagcaggtgtccactgtgtaccaataaatctttatctacaagaacaggcagtgagcargatttgttccatgagccatctacagttaacacctgctatagatgagtaatctctgaccttgtagtaagacctgaacttccagatttcagagacatacccaggtagtctaattccagaggccacattttcttaaccactatgctctactgtctccaatcataaattgataccaaaatgtatttgaacaacaaactggtttctggtttgttcctct

SEQ ID NO: 330716 - DNA, 635 bp, Homo sapiens
tcctagatacagcttctgtttagagtcataccgaacagaaaaggtaacatgatcattccccattgctttctccttcaattgcaattgatttttattagtaactatgagtatcagaaaaagagtttctgtctctgttaatgaactgaagtgtgcaggtgtgtatggatatgttcgtaaaaaccagggctgtaaagtgcccaaattctccccaattttctacaatattttctgtttcttatcattatgaccaaataatgatggaaaaactaatgatgccattaccctgtaattgggaattgaggccgtttagtaatgataaagcatgccctgagcagagttaatgggccaaccaggcwgcgccactgggtagctggtccgcagagcaagaagactgaacagttacaaggtagagtgttgttcataacaggcaccagcttcaggaaacagcttttaccgattattgtctactgctctatcagcttagggaaagttaacagaacttgaataaaaatgtgaagtaattcttgatgtaaaaaaagtcatttttctccacaatttgatcttttagaggcatcttattgaacttattttgaaaagaaaccattattttaatgctaccctattctgcatatgct

SEQ ID NO: 330717 - DNA, 635 bp, Homo sapiens
tcctagatacagcttctgtttagagtcataccgaacagaaaaggtaacatgatcattccccattgctttctccttcaattgcaattgatttttattagtaactatgagtatcagaaaaagagtttctgtctctgttaatgaactgaagtgtgcaggtgtgtatggatatgttcgtaaaaaccagggctgtaaagtgcccaaattctccccaattttctacaatattttctgtttcttatcattatgaccaaataatgatggaaaaactaatgatgccattaccctgtaattgggaattgaggccgtttagtaatgataaagcatgccctgagcagagttaatgggccaaccaggcagcgccactgggtagctggtccgcagagcaagaagactgaacagttacaaggtagagtgttgttcataacaggcaccagcttcaggaaacagcttttaccgattattgtctactgctctatcagcttagggaaagttaacagaacttgaataaaaatgtgaagtaattcttgatgtaaaaaaagtcatttttctccacaatttgatcttttagargcatcttattgaacttattttgaaaagaaaccattattttaatgctaccctattctgcatatgct

SEQ ID NO: 330718 - DNA, 586 bp, Homo sapiens
aaattccccgcataggcaccaacgcataaactgcagttagggagtctatgcagggtcaaccctctagagcagggatcagcagatttcctgtaaagagtcaaatactaaatattttaggctttgcaggccataaggtctttgtcacaatgactcagctctgcagctgtatggcaaaaacagctacagaagtgtggctgtgttccaataaagctttatttataaaaaccaatggagggctggacttggcgcgtggatcatggccgatagacccttgcactggagacatgttggagacctggcgcatttggcagcagtgtcttccctctctgggcccttctctctactgggtgctggttttctgccttggataggtacccagcctyctcacactctctccccactccttcatagaaggacctgacaaattcagtccacctgagatgaggataaaggggttacatttacctgaggttggtggctctcagccctggttgctcagtgacagcccctggggacatttaaaacatctcgatgcccaggtcccactccagagactctcatgcatttggtctgggtgcagcctggg

SEQ ID NO: 330719 - DNA, 630 bp, Homo sapiens
caggaacacgtgcctgtccagaacttaggctttggggatcagatcattggactctgatgaccagccctagcactcgtttggtgtgcattggacatgcacatgaactgatcaagcttgatttcttcctctgtaaaacaggaattctcaaagcttcattttgggattaaatgagattaaatgaaataatggatggtacatgtcagtgttggtcatagggaagtaaaagattgaatacaccaagggacaatggtcagatcatctataaaaatagaactgtgacccaggatctgcatcaaccagcccagtaaactcacctgttatctagccatgccagacttgtaggatgtcagaccaagatctctgggcaaacaatccagcaaaacaaacaatattccctgcaacaactgaccccaaatgascagaacttgactaataactgacagcttttgaaatttgtgtccccacttccaatttaggatcaatcagagagagccaaatatgcacccctaaccaactgagtgcctggattcctgcagcttccccaggccaacagcctctaatcaggacattctcgaggccttcccttttcccactgtgaagctctcccactcctctgcttgactttgagtt

SEQ ID NO: 330720 - DNA, 575 bp, Homo sapiens
tgtccagaggcacaaaggggaatctctgaaggacctgacagtatgcagacagtgstcaatatgagcctccctaggtcctccctctatgggtcctgtctgcttaggaaccaagcacctttaccacacacactcagccactccaagggggctgtgtggggaaggtgaactcagttctgttgctgatctgcctgtcattatctaggcaactccccattatccagcagactcataagcttacatgcctttccaaaagaatttgtactggcccagtgaaattatgacctctctgcatggatacctctttccttctccctgcctatttttctccttttgcctattagtatctaacctgctaagtattttccttagttatcttgttgttttctcccactaaatgtgagctttgtgaggacaatgatttacctttatcacagctatgtcttcagcaatcaaaagagtgcctgtctcatagttggaactccataaatacctgttgcatgaacaaatgaggaatgaataatcggaaagccaatttttaaaacaaagggataagtcaccgacttacaaaatttgct

SEQ ID NO: 330721 - DNA, 544 bp, Homo sapiens
ccagccttggaaccaactttgtgattcgagtttycttggtttaaaaaaaaaaaaaaatccaatgacatttctatggaaataagcctaagtgggcacgttcccactcattctaggatcatgcacaataatgatgtcacaccaggaagctgaggcttgtaagcttccctgtagtatttcaaacagtatttattcccattcattttccaatacctacaccagtttgtaagtgatctagcctaatggttgccctcgtccaaactgcccttcgagttttataatgaattctcccaagaaaagcagctttgcggtgatgtggagagacaagctgtttgaaatgtgagcaggatgagggagccctagaggtttatgtgggcatttgtaatagaatccagttcctaaatcattcttacatgtgtggttcaaagtaaacattacacaataccgctatcatttccaatttaactgccctgagggctaaattctgaaagccaaggaaatagatacttttattattaaggtaaattgaagaagaccttcatatacc

SEQ ID NO: 330722 - DNA, 576 bp, Homo sapiens
tcctcacccccacctgcaactcagtcctcacctcactcaagtctcttctaccccagcacgaagttgcaaccgctctctttaaggcacccagtgatcccctgtggctacatccaatcaatatctctacatctttccccgcaaaatggattctactccttcatctgcgatgtcaacaaataaatgacaacatgttctactccgttgttaatgtcagaaaccaagcaagagacagcatggggctggagccccgtagagagtgggggttcaccacccagtccttatggaattctgctgtgtttacatgrgcgacagatgatgtggattcaatgccaaacaaaagttcaaagcttttcaaagtttgtcaactgcctaaacgtaaatgtgagacttgatatttctactggaaaaggaactttccacactcctccgacatgaccagaaccttcccgttcccttctctcctcagagccctggggaaatgctggatcctggccccacccgacccatccaaacgtggccaaagaccctggggctcgccaggactcctgagagtctgaggctcccacatggaacggc

SEQ ID NO: 330723 - DNA, 431 bp, Homo sapiens
ggtttatcacatcccttatgtgacaaaattcttttcagtagtaattatgtaatgaaacatrtattaatgatggtggaaaagaaacacagtaaaaatgttcacagtcattaaaaagcacagtcagtaaaacacggtcagtaaaaatgtttacagtcagttaaaaaaaagttttactgaacctcatctatgtatatatcattccagttaaaaataaaaagtaaaataagtattacaacttaaatgaaagcttcccattccaaaatggtggtgtagaaacaagttggcctcattacctcctccccacagaaacccagaaacaaatacacagtgccaagattatcaccagtagtattccaggactcagatgagaatgagacagttcctggaatcacagagaattgaacaaattttaagcagacagtaagggaatc

SEQ ID NO: 330724 - DNA, 401 bp, Homo sapiens
tgcctttattaggtcttttgattggaaaactgagttgctgctctattgagtaaaagtttttgctttctgaaatctttgaattatcactttagctaaatagatgactattattttagagtgacctgtgatttattttaatatcaagtgtcttcaacctttgatatttgacatacctcccaaaaacaaaattcaaattctaaarttgagtctttttgacctcaaagtaactcttggacattcaaaaaaatggagggctcttgaaaatccaagagggacatattaggcttattgggatgttaaagggatgttaaaatcatatgggaagtattatccaataagaaatggtgtttgactttctttgaattatctttgtgtggatgttattaatgtatgctctccaa

SEQ ID NO: 330725 - DNA, 571 bp, Homo sapiens
tctattctcttcttatgtctctgttcctataggaaggctgtattttcttggttccttgggaaaaccaaacagatgttttctaaaattttcttctatatcttacaaaaaatatttgtttagagggtgtttttcttctgagtctttagattaaaaaattttcgaaacaaagacaaggttgtatgagttacctaacygcacacaacctcttcattagaaaaatgatgtcagtaatggtactcacctcatacaattggtatggtaagtaaatgaattaatacatgtgaagtatttgcagtagtctgggtccagtcaggatacagaaaccagagagtaggctaaactgggaaaggttgatgtataaatgtatcaacaaaagggtaactatagaatataaggaaactacatggtaccctacggttgagggtggcaggaaaaaacaaacttggaaggggctcagaccttgttggagaagatgtgattcagcccactggatagcagagaattttgttggcttggccagcctggagctgacctgggactgctgggcaagcaacaggccaccctctggact

SEQ ID NO: 330726 - DNA, 657 bp, Homo sapiens
ctagaatcttgttcaattgtagacttaattagttctaggtacttaaccactcaaaagagctatcttatataaattaagttattccattaacaggctcactttttctagaatcttgaaataggagaattcataaatttaaccaaaacttctgagttgaagcttatgatamtatcttgacatgctatactagaggaagaatatcaattatgtataagagataactgattattttaaatcatattacacattcggaaatacatttgaaaataaagggtcttatagacttaggttaggcataaggaagaaattacaagaaatgttaactattaaaatttattgcaaggaactcacattctttgcagatattttagaacggtagtaatcgaaagagatggtttatttatgaatttagaaatctgtattttttaattcaaaatgctatttttcttcctagtttctatataccaatattagcttatagtagtatacttctactcacctttacaaggcatatggcagatagattattttcatggtcattataatttttgagattaattgcatcttcacaaagtcctcttatataaaccaaacaggtttgaaacaagtcatcagccaaaaaaagatggtggtacaaaaatgacctgaaagttaaaa

SEQ ID NO: 330727 - DNA, 552 bp, Homo sapiens
ttttatcacaataaaagaaagtccayccagacaattcttaataaatatataatgtgctgcttagcttattctcgaaaataacctctaactaactctgggaatactggacctcaagctatatataccttctaatattactgcatttaaattttgcattaaatcattctttaaatgtaattatggttacagtgaatgagtatcactatagtaaacaagttactaccttcacctaatcctcataaaaaccccaagagacagaaattattactctcattgcacatacaaaaaaaatctgaaagcttaatttgtcaaaggctatattgctagcatgtggtaaggctgaagttcactcatgggtctgtgcacatcgttataatatgaactaactggggcctgaaaatatttttgtagtgaagaaatctcttagctgttacactttttgtgacaacaagaatgaaccagtaaatagttttatttcctctagattgtaaactacaagaaaggaatagccacagctaaatggaactgtaaattttacagattacaatgggg

SEQ ID NO: 330728 - DNA, 620 bp, Homo sapiens
gactaactcccccaaatcccacttctgtagagctttggagctgcagcagctgttgaggtaatggttactttcctcaaaaggtagccattatgatgactggcttcaaaaagtaaaaaaaaggtcttttgaaaaattgacagttctccccacaaagagttgagtgactggtcagctacaatttcttctaacttgtaattccttctaatatatgatgttgaggttttagagagagcagttaaaataaagtrgtctaattagacagtgtttgcatcatctttttcagtttagatgttgaggaagtgttcagatcctaccaagcaattttttcttcttttgagtgagaactgtctatacttttgtacttagtgtctttacctgtcccccttttgagctttatgtcttaaagaaatgttatgccatttactccttttaatagattaaacttattttcaggttattgaagaaaacctgtctcacagaatcataagacaaactgtatgaaactcttggaacagtgcctggcacatggtagtatacagtaaatgttatctgctgtttcattttagttttaacatatctaccatgcacctgcctcaatggaatagtgtaaaaggatattt

SEQ ID NO: 330729 - DNA, 620 bp, Homo sapiens
gactaactcccccaaatcccacttctgtagagctttggagctgcagcagctgttgaggtaatggttactttcctcaaaaggtagccattatgatgactggcttcaaaaagtaaaaaaaaggtcttttgaaaaattgacagttctccccacaaagagttgagtgactggtcagctacaatttcttctaacttgtaattccttctaatatatgatgttgaggttttagagagagcagttaaaataaagtagtctaattagacagtgtttgcatcatctttttcagtttagatgttgaggaagtgttcagatmctaccaagcaattttttcttcttttgagtgagaactgtctatacttttgtacttagtgtctttacctgtcccccttttgagctttatgtcttaaagaaatgttatgccatttactccttttaatagattaaacttattttcaggttattgaagaaaacctgtctcacagaatcataagacaaactgtatgaaactcttggaacagtgcctggcacatggtagtatacagtaaatgttatctgctgtttcattttagttttaacatatctaccatgcacctgcctcaatggaatagtgtaaaaggatattt

SEQ ID NO: 330730 - DNA, 548 bp, Homo sapiens
tcagtggtctaaatgtaccaattaaaaggcagattgcaggagtgcctataaaaacaagacccaactttattgctgtctatatgaaactctttaaatataaatacacatggattaaaagcatgggaaagatatgccatgctaacattaatcaaaagaaaataggattagctatattaatttcaaacagcagatttcagagcaagtraagttatcagggataaagacacatgagttctataatggtaaaagtgttagttctccaatttaccttatgtgcctaataacagagtgaccaaattctcaatgcaaatactggtagaactgtgaggaaaaaatagatgaatcactattatagttggagacttcattacccttctatcagaaatggccagatttagcaggcagaaaatcagtacagacattgttgaactcaacaacaccattactcaactggatataactgacatctgtagactacttcatccaacaacagaatacacattcttccctagctcagatagaacatagaacgtagaacacattctgaa

SEQ ID NO: 330731 - DNA, 567 bp, Homo sapiens
gttttttcgatgggcccaacatgttagcaactagaagaaaatactaataactcctaatatacacataaattccaaactgttttgctaaaagtccacaacgagtttctaaacatatacatctgcctttgtaaatagagacattcaacaaatagtcattgtgcactgacttatgtcttctcctcaccaaccacacctccccagggtctcatgatgactaagtaggacagagggaaggagtctacacactgtaagagctccatttcctcctccaaatctcaggagtcaaagatcagacatcaccatccactcctctcacgtaaacagaaagtcaaagaaacatttatgaagtgccttgctaacgtcaggcaatgactgtatctggcaatgaggatacaaagataagtaaggctaagttgctagtggaagcaaatctaatgctgactgctccagagacatatcacaaaggttyccagggagtcgagagaaggaaggcactctgccctctcatattccaatataagattacttccaaccttccttctgactcctttgtttacctgctgtata

SEQ ID NO: 330732 - DNA, 557 bp, Homo sapiens
attgacattggttgcttcaggggaccatcttggtagagttggggtggggtgcagaaagaggcaggtgtgtacttttcattttatagacactgctgtgattttatgtgtttaattttaccctattatcttaaatatatatgtattttttaatagtgacaagtaatttacaattcactagtcaacatgctcttttctcttccatgcatacaaaagccataggttgaaggcaaaagataggactgcaatgtatgtatatatatgttttatcaattttyccacggctgttgtgacattccttatgttcttatacacacatttattctggctttggcgctacctttcaggttaatagaaatcccacatgggaaagcagcagtgagtaagataacaggaaataaaaacatccggcctcatattctagtccttaggatgagcaaccacagaaaagatcagcgatgacatttctttatcaaataaatactgttattcataggactcttaaagatacaggagtattttctttttacaaagagttttctcttaaatggagtttcttc

SEQ ID NO: 330733 - DNA, 557 bp, Homo sapiens
attgacattggttgcttcaggggaccatcttggtagagttggggtggggtgcagaaagaggcaggtgtgtacttttcattttatagacactgctgtgattttatgtgtttaattttaccctattatcttaaatatatatgtattttttaatagtgacaagtaatttacaattcactagtcaacatgctcttttctcttccatgcatacaaaagccataggttgaaggcaaaagataggactgcaatgtatgtatatatatgttttatcaatttttccayggctgttgtgacattccttatgttcttatacacacatttattctggctttggcgctacctttcaggttaatagaaatcccacatgggaaagcagcagtgagtaagataacaggaaataaaaacatccggcctcatattctagtccttaggatgagcaaccacagaaaagatcagcgatgacatttctttatcaaataaatactgttattcataggactcttaaagatacaggagtattttctttttacaaagagttttctcttaaatggagtttcttc

SEQ ID NO: 330734 - DNA, 606 bp, Homo sapiens
atctctaaatttgatagtcaccagtattcaaaacctttcctgagaattgacatactaatttatacagcacgggattcgttgaattaatcttagatttacatcagtttctcctgtgtcagcctctttccggactccctctacttgaacacaatttgtagctgtaaattgcagcttgtaattagtatattatggcctgttgagtaatacttttaaaaataccacattttttttcaaacagcactttgaattcttcctcagtgcaaatgaaatgtaaaatcttgtttgatcaaaaaaatgcaatgttgagatcaatgtcaacaaagaatgtcatttaaggtaagcatagttgggcagaagctcctaattttcaaatagttaatcagctaaaatacagttttggggggaggtgctcaaattttttttttttccactactccccactttctttctttttggttgtttttgaaggcaggaattctgtattggatttatgcttcctactggtgtgaaactgacacataaagcctcctttgacttcytgtatttccttgttttatacacattaacagctttgttccctccccttttctgtctggcagcctaggg

SEQ ID NO: 330735 - DNA, 639 bp, Homo sapiens
cccacccacatctcatctcataatgtaatcccctcatgttgagggagggacctgtaatccccacgtgtcaaaggagggaggtgattggatcataggggcagttcctcccatactgttctcatgaaagtgagttctgatgagatctgatggctttataagtgtttagaaattcctccttcatgcttctttttcctgccaccttgtgaagaggtgcttgcttccctttctgccatgatggtaagtttcctgaggcctcccaagccatgcagaatggtgagtcaattaaacctcctttgtttataaattacacagcctctggtagtatctttatagcaatgtgaaaacggactaatacaaatgtataccatggaacatttttatacctagaatacactgaaccacctttgggtawtgctgaagttgctttcacatttgattttcatgctaagagtcaataaatgtgagacagagatcctttggagcattcactactctcttcctgtgattttcttaaactgggaattcttttagaaaacttatcttcataggtgcaattagagaggtttaatctacaacttggcctgcaattaaagagtgtccttagtaaatgagagcaaggcctgtgtttggtttgtttaa

SEQ ID NO: 330736 - DNA, 652 bp, Homo sapiens
atgagaagtcactcagtattgcaaggacaacatcaaagggatggtgctaaaccattcatgagaaattcactctcatgatccagtcaccttccacaggccccacctccaatactggagagtataattcaatatgagattaggatgggaacatatatccaaactacatcagatcgtgtctcaaaaaaataaaaaagaaaaaaggaaaagaaagaaagctagaatggttatattaattcagataaatacaatttctgaacaaacaatattaccagggccatttcttaatgataaagggggtcattccgacaagaggacataaatctaaaagttaaacatctaaaaacagagcttcagcctgggcaacatggcaagacctcatctctacaaaaaaatacaaaaaattagctaagtgtggtggcatgcacctgaagtcccagctacttgagaggctgaggtggggggatcacttgagcctggggaggtcaaggctgcagtgagccatgatcgtgccactgcactctaacctgggcagcagagtgagatcctgactcaaaaataataaagtaawataatctaaatataaataaacagagcttccaaatgcatgatagtgatgaaataaaaatagaaaaaaatcacagagtcagagatt

SEQ ID NO: 330737 - DNA, 552 bp, Homo sapiens
ggagaccaccctgggcaacatagtgagaccctgtctctataaaaataaaacgaaaaataaatagctgggcatggtagtggttccccgttgcccaagctactcaggaggctgaggcaggagtatgtcttgagtctaggaartcgaggctgcagtgagtcaagattgcatcagtgtgcaccagcctcggtgacagagtgagaccctttcttcaacaagaaaaaaagaataagcaattttcaccggaagcaatctgtctatgggattaaacagtgaagaagaaagaagagaaaaagtaaatagaaaaattggattttatgctgaatattctttgactaatataaagtttggggagagagaagaaacgtgcagttgtatgtgctttaatatttctgcagtcctgaatagatgtgtaataaattagtaatttctgcagtccagaatagatgtgtagaagtaatactaattagtattagtagaatgatgaagacaaaaatgagtagaaagctatatgtttagggagacagcagaatgatattagaaattaacactaat

SEQ ID NO: 330738 - DNA, 622 bp, Homo sapiens
tgagtagctgggactacaggcgcccgccactatggccggtacttgaactaaatgtgtgaacaaaacagacacaaattcttgccccctccatccccaaaggacatacattctagttcaagcaaacagacaataagcagaaaaataaataaaatagatgaagcatcagatgttggcttagaccagggtatttgcatgagcaatagtcagatttgaggtatattgtaaaggtggaactattaggatcaaccgagactgaattcatgtctgagaacaaaaaattccagagtgtgggcctgagcaaccagagagatatcattgactgagatggggmaggttccaggaatatgtttggaacatgaagatcaagagtttgattccggacacactagcttgaaatgcttactagagagccaagaggaactgttgaacctggggttcaaggaagagtttcagacaagagacatacattttattttatattttatttttccataagcaatttgggtacatggggtatttggttacatgagttagttctttggtggcgatttgtgagattttggtgcacccatcacccaagcagtatacactgcaccatatttgtagtattttatcccttgcc

SEQ ID NO: 330739 - DNA, 622 bp, Homo sapiens
tgagtagctgggactacaggcgcccgccactatggccggtacttgaactaaatgtgtgaacaaaacagacacaaattcttgccccctccatccccaaaggacatacattctagttcaagcaaacagacaataagcagaaaaataaataaaatagatgaagcatcagatgttggcttagaccagggtatttgcatgagcaatagtcagatttgaggtatattgtaaaggtggaactattaggatcaaccgagactgaattcatgtctgagaacaaaaaattccagagtgtgggcctgagcaaccagagagatatcattgactgagatggggaaggttccaggaatatgtttggaacatgaagatcaagagtttgattccggacacactagyttgaaatgcttactagagagccaagaggaactgttgaacctggggttcaaggaagagtttcagacaagagacatacattttattttatattttatttttccataagcaatttgggtacatggggtatttggttacatgagttagttctttggtggcgatttgtgagattttggtgcacccatcacccaagcagtatacactgcaccatatttgtagtattttatcccttgcc

SEQ ID NO: 330740 - DNA, 536 bp, Homo sapiens
ttagtcatgtgacttccagtaagttattttctttccaccagccttaattttctcatctgcaaaatagccacgatggccatttctcttgatggtagagcattgatacaatgacttttcaatctatccatacgtgggacgaatgtttccttcctggtttttgtcggacacacagacatgtctatgccttttgctgcattggccctgtatattcttactaatatagttccatgcttaaatcctggtgatgtaaaagcatcagttttggagccagacatccatgttactcatgtgacttccagtaacttattttctttccaccagccttaattttctcatctgcaaaatggccatgccatgatggccatttctcttgatggtagagcattgatacaatgttytgtgaagaggctgcatggtgtgaaccaggtagcaacatgcaacaactgtccagacacttaataaagaagacattccgtttattttgtagagctgaatcgtttctcggtggttgaattgcatgtttattactatctccc

SEQ ID NO: 330741 - DNA, 615 bp, Homo sapiens
agacatttctccatgtgcactcccttctcccactgttgcatgcttgcagctgggcatctggctcctggaatagctcactmtctccagcctcccttgcagctagatctcagcacttggcagagctcctagactgatggggtgggagcagaggtggggtgctcgggatggagaggagcacactctcccctttcccacttataaaatataaaaaattataggccaggtatggtggctcatgcctgtaattccagcactttgggaagccgaggcaggtggatcatcttaggtcaggagttcaagaccagcctggctaacatggtgaaaccccatctctactaaaaacacaaaaattagctgggcctgttggcaggtgcctgtagtcccagctacttgagaggctgaggcaggagaatcgcttgaacctggggggcagaggttgcaatgagctgagatcacgccactgcactccagctgggggacagagtgaaactttgtttcacaaaaacagaaaataaataatgaaaaaaatttttaaataatgtttgccttaactgccttttaaataatgtttgccaaactgccttccagaaagcttaacaaatacaaaattccacc

SEQ ID NO: 330742 - DNA, 574 bp, Homo sapiens
gagggaagaagacataacctgccgtgcctttcaatgcactcaagtttgtcctgcagtataggaggcaggaacctgctgtttacccagtggcccccagcccccacagccactcacagtgtgagcatctcactgcagtcagtagctttagtattaaagatacatatttttcacacccaggatccctgagcacaagccaacaactccacttggtgctcagccaatgaacaataatgtgtcaatgctgaaagaaagacgggaagtttcgagccgtagaagctgtattttatgagtggtttgagggactttcaagggtgatgttgattgcktgttattttcgcatcatgtgtttgctctggaaactaaacttctttctggaatgggacttcattgccaagaccagtgaactctcagtgaagcattggaggcttgcgataagaaagggtgaatgaactataggaacatgagttcttggccgccttcattcctatgcaaattgacatttggtttctctctggaggaaatgcctggccaggatcacagggcaatgcctgtgggcatgggccttgagcatctc

SEQ ID NO: 330743 - DNA, 574 bp, Homo sapiens
gagggaagaagacataacctgccgtgcctttcaatgcactcaagtttgtcctgcagtataggaggcaggaacctgctgtttacccagtggcccccagcccccacagccactcacagtgtgagcatctcactgcagtcagtagctttagtattaaagatacatatttttcacacccaggatccctgagcacaagccaacaactccacttggtgctcagccaatgaacaataatgtgtcaatgctgaaagaaagacgggaagtttcgagccgtagaagctgtattttatgagtggtttgagggactttcaagggtgatgttgattgcgtgttattttcgcatcatgtgtttgctctggaaactaaacttctttctggaatgggacttcattgccaagaccagtgaactctcagtgaagcattggaggcttgcgataagaaagggtgaatgaactataggaacatgagttcttggccrccttcattcctatgcaaattgacatttggtttctctctggaggaaatgcctggccaggatcacagggcaatgcctgtgggcatgggccttgagcatctc

SEQ ID NO: 330744 - DNA, 339 bp, Homo sapiens
agttttttcgtaaaagccagaattgtgtatttttacatgaaacatctttatttatagggtggcgactaactctgtttcttttaaaacaccaggctgaccaaacaaaacacatctgcaggcagatctgctttccaggatgcctgttttcacgttctggtttgcattctgtctgttttcttctttctctaccgtctgatttcccactcatttttagccaccacggtgctggggcctgccctgctggccactctcactgccttttacaaacacatcacaacccataaatrtaggaaaaatggaagttattaatgtctcagctgatatcagaaatccgccaag

SEQ ID NO: 330745 - DNA, 623 bp, Homo sapiens
gcttgtgtccccaaacgtctgcacctgacagctaaattgcatgtggcctctgaagcatgtaaaatctaacaccgtcagctcaatactgaaataagtgacgagcaaagaccattttccttatgtagccacgatctctttaagcatgcagttgaattgctagagtaaaagaaatgctttacattcatttgaaaatgcaaacaggattattaattgatagtgatgatcactgctaaatctactaatggttttctcaactcccatctgatatgacaaatgaaagtgctgagaggctcagatgtttgattcttttgtggtaaaaaaaataattccaatatgtatctagttgattcctcatatgaaagagatgattctgtttctttaggcttagctgttaaattcccaagtgaaaaagctatgccacgtctatgatcaatacataattgtgtttcggccttcaagtgctcaaggtctgaggttgaagaattaatttgctggttgaggttaatagaatgtcaattaatttctyggtataaatgtcaatacattcagttaagccttgtgatttaaatataattaaagataaactttaagtcaatgttggctttttcgttttgggtatggtg

SEQ ID NO: 330746 - DNA, 548 bp, Homo sapiens
cttgtcttctaaaaggacatttcaggctgttgcttatggccaacagttttgacttcatctatttaagtgcatccctttctggtggaaaggtttagattttgagtcccatgcacaaaggagtctgcactagtgagcattattggggaatgagaagagctgtctgtgttgggaaggagctgttcattggctccgtgcgagaagattagacctccgagagatgcctccaaatccacacctgtggagtcagtcaggaggtgtttgagctgtatgtagaggctgggctcactactccgcttcctttttcattgccctccatacaatggatgatggcaagcaggtcagggaaggaagatgtttggtttaccygtgctaaacacaaaatagcaaccacaccagtggggcaaaactaaactacaggcaggtcccattcccagaatgcttccaggttcacaagtctgacatagccccgtgcctttctcctgatgattgcactttgtcctccaagcaaaacctgcccaatctcaactgcaatgctgccttctccatgg

SEQ ID NO: 330747 - DNA, 571 bp, Homo sapiens
ctggcaattgtgtgtggtgtgaggtagtgatctaacatcttttataaaaactaaatatttaaattttatgtgttgaaggtatttgttttgttttgctctttttgattttgatgcatgcatttaatttcagaatatggtttatttttcttgaatcaccagagaaayatccattttactcattttaacaccatctctttcttaagttaattctgtttctttggagtttttcagtttgttgatattgatttgtctcttttattgatgtggcaacattttctcaaaatatagaagattgcttttatttttacatcgtgtgaagaaggaggcatattactttttgaaagatggagtgtatttcttaagcagtaacaagtcatgctctttatgtgacatcatttttttattatagtaaagttttcaggtgatatttgagagagagagtctggatatgaggttgcatatagtgaatgaattatcacaaacactgctttgattatcaggccctagcaaccatggtcactctaagagtgtcctgtcagaactatgactttagagagcagtgttgagtgat

SEQ ID NO: 330748 - DNA, 530 bp, Homo sapiens
caaagtttatctaaactctgcaagacagttggctactttgtgtctaaaagtgtttaggaactttcatgttggcttgtttcaatattaattatttttactgagaggacaattaattccstaatctgttataacactttctgagtcacttaagcagaactctaaaaataagaagatggatttaatttcgattttgaaattaagtttcttaacttgatattcctggctttattaatttaaacctaaatatatagaaatgaagtttttgctatatttgttgtaaaaactagcacagctcatagaaatattaaaaagtaagaaattgaatagattgatagcattgttttgattgttactgttattttagtaaataatctgaaataaattaaacattttaaagcacaatttagaaaaaaatatgcagaatacagagaatggaatctagagacatttatggaatttaagaagctattttgttcaattcccaagtctagctcgaaatttgttccaggctcaatatgctgcagttttta

SEQ ID NO: 330749 - DNA, 636 bp, Homo sapiens
cagctcatagaaatattaaaaagtaagaaattgaatagattgatagcattgttttgattgttrctgttattttagtaaataatctgaaataaattaaacattttaaagcacaatttagaaaaaaatatgcagaatacagagaatggaatctagagacatttatggaatttaagaagctattttgttcaattcccaagtctagctcgaaatttgttccaggctcaatatgctgcagtttttaggaataaccttcttctatgcagaagaaatatgagaaactattgaccagaaacttataatgaaattaaggaggtgttaattctgctatggccacatattaaggttccagaaaatgggcttgctttttttcctttttattcaatgttgtttaagaaacaacaaagaaaggattaaaacatatttgctttacattaaataaaaattaactcatgcttttttggaaaggatacacacaaacaaatgtctggtcttactatcctagtcaaagaaatatatgtatttttaaataaaacattattgtctttattgtctttatatacaaaataccaaatcagagaaaactttcaaagttttcccttcacatatatctattagaaaatggttattaaaagaggg

SEQ ID NO: 330750 - DNA, 603 bp, Homo sapiens
actaaaagatatttaatgttaccacaaaaagttcaaaccttctcagcagtattttggtttaaagataattttccaaatggtttgcttcccctttctggctcctattggtccctaggaagcactttccctttcagtacccagagcattgcctttcacctatgtacccatttccaaatctctgctctccagaaagcatttcatgaaagtcaagtatactttttatgaacaagggcaaatgtgcacactccaagaggatctgatttcatcttctgccactaatgttttgaataaaatctttcttttacttaaataacctgaagtataataaaataagaaaaaagatttaaagaggcagaagaggttttcttggtaacaaattacaccattaaagacattctggctaggtgtggtggctcaacctgtaatcccagctacttgggaggctgagacrggaggattgctgagatcaggagttcaagaccagcctgggcaacatagggataccctgtctctaaaaataaataaataaacaaaagccactctgactacaaagtatatgagagttaacaggctaaatatcacatgggaatcctatacctgtta

SEQ ID NO: 330751 - DNA, 631 bp, Homo sapiens
atctttctaagcaaaagagagaactaaacaaaagtaggatatatatgaaagtaaatgtgttatagacttatttttataagaatggaaaatagaaaatagggaaatttttctgaaaatttaatgacggagatatttcctaagatgaacctttagtaacagaatttacttgagtgaacattccagcaaaataaggcatagacctatgaatgcaaaagataaagaatataaatagctgttaaaaacttttagctggatttaaataactgctgaatttgtggtttatatttatacctacaaaagctcacaaggtcagcaatgaggacaagggaaagcatatctaatacctaatatctcatattatggaatatctcatattatcttatataatagaaatagaagctaattataataattttcaatgtttattgaaatatgctatttttggtaytctctagaattaaggaattagaatgtctaagatctatccctatagaaacaaacaaaaaaatggaaaaagtcaaataatgaaagggagggggaaaaacagaaataaaaatgcagcctgatcaaatgaaaaatataaaacagatggcaaaatatgactaaacatacaaaatagcacgttaaatgt

SEQ ID NO: 330752 - DNA, 606 bp, Homo sapiens
ctggcctcttttagcgtttttaaaattaattatatatttgatttttataggtcataaagcatgtaaaaaaccctttgggcctcatagagccatgggaaactgatctcttgtatttttccactagagttttccttgatggttttcatgtctgtgtccataaaatatttctgtccawtcttttgctttaaacaagcattttcagattcatcatgtatctgcattggtactatttttcacagagattaaaaaaataaaaattgcagtgaaaaaattgtagctttaaagttattatttttattcttgtaaaaatttgtatagtttaaagcttcttgtcatcccttttctcttctaaatttatccatatttgtctttttttatttgatttgatttccatgtcactatcctgaatagtacactaaaattaatttccatattatccaatgattaacttggtcatatcttctatgtatttaggaacacatatcaaatataatcttcagcaaatgctacagttttatgtatgaaagggatacaacttctgctttttctaattaaaggtaaatatgcattaatttcaatgattgtttctattatcttacagcctga

SEQ ID NO: 330753 - DNA, 606 bp, Homo sapiens
ctggcctcttttagcgtttttaaaattaattatatatttgatttttataggtcataaagcatgtaaaaaaccctttgggcctcatagagccatgggaaactgatctcttgtatttttccactagagttttccttgatggttttcatgtctgtgtccataaaatatttctgtccaatcttttgctttaaacaagcattttcagattcatcatgtatctgcattggtactatttttcacagagattaaaaaaataaaaattgcagtgaaaaaattgtagctttaaagttattatttttattcttgtaaaaatytgtatagtttaaagcttcttgtcatcccttttctcttctaaatttatccatatttgtctttttttatttgatttgatttccatgtcactatcctgaatagtacactaaaattaatttccatattatccaatgattaacttggtcatatcttctatgtatttaggaacacatatcaaatataatcttcagcaaatgctacagttttatgtatgaaagggatacaacttctgctttttctaattaaaggtaaatatgcattaatttcaatgattgtttctattatcttacagcctga

SEQ ID NO: 330754 - DNA, 648 bp, Homo sapiens
ctgcattggtactatttttcacagagattaaaaaaataaaaattgcagtgaaaaaattgtagctttaaagttattatttttattcttgtaaaaatttgtatagtttaaagcttcttgtcatcccttttctcttctaaatttatccatatttgtctttttttatttgatttgatttccatgtcactatcctgaatagtacactaaaattaatttccatattatccaatgattaacttggtcatatcttctatgtatttaggaacacatatcaaatataatcttcagcaaatgctacagttttatgtatgaaagggatacaacttctgctttttctaattaaaggtaaatatgcattaatttcaatgattgtttctattatcttacagcctgagtgacttcatgtctgtgtttgggtatgtgtgtggctgtatgttgtttacaaagtatccatttctaaggagactttgagtaattcacacrttaaaacacattgtgagaaaaagcaaattgaggggttaacaaaaatggaatacatttattgcaaacagaaggagtaaatgtttctaaacacttgagataaattgatagctacaacatggcactaaaatgtattcttagttttcttgaaataaaagagaaaacatattg

SEQ ID NO: 330755 - DNA, 543 bp, Homo sapiens
atggactcctataagatgtaacttttttttccagcttctttcacttagcaaacacctttctagatgcagccatatatttgacactcatccgttgttcatttgattttaattctgacaggtattatattgtttaggtgtgcgagaatgtttattcactcacccattaaaacatattgggatgttttcaaatttcagttattaatgagtaatgttgatatgtatatttgtaagtttttgagataattttttttctctgatgaaatacttagagcaggactgttaattcctatggtaagtgtatgcctgactttaaataaaacaacacacatagagtggaagaaagagaaattagaccctgatgacataacttgagccctgaattttctagagattgaaggatagtttactcttgggcttttgagatggattttctgtcacttgcagcccaaaatttccacatacatkaccaaattcctcttggtgcacagttcctatggtgcccaatttagtgtttttcaaacttgcatgatgattaaaatcagc

SEQ ID NO: 330756 - DNA, 572 bp, Homo sapiens
ttggcctttggccaacacaggtctgctactgataaattttgtttttttttaatatgaaaacttctttatcttatcttgaattatgaaagacagcttttcaatcacagggctgaaattgttaaaaatcaaatgactaagacgatctgaattacaacacaagaggaacttccagtctcataaagtgtttcttgttaaagtgaggtcattgattgggagtgaatgggatcctataaattggggtaaagacacaagagaagaccccagtgaagctgtggacattgaacacctaagtataatgagtcttctttgccagtagaagaggtatccctaccccaactgaaagcgacctcctcatttaccggagctattggcctctccartcccaacagaagtggcttccatatccccagtgagtgatagctccttcccacccactgcagtatcagcctttccatctcagcgtgaagagattaaccctacattgacagaggaaactatcatggcctcctggaggcacttaccatgcaagacaggtgattctcttcaggactcacacccacccaccacccctc

SEQ ID NO: 330757 - DNA, 572 bp, Homo sapiens
ttggcctttggccaacacaggtctgctactgataaattttgtttttttttaatatgaaaacttctttatcttatcttgaattatgaaagacagcttttcaatcacagggctgaaattgttaaaaatcaaatgactaagacgatctgaattacaacacaagaggaacttccagtctcataaagtgtttcttgttaaagtgaggtcattgattgggagtgaatgggatcctataaattggggtaaagacacaagagaagaccccagtgaagctgtggacattgaacacctaagtataatgagtcttctttgccagtagaagaggtatccctaccccaactgaaagcgacctcctcatttaccggagctattggcctctccaatcccaacagaagtggcttccatatccccagtgagtgatagctccttcccacccactgcagtatcagcctttccatctcagcgtgaagagattaaccctacattgacagaggaaactatyatggcctcctggaggcacttaccatgcaagacaggtgattctcttcaggactcacacccacccaccacccctc

SEQ ID NO: 330758 - DNA, 586 bp, Homo sapiens
caatagctgggtaacaatataatctgtacagtaaacacccacaatgtacagtttactcacgtaagtaatctgcacatgtacttcctaaacctaaaataaaagttgtaaaggaagaaaaccaccaataatcttgaaaatacatatgtgatcataaagataaaaattagatactggcattgctcatgtaaaaaatgtcttgaagtatcatatttattatatcatatttcttgaagtatcattatcatattaaatgctgaaaatacatgtactgtatgcatttacgtaaatattattatygcataaattcattacgcatatatgttgtctgttttcctcataataaatttttcataggaaatgtttctgaatatatttaaatttaaaggggcaatcttgtattatatttattatgaaaataagcaaataaatatacctttggaatagatttggaagaaaagtaaaagtaggccattgtataatagttattaacattttatagaaagaagaaaagaaaaacattaagtctttaaataatttccaaatttggctctccctcagaattaacatggatgccttttagaagaaa

SEQ ID NO: 330759 - DNA, 509 bp, Homo sapiens
tttaataaaatatatgacatatatttttaggccttcaaaaaagtatattcaacactgcaagtcctaaaagaagaaaagcttatgattttcctactgatttcagtagttctctacttggggataatttcccaattatgactcattgagttgaaatccaacagatcatggcatcccctctaagatgccaaagaacaaaagaacaacaacaacaacaacaacaaaaaaaaaaccagagaacagaaacctgaagagataacaaagaaaggcctgggatggagtttcatattggagtccatatgggactagctgggagtccatgtctaagagctgagctgcttgtcatcaggttgtgattacctgagacttaccagagagctgtttcgacaaggttcagaacagaacacagagacttgaaattaaacagcactgatgcaatttggagatttggcctmaattaagtcgagaaatgttattaatgccttattaacgcttgaacatccagctaaggt

SEQ ID NO: 330760 - DNA, 633 bp, Homo sapiens
ctagcactcaaaaaaaatgtgagtgcttgggcacaatgtcattttattatccattctaatagtgttttaatttgtaggtttaaaagatacatatttattataatcattcatatgatttgtttggttaataattttattatttgtttctgtttgttttcttttattcctattcctttctccctctttctttccttttttttttttttttttttaatttgaggcagggtctcactctgttgcccaggctagagtgcagtggtgcaatcatggttcactcaccgcagtrttgacctccccggctccagcaatcctcttacctcagccccctgggtagctgggaccacaggtgcacatcaccttgcccagataaatttttaatttttttgttgagataaggtctcaccatgtctctcaggctggccccaaactcctgggctcaagcaatcctcccgcctctgcttcccaaagtgctgggattgagctaccatgtctggacttccttctttttatgttatttgaacaatgtttagaattacagtttaattttctattttgttttttactgtatctctttatataggttttaaaatttgtatcattatggattaaactgcaaataattagtttttcata

SEQ ID NO: 330761 - DNA, 459 bp, Homo sapiens
gttaattaggccaagttcgctgataggttgttcaggtaaaatatgacttattttttgtctgcttgctgtatcatctactgagagaagtgttggactctccctgcttacttgcagggattttttttcctgataattctattatttctaccaggtgttatttcacagatatgtattctcttttgtaacacttactacattctgggttgttttgtcttcttagttagtatttctagttttgaagttcrcttttttaaattaatatagctattccagctttcttttgattagagtttgcatggtatatctttatcgtacatgcctttatatttaaagtggttttctttacaaataatttagttgggtcacactttcttttcagtctttatcttataaatggtatctatagaccacttacttttaatgtgattattgatatagtttggctaaaatctaccattt

SEQ ID NO: 330762 - DNA, 527 bp, Homo sapiens
atcaactacatattctataagaaattgacattaaataattgactaaggaaacataagaaatttataggaataattaccagttacaaattaataacataaaaagctcaccaaacaccaactttacatattcatttgyccatctacatataggataaaggcatttatgtcctgtaaacataaagcaacattatgaaataatgcattatttagggcatactttgtaaaaagaacgactggtctcaggaaaaagaagttttaacatttgaagttgcctaaacagtgttattacatgttctttttcttttcatatttacctggcaattgctttaaaatattttgatatgttcactttattaacatatttcaactggaagagtttttaattattaaaatttatttccctgactatattttttcttatttcacactgttcttttaaatcttacaaaatactccaaatatctttttaaaaaatatataaatatcagaatctacatttagagtctcttttttctttgtaagcatac

SEQ ID NO: 330763 - DNA, 599 bp, Homo sapiens
aagccttcatattttgaagtttcattctaccaagtgaaattgaattgcaaatatgaaattttgttgtgtatgttatttttaagaaaaattatcccttaaactgaccttctacttgagttcattttgttcaatctaattagtctcaatgagattttgccatttattataagctagaatgagtcttttccagagggtgatattatatagtttatgacaatggaactaactatggaactaattaaccatacccactgtcctttcttagaattcctatgatagagtgcttatctgtttttgcagtaccactttatctcactatctaaaaactaagttgtctcttagttgtccagctatctttcacagcatctctgcaaagattattcatcaaatactttaaaatagaagtttctattttaatttgattaggtttttcctgaatgactaaggatgatttcaatatccatgaatgtaaaactggttgtaatgccccttgattctgtctatcttggaagacaaaatgtccagcctgtgacttgtatagaataacttttctgttgttataytctgaggttaccaagtcacctgaatatgagtttttt

SEQ ID NO: 330764 - DNA, 603 bp, Homo sapiens
gcataataatcacatcatggtaaatggagtatccatcctctcaagcatttattatttttgttagaaataatccaattatgctctgatttttggttcttatgatgatgcttttttgtatgttgtattagtccattttcacactgctgatgaagacatacccaagactgggtaatttacgaaagaaagaggtttaatcggacttacagttccacatggctggggaggcctcacaatcatggcggaaggcaagtaagtcacattatacatggatggtggcaggcaaataaaagagagcttgtgtagagaaactcccattcttaataccatcagatctcatgagacctgttcactatcatgagaacagcacgagaagaacctgacctcatgattcgatcatctcccatggggtccctcccataacacatgagaattaggggagctataagatgagatttgggtgtggacacagcaccaaactgtaagattcttcccctgtcaaatctcatatcttcacatttcaaatccagtcatgtcttcccarcagtcccccaaagtctaaactcatttcagcattaactcaaaagtccacagtccaaagtctca

SEQ ID NO: 330765 - DNA, 603 bp, Homo sapiens
cagcactggtgtgatctcggckcactgcaacctctacctcctgggttcaagcgattctcctgcctcagcctcccgagtagctgggactacagttgcatgccaccacgcccggctaatctttggtatttttagtagagatggggtttcaccatgttagccaggatggtctcgatctcctgacctcatgatccacccaccttggcctcccaaagtgctgggattacaggcgtgagccatcacacccggcgagaagctttttcaaagtcacacaaacacaggccattatcacactcgatacacataatactatggctacggcaatggtttgcagatatcgctttgagtagcactgctttagtgacgtagtgcactgtttaatttttgatggggttatgagactgtgaattaacttagcttgctcttgctagtcttttttcttgacaacaggatcctattcattgtctgttatcttttgttaaacagcataactagattggttttggttctgcctgacttagttcttttcttcattcatgtaagtaagacttctaactcttactatgaatttcattcctgtttttagatctctgtgtcttgcctaga

SEQ ID NO: 330766 - DNA, 603 bp, Homo sapiens
cagcactggtgtgatctcggctcactgcaacctctacctcctgggttcaagcgattctcctgcctcagcctcccgagtagctgggactacagttgcatgccaccacgcccggctaatctttggtatttttagtagagrtggggtttcaccatgttagccaggatggtctcgatctcctgacctcatgatccacccaccttggcctcccaaagtgctgggattacaggcgtgagccatcacacccggcgagaagctttttcaaagtcacacaaacacaggccattatcacactcgatacacataatactatggctacggcaatggtttgcagatatcgctttgagtagcactgctttagtgacgtagtgcactgtttaatttttgatggggttatgagactgtgaattaacttagcttgctcttgctagtcttttttcttgacaacaggatcctattcattgtctgttatcttttgttaaacagcataactagattggttttggttctgcctgacttagttcttttcttcattcatgtaagtaagacttctaactcttactatgaatttcattcctgtttttagatctctgtgtcttgcctaga

SEQ ID NO: 330767 - DNA, 534 bp, Homo sapiens
actgtgcgatttataaaggaaagaagtttaattgaytcacagttcagcatggctgaggaggcctcaggaaacttacaataatggtggaaggtgaaggggaagcaaggcaccttcttcacaaggtggcaggaaggagaagtgccgagcgaaagggaaagagtcccttttaaaaccatcagatctcgtgagaactcactatcatgagaatagcagcgggggagaccacccccatggttcaattacttccacctgctctctcccttgacacatggagattatggggattatggtgattacaattcaaaatgagatttgggttgggacacaaaacctaaccatatcagatatgtctggcaagataaatatacctatgaataaatatatttgatcttaaatataaaatgttttatctggtaaaaatatcttttacgaatgaaggggaaataaaaatattttcagattgaggaaactaagataatttgcctgtagcatatctaccattaaagagtggttaaacaaatttcatcaaacaca
